United States Patent Application Publication US 2024/0066150 A1 - sequence listing, part 6

SEQ ID NO: 57397 - DNA, 20 bp, synthetic construct
  misc_feature 1..20: note = Description of Artificial Sequence: Synthetic oligonucleotide
  misc_feature 1..20: note = Target: SCN10A; (+) strand; PAM type: YTN; PAM sequence: CTG
  source 1..20: mol_type = other DNA
tatgtctctatatcccgggt

SEQ ID NO: 57398 - DNA, 20 bp, synthetic construct
  misc_feature 1..20: note = Description of Artificial Sequence: Synthetic oligonucleotide
  misc_feature 1..20: note = Target: SCN10A; (+) strand; PAM type: YTN; PAM sequence: CTC
  source 1..20: mol_type = other DNA
tatatcccgggtttttttaa

SEQ ID NO: 57399 - DNA, 20 bp, synthetic construct
  misc_feature 1..20: note = Description of Artificial Sequence: Synthetic oligonucleotide
  misc_feature 1..20: note = Target: SCN10A; (+) strand; PAM type: YTN; PAM sequence: CTA
  source 1..20: mol_type = other DNA
tatcccgggtttttttaatt

SEQ ID NO: 57400 - DNA, 20 bp, synthetic construct
  misc_feature 1..20: note = Description of Artificial Sequence: Synthetic oligonucleotide
  misc_feature 1..20: note = Target: SCN10A; (+) strand; PAM type: YTN; PAM sequence: TTT
  source 1..20: mol_type = other DNA
ttttaattattattatactt

SEQ ID NO: 57401 - DNA, 20 bp, synthetic construct
  misc_feature 1..20: note = Description of Artificial Sequence: Synthetic oligonucleotide
  misc_feature 1..20: note = Target: SCN10A; (+) strand; PAM type: YTN; PAM sequence: TTT
  source 1..20: mol_type = other DNA
tttaattattattatacttt

SEQ ID NO: 57402 - DNA, 20 bp, synthetic construct
  misc_feature 1..20: note = Description of Artificial Sequence: Synthetic oligonucleotide
  misc_feature 1..20: note = Target: SCN10A; (+) strand; PAM type: YTN; PAM sequence: TTT
  source 1..20: mol_type = other DNA
ttaattattattatacttta

SEQ ID NO: 57403 - DNA, 20 bp, synthetic construct
  misc_feature 1..20: note = Description of Artificial Sequence: Synthetic oligonucleotide
  misc_feature 1..20: note = Target: SCN10A; (+) strand; PAM type: YTN; PAM sequence: TTT
  source 1..20: mol_type = other DNA
taattattattatactttaa

SEQ ID NO: 57404 - DNA, 20 bp, synthetic construct
  misc_feature 1..20: note = Description of Artificial Sequence: Synthetic oligonucleotide
  misc_feature 1..20: note = Target: SCN10A; (+) strand; PAM type: YTN; PAM sequence: TTT
  source 1..20: mol_type = other DNA
aattattattatactttaag

SEQ ID NO: 57405 - DNA, 20 bp, synthetic construct
  misc_feature 1..20: note = Description of Artificial Sequence: Synthetic oligonucleotide
  misc_feature 1..20: note = Target: SCN10A; (+) strand; PAM type: YTN; PAM sequence: TTA
  source 1..20: mol_type = other DNA
attattattatactttaagt

SEQ ID NO: 57406 - DNA, 20 bp, synthetic construct
  misc_feature 1..20: note = Description of Artificial Sequence: Synthetic oligonucleotide
  misc_feature 1..20: note = Target: SCN10A; (+) strand; PAM type: YTN; PAM sequence: TTA
  source 1..20: mol_type = other DNA
ttattatactttaagtttta

SEQ ID NO: 57407 - DNA, 20 bp, synthetic construct
  misc_feature 1..20: note = Description of Artificial Sequence: Synthetic oligonucleotide
  misc_feature 1..20: note = Target: SCN10A; (+) strand; PAM type: YTN; PAM sequence: TTA
  source 1..20: mol_type = other DNA
ttatactttaagttttagga

SEQ ID NO: 57408 - DNA, 20 bp, synthetic construct
  misc_feature 1..20: note = Description of Artificial Sequence: Synthetic oligonucleotide
  misc_feature 1..20: note = Target: SCN10A; (+) strand; PAM type: YTN; PAM sequence: TTA
  source 1..20: mol_type = other DNA
tactttaagttttaggatac

SEQ ID NO: 57409 - DNA, 20 bp, synthetic construct
  misc_feature 1..20: note = Description of Artificial Sequence: Synthetic oligonucleotide
  misc_feature 1..20: note = Target: SCN10A; (+) strand; PAM type: YTN; PAM sequence: CTT
  source 1..20: mol_type = other DNA
taagttttaggatacatgag

SEQ ID NO: 57410 - DNA, 20 bp, synthetic construct
  misc_feature 1..20: note = Description of Artificial Sequence: Synthetic oligonucleotide
  misc_feature 1..20: note = Target: SCN10A; (+) strand; PAM type: YTN; PAM sequence: TTT
  source 1..20: mol_type = other DNA
aagttttaggatacatgagc

SEQ ID NO: 57411 - DNA, 20 bp, synthetic construct
  misc_feature 1..20: note = Description of Artificial Sequence: Synthetic oligonucleotide
  misc_feature 1..20: note = Target: SCN10A; (+) strand; PAM type: YTN; PAM sequence: TTA
  source 1..20: mol_type = other DNA
agttttaggatacatgagca

SEQ ID NO: 57412 - DNA, 20 bp, synthetic construct
  misc_feature 1..20: note = Description of Artificial Sequence: Synthetic oligonucleotide
  misc_feature 1..20: note = Target: SCN10A; (+) strand; PAM type: YTN; PAM sequence: TTT
  source 1..20: mol_type = other DNA
taggatacatgagcacaacg

SEQ ID NO: 57413 - DNA, 20 bp, synthetic construct
  misc_feature 1..20: note = Description of Artificial Sequence: Synthetic oligonucleotide
  misc_feature 1..20: note = Target: SCN10A; (+) strand; PAM type: YTN; PAM sequence: TTT
  source 1..20: mol_type = other DNA
aggatacatgagcacaacgt

SEQ ID NO: 57414 - DNA, 20 bp, synthetic construct
  misc_feature 1..20: note = Description of Artificial Sequence: Synthetic oligonucleotide
  misc_feature 1..20: note = Target: SCN10A; (+) strand; PAM type: YTN; PAM sequence: TTA
  source 1..20: mol_type = other DNA
ggatacatgagcacaacgtg

SEQ ID NO: 57415 - DNA, 20 bp, synthetic construct
  misc_feature 1..20: note = Description of Artificial Sequence: Synthetic oligonucleotide
  misc_feature 1..20: note = Target: SCN10A; (+) strand; PAM type: YTN; PAM sequence: TTT
  source 1..20: mol_type = other DNA
gttacatatgtatacatgtg

SEQ ID NO: 57416 - DNA, 20 bp, synthetic construct
  misc_feature 1..20: note = Description of Artificial Sequence: Synthetic oligonucleotide
  misc_feature 1..20: note = Target: SCN10A; (+) strand; PAM type: YTN; PAM sequence: TTG
  source 1..20: mol_type = other DNA
ttacatatgtatacatgtgc

SEQ ID NO: 57417 - DNA, 20 bp, synthetic construct
  misc_feature 1..20: note = Description of Artificial Sequence: Synthetic oligonucleotide
  misc_feature 1..20: note = Target: SCN10A; (+) strand; PAM type: YTN; PAM sequence: TTA
  source 1..20: mol_type = other DNA
catatgtatacatgtgccat

SEQ ID NO: 57418 - DNA, 20 bp, synthetic construct
  misc_feature 1..20: note = Description of Artificial Sequence: Synthetic oligonucleotide
  misc_feature 1..20: note = Target: SCN10A; (+) strand; PAM type: YTN; PAM sequence: TTG
  source 1..20: mol_type = other DNA
gtgtgctgcacccattaact

SEQ ID NO: 57419 - DNA, 20 bp, synthetic construct
  misc_feature 1..20: note = Description of Artificial Sequence: Synthetic oligonucleotide
  misc_feature 1..20: note = Target: SCN10A; (+) strand; PAM type: YTN; PAM sequence: CTG
  source 1..20: mol_type = other DNA
cacccattaacttgtcattt

SEQ ID NO: 57420 - DNA, 20 bp, synthetic construct
  misc_feature 1..20: note = Description of Artificial Sequence: Synthetic oligonucleotide
  misc_feature 1..20: note = Target: SCN10A; (+) strand; PAM type: YTN; PAM sequence: TTA
  source 1..20: mol_type = other DNA
acttgtcatttacattaggt

SEQ ID NO: 57421 - DNA, 20 bp, synthetic construct
  misc_feature 1..20: note = Description of Artificial Sequence: Synthetic oligonucleotide
  misc_feature 1..20: note = Target: SCN10A; (+) strand; PAM type: YTN; PAM sequence: CTT
  source 1..20: mol_type = other DNA
gtcatttacattaggtatat

SEQ ID NO: 57422 - DNA, 20 bp, synthetic construct
  misc_feature 1..20: note = Description of Artificial Sequence: Synthetic oligonucleotide
  misc_feature 1..20: note = Target: SCN10A; (+) strand; PAM type: YTN; PAM sequence: TTG
  source 1..20: mol_type = other DNA
tcatttacattaggtatatc

SEQ ID NO: 57423 - DNA, 20 bp, synthetic construct
  misc_feature 1..20: note = Description of Artificial Sequence: Synthetic oligonucleotide
  misc_feature 1..20: note = Target: SCN10A; (+) strand; PAM type: YTN; PAM sequence: TTT
  source 1..20: mol_type = other DNA
acattaggtatatctcctaa

SEQ ID NO: 57424 - DNA, 20 bp, synthetic construct
  misc_feature 1..20: note = Description of Artificial Sequence: Synthetic oligonucleotide
  misc_feature 1..20: note = Target: SCN10A; (+) strand; PAM type: YTN; PAM sequence: TTA
  source 1..20: mol_type = other DNA
cattaggtatatctcctaat

SEQ ID NO: 57425 - DNA, 20 bp, synthetic construct
  misc_feature 1..20: note = Description of Artificial Sequence: Synthetic oligonucleotide
  misc_feature 1..20: note = Target: SCN10A; (+) strand; PAM type: YTN; PAM sequence: TTA
  source 1..20: mol_type = other DNA
ggtatatctcctaatgctat

SEQ ID NO: 57426 - DNA, 20 bp, synthetic construct
  misc_feature 1..20: note = Description of Artificial Sequence: Synthetic oligonucleotide
  misc_feature 1..20: note = Target: SCN10A; (+) strand; PAM type: YTN; PAM sequence: CTC
  source 1..20: mol_type = other DNA
ctaatgctatccctcccccc

SEQ ID NO: 57427 - DNA, 20 bp, synthetic construct
  misc_feature 1..20: note = Description of Artificial Sequence: Synthetic oligonucleotide
  misc_feature 1..20: note = Target: SCN10A; (+) strand; PAM type: YTN; PAM sequence: CTA
  source 1..20: mol_type = other DNA
atgctatccctcccccctcc

SEQ ID NO: 57428 - DNA, 20 bp, synthetic construct
  misc_feature 1..20: note = Description of Artificial Sequence: Synthetic oligonucleotide
  misc_feature 1..20: note = Target: SCN10A; (+) strand; PAM type: YTN; PAM sequence: CTA
  source 1..20: mol_type = other DNA
tccctcccccctccctccac

SEQ ID NO: 57429 - DNA, 20 bp, synthetic construct
  misc_feature 1..20: note = Description of Artificial Sequence: Synthetic oligonucleotide
  misc_feature 1..20: note = Target: SCN10A; (+) strand; PAM type: YTN; PAM sequence: CTC
  source 1..20: mol_type = other DNA
ccccctccctccaccccaca

SEQ ID NO: 57430 - DNA, 20 bp, synthetic construct
  misc_feature 1..20: note = Description of Artificial Sequence: Synthetic oligonucleotide
  misc_feature 1..20: note = Target: SCN10A; (+) strand; PAM type: YTN; PAM sequence: CTC
  source 1..20: mol_type = other DNA
cctccaccccacaactgtcc

SEQ ID NO: 57431 - DNA, 20 bp, synthetic construct
  misc_feature 1..20: note = Description of Artificial Sequence: Synthetic oligonucleotide
  misc_feature 1..20: note = Target: SCN10A; (+) strand; PAM type: YTN; PAM sequence: CTC
  source 1..20: mol_type = other DNA
caccccacaactgtccccgg

SEQ ID NO: 57432 - DNA, 20 bp, synthetic construct
  misc_feature 1..20: note = Description of Artificial Sequence: Synthetic oligonucleotide
  misc_feature 1..20: note = Target: SCN10A; (+) strand; PAM type: YTN; PAM sequence: CTG
  source 1..20: mol_type = other DNA
tccccggtgtgtgatgttcc

SEQ ID NO: 57433 - DNA, 20 bp, synthetic construct
  misc_feature 1..20: note = Description of Artificial Sequence: Synthetic oligonucleotide
  misc_feature 1..20: note = Target: SCN10A; (+) strand; PAM type: YTN; PAM sequence: TTC
  source 1..20: mol_type = other DNA
cccttcctgtgtccatgtgt

SEQ ID NO: 57434 - DNA, 20 bp, synthetic construct
  misc_feature 1..20: note = Description of Artificial Sequence: Synthetic oligonucleotide
  misc_feature 1..20: note = Target: SCN10A; (+) strand; PAM type: YTN; PAM sequence: CTT
  source 1..20: mol_type = other DNA
cctgtgtccatgtgttctta

SEQ ID NO: 57435 - DNA, 20 bp, synthetic construct
  misc_feature 1..20: note = Description of Artificial Sequence: Synthetic oligonucleotide
  misc_feature 1..20: note = Target: SCN10A; (+) strand; PAM type: YTN; PAM sequence: TTC
  source 1..20: mol_type = other DNA
ctgtgtccatgtgttcttat

SEQ ID NO: 57436 - DNA, 20 bp, synthetic construct
  misc_feature 1..20: note = Description of Artificial Sequence: Synthetic oligonucleotide
  misc_feature 1..20: note = Target: SCN10A; (+) strand; PAM type: YTN; PAM sequence: CTG
  source 1..20: mol_type = other DNA
tgtccatgtgttcttattgt

SEQ ID NO: 57437 - DNA, 20 bp, synthetic construct
  misc_feature 1..20: note = Description of Artificial Sequence: Synthetic oligonucleotide
  misc_feature 1..20: note = Target: SCN10A; (+) strand; PAM type: YTN; PAM sequence: TTC
  source 1..20: mol_type = other DNA
ttattgttcaattcccacct

SEQ ID NO: 57438 - DNA, 20 bp, synthetic construct
  misc_feature 1..20: note = Description of Artificial Sequence: Synthetic oligonucleotide
  misc_feature 1..20: note = Target: SCN10A; (+) strand; PAM type: YTN; PAM sequence: CTT
  source 1..20: mol_type = other DNA
attgttcaattcccacctat

SEQ ID NO: 57439 - DNA, 20 bp, synthetic construct
  misc_feature 1..20: note = Description of Artificial Sequence: Synthetic oligonucleotide
  misc_feature 1..20: note = Target: SCN10A; (+) strand; PAM type: YTN; PAM sequence: TTA
  source 1..20: mol_type = other DNA
ttgttcaattcccacctatg

SEQ ID NO: 57440 - DNA, 20 bp, synthetic construct
  misc_feature 1..20: note = Description of Artificial Sequence: Synthetic oligonucleotide
  misc_feature 1..20: note = Target: SCN10A; (+) strand; PAM type: YTN; PAM sequence: TTG
  source 1..20: mol_type = other DNA
ttcaattcccacctatgagt

SEQ ID NO: 57441 - DNA, 20 bp, synthetic construct
  misc_feature 1..20: note = Description of Artificial Sequence: Synthetic oligonucleotide
  misc_feature 1..20: note = Target: SCN10A; (+) strand; PAM type: YTN; PAM sequence: TTC
  source 1..20: mol_type = other DNA
aattcccacctatgagtgag

SEQ ID NO: 57442 - DNA, 20 bp, synthetic construct
  misc_feature 1..20: note = Description of Artificial Sequence: Synthetic oligonucleotide
  misc_feature 1..20: note = Target: SCN10A; (+) strand; PAM type: YTN; PAM sequence: TTC
  source 1..20: mol_type = other DNA
ccacctatgagtgagaacat

SEQ ID NO: 57443 - DNA, 20 bp, synthetic construct
  misc_feature 1..20: note = Description of Artificial Sequence: Synthetic oligonucleotide
  misc_feature 1..20: note = Target: SCN10A; (+) strand; PAM type: YTN; PAM sequence: CTA
  source 1..20: mol_type = other DNA
tgagtgagaacatgcggtgt

SEQ ID NO: 57444 - DNA, 20 bp, synthetic construct
  misc_feature 1..20: note = Description of Artificial Sequence: Synthetic oligonucleotide
  misc_feature 1..20: note = Target: SCN10A; (+) strand; PAM type: YTN; PAM sequence: TTT
  source 1..20: mol_type = other DNA
ggttttttttgtccttgcga

SEQ ID NO: 57445 - DNA, 20 bp, synthetic construct
  misc_feature 1..20: note = Description of Artificial Sequence: Synthetic oligonucleotide
  misc_feature 1..20: note = Target: SCN10A; (+) strand; PAM type: YTN; PAM sequence: TTG
  source 1..20: mol_type = other DNA
gttttttttgtccttgcgat

SEQ ID NO: 57446 - DNA, 20 bp, synthetic construct
  misc_feature 1..20: note = Description of Artificial Sequence: Synthetic oligonucleotide
  misc_feature 1..20: note = Target: SCN10A; (+) strand; PAM type: YTN; PAM sequence: TTT
  source 1..20: mol_type = other DNA
tttttgtccttgcgatagtt

SEQ ID NO: 57447 - DNA, 20 bp, synthetic construct
  misc_feature 1..20: note = Description of Artificial Sequence: Synthetic oligonucleotide
  misc_feature 1..20: note = Target: SCN10A; (+) strand; PAM type: YTN; PAM sequence: TTT
  source 1..20: mol_type = other DNA
ttttgtccttgcgatagttt

SEQ ID NO: 57448 - DNA, 20 bp, synthetic construct
  misc_feature 1..20: note = Description of Artificial Sequence: Synthetic oligonucleotide
  misc_feature 1..20: note = Target: SCN10A; (+) strand; PAM type: YTN; PAM sequence: TTT
  source 1..20: mol_type = other DNA
tttgtccttgcgatagtttg

SEQ ID NO: 57449 - DNA, 20 bp, synthetic construct
  misc_feature 1..20: note = Description of Artificial Sequence: Synthetic oligonucleotide
  misc_feature 1..20: note = Target: SCN10A; (+) strand; PAM type: YTN; PAM sequence: TTT
  source 1..20: mol_type = other DNA
ttgtccttgcgatagtttgc

SEQ ID NO: 57450 - DNA, 20 bp, synthetic construct
  misc_feature 1..20: note = Description of Artificial Sequence: Synthetic oligonucleotide
  misc_feature 1..20: note = Target: SCN10A; (+) strand; PAM type: YTN; PAM sequence: TTT
  source 1..20: mol_type = other DNA
tgtccttgcgatagtttgct

SEQ ID NO: 57451 - DNA, 20 bp, synthetic construct
  misc_feature 1..20: note = Description of Artificial Sequence: Synthetic oligonucleotide
  misc_feature 1..20: note = Target: SCN10A; (+) strand; PAM type: YTN; PAM sequence: TTT
  source 1..20: mol_type = other DNA
gtccttgcgatagtttgctg

SEQ ID NO: 57452 - DNA, 20 bp, synthetic construct
  misc_feature 1..20: note = Description of Artificial Sequence: Synthetic oligonucleotide
  misc_feature 1..20: note = Target: SCN10A; (+) strand; PAM type: YTN; PAM sequence: TTG
  source 1..20: mol_type = other DNA
tccttgcgatagtttgctga

SEQ ID NO: 57453 - DNA, 20 bp, synthetic construct
  misc_feature 1..20: note = Description of Artificial Sequence: Synthetic oligonucleotide
  misc_feature 1..20: note = Target: SCN10A; (+) strand; PAM type: YTN; PAM sequence: CTT
  source 1..20: mol_type = other DNA
gcgatagtttgctgagaatg

SEQ ID NO: 57454 - DNA, 20 bp, synthetic construct
  misc_feature 1..20: note = Description of Artificial Sequence: Synthetic oligonucleotide
  misc_feature 1..20: note = Target: SCN10A; (+) strand; PAM type: YTN; PAM sequence: TTG
  source 1..20: mol_type = other DNA
cgatagtttgctgagaatga

SEQ ID NO: 57455 - DNA, 20 bp, synthetic construct
  misc_feature 1..20: note = Description of Artificial Sequence: Synthetic oligonucleotide
  misc_feature 1..20: note = Target: SCN10A; (+) strand; PAM type: YTN; PAM sequence: TTT
  source 1..20: mol_type = other DNA
gctgagaatgatggtttcca

SEQ ID NO: 57456 - DNA, 20 bp, synthetic construct
  misc_feature 1..20: note = Description of Artificial Sequence: Synthetic oligonucleotide
  misc_feature 1..20: note = Target: SCN10A; (+) strand; PAM type: YTN; PAM sequence: TTG
  source 1..20: mol_type = other DNA
ctgagaatgatggtttccag

SEQ ID NO: 57457 - DNA, 20 bp, synthetic construct
  misc_feature 1..20: note = Description of Artificial Sequence: Synthetic oligonucleotide
  misc_feature 1..20: note = Target: SCN10A; (+) strand; PAM type: YTN; PAM sequence: CTG
  source 1..20: mol_type = other DNA
agaatgatggtttccagctt

SEQ ID NO: 57458 - DNA, 20 bp, synthetic construct
  misc_feature 1..20: note = Description of Artificial Sequence: Synthetic oligonucleotide
  misc_feature 1..20: note = Target: SCN10A; (+) strand; PAM type: YTN; PAM sequence: TTT
  source 1..20: mol_type = other DNA
ccagcttcatccatgtccct

SEQ ID NO: 57459 - DNA, 20 bp, synthetic construct
  misc_feature 1..20: note = Description of Artificial Sequence: Synthetic oligonucleotide
  misc_feature 1..20: note = Target: SCN10A; (+) strand; PAM type: YTN; PAM sequence: TTC
  source 1..20: mol_type = other DNA
cagcttcatccatgtccctg

SEQ ID NO: 57460 - DNA, 20 bp, synthetic construct
  misc_feature 1..20: note = Description of Artificial Sequence: Synthetic oligonucleotide
  misc_feature 1..20: note = Target: SCN10A; (+) strand; PAM type: YTN; PAM sequence: CTT
  source 1..20: mol_type = other DNA
catccatgtccctgcaaagg

SEQ ID NO: 57461 - DNA, 20 bp, synthetic construct
  misc_feature 1..20: note = Description of Artificial Sequence: Synthetic oligonucleotide
  misc_feature 1..20: note = Target: SCN10A; (+) strand; PAM type: YTN; PAM sequence: TTC
  source 1..20: mol_type = other DNA
atccatgtccctgcaaagga

SEQ ID NO: 57462 - DNA, 20 bp, synthetic construct
  misc_feature 1..20: note = Description of Artificial Sequence: Synthetic oligonucleotide
  misc_feature 1..20: note = Target: SCN10A; (+) strand; PAM type: YTN; PAM sequence: CTG
  source 1..20: mol_type = other DNA
caaaggacatgaactcatca

SEQ ID NO: 57463 - DNA, 20 bp, synthetic construct
  misc_feature 1..20: note = Description of Artificial Sequence: Synthetic oligonucleotide
  misc_feature 1..20: note = Target: SCN10A; (+) strand; PAM type: YTN; PAM sequence: CTC
  source 1..20: mol_type = other DNA
atcattttttatggctgcat

SEQ ID NO: 57464 - DNA, 20 bp, synthetic construct
  misc_feature 1..20: note = Description of Artificial Sequence: Synthetic oligonucleotide
  misc_feature 1..20: note = Target: SCN10A; (+) strand; PAM type: YTN; PAM sequence: TTT
  source 1..20: mol_type = other DNA
tttatggctgcatagtattc

SEQ ID NO: 57465 - DNA, 20 bp, synthetic construct
  misc_feature 1..20: note = Description of Artificial Sequence: Synthetic oligonucleotide
  misc_feature 1..20: note = Target: SCN10A; (+) strand; PAM type: YTN; PAM sequence: TTT
  source 1..20: mol_type = other DNA
ttatggctgcatagtattcc

SEQ ID NO: 57466 - DNA, 20 bp, synthetic construct
  misc_feature 1..20: note = Description of Artificial Sequence: Synthetic oligonucleotide
  misc_feature 1..20: note = Target: SCN10A; (+) strand; PAM type: YTN; PAM sequence: TTT
  source 1..20: mol_type = other DNA
tatggctgcatagtattcca

SEQ ID NO: 57467 - DNA, 20 bp, synthetic construct
  misc_feature 1..20: note = Description of Artificial Sequence: Synthetic oligonucleotide
  misc_feature 1..20: note = Target: SCN10A; (+) strand; PAM type: YTN; PAM sequence: TTT
  source 1..20: mol_type = other DNA
atggctgcatagtattccat

SEQ ID NO: 57468 - DNA, 20 bp, synthetic construct
  misc_feature 1..20: note = Description of Artificial Sequence: Synthetic oligonucleotide
  misc_feature 1..20: note = Target: SCN10A; (+) strand; PAM type: YTN; PAM sequence: TTA
  source 1..20: mol_type = other DNA
tggctgcatagtattccatg

SEQ ID NO: 57469 - DNA, 20 bp, synthetic construct
  misc_feature 1..20: note = Description of Artificial Sequence: Synthetic oligonucleotide
  misc_feature 1..20: note = Target: SCN10A; (+) strand; PAM type: YTN; PAM sequence: CTG
  source 1..20: mol_type = other DNA
catagtattccatggtgtat

SEQ ID NO: 57470 - DNA, 20 bp, synthetic construct
  misc_feature 1..20: note = Description of Artificial Sequence: Synthetic oligonucleotide
  misc_feature 1..20: note = Target: SCN10A; (+) strand; PAM type: YTN; PAM sequence: TTC
  source 1..20: mol_type = other DNA
catggtgtatatgtgccaca

SEQ ID NO: 57471 - DNA, 20 bp, synthetic construct
  misc_feature 1..20: note = Description of Artificial Sequence: Synthetic oligonucleotide
  misc_feature 1..20: note = Target: SCN10A; (+) strand; PAM type: YTN; PAM sequence: TTT
  source 1..20: mol_type = other DNA
tcttaatccagtctatcact

SEQ ID NO: 57472 - DNA, 20 bp, synthetic construct
  misc_feature 1..20: note = Description of Artificial Sequence: Synthetic oligonucleotide
  misc_feature 1..20: note = Target: SCN10A; (+) strand; PAM type: YTN; PAM sequence: TTT
  source 1..20: mol_type = other DNA
cttaatccagtctatcactg

SEQ ID NO: 57473 - DNA, 20 bp, synthetic construct
  misc_feature 1..20: note = Description of Artificial Sequence: Synthetic oligonucleotide
  misc_feature 1..20: note = Target: SCN10A; (+) strand; PAM type: YTN; PAM sequence: TTC
  source 1..20: mol_type = other DNA
ttaatccagtctatcactgt

SEQ ID NO: 57474 - DNA, 20 bp, synthetic construct
  misc_feature 1..20: note = Description of Artificial Sequence: Synthetic oligonucleotide
  misc_feature 1..20: note = Target: SCN10A; (+) strand; PAM type: YTN; PAM sequence: CTT
  source 1..20: mol_type = other DNA
aatccagtctatcactgttg

SEQ ID NO: 57475 - DNA, 20 bp, synthetic construct
  misc_feature 1..20: note = Description of Artificial Sequence: Synthetic oligonucleotide
  misc_feature 1..20: note = Target: SCN10A; (+) strand; PAM type: YTN; PAM sequence: TTA
  source 1..20: mol_type = other DNA
atccagtctatcactgttgg

SEQ ID NO: 57476 - DNA, 20 bp, synthetic construct
  misc_feature 1..20: note = Description of Artificial Sequence: Synthetic oligonucleotide
  misc_feature 1..20: note = Target: SCN10A; (+) strand; PAM type: YTN; PAM sequence: CTA
  source 1..20: mol_type = other DNA
tcactgttggacatttgggt

SEQ ID NO: 57477 - DNA, 20 bp, synthetic construct
  misc_feature 1..20: note = Description of Artificial Sequence: Synthetic oligonucleotide
  misc_feature 1..20: note = Target: SCN10A; (+) strand; PAM type: YTN; PAM sequence: CTG
  source 1..20: mol_type = other DNA
ttggacatttgggttggttc

SEQ ID NO: 57478 - DNA, 20 bp, synthetic construct
  misc_feature 1..20: note = Description of Artificial Sequence: Synthetic oligonucleotide
  misc_feature 1..20: note = Target: SCN10A; (+) strand; PAM type: YTN; PAM sequence: TTG
  source 1..20: mol_type = other DNA
gacatttgggttggttccaa

SEQ ID NO: 57479 - DNA, 20 bp, synthetic construct
  misc_feature 1..20: note = Description of Artificial Sequence: Synthetic oligonucleotide
  misc_feature 1..20: note = Target: SCN10A; (+) strand; PAM type: YTN; PAM sequence: TTT
  source 1..20: mol_type = other DNA
gggttggttccaagtctttg

SEQ ID NO: 57480 - DNA, 20 bp, synthetic construct
  misc_feature 1..20: note = Description of Artificial Sequence: Synthetic oligonucleotide
  misc_feature 1..20: note = Target: SCN10A; (+) strand; PAM type: YTN; PAM sequence: TTG
  source 1..20: mol_type = other DNA
ggttggttccaagtctttgc

SEQ ID NO: 57481 - DNA, 20 bp, synthetic construct
  misc_feature 1..20: note = Description of Artificial Sequence: Synthetic oligonucleotide
  misc_feature 1..20: note = Target: SCN10A; (+) strand; PAM type: YTN; PAM sequence: TTG
  source 1..20: mol_type = other DNA
gttccaagtctttgctattg

SEQ ID NO: 57482 - DNA, 20 bp, synthetic construct
  misc_feature 1..20: note = Description of Artificial Sequence: Synthetic oligonucleotide
  misc_feature 1..20: note = Target: SCN10A; (+) strand; PAM type: YTN; PAM sequence: TTC
  source 1..20: mol_type = other DNA
caagtctttgctattgtgaa

SEQ ID NO: 57483 - DNA, 20 bp, synthetic construct
  misc_feature 1..20: note = Description of Artificial Sequence: Synthetic oligonucleotide
  misc_feature 1..20: note = Target: SCN10A; (+) strand; PAM type: YTN; PAM sequence: CTT
  source 1..20: mol_type = other DNA
tgctattgtgaatagtgcca

SEQ ID NO: 57484 - DNA, 20 bp, synthetic construct
  misc_feature 1..20: note = Description of Artificial Sequence: Synthetic oligonucleotide
  misc_feature 1..20: note = Target: SCN10A; (+) strand; PAM type: YTN; PAM sequence: TTT
  source 1..20: mol_type = other DNA
gctattgtgaatagtgccac

SEQ ID NO: 57485 - DNA, 20 bp, synthetic construct
  misc_feature 1..20: note = Description of Artificial Sequence: Synthetic oligonucleotide
  misc_feature 1..20: note = Target: SCN10A; (+) strand; PAM type: YTN; PAM sequence: TTG
  source 1..20: mol_type = other DNA
ctattgtgaatagtgccaca

SEQ ID NO: 57486 - DNA, 20 bp, synthetic construct
  misc_feature 1..20: note = Description of Artificial Sequence: Synthetic oligonucleotide
  misc_feature 1..20: note = Target: SCN10A; (+) strand; PAM type: YTN; PAM sequence: CTA
  source 1..20: mol_type = other DNA
ttgtgaatagtgccacaata

SEQ ID NO: 57487 - DNA, 20 bp, synthetic construct
  misc_feature 1..20: note = Description of Artificial Sequence: Synthetic oligonucleotide
  misc_feature 1..20: note = Target: SCN10A; (+) strand; PAM type: YTN; PAM sequence: TTG
  source 1..20: mol_type = other DNA
tgaatagtgccacaataaac

SEQ ID NO: 57488 - DNA, 20 bp, synthetic construct
  misc_feature 1..20: note = Description of Artificial Sequence: Synthetic oligonucleotide
  misc_feature 1..20: note = Target: SCN10A; (+) strand; PAM type: YTN; PAM sequence: CTT
  source 1..20: mol_type = other DNA
tatagcagtatgatttataa

SEQ ID NO: 57489 - DNA, 20 bp, synthetic construct
  misc_feature 1..20: note = Description of Artificial Sequence: Synthetic oligonucleotide
  misc_feature 1..20: note = Target: SCN10A; (+) strand; PAM type: YTN; PAM sequence: TTT
  source 1..20: mol_type = other DNA
atagcagtatgatttataat

SEQ ID NO: 57490 - DNA, 20 bp, synthetic construct
  misc_feature 1..20: note = Description of Artificial Sequence: Synthetic oligonucleotide
  misc_feature 1..20: note = Target: SCN10A; (+) strand; PAM type: YTN; PAM sequence: TTA
  source 1..20: mol_type = other DNA
tagcagtatgatttataatc

SEQ ID NO: 57491 - DNA, 20 bp, synthetic construct
  misc_feature 1..20: note = Description of Artificial Sequence: Synthetic oligonucleotide
  misc_feature 1..20: note = Target: SCN10A; (+) strand; PAM type: YTN; PAM sequence: TTT
  source 1..20: mol_type = other DNA
ataatcctttgggtatatac

SEQ ID NO: 57492 - DNA, 20 bp, synthetic construct
  misc_feature 1..20: note = Description of Artificial Sequence: Synthetic oligonucleotide
  misc_feature 1..20: note = Target: SCN10A; (+) strand; PAM type: YTN; PAM sequence: TTA
  source 1..20: mol_type = other DNA
taatcctttgggtatatacc

SEQ ID NO: 57493 - DNA, 20 bp, synthetic construct
  misc_feature 1..20: note = Description of Artificial Sequence: Synthetic oligonucleotide
  misc_feature 1..20: note = Target: SCN10A; (+) strand; PAM type: YTN; PAM sequence: CTT
  source 1..20: mol_type = other DNA
tgggtatatacccagtaatg

SEQ ID NO: 57494 - DNA, 20 bp, synthetic construct
  misc_feature 1..20: note = Description of Artificial Sequence: Synthetic oligonucleotide
  misc_feature 1..20: note = Target: SCN10A; (+) strand; PAM type: YTN; PAM sequence: TTT
  source 1..20: mol_type = other DNA
gggtatatacccagtaatgg

SEQ ID NO: 57495 - DNA, 20 bp, synthetic construct
  misc_feature 1..20: note = Description of Artificial Sequence: Synthetic oligonucleotide
  misc_feature 1..20: note = Target: SCN10A; (+) strand; PAM type: YTN; PAM sequence: TTG
  source 1..20: mol_type = other DNA
ggtatatacccagtaatggg

SEQ ID NO: 57496 - DNA, 20 bp, synthetic construct
  misc_feature 1..20: note = Description of Artificial Sequence: Synthetic oligonucleotide
  misc_feature 1..20: note = Target: SCN10A; (+) strand; PAM type: YTN; PAM sequence: CTG
  source 1..20: mol_type = other DNA
ggtcaaatggtatttctggt

SEQ ID NO: 57497 - DNA, 20 bp, synthetic construct
  misc_feature 1..20: note = Description of Artificial Sequence: Synthetic oligonucleotide
  misc_feature 1..20: note = Target: SCN10A; (+) strand; PAM type: YTN; PAM sequence: TTT
  source 1..20: mol_type = other DNA
ctggttctagatccctgagg

SEQ ID NO: 57498 - DNA, 20 bp, synthetic construct
  misc_feature 1..20: note = Description of Artificial Sequence: Synthetic oligonucleotide
  misc_feature 1..20: note = Target: SCN10A; (+) strand; PAM type: YTN; PAM sequence: TTC
  source 1..20: mol_type = other DNA
tggttctagatccctgagga

SEQ ID NO: 57499 - DNA, 20 bp, synthetic construct
  misc_feature 1..20: note = Description of Artificial Sequence: Synthetic oligonucleotide
  misc_feature 1..20: note = Target: SCN10A; (+) strand; PAM type: YTN; PAM sequence: CTG
  source 1..20: mol_type = other DNA
gttctagatccctgaggaat

SEQ ID NO: 57500 - DNA, 20 bp, synthetic construct
  misc_feature 1..20: note = Description of Artificial Sequence: Synthetic oligonucleotide
  misc_feature 1..20: note = Target: SCN10A; (+) strand; PAM type: YTN; PAM sequence: TTC
  source 1..20: mol_type = other DNA
tagatccctgaggaattgcc

SEQ ID NO: 57501 - DNA, 20 bp, synthetic construct
  misc_feature 1..20: note = Description of Artificial Sequence: Synthetic oligonucleotide
  misc_feature 1..20: note = Target: SCN10A; (+) strand; PAM type: YTN; PAM sequence: CTA
  source 1..20: mol_type = other DNA
gatccctgaggaattgccac

SEQ ID NO: 57502 - DNA, 20 bp, synthetic construct
  misc_feature 1..20: note = Description of Artificial Sequence: Synthetic oligonucleotide
  misc_feature 1..20: note = Target: SCN10A; (+) strand; PAM type: YTN; PAM sequence: CTG
  source 1..20: mol_type = other DNA
aggaattgccacaccgactt

SEQ ID NO: 57503 - DNA, 20 bp, synthetic construct
  misc_feature 1..20: note = Description of Artificial Sequence: Synthetic oligonucleotide
  misc_feature 1..20: note = Target: SCN10A; (+) strand; PAM type: YTN; PAM sequence: TTG
  source 1..20: mol_type = other DNA
ccacaccgacttccacaatg

SEQ ID NO: 57504 - DNA, 20 bp, synthetic construct
  misc_feature 1..20: note = Description of Artificial Sequence: Synthetic oligonucleotide
  misc_feature 1..20: note = Target: SCN10A; (+) strand; PAM type: YTN; PAM sequence: CTT
  source 1..20: mol_type = other DNA
ccacaatgattgaactagtt

SEQ ID NO: 57505 - DNA, 20 bp, synthetic construct
  misc_feature 1..20: note = Description of Artificial Sequence: Synthetic oligonucleotide
  misc_feature 1..20: note = Target: SCN10A; (+) strand; PAM type: YTN; PAM sequence: TTC
  source 1..20: mol_type = other DNA
cacaatgattgaactagttt

SEQ ID NO: 57506 - DNA, 20 bp, synthetic construct
  misc_feature 1..20: note = Description of Artificial Sequence: Synthetic oligonucleotide
  misc_feature 1..20: note = Target: SCN10A; (+) strand; PAM type: YTN; PAM sequence: TTG
  source 1..20: mol_type = other DNA
aactagtttacagacccacc

SEQ ID NO: 57507 - DNA, 20 bp, synthetic construct
  misc_feature 1..20: note = Description of Artificial Sequence: Synthetic oligonucleotide
  misc_feature 1..20: note = Target: SCN10A; (+) strand; PAM type: YTN; PAM sequence: CTA
  source 1..20: mol_type = other DNA
gtttacagacccaccaacag

SEQ ID NO: 57508 - DNA, 20 bp, synthetic construct
  misc_feature 1..20: note = Description of Artificial Sequence: Synthetic oligonucleotide
  misc_feature 1..20: note = Target: SCN10A; (+) strand; PAM type: YTN; PAM sequence: TTT
  source 1..20: mol_type = other DNA
acagacccaccaacagtgta

SEQ ID NO: 57509 - DNA, 20 bp, synthetic construct
  misc_feature 1..20: note = Description of Artificial Sequence: Synthetic oligonucleotide
  misc_feature 1..20: note = Target: SCN10A; (+) strand; PAM type: YTN; PAM sequence: TTA
  source 1..20: mol_type = other DNA
cagacccaccaacagtgtaa

SEQ ID NO: 57510 - DNA, 20 bp, synthetic construct
  misc_feature 1..20: note = Description of Artificial Sequence: Synthetic oligonucleotide
  misc_feature 1..20: note = Target: SCN10A; (+) strand; PAM type: YTN; PAM sequence: TTC
  source 1..20: mol_type = other DNA
ctatttctccacatcctctc

SEQ ID NO: 57511 - DNA, 20 bp, synthetic construct
  misc_feature 1..20: note = Description of Artificial Sequence: Synthetic oligonucleotide
  misc_feature 1..20: note = Target: SCN10A; (+) strand; PAM type: YTN; PAM sequence: CTA
  source 1..20: mol_type = other DNA
tttctccacatcctctccag

SEQ ID NO: 57512 - DNA, 20 bp, synthetic construct
  misc_feature 1..20: note = Description of Artificial Sequence: Synthetic oligonucleotide
  misc_feature 1..20: note = Target: SCN10A; (+) strand; PAM type: YTN; PAM sequence: TTT
  source 1..20: mol_type = other DNA
ctccacatcctctccagcac

SEQ ID NO: 57513 - DNA, 20 bp, synthetic construct
  misc_feature 1..20: note = Description of Artificial Sequence: Synthetic oligonucleotide
  misc_feature 1..20: note = Target: SCN10A; (+) strand; PAM type: YTN; PAM sequence: TTC
  source 1..20: mol_type = other DNA
tccacatcctctccagcacc

SEQ ID NO: 57514 - DNA, 20 bp, synthetic construct
  misc_feature 1..20: note = Description of Artificial Sequence: Synthetic oligonucleotide
  misc_feature 1..20: note = Target: SCN10A; (+) strand; PAM type: YTN; PAM sequence: CTC
  source 1..20: mol_type = other DNA
cacatcctctccagcacctg

SEQ ID NO: 57515 - DNA, 20 bp, synthetic construct
  misc_feature 1..20: note = Description of Artificial Sequence: Synthetic oligonucleotide
  misc_feature 1..20: note = Target: SCN10A; (+) strand; PAM type: YTN; PAM sequence: CTC
  source 1..20: mol_type = other DNA
tccagcacctgttgtttcct

SEQ ID NO: 57516 - DNA, 20 bp, synthetic construct
  misc_feature 1..20: note = Description of Artificial Sequence: Synthetic oligonucleotide
  misc_feature 1..20: note = Target: SCN10A; (+) strand; PAM type: YTN; PAM sequence: CTC
  source 1..20: mol_type = other DNA
cagcacctgttgtttcctga

SEQ ID NO: 57517 - DNA, 20 bp, synthetic construct
  misc_feature 1..20: note = Description of Artificial Sequence: Synthetic oligonucleotide
  misc_feature 1..20: note = Target: SCN10A; (+) strand; PAM type: YTN; PAM sequence: CTG
  source 1..20: mol_type = other DNA
ttgtttcctgactttttaat

SEQ ID NO: 57518 - DNA, 20 bp, synthetic construct
  misc_feature 1..20: note = Description of Artificial Sequence: Synthetic oligonucleotide
  misc_feature 1..20: note = Target: SCN10A; (+) strand; PAM type: YTN; PAM sequence: TTG
  source 1..20: mol_type = other DNA
tttcctgactttttaatgat

SEQ ID NO: 57519 - DNA, 20 bp, synthetic construct
  misc_feature 1..20: note = Description of Artificial Sequence: Synthetic oligonucleotide
  misc_feature 1..20: note = Target: SCN10A; (+) strand; PAM type: YTN; PAM sequence: TTT
  source 1..20: mol_type = other DNA
cctgactttttaatgatcgc

SEQ ID NO: 57520 - DNA, 20 bp, synthetic construct
  misc_feature 1..20: note = Description of Artificial Sequence: Synthetic oligonucleotide
  misc_feature 1..20: note = Target: SCN10A; (+) strand; PAM type: YTN; PAM sequence: TTC
  source 1..20: mol_type = other DNA
ctgactttttaatgatcgcc

SEQ ID NO: 57521 - DNA, 20 bp, synthetic construct
  misc_feature 1..20: note = Description of Artificial Sequence: Synthetic oligonucleotide
  misc_feature 1..20: note = Target: SCN10A; (+) strand; PAM type: YTN; PAM sequence: CTG
  source 1..20: mol_type = other DNA
actttttaatgatcgccatt

SEQ ID NO: 57522 - DNA, 20 bp, synthetic construct
  misc_feature 1..20: note = Description of Artificial Sequence: Synthetic oligonucleotide
  misc_feature 1..20: note = Target: SCN10A; (+) strand; PAM type: YTN; PAM sequence: CTT
  source 1..20: mol_type = other DNA
tttaatgatcgccattctaa

SEQ ID NO: 57523 - DNA, 20 bp, synthetic construct
  misc_feature 1..20: note = Description of Artificial Sequence: Synthetic oligonucleotide
  misc_feature 1..20: note = Target: SCN10A; (+) strand; PAM type: YTN; PAM sequence: TTT
  source 1..20: mol_type = other DNA
ttaatgatcgccattctaac

SEQ ID NO: 57524 - DNA, 20 bp, synthetic construct
  misc_feature 1..20: note = Description of Artificial Sequence: Synthetic oligonucleotide
  misc_feature 1..20: note = Target: SCN10A; (+) strand; PAM type: YTN; PAM sequence: TTT
  source 1..20: mol_type = other DNA
taatgatcgccattctaact

SEQ ID NO: 57525 - DNA, 20 bp, synthetic construct
  misc_feature 1..20: note = Description of Artificial Sequence: Synthetic oligonucleotide
  misc_feature 1..20: note = Target: SCN10A; (+) strand; PAM type: YTN; PAM sequence: TTT
  source 1..20: mol_type = other DNA
aatgatcgccattctaactg

SEQ ID NO: 57526 - DNA, 20 bp, synthetic construct
  misc_feature 1..20: note = Description of Artificial Sequence: Synthetic oligonucleotide
  misc_feature 1..20: note = Target: SCN10A; (+) strand; PAM type: YTN; PAM sequence: TTA
  source 1..20: mol_type = other DNA
atgatcgccattctaactgg

SEQ ID NO: 57527 - DNA, 20 bp, synthetic construct
  misc_feature 1..20: note = Description of Artificial Sequence: Synthetic oligonucleotide
  misc_feature 1..20: note = Target: SCN10A; (+) strand; PAM type: YTN; PAM sequence: TTC
  source 1..20: mol_type = other DNA
taactggtgtgagatggtat

SEQ ID NO: 57528 - DNA, 20 bp, synthetic construct
  misc_feature 1..20: note = Description of Artificial Sequence: Synthetic oligonucleotide
  misc_feature 1..20: note = Target: SCN10A; (+) strand; PAM type: YTN; PAM sequence: CTA
  source 1..20: mol_type = other DNA
actggtgtgagatggtatct

SEQ ID NO: 57529 - DNA, 20 bp, synthetic construct
  misc_feature 1..20: note = Description of Artificial Sequence: Synthetic oligonucleotide
  misc_feature 1..20: note = Target: SCN10A; (+) strand; PAM type: YTN; PAM sequence: CTG
  source 1..20: mol_type = other DNA
gtgtgagatggtatctcatt

SEQ ID NO: 57530 - DNA, 20 bp, synthetic construct
  misc_feature 1..20: note = Description of Artificial Sequence: Synthetic oligonucleotide
  misc_feature 1..20: note = Target: SCN10A; (+) strand; PAM type: YTN; PAM sequence: CTC
  source 1..20: mol_type = other DNA
attgtggttttgatttgcat

SEQ ID NO: 57531 - DNA, 20 bp, synthetic construct
  misc_feature 1..20: note = Description of Artificial Sequence: Synthetic oligonucleotide
  misc_feature 1..20: note = Target: SCN10A; (+) strand; PAM type: YTN; PAM sequence: TTG
  source 1..20: mol_type = other DNA
tggttttgatttgcatttct

SEQ ID NO: 57532 - DNA, 20 bp, synthetic construct
  misc_feature 1..20: note = Description of Artificial Sequence: Synthetic oligonucleotide
  misc_feature 1..20: note = Target: SCN10A; (+) strand; PAM type: YTN; PAM sequence: TTT
  source 1..20: mol_type = other DNA
tgatttgcatttctctgatg

SEQ ID NO: 57533 - DNA, 20 bp, synthetic construct
  misc_feature 1..20: note = Description of Artificial Sequence: Synthetic oligonucleotide
  misc_feature 1..20: note = Target: SCN10A; (+) strand; PAM type: YTN; PAM sequence: TTT
  source 1..20: mol_type = other DNA
gatttgcatttctctgatgg

SEQ ID NO: 57534 - DNA, 20 bp, synthetic construct
  misc_feature 1..20: note = Description of Artificial Sequence: Synthetic oligonucleotide
  misc_feature 1..20: note = Target: SCN10A; (+) strand; PAM type: YTN; PAM sequence: TTG
  source 1..20: mol_type = other DNA
atttgcatttctctgatggc

SEQ ID NO: 57535 - DNA, 20 bp, synthetic construct
  misc_feature 1..20: note = Description of Artificial Sequence: Synthetic oligonucleotide
  misc_feature 1..20: note = Target: SCN10A; (+) strand; PAM type: YTN; PAM sequence: TTT
  source 1..20: mol_type = other DNA
gcatttctctgatggccagt

SEQ ID NO: 57536 - DNA, 20 bp, synthetic construct
  misc_feature 1..20: note = Description of Artificial Sequence: Synthetic oligonucleotide
  misc_feature 1..20: note = Target: SCN10A; (+) strand; PAM type: YTN; PAM sequence: TTG
  source 1..20: mol_type = other DNA
catttctctgatggccagtg

SEQ ID NO: 57537 - DNA, 20 bp, synthetic construct
  misc_feature 1..20: note = Description of Artificial Sequence: Synthetic oligonucleotide
  misc_feature 1..20: note = Target: SCN10A; (+) strand; PAM type: YTN; PAM sequence: TTT
  source 1..20: mol_type = other DNA
ctctgatggccagtgatgat

SEQ ID NO: 57538 - DNA, 20 bp, synthetic construct
  misc_feature 1..20: note = Description of Artificial Sequence: Synthetic oligonucleotide
  misc_feature 1..20: note = Target: SCN10A; (+) strand; PAM type: YTN; PAM sequence: TTC
  source 1..20: mol_type = other DNA
tctgatggccagtgatgatg

SEQ ID NO: 57539 - DNA, 20 bp, synthetic construct
  misc_feature 1..20: note = Description of Artificial Sequence: Synthetic oligonucleotide
  misc_feature 1..20: note = Target: SCN10A; (+) strand; PAM type: YTN; PAM sequence: CTC
  source 1..20: mol_type = other DNA
tgatggccagtgatgatgag

SEQ ID NO: 57540 - DNA, 20 bp, synthetic construct
  misc_feature 1..20: note = Description of Artificial Sequence: Synthetic oligonucleotide
  misc_feature 1..20: note = Target: SCN10A; (+) strand; PAM type: YTN; PAM sequence: CTG
  source 1..20: mol_type = other DNA
atggccagtgatgatgagca

SEQ ID NO: 57541 - DNA, 20 bp, synthetic construct
  misc_feature 1..20: note = Description of Artificial Sequence: Synthetic oligonucleotide
  misc_feature 1..20: note = Target: SCN10A; (+) strand; PAM type: YTN; PAM sequence: TTT
  source 1..20: mol_type = other DNA
tttcatgtgttttttggctg

SEQ ID NO: 57542 - DNA, 20 bp, synthetic construct
  misc_feature 1..20: note = Description of Artificial Sequence: Synthetic oligonucleotide
  misc_feature 1..20: note = Target: SCN10A; (+) strand; PAM type: YTN; PAM sequence: TTT
  source 1..20: mol_type = other DNA
ttcatgtgttttttggctgc

SEQ ID NO: 57543 - DNA, 20 bp, synthetic construct
  misc_feature 1..20: note = Description of Artificial Sequence: Synthetic oligonucleotide
  misc_feature 1..20: note = Target: SCN10A; (+) strand; PAM type: YTN; PAM sequence: TTT
  source 1..20: mol_type = other DNA
tcatgtgttttttggctgca

SEQ ID NO: 57544 - DNA, 20 bp, synthetic construct
  misc_feature 1..20: note = Description of Artificial Sequence: Synthetic oligonucleotide
  misc_feature 1..20: note = Target: SCN10A; (+) strand; PAM type: YTN; PAM sequence: TTT
  source 1..20: mol_type = other DNA
catgtgttttttggctgcat

SEQ ID NO: 57545 - DNA, 20 bp, synthetic construct
  misc_feature 1..20: note = Description of Artificial Sequence: Synthetic oligonucleotide
  misc_feature 1..20: note = Target: SCN10A; (+) strand; PAM type: YTN; PAM sequence: TTC
  source 1..20: mol_type = other DNA
atgtgttttttggctgcata

SEQ ID NO: 57546 - DNA, 20 bp, synthetic construct
  misc_feature 1..20: note = Description of Artificial Sequence: Synthetic oligonucleotide
  misc_feature 1..20: note = Target: SCN10A; (+) strand; PAM type: YTN; PAM sequence: TTT
  source 1..20: mol_type = other DNA
tttggctgcataaatgtctt

SEQ ID NO: 57547 - DNA, 20 bp, synthetic construct
  misc_feature 1..20: note = Description of Artificial Sequence: Synthetic oligonucleotide
  misc_feature 1..20: note = Target: SCN10A; (+) strand; PAM type: YTN; PAM sequence: TTT
  source 1..20: mol_type = other DNA
ttggctgcataaatgtcttc

SEQ ID NO: 57548 - DNA, 20 bp, synthetic construct
  misc_feature 1..20: note = Description of Artificial Sequence: Synthetic oligonucleotide
  misc_feature 1..20: note = Target: SCN10A; (+) strand; PAM type: YTN; PAM sequence: TTT
  source 1..20: mol_type = other DNA
tggctgcataaatgtcttct

SEQ ID NO: 57549 - DNA, 20 bp, synthetic construct
  misc_feature 1..20: note = Description of Artificial Sequence: Synthetic oligonucleotide
  misc_feature 1..20: note = Target: SCN10A; (+) strand; PAM type: YTN; PAM sequence: TTT
  source 1..20: mol_type = other DNA
ggctgcataaatgtcttctt

SEQ ID NO: 57550 - DNA, 20 bp, synthetic construct
  misc_feature 1..20: note = Description of Artificial Sequence: Synthetic oligonucleotide
  misc_feature 1..20: note = Target: SCN10A; (+) strand; PAM type: YTN; PAM sequence: TTG
  source 1..20: mol_type = other DNA
gctgcataaatgtcttcttt

SEQ ID NO: 57551 - DNA, 20 bp, synthetic construct
  misc_feature 1..20: note = Description of Artificial Sequence: Synthetic oligonucleotide
  misc_feature 1..20: note = Target: SCN10A; (+) strand; PAM type: YTN; PAM sequence: CTG
  source 1..20: mol_type = other DNA
cataaatgtcttcttttgag

SEQ ID NO: 57552 - DNA, 20 bp, synthetic construct
  misc_feature 1..20: note = Description of Artificial Sequence: Synthetic oligonucleotide
  misc_feature 1..20: note = Target: SCN10A; (+) strand; PAM type: YTN; PAM sequence: CTT
  source 1..20: mol_type = other DNA
cttttgagaagtgtctgttc

SEQ ID NO: 57553 - DNA, 20 bp, synthetic construct
  misc_feature 1..20: note = Description of Artificial Sequence: Synthetic oligonucleotide
  misc_feature 1..20: note = Target: SCN10A; (+) strand; PAM type: YTN; PAM sequence: TTC
  source 1..20: mol_type = other DNA
ttttgagaagtgtctgttca

SEQ ID NO: 57554 - DNA, 20 bp, synthetic construct
  misc_feature 1..20: note = Description of Artificial Sequence: Synthetic oligonucleotide
  misc_feature 1..20: note = Target: SCN10A; (+) strand; PAM type: YTN; PAM sequence: CTT
  source 1..20: mol_type = other DNA
ttgagaagtgtctgttcata

SEQ ID NO: 57555 - DNA, 20 bp, synthetic construct
  misc_feature 1..20: note = Description of Artificial Sequence: Synthetic oligonucleotide
  misc_feature 1..20: note = Target: SCN10A; (+) strand; PAM type: YTN; PAM sequence: TTT
  source 1..20: mol_type = other DNA
tgagaagtgtctgttcatat

SEQ ID NO: 57556 - DNA, 20 bp, synthetic construct
  misc_feature 1..20: note = Description of Artificial Sequence: Synthetic oligonucleotide
  misc_feature 1..20: note = Target: SCN10A; (+) strand; PAM type: YTN; PAM sequence: TTT
  source 1..20: mol_type = other DNA
gagaagtgtctgttcatatc

SEQ ID NO: 57557 - DNA, 20 bp, synthetic construct
  misc_feature 1..20: note = Description of Artificial Sequence: Synthetic oligonucleotide
  misc_feature 1..20: note = Target: SCN10A; (+) strand; PAM type: YTN; PAM sequence: TTG
  source 1..20: mol_type = other DNA
agaagtgtctgttcatatcc

SEQ ID NO: 57558 - DNA, 20 bp, synthetic construct
  misc_feature 1..20: note = Description of Artificial Sequence: Synthetic oligonucleotide
  misc_feature 1..20: note = Target: SCN10A; (+) strand; PAM type: YTN; PAM sequence: CTG
  source 1..20: mol_type = other DNA
ttcatatccttcgcccactt

SEQ ID NO: 57559 - DNA, 20 bp, synthetic construct
  misc_feature 1..20: note = Description of Artificial Sequence: Synthetic oligonucleotide
  misc_feature 1..20: note = Target: SCN10A; (+) strand; PAM type: YTN; PAM sequence: TTC
  source 1..20: mol_type = other DNA
atatccttcgcccacttttt

SEQ ID NO: 57560 - DNA, 20 bp, synthetic construct
  misc_feature 1..20: note = Description of Artificial Sequence: Synthetic oligonucleotide
  misc_feature 1..20: note = Target: SCN10A; (+) strand; PAM type: YTN; PAM sequence: CTT
  source 1..20: mol_type = other DNA
cgcccactttttgatgggat

SEQ ID NO: 57561 - DNA, 20 bp, synthetic construct
  misc_feature 1..20: note = Description of Artificial Sequence: Synthetic oligonucleotide
  misc_feature 1..20: note = Target: SCN10A; (+) strand; PAM type: YTN; PAM sequence: TTC
  source 1..20: mol_type = other DNA
gcccactttttgatgggatt

SEQ ID NO: 57562 - DNA, 20 bp, synthetic construct
  misc_feature 1..20: note = Description of Artificial Sequence: Synthetic oligonucleotide
  misc_feature 1..20: note = Target: SCN10A; (+) strand; PAM type: YTN; PAM sequence: CTT
  source 1..20: mol_type = other DNA
tttgatgggatttttttcct

SEQ ID NO: 57563 - DNA, 20 bp, synthetic construct
  misc_feature 1..20: note = Description of Artificial Sequence: Synthetic oligonucleotide
  misc_feature 1..20: note = Target: SCN10A; (+) strand; PAM type: YTN; PAM sequence: TTT
  source 1..20: mol_type = other DNA
ttgatgggatttttttcctt

SEQ ID NO: 57564 - DNA, 20 bp, synthetic construct
  misc_feature 1..20: note = Description of Artificial Sequence: Synthetic oligonucleotide
  misc_feature 1..20: note = Target: SCN10A; (+) strand; PAM type: YTN; PAM sequence: TTT
  source 1..20: mol_type = other DNA
tgatgggatttttttccttg

SEQ ID NO: 57565 - DNA, 20 bp, synthetic construct
  misc_feature 1..20: note = Description of Artificial Sequence: Synthetic oligonucleotide
  misc_feature 1..20: note = Target: SCN10A; (+) strand; PAM type: YTN; PAM sequence: TTT
  source 1..20: mol_type = other DNA
gatgggatttttttccttgt

SEQ ID NO: 57566 - DNA, 20 bp, synthetic construct
  misc_feature 1..20: note = Description of Artificial Sequence: Synthetic oligonucleotide
  misc_feature 1..20: note = Target: SCN10A; (+) strand; PAM type: YTN; PAM sequence: TTG
  source 1..20: mol_type = other DNA
atgggatttttttccttgta

SEQ ID NO: 57567 - DNA, 20 bp, synthetic construct
  misc_feature 1..20: note = Description of Artificial Sequence: Synthetic oligonucleotide
  misc_feature 1..20: note = Target: SCN10A; (+) strand; PAM type: YTN; PAM sequence: TTT
  source 1..20: mol_type = other DNA
ttttccttgtaaatttgttt

SEQ ID NO: 57568 - DNA, 20 bp, synthetic construct
  misc_feature 1..20: note = Description of Artificial Sequence: Synthetic oligonucleotide
  misc_feature 1..20: note = Target: SCN10A; (+) strand; PAM type: YTN; PAM sequence: TTT
  source 1..20: mol_type = other DNA
tttccttgtaaatttgtttg

SEQ ID NO: 57569 - DNA, 20 bp, synthetic construct
  misc_feature 1..20: note = Description of Artificial Sequence: Synthetic oligonucleotide
  misc_feature 1..20: note = Target: SCN10A; (+) strand; PAM type: YTN; PAM sequence: TTT
  source 1..20: mol_type = other DNA
ttccttgtaaatttgtttga

SEQ ID NO: 57570 - DNA, 20 bp, synthetic construct
  misc_feature 1..20: note = Description of Artificial Sequence: Synthetic oligonucleotide
  misc_feature 1..20: note = Target: SCN10A; (+) strand; PAM type: YTN; PAM sequence: TTT
  source 1..20: mol_type = other DNA
tccttgtaaatttgtttgag

SEQ ID NO: 57571 - DNA, 20 bp, synthetic construct
  misc_feature 1..20: note = Description of Artificial Sequence: Synthetic oligonucleotide
  misc_feature 1..20: note = Target: SCN10A; (+) strand; PAM type: YTN; PAM sequence: TTT
  source 1..20: mol_type = other DNA
ccttgtaaatttgtttgagt

SEQ ID NO: 57572 - DNA, 20 bp, synthetic construct
  misc_feature 1..20: note = Description of Artificial Sequence: Synthetic oligonucleotide
  misc_feature 1..20: note = Target: SCN10A; (+) strand; PAM type: YTN; PAM sequence: TTC
  source 1..20: mol_type = other DNA
cttgtaaatttgtttgagtt

SEQ ID NO: 57573 - DNA, 20 bp, synthetic construct
  misc_feature 1..20: note = Description of Artificial Sequence: Synthetic oligonucleotide
  misc_feature 1..20: note = Target: SCN10A; (+) strand; PAM type: YTN; PAM sequence: CTT
  source 1..20: mol_type = other DNA
gtaaatttgtttgagttcat

SEQ ID NO: 57574 - DNA, 20 bp, synthetic construct
  misc_feature 1..20: note = Description of Artificial Sequence: Synthetic oligonucleotide
  misc_feature 1..20: note = Target: SCN10A; (+) strand; PAM type: YTN; PAM sequence: TTG
  source 1..20: mol_type = other DNA
taaatttgtttgagttcatt

SEQ ID NO: 57575 - DNA, 20 bp, synthetic construct
  misc_feature 1..20: note = Description of Artificial Sequence: Synthetic oligonucleotide
  misc_feature 1..20: note = Target: SCN10A; (+) strand; PAM type: YTN; PAM sequence: TTT
  source 1..20: mol_type = other DNA
gtttgagttcattgtagatt

SEQ ID NO: 57576 - DNA, 20 bp, synthetic construct
  misc_feature 1..20: note = Description of Artificial Sequence: Synthetic oligonucleotide
  misc_feature 1..20: note = Target: SCN10A; (+) strand; PAM type: YTN; PAM sequence: TTG
  source 1..20: mol_type = other DNA
tttgagttcattgtagattc

SEQ ID NO: 57577 - DNA, 20 bp, synthetic construct
  misc_feature 1..20: note = Description of Artificial Sequence: Synthetic oligonucleotide
  misc_feature 1..20: note = Target: SCN10A; (+) strand; PAM type: YTN; PAM sequence: TTT
  source 1..20: mol_type = other DNA
gagttcattgtagattctgg

SEQ ID NO: 57578 - DNA, 20 bp, synthetic construct
  misc_feature 1..20: note = Description of Artificial Sequence: Synthetic oligonucleotide
  misc_feature 1..20: note = Target: SCN10A; (+) strand; PAM type: YTN; PAM sequence: TTG
  source 1..20: mol_type = other DNA
agttcattgtagattctgga

SEQ ID NO: 57579 - DNA, 20 bp, synthetic construct
  misc_feature 1..20: note = Description of Artificial Sequence: Synthetic oligonucleotide
  misc_feature 1..20: note = Target: SCN10A; (+) strand; PAM type: YTN; PAM sequence: TTC
  source 1..20: mol_type = other DNA
attgtagattctggatatta

SEQ ID NO: 57580 - DNA, 20 bp, synthetic construct
  misc_feature 1..20: note = Description of Artificial Sequence: Synthetic oligonucleotide
  misc_feature 1..20: note = Target: SCN10A; (+) strand; PAM type: YTN; PAM sequence: TTG
  source 1..20: mol_type = other DNA
tagattctggatattagccc

SEQ ID NO: 57581 - DNA, 20 bp, synthetic construct
  misc_feature 1..20: note = Description of Artificial Sequence: Synthetic oligonucleotide
  misc_feature 1..20: note = Target: SCN10A; (+) strand; PAM type: YTN; PAM sequence: TTC
  source 1..20: mol_type = other DNA
tggatattagcccttcgtca

SEQ ID NO: 57582 - DNA, 20 bp, synthetic construct
  misc_feature 1..20: note = Description of Artificial Sequence: Synthetic oligonucleotide
  misc_feature 1..20: note = Target: SCN10A; (+) strand; PAM type: YTN; PAM sequence: CTG
  source 1..20: mol_type = other DNA
gatattagcccttcgtcaga

SEQ ID NO: 57583 - DNA, 20 bp, synthetic construct
  misc_feature 1..20: note = Description of Artificial Sequence: Synthetic oligonucleotide
  misc_feature 1..20: note = Target: SCN10A; (+) strand; PAM type: YTN; PAM sequence: TTA
  source 1..20: mol_type = other DNA
gcccttcgtcagatgagtag

SEQ ID NO: 57584 - DNA, 20 bp, synthetic construct
  misc_feature 1..20: note = Description of Artificial Sequence: Synthetic oligonucleotide
  misc_feature 1..20: note = Target: SCN10A; (+) strand; PAM type: YTN; PAM sequence: CTT
  source 1..20: mol_type = other DNA
cgtcagatgagtaggttgca

SEQ ID NO: 57585 - DNA, 20 bp, synthetic construct
  misc_feature 1..20: note = Description of Artificial Sequence: Synthetic oligonucleotide
  misc_feature 1..20: note = Target: SCN10A; (+) strand; PAM type: YTN; PAM sequence: TTC
  source 1..20: mol_type = other DNA
gtcagatgagtaggttgcaa

SEQ ID NO: 57586 - DNA, 20 bp, synthetic construct
  misc_feature 1..20: note = Description of Artificial Sequence: Synthetic oligonucleotide
  misc_feature 1..20: note = Target: SCN10A; (+) strand; PAM type: YTN; PAM sequence: TTG
  source 1..20: mol_type = other DNA
caaaaattttctcccatcct

SEQ ID NO: 57587 - DNA, 20 bp, synthetic construct
  misc_feature 1..20: note = Description of Artificial Sequence: Synthetic oligonucleotide
  misc_feature 1..20: note = Target: SCN10A; (+) strand; PAM type: YTN; PAM sequence: TTT
  source 1..20: mol_type = other DNA
tctcccatcctgtaggtttc

SEQ ID NO: 57588 - DNA, 20 bp, synthetic construct
  misc_feature 1..20: note = Description of Artificial Sequence: Synthetic oligonucleotide
  misc_feature 1..20: note = Target: SCN10A; (+) strand; PAM type: YTN; PAM sequence: TTT
  source 1..20: mol_type = other DNA
ctcccatcctgtaggtttct

SEQ ID NO: 57589 - DNA, 20 bp, synthetic construct
  misc_feature 1..20: note = Description of Artificial Sequence: Synthetic oligonucleotide
  misc_feature 1..20: note = Target: SCN10A; (+) strand; PAM type: YTN; PAM sequence: TTC
  source 1..20: mol_type = other DNA
tcccatcctgtaggtttctg

SEQ ID NO: 57590 - DNA, 20 bp, synthetic construct
  misc_feature 1..20: note = Description of Artificial Sequence: Synthetic oligonucleotide
  misc_feature 1..20: note = Target: SCN10A; (+) strand; PAM type: YTN; PAM sequence: CTC
  source 1..20: mol_type = other DNA
ccatcctgtaggtttctgtt

SEQ ID NO: 57591 - DNA, 20 bp, synthetic construct
  misc_feature 1..20: note = Description of Artificial Sequence: Synthetic oligonucleotide
  misc_feature 1..20: note = Target: SCN10A; (+) strand; PAM type: YTN; PAM sequence: CTG
  source 1..20: mol_type = other DNA
taggtttctgttcactctga

SEQ ID NO: 57592 - DNA, 20 bp, synthetic construct
  misc_feature 1..20: note = Description of Artificial Sequence: Synthetic oligonucleotide
  misc_feature 1..20: note = Target: SCN10A; (+) strand; PAM type: YTN; PAM sequence: TTT
  source 1..20: mol_type = other DNA
ctgttcactctgatggtggt

SEQ ID NO: 57593 - DNA, 20 bp, synthetic construct
  misc_feature 1..20: note = Description of Artificial Sequence: Synthetic oligonucleotide
  misc_feature 1..20: note = Target: SCN10A; (+) strand; PAM type: YTN; PAM sequence: TTC
  source 1..20: mol_type = other DNA
tgttcactctgatggtggtt

SEQ ID NO: 57594 - DNA, 20 bp, synthetic construct
  misc_feature 1..20: note = Description of Artificial Sequence: Synthetic oligonucleotide
  misc_feature 1..20: note = Target: SCN10A; (+) strand; PAM type: YTN; PAM sequence: CTG
  source 1..20: mol_type = other DNA
ttcactctgatggtggtttc

SEQ ID NO: 57595 - DNA, 20 bp, synthetic construct
  misc_feature 1..20: note = Description of Artificial Sequence: Synthetic oligonucleotide
  misc_feature 1..20: note = Target: SCN10A; (+) strand; PAM type: YTN; PAM sequence: TTC
  source 1..20: mol_type = other DNA
actctgatggtggtttcttt

SEQ ID NO: 57596 - DNA, 20 bp, synthetic construct
  misc_feature 1..20: note = Description of Artificial Sequence: Synthetic oligonucleotide
  misc_feature 1..20: note = Target: SCN10A; (+) strand; PAM type: YTN; PAM sequence: CTC
  source 1..20: mol_type = other DNA
tgatggtggtttcttttgct

SEQ ID NO: 57597 - DNA, 20 bp, synthetic construct
  misc_feature 1..20: note = Description of Artificial Sequence: Synthetic oligonucleotide
  misc_feature 1..20: note = Target: SCN10A; (+) strand; PAM type: YTN; PAM sequence: CTG
  source 1..20: mol_type = other DNA
atggtggtttcttttgctgc

SEQ ID NO: 57598 - DNA, 20 bp, synthetic construct
  misc_feature 1..20: note = Description of Artificial Sequence: Synthetic oligonucleotide
  misc_feature 1..20: note = Target: SCN10A; (+) strand; PAM type: YTN; PAM sequence: TTT
  source 1..20: mol_type = other DNA
cttttgctgctcagaagctc

SEQ ID NO: 57599 - DNA, 20 bp, synthetic construct
  misc_feature 1..20: note = Description of Artificial Sequence: Synthetic oligonucleotide
  misc_feature 1..20: note = Target: SCN10A; (+) strand; PAM type: YTN; PAM sequence: TTC
  source 1..20: mol_type = other DNA
ttttgctgctcagaagctct

SEQ ID NO: 57600 - DNA, 20 bp, synthetic construct
  misc_feature 1..20: note = Description of Artificial Sequence: Synthetic oligonucleotide
  misc_feature 1..20: note = Target: SCN10A; (+) strand; PAM type: YTN; PAM sequence: CTT
  source 1..20: mol_type = other DNA
ttgctgctcagaagctcttt

SEQ ID NO: 57601 - DNA, 20 bp, synthetic construct
  misc_feature 1..20: note = Description of Artificial Sequence: Synthetic oligonucleotide
  misc_feature 1..20: note = Target: SCN10A; (+) strand; PAM type: YTN; PAM sequence: TTT
  source 1..20: mol_type = other DNA
tgctgctcagaagctcttta

SEQ ID NO: 57602 - DNA, 20 bp, synthetic construct
  misc_feature 1..20: note = Description of Artificial Sequence: Synthetic oligonucleotide
  misc_feature 1..20: note = Target: SCN10A; (+) strand; PAM type: YTN; PAM sequence: TTT
  source 1..20: mol_type = other DNA
gctgctcagaagctctttag

SEQ ID NO: 57603 - DNA, 20 bp, synthetic construct
  misc_feature 1..20: note = Description of Artificial Sequence: Synthetic oligonucleotide
  misc_feature 1..20: note = Target: SCN10A; (+) strand; PAM type: YTN; PAM sequence: TTG
  source 1..20: mol_type = other DNA
ctgctcagaagctctttagt

SEQ ID NO: 57604 - DNA, 20 bp, synthetic construct
  misc_feature 1..20: note = Description of Artificial Sequence: Synthetic oligonucleotide
  misc_feature 1..20: note = Target: SCN10A; (+) strand; PAM type: YTN; PAM sequence: CTG
  source 1..20: mol_type = other DNA
ctcagaagctctttagttta

SEQ ID NO: 57605 - DNA, 20 bp, synthetic construct
  misc_feature 1..20: note = Description of Artificial Sequence: Synthetic oligonucleotide
  misc_feature 1..20: note = Target: SCN10A; (+) strand; PAM type: YTN; PAM sequence: CTC
  source 1..20: mol_type = other DNA
agaagctctttagtttaatg

SEQ ID NO: 57606 - DNA, 20 bp, synthetic construct
  misc_feature 1..20: note = Description of Artificial Sequence: Synthetic oligonucleotide
  misc_feature 1..20: note = Target: SCN10A; (+) strand; PAM type: YTN; PAM sequence: CTC
  source 1..20: mol_type = other DNA
tttagtttaatgagatccca

SEQ ID NO: 57607 - DNA, 20 bp, synthetic construct
  misc_feature 1..20: note = Description of Artificial Sequence: Synthetic oligonucleotide
  misc_feature 1..20: note = Target: SCN10A; (+) strand; PAM type: YTN; PAM sequence: CTT
  source 1..20: mol_type = other DNA
tagtttaatgagatcccatt

SEQ ID NO: 57608 - DNA, 20 bp, synthetic construct
  misc_feature 1..20: note = Description of Artificial Sequence: Synthetic oligonucleotide
  misc_feature 1..20: note = Target: SCN10A; (+) strand; PAM type: YTN; PAM sequence: TTT
  source 1..20: mol_type = other DNA
agtttaatgagatcccattt

SEQ ID NO: 57609 - DNA, 20 bp, synthetic construct
  misc_feature 1..20: note = Description of Artificial Sequence: Synthetic oligonucleotide
  misc_feature 1..20: note = Target: SCN10A; (+) strand; PAM type: YTN; PAM sequence: TTA
  source 1..20: mol_type = other DNA
gtttaatgagatcccatttg

SEQ ID NO: 57610 - DNA, 20 bp, synthetic construct
  misc_feature 1..20: note = Description of Artificial Sequence: Synthetic oligonucleotide
  misc_feature 1..20: note = Target: SCN10A; (+) strand; PAM type: YTN; PAM sequence: TTT
  source 1..20: mol_type = other DNA
aatgagatcccatttgtcaa

SEQ ID NO: 57611 - DNA, 20 bp, synthetic construct
  misc_feature 1..20: note = Description of Artificial Sequence: Synthetic oligonucleotide
  misc_feature 1..20: note = Target: SCN10A; (+) strand; PAM type: YTN; PAM sequence: TTA
  source 1..20: mol_type = other DNA
atgagatcccatttgtcaat

SEQ ID NO: 57612 - DNA, 20 bp, synthetic construct
  misc_feature 1..20: note = Description of Artificial Sequence: Synthetic oligonucleotide
  misc_feature 1..20: note = Target: SCN10A; (+) strand; PAM type: YTN; PAM sequence: TTT
  source 1..20: mol_type = other DNA
gtcaattttgacttttgttg

SEQ ID NO: 57613 - DNA, 20 bp, synthetic construct
  misc_feature 1..20: note = Description of Artificial Sequence: Synthetic oligonucleotide
  misc_feature 1..20: note = Target: SCN10A; (+) strand; PAM type: YTN; PAM sequence: TTG
  source 1..20: mol_type = other DNA
tcaattttgacttttgttgc

SEQ ID NO: 57614 - DNA, 20 bp, synthetic construct
  misc_feature 1..20: note = Description of Artificial Sequence: Synthetic oligonucleotide
  misc_feature 1..20: note = Target: SCN10A; (+) strand; PAM type: YTN; PAM sequence: TTT
  source 1..20: mol_type = other DNA
tgacttttgttgccattgct

SEQ ID NO: 57615 - DNA, 20 bp, synthetic construct
  misc_feature 1..20: note = Description of Artificial Sequence: Synthetic oligonucleotide
  misc_feature 1..20: note = Target: SCN10A; (+) strand; PAM type: YTN; PAM sequence: TTT
  source 1..20: mol_type = other DNA
gacttttgttgccattgctt

SEQ ID NO: 57616 - DNA, 20 bp, synthetic construct
  misc_feature 1..20: note = Description of Artificial Sequence: Synthetic oligonucleotide
  misc_feature 1..20: note = Target: SCN10A; (+) strand; PAM type: YTN; PAM sequence: TTG
  source 1..20: mol_type = other DNA
acttttgttgccattgcttt

SEQ ID NO: 57617 - DNA, 20 bp, synthetic construct
  misc_feature 1..20: note = Description of Artificial Sequence: Synthetic oligonucleotide
  misc_feature 1..20: note = Target: SCN10A; (+) strand; PAM type: YTN; PAM sequence: CTT
  source 1..20: mol_type = other DNA
ttgttgccattgcttttggt

SEQ ID NO: 57618 - DNA, 20 bp, synthetic construct
  misc_feature 1..20: note = Description of Artificial Sequence: Synthetic oligonucleotide
  misc_feature 1..20: note = Target: SCN10A; (+) strand; PAM type: YTN; PAM sequence: TTT
  source 1..20: mol_type = other DNA
tgttgccattgcttttggtg

SEQ ID NO: 57619 - DNA, 20 bp, synthetic construct
  misc_feature 1..20: note = Description of Artificial Sequence: Synthetic oligonucleotide
  misc_feature 1..20: note = Target: SCN10A; (+) strand; PAM type: YTN; PAM sequence: TTT
  source 1..20: mol_type = other DNA
gttgccattgcttttggtgt

SEQ ID NO: 57620 - DNA, 20 bp, synthetic construct
  misc_feature 1..20: note = Description of Artificial Sequence: Synthetic oligonucleotide
  misc_feature 1..20: note = Target: SCN10A; (+) strand; PAM type: YTN; PAM sequence: TTG
  source 1..20: mol_type = other DNA
ttgccattgcttttggtgtt

SEQ ID NO: 57621 - DNA, 20 bp, synthetic construct
  misc_feature 1..20: note = Description of Artificial Sequence: Synthetic oligonucleotide
  misc_feature 1..20: note = Target: SCN10A; (+) strand; PAM type: YTN; PAM sequence: TTG
  source 1..20: mol_type = other DNA
ccattgcttttggtgtttta

SEQ ID NO: 57622 - DNA, 20 bp, synthetic construct
  misc_feature 1..20: note = Description of Artificial Sequence: Synthetic oligonucleotide
  misc_feature 1..20: note = Target: SCN10A; (+) strand; PAM type: YTN; PAM sequence: TTG
  source 1..20: mol_type = other DNA
cttttggtgttttagacatg

SEQ ID NO: 57623 - DNA, 20 bp, synthetic construct
  misc_feature 1..20: note = Description of Artificial Sequence: Synthetic oligonucleotide
  misc_feature 1..20: note = Target: SCN10A; (+) strand; PAM type: YTN; PAM sequence: CTT
  source 1..20: mol_type = other DNA
ttggtgttttagacatgaag

SEQ ID NO: 57624 - DNA, 20 bp, synthetic construct
  misc_feature 1..20: note = Description of Artificial Sequence: Synthetic oligonucleotide
  misc_feature 1..20: note = Target: SCN10A; (+) strand; PAM type: YTN; PAM sequence: TTT
  source 1..20: mol_type = other DNA
tggtgttttagacatgaagt

SEQ ID NO: 57625 - DNA, 20 bp, synthetic construct
  misc_feature 1..20: note = Description of Artificial Sequence: Synthetic oligonucleotide
  misc_feature 1..20: note = Target: SCN10A; (+) strand; PAM type: YTN; PAM sequence: TTT
  source 1..20: mol_type = other DNA
ggtgttttagacatgaagtc

SEQ ID NO: 57626 - DNA, 20 bp, synthetic construct
  misc_feature 1..20: note = Description of Artificial Sequence: Synthetic oligonucleotide
  misc_feature 1..20: note = Target: SCN10A; (+) strand; PAM type: YTN; PAM sequence: TTG
  source 1..20: mol_type = other DNA
gtgttttagacatgaagtcc

SEQ ID NO: 57627 - DNA, 20 bp, synthetic construct
  misc_feature 1..20: note = Description of Artificial Sequence: Synthetic oligonucleotide
  misc_feature 1..20: note = Target: SCN10A; (+) strand; PAM type: YTN; PAM sequence: TTT
  source 1..20: mol_type = other DNA
tagacatgaagtccttgccc

SEQ ID NO: 57628 - DNA, 20 bp, synthetic construct
  misc_feature 1..20: note = Description of Artificial Sequence: Synthetic oligonucleotide
  misc_feature 1..20: note = Target: SCN10A; (+) strand; PAM type: YTN; PAM sequence: TTT
  source 1..20: mol_type = other DNA
agacatgaagtccttgccca

SEQ ID NO: 57629 - DNA, 20 bp, synthetic construct
  misc_feature 1..20: note = Description of Artificial Sequence: Synthetic oligonucleotide
  misc_feature 1..20: note = Target: SCN10A; (+) strand; PAM type: YTN; PAM sequence: TTA
  source 1..20: mol_type = other DNA
gacatgaagtccttgcccat

SEQ ID NO: 57630 - DNA, 20 bp, synthetic construct
  misc_feature 1..20: note = Description of Artificial Sequence: Synthetic oligonucleotide
  misc_feature 1..20: note = Target: SCN10A; (+) strand; PAM type: YTN; PAM sequence: CTT
  source 1..20: mol_type = other DNA
gcccatgcctatgtcctgaa

SEQ ID NO: 57631 - DNA, 20 bp, synthetic construct
  misc_feature 1..20: note = Description of Artificial Sequence: Synthetic oligonucleotide
  misc_feature 1..20: note = Target: SCN10A; (+) strand; PAM type: YTN; PAM sequence: TTG
  source 1..20: mol_type = other DNA
cccatgcctatgtcctgaat

SEQ ID NO: 57632 - DNA, 20 bp, synthetic construct
  misc_feature 1..20: note = Description of Artificial Sequence: Synthetic oligonucleotide
  misc_feature 1..20: note = Target: SCN10A; (+) strand; PAM type: YTN; PAM sequence: CTA
  source 1..20: mol_type = other DNA
tgtcctgaatggtattgcct

SEQ ID NO: 57633 - DNA, 20 bp, synthetic construct
  misc_feature 1..20: note = Description of Artificial Sequence: Synthetic oligonucleotide
  misc_feature 1..20: note = Target: SCN10A; (+) strand; PAM type: YTN; PAM sequence: CTG
  source 1..20: mol_type = other DNA
aatggtattgcctaggttct

SEQ ID NO: 57634 - DNA, 20 bp, synthetic construct
  misc_feature 1..20: note = Description of Artificial Sequence: Synthetic oligonucleotide
  misc_feature 1..20: note = Target: SCN10A; (+) strand; PAM type: YTN; PAM sequence: TTG
  source 1..20: mol_type = other DNA
cctaggttctcttctagggt

SEQ ID NO: 57635 - DNA, 20 bp, synthetic construct
  misc_feature 1..20: note = Description of Artificial Sequence: Synthetic oligonucleotide
  misc_feature 1..20: note = Target: SCN10A; (+) strand; PAM type: YTN; PAM sequence: CTA
  source 1..20: mol_type = other DNA
ggttctcttctagggttttt

SEQ ID NO: 57636 - DNA, 20 bp, synthetic construct
  misc_feature 1..20: note = Description of Artificial Sequence: Synthetic oligonucleotide
  misc_feature 1..20: note = Target: SCN10A; (+) strand; PAM type: YTN; PAM sequence: TTC
  source 1..20: mol_type = other DNA
tcttctagggtttttatggt

SEQ ID NO: 57637 - DNA, 20 bp, synthetic construct
  misc_feature 1..20: note = Description of Artificial Sequence: Synthetic oligonucleotide
  misc_feature 1..20: note = Target: SCN10A; (+) strand; PAM type: YTN; PAM sequence: CTC
  source 1..20: mol_type = other DNA
ttctagggtttttatggttt

SEQ ID NO: 57638 - DNA, 20 bp, synthetic construct
  misc_feature 1..20: note = Description of Artificial Sequence: Synthetic oligonucleotide
  misc_feature 1..20: note = Target: SCN10A; (+) strand; PAM type: YTN; PAM sequence: CTT
  source 1..20: mol_type = other DNA
ctagggtttttatggtttta

SEQ ID NO: 57639 - DNA, 20 bp, synthetic construct
  misc_feature 1..20: note = Description of Artificial Sequence: Synthetic oligonucleotide
  misc_feature 1..20: note = Target: SCN10A; (+) strand; PAM type: YTN; PAM sequence: TTC
  source 1..20: mol_type = other DNA
tagggtttttatggttttag

SEQ ID NO: 57640 - DNA, 20 bp, synthetic construct
  misc_feature 1..20: note = Description of Artificial Sequence: Synthetic oligonucleotide
  misc_feature 1..20: note = Target: SCN10A; (+) strand; PAM type: YTN; PAM sequence: CTA
  source 1..20: mol_type = other DNA
gggtttttatggttttaggt

SEQ ID NO: 57641 - DNA, 20 bp, synthetic construct
  misc_feature 1..20: note = Description of Artificial Sequence: Synthetic oligonucleotide
  misc_feature 1..20: note = Target: SCN10A; (+) strand; PAM type: YTN; PAM sequence: TTT
  source 1..20: mol_type = other DNA
ttatggttttaggtctaaca

SEQ ID NO: 57642 - DNA, 20 bp, synthetic construct
  misc_feature 1..20: note = Description of Artificial Sequence: Synthetic oligonucleotide
  misc_feature 1..20: note = Target: SCN10A; (+) strand; PAM type: YTN; PAM sequence: TTT
  source 1..20: mol_type = other DNA
tatggttttaggtctaacat

SEQ ID NO: 57643 - DNA, 20 bp, synthetic construct
  misc_feature 1..20: note = Description of Artificial Sequence: Synthetic oligonucleotide
  misc_feature 1..20: note = Target: SCN10A; (+) strand; PAM type: YTN; PAM sequence: TTT
  source 1..20: mol_type = other DNA
atggttttaggtctaacatt

SEQ ID NO: 57644 - DNA, 20 bp, synthetic construct
  misc_feature 1..20: note = Description of Artificial Sequence: Synthetic oligonucleotide
  misc_feature 1..20: note = Target: SCN10A; (+) strand; PAM type: YTN; PAM sequence: TTA
  source 1..20: mol_type = other DNA
tggttttaggtctaacattt

SEQ ID NO: 57645 - DNA, 20 bp, synthetic construct
  misc_feature 1..20: note = Description of Artificial Sequence: Synthetic oligonucleotide
  misc_feature 1..20: note = Target: SCN10A; (+) strand; PAM type: YTN; PAM sequence: TTT
  source 1..20: mol_type = other DNA
taggtctaacatttaagtct

SEQ ID NO: 57646 - DNA, 20 bp, synthetic construct
  misc_feature 1..20: note = Description of Artificial Sequence: Synthetic oligonucleotide
  misc_feature 1..20: note = Target: SCN10A; (+) strand; PAM type: YTN; PAM sequence: TTT
  source 1..20: mol_type = other DNA
aggtctaacatttaagtctt

SEQ ID NO: 57647 - DNA, 20 bp, synthetic construct
  misc_feature 1..20: note = Description of Artificial Sequence: Synthetic oligonucleotide
  misc_feature 1..20: note = Target: SCN10A; (+) strand; PAM type: YTN; PAM sequence: TTA
  source 1..20: mol_type = other DNA
ggtctaacatttaagtcttt

SEQ ID NO: 57648 - DNA, 20 bp, synthetic construct
  misc_feature 1..20: note = Description of Artificial Sequence: Synthetic oligonucleotide
  misc_feature 1..20: note = Target: SCN10A; (+) strand; PAM type: YTN; PAM sequence: CTA
  source 1..20: mol_type = other DNA
acatttaagtctttaatcca

SEQ ID NO: 57649 - DNA, 20 bp, synthetic construct
  misc_feature 1..20: note = Description of Artificial Sequence: Synthetic oligonucleotide
  misc_feature 1..20: note = Target: SCN10A; (+) strand; PAM type: YTN; PAM sequence: TTT
  source 1..20: mol_type = other DNA
aagtctttaatccatcttga

SEQ ID NO: 57650 - DNA, 20 bp, synthetic construct
  misc_feature 1..20: note = Description of Artificial Sequence: Synthetic oligonucleotide
  misc_feature 1..20: note = Target: SCN10A; (+) strand; PAM type: YTN; PAM sequence: TTA
  source 1..20: mol_type = other DNA
agtctttaatccatcttgaa

SEQ ID NO: 57651 - DNA, 20 bp, synthetic construct
  misc_feature 1..20: note = Description of Artificial Sequence: Synthetic oligonucleotide
  misc_feature 1..20: note = Target: SCN10A; (+) strand; PAM type: YTN; PAM sequence: CTT
  source 1..20: mol_type = other DNA
taatccatcttgaattaatt

SEQ ID NO: 57652 - DNA, 20 bp, synthetic construct
  misc_feature 1..20: note = Description of Artificial Sequence: Synthetic oligonucleotide
  misc_feature 1..20: note = Target: SCN10A; (+) strand; PAM type: YTN; PAM sequence: TTT
  source 1..20: mol_type = other DNA
aatccatcttgaattaattt

SEQ ID NO: 57653 - DNA, 20 bp, synthetic construct
  misc_feature 1..20: note = Description of Artificial Sequence: Synthetic oligonucleotide
  misc_feature 1..20: note = Target: SCN10A; (+) strand; PAM type: YTN; PAM sequence: TTA
  source 1..20: mol_type = other DNA
atccatcttgaattaatttt

SEQ ID NO: 57654 - DNA, 20 bp, synthetic construct
  misc_feature 1..20: note = Description of Artificial Sequence: Synthetic oligonucleotide
  misc_feature 1..20: note = Target: SCN10A; (+) strand; PAM type: YTN; PAM sequence: CTT
  source 1..20: mol_type = other DNA
gaattaatttttgtataagg

SEQ ID NO: 57655 - DNA, 20 bp, synthetic construct
  misc_feature 1..20: note = Description of Artificial Sequence: Synthetic oligonucleotide
  misc_feature 1..20: note = Target: SCN10A; (+) strand; PAM type: YTN; PAM sequence: TTG
  source 1..20: mol_type = other DNA
aattaatttttgtataaggt

SEQ ID NO: 57656 - DNA, 20 bp, synthetic construct
  misc_feature 1..20: note = Description of Artificial Sequence: Synthetic oligonucleotide
  misc_feature 1..20: note = Target: SCN10A; (+) strand; PAM type: YTN; PAM sequence: TTA
  source 1..20: mol_type = other DNA
atttttgtataaggtgtaag

SEQ ID NO: 57657 - DNA, 20 bp, synthetic construct
  misc_feature 1..20: note = Description of Artificial Sequence: Synthetic oligonucleotide
  misc_feature 1..20: note = Target: SCN10A; (+) strand; PAM type: YTN; PAM sequence: TTT
  source 1..20: mol_type = other DNA
ttgtataaggtgtaaggaag

SEQ ID NO: 57658 - DNA, 20 bp, synthetic construct
  misc_feature 1..20: note = Description of Artificial Sequence: Synthetic oligonucleotide
  misc_feature 1..20: note = Target: SCN10A; (+) strand; PAM type: YTN; PAM sequence: TTT
  source 1..20: mol_type = other DNA
tgtataaggtgtaaggaagg

SEQ ID NO: 57659 - DNA, 20 bp, synthetic construct
  misc_feature 1..20: note = Description of Artificial Sequence: Synthetic oligonucleotide
  misc_feature 1..20: note = Target: SCN10A; (+) strand; PAM type: YTN; PAM sequence: TTT
  source 1..20: mol_type = other DNA
gtataaggtgtaaggaaggg

SEQ ID NO: 57660 - DNA, 20 bp, synthetic construct
  misc_feature 1..20: note = Description of Artificial Sequence: Synthetic oligonucleotide
  misc_feature 1..20: note = Target: SCN10A; (+) strand; PAM type: YTN; PAM sequence: TTG
  source 1..20: mol_type = other DNA
tataaggtgtaaggaaggga

SEQ ID NO: 57661 - DNA, 20 bp, synthetic construct
  misc_feature 1..20: note = Description of Artificial Sequence: Synthetic oligonucleotide
  misc_feature 1..20: note = Target: SCN10A; (+) strand; PAM type: YTN; PAM sequence: TTT
  source 1..20: mol_type = other DNA
cagctttctccatatggcta

SEQ ID NO: 57662 - DNA, 20 bp, synthetic construct
  misc_feature 1..20: note = Description of Artificial Sequence: Synthetic oligonucleotide
  misc_feature 1..20: note = Target: SCN10A; (+) strand; PAM type: YTN; PAM sequence: TTC
  source 1..20: mol_type = other DNA
agctttctccatatggctag

SEQ ID NO: 57663 - DNA, 20 bp, synthetic construct
  misc_feature 1..20: note = Description of Artificial Sequence: Synthetic oligonucleotide
  misc_feature 1..20: note = Target: SCN10A; (+) strand; PAM type: YTN; PAM sequence: CTT
  source 1..20: mol_type = other DNA
tctccatatggctagccagt

SEQ ID NO: 57664 - DNA, 20 bp, synthetic construct
  misc_feature 1..20: note = Description of Artificial Sequence: Synthetic oligonucleotide
  misc_feature 1..20: note = Target: SCN10A; (+) strand; PAM type: YTN; PAM sequence: TTT
  source 1..20: mol_type = other DNA
ctccatatggctagccagtt

SEQ ID NO: 57665 - DNA, 20 bp, synthetic construct
  misc_feature 1..20: note = Description of Artificial Sequence: Synthetic oligonucleotide
  misc_feature 1..20: note = Target: SCN10A; (+) strand; PAM type: YTN; PAM sequence: TTC
  source 1..20: mol_type = other DNA
tccatatggctagccagttt

SEQ ID NO: 57666 - DNA, 20 bp, synthetic construct
  misc_feature 1..20: note = Description of Artificial Sequence: Synthetic oligonucleotide
  misc_feature 1..20: note = Target: SCN10A; (+) strand; PAM type: YTN; PAM sequence: CTC
  source 1..20: mol_type = other DNA
catatggctagccagttttc

SEQ ID NO: 57667 - DNA, 20 bp, synthetic construct
  misc_feature 1..20: note = Description of Artificial Sequence: Synthetic oligonucleotide
  misc_feature 1..20: note = Target: SCN10A; (+) strand; PAM type: YTN; PAM sequence: CTA
  source 1..20: mol_type = other DNA
gccagttttcccagcaccat

SEQ ID NO: 57668 - DNA, 20 bp, synthetic construct
  misc_feature 1..20: note = Description of Artificial Sequence: Synthetic oligonucleotide
  misc_feature 1..20: note = Target: SCN10A; (+) strand; PAM type: YTN; PAM sequence: TTT
  source 1..20: mol_type = other DNA
tcccagcaccatttattaaa

SEQ ID NO: 57669 - DNA, 20 bp, synthetic construct
  misc_feature 1..20: note = Description of Artificial Sequence: Synthetic oligonucleotide
  misc_feature 1..20: note = Target: SCN10A; (+) strand; PAM type: YTN; PAM sequence: TTT
  source 1..20: mol_type = other DNA
cccagcaccatttattaaat

SEQ ID NO: 57670 - DNA, 20 bp, synthetic construct
  misc_feature 1..20: note = Description of Artificial Sequence: Synthetic oligonucleotide
  misc_feature 1..20: note = Target: SCN10A; (+) strand; PAM type: YTN; PAM sequence: TTC
  source 1..20: mol_type = other DNA
ccagcaccatttattaaata

SEQ ID NO: 57671 - DNA, 20 bp, synthetic construct
  misc_feature 1..20: note = Description of Artificial Sequence: Synthetic oligonucleotide
  misc_feature 1..20: note = Target: SCN10A; (+) strand; PAM type: YTN; PAM sequence: TTT
  source 1..20: mol_type = other DNA
attaaatagggaatcctttc

SEQ ID NO: 57672 - DNA, 20 bp, synthetic construct
  misc_feature 1..20: note = Description of Artificial Sequence: Synthetic oligonucleotide
  misc_feature 1..20: note = Target: SCN10A; (+) strand; PAM type: YTN; PAM sequence: TTA
  source 1..20: mol_type = other DNA
ttaaatagggaatcctttcc

SEQ ID NO: 57673 - DNA, 20 bp, synthetic construct
  misc_feature 1..20: note = Description of Artificial Sequence: Synthetic oligonucleotide
  misc_feature 1..20: note = Target: SCN10A; (+) strand; PAM type: YTN; PAM sequence: TTA
  source 1..20: mol_type = other DNA
aatagggaatcctttcccca

SEQ ID NO: 57674 - DNA, 20 bp, synthetic construct
  misc_feature 1..20: note = Description of Artificial Sequence: Synthetic oligonucleotide
  misc_feature 1..20: note = Target: SCN10A; (+) strand; PAM type: YTN; PAM sequence: CTT
  source 1..20: mol_type = other DNA
tccccatttcttgtttttgt

SEQ ID NO: 57675 - DNA, 20 bp, synthetic construct
  misc_feature 1..20: note = Description of Artificial Sequence: Synthetic oligonucleotide
  misc_feature 1..20: note = Target: SCN10A; (+) strand; PAM type: YTN; PAM sequence: TTT
  source 1..20: mol_type = other DNA
ccccatttcttgtttttgtc

SEQ ID NO: 57676 - DNA, 20 bp, synthetic construct
  misc_feature 1..20: note = Description of Artificial Sequence: Synthetic oligonucleotide
  misc_feature 1..20: note = Target: SCN10A; (+) strand; PAM type: YTN; PAM sequence: TTC
  source 1..20: mol_type = other DNA
cccatttcttgtttttgtca

SEQ ID NO: 57677 - DNA, 20 bp, synthetic construct
  misc_feature 1..20: note = Description of Artificial Sequence: Synthetic oligonucleotide
  misc_feature 1..20: note = Target: SCN10A; (+) strand; PAM type: YTN; PAM sequence: TTT
  source 1..20: mol_type = other DNA
cttgtttttgtcaggtttgt

SEQ ID NO: 57678 - DNA, 20 bp, synthetic construct
  misc_feature 1..20: note = Description of Artificial Sequence: Synthetic oligonucleotide
  misc_feature 1..20: note = Target: SCN10A; (+) strand; PAM type: YTN; PAM sequence: TTC
  source 1..20: mol_type = other DNA
ttgtttttgtcaggtttgtc

SEQ ID NO: 57679 - DNA, 20 bp, synthetic construct
  misc_feature 1..20: note = Description of Artificial Sequence: Synthetic oligonucleotide
  misc_feature 1..20: note = Target: SCN10A; (+) strand; PAM type: YTN; PAM sequence: CTT
  source 1..20: mol_type = other DNA
gtttttgtcaggtttgtcaa

SEQ ID NO: 57680 - DNA, 20 bp, synthetic construct
  misc_feature 1..20: note = Description of Artificial Sequence: Synthetic oligonucleotide
  misc_feature 1..20: note = Target: SCN10A; (+) strand; PAM type: YTN; PAM sequence: TTG
  source 1..20: mol_type = other DNA
tttttgtcaggtttgtcaaa

SEQ ID NO: 57681 - DNA, 20 bp, synthetic construct
  misc_feature 1..20: note = Description of Artificial Sequence: Synthetic oligonucleotide
  misc_feature 1..20: note = Target: SCN10A; (+) strand; PAM type: YTN; PAM sequence: TTT
  source 1..20: mol_type = other DNA
ttgtcaggtttgtcaaagat

SEQ ID NO: 57682 - DNA, 20 bp, synthetic construct
  misc_feature 1..20: note = Description of Artificial Sequence: Synthetic oligonucleotide
  misc_feature 1..20: note = Target: SCN10A; (+) strand; PAM type: YTN; PAM sequence: TTT
  source 1..20: mol_type = other DNA
tgtcaggtttgtcaaagatc

SEQ ID NO: 57683 - DNA, 20 bp, synthetic construct
  misc_feature 1..20: note = Description of Artificial Sequence: Synthetic oligonucleotide
  misc_feature 1..20: note = Target: SCN10A; (+) strand; PAM type: YTN; PAM sequence: TTT
  source 1..20: mol_type = other DNA
gtcaggtttgtcaaagatca

SEQ ID NO: 57684 - DNA, 20 bp, synthetic construct
  misc_feature 1..20: note = Description of Artificial Sequence: Synthetic oligonucleotide
  misc_feature 1..20: note = Target: SCN10A; (+) strand; PAM type: YTN; PAM sequence: TTG
  source 1..20: mol_type = other DNA
tcaggtttgtcaaagatcag

SEQ ID NO: 57685 - DNA, 20 bp, synthetic construct
  misc_feature 1..20: note = Description of Artificial Sequence: Synthetic oligonucleotide
  misc_feature 1..20: note = Target: SCN10A; (+) strand; PAM type: YTN; PAM sequence: TTT
  source 1..20: mol_type = other DNA
gtcaaagatcagatagttgt

SEQ ID NO: 57686 - DNA, 20 bp, synthetic construct
  misc_feature 1..20: note = Description of Artificial Sequence: Synthetic oligonucleotide
  misc_feature 1..20: note = Target: SCN10A; (+) strand; PAM type: YTN; PAM sequence: TTG
  source 1..20: mol_type = other DNA
tcaaagatcagatagttgta

SEQ ID NO: 57687 - DNA, 20 bp, synthetic construct
  misc_feature 1..20: note = Description of Artificial Sequence: Synthetic oligonucleotide
  misc_feature 1..20: note = Target: SCN10A; (+) strand; PAM type: YTN; PAM sequence: TTG
  source 1..20: mol_type = other DNA
tagatatgcggcattatttc

SEQ ID NO: 57688 - DNA, 20 bp, synthetic construct
  misc_feature 1..20: note = Description of Artificial Sequence: Synthetic oligonucleotide
  misc_feature 1..20: note = Target: SCN10A; (+) strand; PAM type: YTN; PAM sequence: TTA
  source 1..20: mol_type = other DNA
tttctgagggctctgttctg

SEQ ID NO: 57689 - DNA, 20 bp, synthetic construct
  misc_feature 1..20: note = Description of Artificial Sequence: Synthetic oligonucleotide
  misc_feature 1..20: note = Target: SCN10A; (+) strand; PAM type: YTN; PAM sequence: TTT
  source 1..20: mol_type = other DNA
ctgagggctctgttctgttc

SEQ ID NO: 57690 - DNA, 20 bp, synthetic construct
  misc_feature 1..20: note = Description of Artificial Sequence: Synthetic oligonucleotide
  misc_feature 1..20: note = Target: SCN10A; (+) strand; PAM type: YTN; PAM sequence: TTC
  source 1..20: mol_type = other DNA
tgagggctctgttctgttcc

SEQ ID NO: 57691 - DNA, 20 bp, synthetic construct
  misc_feature 1..20: note = Description of Artificial Sequence: Synthetic oligonucleotide
  misc_feature 1..20: note = Target: SCN10A; (+) strand; PAM type: YTN; PAM sequence: CTG
  source 1..20: mol_type = other DNA
agggctctgttctgttccat

SEQ ID NO: 57692 - DNA, 20 bp, synthetic construct
  misc_feature 1..20: note = Description of Artificial Sequence: Synthetic oligonucleotide
  misc_feature 1..20: note = Target: SCN10A; (+) strand; PAM type: YTN; PAM sequence: CTC
  source 1..20: mol_type = other DNA
tgttctgttccattggtcta

SEQ ID NO: 57693 - DNA, 20 bp, synthetic construct
  misc_feature 1..20: note = Description of Artificial Sequence: Synthetic oligonucleotide
  misc_feature 1..20: note = Target: SCN10A; (+) strand; PAM type: YTN; PAM sequence: CTG
  source 1..20: mol_type = other DNA
ttctgttccattggtctata

SEQ ID NO: 57694 - DNA, 20 bp, synthetic construct
  misc_feature 1..20: note = Description of Artificial Sequence: Synthetic oligonucleotide
  misc_feature 1..20: note = Target: SCN10A; (+) strand; PAM type: YTN; PAM sequence: TTC
  source 1..20: mol_type = other DNA
tgttccattggtctatatct

SEQ ID NO: 57695 - DNA, 20 bp, synthetic construct
  misc_feature 1..20: note = Description of Artificial Sequence: Synthetic oligonucleotide
  misc_feature 1..20: note = Target: SCN10A; (+) strand; PAM type: YTN; PAM sequence: CTG
  source 1..20: mol_type = other DNA
ttccattggtctatatctct

SEQ ID NO: 57696 - DNA, 20 bp, synthetic construct
  misc_feature 1..20: note = Description of Artificial Sequence: Synthetic oligonucleotide
  misc_feature 1..20: note = Target: SCN10A; (+) strand; PAM type: YTN; PAM sequence: TTC
  source 1..20: mol_type = other DNA
cattggtctatatctctgtt

SEQ ID NO: 57697 - DNA, 20 bp, synthetic construct
  misc_feature 1..20: note = Description of Artificial Sequence: Synthetic oligonucleotide
  misc_feature 1..20: note = Target: SCN10A; (+) strand; PAM type: YTN; PAM sequence: TTG
  source 1..20: mol_type = other DNA
gtctatatctctgttttggt

SEQ ID NO: 57698 - DNA, 20 bp, synthetic construct
  misc_feature 1..20: note = Description of Artificial Sequence: Synthetic oligonucleotide
  misc_feature 1..20: note = Target: SCN10A; (+) strand; PAM type: YTN; PAM sequence: CTA
  source 1..20: mol_type = other DNA
tatctctgttttggtaccag

SEQ ID NO: 57699 - DNA, 20 bp, synthetic construct
  misc_feature 1..20: note = Description of Artificial Sequence: Synthetic oligonucleotide
  misc_feature 1..20: note = Target: SCN10A; (+) strand; PAM type: YTN; PAM sequence: CTC
  source 1..20: mol_type = other DNA
tgttttggtaccagtaccat

SEQ ID NO: 57700 - DNA, 20 bp, synthetic construct
  misc_feature 1..20: note = Description of Artificial Sequence: Synthetic oligonucleotide
  misc_feature 1..20: note = Target: SCN10A; (+) strand; PAM type: YTN; PAM sequence: CTG
  source 1..20: mol_type = other DNA
ttttggtaccagtaccatgc

SEQ ID NO: 57701 - DNA, 20 bp, synthetic construct
  misc_feature 1..20: note = Description of Artificial Sequence: Synthetic oligonucleotide
  misc_feature 1..20: note = Target: SCN10A; (+) strand; PAM type: YTN; PAM sequence: TTT
  source 1..20: mol_type = other DNA
tggtaccagtaccatgctgt

SEQ ID NO: 57702 - DNA, 20 bp, synthetic construct
  misc_feature 1..20: note = Description of Artificial Sequence: Synthetic oligonucleotide
  misc_feature 1..20: note = Target: SCN10A; (+) strand; PAM type: YTN; PAM sequence: TTT
  source 1..20: mol_type = other DNA
ggtaccagtaccatgctgtt

SEQ ID NO: 57703 - DNA, 20 bp, synthetic construct
  misc_feature 1..20: note = Description of Artificial Sequence: Synthetic oligonucleotide
  misc_feature 1..20: note = Target: SCN10A; (+) strand; PAM type: YTN; PAM sequence: TTG
  source 1..20: mol_type = other DNA
gtaccagtaccatgctgttt

SEQ ID NO: 57704 - DNA, 20 bp, synthetic construct
  misc_feature 1..20: note = Description of Artificial Sequence: Synthetic oligonucleotide
  misc_feature 1..20: note = Target: SCN10A; (+) strand; PAM type: YTN; PAM sequence: CTG
  source 1..20: mol_type = other DNA
ttttggttactgtagccttg

SEQ ID NO: 57705 - DNA, 20 bp, synthetic construct
  misc_feature 1..20: note = Description of Artificial Sequence: Synthetic oligonucleotide
  misc_feature 1..20: note = Target: SCN10A; (+) strand; PAM type: YTN; PAM sequence: TTT
  source 1..20: mol_type = other DNA
tggttactgtagccttgtaa

SEQ ID NO: 57706 - DNA, 20 bp, synthetic construct
  misc_feature 1..20: note = Description of Artificial Sequence: Synthetic oligonucleotide
  misc_feature 1..20: note = Target: SCN10A; (+) strand; PAM type: YTN; PAM sequence: TTT
  source 1..20: mol_type = other DNA
ggttactgtagccttgtaat

SEQ ID NO: 57707 - DNA, 20 bp, synthetic construct
  misc_feature 1..20: note = Description of Artificial Sequence: Synthetic oligonucleotide
  misc_feature 1..20: note = Target: SCN10A; (+) strand; PAM type: YTN; PAM sequence: TTG
  source 1..20: mol_type = other DNA
gttactgtagccttgtaata

SEQ ID NO: 57708 - DNA, 20 bp, synthetic construct
  misc_feature 1..20: note = Description of Artificial Sequence: Synthetic oligonucleotide
  misc_feature 1..20: note = Target: SCN10A; (+) strand; PAM type: YTN; PAM sequence: TTA
  source 1..20: mol_type = other DNA
ctgtagccttgtaatatagt

SEQ ID NO: 57709 - DNA, 20 bp, synthetic construct
  misc_feature 1..20: note = Description of Artificial Sequence: Synthetic oligonucleotide
  misc_feature 1..20: note = Target: SCN10A; (+) strand; PAM type: YTN; PAM sequence: CTG
  source 1..20: mol_type = other DNA
tagccttgtaatatagtttg

SEQ ID NO: 57710 - DNA, 20 bp, synthetic construct
  misc_feature 1..20: note = Description of Artificial Sequence: Synthetic oligonucleotide
  misc_feature 1..20: note = Target: SCN10A; (+) strand; PAM type: YTN; PAM sequence: CTT
  source 1..20: mol_type = other DNA
gtaatatagtttgaagtcag

SEQ ID NO: 57711 - DNA, 20 bp, synthetic construct
  misc_feature 1..20: note = Description of Artificial Sequence: Synthetic oligonucleotide
  misc_feature 1..20: note = Target: SCN10A; (+) strand; PAM type: YTN; PAM sequence: TTG
  source 1..20: mol_type = other DNA
taatatagtttgaagtcagg

SEQ ID NO: 57712 - DNA, 20 bp, synthetic construct
  misc_feature 1..20: note = Description of Artificial Sequence: Synthetic oligonucleotide
  misc_feature 1..20: note = Target: SCN10A; (+) strand; PAM type: YTN; PAM sequence: TTT
  source 1..20: mol_type = other DNA
gaagtcaggtagcgtgatgc

SEQ ID NO: 57713 - DNA, 20 bp, synthetic construct
  misc_feature 1..20: note = Description of Artificial Sequence: Synthetic oligonucleotide
  misc_feature 1..20: note = Target: SCN10A; (+) strand; PAM type: YTN; PAM sequence: TTG
  source 1..20: mol_type = other DNA
aagtcaggtagcgtgatgcc

SEQ ID NO: 57714 - DNA, 20 bp, synthetic construct
  misc_feature 1..20: note = Description of Artificial Sequence: Synthetic oligonucleotide
  misc_feature 1..20: note = Target: SCN10A; (+) strand; PAM type: YTN; PAM sequence: CTC
  source 1..20: mol_type = other DNA
cagctttgttatacaccaat

SEQ ID NO: 57715 - DNA, 20 bp, synthetic construct
  misc_feature 1..20: note = Description of Artificial Sequence: Synthetic oligonucleotide
  misc_feature 1..20: note = Target: SCN10A; (+) strand; PAM type: YTN; PAM sequence: CTT
  source 1..20: mol_type = other DNA
tgttatacaccaataacaga

SEQ ID NO: 57716 - DNA, 20 bp, synthetic construct
  misc_feature 1..20: note = Description of Artificial Sequence: Synthetic oligonucleotide
  misc_feature 1..20: note = Target: SCN10A; (+) strand; PAM type: YTN; PAM sequence: TTT
  source 1..20: mol_type = other DNA
gttatacaccaataacagac

SEQ ID NO: 57717 - DNA, 20 bp, synthetic construct
  misc_feature 1..20: note = Description of Artificial Sequence: Synthetic oligonucleotide
  misc_feature 1..20: note = Target: SCN10A; (+) strand; PAM type: YTN; PAM sequence: TTG
  source 1..20: mol_type = other DNA
ttatacaccaataacagaca

SEQ ID NO: 57718 - DNA, 20 bp, synthetic construct
  misc_feature 1..20: note = Description of Artificial Sequence: Synthetic oligonucleotide
  misc_feature 1..20: note = Target: SCN10A; (+) strand; PAM type: YTN; PAM sequence: TTA
  source 1..20: mol_type = other DNA
tacaccaataacagacaaac

SEQ ID NO: 57719 - DNA, 20 bp, synthetic construct
  misc_feature 1..20: note = Description of Artificial Sequence: Synthetic oligonucleotide
  misc_feature 1..20: note = Target: SCN10A; (+) strand; PAM type: YTN; PAM sequence: CTC
  source 1..20: mol_type = other DNA
ccattcacaattgcttcaaa

SEQ ID NO: 57720 - DNA, 20 bp, synthetic construct
  misc_feature 1..20: note = Description of Artificial Sequence: Synthetic oligonucleotide
  misc_feature 1..20: note = Target: SCN10A; (+) strand; PAM type: YTN; PAM sequence: TTC
  source 1..20: mol_type = other DNA
acaattgcttcaaagagaat

SEQ ID NO: 57721 - DNA, 20 bp, synthetic construct
  misc_feature 1..20: note = Description of Artificial Sequence: Synthetic oligonucleotide
  misc_feature 1..20: note = Target: SCN10A; (+) strand; PAM type: YTN; PAM sequence: TTG
  source 1..20: mol_type = other DNA
cttcaaagagaataaaatac

SEQ ID NO: 57722 - DNA, 20 bp, synthetic construct
  misc_feature 1..20: note = Description of Artificial Sequence: Synthetic oligonucleotide
  misc_feature 1..20: note = Target: SCN10A; (+) strand; PAM type: YTN; PAM sequence: CTT
  source 1..20: mol_type = other DNA
caaagagaataaaataccta

SEQ ID NO: 57723 - DNA, 20 bp, synthetic construct
  misc_feature 1..20: note = Description of Artificial Sequence: Synthetic oligonucleotide
  misc_feature 1..20: note = Target: SCN10A; (+) strand; PAM type: YTN; PAM sequence: TTC
  source 1..20: mol_type = other DNA
aaagagaataaaatacctag

SEQ ID NO: 57724 - DNA, 20 bp, synthetic construct
  misc_feature 1..20: note = Description of Artificial Sequence: Synthetic oligonucleotide
  misc_feature 1..20: note = Target: SCN10A; (+) strand; PAM type: YTN; PAM sequence: CTA
  source 1..20: mol_type = other DNA
ggaatgcaacttacaaggga

SEQ ID NO: 57725 - DNA, 20 bp, synthetic construct
  misc_feature 1..20: note = Description of Artificial Sequence: Synthetic oligonucleotide
  misc_feature 1..20: note = Target: SCN10A; (+) strand; PAM type: YTN; PAM sequence: CTT
  source 1..20: mol_type = other DNA
acaagggatgtgaaggacct

SEQ ID NO: 57726 - DNA, 20 bp, synthetic construct
  misc_feature 1..20: note = Description of Artificial Sequence: Synthetic oligonucleotide
  misc_feature 1..20: note = Target: SCN10A; (+) strand; PAM type: YTN; PAM sequence: TTA
  source 1..20: mol_type = other DNA
caagggatgtgaaggacctc

SEQ ID NO: 57727 - DNA, 20 bp, synthetic construct
  misc_feature 1..20: note = Description of Artificial Sequence: Synthetic oligonucleotide
  misc_feature 1..20: note = Target: SCN10A; (+) strand; PAM type: YTN; PAM sequence: CTC
  source 1..20: mol_type = other DNA
ttcaaggagaactacaaacc

SEQ ID NO: 57728 - DNA, 20 bp, synthetic construct
  misc_feature 1..20: note = Description of Artificial Sequence: Synthetic oligonucleotide
  misc_feature 1..20: note = Target: SCN10A; (+) strand; PAM type: YTN; PAM sequence: CTT
  source 1..20: mol_type = other DNA
caaggagaactacaaaccac

SEQ ID NO: 57729 - DNA, 20 bp, synthetic construct
  misc_feature 1..20: note = Description of Artificial Sequence: Synthetic oligonucleotide
  misc_feature 1..20: note = Target: SCN10A; (+) strand; PAM type: YTN; PAM sequence: TTC
  source 1..20: mol_type = other DNA
aaggagaactacaaaccact

SEQ ID NO: 57730 - DNA, 20 bp, synthetic construct
  misc_feature 1..20: note = Description of Artificial Sequence: Synthetic oligonucleotide
  misc_feature 1..20: note = Target: SCN10A; (+) strand; PAM type: YTN; PAM sequence: CTA
  source 1..20: mol_type = other DNA
caaaccactgctcagtgaaa

SEQ ID NO: 57731 - DNA, 20 bp, synthetic construct
  misc_feature 1..20: note = Description of Artificial Sequence: Synthetic oligonucleotide
  misc_feature 1..20: note = Target: SCN10A; (+) strand; PAM type: YTN; PAM sequence: CTG
  source 1..20: mol_type = other DNA
ctcagtgaaataaaagagga

SEQ ID NO: 57732 - DNA, 20 bp, synthetic construct
  misc_feature 1..20: note = Description of Artificial Sequence: Synthetic oligonucleotide
  misc_feature 1..20: note = Target: SCN10A; (+) strand; PAM type: YTN; PAM sequence: CTC
  source 1..20: mol_type = other DNA
agtgaaataaaagaggatac

SEQ ID NO: 57733 - DNA, 20 bp, synthetic construct
  misc_feature 1..20: note = Description of Artificial Sequence: Synthetic oligonucleotide
  misc_feature 1..20: note = Target: SCN10A; (+) strand; PAM type: YTN; PAM sequence: CTC
  source 1..20: mol_type = other DNA
catgctcatgggtaggaaga

SEQ ID NO: 57734 - DNA, 20 bp, synthetic construct
  misc_feature 1..20: note = Description of Artificial Sequence: Synthetic oligonucleotide
  misc_feature 1..20: note = Target: SCN10A; (+) strand; PAM type: YTN; PAM sequence: CTC
  source 1..20: mol_type = other DNA
atgggtaggaagaatcaata

SEQ ID NO: 57735 - DNA, 20 bp, synthetic construct
  misc_feature 1..20: note = Description of Artificial Sequence: Synthetic oligonucleotide
  misc_feature 1..20: note = Target: SCN10A; (+) strand; PAM type: YTN; PAM sequence: CTT
  source 1..20: mol_type = other DNA
gaaaatggccatactgccca

SEQ ID NO: 57736 - DNA, 20 bp, synthetic construct
  misc_feature 1..20: note = Description of Artificial Sequence: Synthetic oligonucleotide
  misc_feature 1..20: note = Target: SCN10A; (+) strand; PAM type: YTN; PAM sequence: TTG
  source 1..20: mol_type = other DNA
aaaatggccatactgcccaa

SEQ ID NO: 57737 - DNA, 20 bp, synthetic construct
  misc_feature 1..20: note = Description of Artificial Sequence: Synthetic oligonucleotide
  misc_feature 1..20: note = Target: SCN10A; (+) strand; PAM type: YTN; PAM sequence: CTG
  source 1..20: mol_type = other DNA
cccaaggtaatttatagatt

SEQ ID NO: 57738 - DNA, 20 bp, synthetic construct
  misc_feature 1..20: note = Description of Artificial Sequence: Synthetic oligonucleotide
  misc_feature 1..20: note = Target: SCN10A; (+) strand; PAM type: YTN; PAM sequence: TTT
  source 1..20: mol_type = other DNA
atagattcaatgccatcccc

SEQ ID NO: 57739 - DNA, 20 bp, synthetic construct
  misc_feature 1..20: note = Description of Artificial Sequence: Synthetic oligonucleotide
  misc_feature 1..20: note = Target: SCN10A; (+) strand; PAM type: YTN; PAM sequence: TTA
  source 1..20: mol_type = other DNA
tagattcaatgccatcccca

SEQ ID NO: 57740 - DNA, 20 bp, synthetic construct
  misc_feature 1..20: note = Description of Artificial Sequence: Synthetic oligonucleotide
  misc_feature 1..20: note = Target: SCN10A; (+) strand; PAM type: YTN; PAM sequence: TTC
  source 1..20: mol_type = other DNA
aatgccatccccatcaagct

SEQ ID NO: 57741 - DNA, 20 bp, synthetic construct
  misc_feature 1..20: note = Description of Artificial Sequence: Synthetic oligonucleotide
  misc_feature 1..20: note = Target: SCN10A; (+) strand; PAM type: YTN; PAM sequence: CTA
  source 1..20: mol_type = other DNA
ccaatgactttcttctcaga

SEQ ID NO: 57742 - DNA, 20 bp, synthetic construct
  misc_feature 1..20: note = Description of Artificial Sequence: Synthetic oligonucleotide
  misc_feature 1..20: note = Target: SCN10A; (+) strand; PAM type: YTN; PAM sequence: CTT
  source 1..20: mol_type = other DNA
tcttctcagaattggaaaaa

SEQ ID NO: 57743 - DNA, 20 bp, synthetic construct
  misc_feature 1..20: note = Description of Artificial Sequence: Synthetic oligonucleotide
  misc_feature 1..20: note = Target: SCN10A; (+) strand; PAM type: YTN; PAM sequence: TTT
  source 1..20: mol_type = other DNA
cttctcagaattggaaaaaa

SEQ ID NO: 57744 - DNA, 20 bp, synthetic construct
  misc_feature 1..20: note = Description of Artificial Sequence: Synthetic oligonucleotide
  misc_feature 1..20: note = Target: SCN10A; (+) strand; PAM type: YTN; PAM sequence: TTC
  source 1..20: mol_type = other DNA
ttctcagaattggaaaaaac

SEQ ID NO: 57745 - DNA, 20 bp, synthetic construct
  misc_feature 1..20: note = Description of Artificial Sequence: Synthetic oligonucleotide
  misc_feature 1..20: note = Target: SCN10A; (+) strand; PAM type: YTN; PAM sequence: CTT
  source 1..20: mol_type = other DNA
ctcagaattggaaaaaacta

SEQ ID NO: 57746 - DNA, 20 bp, synthetic construct
  misc_feature 1..20: note = Description of Artificial Sequence: Synthetic oligonucleotide
  misc_feature 1..20: note = Target: SCN10A; (+) strand; PAM type: YTN; PAM sequence: TTC
  source 1..20: mol_type = other DNA
tcagaattggaaaaaactac

SEQ ID NO: 57747 - DNA, 20 bp, synthetic construct
  misc_feature 1..20: note = Description of Artificial Sequence: Synthetic oligonucleotide
  misc_feature 1..20: note = Target: SCN10A; (+) strand; PAM type: YTN; PAM sequence: CTC
  source 1..20: mol_type = other DNA
agaattggaaaaaactactt

SEQ ID NO: 57748 - DNA, 20 bp, synthetic construct
  misc_feature 1..20: note = Description of Artificial Sequence: Synthetic oligonucleotide
  misc_feature 1..20: note = Target: SCN10A; (+) strand; PAM type: YTN; PAM sequence: TTG
  source 1..20: mol_type = other DNA
gaaaaaactactttaaagtt

SEQ ID NO: 57749 - DNA, 20 bp, synthetic construct
  misc_feature 1..20: note = Description of Artificial Sequence: Synthetic oligonucleotide
  misc_feature 1..20: note = Target: SCN10A; (+) strand; PAM type: YTN; PAM sequence: CTA
  source 1..20: mol_type = other DNA
ctttaaagttcatacggaac

SEQ ID NO: 57750 - DNA, 20 bp, synthetic construct
  misc_feature 1..20: note = Description of Artificial Sequence: Synthetic oligonucleotide
  misc_feature 1..20: note = Target: SCN10A; (+) strand; PAM type: YTN; PAM sequence: CTT
  source 1..20: mol_type = other DNA
taaagttcatacggaaccaa

SEQ ID NO: 57751 - DNA, 20 bp, synthetic construct
  misc_feature 1..20: note = Description of Artificial Sequence: Synthetic oligonucleotide
  misc_feature 1..20: note = Target: SCN10A; (+) strand; PAM type: YTN; PAM sequence: TTT
  source 1..20: mol_type = other DNA
aaagttcatacggaaccaaa

SEQ ID NO: 57752 - DNA, 20 bp, synthetic construct
  misc_feature 1..20: note = Description of Artificial Sequence: Synthetic oligonucleotide
  misc_feature 1..20: note = Target: SCN10A; (+) strand; PAM type: YTN; PAM sequence: TTA
  source 1..20: mol_type = other DNA
aagttcatacggaaccaaaa

SEQ ID NO: 57753 - DNA, 20 bp, synthetic construct
  misc_feature 1..20: note = Description of Artificial Sequence: Synthetic oligonucleotide
  misc_feature 1..20: note = Target: SCN10A; (+) strand; PAM type: YTN; PAM sequence: TTC
  source 1..20: mol_type = other DNA
atacggaaccaaaaaagagc

SEQ ID NO: 57754 - DNA, 20 bp, synthetic construct
  misc_feature 1..20: note = Description of Artificial Sequence: Synthetic oligonucleotide
  misc_feature 1..20: note = Target: SCN10A; (+) strand; PAM type: YTN; PAM sequence: TTG
  source 1..20: mol_type = other DNA
ccaagtcaatcctaatcctg

SEQ ID NO: 57755 - DNA, 20 bp, synthetic construct
  misc_feature 1..20: note = Description of Artificial Sequence: Synthetic oligonucleotide
  misc_feature 1..20: note = Target: SCN10A; (+) strand; PAM type: YTN; PAM sequence: CTA
  source 1..20: mol_type = other DNA
atcctgttttttttttaacc

SEQ ID NO: 57756 - DNA, 20 bp, synthetic construct
  misc_feature 1..20: note = Description of Artificial Sequence: Synthetic oligonucleotide
  misc_feature 1..20: note = Target: SCN10A; (+) strand; PAM type: YTN; PAM sequence: CTG
  source 1..20: mol_type = other DNA
ttttttttttaaccttactt

SEQ ID NO: 57757 - DNA, 20 bp, synthetic construct
  misc_feature 1..20: note = Description of Artificial Sequence: Synthetic oligonucleotide
  misc_feature 1..20: note = Target: SCN10A; (+) strand; PAM type: YTN; PAM sequence: TTT
  source 1..20: mol_type = other DNA
tttttttaaccttacttttt

SEQ ID NO: 57758 - DNA, 20 bp, synthetic construct
  misc_feature 1..20: note = Description of Artificial Sequence: Synthetic oligonucleotide
  misc_feature 1..20: note = Target: SCN10A; (+) strand; PAM type: YTN; PAM sequence: TTT
  source 1..20: mol_type = other DNA
ttttttaaccttactttttt

SEQ ID NO: 57759 - DNA, 20 bp, synthetic construct
  misc_feature 1..20: note = Description of Artificial Sequence: Synthetic oligonucleotide
  misc_feature 1..20: note = Target: SCN10A; (+) strand; PAM type: YTN; PAM sequence: TTT
  source 1..20: mol_type = other DNA
tttttaaccttacttttttg

SEQ ID NO: 57760 - DNA, 20 bp, synthetic construct
  misc_feature 1..20: note = Description of Artificial Sequence: Synthetic oligonucleotide
  misc_feature 1..20: note = Target: SCN10A; (+) strand; PAM type: YTN; PAM sequence: TTT
  source 1..20: mol_type = other DNA
ttttaaccttacttttttga

SEQ ID NO: 57761 - DNA, 20 bp, synthetic construct
  misc_feature 1..20: note = Description of Artificial Sequence: Synthetic oligonucleotide
  misc_feature 1..20: note = Target: SCN10A; (+) strand; PAM type: YTN; PAM sequence: TTT
  source 1..20: mol_type = other DNA
tttaaccttacttttttgat

SEQ ID NO: 57762 - DNA, 20 bp, synthetic construct
  misc_feature 1..20: note = Description of Artificial Sequence: Synthetic oligonucleotide
  misc_feature 1..20: note = Target: SCN10A; (+) strand; PAM type: YTN; PAM sequence: TTT
  source 1..20: mol_type = other DNA
ttaaccttacttttttgatt

SEQ ID NO: 57763 - DNA, 20 bp, synthetic construct
  misc_feature 1..20: note = Description of Artificial Sequence: Synthetic oligonucleotide
  misc_feature 1..20: note = Target: SCN10A; (+) strand; PAM type: YTN; PAM sequence: TTT
  source 1..20: mol_type = other DNA
taaccttacttttttgattg

SEQ ID NO: 57764 - DNA, 20 bp, synthetic construct
  misc_feature 1..20: note = Description of Artificial Sequence: Synthetic oligonucleotide
  misc_feature 1..20: note = Target: SCN10A; (+) strand; PAM type: YTN; PAM sequence: TTT
  source 1..20: mol_type = other DNA
aaccttacttttttgattgg

SEQ ID NO: 57765 - DNA, 20 bp, synthetic construct
  misc_feature 1..20: note = Description of Artificial Sequence: Synthetic oligonucleotide
  misc_feature 1..20: note = Target: SCN10A; (+) strand; PAM type: YTN; PAM sequence: TTA
  source 1..20: mol_type = other DNA
accttacttttttgattggc

SEQ ID NO: 57766 - DNA, 20 bp, synthetic construct
  misc_feature 1..20: note = Description of Artificial Sequence: Synthetic oligonucleotide
  misc_feature 1..20: note = Target: SCN10A; (+) strand; PAM type: YTN; PAM sequence: CTT
  source 1..20: mol_type = other DNA
acttttttgattggctaatt

SEQ ID NO: 57767 - DNA, 20 bp, synthetic construct
  misc_feature 1..20: note = Description of Artificial Sequence: Synthetic oligonucleotide
  misc_feature 1..20: note = Target: SCN10A; (+) strand; PAM type: YTN; PAM sequence: TTA
  source 1..20: mol_type = other DNA
cttttttgattggctaattg

SEQ ID NO: 57768 - DNA, 20 bp, synthetic construct
  misc_feature 1..20: note = Description of Artificial Sequence: Synthetic oligonucleotide
  misc_feature 1..20: note = Target: SCN10A; (+) strand; PAM type: YTN; PAM sequence: CTT
  source 1..20: mol_type = other DNA
ttttgattggctaattgttt

SEQ ID NO: 57769 - DNA, 20 bp, synthetic construct
  misc_feature 1..20: note = Description of Artificial Sequence: Synthetic oligonucleotide
  misc_feature 1..20: note = Target: SCN10A; (+) strand; PAM type: YTN; PAM sequence: TTT
  source 1..20: mol_type = other DNA
tttgattggctaattgtttc

SEQ ID NO: 57770 - DNA, 20 bp, synthetic construct
  misc_feature 1..20: note = Description of Artificial Sequence: Synthetic oligonucleotide
  misc_feature 1..20: note = Target: SCN10A; (+) strand; PAM type: YTN; PAM sequence: TTT
  source 1..20: mol_type = other DNA
ttgattggctaattgtttct

SEQ ID NO: 57771 - DNA, 20 bp, synthetic construct
  misc_feature 1..20: note = Description of Artificial Sequence: Synthetic oligonucleotide
  misc_feature 1..20: note = Target: SCN10A; (+) strand; PAM type: YTN; PAM sequence: TTT
  source 1..20: mol_type = other DNA
tgattggctaattgtttctt

SEQ ID NO: 57772 - DNA, 20 bp, synthetic construct
  misc_feature 1..20: note = Description of Artificial Sequence: Synthetic oligonucleotide
  misc_feature 1..20: note = Target: SCN10A; (+) strand; PAM type: YTN; PAM sequence: TTT
  source 1..20: mol_type = other DNA
gattggctaattgtttctta

SEQ ID NO: 57773 - DNA, 20 bp, synthetic construct
  misc_feature 1..20: note = Description of Artificial Sequence: Synthetic oligonucleotide
  misc_feature 1..20: note = Target: SCN10A; (+) strand; PAM type: YTN; PAM sequence: TTG
  source 1..20: mol_type = other DNA
attggctaattgtttcttag

SEQ ID NO: 57774 - DNA, 20 bp, synthetic construct
  misc_feature 1..20: note = Description of Artificial Sequence: Synthetic oligonucleotide
  misc_feature 1..20: note = Target: SCN10A; (+) strand; PAM type: YTN; PAM sequence: TTG
  source 1..20: mol_type = other DNA
gctaattgtttcttagcata

SEQ ID NO: 57775 - DNA, 20 bp, synthetic construct
  misc_feature 1..20: note = Description of Artificial Sequence: Synthetic oligonucleotide
  misc_feature 1..20: note = Target: SCN10A; (+) strand; PAM type: YTN; PAM sequence: CTA
  source 1..20: mol_type = other DNA
attgtttcttagcatagttc

SEQ ID NO: 57776 - DNA, 20 bp, synthetic construct
  misc_feature 1..20: note = Description of Artificial Sequence: Synthetic oligonucleotide
  misc_feature 1..20: note = Target: SCN10A; (+) strand; PAM type: YTN; PAM sequence: TTG
  source 1..20: mol_type = other DNA
tttcttagcatagttccccc

SEQ ID NO: 57777 - DNA, 20 bp, synthetic construct
  misc_feature 1..20: note = Description of Artificial Sequence: Synthetic oligonucleotide
  misc_feature 1..20: note = Target: SCN10A; (+) strand; PAM type: YTN; PAM sequence: TTT
  source 1..20: mol_type = other DNA
cttagcatagttcccccttg

SEQ ID NO: 57778 - DNA, 20 bp, synthetic construct
  misc_feature 1..20: note = Description of Artificial Sequence: Synthetic oligonucleotide
  misc_feature 1..20: note = Target: SCN10A; (+) strand; PAM type: YTN; PAM sequence: TTC
  source 1..20: mol_type = other DNA
ttagcatagttcccccttgt

SEQ ID NO: 57779 - DNA, 20 bp, synthetic construct
  misc_feature 1..20: note = Description of Artificial Sequence: Synthetic oligonucleotide
  misc_feature 1..20: note = Target: SCN10A; (+) strand; PAM type: YTN; PAM sequence: CTT
  source 1..20: mol_type = other DNA
agcatagttcccccttgtcc

SEQ ID NO: 57780 - DNA, 20 bp, synthetic construct
  misc_feature 1..20: note = Description of Artificial Sequence: Synthetic oligonucleotide
  misc_feature 1..20: note = Target: SCN10A; (+) strand; PAM type: YTN; PAM sequence: TTA
  source 1..20: mol_type = other DNA
gcatagttcccccttgtcct

SEQ ID NO: 57781 - DNA, 20 bp, synthetic construct
  misc_feature 1..20: note = Description of Artificial Sequence: Synthetic oligonucleotide
  misc_feature 1..20: note = Target: SCN10A; (+) strand; PAM type: YTN; PAM sequence: TTC
  source 1..20: mol_type = other DNA
ccccttgtcctactttggaa

SEQ ID NO: 57782 - DNA, 20 bp, synthetic construct
  misc_feature 1..20: note = Description of Artificial Sequence: Synthetic oligonucleotide
  misc_feature 1..20: note = Target: SCN10A; (+) strand; PAM type: YTN; PAM sequence: CTT
  source 1..20: mol_type = other DNA
gtcctactttggaaatgata

SEQ ID NO: 57783 - DNA, 20 bp, synthetic construct
  misc_feature 1..20: note = Description of Artificial Sequence: Synthetic oligonucleotide
  misc_feature 1..20: note = Target: SCN10A; (+) strand; PAM type: YTN; PAM sequence: TTG
  source 1..20: mol_type = other DNA
tcctactttggaaatgatat

SEQ ID NO: 57784 - DNA, 20 bp, synthetic construct
  misc_feature 1..20: note = Description of Artificial Sequence: Synthetic oligonucleotide
  misc_feature 1..20: note = Target: SCN10A; (+) strand; PAM type: YTN; PAM sequence: CTA
  source 1..20: mol_type = other DNA
ctttggaaatgatatactct

SEQ ID NO: 57785 - DNA, 20 bp, synthetic construct
  misc_feature 1..20: note = Description of Artificial Sequence: Synthetic oligonucleotide
  misc_feature 1..20: note = Target: SCN10A; (+) strand; PAM type: YTN; PAM sequence: CTT
  source 1..20: mol_type = other DNA
tggaaatgatatactctatt

SEQ ID NO: 57786 - DNA, 20 bp, synthetic construct
  misc_feature 1..20: note = Description of Artificial Sequence: Synthetic oligonucleotide
  misc_feature 1..20: note = Target: SCN10A; (+) strand; PAM type: YTN; PAM sequence: TTT
  source 1..20: mol_type = other DNA
ggaaatgatatactctattt

SEQ ID NO: 57787 - DNA, 20 bp, synthetic construct
  misc_feature 1..20: note = Description of Artificial Sequence: Synthetic oligonucleotide
  misc_feature 1..20: note = Target: SCN10A; (+) strand; PAM type: YTN; PAM sequence: TTG
  source 1..20: mol_type = other DNA
gaaatgatatactctatttc

SEQ ID NO: 57788 - DNA, 20 bp, synthetic construct
  misc_feature 1..20: note = Description of Artificial Sequence: Synthetic oligonucleotide
  misc_feature 1..20: note = Target: SCN10A; (+) strand; PAM type: YTN; PAM sequence: CTC
  source 1..20: mol_type = other DNA
tatttctgatttgttactgg

SEQ ID NO: 57789 - DNA, 20 bp, synthetic construct
  misc_feature 1..20: note = Description of Artificial Sequence: Synthetic oligonucleotide
  misc_feature 1..20: note = Target: SCN10A; (+) strand; PAM type: YTN; PAM sequence: CTA
  source 1..20: mol_type = other DNA
tttctgatttgttactggca

SEQ ID NO: 57790 - DNA, 20 bp, synthetic construct
  misc_feature 1..20: note = Description of Artificial Sequence: Synthetic oligonucleotide
  misc_feature 1..20: note = Target: SCN10A; (+) strand; PAM type: YTN; PAM sequence: TTT
  source 1..20: mol_type = other DNA
ctgatttgttactggcaacc

SEQ ID NO: 57791 - DNA, 20 bp, synthetic construct
  misc_feature 1..20: note = Description of Artificial Sequence: Synthetic oligonucleotide
  misc_feature 1..20: note = Target: SCN10A; (+) strand; PAM type: YTN; PAM sequence: TTC
  source 1..20: mol_type = other DNA
tgatttgttactggcaaccc

SEQ ID NO: 57792 - DNA, 20 bp, synthetic construct
  misc_feature 1..20: note = Description of Artificial Sequence: Synthetic oligonucleotide
  misc_feature 1..20: note = Target: SCN10A; (+) strand; PAM type: YTN; PAM sequence: CTG
  source 1..20: mol_type = other DNA
atttgttactggcaacccta

SEQ ID NO: 57793 - DNA, 20 bp, synthetic construct
  misc_feature 1..20: note = Description of Artificial Sequence: Synthetic oligonucleotide
  misc_feature 1..20: note = Target: SCN10A; (+) strand; PAM type: YTN; PAM sequence: TTT
  source 1..20: mol_type = other DNA
gttactggcaaccctaataa

SEQ ID NO: 57794 - DNA, 20 bp, synthetic construct
  misc_feature 1..20: note = Description of Artificial Sequence: Synthetic oligonucleotide
  misc_feature 1..20: note = Target: SCN10A; (+) strand; PAM type: YTN; PAM sequence: TTG
  source 1..20: mol_type = other DNA
ttactggcaaccctaataat

SEQ ID NO: 57795 - DNA, 20 bp, synthetic construct
  misc_feature 1..20: note = Description of Artificial Sequence: Synthetic oligonucleotide
  misc_feature 1..20: note = Target: SCN10A; (+) strand; PAM type: YTN; PAM sequence: TTA
  source 1..20: mol_type = other DNA
ctggcaaccctaataattaa

SEQ ID NO: 57796 - DNA, 20 bp, synthetic construct
  misc_feature 1..20: note = Description of Artificial Sequence: Synthetic oligonucleotide
  misc_feature 1..20: note = Target: SCN10A; (+) strand; PAM type: YTN; PAM sequence: CTG
  source 1..20: mol_type = other DNA
gcaaccctaataattaagtc

SEQ ID NO: 57797 - DNA, 20 bp, synthetic construct
  misc_feature 1..20: note = Description of Artificial Sequence: Synthetic oligonucleotide
  misc_feature 1..20: note = Target: SCN10A; (+) strand; PAM type: YTN; PAM sequence: CTA
  source 1..20: mol_type = other DNA
ataattaagtcattcattct

SEQ ID NO: 57798 - DNA, 20 bp, synthetic construct
  misc_feature 1..20: note = Description of Artificial Sequence: Synthetic oligonucleotide
  misc_feature 1..20: note = Target: SCN10A; (+) strand; PAM type: YTN; PAM sequence: TTA
  source 1..20: mol_type = other DNA
agtcattcattcttaagtta

SEQ ID NO: 57799 - DNA, 20 bp, synthetic construct
  misc_feature 1..20: note = Description of Artificial Sequence: Synthetic oligonucleotide
  misc_feature 1..20: note = Target: SCN10A; (+) strand; PAM type: YTN; PAM sequence: TTC
  source 1..20: mol_type = other DNA
attcttaagttacacagtct

SEQ ID NO: 57800 - DNA, 20 bp, synthetic construct
  misc_feature 1..20: note = Description of Artificial Sequence: Synthetic oligonucleotide
  misc_feature 1..20: note = Target: SCN10A; (+) strand; PAM type: YTN; PAM sequence: TTC
  source 1..20: mol_type = other DNA
ttaagttacacagtctaatg

SEQ ID NO: 57801 - DNA, 20 bp, synthetic construct
  misc_feature 1..20: note = Description of Artificial Sequence: Synthetic oligonucleotide
  misc_feature 1..20: note = Target: SCN10A; (+) strand; PAM type: YTN; PAM sequence: CTT
  source 1..20: mol_type = other DNA
aagttacacagtctaatgat

SEQ ID NO: 57802 - DNA, 20 bp, synthetic construct
  misc_feature 1..20: note = Description of Artificial Sequence: Synthetic oligonucleotide
  misc_feature 1..20: note = Target: SCN10A; (+) strand; PAM type: YTN; PAM sequence: TTA
  source 1..20: mol_type = other DNA
agttacacagtctaatgata

SEQ ID NO: 57803 - DNA, 20 bp, synthetic construct
  misc_feature 1..20: note = Description of Artificial Sequence: Synthetic oligonucleotide
  misc_feature 1..20: note = Target: SCN10A; (+) strand; PAM type: YTN; PAM sequence: TTA
  source 1..20: mol_type = other DNA
cacagtctaatgataataaa

SEQ ID NO: 57804 - DNA, 20 bp, synthetic construct
  misc_feature 1..20: note = Description of Artificial Sequence: Synthetic oligonucleotide
  misc_feature 1..20: note = Target: SCN10A; (+) strand; PAM type: YTN; PAM sequence: CTA
  source 1..20: mol_type = other DNA
atgataataaaaacctttac

SEQ ID NO: 57805 - DNA, 20 bp, synthetic construct
  misc_feature 1..20: note = Description of Artificial Sequence: Synthetic oligonucleotide
  misc_feature 1..20: note = Target: SCN10A; (+) strand; PAM type: YTN; PAM sequence: CTT
  source 1..20: mol_type = other DNA
tacttttttttactttttag

SEQ ID NO: 57806 - DNA, 20 bp, synthetic construct
  misc_feature 1..20: note = Description of Artificial Sequence: Synthetic oligonucleotide
  misc_feature 1..20: note = Target: SCN10A; (+) strand; PAM type: YTN; PAM sequence: TTT
  source 1..20: mol_type = other DNA
acttttttttactttttagc

SEQ ID NO: 57807 - DNA, 20 bp, synthetic construct
  misc_feature 1..20: note = Description of Artificial Sequence: Synthetic oligonucleotide
  misc_feature 1..20: note = Target: SCN10A; (+) strand; PAM type: YTN; PAM sequence: TTA
  source 1..20: mol_type = other DNA
cttttttttactttttagca

SEQ ID NO: 57808 - DNA, 20 bp, synthetic construct
  misc_feature 1..20: note = Description of Artificial Sequence: Synthetic oligonucleotide
  misc_feature 1..20: note = Target: SCN10A; (+) strand; PAM type: YTN; PAM sequence: CTT
  source 1..20: mol_type = other DNA
ttttttactttttagcatta

SEQ ID NO: 57809 - DNA, 20 bp, synthetic construct
  misc_feature 1..20: note = Description of Artificial Sequence: Synthetic oligonucleotide
  misc_feature 1..20: note = Target: SCN10A; (+) strand; PAM type: YTN; PAM sequence: TTT
  source 1..20: mol_type = other DNA
tttttactttttagcattag

SEQ ID NO: 57810 - DNA, 20 bp, synthetic construct
  misc_feature 1..20: note = Description of Artificial Sequence: Synthetic oligonucleotide
  misc_feature 1..20: note = Target: SCN10A; (+) strand; PAM type: YTN; PAM sequence: TTT
  source 1..20: mol_type = other DNA
ttttactttttagcattagg

SEQ ID NO: 57811 - DNA, 20 bp, synthetic construct
  misc_feature 1..20: note = Description of Artificial Sequence: Synthetic oligonucleotide
  misc_feature 1..20: note = Target: SCN10A; (+) strand; PAM type: YTN; PAM sequence: TTT
  source 1..20: mol_type = other DNA
tttactttttagcattagga

SEQ ID NO: 57812 - DNA, 20 bp, synthetic construct
  misc_feature 1..20: note = Description of Artificial Sequence: Synthetic oligonucleotide
  misc_feature 1..20: note = Target: SCN10A; (+) strand; PAM type: YTN; PAM sequence: TTT
  source 1..20: mol_type = other DNA
ttactttttagcattaggag

SEQ ID NO: 57813 - DNA, 20 bp, synthetic construct
  misc_feature 1..20: note = Description of Artificial Sequence: Synthetic oligonucleotide
  misc_feature 1..20: note = Target: SCN10A; (+) strand; PAM type: YTN; PAM sequence: TTT
  source 1..20: mol_type = other DNA
tactttttagcattaggaga

SEQ ID NO: 57814 - DNA, 20 bp, synthetic construct
  misc_feature 1..20: note = Description of Artificial Sequence: Synthetic oligonucleotide
  misc_feature 1..20: note = Target: SCN10A; (+) strand; PAM type: YTN; PAM sequence: TTT
  source 1..20: mol_type = other DNA
actttttagcattaggagaa

SEQ ID NO: 57815 - DNA, 20 bp, synthetic construct
  misc_feature 1..20: note = Description of Artificial Sequence: Synthetic oligonucleotide
  misc_feature 1..20: note = Target: SCN10A; (+) strand; PAM type: YTN; PAM sequence: TTA
  source 1..20: mol_type = other DNA
ctttttagcattaggagaaa

SEQ ID NO: 57816 - DNA, 20 bp, synthetic construct
  misc_feature 1..20: note = Description of Artificial Sequence: Synthetic oligonucleotide
  misc_feature 1..20: note = Target: SCN10A; (+) strand; PAM type: YTN; PAM sequence: CTT
  source 1..20: mol_type = other DNA
tttagcattaggagaaatac

SEQ ID NO: 57817 - DNA, 20 bp, synthetic construct
  misc_feature 1..20: note = Description of Artificial Sequence: Synthetic oligonucleotide
  misc_feature 1..20: note = Target: SCN10A; (+) strand; PAM type: YTN; PAM sequence: TTT
  source 1..20: mol_type = other DNA
ttagcattaggagaaatacc

SEQ ID NO: 57818 - DNA, 20 bp, synthetic construct
  misc_feature 1..20: note = Description of Artificial Sequence: Synthetic oligonucleotide
  misc_feature 1..20: note = Target: SCN10A; (+) strand; PAM type: YTN; PAM sequence: TTT
  source 1..20: mol_type = other DNA
tagcattaggagaaatacct

SEQ ID NO: 57819 - DNA, 20 bp, synthetic construct
  misc_feature 1..20: note = Description of Artificial Sequence: Synthetic oligonucleotide
  misc_feature 1..20: note = Target: SCN10A; (+) strand; PAM type: YTN; PAM sequence: TTT
  source 1..20: mol_type = other DNA
agcattaggagaaataccta

SEQ ID NO: 57820 - DNA, 20 bp, synthetic construct
  misc_feature 1..20: note = Description of Artificial Sequence: Synthetic oligonucleotide
  misc_feature 1..20: note = Target: SCN10A; (+) strand; PAM type: YTN; PAM sequence: TTA
  source 1..20: mol_type = other DNA
gcattaggagaaatacctaa

SEQ ID NO: 57821 - DNA, 20 bp, synthetic construct
  misc_feature 1..20: note = Description of Artificial Sequence: Synthetic oligonucleotide
  misc_feature 1..20: note = Target: SCN10A; (+) strand; PAM type: YTN; PAM sequence: TTA
  source 1..20: mol_type = other DNA
ggagaaatacctaatgtaga

SEQ ID NO: 57822 - DNA, 20 bp, synthetic construct
  misc_feature 1..20: note = Description of Artificial Sequence: Synthetic oligonucleotide
  misc_feature 1..20: note = Target: SCN10A; (+) strand; PAM type: YTN; PAM sequence: CTA
  source 1..20: mol_type = other DNA
atgtagatgacgggttgatg

SEQ ID NO: 57823 - DNA, 20 bp, synthetic construct
  misc_feature 1..20: note = Description of Artificial Sequence: Synthetic oligonucleotide
  misc_feature 1..20: note = Target: SCN10A; (+) strand; PAM type: YTN; PAM sequence: TTG
  source 1..20: mol_type = other DNA
atgggtgcagcaaaccaaca

SEQ ID NO: 57824 - DNA, 20 bp, synthetic construct
  misc_feature 1..20: note = Description of Artificial Sequence: Synthetic oligonucleotide
  misc_feature 1..20: note = Target: SCN10A; (+) strand; PAM type: YTN; PAM sequence: CTA
  source 1..20: mol_type = other DNA
tataacaaacatgtacattg

SEQ ID NO: 57825 - DNA, 20 bp, synthetic construct
  misc_feature 1..20: note = Description of Artificial Sequence: Synthetic oligonucleotide
  misc_feature 1..20: note = Target: SCN10A; (+) strand; PAM type: YTN; PAM sequence: TTG
  source 1..20: mol_type = other DNA
tgcacatgtaccctagaatt

SEQ ID NO: 57826 - DNA, 20 bp, synthetic construct
  misc_feature 1..20: note = Description of Artificial Sequence: Synthetic oligonucleotide
  misc_feature 1..20: note = Target: SCN10A; (+) strand; PAM type: YTN; PAM sequence: CTA
  source 1..20: mol_type = other DNA
gaatttaaagtataatttta

SEQ ID NO: 57827 - DNA, 20 bp, synthetic construct
  misc_feature 1..20: note = Description of Artificial Sequence: Synthetic oligonucleotide
  misc_feature 1..20: note = Target: SCN10A; (+) strand; PAM type: YTN; PAM sequence: TTT
  source 1..20: mol_type = other DNA
aaagtataattttaaaaaaa

SEQ ID NO: 57828 - DNA, 20 bp, synthetic construct
  misc_feature 1..20: note = Description of Artificial Sequence: Synthetic oligonucleotide
  misc_feature 1..20: note = Target: SCN10A; (+) strand; PAM type: YTN; PAM sequence: TTA
  source 1..20: mol_type = other DNA
aagtataattttaaaaaaag

SEQ ID NO: 57829 - DNA, 20 bp, synthetic construct
  misc_feature 1..20: note = Description of Artificial Sequence: Synthetic oligonucleotide
  misc_feature 1..20: note = Target: SCN10A; (+) strand; PAM type: YTN; PAM sequence: TTT
  source 1..20: mol_type = other DNA
taaaaaaagaaaaaaaagga

SEQ ID NO: 57830 - DNA, 20 bp, synthetic construct
  misc_feature 1..20: note = Description of Artificial Sequence: Synthetic oligonucleotide
  misc_feature 1..20: note = Target: SCN10A; (+) strand; PAM type: YTN; PAM sequence: TTT
  source 1..20: mol_type = other DNA
aaaaaaagaaaaaaaaggaa

SEQ ID NO: 57831 - DNA, 20 bp, synthetic construct
  misc_feature 1..20: note = Description of Artificial Sequence: Synthetic oligonucleotide
  misc_feature 1..20: note = Target: SCN10A; (+) strand; PAM type: YTN; PAM sequence: TTA
  source 1..20: mol_type = other DNA
aaaaaagaaaaaaaaggaat

SEQ ID NO: 57832 - DNA, 20 bp, synthetic construct
  misc_feature 1..20: note = Description of Artificial Sequence: Synthetic oligonucleotide
  misc_feature 1..20: note = Target: SCN10A; (+) strand; PAM type: YTN; PAM sequence: TTG
  source 1..20: mol_type = other DNA
tctttttaatttatttgtaa

SEQ ID NO: 57833 - DNA, 20 bp, synthetic construct
  misc_feature 1..20: note = Description of Artificial Sequence: Synthetic oligonucleotide
  misc_feature 1..20: note = Target: SCN10A; (+) strand; PAM type: YTN; PAM sequence: CTT
  source 1..20: mol_type = other DNA
tttaatttatttgtaaacct

SEQ ID NO: 57834 - DNA, 20 bp, synthetic construct
  misc_feature 1..20: note = Description of Artificial Sequence: Synthetic oligonucleotide
  misc_feature 1..20: note = Target: SCN10A; (+) strand; PAM type: YTN; PAM sequence: TTT
  source 1..20: mol_type = other DNA
ttaatttatttgtaaacctt

SEQ ID NO: 57835 - DNA, 20 bp, synthetic construct
  misc_feature 1..20: note = Description of Artificial Sequence: Synthetic oligonucleotide
  misc_feature 1..20: note = Target: SCN10A; (+) strand; PAM type: YTN; PAM sequence: TTT
  source 1..20: mol_type = other DNA
taatttatttgtaaaccttc

SEQ ID NO: 57836 - DNA, 20 bp, synthetic construct
  misc_feature 1..20: note = Description of Artificial Sequence: Synthetic oligonucleotide
  misc_feature 1..20: note = Target: SCN10A; (+) strand; PAM type: YTN; PAM sequence: TTT
  source 1..20: mol_type = other DNA
aatttatttgtaaaccttca

SEQ ID NO: 57837 - DNA, 20 bp, synthetic construct
  misc_feature 1..20: note = Description of Artificial Sequence: Synthetic oligonucleotide
  misc_feature 1..20: note = Target: SCN10A; (+) strand; PAM type: YTN; PAM sequence: TTA
  source 1..20: mol_type = other DNA
atttatttgtaaaccttcag

SEQ ID NO: 57838 - DNA, 20 bp, synthetic construct
  misc_feature 1..20: note = Description of Artificial Sequence: Synthetic oligonucleotide
  misc_feature 1..20: note = Target: SCN10A; (+) strand; PAM type: YTN; PAM sequence: TTT
  source 1..20: mol_type = other DNA
atttgtaaaccttcagcctg

SEQ ID NO: 57839 - DNA, 20 bp, synthetic construct
  misc_feature 1..20: note = Description of Artificial Sequence: Synthetic oligonucleotide
  misc_feature 1..20: note = Target: SCN10A; (+) strand; PAM type: YTN; PAM sequence: TTA
  source 1..20: mol_type = other DNA
tttgtaaaccttcagcctgt

SEQ ID NO: 57840 - DNA, 20 bp, synthetic construct
  misc_feature 1..20: note = Description of Artificial Sequence: Synthetic oligonucleotide
  misc_feature 1..20: note = Target: SCN10A; (+) strand; PAM type: YTN; PAM sequence: TTT
  source 1..20: mol_type = other DNA
gtaaaccttcagcctgtgtt

SEQ ID NO: 57841 - DNA, 20 bp, synthetic construct
  misc_feature 1..20: note = Description of Artificial Sequence: Synthetic oligonucleotide
  misc_feature 1..20: note = Target: SCN10A; (+) strand; PAM type: YTN; PAM sequence: TTG
  source 1..20: mol_type = other DNA
taaaccttcagcctgtgttc

SEQ ID NO: 57842 - DNA, 20 bp, synthetic construct
  misc_feature 1..20: note = Description of Artificial Sequence: Synthetic oligonucleotide
  misc_feature 1..20: note = Target: SCN10A; (+) strand; PAM type: YTN; PAM sequence: CTT
  source 1..20: mol_type = other DNA
cagcctgtgttcagctccag

SEQ ID NO: 57843 - DNA, 20 bp, synthetic construct
  misc_feature 1..20: note = Description of Artificial Sequence: Synthetic oligonucleotide
  misc_feature 1..20: note = Target: SCN10A; (+) strand; PAM type: YTN; PAM sequence: TTC
  source 1..20: mol_type = other DNA
agcctgtgttcagctccaga

SEQ ID NO: 57844 - DNA, 20 bp, synthetic construct
  misc_feature 1..20: note = Description of Artificial Sequence: Synthetic oligonucleotide
  misc_feature 1..20: note = Target: SCN10A; (+) strand; PAM type: YTN; PAM sequence: CTG
  source 1..20: mol_type = other DNA
tgttcagctccagactgaag

SEQ ID NO: 57845 - DNA, 20 bp, synthetic construct
  misc_feature 1..20: note = Description of Artificial Sequence: Synthetic oligonucleotide
  misc_feature 1..20: note = Target: SCN10A; (+) strand; PAM type: YTN; PAM sequence: TTC
  source 1..20: mol_type = other DNA
agctccagactgaagatctg

SEQ ID NO: 57846 - DNA, 20 bp, synthetic construct
  misc_feature 1..20: note = Description of Artificial Sequence: Synthetic oligonucleotide
  misc_feature 1..20: note = Target: SCN10A; (+) strand; PAM type: YTN; PAM sequence: CTC
  source 1..20: mol_type = other DNA
cagactgaagatctgtctta

SEQ ID NO: 57847 - DNA, 20 bp, synthetic construct
  misc_feature 1..20: note = Description of Artificial Sequence: Synthetic oligonucleotide
  misc_feature 1..20: note = Target: SCN10A; (+) strand; PAM type: YTN; PAM sequence: CTG
  source 1..20: mol_type = other DNA
aagatctgtcttatcttgca

SEQ ID NO: 57848 - DNA, 20 bp, synthetic construct
  misc_feature 1..20: note = Description of Artificial Sequence: Synthetic oligonucleotide
  misc_feature 1..20: note = Target: SCN10A; (+) strand; PAM type: YTN; PAM sequence: CTG
  source 1..20: mol_type = other DNA
tcttatcttgcatccctaac

SEQ ID NO: 57849 - DNA, 20 bp, synthetic construct
  misc_feature 1..20: note = Description of Artificial Sequence: Synthetic oligonucleotide
  misc_feature 1..20: note = Target: SCN10A; (+) strand; PAM type: YTN; PAM sequence: CTT
  source 1..20: mol_type = other DNA
atcttgcatccctaacactt

SEQ ID NO: 57850 - DNA, 20 bp, synthetic construct
  misc_feature 1..20: note = Description of Artificial Sequence: Synthetic oligonucleotide
  misc_feature 1..20: note = Target: SCN10A; (+) strand; PAM type: YTN; PAM sequence: TTA
  source 1..20: mol_type = other DNA
tcttgcatccctaacactta

SEQ ID NO: 57851 - DNA, 20 bp, synthetic construct
  misc_feature 1..20: note = Description of Artificial Sequence: Synthetic oligonucleotide
  misc_feature 1..20: note = Target: SCN10A; (+) strand; PAM type: YTN; PAM sequence: CTT
  source 1..20: mol_type = other DNA
gcatccctaacacttaggaa

SEQ ID NO: 57852 - DNA, 20 bp, synthetic construct
  misc_feature 1..20: note = Description of Artificial Sequence: Synthetic oligonucleotide
  misc_feature 1..20: note = Target: SCN10A; (+) strand; PAM type: YTN; PAM sequence: TTG
  source 1..20: mol_type = other DNA
catccctaacacttaggaaa

SEQ ID NO: 57853 - DNA, 20 bp, synthetic construct
  misc_feature 1..20: note = Description of Artificial Sequence: Synthetic oligonucleotide
  misc_feature 1..20: note = Target: SCN10A; (+) strand; PAM type: YTN; PAM sequence: CTA
  source 1..20: mol_type = other DNA
acacttaggaaagtgacttc

SEQ ID NO: 57854 - DNA, 20 bp, synthetic construct
  misc_feature 1..20: note = Description of Artificial Sequence: Synthetic oligonucleotide
  misc_feature 1..20: note = Target: SCN10A; (+) strand; PAM type: YTN; PAM sequence: CTT
  source 1..20: mol_type = other DNA
aggaaagtgacttcactttt

SEQ ID NO: 57855 - DNA, 20 bp, synthetic construct
  misc_feature 1..20: note = Description of Artificial Sequence: Synthetic oligonucleotide
  misc_feature 1..20: note = Target: SCN10A; (+) strand; PAM type: YTN; PAM sequence: TTA
  source 1..20: mol_type = other DNA
ggaaagtgacttcacttttg

SEQ ID NO: 57856 - DNA, 20 bp, synthetic construct
  misc_feature 1..20: note = Description of Artificial Sequence: Synthetic oligonucleotide
  misc_feature 1..20: note = Target: SCN10A; (+) strand; PAM type: YTN; PAM sequence: CTT
  source 1..20: mol_type = other DNA
cacttttgtcttaagcaaat

SEQ ID NO: 57857 - DNA, 20 bp, synthetic construct
  misc_feature 1..20: note = Description of Artificial Sequence: Synthetic oligonucleotide
  misc_feature 1..20: note = Target: SCN10A; (+) strand; PAM type: YTN; PAM sequence: TTC
  source 1..20: mol_type = other DNA
acttttgtcttaagcaaatg

SEQ ID NO: 57858 - DNA, 20 bp, synthetic construct
  misc_feature 1..20: note = Description of Artificial Sequence: Synthetic oligonucleotide
  misc_feature 1..20: note = Target: SCN10A; (+) strand; PAM type: YTN; PAM sequence: CTT
  source 1..20: mol_type = other DNA
ttgtcttaagcaaatgctcc

SEQ ID NO: 57859 - DNA, 20 bp, synthetic construct
  misc_feature 1..20: note = Description of Artificial Sequence: Synthetic oligonucleotide
  misc_feature 1..20: note = Target: SCN10A; (+) strand; PAM type: YTN; PAM sequence: TTT
  source 1..20: mol_type = other DNA
tgtcttaagcaaatgctcca

SEQ ID NO: 57860 - DNA, 20 bp, synthetic construct
  misc_feature 1..20: note = Description of Artificial Sequence: Synthetic oligonucleotide
  misc_feature 1..20: note = Target: SCN10A; (+) strand; PAM type: YTN; PAM sequence: TTT
  source 1..20: mol_type = other DNA
gtcttaagcaaatgctccag

SEQ ID NO: 57861 - DNA, 20 bp, synthetic construct
  misc_feature 1..20: note = Description of Artificial Sequence: Synthetic oligonucleotide
  misc_feature 1..20: note = Target: SCN10A; (+) strand; PAM type: YTN; PAM sequence: TTG
  source 1..20: mol_type = other DNA
tcttaagcaaatgctccagc

SEQ ID NO: 57862 - DNA, 20 bp, synthetic construct
  misc_feature 1..20: note = Description of Artificial Sequence: Synthetic oligonucleotide
  misc_feature 1..20: note = Target: SCN10A; (+) strand; PAM type: YTN; PAM sequence: CTT
  source 1..20: mol_type = other DNA
aagcaaatgctccagcacac

SEQ ID NO: 57863 - DNA, 20 bp, synthetic construct
  misc_feature 1..20: note = Description of Artificial Sequence: Synthetic oligonucleotide
  misc_feature 1..20: note = Target: SCN10A; (+) strand; PAM type: YTN; PAM sequence: TTA
  source 1..20: mol_type = other DNA
agcaaatgctccagcacacc

SEQ ID NO: 57864 - DNA, 20 bp, synthetic construct
  misc_feature 1..20: note = Description of Artificial Sequence: Synthetic oligonucleotide
  misc_feature 1..20: note = Target: SCN10A; (+) strand; PAM type: YTN; PAM sequence: CTC
  source 1..20: mol_type = other DNA
cagcacaccagggctctgcc

SEQ ID NO: 57865 - DNA, 20 bp, synthetic construct
  misc_feature 1..20: note = Description of Artificial Sequence: Synthetic oligonucleotide
  misc_feature 1..20: note = Target: SCN10A; (+) strand; PAM type: YTN; PAM sequence: CTC
  source 1..20: mol_type = other DNA
tgccgatacctactattctg

SEQ ID NO: 57866 - DNA, 20 bp, synthetic construct
  misc_feature 1..20: note = Description of Artificial Sequence: Synthetic oligonucleotide
  misc_feature 1..20: note = Target: SCN10A; (+) strand; PAM type: YTN; PAM sequence: CTG
  source 1..20: mol_type = other DNA
ccgatacctactattctgtg

SEQ ID NO: 57867 - DNA, 20 bp, synthetic construct
  misc_feature 1..20: note = Description of Artificial Sequence: Synthetic oligonucleotide
  misc_feature 1..20: note = Target: SCN10A; (+) strand; PAM type: YTN; PAM sequence: CTA
  source 1..20: mol_type = other DNA
ctattctgtgttaagtggat

SEQ ID NO: 57868 - DNA, 20 bp, synthetic construct
  misc_feature 1..20: note = Description of Artificial Sequence: Synthetic oligonucleotide
  misc_feature 1..20: note = Target: SCN10A; (+) strand; PAM type: YTN; PAM sequence: CTA
  source 1..20: mol_type = other DNA
ttctgtgttaagtggatgtt

SEQ ID NO: 57869 - DNA, 20 bp, synthetic construct
  misc_feature 1..20: note = Description of Artificial Sequence: Synthetic oligonucleotide
  misc_feature 1..20: note = Target: SCN10A; (+) strand; PAM type: YTN; PAM sequence: TTC
  source 1..20: mol_type = other DNA
tgtgttaagtggatgttctg

SEQ ID NO: 57870 - DNA, 20 bp, synthetic construct
  misc_feature 1..20: note = Description of Artificial Sequence: Synthetic oligonucleotide
  misc_feature 1..20: note = Target: SCN10A; (+) strand; PAM type: YTN; PAM sequence: CTG
  source 1..20: mol_type = other DNA
tgttaagtggatgttctgaa

SEQ ID NO: 57871 - DNA, 20 bp, synthetic construct
  misc_feature 1..20: note = Description of Artificial Sequence: Synthetic oligonucleotide
  misc_feature 1..20: note = Target: SCN10A; (+) strand; PAM type: YTN; PAM sequence: TTA
  source 1..20: mol_type = other DNA
agtggatgttctgaatgtta

SEQ ID NO: 57872 - DNA, 20 bp, synthetic construct
  misc_feature 1..20: note = Description of Artificial Sequence: Synthetic oligonucleotide
  misc_feature 1..20: note = Target: SCN10A; (+) strand; PAM type: YTN; PAM sequence: TTC
  source 1..20: mol_type = other DNA
tgaatgttatttgccatctg

SEQ ID NO: 57873 - DNA, 20 bp, synthetic construct
  misc_feature 1..20: note = Description of Artificial Sequence: Synthetic oligonucleotide
  misc_feature 1..20: note = Target: SCN10A; (+) strand; PAM type: YTN; PAM sequence: CTG
  source 1..20: mol_type = other DNA
aatgttatttgccatctgtg

SEQ ID NO: 57874 - DNA, 20 bp, synthetic construct
  misc_feature 1..20: note = Description of Artificial Sequence: Synthetic oligonucleotide
  misc_feature 1..20: note = Target: SCN10A; (+) strand; PAM type: YTN; PAM sequence: TTA
  source 1..20: mol_type = other DNA
tttgccatctgtgtctatgt

SEQ ID NO: 57875 - DNA, 20 bp, synthetic construct
  misc_feature 1..20: note = Description of Artificial Sequence: Synthetic oligonucleotide
  misc_feature 1..20: note = Target: SCN10A; (+) strand; PAM type: YTN; PAM sequence: TTT
  source 1..20: mol_type = other DNA
gccatctgtgtctatgtgtt

SEQ ID NO: 57876 - DNA, 20 bp, synthetic construct
  misc_feature 1..20: note = Description of Artificial Sequence: Synthetic oligonucleotide
  misc_feature 1..20: note = Target: SCN10A; (+) strand; PAM type: YTN; PAM sequence: TTG
  source 1..20: mol_type = other DNA
ccatctgtgtctatgtgtta

SEQ ID NO: 57877 - DNA, 20 bp, synthetic construct
  misc_feature 1..20: note = Description of Artificial Sequence: Synthetic oligonucleotide
  misc_feature 1..20: note = Target: SCN10A; (+) strand; PAM type: YTN; PAM sequence: CTG
  source 1..20: mol_type = other DNA
tgtctatgtgttatgcagtt

SEQ ID NO: 57878 - DNA, 20 bp, synthetic construct
  misc_feature 1..20: note = Description of Artificial Sequence: Synthetic oligonucleotide
  misc_feature 1..20: note = Target: SCN10A; (+) strand; PAM type: YTN; PAM sequence: CTA
  source 1..20: mol_type = other DNA
tgtgttatgcagtttaatgg

SEQ ID NO: 57879 - DNA, 20 bp, synthetic construct
  misc_feature 1..20: note = Description of Artificial Sequence: Synthetic oligonucleotide
  misc_feature 1..20: note = Target: SCN10A; (+) strand; PAM type: YTN; PAM sequence: TTA
  source 1..20: mol_type = other DNA
tgcagtttaatggtataaaa

SEQ ID NO: 57880 - DNA, 20 bp, synthetic construct
  misc_feature 1..20: note = Description of Artificial Sequence: Synthetic oligonucleotide
  misc_feature 1..20: note = Target: SCN10A; (+) strand; PAM type: YTN; PAM sequence: TTT
  source 1..20: mol_type = other DNA
aatggtataaaaagttaggg

SEQ ID NO: 57881 - DNA, 20 bp, synthetic construct
  misc_feature 1..20: note = Description of Artificial Sequence: Synthetic oligonucleotide
  misc_feature 1..20: note = Target: SCN10A; (+) strand; PAM type: YTN; PAM sequence: TTA
  source 1..20: mol_type = other DNA
atggtataaaaagttagggc

SEQ ID NO: 57882 - DNA, 20 bp, synthetic construct
  misc_feature 1..20: note = Description of Artificial Sequence: Synthetic oligonucleotide
  misc_feature 1..20: note = Target: SCN10A; (+) strand; PAM type: YTN; PAM sequence: TTA
  source 1..20: mol_type = other DNA
gggcggtgtttatggtggag

SEQ ID NO: 57883 - DNA, 20 bp, synthetic construct
  misc_feature 1..20: note = Description of Artificial Sequence: Synthetic oligonucleotide
  misc_feature 1..20: note = Target: SCN10A; (+) strand; PAM type: YTN; PAM sequence: TTT
  source 1..20: mol_type = other DNA
atggtggaggcatacttttg

SEQ ID NO: 57884 - DNA, 20 bp, synthetic construct
  misc_feature 1..20: note = Description of Artificial Sequence: Synthetic oligonucleotide
  misc_feature 1..20: note = Target: SCN10A; (+) strand; PAM type: YTN; PAM sequence: TTA
  source 1..20: mol_type = other DNA
tggtggaggcatacttttga

SEQ ID NO: 57885 - DNA, 20 bp, synthetic construct
  misc_feature 1..20: note = Description of Artificial Sequence: Synthetic oligonucleotide
  misc_feature 1..20: note = Target: SCN10A; (+) strand; PAM type: YTN; PAM sequence: CTT
  source 1..20: mol_type = other DNA
ttgagaacttgcaggttcca

SEQ ID NO: 57886 - DNA, 20 bp, synthetic construct
  misc_feature 1..20: note = Description of Artificial Sequence: Synthetic oligonucleotide
  misc_feature 1..20: note = Target: SCN10A; (+) strand; PAM type: YTN; PAM sequence: TTT
  source 1..20: mol_type = other DNA
tgagaacttgcaggttccag

SEQ ID NO: 57887 - DNA, 20 bp, synthetic construct
  misc_feature 1..20: note = Description of Artificial Sequence: Synthetic oligonucleotide
  misc_feature 1..20: note = Target: SCN10A; (+) strand; PAM type: YTN; PAM sequence: TTT
  source 1..20: mol_type = other DNA
gagaacttgcaggttccaga

SEQ ID NO: 57888 - DNA, 20 bp, synthetic construct
  misc_feature 1..20: note = Description of Artificial Sequence: Synthetic oligonucleotide
  misc_feature 1..20: note = Target: SCN10A; (+) strand; PAM type: YTN; PAM sequence: TTG
  source 1..20: mol_type = other DNA
agaacttgcaggttccagat

SEQ ID NO: 57889 - DNA, 20 bp, synthetic construct
  misc_feature 1..20: note = Description of Artificial Sequence: Synthetic oligonucleotide
  misc_feature 1..20: note = Target: SCN10A; (+) strand; PAM type: YTN; PAM sequence: CTT
  source 1..20: mol_type = other DNA
gcaggttccagatatttgta

SEQ ID NO: 57890 - DNA, 20 bp, synthetic construct
  misc_feature 1..20: note = Description of Artificial Sequence: Synthetic oligonucleotide
  misc_feature 1..20: note = Target: SCN10A; (+) strand; PAM type: YTN; PAM sequence: TTG
  source 1..20: mol_type = other DNA
caggttccagatatttgtac

SEQ ID NO: 57891 - DNA, 20 bp, synthetic construct
  misc_feature 1..20: note = Description of Artificial Sequence: Synthetic oligonucleotide
  misc_feature 1..20: note = Target: SCN10A; (+) strand; PAM type: YTN; PAM sequence: TTC
  source 1..20: mol_type = other DNA
cagatatttgtacagtcagc

SEQ ID NO: 57892 - DNA, 20 bp, synthetic construct
  misc_feature 1..20: note = Description of Artificial Sequence: Synthetic oligonucleotide
  misc_feature 1..20: note = Target: SCN10A; (+) strand; PAM type: YTN; PAM sequence: TTT
  source 1..20: mol_type = other DNA
gtacagtcagcatcattatc

SEQ ID NO: 57893 - DNA, 20 bp, synthetic construct
  misc_feature 1..20: note = Description of Artificial Sequence: Synthetic oligonucleotide
  misc_feature 1..20: note = Target: SCN10A; (+) strand; PAM type: YTN; PAM sequence: TTG
  source 1..20: mol_type = other DNA
tacagtcagcatcattatcc

SEQ ID NO: 57894 - DNA, 20 bp, synthetic construct
  misc_feature 1..20: note = Description of Artificial Sequence: Synthetic oligonucleotide
  misc_feature 1..20: note = Target: SCN10A; (+) strand; PAM type: YTN; PAM sequence: TTA
  source 1..20: mol_type = other DNA
tcctgtctcttatctccctt

SEQ ID NO: 57895 - DNA, 20 bp, synthetic construct
  misc_feature 1..20: note = Description of Artificial Sequence: Synthetic oligonucleotide
  misc_feature 1..20: note = Target: SCN10A; (+) strand; PAM type: YTN; PAM sequence: CTG
  source 1..20: mol_type = other DNA
tctcttatctcccttcagtg

SEQ ID NO: 57896 - DNA, 20 bp, synthetic construct
  misc_feature 1..20: note = Description of Artificial Sequence: Synthetic oligonucleotide
  misc_feature 1..20: note = Target: SCN10A; (+) strand; PAM type: YTN; PAM sequence: CTC
  source 1..20: mol_type = other DNA
ttatctcccttcagtgctaa

SEQ ID NO: 57897 - DNA, 20 bp, synthetic construct
  misc_feature 1..20: note = Description of Artificial Sequence: Synthetic oligonucleotide
  misc_feature 1..20: note = Target: SCN10A; (+) strand; PAM type: YTN; PAM sequence: CTT
  source 1..20: mol_type = other DNA
atctcccttcagtgctaagg

SEQ ID NO: 57898 - DNA, 20 bp, synthetic construct
  misc_feature 1..20: note = Description of Artificial Sequence: Synthetic oligonucleotide
  misc_feature 1..20: note = Target: SCN10A; (+) strand; PAM type: YTN; PAM sequence: TTA
  source 1..20: mol_type = other DNA
tctcccttcagtgctaaggt

SEQ ID NO: 57899 - DNA, 20 bp, synthetic construct
  misc_feature 1..20: note = Description of Artificial Sequence: Synthetic oligonucleotide
  misc_feature 1..20: note = Target: SCN10A; (+) strand; PAM type: YTN; PAM sequence: CTC
  source 1..20: mol_type = other DNA
ccttcagtgctaaggtatcc

SEQ ID NO: 57900 - DNA, 20 bp, synthetic construct
  misc_feature 1..20: note = Description of Artificial Sequence: Synthetic oligonucleotide
  misc_feature 1..20: note = Target: SCN10A; (+) strand; PAM type: YTN; PAM sequence: CTT
  source 1..20: mol_type = other DNA
cagtgctaaggtatcctcac

SEQ ID NO: 57901 - DNA, 20 bp, synthetic construct
  misc_feature 1..20: note = Description of Artificial Sequence: Synthetic oligonucleotide
  misc_feature 1..20: note = Target: SCN10A; (+) strand; PAM type: YTN; PAM sequence: TTC
  source 1..20: mol_type = other DNA
agtgctaaggtatcctcaca

SEQ ID NO: 57902 - DNA, 20 bp, synthetic construct
  misc_feature 1..20: note = Description of Artificial Sequence: Synthetic oligonucleotide
  misc_feature 1..20: note = Target: SCN10A; (+) strand; PAM type: YTN; PAM sequence: CTA
  source 1..20: mol_type = other DNA
aggtatcctcacattctggg

SEQ ID NO: 57903 - DNA, 20 bp, synthetic construct
  misc_feature 1..20: note = Description of Artificial Sequence: Synthetic oligonucleotide
  misc_feature 1..20: note = Target: SCN10A; (+) strand; PAM type: YTN; PAM sequence: CTC
  source 1..20: mol_type = other DNA
acattctgggccagagagat

SEQ ID NO: 57904 - DNA, 20 bp, synthetic construct
  misc_feature 1..20: note = Description of Artificial Sequence: Synthetic oligonucleotide
  misc_feature 1..20: note = Target: SCN10A; (+) strand; PAM type: YTN; PAM sequence: TTC
  source 1..20: mol_type = other DNA
tgggccagagagattctagt

SEQ ID NO: 57905 - DNA, 20 bp, synthetic construct
  misc_feature 1..20: note = Description of Artificial Sequence: Synthetic oligonucleotide
  misc_feature 1..20: note = Target: SCN10A; (+) strand; PAM type: YTN; PAM sequence: CTG
  source 1..20: mol_type = other DNA
ggccagagagattctagttt

SEQ ID NO: 57906 - DNA, 20 bp, synthetic construct
  misc_feature 1..20: note = Description of Artificial Sequence: Synthetic oligonucleotide
  misc_feature 1..20: note = Target: SCN10A; (+) strand; PAM type: YTN; PAM sequence: TTC
  source 1..20: mol_type = other DNA
tagttttacctcttgtgggt

SEQ ID NO: 57907 - DNA, 20 bp, synthetic construct
  misc_feature 1..20: note = Description of Artificial Sequence: Synthetic oligonucleotide
  misc_feature 1..20: note = Target: SCN10A; (+) strand; PAM type: YTN; PAM sequence: CTA
  source 1..20: mol_type = other DNA
gttttacctcttgtgggtgg

SEQ ID NO: 57908 - DNA, 20 bp, synthetic construct
  misc_feature 1..20: note = Description of Artificial Sequence: Synthetic oligonucleotide
  misc_feature 1..20: note = Target: SCN10A; (+) strand; PAM type: YTN; PAM sequence: TTT
  source 1..20: mol_type = other DNA
tacctcttgtgggtggggtt

SEQ ID NO: 57909 - DNA, 20 bp, synthetic construct
  misc_feature 1..20: note = Description of Artificial Sequence: Synthetic oligonucleotide
  misc_feature 1..20: note = Target: SCN10A; (+) strand; PAM type: YTN; PAM sequence: TTT
  source 1..20: mol_type = other DNA
acctcttgtgggtggggttg

SEQ ID NO: 57910 - DNA, 20 bp, synthetic construct
  misc_feature 1..20: note = Description of Artificial Sequence: Synthetic oligonucleotide
  misc_feature 1..20: note = Target: SCN10A; (+) strand; PAM type: YTN; PAM sequence: TTA
  source 1..20: mol_type = other DNA
cctcttgtgggtggggttga

SEQ ID NO: 57911 - DNA, 20 bp, synthetic construct
  misc_feature 1..20: note = Description of Artificial Sequence: Synthetic oligonucleotide
  misc_feature 1..20: note = Target: SCN10A; (+) strand; PAM type: YTN; PAM sequence: CTC
  source 1..20: mol_type = other DNA
ttgtgggtggggttgagaag

SEQ ID NO: 57912 - DNA, 20 bp, synthetic construct
  misc_feature 1..20: note = Description of Artificial Sequence: Synthetic oligonucleotide
  misc_feature 1..20: note = Target: SCN10A; (+) strand; PAM type: YTN; PAM sequence: CTT
  source 1..20: mol_type = other DNA
gtgggtggggttgagaaggt

SEQ ID NO: 57913 - DNA, 20 bp, synthetic construct
  misc_feature 1..20: note = Description of Artificial Sequence: Synthetic oligonucleotide
  misc_feature 1..20: note = Target: SCN10A; (+) strand; PAM type: YTN; PAM sequence: TTG
  source 1..20: mol_type = other DNA
tgggtggggttgagaaggta

SEQ ID NO: 57914 - DNA, 20 bp, synthetic construct
  misc_feature 1..20: note = Description of Artificial Sequence: Synthetic oligonucleotide
  misc_feature 1..20: note = Target: SCN10A; (+) strand; PAM type: YTN; PAM sequence: TTG
  source 1..20: mol_type = other DNA
agaaggtagctctggttctc

SEQ ID NO: 57915 - DNA, 20 bp, synthetic construct
  misc_feature 1..20: note = Description of Artificial Sequence: Synthetic oligonucleotide
  misc_feature 1..20: note = Target: SCN10A; (+) strand; PAM type: YTN; PAM sequence: CTC
  source 1..20: mol_type = other DNA
tggttctcaggttggctccc

SEQ ID NO: 57916 - DNA, 20 bp, synthetic construct
  misc_feature 1..20: note = Description of Artificial Sequence: Synthetic oligonucleotide
  misc_feature 1..20: note = Target: SCN10A; (+) strand; PAM type: YTN; PAM sequence: CTG
  source 1..20: mol_type = other DNA
gttctcaggttggctcccat

SEQ ID NO: 57917 - DNA, 20 bp, synthetic construct
  misc_feature 1..20: note = Description of Artificial Sequence: Synthetic oligonucleotide
  misc_feature 1..20: note = Target: SCN10A; (+) strand; PAM type: YTN; PAM sequence: TTC
  source 1..20: mol_type = other DNA
tcaggttggctcccatggaa

SEQ ID NO: 57918 - DNA, 20 bp, synthetic construct
  misc_feature 1..20: note = Description of Artificial Sequence: Synthetic oligonucleotide
  misc_feature 1..20: note = Target: SCN10A; (+) strand; PAM type: YTN; PAM sequence: CTC
  source 1..20: mol_type = other DNA
aggttggctcccatggaaat

SEQ ID NO: 57919 - DNA, 20 bp, synthetic construct
  misc_feature 1..20: note = Description of Artificial Sequence: Synthetic oligonucleotide
  misc_feature 1..20: note = Target: SCN10A; (+) strand; PAM type: YTN; PAM sequence: TTG
  source 1..20: mol_type = other DNA
gctcccatggaaatctagtt

SEQ ID NO: 57920 - DNA, 20 bp, synthetic construct
  misc_feature 1..20: note = Description of Artificial Sequence: Synthetic oligonucleotide
  misc_feature 1..20: note = Target: SCN10A; (+) strand; PAM type: YTN; PAM sequence: CTC
  source 1..20: mol_type = other DNA
ccatggaaatctagtttcta

SEQ ID NO: 57921 - DNA, 20 bp, synthetic construct
  misc_feature 1..20: note = Description of Artificial Sequence: Synthetic oligonucleotide
  misc_feature 1..20: note = Target: SCN10A; (+) strand; PAM type: YTN; PAM sequence: CTA
  source 1..20: mol_type = other DNA
gtttctaccttgtaattgta

SEQ ID NO: 57922 - DNA, 20 bp, synthetic construct
  misc_feature 1..20: note = Description of Artificial Sequence: Synthetic oligonucleotide
  misc_feature 1..20: note = Target: SCN10A; (+) strand; PAM type: YTN; PAM sequence: TTT
  source 1..20: mol_type = other DNA
ctaccttgtaattgtaccac

SEQ ID NO: 57923 - DNA, 20 bp, synthetic construct
  misc_feature 1..20: note = Description of Artificial Sequence: Synthetic oligonucleotide
  misc_feature 1..20: note = Target: SCN10A; (+) strand; PAM type: YTN; PAM sequence: TTC
  source 1..20: mol_type = other DNA
taccttgtaattgtaccacc

SEQ ID NO: 57924 - DNA, 20 bp, synthetic construct
  misc_feature 1..20: note = Description of Artificial Sequence: Synthetic oligonucleotide
  misc_feature 1..20: note = Target: SCN10A; (+) strand; PAM type: YTN; PAM sequence: CTA
  source 1..20: mol_type = other DNA
ccttgtaattgtaccaccag

SEQ ID NO: 57925 - DNA, 20 bp, synthetic construct
  misc_feature 1..20: note = Description of Artificial Sequence: Synthetic oligonucleotide
  misc_feature 1..20: note = Target: SCN10A; (+) strand; PAM type: YTN; PAM sequence: CTT
  source 1..20: mol_type = other DNA
gtaattgtaccaccaggtga

SEQ ID NO: 57926 - DNA, 20 bp, synthetic construct
  misc_feature 1..20: note = Description of Artificial Sequence: Synthetic oligonucleotide
  misc_feature 1..20: note = Target: SCN10A; (+) strand; PAM type: YTN; PAM sequence: TTG
  source 1..20: mol_type = other DNA
taattgtaccaccaggtgaa

SEQ ID NO: 57927 - DNA, 20 bp, synthetic construct
  misc_feature 1..20: note = Description of Artificial Sequence: Synthetic oligonucleotide
  misc_feature 1..20: note = Target: SCN10A; (+) strand; PAM type: YTN; PAM sequence: TTG
  source 1..20: mol_type = other DNA
taccaccaggtgaacttgga

SEQ ID NO: 57928 - DNA, 20 bp, synthetic construct
  misc_feature 1..20: note = Description of Artificial Sequence: Synthetic oligonucleotide
  misc_feature 1..20: note = Target: SCN10A; (+) strand; PAM type: YTN; PAM sequence: CTT
  source 1..20: mol_type = other DNA
ggaaactggctctagtgaaa

SEQ ID NO: 57929 - DNA, 20 bp, synthetic construct
  misc_feature 1..20: note = Description of Artificial Sequence: Synthetic oligonucleotide
  misc_feature 1..20: note = Target: SCN10A; (+) strand; PAM type: YTN; PAM sequence: TTG
  source 1..20: mol_type = other DNA
gaaactggctctagtgaaat

SEQ ID NO: 57930 - DNA, 20 bp, synthetic construct
  misc_feature 1..20: note = Description of Artificial Sequence: Synthetic oligonucleotide
  misc_feature 1..20: note = Target: SCN10A; (+) strand; PAM type: YTN; PAM sequence: CTG
  source 1..20: mol_type = other DNA
gctctagtgaaattttcaaa

SEQ ID NO: 57931 - DNA, 20 bp, synthetic construct
  misc_feature 1..20: note = Description of Artificial Sequence: Synthetic oligonucleotide
  misc_feature 1..20: note = Target: SCN10A; (+) strand; PAM type: YTN; PAM sequence: CTC
  source 1..20: mol_type = other DNA
tagtgaaattttcaaaagat

SEQ ID NO: 57932 - DNA, 20 bp, synthetic construct
  misc_feature 1..20: note = Description of Artificial Sequence: Synthetic oligonucleotide
  misc_feature 1..20: note = Target: SCN10A; (+) strand; PAM type: YTN; PAM sequence: CTA
  source 1..20: mol_type = other DNA
gtgaaattttcaaaagataa

SEQ ID NO: 57933 - DNA, 20 bp, synthetic construct
  misc_feature 1..20: note = Description of Artificial Sequence: Synthetic oligonucleotide
  misc_feature 1..20: note = Target: SCN10A; (+) strand; PAM type: YTN; PAM sequence: TTT
  source 1..20: mol_type = other DNA
tcaaaagataatcttgcatt

SEQ ID NO: 57934 - DNA, 20 bp, synthetic construct
  misc_feature 1..20: note = Description of Artificial Sequence: Synthetic oligonucleotide
  misc_feature 1..20: note = Target: SCN10A; (+) strand; PAM type: YTN; PAM sequence: TTT
  source 1..20: mol_type = other DNA
caaaagataatcttgcattt

SEQ ID NO: 57935 - DNA, 20 bp, synthetic construct
  misc_feature 1..20: note = Description of Artificial Sequence: Synthetic oligonucleotide
  misc_feature 1..20: note = Target: SCN10A; (+) strand; PAM type: YTN; PAM sequence: TTC
  source 1..20: mol_type = other DNA
aaaagataatcttgcatttg

SEQ ID NO: 57936 - DNA, 20 bp, synthetic construct
  misc_feature 1..20: note = Description of Artificial Sequence: Synthetic oligonucleotide
  misc_feature 1..20: note = Target: SCN10A; (+) strand; PAM type: YTN; PAM sequence: CTT
  source 1..20: mol_type = other DNA
gcatttggatacatttccaa

SEQ ID NO: 57937 - DNA, 20 bp, synthetic construct
  misc_feature 1..20: note = Description of Artificial Sequence: Synthetic oligonucleotide
  misc_feature 1..20: note = Target: SCN10A; (+) strand; PAM type: YTN; PAM sequence: TTG
  source 1..20: mol_type = other DNA
catttggatacatttccaaa

SEQ ID NO: 57938 - DNA, 20 bp, synthetic construct
  misc_feature 1..20: note = Description of Artificial Sequence: Synthetic oligonucleotide
  misc_feature 1..20: note = Target: SCN10A; (+) strand; PAM type: YTN; PAM sequence: TTT
  source 1..20: mol_type = other DNA
ggatacatttccaaaaactc

SEQ ID NO: 57939 - DNA, 20 bp, synthetic construct
  misc_feature 1..20: note = Description of Artificial Sequence: Synthetic oligonucleotide
  misc_feature 1..20: note = Target: SCN10A; (+) strand; PAM type: YTN; PAM sequence: TTG
  source 1..20: mol_type = other DNA
gatacatttccaaaaactcc

SEQ ID NO: 57940 - DNA, 20 bp, synthetic construct
  misc_feature 1..20: note = Description of Artificial Sequence: Synthetic oligonucleotide
  misc_feature 1..20: note = Target: SCN10A; (+) strand; PAM type: YTN; PAM sequence: TTT
  source 1..20: mol_type = other DNA
ccaaaaactccgtgtcatgc

SEQ ID NO: 57941 - DNA, 20 bp, synthetic construct
  misc_feature 1..20: note = Description of Artificial Sequence: Synthetic oligonucleotide
  misc_feature 1..20: note = Target: SCN10A; (+) strand; PAM type: YTN; PAM sequence: TTC
  source 1..20: mol_type = other DNA
caaaaactccgtgtcatgca

SEQ ID NO: 57942 - DNA, 20 bp, synthetic construct
  misc_feature 1..20: note = Description of Artificial Sequence: Synthetic oligonucleotide
  misc_feature 1..20: note = Target: SCN10A; (+) strand; PAM type: YTN; PAM sequence: CTC
  source 1..20: mol_type = other DNA
cgtgtcatgcaagatgtgta

SEQ ID NO: 57943 - DNA, 20 bp, synthetic construct
  misc_feature 1..20: note = Description of Artificial Sequence: Synthetic oligonucleotide
  misc_feature 1..20: note = Target: SCN10A; (+) strand; PAM type: YTN; PAM sequence: TTG
  source 1..20: mol_type = other DNA
catcccttttccaatgtttc

SEQ ID NO: 57944 - DNA, 20 bp, synthetic construct
  misc_feature 1..20: note = Description of Artificial Sequence: Synthetic oligonucleotide
  misc_feature 1..20: note = Target: SCN10A; (+) strand; PAM type: YTN; PAM sequence: CTT
  source 1..20: mol_type = other DNA
ttccaatgtttcccattaca

SEQ ID NO: 57945 - DNA, 20 bp, synthetic construct
  misc_feature 1..20: note = Description of Artificial Sequence: Synthetic oligonucleotide
  misc_feature 1..20: note = Target: SCN10A; (+) strand; PAM type: YTN; PAM sequence: TTT
  source 1..20: mol_type = other DNA
tccaatgtttcccattacaa

SEQ ID NO: 57946 - DNA, 20 bp, synthetic construct
  misc_feature 1..20: note = Description of Artificial Sequence: Synthetic oligonucleotide
  misc_feature 1..20: note = Target: SCN10A; (+) strand; PAM type: YTN; PAM sequence: TTT
  source 1..20: mol_type = other DNA
ccaatgtttcccattacaat

SEQ ID NO: 57947 - DNA, 20 bp, synthetic construct
  misc_feature 1..20: note = Description of Artificial Sequence: Synthetic oligonucleotide
  misc_feature 1..20: note = Target: SCN10A; (+) strand; PAM type: YTN; PAM sequence: TTC
  source 1..20: mol_type = other DNA
caatgtttcccattacaatt

SEQ ID NO: 57948 - DNA, 20 bp, synthetic construct
  misc_feature 1..20: note = Description of Artificial Sequence: Synthetic oligonucleotide
  misc_feature 1..20: note = Target: SCN10A; (+) strand; PAM type: YTN; PAM sequence: TTT
  source 1..20: mol_type = other DNA
cccattacaatttaggaaat

SEQ ID NO: 57949 - DNA, 20 bp, synthetic construct
  misc_feature 1..20: note = Description of Artificial Sequence: Synthetic oligonucleotide
  misc_feature 1..20: note = Target: SCN10A; (+) strand; PAM type: YTN; PAM sequence: TTC
  source 1..20: mol_type = other DNA
ccattacaatttaggaaatg

SEQ ID NO: 57950 - DNA, 20 bp, synthetic construct
  misc_feature 1..20: note = Description of Artificial Sequence: Synthetic oligonucleotide
  misc_feature 1..20: note = Target: SCN10A; (+) strand; PAM type: YTN; PAM sequence: TTA
  source 1..20: mol_type = other DNA
caatttaggaaatgcatttg

SEQ ID NO: 57951 - DNA, 20 bp, synthetic construct
  misc_feature 1..20: note = Description of Artificial Sequence: Synthetic oligonucleotide
  misc_feature 1..20: note = Target: SCN10A; (+) strand; PAM type: YTN; PAM sequence: TTT
  source 1..20: mol_type = other DNA
aggaaatgcatttgtgcaga

SEQ ID NO: 57952 - DNA, 20 bp, synthetic construct
  misc_feature 1..20: note = Description of Artificial Sequence: Synthetic oligonucleotide
  misc_feature 1..20: note = Target: SCN10A; (+) strand; PAM type: YTN; PAM sequence: TTA
  source 1..20: mol_type = other DNA
ggaaatgcatttgtgcagaa

SEQ ID NO: 57953 - DNA, 20 bp, synthetic construct
  misc_feature 1..20: note = Description of Artificial Sequence: Synthetic oligonucleotide
  misc_feature 1..20: note = Target: SCN10A; (+) strand; PAM type: YTN; PAM sequence: TTT
  source 1..20: mol_type = other DNA
gtgcagaaaaaatgagaaat

SEQ ID NO: 57954 - DNA, 20 bp, synthetic construct
  misc_feature 1..20: note = Description of Artificial Sequence: Synthetic oligonucleotide
  misc_feature 1..20: note = Target: SCN10A; (+) strand; PAM type: YTN; PAM sequence: TTG
  source 1..20: mol_type = other DNA
tgcagaaaaaatgagaaatg

SEQ ID NO: 57955 - DNA, 20 bp, synthetic construct
  misc_feature 1..20: note = Description of Artificial Sequence: Synthetic oligonucleotide
  misc_feature 1..20: note = Target: SCN10A; (+) strand; PAM type: YTN; PAM sequence: TTA
  source 1..20: mol_type = other DNA
gtttccctgggatgctgtaa

SEQ ID NO: 57956 - DNA, 20 bp, synthetic construct
  misc_feature 1..20: note = Description of Artificial Sequence: Synthetic oligonucleotide
  misc_feature 1..20: note = Target: SCN10A; (+) strand; PAM type: YTN; PAM sequence: TTT
  source 1..20: mol_type = other DNA
ccctgggatgctgtaacaaa

SEQ ID NO: 57957 - DNA, 20 bp, synthetic construct
  misc_feature 1..20: note = Description of Artificial Sequence: Synthetic oligonucleotide
  misc_feature 1..20: note = Target: SCN10A; (+) strand; PAM type: YTN; PAM sequence: TTC
  source 1..20: mol_type = other DNA
cctgggatgctgtaacaaat

SEQ ID NO: 57958 - DNA, 20 bp, synthetic construct
  misc_feature 1..20: note = Description of Artificial Sequence: Synthetic oligonucleotide
  misc_feature 1..20: note = Target: SCN10A; (+) strand; PAM type: YTN; PAM sequence: CTG
  source 1..20: mol_type = other DNA
ggatgctgtaacaaattacc

SEQ ID NO: 57959 - DNA, 20 bp, synthetic construct
  misc_feature 1..20: note = Description of Artificial Sequence: Synthetic oligonucleotide
  misc_feature 1..20: note = Target: SCN10A; (+) strand; PAM type: YTN; PAM sequence: CTG
  source 1..20: mol_type = other DNA
taacaaattaccagaaacta

SEQ ID NO: 57960 - DNA, 20 bp, synthetic construct
  misc_feature 1..20: note = Description of Artificial Sequence: Synthetic oligonucleotide
  misc_feature 1..20: note = Target: SCN10A; (+) strand; PAM type: YTN; PAM sequence: TTA
  source 1..20: mol_type = other DNA
ccagaaactaggtagatgac

SEQ ID NO: 57961 - DNA, 20 bp, synthetic construct
  misc_feature 1..20: note = Description of Artificial Sequence: Synthetic oligonucleotide
  misc_feature 1..20: note = Target: SCN10A; (+) strand; PAM type: YTN; PAM sequence: CTA
  source 1..20: mol_type = other DNA
ggtagatgacaataatagaa

SEQ ID NO: 57962 - DNA, 20 bp, synthetic construct
  misc_feature 1..20: note = Description of Artificial Sequence: Synthetic oligonucleotide
  misc_feature 1..20: note = Target: SCN10A; (+) strand; PAM type: YTN; PAM sequence: TTT
  source 1..20: mol_type = other DNA
attctcttacacttctgagg

SEQ ID NO: 57963 - DNA, 20 bp, synthetic construct
  misc_feature 1..20: note = Description of Artificial Sequence: Synthetic oligonucleotide
  misc_feature 1..20: note = Target: SCN10A; (+) strand; PAM type: YTN; PAM sequence: TTA
  source 1..20: mol_type = other DNA
ttctcttacacttctgaggc

SEQ ID NO: 57964 - DNA, 20 bp, synthetic construct
  misc_feature 1..20: note = Description of Artificial Sequence: Synthetic oligonucleotide
  misc_feature 1..20: note = Target: SCN10A; (+) strand; PAM type: YTN; PAM sequence: TTC
  source 1..20: mol_type = other DNA
tcttacacttctgaggctag

SEQ ID NO: 57965 - DNA, 20 bp, synthetic construct
  misc_feature 1..20: note = Description of Artificial Sequence: Synthetic oligonucleotide
  misc_feature 1..20: note = Target: SCN10A; (+) strand; PAM type: YTN; PAM sequence: CTC
  source 1..20: mol_type = other DNA
ttacacttctgaggctagat

SEQ ID NO: 57966 - DNA, 20 bp, synthetic construct
  misc_feature 1..20: note = Description of Artificial Sequence: Synthetic oligonucleotide
  misc_feature 1..20: note = Target: SCN10A; (+) strand; PAM type: YTN; PAM sequence: CTT
  source 1..20: mol_type = other DNA
acacttctgaggctagatgt

SEQ ID NO: 57967 - DNA, 20 bp, synthetic construct
  misc_feature 1..20: note = Description of Artificial Sequence: Synthetic oligonucleotide
  misc_feature 1..20: note = Target: SCN10A; (+) strand; PAM type: YTN; PAM sequence: TTA
  source 1..20: mol_type = other DNA
cacttctgaggctagatgtc

SEQ ID NO: 57968 - DNA, 20 bp, synthetic construct
  misc_feature 1..20: note = Description of Artificial Sequence: Synthetic oligonucleotide
  misc_feature 1..20: note = Target: SCN10A; (+) strand; PAM type: YTN; PAM sequence: CTT
  source 1..20: mol_type = other DNA
ctgaggctagatgtctaaaa

SEQ ID NO: 57969 - DNA, 20 bp, synthetic construct
  misc_feature 1..20: note = Description of Artificial Sequence: Synthetic oligonucleotide
  misc_feature 1..20: note = Target: SCN10A; (+) strand; PAM type: YTN; PAM sequence: TTC
  source 1..20: mol_type = other DNA
tgaggctagatgtctaaaat

SEQ ID NO: 57970 - DNA, 20 bp, synthetic construct
  misc_feature 1..20: note = Description of Artificial Sequence: Synthetic oligonucleotide
  misc_feature 1..20: note = Target: SCN10A; (+) strand; PAM type: YTN; PAM sequence: CTG
  source 1..20: mol_type = other DNA
aggctagatgtctaaaatca

SEQ ID NO: 57971 - DNA, 20 bp, synthetic construct
  misc_feature 1..20: note = Description of Artificial Sequence: Synthetic oligonucleotide
  misc_feature 1..20: note = Target: SCN10A; (+) strand; PAM type: YTN; PAM sequence: CTA
  source 1..20: mol_type = other DNA
gatgtctaaaatcaaggtat

SEQ ID NO: 57972 - DNA, 20 bp, synthetic construct
  misc_feature 1..20: note = Description of Artificial Sequence: Synthetic oligonucleotide
  misc_feature 1..20: note = Target: SCN10A; (+) strand; PAM type: YTN; PAM sequence: CTA
  source 1..20: mol_type = other DNA
aaatcaaggtattggcagag

SEQ ID NO: 57973 - DNA, 20 bp, synthetic construct
  misc_feature 1..20: note = Description of Artificial Sequence: Synthetic oligonucleotide
  misc_feature 1..20: note = Target: SCN10A; (+) strand; PAM type: YTN; PAM sequence: TTG
  source 1..20: mol_type = other DNA
gcagagccatgttccctctg

SEQ ID NO: 57974 - DNA, 20 bp, synthetic construct
  misc_feature 1..20: note = Description of Artificial Sequence: Synthetic oligonucleotide
  misc_feature 1..20: note = Target: SCN10A; (+) strand; PAM type: YTN; PAM sequence: TTC
  source 1..20: mol_type = other DNA
cctctgaagcccgcaggtga

SEQ ID NO: 57975 - DNA, 20 bp, synthetic construct
  misc_feature 1..20: note = Description of Artificial Sequence: Synthetic oligonucleotide
  misc_feature 1..20: note = Target: SCN10A; (+) strand; PAM type: YTN; PAM sequence: CTC
  source 1..20: mol_type = other DNA
tgaagcccgcaggtgagaac

SEQ ID NO: 57976 - DNA, 20 bp, synthetic construct
  misc_feature 1..20: note = Description of Artificial Sequence: Synthetic oligonucleotide
  misc_feature 1..20: note = Target: SCN10A; (+) strand; PAM type: YTN; PAM sequence: CTG
  source 1..20: mol_type = other DNA
aagcccgcaggtgagaaccg

SEQ ID NO: 57977 - DNA, 20 bp, synthetic construct
  misc_feature 1..20: note = Description of Artificial Sequence: Synthetic oligonucleotide
  misc_feature 1..20: note = Target: SCN10A; (+) strand; PAM type: YTN; PAM sequence: TTG
  source 1..20: mol_type = other DNA
ccttccatgtctcctcctag

SEQ ID NO: 57978 - DNA, 20 bp, synthetic construct
  misc_feature 1..20: note = Description of Artificial Sequence: Synthetic oligonucleotide
  misc_feature 1..20: note = Target: SCN10A; (+) strand; PAM type: YTN; PAM sequence: CTT
  source 1..20: mol_type = other DNA
ccatgtctcctcctagcttc

SEQ ID NO: 57979 - DNA, 20 bp, synthetic construct
  misc_feature 1..20: note = Description of Artificial Sequence: Synthetic oligonucleotide
  misc_feature 1..20: note = Target: SCN10A; (+) strand; PAM type: YTN; PAM sequence: TTC
  source 1..20: mol_type = other DNA
catgtctcctcctagcttca

SEQ ID NO: 57980 - DNA, 20 bp, synthetic construct
  misc_feature 1..20: note = Description of Artificial Sequence: Synthetic oligonucleotide
  misc_feature 1..20: note = Target: SCN10A; (+) strand; PAM type: YTN; PAM sequence: CTC
  source 1..20: mol_type = other DNA
ctcctagcttcagcaatctt

SEQ ID NO: 57981 - DNA, 20 bp, synthetic construct
  misc_feature 1..20: note = Description of Artificial Sequence: Synthetic oligonucleotide
  misc_feature 1..20: note = Target: SCN10A; (+) strand; PAM type: YTN; PAM sequence: CTC
  source 1..20: mol_type = other DNA
ctagcttcagcaatctttgc

SEQ ID NO: 57982 - DNA, 20 bp, synthetic construct
  misc_feature 1..20: note = Description of Artificial Sequence: Synthetic oligonucleotide
  misc_feature 1..20: note = Target: SCN10A; (+) strand; PAM type: YTN; PAM sequence: CTA
  source 1..20: mol_type = other DNA
gcttcagcaatctttgccat

SEQ ID NO: 57983 - DNA, 20 bp, synthetic construct
  misc_feature 1..20: note = Description of Artificial Sequence: Synthetic oligonucleotide
  misc_feature 1..20: note = Target: SCN10A; (+) strand; PAM type: YTN; PAM sequence: CTT
  source 1..20: mol_type = other DNA
cagcaatctttgccattcct

SEQ ID NO: 57984 - DNA, 20 bp, synthetic construct
  misc_feature 1..20: note = Description of Artificial Sequence: Synthetic oligonucleotide
  misc_feature 1..20: note = Target: SCN10A; (+) strand; PAM type: YTN; PAM sequence: TTC
  source 1..20: mol_type = other DNA
agcaatctttgccattcctt

SEQ ID NO: 57985 - DNA, 20 bp, synthetic construct
  misc_feature 1..20: note = Description of Artificial Sequence: Synthetic oligonucleotide
  misc_feature 1..20: note = Target: SCN10A; (+) strand; PAM type: YTN; PAM sequence: CTT
  source 1..20: mol_type = other DNA
tgccattccttggcctgcac

SEQ ID NO: 57986 - DNA, 20 bp, synthetic construct
  misc_feature 1..20: note = Description of Artificial Sequence: Synthetic oligonucleotide
  misc_feature 1..20: note = Target: SCN10A; (+) strand; PAM type: YTN; PAM sequence: TTT
  source 1..20: mol_type = other DNA
gccattccttggcctgcaca

SEQ ID NO: 57987 - DNA, 20 bp, synthetic construct
  misc_feature 1..20: note = Description of Artificial Sequence: Synthetic oligonucleotide
  misc_feature 1..20: note = Target: SCN10A; (+) strand; PAM type: YTN; PAM sequence: TTG
  source 1..20: mol_type = other DNA
ccattccttggcctgcacat

SEQ ID NO: 57988 - DNA, 20 bp, synthetic construct
  misc_feature 1..20: note = Description of Artificial Sequence: Synthetic oligonucleotide
  misc_feature 1..20: note = Target: SCN10A; (+) strand; PAM type: YTN; PAM sequence: TTC
  source 1..20: mol_type = other DNA
cttggcctgcacatgtatct

SEQ ID NO: 57989 - DNA, 20 bp, synthetic construct
  misc_feature 1..20: note = Description of Artificial Sequence: Synthetic oligonucleotide
  misc_feature 1..20: note = Target: SCN10A; (+) strand; PAM type: YTN; PAM sequence: CTT
  source 1..20: mol_type = other DNA
ggcctgcacatgtatctctc

SEQ ID NO: 57990 - DNA, 20 bp, synthetic construct
  misc_feature 1..20: note = Description of Artificial Sequence: Synthetic oligonucleotide
  misc_feature 1..20: note = Target: SCN10A; (+) strand; PAM type: YTN; PAM sequence: TTG
  source 1..20: mol_type = other DNA
gcctgcacatgtatctctcc

SEQ ID NO: 57991 - DNA, 20 bp, synthetic construct
  misc_feature 1..20: note = Description of Artificial Sequence: Synthetic oligonucleotide
  misc_feature 1..20: note = Target: SCN10A; (+) strand; PAM type: YTN; PAM sequence: CTG
  source 1..20: mol_type = other DNA
cacatgtatctctccgattt

SEQ ID NO: 57992 - DNA, 20 bp, synthetic construct
  misc_feature 1..20: note = Description of Artificial Sequence: Synthetic oligonucleotide
  misc_feature 1..20: note = Target: SCN10A; (+) strand; PAM type: YTN; PAM sequence: CTC
  source 1..20: mol_type = other DNA
tccgatttcttcctgtgtct

SEQ ID NO: 57993 - DNA, 20 bp, synthetic construct
  misc_feature 1..20: note = Description of Artificial Sequence: Synthetic oligonucleotide
  misc_feature 1..20: note = Target: SCN10A; (+) strand; PAM type: YTN; PAM sequence: CTC
  source 1..20: mol_type = other DNA
cgatttcttcctgtgtctcc

SEQ ID NO: 57994 - DNA, 20 bp, synthetic construct
  misc_feature 1..20: note = Description of Artificial Sequence: Synthetic oligonucleotide
  misc_feature 1..20: note = Target: SCN10A; (+) strand; PAM type: YTN; PAM sequence: TTT
  source 1..20: mol_type = other DNA
cttcctgtgtctccatacag

SEQ ID NO: 57995 - DNA, 20 bp, synthetic construct
  misc_feature 1..20: note = Description of Artificial Sequence: Synthetic oligonucleotide
  misc_feature 1..20: note = Target: SCN10A; (+) strand; PAM type: YTN; PAM sequence: TTC
  source 1..20: mol_type = other DNA
ttcctgtgtctccatacagc

SEQ ID NO: 57996 - DNA, 20 bp, synthetic construct
  misc_feature 1..20: note = Description of Artificial Sequence: Synthetic oligonucleotide
  misc_feature 1..20: note = Target: SCN10A; (+) strand; PAM type: YTN; PAM sequence: CTT
  source 1..20: mol_type = other DNA
cctgtgtctccatacagctg

SEQ ID NO: 57997 - DNA, 20 bp, synthetic construct
  misc_feature 1..20: note = Description of Artificial Sequence: Synthetic oligonucleotide
  misc_feature 1..20: note = Target: SCN10A; (+) strand; PAM type: YTN; PAM sequence: TTC
  source 1..20: mol_type = other DNA
ctgtgtctccatacagctgt

SEQ ID NO: 57998 - DNA, 20 bp, synthetic construct
  misc_feature 1..20: note = Description of Artificial Sequence: Synthetic oligonucleotide
  misc_feature 1..20: note = Target: SCN10A; (+) strand; PAM type: YTN; PAM sequence: CTG
  source 1..20: mol_type = other DNA
tgtctccatacagctgtctt

SEQ ID NO: 57999 - DNA, 20 bp, synthetic construct
  misc_feature 1..20: note = Description of Artificial Sequence: Synthetic oligonucleotide
  misc_feature 1..20: note = Target: SCN10A; (+) strand; PAM type: YTN; PAM sequence: CTC
  source 1..20: mol_type = other DNA
catacagctgtcttttcttt

SEQ ID NO: 58000 - DNA, 20 bp, synthetic construct
  misc_feature 1..20: note = Description of Artificial Sequence: Synthetic oligonucleotide
  misc_feature 1..20: note = Target: SCN10A; (+) strand; PAM type: YTN; PAM sequence: CTG
  source 1..20: mol_type = other DNA
tcttttctttgtgtgtgttt

SEQ ID NO: 58001 - DNA, 20 bp, synthetic construct
  misc_feature 1..20: note = Description of Artificial Sequence: Synthetic oligonucleotide
  misc_feature 1..20: note = Target: SCN10A; (+) strand; PAM type: YTN; PAM sequence: CTT
  source 1..20: mol_type = other DNA
ttctttgtgtgtgttttttt

SEQ ID NO: 58002 - DNA, 20 bp, synthetic construct
  misc_feature 1..20: note = Description of Artificial Sequence: Synthetic oligonucleotide
  misc_feature 1..20: note = Target: SCN10A; (+) strand; PAM type: YTN; PAM sequence: TTT
  source 1..20: mol_type = other DNA
tctttgtgtgtgtttttttc

SEQ ID NO: 58003 - DNA, 20 bp, synthetic construct
  misc_feature 1..20: note = Description of Artificial Sequence: Synthetic oligonucleotide
  misc_feature 1..20: note = Target: SCN10A; (+) strand; PAM type: YTN; PAM sequence: TTT
  source 1..20: mol_type = other DNA
ctttgtgtgtgtttttttct

SEQ ID NO: 58004 - DNA, 20 bp, synthetic construct
  misc_feature 1..20: note = Description of Artificial Sequence: Synthetic oligonucleotide
  misc_feature 1..20: note = Target: SCN10A; (+) strand; PAM type: YTN; PAM sequence: TTC
  source 1..20: mol_type = other DNA
tttgtgtgtgtttttttctg

SEQ ID NO: 58005 - DNA, 20 bp, synthetic construct
  misc_feature 1..20: note = Description of Artificial Sequence: Synthetic oligonucleotide
  misc_feature 1..20: note = Target: SCN10A; (+) strand; PAM type: YTN; PAM sequence: CTT
  source 1..20: mol_type = other DNA
tgtgtgtgtttttttctgca

SEQ ID NO: 58006 - DNA, 20 bp, synthetic construct
  misc_feature 1..20: note = Description of Artificial Sequence: Synthetic oligonucleotide
  misc_feature 1..20: note = Target: SCN10A; (+) strand; PAM type: YTN; PAM sequence: TTT
  source 1..20: mol_type = other DNA
gtgtgtgtttttttctgcat

SEQ ID NO: 58007 - DNA, 20 bp, synthetic construct
  misc_feature 1..20: note = Description of Artificial Sequence: Synthetic oligonucleotide
  misc_feature 1..20: note = Target: SCN10A; (+) strand; PAM type: YTN; PAM sequence: TTG
  source 1..20: mol_type = other DNA
tgtgtgtttttttctgcatc

SEQ ID NO: 58008 - DNA, 20 bp, synthetic construct
  misc_feature 1..20: note = Description of Artificial Sequence: Synthetic oligonucleotide
  misc_feature 1..20: note = Target: SCN10A; (+) strand; PAM type: YTN; PAM sequence: TTT
  source 1..20: mol_type = other DNA
ttttctgcatcttcccatgg

SEQ ID NO: 58009 - DNA, 20 bp, synthetic construct
  misc_feature 1..20: note = Description of Artificial Sequence: Synthetic oligonucleotide
  misc_feature 1..20: note = Target: SCN10A; (+) strand; PAM type: YTN; PAM sequence: TTT
  source 1..20: mol_type = other DNA
tttctgcatcttcccatggt

SEQ ID NO: 58010 - DNA, 20 bp, synthetic construct
  misc_feature 1..20: note = Description of Artificial Sequence: Synthetic oligonucleotide
  misc_feature 1..20: note = Target: SCN10A; (+) strand; PAM type: YTN; PAM sequence: TTT
  source 1..20: mol_type = other DNA
ttctgcatcttcccatggta

SEQ ID NO: 58011 - DNA, 20 bp, synthetic construct
  misc_feature 1..20: note = Description of Artificial Sequence: Synthetic oligonucleotide
  misc_feature 1..20: note = Target: SCN10A; (+) strand; PAM type: YTN; PAM sequence: TTT
  source 1..20: mol_type = other DNA
tctgcatcttcccatggtat

SEQ ID NO: 58012 - DNA, 20 bp, synthetic construct
  misc_feature 1..20: note = Description of Artificial Sequence: Synthetic oligonucleotide
  misc_feature 1..20: note = Target: SCN10A; (+) strand; PAM type: YTN; PAM sequence: TTT
  source 1..20: mol_type = other DNA
ctgcatcttcccatggtatt

SEQ ID NO: 58013 - DNA, 20 bp, synthetic construct
  misc_feature 1..20: note = Description of Artificial Sequence: Synthetic oligonucleotide
  misc_feature 1..20: note = Target: SCN10A; (+) strand; PAM type: YTN; PAM sequence: TTC
  source 1..20: mol_type = other DNA
tgcatcttcccatggtattc

SEQ ID NO: 58014 - DNA, 20 bp, synthetic construct
  misc_feature 1..20: note = Description of Artificial Sequence: Synthetic oligonucleotide
  misc_feature 1..20: note = Target: SCN10A; (+) strand; PAM type: YTN; PAM sequence: CTG
  source 1..20: mol_type = other DNA
catcttcccatggtattctc

SEQ ID NO: 58015 - DNA, 20 bp, synthetic construct
  misc_feature 1..20: note = Description of Artificial Sequence: Synthetic oligonucleotide
  misc_feature 1..20: note = Target: SCN10A; (+) strand; PAM type: YTN; PAM sequence: CTT
  source 1..20: mol_type = other DNA
cccatggtattctcctctct

SEQ ID NO: 58016 - DNA, 20 bp, synthetic construct
  misc_feature 1..20: note = Description of Artificial Sequence: Synthetic oligonucleotide
  misc_feature 1..20: note = Target: SCN10A; (+) strand; PAM type: YTN; PAM sequence: TTC
  source 1..20: mol_type = other DNA
ccatggtattctcctctctg

SEQ ID NO: 58017 - DNA, 20 bp, synthetic construct
  misc_feature 1..20: note = Description of Artificial Sequence: Synthetic oligonucleotide
  misc_feature 1..20: note = Target: SCN10A; (+) strand; PAM type: YTN; PAM sequence: TTC
  source 1..20: mol_type = other DNA
tcctctctgtgtgtctctgt

SEQ ID NO: 58018 - DNA, 20 bp, synthetic construct
  misc_feature 1..20: note = Description of Artificial Sequence: Synthetic oligonucleotide
  misc_feature 1..20: note = Target: SCN10A; (+) strand; PAM type: YTN; PAM sequence: CTC
  source 1..20: mol_type = other DNA
ctctctgtgtgtctctgttc

SEQ ID NO: 58019 - DNA, 20 bp, synthetic construct
  misc_feature 1..20: note = Description of Artificial Sequence: Synthetic oligonucleotide
  misc_feature 1..20: note = Target: SCN10A; (+) strand; PAM type: YTN; PAM sequence: CTC
  source 1..20: mol_type = other DNA
tctgtgtgtctctgttcaaa

SEQ ID NO: 58020 - DNA, 20 bp, synthetic construct
  misc_feature 1..20: note = Description of Artificial Sequence: Synthetic oligonucleotide
  misc_feature 1..20: note = Target: SCN10A; (+) strand; PAM type: YTN; PAM sequence: CTC
  source 1..20: mol_type = other DNA
tgtgtgtctctgttcaaatt

SEQ ID NO: 58021 - DNA, 20 bp, synthetic construct
  misc_feature 1..20: note = Description of Artificial Sequence: Synthetic oligonucleotide
  misc_feature 1..20: note = Target: SCN10A; (+) strand; PAM type: YTN; PAM sequence: CTG
  source 1..20: mol_type = other DNA
tgtgtctctgttcaaattcc

SEQ ID NO: 58022 - DNA, 20 bp, synthetic construct
  misc_feature 1..20: note = Description of Artificial Sequence: Synthetic oligonucleotide
  misc_feature 1..20: note = Target: SCN10A; (+) strand; PAM type: YTN; PAM sequence: CTC
  source 1..20: mol_type = other DNA
tgttcaaattcccctcatat

SEQ ID NO: 58023 - DNA, 20 bp, synthetic construct
  misc_feature 1..20: note = Description of Artificial Sequence: Synthetic oligonucleotide
  misc_feature 1..20: note = Target: SCN10A; (+) strand; PAM type: YTN; PAM sequence: CTG
  source 1..20: mol_type = other DNA
ttcaaattcccctcatattt

SEQ ID NO: 58024 - DNA, 20 bp, synthetic construct
  misc_feature 1..20: note = Description of Artificial Sequence: Synthetic oligonucleotide
  misc_feature 1..20: note = Target: SCN10A; (+) strand; PAM type: YTN; PAM sequence: TTC
  source 1..20: mol_type = other DNA
aaattcccctcatattttag

SEQ ID NO: 58025 - DNA, 20 bp, synthetic construct
  misc_feature 1..20: note = Description of Artificial Sequence: Synthetic oligonucleotide
  misc_feature 1..20: note = Target: SCN10A; (+) strand; PAM type: YTN; PAM sequence: TTC
  source 1..20: mol_type = other DNA
ccctcatattttagcaacac

SEQ ID NO: 58026 - DNA, 20 bp, synthetic construct
  misc_feature 1..20: note = Description of Artificial Sequence: Synthetic oligonucleotide
  misc_feature 1..20: note = Target: SCN10A; (+) strand; PAM type: YTN; PAM sequence: CTC
  source 1..20: mol_type = other DNA
atattttagcaacaccagtc

SEQ ID NO: 58027 - DNA, 20 bp, synthetic construct
  misc_feature 1..20: note = Description of Artificial Sequence: Synthetic oligonucleotide
  misc_feature 1..20: note = Target: SCN10A; (+) strand; PAM type: YTN; PAM sequence: TTT
  source 1..20: mol_type = other DNA
tagcaacaccagtcattgga

SEQ ID NO: 58028 - DNA, 20 bp, synthetic construct
  misc_feature 1..20: note = Description of Artificial Sequence: Synthetic oligonucleotide
  misc_feature 1..20: note = Target: SCN10A; (+) strand; PAM type: YTN; PAM sequence: TTT
  source 1..20: mol_type = other DNA
agcaacaccagtcattggat

SEQ ID NO: 58029 - DNA, 20 bp, synthetic construct
  misc_feature 1..20: note = Description of Artificial Sequence: Synthetic oligonucleotide
  misc_feature 1..20: note = Target: SCN10A; (+) strand; PAM type: YTN; PAM sequence: TTA
  source 1..20: mol_type = other DNA
gcaacaccagtcattggatt

SEQ ID NO: 58030 - DNA, 20 bp, synthetic construct
  misc_feature 1..20: note = Description of Artificial Sequence: Synthetic oligonucleotide
  misc_feature 1..20: note = Target: SCN10A; (+) strand; PAM type: YTN; PAM sequence: TTG
  source 1..20: mol_type = other DNA
gattagggctcaccttcatc

SEQ ID NO: 58031 - DNA, 20 bp, synthetic construct
  misc_feature 1..20: note = Description of Artificial Sequence: Synthetic oligonucleotide
  misc_feature 1..20: note = Target: SCN10A; (+) strand; PAM type: YTN; PAM sequence: TTA
  source 1..20: mol_type = other DNA
gggctcaccttcatctgaat

SEQ ID NO: 58032 - DNA, 20 bp, synthetic construct
  misc_feature 1..20: note = Description of Artificial Sequence: Synthetic oligonucleotide
  misc_feature 1..20: note = Target: SCN10A; (+) strand; PAM type: YTN; PAM sequence: CTC
  source 1..20: mol_type = other DNA
accttcatctgaatttgttt

SEQ ID NO: 58033 - DNA, 20 bp, synthetic construct
  misc_feature 1..20: note = Description of Artificial Sequence: Synthetic oligonucleotide
  misc_feature 1..20: note = Target: SCN10A; (+) strand; PAM type: YTN; PAM sequence: CTT
  source 1..20: mol_type = other DNA
catctgaatttgtttacatc

SEQ ID NO: 58034 - DNA, 20 bp, synthetic construct
  misc_feature 1..20: note = Description of Artificial Sequence: Synthetic oligonucleotide
  misc_feature 1..20: note = Target: SCN10A; (+) strand; PAM type: YTN; PAM sequence: TTC
  source 1..20: mol_type = other DNA
atctgaatttgtttacatct

SEQ ID NO: 58035 - DNA, 20 bp, synthetic construct
  misc_feature 1..20: note = Description of Artificial Sequence: Synthetic oligonucleotide
  misc_feature 1..20: note = Target: SCN10A; (+) strand; PAM type: YTN; PAM sequence: CTG
  source 1..20: mol_type = other DNA
aatttgtttacatctgcaaa

SEQ ID NO: 58036 - DNA, 20 bp, synthetic construct
  misc_feature 1..20: note = Description of Artificial Sequence: Synthetic oligonucleotide
  misc_feature 1..20: note = Target: SCN10A; (+) strand; PAM type: YTN; PAM sequence: TTT
  source 1..20: mol_type = other DNA
gtttacatctgcaaaaacct

SEQ ID NO: 58037 - DNA, 20 bp, synthetic construct
  misc_feature 1..20: note = Description of Artificial Sequence: Synthetic oligonucleotide
  misc_feature 1..20: note = Target: SCN10A; (+) strand; PAM type: YTN; PAM sequence: TTG
  source 1..20: mol_type = other DNA
tttacatctgcaaaaacctt

SEQ ID NO: 58038 - DNA, 20 bp, synthetic construct
  misc_feature 1..20: note = Description of Artificial Sequence: Synthetic oligonucleotide
  misc_feature 1..20: note = Target: SCN10A; (+) strand; PAM type: YTN; PAM sequence: TTT
  source 1..20: mol_type = other DNA
acatctgcaaaaaccttaat

SEQ ID NO: 58039 - DNA, 20 bp, synthetic construct
  misc_feature 1..20: note = Description of Artificial Sequence: Synthetic oligonucleotide
  misc_feature 1..20: note = Target: SCN10A; (+) strand; PAM type: YTN; PAM sequence: TTA
  source 1..20: mol_type = other DNA
catctgcaaaaaccttaatg

SEQ ID NO: 58040 - DNA, 20 bp, synthetic construct
  misc_feature 1..20: note = Description of Artificial Sequence: Synthetic oligonucleotide
  misc_feature 1..20: note = Target: SCN10A; (+) strand; PAM type: YTN; PAM sequence: CTG
  source 1..20: mol_type = other DNA
caaaaaccttaatgtcaaat

SEQ ID NO: 58041 - DNA, 20 bp, synthetic construct
  misc_feature 1..20: note = Description of Artificial Sequence: Synthetic oligonucleotide
  misc_feature 1..20: note = Target: SCN10A; (+) strand; PAM type: YTN; PAM sequence: CTT
  source 1..20: mol_type = other DNA
aatgtcaaataaggtcacaa

SEQ ID NO: 58042 - DNA, 20 bp, synthetic construct
  misc_feature 1..20: note = Description of Artificial Sequence: Synthetic oligonucleotide
  misc_feature 1..20: note = Target: SCN10A; (+) strand; PAM type: YTN; PAM sequence: TTA
  source 1..20: mol_type = other DNA
atgtcaaataaggtcacaat

SEQ ID NO: 58043 - DNA, 20 bp, synthetic construct
  misc_feature 1..20: note = Description of Artificial Sequence: Synthetic oligonucleotide
  misc_feature 1..20: note = Target: SCN10A; (+) strand; PAM type: YTN; PAM sequence: CTA
  source 1..20: mol_type = other DNA
ttggttagaacttcaacata

SEQ ID NO: 58044 - DNA, 20 bp, synthetic construct
  misc_feature 1..20: note = Description of Artificial Sequence: Synthetic oligonucleotide
  misc_feature 1..20: note = Target: SCN10A; (+) strand; PAM type: YTN; PAM sequence: TTG
  source 1..20: mol_type = other DNA
gttagaacttcaacataccc

SEQ ID NO: 58045 - DNA, 20 bp, synthetic construct
  misc_feature 1..20: note = Description of Artificial Sequence: Synthetic oligonucleotide
  misc_feature 1..20: note = Target: SCN10A; (+) strand; PAM type: YTN; PAM sequence: TTA
  source 1..20: mol_type = other DNA
gaacttcaacataccctttt

SEQ ID NO: 58046 - DNA, 20 bp, synthetic construct
  misc_feature 1..20: note = Description of Artificial Sequence: Synthetic oligonucleotide
  misc_feature 1..20: note = Target: SCN10A; (+) strand; PAM type: YTN; PAM sequence: CTT
  source 1..20: mol_type = other DNA
caacatacccttttagggaa

SEQ ID NO: 58047 - DNA, 20 bp, synthetic construct
  misc_feature 1..20: note = Description of Artificial Sequence: Synthetic oligonucleotide
  misc_feature 1..20: note = Target: SCN10A; (+) strand; PAM type: YTN; PAM sequence: TTC
  source 1..20: mol_type = other DNA
aacatacccttttagggaac

SEQ ID NO: 58048 - DNA, 20 bp, synthetic construct
  misc_feature 1..20: note = Description of Artificial Sequence: Synthetic oligonucleotide
  misc_feature 1..20: note = Target: SCN10A; (+) strand; PAM type: YTN; PAM sequence: CTT
  source 1..20: mol_type = other DNA
ttagggaacattattcaacc

SEQ ID NO: 58049 - DNA, 20 bp, synthetic construct
  misc_feature 1..20: note = Description of Artificial Sequence: Synthetic oligonucleotide
  misc_feature 1..20: note = Target: SCN10A; (+) strand; PAM type: YTN; PAM sequence: TTT
  source 1..20: mol_type = other DNA
tagggaacattattcaaccc

SEQ ID NO: 58050 - DNA, 20 bp, synthetic construct
  misc_feature 1..20: note = Description of Artificial Sequence: Synthetic oligonucleotide
  misc_feature 1..20: note = Target: SCN10A; (+) strand; PAM type: YTN; PAM sequence: TTT
  source 1..20: mol_type = other DNA
agggaacattattcaaccca

SEQ ID NO: 58051 - DNA, 20 bp, synthetic construct
  misc_feature 1..20: note = Description of Artificial Sequence: Synthetic oligonucleotide
  misc_feature 1..20: note = Target: SCN10A; (+) strand; PAM type: YTN; PAM sequence: TTA
  source 1..20: mol_type = other DNA
gggaacattattcaacccaa

SEQ ID NO: 58052 - DNA, 20 bp, synthetic construct
  misc_feature 1..20: note = Description of Artificial Sequence: Synthetic oligonucleotide
  misc_feature 1..20: note = Target: SCN10A; (+) strand; PAM type: YTN; PAM sequence: TTA
  source 1..20: mol_type = other DNA
ttcaacccaaagcataattc

SEQ ID NO: 58053 - DNA, 20 bp, synthetic construct
  misc_feature 1..20: note = Description of Artificial Sequence: Synthetic oligonucleotide
  misc_feature 1..20: note = Target: SCN10A; (+) strand; PAM type: YTN; PAM sequence: TTC
  source 1..20: mol_type = other DNA
aacccaaagcataattcaac

SEQ ID NO: 58054 - DNA, 20 bp, synthetic construct
  misc_feature 1..20: note = Description of Artificial Sequence: Synthetic oligonucleotide
  misc_feature 1..20: note = Target: SCN10A; (+) strand; PAM type: YTN; PAM sequence: TTC
  source 1..20: mol_type = other DNA
aacataaagttgaattatgt

SEQ ID NO: 58055 - DNA, 20 bp, synthetic construct
  misc_feature 1..20: note = Description of Artificial Sequence: Synthetic oligonucleotide
  misc_feature 1..20: note = Target: SCN10A; (+) strand; PAM type: YTN; PAM sequence: TTG
  source 1..20: mol_type = other DNA
aattatgttcctatgtttag

SEQ ID NO: 58056 - DNA, 20 bp, synthetic construct
  misc_feature 1..20: note = Description of Artificial Sequence: Synthetic oligonucleotide
  misc_feature 1..20: note = Target: SCN10A; (+) strand; PAM type: YTN; PAM sequence: TTA
  source 1..20: mol_type = other DNA
tgttcctatgtttagggagc

SEQ ID NO: 58057 - DNA, 20 bp, synthetic construct
  misc_feature 1..20: note = Description of Artificial Sequence: Synthetic oligonucleotide
  misc_feature 1..20: note = Target: SCN10A; (+) strand; PAM type: YTN; PAM sequence: TTC
  source 1..20: mol_type = other DNA
ctatgtttagggagcataat

SEQ ID NO: 58058 - DNA, 20 bp, synthetic construct
  misc_feature 1..20: note = Description of Artificial Sequence: Synthetic oligonucleotide
  misc_feature 1..20: note = Target: SCN10A; (+) strand; PAM type: YTN; PAM sequence: CTA
  source 1..20: mol_type = other DNA
tgtttagggagcataattca

SEQ ID NO: 58059 - DNA, 20 bp, synthetic construct
  misc_feature 1..20: note = Description of Artificial Sequence: Synthetic oligonucleotide
  misc_feature 1..20: note = Target: SCN10A; (+) strand; PAM type: YTN; PAM sequence: TTT
  source 1..20: mol_type = other DNA
agggagcataattcaactca

SEQ ID NO: 58060 - DNA, 20 bp, synthetic construct
  misc_feature 1..20: note = Description of Artificial Sequence: Synthetic oligonucleotide
  misc_feature 1..20: note = Target: SCN10A; (+) strand; PAM type: YTN; PAM sequence: TTA
  source 1..20: mol_type = other DNA
gggagcataattcaactcaa

SEQ ID NO: 58061 - DNA, 20 bp, synthetic construct
  misc_feature 1..20: note = Description of Artificial Sequence: Synthetic oligonucleotide
  misc_feature 1..20: note = Target: SCN10A; (+) strand; PAM type: YTN; PAM sequence: TTC
  source 1..20: mol_type = other DNA
aactcaaagtaaaaatactt

SEQ ID NO: 58062 - DNA, 20 bp, synthetic construct
  misc_feature 1..20: note = Description of Artificial Sequence: Synthetic oligonucleotide
  misc_feature 1..20: note = Target: SCN10A; (+) strand; PAM type: YTN; PAM sequence: CTC
  source 1..20: mol_type = other DNA
aaagtaaaaatacttttgag

SEQ ID NO: 58063 - DNA, 20 bp, synthetic construct
  misc_feature 1..20: note = Description of Artificial Sequence: Synthetic oligonucleotide
  misc_feature 1..20: note = Target: SCN10A; (+) strand; PAM type: YTN; PAM sequence: CTT
  source 1..20: mol_type = other DNA
ttgagaatagtatcatctgc

SEQ ID NO: 58064 - DNA, 20 bp, synthetic construct
  misc_feature 1..20: note = Description of Artificial Sequence: Synthetic oligonucleotide
  misc_feature 1..20: note = Target: SCN10A; (+) strand; PAM type: YTN; PAM sequence: TTT
  source 1..20: mol_type = other DNA
tgagaatagtatcatctgct

SEQ ID NO: 58065 - DNA, 20 bp, synthetic construct
  misc_feature 1..20: note = Description of Artificial Sequence: Synthetic oligonucleotide
  misc_feature 1..20: note = Target: SCN10A; (+) strand; PAM type: YTN; PAM sequence: TTT
  source 1..20: mol_type = other DNA
gagaatagtatcatctgctt

SEQ ID NO: 58066 - DNA, 20 bp, synthetic construct
  misc_feature 1..20: note = Description of Artificial Sequence: Synthetic oligonucleotide
  misc_feature 1..20: note = Target: SCN10A; (+) strand; PAM type: YTN; PAM sequence: TTG
  source 1..20: mol_type = other DNA
agaatagtatcatctgcttt

SEQ ID NO: 58067 - DNA, 20 bp, synthetic construct
  misc_feature 1..20: note = Description of Artificial Sequence: Synthetic oligonucleotide
  misc_feature 1..20: note = Target: SCN10A; (+) strand; PAM type: YTN; PAM sequence: CTG
  source 1..20: mol_type = other DNA
ctttaatagaaccagtctga

SEQ ID NO: 58068 - DNA, 20 bp, synthetic construct
  misc_feature 1..20: note = Description of Artificial Sequence: Synthetic oligonucleotide
  misc_feature 1..20: note = Target: SCN10A; (+) strand; PAM type: YTN; PAM sequence: CTT
  source 1..20: mol_type = other DNA
taatagaaccagtctgatgg

SEQ ID NO: 58069 - DNA, 20 bp, synthetic construct
  misc_feature 1..20: note = Description of Artificial Sequence: Synthetic oligonucleotide
  misc_feature 1..20: note = Target: SCN10A; (+) strand; PAM type: YTN; PAM sequence: TTT
  source 1..20: mol_type = other DNA
aatagaaccagtctgatggt

SEQ ID NO: 58070 - DNA, 20 bp, synthetic construct
  misc_feature 1..20: note = Description of Artificial Sequence: Synthetic oligonucleotide
  misc_feature 1..20: note = Target: SCN10A; (+) strand; PAM type: YTN; PAM sequence: TTA
  source 1..20: mol_type = other DNA
atagaaccagtctgatggtt

SEQ ID NO: 58071 - DNA, 20 bp, synthetic construct
  misc_feature 1..20: note = Description of Artificial Sequence: Synthetic oligonucleotide
  misc_feature 1..20: note = Target: SCN10A; (+) strand; PAM type: YTN; PAM sequence: CTG
  source 1..20: mol_type = other DNA
atggtttggcacacttaatt

SEQ ID NO: 58072 - DNA, 20 bp, synthetic construct
  misc_feature 1..20: note = Description of Artificial Sequence: Synthetic oligonucleotide
  misc_feature 1..20: note = Target: SCN10A; (+) strand; PAM type: YTN; PAM sequence: TTT
  source 1..20: mol_type = other DNA
ggcacacttaattctttcac

SEQ ID NO: 58073 - DNA, 20 bp, synthetic construct
  misc_feature 1..20: note = Description of Artificial Sequence: Synthetic oligonucleotide
  misc_feature 1..20: note = Target: SCN10A; (+) strand; PAM type: YTN; PAM sequence: TTG
  source 1..20: mol_type = other DNA
gcacacttaattctttcaca

SEQ ID NO: 58074 - DNA, 20 bp, synthetic construct
  misc_feature 1..20: note = Description of Artificial Sequence: Synthetic oligonucleotide
  misc_feature 1..20: note = Target: SCN10A; (+) strand; PAM type: YTN; PAM sequence: CTT
  source 1..20: mol_type = other DNA
aattctttcacatatcattg

SEQ ID NO: 58075 - DNA, 20 bp, synthetic construct
  misc_feature 1..20: note = Description of Artificial Sequence: Synthetic oligonucleotide
  misc_feature 1..20: note = Target: SCN10A; (+) strand; PAM type: YTN; PAM sequence: TTA
  source 1..20: mol_type = other DNA
attctttcacatatcattgt

SEQ ID NO: 58076 - DNA, 20 bp, synthetic construct
  misc_feature 1..20: note = Description of Artificial Sequence: Synthetic oligonucleotide
  misc_feature 1..20: note = Target: SCN10A; (+) strand; PAM type: YTN; PAM sequence: TTC
  source 1..20: mol_type = other DNA
tttcacatatcattgtaaaa

SEQ ID NO: 58077 - DNA, 20 bp, synthetic construct
  misc_feature 1..20: note = Description of Artificial Sequence: Synthetic oligonucleotide
  misc_feature 1..20: note = Target: SCN10A; (+) strand; PAM type: YTN; PAM sequence: CTT
  source 1..20: mol_type = other DNA
tcacatatcattgtaaaaat

SEQ ID NO: 58078 - DNA, 20 bp, synthetic construct
  misc_feature 1..20: note = Description of Artificial Sequence: Synthetic oligonucleotide
  misc_feature 1..20: note = Target: SCN10A; (+) strand; PAM type: YTN; PAM sequence: TTT
  source 1..20: mol_type = other DNA
cacatatcattgtaaaaata

SEQ ID NO: 58079 - DNA, 20 bp, synthetic construct
  misc_feature 1..20: note = Description of Artificial Sequence: Synthetic oligonucleotide
  misc_feature 1..20: note = Target: SCN10A; (+) strand; PAM type: YTN; PAM sequence: TTC
  source 1..20: mol_type = other DNA
acatatcattgtaaaaataa

SEQ ID NO: 58080 - DNA, 20 bp, synthetic construct
  misc_feature 1..20: note = Description of Artificial Sequence: Synthetic oligonucleotide
  misc_feature 1..20: note = Target: SCN10A; (+) strand; PAM type: YTN; PAM sequence: TTG
  source 1..20: mol_type = other DNA
taaaaataaacctgtgccca

SEQ ID NO: 58081 - DNA, 20 bp, synthetic construct
  misc_feature 1..20: note = Description of Artificial Sequence: Synthetic oligonucleotide
  misc_feature 1..20: note = Target: SCN10A; (+) strand; PAM type: YTN; PAM sequence: CTG
  source 1..20: mol_type = other DNA
tgcccaaactctctgtccac

SEQ ID NO: 58082 - DNA, 20 bp, synthetic construct
  misc_feature 1..20: note = Description of Artificial Sequence: Synthetic oligonucleotide
  misc_feature 1..20: note = Target: SCN10A; (+) strand; PAM type: YTN; PAM sequence: CTC
  source 1..20: mol_type = other DNA
tctgtccacttagctgtctt

SEQ ID NO: 58083 - DNA, 20 bp, synthetic construct
  misc_feature 1..20: note = Description of Artificial Sequence: Synthetic oligonucleotide
  misc_feature 1..20: note = Target: SCN10A; (+) strand; PAM type: YTN; PAM sequence: CTC
  source 1..20: mol_type = other DNA
tgtccacttagctgtcttat

SEQ ID NO: 58084 - DNA, 20 bp, synthetic construct
  misc_feature 1..20: note = Description of Artificial Sequence: Synthetic oligonucleotide
  misc_feature 1..20: note = Target: SCN10A; (+) strand; PAM type: YTN; PAM sequence: CTG
  source 1..20: mol_type = other DNA
tccacttagctgtcttataa

SEQ ID NO: 58085 - DNA, 20 bp, synthetic construct
  misc_feature 1..20: note = Description of Artificial Sequence: Synthetic oligonucleotide
  misc_feature 1..20: note = Target: SCN10A; (+) strand; PAM type: YTN; PAM sequence: CTT
  source 1..20: mol_type = other DNA
agctgtcttataaacacttg

SEQ ID NO: 58086 - DNA, 20 bp, synthetic construct
  misc_feature 1..20: note = Description of Artificial Sequence: Synthetic oligonucleotide
  misc_feature 1..20: note = Target: SCN10A; (+) strand; PAM type: YTN; PAM sequence: TTA
  source 1..20: mol_type = other DNA
gctgtcttataaacacttgg

SEQ ID NO: 58087 - DNA, 20 bp, synthetic construct
  misc_feature 1..20: note = Description of Artificial Sequence: Synthetic oligonucleotide
  misc_feature 1..20: note = Target: SCN10A; (+) strand; PAM type: YTN; PAM sequence: CTG
  source 1..20: mol_type = other DNA
tcttataaacacttgggcta

SEQ ID NO: 58088 - DNA, 20 bp, synthetic construct
  misc_feature 1..20: note = Description of Artificial Sequence: Synthetic oligonucleotide
  misc_feature 1..20: note = Target: SCN10A; (+) strand; PAM type: YTN; PAM sequence: CTT
  source 1..20: mol_type = other DNA
ataaacacttgggctagtat

SEQ ID NO: 58089 - DNA, 20 bp, synthetic construct
  misc_feature 1..20: note = Description of Artificial Sequence: Synthetic oligonucleotide
  misc_feature 1..20: note = Target: SCN10A; (+) strand; PAM type: YTN; PAM sequence: TTA
  source 1..20: mol_type = other DNA
taaacacttgggctagtatc

SEQ ID NO: 58090 - DNA, 20 bp, synthetic construct
  misc_feature 1..20: note = Description of Artificial Sequence: Synthetic oligonucleotide
  misc_feature 1..20: note = Target: SCN10A; (+) strand; PAM type: YTN; PAM sequence: CTT
  source 1..20: mol_type = other DNA
gggctagtatctcagatggc

SEQ ID NO: 58091 - DNA, 20 bp, synthetic construct
  misc_feature 1..20: note = Description of Artificial Sequence: Synthetic oligonucleotide
  misc_feature 1..20: note = Target: SCN10A; (+) strand; PAM type: YTN; PAM sequence: TTG
  source 1..20: mol_type = other DNA
ggctagtatctcagatggct

SEQ ID NO: 58092 - DNA, 20 bp, synthetic construct
  misc_feature 1..20: note = Description of Artificial Sequence: Synthetic oligonucleotide
  misc_feature 1..20: note = Target: SCN10A; (+) strand; PAM type: YTN; PAM sequence: CTA
  source 1..20: mol_type = other DNA
gtatctcagatggctttttc

SEQ ID NO: 58093 - DNA, 20 bp, synthetic construct
  misc_feature 1..20: note = Description of Artificial Sequence: Synthetic oligonucleotide
  misc_feature 1..20: note = Target: SCN10A; (+) strand; PAM type: YTN; PAM sequence: CTC
  source 1..20: mol_type = other DNA
agatggctttttcatcatcc

SEQ ID NO: 58094 - DNA, 20 bp, synthetic construct
  misc_feature 1..20: note = Description of Artificial Sequence: Synthetic oligonucleotide
  misc_feature 1..20: note = Target: SCN10A; (+) strand; PAM type: YTN; PAM sequence: CTT
  source 1..20: mol_type = other DNA
tttcatcatccacatgggat

SEQ ID NO: 58095 - DNA, 20 bp, synthetic construct
  misc_feature 1..20: note = Description of Artificial Sequence: Synthetic oligonucleotide
  misc_feature 1..20: note = Target: SCN10A; (+) strand; PAM type: YTN; PAM sequence: TTT
  source 1..20: mol_type = other DNA
ttcatcatccacatgggatt

SEQ ID NO: 58096 - DNA, 20 bp, synthetic construct
  misc_feature 1..20: note = Description of Artificial Sequence: Synthetic oligonucleotide
  misc_feature 1..20: note = Target: SCN10A; (+) strand; PAM type: YTN; PAM sequence: TTT
  source 1..20: mol_type = other DNA
tcatcatccacatgggattt

SEQ ID NO: 58097 - DNA, 20 bp, synthetic construct
  misc_feature 1..20: note = Description of Artificial Sequence: Synthetic oligonucleotide
  misc_feature 1..20: note = Target: SCN10A; (+) strand; PAM type: YTN; PAM sequence: TTT
  source 1..20: mol_type = other DNA
catcatccacatgggattta

SEQ ID NO: 58098 - DNA, 20 bp, synthetic construct
  misc_feature 1..20: note = Description of Artificial Sequence: Synthetic oligonucleotide
  misc_feature 1..20: note = Target: SCN10A; (+) strand; PAM type: YTN; PAM sequence: TTC
  source 1..20: mol_type = other DNA
atcatccacatgggatttag

SEQ ID NO: 58099 - DNA, 20 bp, synthetic construct
  misc_feature 1..20: note = Description of Artificial Sequence: Synthetic oligonucleotide
  misc_feature 1..20: note = Target: SCN10A; (+) strand; PAM type: YTN; PAM sequence: TTT
  source 1..20: mol_type = other DNA
agacgttgaagaagctgcac

SEQ ID NO: 58100 - DNA, 20 bp, synthetic construct
  misc_feature 1..20: note = Description of Artificial Sequence: Synthetic oligonucleotide
  misc_feature 1..20: note = Target: SCN10A; (+) strand; PAM type: YTN; PAM sequence: TTA
  source 1..20: mol_type = other DNA
gacgttgaagaagctgcaca

SEQ ID NO: 58101 - DNA, 20 bp, synthetic construct
  misc_feature 1..20: note = Description of Artificial Sequence: Synthetic oligonucleotide
  misc_feature 1..20: note = Target: SCN10A; (+) strand; PAM type: YTN; PAM sequence: TTG
  source 1..20: mol_type = other DNA
aagaagctgcacagtcagta

SEQ ID NO: 58102 - DNA, 20 bp, synthetic construct
  misc_feature 1..20: note = Description of Artificial Sequence: Synthetic oligonucleotide
  misc_feature 1..20: note = Target: SCN10A; (+) strand; PAM type: YTN; PAM sequence: CTG
  source 1..20: mol_type = other DNA
cacagtcagtatctgtgctc

SEQ ID NO: 58103 - DNA, 20 bp, synthetic construct
  misc_feature 1..20: note = Description of Artificial Sequence: Synthetic oligonucleotide
  misc_feature 1..20: note = Target: SCN10A; (+) strand; PAM type: YTN; PAM sequence: CTG
  source 1..20: mol_type = other DNA
tgctcccgggttcagtggta

SEQ ID NO: 58104 - DNA, 20 bp, synthetic construct
  misc_feature 1..20: note = Description of Artificial Sequence: Synthetic oligonucleotide
  misc_feature 1..20: note = Target: SCN10A; (+) strand; PAM type: YTN; PAM sequence: CTC
  source 1..20: mol_type = other DNA
ccgggttcagtggtacgaga

SEQ ID NO: 58105 - DNA, 20 bp, synthetic construct
  misc_feature 1..20: note = Description of Artificial Sequence: Synthetic oligonucleotide
  misc_feature 1..20: note = Target: SCN10A; (+) strand; PAM type: YTN; PAM sequence: TTC
  source 1..20: mol_type = other DNA
agtggtacgagagaggaaga

SEQ ID NO: 58106 - DNA, 20 bp, synthetic construct
  misc_feature 1..20: note = Description of Artificial Sequence: Synthetic oligonucleotide
  misc_feature 1..20: note = Target: SCN10A; (+) strand; PAM type: YTN; PAM sequence: TTA
  source 1..20: mol_type = other DNA
tttggttgaactcatctttt

SEQ ID NO: 58107 - DNA, 20 bp, synthetic construct
  misc_feature 1..20: note = Description of Artificial Sequence: Synthetic oligonucleotide
  misc_feature 1..20: note = Target: SCN10A; (+) strand; PAM type: YTN; PAM sequence: TTT
  source 1..20: mol_type = other DNA
ggttgaactcatcttttaga

SEQ ID NO: 58108 - DNA, 20 bp, synthetic construct
  misc_feature 1..20: note = Description of Artificial Sequence: Synthetic oligonucleotide
  misc_feature 1..20: note = Target: SCN10A; (+) strand; PAM type: YTN; PAM sequence: TTG
  source 1..20: mol_type = other DNA
gttgaactcatcttttagaa

SEQ ID NO: 58109 - DNA, 20 bp, synthetic construct
  misc_feature 1..20: note = Description of Artificial Sequence: Synthetic oligonucleotide
  misc_feature 1..20: note = Target: SCN10A; (+) strand; PAM type: YTN; PAM sequence: TTG
  source 1..20: mol_type = other DNA
aactcatcttttagaataaa

SEQ ID NO: 58110 - DNA, 20 bp, synthetic construct
  misc_feature 1..20: note = Description of Artificial Sequence: Synthetic oligonucleotide
  misc_feature 1..20: note = Target: SCN10A; (+) strand; PAM type: YTN; PAM sequence: CTC
  source 1..20: mol_type = other DNA
atcttttagaataaatcagg

SEQ ID NO: 58111 - DNA, 20 bp, synthetic construct
  misc_feature 1..20: note = Description of Artificial Sequence: Synthetic oligonucleotide
  misc_feature 1..20: note = Target: SCN10A; (+) strand; PAM type: YTN; PAM sequence: CTT
  source 1..20: mol_type = other DNA
ttagaataaatcaggcattc

SEQ ID NO: 58112 - DNA, 20 bp, synthetic construct
  misc_feature 1..20: note = Description of Artificial Sequence: Synthetic oligonucleotide
  misc_feature 1..20: note = Target: SCN10A; (+) strand; PAM type: YTN; PAM sequence: TTT
  source 1..20: mol_type = other DNA
tagaataaatcaggcattca

SEQ ID NO: 58113 - DNA, 20 bp, synthetic construct
  misc_feature 1..20: note = Description of Artificial Sequence: Synthetic oligonucleotide
  misc_feature 1..20: note = Target: SCN10A; (+) strand; PAM type: YTN; PAM sequence: TTT
  source 1..20: mol_type = other DNA
agaataaatcaggcattcag

SEQ ID NO: 58114 - DNA, 20 bp, synthetic construct
  misc_feature 1..20: note = Description of Artificial Sequence: Synthetic oligonucleotide
  misc_feature 1..20: note = Target: SCN10A; (+) strand; PAM type: YTN; PAM sequence: TTA
  source 1..20: mol_type = other DNA
gaataaatcaggcattcaga

SEQ ID NO: 58115 - DNA, 20 bp, synthetic construct
  misc_feature 1..20: note = Description of Artificial Sequence: Synthetic oligonucleotide
  misc_feature 1..20: note = Target: SCN10A; (+) strand; PAM type: YTN; PAM sequence: TTC
  source 1..20: mol_type = other DNA
agagaatagctgatttgaga

SEQ ID NO: 58116 - DNA, 20 bp, synthetic construct
  misc_feature 1..20: note = Description of Artificial Sequence: Synthetic oligonucleotide
  misc_feature 1..20: note = Target: SCN10A; (+) strand; PAM type: YTN; PAM sequence: CTG
  source 1..20: mol_type = other DNA
atttgagatggcttggtacc

SEQ ID NO: 58117 - DNA, 20 bp, synthetic construct
  misc_feature 1..20: note = Description of Artificial Sequence: Synthetic oligonucleotide
  misc_feature 1..20: note = Target: SCN10A; (+) strand; PAM type: YTN; PAM sequence: TTT
  source 1..20: mol_type = other DNA
gagatggcttggtacctctg

SEQ ID NO: 58118 - DNA, 20 bp, synthetic construct
  misc_feature 1..20: note = Description of Artificial Sequence: Synthetic oligonucleotide
  misc_feature 1..20: note = Target: SCN10A; (+) strand; PAM type: YTN; PAM sequence: TTG
  source 1..20: mol_type = other DNA
agatggcttggtacctctgc

SEQ ID NO: 58119 - DNA, 20 bp, synthetic construct
  misc_feature 1..20: note = Description of Artificial Sequence: Synthetic oligonucleotide
  misc_feature 1..20: note = Target: SCN10A; (+) strand; PAM type: YTN; PAM sequence: CTT
  source 1..20: mol_type = other DNA
ggtacctctgctatcccatc

SEQ ID NO: 58120 - DNA, 20 bp, synthetic construct
  misc_feature 1..20: note = Description of Artificial Sequence: Synthetic oligonucleotide
  misc_feature 1..20: note = Target: SCN10A; (+) strand; PAM type: YTN; PAM sequence: TTG
  source 1..20: mol_type = other DNA
gtacctctgctatcccatca

SEQ ID NO: 58121 - DNA, 20 bp, synthetic construct
  misc_feature 1..20: note = Description of Artificial Sequence: Synthetic oligonucleotide
  misc_feature 1..20: note = Target: SCN10A; (+) strand; PAM type: YTN; PAM sequence: CTC
  source 1..20: mol_type = other DNA
tgctatcccatcatcatctt

SEQ ID NO: 58122 - DNA, 20 bp, synthetic construct
  misc_feature 1..20: note = Description of Artificial Sequence: Synthetic oligonucleotide
  misc_feature 1..20: note = Target: SCN10A; (+) strand; PAM type: YTN; PAM sequence: CTG
  source 1..20: mol_type = other DNA
ctatcccatcatcatcttat

SEQ ID NO: 58123 - DNA, 20 bp, synthetic construct
  misc_feature 1..20: note = Description of Artificial Sequence: Synthetic oligonucleotide
  misc_feature 1..20: note = Target: SCN10A; (+) strand; PAM type: YTN; PAM sequence: CTA
  source 1..20: mol_type = other DNA
tcccatcatcatcttattaa

SEQ ID NO: 58124 - DNA, 20 bp, synthetic construct
  misc_feature 1..20: note = Description of Artificial Sequence: Synthetic oligonucleotide
  misc_feature 1..20: note = Target: SCN10A; (+) strand; PAM type: YTN; PAM sequence: CTT
  source 1..20: mol_type = other DNA
attaacctgcatctgtggat

SEQ ID NO: 58125 - DNA, 20 bp, synthetic construct
  misc_feature 1..20: note = Description of Artificial Sequence: Synthetic oligonucleotide
  misc_feature 1..20: note = Target: SCN10A; (+) strand; PAM type: YTN; PAM sequence: TTA
  source 1..20: mol_type = other DNA
ttaacctgcatctgtggatg

SEQ ID NO: 58126 - DNA, 20 bp, synthetic construct
  misc_feature 1..20: note = Description of Artificial Sequence: Synthetic oligonucleotide
  misc_feature 1..20: note = Target: SCN10A; (+) strand; PAM type: YTN; PAM sequence: TTA
  source 1..20: mol_type = other DNA
acctgcatctgtggatgctg

SEQ ID NO: 58127 - DNA, 20 bp, synthetic construct
  misc_feature 1..20: note = Description of Artificial Sequence: Synthetic oligonucleotide
  misc_feature 1..20: note = Target: SCN10A; (+) strand; PAM type: YTN; PAM sequence: CTG
  source 1..20: mol_type = other DNA
catctgtggatgctgccaac

SEQ ID NO: 58128 - DNA, 20 bp, synthetic construct
  misc_feature 1..20: note = Description of Artificial Sequence: Synthetic oligonucleotide
  misc_feature 1..20: note = Target: SCN10A; (+) strand; PAM type: YTN; PAM sequence: CTG
  source 1..20: mol_type = other DNA
tggatgctgccaactcccag

SEQ ID NO: 58129 - DNA, 20 bp, synthetic construct
  misc_feature 1..20: note = Description of Artificial Sequence: Synthetic oligonucleotide
  misc_feature 1..20: note = Target: SCN10A; (+) strand; PAM type: YTN; PAM sequence: CTG
  source 1..20: mol_type = other DNA
ccaactcccagtaagcatct

SEQ ID NO: 58130 - DNA, 20 bp, synthetic construct
  misc_feature 1..20: note = Description of Artificial Sequence: Synthetic oligonucleotide
  misc_feature 1..20: note = Target: SCN10A; (+) strand; PAM type: YTN; PAM sequence: CTC
  source 1..20: mol_type = other DNA
ccagtaagcatcttgagagc

SEQ ID NO: 58131 - DNA, 20 bp, synthetic construct
  misc_feature 1..20: note = Description of Artificial Sequence: Synthetic oligonucleotide
  misc_feature 1..20: note = Target: SCN10A; (+) strand; PAM type: YTN; PAM sequence: CTT
  source 1..20: mol_type = other DNA
gagagcctctttgacttctt

SEQ ID NO: 58132 - DNA, 20 bp, synthetic construct
  misc_feature 1..20: note = Description of Artificial Sequence: Synthetic oligonucleotide
  misc_feature 1..20: note = Target: SCN10A; (+) strand; PAM type: YTN; PAM sequence: TTG
  source 1..20: mol_type = other DNA
agagcctctttgacttctta

SEQ ID NO: 58133 - DNA, 20 bp, synthetic construct
  misc_feature 1..20: note = Description of Artificial Sequence: Synthetic oligonucleotide
  misc_feature 1..20: note = Target: SCN10A; (+) strand; PAM type: YTN; PAM sequence: CTC
  source 1..20: mol_type = other DNA
tttgacttcttatgggctaa

SEQ ID NO: 58134 - DNA, 20 bp, synthetic construct
  misc_feature 1..20: note = Description of Artificial Sequence: Synthetic oligonucleotide
  misc_feature 1..20: note = Target: SCN10A; (+) strand; PAM type: YTN; PAM sequence: CTT
  source 1..20: mol_type = other DNA
tgacttcttatgggctaata

SEQ ID NO: 58135 - DNA, 20 bp, synthetic construct
  misc_feature 1..20: note = Description of Artificial Sequence: Synthetic oligonucleotide
  misc_feature 1..20: note = Target: SCN10A; (+) strand; PAM type: YTN; PAM sequence: TTT
  source 1..20: mol_type = other DNA
gacttcttatgggctaatag

SEQ ID NO: 58136 - DNA, 20 bp, synthetic construct
  misc_feature 1..20: note = Description of Artificial Sequence: Synthetic oligonucleotide
  misc_feature 1..20: note = Target: SCN10A; (+) strand; PAM type: YTN; PAM sequence: TTG
  source 1..20: mol_type = other DNA
acttcttatgggctaatagt

SEQ ID NO: 58137 - DNA, 20 bp, synthetic construct
  misc_feature 1..20: note = Description of Artificial Sequence: Synthetic oligonucleotide
  misc_feature 1..20: note = Target: SCN10A; (+) strand; PAM type: YTN; PAM sequence: CTT
  source 1..20: mol_type = other DNA
cttatgggctaatagtgaca

SEQ ID NO: 58138 - DNA, 20 bp, synthetic construct
  misc_feature 1..20: note = Description of Artificial Sequence: Synthetic oligonucleotide
  misc_feature 1..20: note = Target: SCN10A; (+) strand; PAM type: YTN; PAM sequence: TTC
  source 1..20: mol_type = other DNA
ttatgggctaatagtgacag

SEQ ID NO: 58139 - DNA, 20 bp, synthetic construct
  misc_feature 1..20: note = Description of Artificial Sequence: Synthetic oligonucleotide
  misc_feature 1..20: note = Target: SCN10A; (+) strand; PAM type: YTN; PAM sequence: CTT
  source 1..20: mol_type = other DNA
atgggctaatagtgacagaa

SEQ ID NO: 58140 - DNA, 20 bp, synthetic construct
  misc_feature 1..20: note = Description of Artificial Sequence: Synthetic oligonucleotide
  misc_feature 1..20: note = Target: SCN10A; (+) strand; PAM type: YTN; PAM sequence: TTA
  source 1..20: mol_type = other DNA
tgggctaatagtgacagaaa

SEQ ID NO: 58141 - DNA, 20 bp, synthetic construct
  misc_feature 1..20: note = Description of Artificial Sequence: Synthetic oligonucleotide
  misc_feature 1..20: note = Target: SCN10A; (+) strand; PAM type: YTN; PAM sequence: CTA
  source 1..20: mol_type = other DNA
atagtgacagaaaagggaga

SEQ ID NO: 58142 - DNA, 20 bp, synthetic construct
  misc_feature 1..20: note = Description of Artificial Sequence: Synthetic oligonucleotide
  misc_feature 1..20: note = Target: SCN10A; (+) strand; PAM type: YTN; PAM sequence: CTC
  source 1..20: mol_type = other DNA
ggcaaatctgtattcttgag

SEQ ID NO: 58143 - DNA, 20 bp, synthetic construct
  misc_feature 1..20: note = Description of Artificial Sequence: Synthetic oligonucleotide
  misc_feature 1..20: note = Target: SCN10A; (+) strand; PAM type: YTN; PAM sequence: CTG
  source 1..20: mol_type = other DNA
tattcttgaggcatgtgaga

SEQ ID NO: 58144 - DNA, 20 bp, synthetic construct
  misc_feature 1..20: note = Description of Artificial Sequence: Synthetic oligonucleotide
  misc_feature 1..20: note = Target: SCN10A; (+) strand; PAM type: YTN; PAM sequence: TTC
  source 1..20: mol_type = other DNA
ttgaggcatgtgagatgtat

SEQ ID NO: 58145 - DNA, 20 bp, synthetic construct
  misc_feature 1..20: note = Description of Artificial Sequence: Synthetic oligonucleotide
  misc_feature 1..20: note = Target: SCN10A; (+) strand; PAM type: YTN; PAM sequence: CTT
  source 1..20: mol_type = other DNA
gaggcatgtgagatgtatca

SEQ ID NO: 58146 - DNA, 20 bp, synthetic construct
  misc_feature 1..20: note = Description of Artificial Sequence: Synthetic oligonucleotide
  misc_feature 1..20: note = Target: SCN10A; (+) strand; PAM type: YTN; PAM sequence: TTG
  source 1..20: mol_type = other DNA
aggcatgtgagatgtatcag

SEQ ID NO: 58147 - DNA, 20 bp, synthetic construct
  misc_feature 1..20: note = Description of Artificial Sequence: Synthetic oligonucleotide
  misc_feature 1..20: note = Target: SCN10A; (+) strand; PAM type: YTN; PAM sequence: CTG
  source 1..20: mol_type = other DNA
tgctttgtaattatacaaat

SEQ ID NO: 58148 - DNA, 20 bp, synthetic construct
  misc_feature 1..20: note = Description of Artificial Sequence: Synthetic oligonucleotide
  misc_feature 1..20: note = Target: SCN10A; (+) strand; PAM type: YTN; PAM sequence: CTT
  source 1..20: mol_type = other DNA
tgtaattatacaaatggaaa

SEQ ID NO: 58149 - DNA, 20 bp, synthetic construct
  misc_feature 1..20: note = Description of Artificial Sequence: Synthetic oligonucleotide
  misc_feature 1..20: note = Target: SCN10A; (+) strand; PAM type: YTN; PAM sequence: TTT
  source 1..20: mol_type = other DNA
gtaattatacaaatggaaaa

SEQ ID NO: 58150 - DNA, 20 bp, synthetic construct
  misc_feature 1..20: note = Description of Artificial Sequence: Synthetic oligonucleotide
  misc_feature 1..20: note = Target: SCN10A; (+) strand; PAM type: YTN; PAM sequence: TTG
  source 1..20: mol_type = other DNA
taattatacaaatggaaaat

SEQ ID NO: 58151 - DNA, 20 bp, synthetic construct
  misc_feature 1..20: note = Description of Artificial Sequence: Synthetic oligonucleotide
  misc_feature 1..20: note = Target: SCN10A; (+) strand; PAM type: YTN; PAM sequence: TTA
  source 1..20: mol_type = other DNA
tacaaatggaaaatcttatg

SEQ ID NO: 58152 - DNA, 20 bp, synthetic construct
  misc_feature 1..20: note = Description of Artificial Sequence: Synthetic oligonucleotide
  misc_feature 1..20: note = Target: SCN10A; (+) strand; PAM type: YTN; PAM sequence: CTT
  source 1..20: mol_type = other DNA
atgaaatgatcaaatatata

SEQ ID NO: 58153 - DNA, 20 bp, synthetic construct
  misc_feature 1..20: note = Description of Artificial Sequence: Synthetic oligonucleotide
  misc_feature 1..20: note = Target: SCN10A; (+) strand; PAM type: YTN; PAM sequence: TTA
  source 1..20: mol_type = other DNA
tgaaatgatcaaatatatag

SEQ ID NO: 58154 - DNA, 20 bp, synthetic construct
  misc_feature 1..20: note = Description of Artificial Sequence: Synthetic oligonucleotide
  misc_feature 1..20: note = Target: SCN10A; (+) strand; PAM type: YTN; PAM sequence: TTG
  source 1..20: mol_type = other DNA
gctatatatttgaatctttg

SEQ ID NO: 58155 - DNA, 20 bp, synthetic construct
  misc_feature 1..20: note = Description of Artificial Sequence: Synthetic oligonucleotide
  misc_feature 1..20: note = Target: SCN10A; (+) strand; PAM type: YTN; PAM sequence: CTA
  source 1..20: mol_type = other DNA
tatatttgaatctttgtgat

SEQ ID NO: 58156 - DNA, 20 bp, synthetic construct
  misc_feature 1..20: note = Description of Artificial Sequence: Synthetic oligonucleotide
  misc_feature 1..20: note = Target: SCN10A; (+) strand; PAM type: YTN; PAM sequence: TTT
  source 1..20: mol_type = other DNA
gaatctttgtgattgtggct

SEQ ID NO: 58157 - DNA, 20 bp, synthetic construct
  misc_feature 1..20: note = Description of Artificial Sequence: Synthetic oligonucleotide
  misc_feature 1..20: note = Target: SCN10A; (+) strand; PAM type: YTN; PAM sequence: TTG
  source 1..20: mol_type = other DNA
aatctttgtgattgtggctg

SEQ ID NO: 58158 - DNA, 20 bp, synthetic construct
  misc_feature 1..20: note = Description of Artificial Sequence: Synthetic oligonucleotide
  misc_feature 1..20: note = Target: SCN10A; (+) strand; PAM type: YTN; PAM sequence: CTT
  source 1..20: mol_type = other DNA
tgtgattgtggctgggaatg

SEQ ID NO: 58159 - DNA, 20 bp, synthetic construct
  misc_feature 1..20: note = Description of Artificial Sequence: Synthetic oligonucleotide
  misc_feature 1..20: note = Target: SCN10A; (+) strand; PAM type: YTN; PAM sequence: TTT
  source 1..20: mol_type = other DNA
gtgattgtggctgggaatgg

SEQ ID NO: 58160 - DNA, 20 bp, synthetic construct
  misc_feature 1..20: note = Description of Artificial Sequence: Synthetic oligonucleotide
  misc_feature 1..20: note = Target: SCN10A; (+) strand; PAM type: YTN; PAM sequence: TTG
  source 1..20: mol_type = other DNA
tgattgtggctgggaatggg

SEQ ID NO: 58161 - DNA, 20 bp, synthetic construct
  misc_feature 1..20: note = Description of Artificial Sequence: Synthetic oligonucleotide
  misc_feature 1..20: note = Target: SCN10A; (+) strand; PAM type: YTN; PAM sequence: TTG
  source 1..20: mol_type = other DNA
tggctgggaatgggccaaga

SEQ ID NO: 58162 - DNA, 20 bp, synthetic construct
  misc_feature 1..20: note = Description of Artificial Sequence: Synthetic oligonucleotide
  misc_feature 1..20: note = Target: SCN10A; (+) strand; PAM type: YTN; PAM sequence: CTG
  source 1..20: mol_type = other DNA
ggaatgggccaagagttaat

SEQ ID NO: 58163 - DNA, 20 bp, synthetic construct
  misc_feature 1..20: note = Description of Artificial Sequence: Synthetic oligonucleotide
  misc_feature 1..20: note = Target: SCN10A; (+) strand; PAM type: YTN; PAM sequence: TTA
  source 1..20: mol_type = other DNA
atggaagatcatgactgtca

SEQ ID NO: 58164 - DNA, 20 bp, synthetic construct
  misc_feature 1..20: note = Description of Artificial Sequence: Synthetic oligonucleotide
  misc_feature 1..20: note = Target: SCN10A; (+) strand; PAM type: YTN; PAM sequence: CTG
  source 1..20: mol_type = other DNA
tcattacaatccctatgtcc

SEQ ID NO: 58165 - DNA, 20 bp, synthetic construct
  misc_feature 1..20: note = Description of Artificial Sequence: Synthetic oligonucleotide
  misc_feature 1..20: note = Target: SCN10A; (+) strand; PAM type: YTN; PAM sequence: TTA
  source 1..20: mol_type = other DNA
caatccctatgtcctatgtt

SEQ ID NO: 58166 - DNA, 20 bp, synthetic construct
  misc_feature 1..20: note = Description of Artificial Sequence: Synthetic oligonucleotide
  misc_feature 1..20: note = Target: SCN10A; (+) strand; PAM type: YTN; PAM sequence: CTA
  source 1..20: mol_type = other DNA
tgtcctatgttgttataggg

SEQ ID NO: 58167 - DNA, 20 bp, synthetic construct
  misc_feature 1..20: note = Description of Artificial Sequence: Synthetic oligonucleotide
  misc_feature 1..20: note = Target: SCN10A; (+) strand; PAM type: YTN; PAM sequence: CTA
  source 1..20: mol_type = other DNA
tgttgttatagggagtcttt

SEQ ID NO: 58168 - DNA, 20 bp, synthetic construct
  misc_feature 1..20: note = Description of Artificial Sequence: Synthetic oligonucleotide
  misc_feature 1..20: note = Target: SCN10A; (+) strand; PAM type: YTN; PAM sequence: TTG
  source 1..20: mol_type = other DNA
ttatagggagtctttgcttt

SEQ ID NO: 58169 - DNA, 20 bp, synthetic construct
  misc_feature 1..20: note = Description of Artificial Sequence: Synthetic oligonucleotide
  misc_feature 1..20: note = Target: SCN10A; (+) strand; PAM type: YTN; PAM sequence: TTA
  source 1..20: mol_type = other DNA
tagggagtctttgcttttct

SEQ ID NO: 58170 - DNA, 20 bp, synthetic construct
  misc_feature 1..20: note = Description of Artificial Sequence: Synthetic oligonucleotide
  misc_feature 1..20: note = Target: SCN10A; (+) strand; PAM type: YTN; PAM sequence: CTT
  source 1..20: mol_type = other DNA
tgcttttcttcatctcaaaa

SEQ ID NO: 58171 - DNA, 20 bp, synthetic construct
  misc_feature 1..20: note = Description of Artificial Sequence: Synthetic oligonucleotide
  misc_feature 1..20: note = Target: SCN10A; (+) strand; PAM type: YTN; PAM sequence: TTT
  source 1..20: mol_type = other DNA
gcttttcttcatctcaaaat

SEQ ID NO: 58172 - DNA, 20 bp, synthetic construct
  misc_feature 1..20: note = Description of Artificial Sequence: Synthetic oligonucleotide
  misc_feature 1..20: note = Target: SCN10A; (+) strand; PAM type: YTN; PAM sequence: TTG
  source 1..20: mol_type = other DNA
cttttcttcatctcaaaatc

SEQ ID NO: 58173 - DNA, 20 bp, synthetic construct
  misc_feature 1..20: note = Description of Artificial Sequence: Synthetic oligonucleotide
  misc_feature 1..20: note = Target: SCN10A; (+) strand; PAM type: YTN; PAM sequence: CTT
  source 1..20: mol_type = other DNA
ttcttcatctcaaaatctgc

SEQ ID NO: 58174 - DNA, 20 bp, synthetic construct
  misc_feature 1..20: note = Description of Artificial Sequence: Synthetic oligonucleotide
  misc_feature 1..20: note = Target: SCN10A; (+) strand; PAM type: YTN; PAM sequence: TTT
  source 1..20: mol_type = other DNA
tcttcatctcaaaatctgca

SEQ ID NO: 58175 - DNA, 20 bp, synthetic construct
  misc_feature 1..20: note = Description of Artificial Sequence: Synthetic oligonucleotide
  misc_feature 1..20: note = Target: SCN10A; (+) strand; PAM type: YTN; PAM sequence: TTT
  source 1..20: mol_type = other DNA
cttcatctcaaaatctgcaa

SEQ ID NO: 58176 - DNA, 20 bp, synthetic construct
  misc_feature 1..20: note = Description of Artificial Sequence: Synthetic oligonucleotide
  misc_feature 1..20: note = Target: SCN10A; (+) strand; PAM type: YTN; PAM sequence: TTC
  source 1..20: mol_type = other DNA
ttcatctcaaaatctgcaac

SEQ ID NO: 58177 - DNA, 20 bp, synthetic construct
  misc_feature 1..20: note = Description of Artificial Sequence: Synthetic oligonucleotide
  misc_feature 1..20: note = Target: SCN10A; (+) strand; PAM type: YTN; PAM sequence: CTT
  source 1..20: mol_type = other DNA
catctcaaaatctgcaacat

SEQ ID NO: 58178 - DNA, 20 bp, synthetic construct
  misc_feature 1..20: note = Description of Artificial Sequence: Synthetic oligonucleotide
  misc_feature 1..20: note = Target: SCN10A; (+) strand; PAM type: YTN; PAM sequence: TTC
  source 1..20: mol_type = other DNA
atctcaaaatctgcaacatg

SEQ ID NO: 58179 - DNA, 20 bp, synthetic construct
  misc_feature 1..20: note = Description of Artificial Sequence: Synthetic oligonucleotide
  misc_feature 1..20: note = Target: SCN10A; (+) strand; PAM type: YTN; PAM sequence: CTC
  source 1..20: mol_type = other DNA
aaaatctgcaacatgccttt

SEQ ID NO: 58180 - DNA, 20 bp, synthetic construct
  misc_feature 1..20: note = Description of Artificial Sequence: Synthetic oligonucleotide
  misc_feature 1..20: note = Target: SCN10A; (+) strand; PAM type: YTN; PAM sequence: CTG
  source 1..20: mol_type = other DNA
caacatgcctttggcctaaa

SEQ ID NO: 58181 - DNA, 20 bp, synthetic construct
  misc_feature 1..20: note = Description of Artificial Sequence: Synthetic oligonucleotide
  misc_feature 1..20: note = Target: SCN10A; (+) strand; PAM type: YTN; PAM sequence: CTT
  source 1..20: mol_type = other DNA
tggcctaaataaactcctct

SEQ ID NO: 58182 - DNA, 20 bp, synthetic construct
  misc_feature 1..20: note = Description of Artificial Sequence: Synthetic oligonucleotide
  misc_feature 1..20: note = Target: SCN10A; (+) strand; PAM type: YTN; PAM sequence: TTT
  source 1..20: mol_type = other DNA
ggcctaaataaactcctctg

SEQ ID NO: 58183 - DNA, 20 bp, synthetic construct
  misc_feature 1..20: note = Description of Artificial Sequence: Synthetic oligonucleotide
  misc_feature 1..20: note = Target: SCN10A; (+) strand; PAM type: YTN; PAM sequence: TTG
  source 1..20: mol_type = other DNA
gcctaaataaactcctctga

SEQ ID NO: 58184 - DNA, 20 bp, synthetic construct
  misc_feature 1..20: note = Description of Artificial Sequence: Synthetic oligonucleotide
  misc_feature 1..20: note = Target: SCN10A; (+) strand; PAM type: YTN; PAM sequence: CTA
  source 1..20: mol_type = other DNA
aataaactcctctgacaatt

SEQ ID NO: 58185 - DNA, 20 bp, synthetic construct
  misc_feature 1..20: note = Description of Artificial Sequence: Synthetic oligonucleotide
  misc_feature 1..20: note = Target: SCN10A; (+) strand; PAM type: YTN; PAM sequence: CTC
  source 1..20: mol_type = other DNA
ctctgacaattcttactcca

SEQ ID NO: 58186 - DNA, 20 bp, synthetic construct
  misc_feature 1..20: note = Description of Artificial Sequence: Synthetic oligonucleotide
  misc_feature 1..20: note = Target: SCN10A; (+) strand; PAM type: YTN; PAM sequence: CTC
  source 1..20: mol_type = other DNA
tgacaattcttactccattc

SEQ ID NO: 58187 - DNA, 20 bp, synthetic construct
  misc_feature 1..20: note = Description of Artificial Sequence: Synthetic oligonucleotide
  misc_feature 1..20: note = Target: SCN10A; (+) strand; PAM type: YTN; PAM sequence: CTG
  source 1..20: mol_type = other DNA
acaattcttactccattcag

SEQ ID NO: 58188 - DNA, 20 bp, synthetic construct
  misc_feature 1..20: note = Description of Artificial Sequence: Synthetic oligonucleotide
  misc_feature 1..20: note = Target: SCN10A; (+) strand; PAM type: YTN; PAM sequence: TTC
  source 1..20: mol_type = other DNA
ttactccattcagttcatac

SEQ ID NO: 58189 - DNA, 20 bp, synthetic construct
  misc_feature 1..20: note = Description of Artificial Sequence: Synthetic oligonucleotide
  misc_feature 1..20: note = Target: SCN10A; (+) strand; PAM type: YTN; PAM sequence: CTT
  source 1..20: mol_type = other DNA
actccattcagttcatacaa

SEQ ID NO: 58190 - DNA, 20 bp, synthetic construct
  misc_feature 1..20: note = Description of Artificial Sequence: Synthetic oligonucleotide
  misc_feature 1..20: note = Target: SCN10A; (+) strand; PAM type: YTN; PAM sequence: TTA
  source 1..20: mol_type = other DNA
ctccattcagttcatacaat

SEQ ID NO: 58191 - DNA, 20 bp, synthetic construct
  misc_feature 1..20: note = Description of Artificial Sequence: Synthetic oligonucleotide
  misc_feature 1..20: note = Target: SCN10A; (+) strand; PAM type: YTN; PAM sequence: CTC
  source 1..20: mol_type = other DNA
cattcagttcatacaattaa

SEQ ID NO: 58192 - DNA, 20 bp, synthetic construct
  misc_feature 1..20: note = Description of Artificial Sequence: Synthetic oligonucleotide
  misc_feature 1..20: note = Target: SCN10A; (+) strand; PAM type: YTN; PAM sequence: TTC
  source 1..20: mol_type = other DNA
agttcatacaattaatcttt

SEQ ID NO: 58193 - DNA, 20 bp, synthetic construct
  misc_feature 1..20: note = Description of Artificial Sequence: Synthetic oligonucleotide
  misc_feature 1..20: note = Target: SCN10A; (+) strand; PAM type: YTN; PAM sequence: TTC
  source 1..20: mol_type = other DNA
atacaattaatcttttgggg

SEQ ID NO: 58194 - DNA, 20 bp, synthetic construct
  misc_feature 1..20: note = Description of Artificial Sequence: Synthetic oligonucleotide
  misc_feature 1..20: note = Target: SCN10A; (+) strand; PAM type: YTN; PAM sequence: TTA
  source 1..20: mol_type = other DNA
atcttttgggggcttaattc

SEQ ID NO: 58195 - DNA, 20 bp, synthetic construct
  misc_feature 1..20: note = Description of Artificial Sequence: Synthetic oligonucleotide
  misc_feature 1..20: note = Target: SCN10A; (+) strand; PAM type: YTN; PAM sequence: CTT
  source 1..20: mol_type = other DNA
ttgggggcttaattcctatt

SEQ ID NO: 58196 - DNA, 20 bp, synthetic construct
  misc_feature 1..20: note = Description of Artificial Sequence: Synthetic oligonucleotide
  misc_feature 1..20: note = Target: SCN10A; (+) strand; PAM type: YTN; PAM sequence: TTT
  source 1..20: mol_type = other DNA
tgggggcttaattcctattt

SEQ ID NO: 58197 - DNA, 20 bp, synthetic construct
  misc_feature 1..20: note = Description of Artificial Sequence: Synthetic oligonucleotide
  misc_feature 1..20: note = Target: SCN10A; (+) strand; PAM type: YTN; PAM sequence: TTT
  source 1..20: mol_type = other DNA
gggggcttaattcctatttt

SEQ ID NO: 58198 - DNA, 20 bp, synthetic construct
  misc_feature 1..20: note = Description of Artificial Sequence: Synthetic oligonucleotide
  misc_feature 1..20: note = Target: SCN10A; (+) strand; PAM type: YTN; PAM sequence: TTG
  source 1..20: mol_type = other DNA
ggggcttaattcctatttta

SEQ ID NO: 58199 - DNA, 20 bp, synthetic construct
  misc_feature 1..20: note = Description of Artificial Sequence: Synthetic oligonucleotide
  misc_feature 1..20: note = Target: SCN10A; (+) strand; PAM type: YTN; PAM sequence: CTT
  source 1..20: mol_type = other DNA
aattcctattttatctcttg

SEQ ID NO: 58200 - DNA, 20 bp, synthetic construct
  misc_feature 1..20: note = Description of Artificial Sequence: Synthetic oligonucleotide
  misc_feature 1..20: note = Target: SCN10A; (+) strand; PAM type: YTN; PAM sequence: TTA
  source 1..20: mol_type = other DNA
attcctattttatctcttgt

SEQ ID NO: 58201 - DNA, 20 bp, synthetic construct
  misc_feature 1..20: note = Description of Artificial Sequence: Synthetic oligonucleotide
  misc_feature 1..20: note = Target: SCN10A; (+) strand; PAM type: YTN; PAM sequence: TTC
  source 1..20: mol_type = other DNA
ctattttatctcttgttctt

SEQ ID NO: 58202 - DNA, 20 bp, synthetic construct
  misc_feature 1..20: note = Description of Artificial Sequence: Synthetic oligonucleotide
  misc_feature 1..20: note = Target: SCN10A; (+) strand; PAM type: YTN; PAM sequence: CTA
  source 1..20: mol_type = other DNA
ttttatctcttgttcttgga

SEQ ID NO: 58203 - DNA, 20 bp, synthetic construct
  misc_feature 1..20: note = Description of Artificial Sequence: Synthetic oligonucleotide
  misc_feature 1..20: note = Target: SCN10A; (+) strand; PAM type: YTN; PAM sequence: TTT
  source 1..20: mol_type = other DNA
tatctcttgttcttggagca

SEQ ID NO: 58204 - DNA, 20 bp, synthetic construct
  misc_feature 1..20: note = Description of Artificial Sequence: Synthetic oligonucleotide
  misc_feature 1..20: note = Target: SCN10A; (+) strand; PAM type: YTN; PAM sequence: TTT
  source 1..20: mol_type = other DNA
atctcttgttcttggagcag

SEQ ID NO: 58205 - DNA, 20 bp, synthetic construct
  misc_feature 1..20: note = Description of Artificial Sequence: Synthetic oligonucleotide
  misc_feature 1..20: note = Target: SCN10A; (+) strand; PAM type: YTN; PAM sequence: TTA
  source 1..20: mol_type = other DNA
tctcttgttcttggagcagt

SEQ ID NO: 58206 - DNA, 20 bp, synthetic construct
  misc_feature 1..20: note = Description of Artificial Sequence: Synthetic oligonucleotide
  misc_feature 1..20: note = Target: SCN10A; (+) strand; PAM type: YTN; PAM sequence: CTC
  source 1..20: mol_type = other DNA
ttgttcttggagcagtgccc

SEQ ID NO: 58207 - DNA, 20 bp, synthetic construct
  misc_feature 1..20: note = Description of Artificial Sequence: Synthetic oligonucleotide
  misc_feature 1..20: note = Target: SCN10A; (+) strand; PAM type: YTN; PAM sequence: CTT
  source 1..20: mol_type = other DNA
gttcttggagcagtgcccat

SEQ ID NO: 58208 - DNA, 20 bp, synthetic construct
  misc_feature 1..20: note = Description of Artificial Sequence: Synthetic oligonucleotide
  misc_feature 1..20: note = Target: SCN10A; (+) strand; PAM type: YTN; PAM sequence: TTG
  source 1..20: mol_type = other DNA
ttcttggagcagtgcccatc

SEQ ID NO: 58209 - DNA, 20 bp, synthetic construct
  misc_feature 1..20: note = Description of Artificial Sequence: Synthetic oligonucleotide
  misc_feature 1..20: note = Target: SCN10A; (+) strand; PAM type: YTN; PAM sequence: TTC
  source 1..20: mol_type = other DNA
ttggagcagtgcccatcata

SEQ ID NO: 58210 - DNA, 20 bp, synthetic construct
  misc_feature 1..20: note = Description of Artificial Sequence: Synthetic oligonucleotide
  misc_feature 1..20: note = Target: SCN10A; (+) strand; PAM type: YTN; PAM sequence: CTT
  source 1..20: mol_type = other DNA
ggagcagtgcccatcatata

SEQ ID NO: 58211 - DNA, 20 bp, synthetic construct
  misc_feature 1..20: note = Description of Artificial Sequence: Synthetic oligonucleotide
  misc_feature 1..20: note = Target: SCN10A; (+) strand; PAM type: YTN; PAM sequence: TTG
  source 1..20: mol_type = other DNA
gagcagtgcccatcatatag

SEQ ID NO: 58212 - DNA, 20 bp, synthetic construct
  misc_feature 1..20: note = Description of Artificial Sequence: Synthetic oligonucleotide
  misc_feature 1..20: note = Target: SCN10A; (+) strand; PAM type: YTN; PAM sequence: TTA
  source 1..20: mol_type = other DNA
ataacatttgcaggatgaat

SEQ ID NO: 58213 - DNA, 20 bp, synthetic construct
  misc_feature 1..20: note = Description of Artificial Sequence: Synthetic oligonucleotide
  misc_feature 1..20: note = Target: SCN10A; (+) strand; PAM type: YTN; PAM sequence: TTT
  source 1..20: mol_type = other DNA
gcaggatgaatgaaagaaac

SEQ ID NO: 58214 - DNA, 20 bp, synthetic construct
  misc_feature 1..20: note = Description of Artificial Sequence: Synthetic oligonucleotide
  misc_feature 1..20: note = Target: SCN10A; (+) strand; PAM type: YTN; PAM sequence: TTG
  source 1..20: mol_type = other DNA
caggatgaatgaaagaaact

SEQ ID NO: 58215 - DNA, 20 bp, synthetic construct
  misc_feature 1..20: note = Description of Artificial Sequence: Synthetic oligonucleotide
  misc_feature 1..20: note = Target: SCN10A; (+) strand; PAM type: YTN; PAM sequence: CTA
  source 1..20: mol_type = other DNA
ctggccataccttttatcta

SEQ ID NO: 58216 - DNA, 20 bp, synthetic construct
  misc_feature 1..20: note = Description of Artificial Sequence: Synthetic oligonucleotide
  misc_feature 1..20: note = Target: SCN10A; (+) strand; PAM type: YTN; PAM sequence: CTG
  source 1..20: mol_type = other DNA
gccataccttttatctactg

SEQ ID NO: 58217 - DNA, 20 bp, synthetic construct
  misc_feature 1..20: note = Description of Artificial Sequence: Synthetic oligonucleotide
  misc_feature 1..20: note = Target: SCN10A; (+) strand; PAM type: YTN; PAM sequence: CTT
  source 1..20: mol_type = other DNA
ttatctactggatcatcatt

SEQ ID NO: 58218 - DNA, 20 bp, synthetic construct
  misc_feature 1..20: note = Description of Artificial Sequence: Synthetic oligonucleotide
  misc_feature 1..20: note = Target: SCN10A; (+) strand; PAM type: YTN; PAM sequence: TTT
  source 1..20: mol_type = other DNA
tatctactggatcatcattc

SEQ ID NO: 58219 - DNA, 20 bp, synthetic construct
  misc_feature 1..20: note = Description of Artificial Sequence: Synthetic oligonucleotide
  misc_feature 1..20: note = Target: SCN10A; (+) strand; PAM type: YTN; PAM sequence: TTT
  source 1..20: mol_type = other DNA
atctactggatcatcattct

SEQ ID NO: 58220 - DNA, 20 bp, synthetic construct
  misc_feature 1..20: note = Description of Artificial Sequence: Synthetic oligonucleotide
  misc_feature 1..20: note = Target: SCN10A; (+) strand; PAM type: YTN; PAM sequence: TTA
  source 1..20: mol_type = other DNA
tctactggatcatcattctc

SEQ ID NO: 58221 - DNA, 20 bp, synthetic construct
  misc_feature 1..20: note = Description of Artificial Sequence: Synthetic oligonucleotide
  misc_feature 1..20: note = Target: SCN10A; (+) strand; PAM type: YTN; PAM sequence: CTA
  source 1..20: mol_type = other DNA
ctggatcatcattctcatga

SEQ ID NO: 58222 - DNA, 20 bp, synthetic construct
  misc_feature 1..20: note = Description of Artificial Sequence: Synthetic oligonucleotide
  misc_feature 1..20: note = Target: SCN10A; (+) strand; PAM type: YTN; PAM sequence: CTG
  source 1..20: mol_type = other DNA
gatcatcattctcatgatta

SEQ ID NO: 58223 - DNA, 20 bp, synthetic construct
  misc_feature 1..20: note = Description of Artificial Sequence: Synthetic oligonucleotide
  misc_feature 1..20: note = Target: SCN10A; (+) strand; PAM type: YTN; PAM sequence: TTC
  source 1..20: mol_type = other DNA
tcatgattatactttttctt

SEQ ID NO: 58224 - DNA, 20 bp, synthetic construct
  misc_feature 1..20: note = Description of Artificial Sequence: Synthetic oligonucleotide
  misc_feature 1..20: note = Target: SCN10A; (+) strand; PAM type: YTN; PAM sequence: CTC
  source 1..20: mol_type = other DNA
atgattatactttttcttct

SEQ ID NO: 58225 - DNA, 20 bp, synthetic construct
  misc_feature 1..20: note = Description of Artificial Sequence: Synthetic oligonucleotide
  misc_feature 1..20: note = Target: SCN10A; (+) strand; PAM type: YTN; PAM sequence: TTA
  source 1..20: mol_type = other DNA
tactttttcttctgattata

SEQ ID NO: 58226 - DNA, 20 bp, synthetic construct
  misc_feature 1..20: note = Description of Artificial Sequence: Synthetic oligonucleotide
  misc_feature 1..20: note = Target: SCN10A; (+) strand; PAM type: YTN; PAM sequence: CTT
  source 1..20: mol_type = other DNA
tttcttctgattatattaac

SEQ ID NO: 58227 - DNA, 20 bp, synthetic construct
  misc_feature 1..20: note = Description of Artificial Sequence: Synthetic oligonucleotide
  misc_feature 1..20: note = Target: SCN10A; (+) strand; PAM type: YTN; PAM sequence: TTT
  source 1..20: mol_type = other DNA
ttcttctgattatattaact

SEQ ID NO: 58228 - DNA, 20 bp, synthetic construct
  misc_feature 1..20: note = Description of Artificial Sequence: Synthetic oligonucleotide
  misc_feature 1..20: note = Target: SCN10A; (+) strand; PAM type: YTN; PAM sequence: TTT
  source 1..20: mol_type = other DNA
tcttctgattatattaacta

SEQ ID NO: 58229 - DNA, 20 bp, synthetic construct
  misc_feature 1..20: note = Description of Artificial Sequence: Synthetic oligonucleotide
  misc_feature 1..20: note = Target: SCN10A; (+) strand; PAM type: YTN; PAM sequence: TTT
  source 1..20: mol_type = other DNA
cttctgattatattaactat

SEQ ID NO: 58230 - DNA, 20 bp, synthetic construct
  misc_feature 1..20: note = Description of Artificial Sequence: Synthetic oligonucleotide
  misc_feature 1..20: note = Target: SCN10A; (+) strand; PAM type: YTN; PAM sequence: TTC
  source 1..20: mol_type = other DNA
ttctgattatattaactatg

SEQ ID NO: 58231 - DNA, 20 bp, synthetic construct
  misc_feature 1..20: note = Description of Artificial Sequence: Synthetic oligonucleotide
  misc_feature 1..20: note = Target: SCN10A; (+) strand; PAM type: YTN; PAM sequence: CTT
  source 1..20: mol_type = other DNA
ctgattatattaactatgga

SEQ ID NO: 58232 - DNA, 20 bp, synthetic construct
  misc_feature 1..20: note = Description of Artificial Sequence: Synthetic oligonucleotide
  misc_feature 1..20: note = Target: SCN10A; (+) strand; PAM type: YTN; PAM sequence: TTC
  source 1..20: mol_type = other DNA
tgattatattaactatggag

SEQ ID NO: 58233 - DNA, 20 bp, synthetic construct
  misc_feature 1..20: note = Description of Artificial Sequence: Synthetic oligonucleotide
  misc_feature 1..20: note = Target: SCN10A; (+) strand; PAM type: YTN; PAM sequence: CTG
  source 1..20: mol_type = other DNA
attatattaactatggagtt

SEQ ID NO: 58234 - DNA, 20 bp, synthetic construct
  misc_feature 1..20: note = Description of Artificial Sequence: Synthetic oligonucleotide
  misc_feature 1..20: note = Target: SCN10A; (+) strand; PAM type: YTN; PAM sequence: TTA
  source 1..20: mol_type = other DNA
tattaactatggagttctgg

SEQ ID NO: 58235 - DNA, 20 bp, synthetic construct
  misc_feature 1..20: note = Description of Artificial Sequence: Synthetic oligonucleotide
  misc_feature 1..20: note = Target: SCN10A; (+) strand; PAM type: YTN; PAM sequence: TTA
  source 1..20: mol_type = other DNA
actatggagttctggacgcc

SEQ ID NO: 58236 - DNA, 20 bp, synthetic construct
  misc_feature 1..20: note = Description of Artificial Sequence: Synthetic oligonucleotide
  misc_feature 1..20: note = Target: SCN10A; (+) strand; PAM type: YTN; PAM sequence: CTA
  source 1..20: mol_type = other DNA
tggagttctggacgccaggt

SEQ ID NO: 58237 - DNA, 20 bp, synthetic construct
  misc_feature 1..20: note = Description of Artificial Sequence: Synthetic oligonucleotide
  misc_feature 1..20: note = Target: SCN10A; (+) strand; PAM type: YTN; PAM sequence: TTC
  source 1..20: mol_type = other DNA
tggacgccaggtaatgtaaa

SEQ ID NO: 58238 - DNA, 20 bp, synthetic construct
  misc_feature 1..20: note = Description of Artificial Sequence: Synthetic oligonucleotide
  misc_feature 1..20: note = Target: SCN10A; (+) strand; PAM type: YTN; PAM sequence: CTG
  source 1..20: mol_type = other DNA
gacgccaggtaatgtaaaaa

SEQ ID NO: 58239 - DNA, 20 bp, synthetic construct
  misc_feature 1..20: note = Description of Artificial Sequence: Synthetic oligonucleotide
  misc_feature 1..20: note = Target: SCN10A; (+) strand; PAM type: YTN; PAM sequence: CTC
  source 1..20: mol_type = other DNA
tcctccttaatgtctgatta

SEQ ID NO: 58240 - DNA, 20 bp, synthetic construct
  misc_feature 1..20: note = Description of Artificial Sequence: Synthetic oligonucleotide
  misc_feature 1..20: note = Target: SCN10A; (+) strand; PAM type: YTN; PAM sequence: CTC
  source 1..20: mol_type = other DNA
ctccttaatgtctgattatg

SEQ ID NO: 58241 - DNA, 20 bp, synthetic construct
  misc_feature 1..20: note = Description of Artificial Sequence: Synthetic oligonucleotide
  misc_feature 1..20: note = Target: SCN10A; (+) strand; PAM type: YTN; PAM sequence: CTC
  source 1..20: mol_type = other DNA
cttaatgtctgattatgaga

SEQ ID NO: 58242 - DNA, 20 bp, synthetic construct
  misc_feature 1..20: note = Description of Artificial Sequence: Synthetic oligonucleotide
  misc_feature 1..20: note = Target: SCN10A; (+) strand; PAM type: YTN; PAM sequence: CTT
  source 1..20: mol_type = other DNA
aatgtctgattatgagatgt

SEQ ID NO: 58243 - DNA, 20 bp, synthetic construct
  misc_feature 1..20: note = Description of Artificial Sequence: Synthetic oligonucleotide
  misc_feature 1..20: note = Target: SCN10A; (+) strand; PAM type: YTN; PAM sequence: TTA
  source 1..20: mol_type = other DNA
atgtctgattatgagatgtg

SEQ ID NO: 58244 - DNA, 20 bp, synthetic construct
  misc_feature 1..20: note = Description of Artificial Sequence: Synthetic oligonucleotide
  misc_feature 1..20: note = Target: SCN10A; (+) strand; PAM type: YTN; PAM sequence: CTG
  source 1..20: mol_type = other DNA
attatgagatgtgaacagac

SEQ ID NO: 58245 - DNA, 20 bp, synthetic construct
  misc_feature 1..20: note = Description of Artificial Sequence: Synthetic oligonucleotide
  misc_feature 1..20: note = Target: SCN10A; (+) strand; PAM type: YTN; PAM sequence: TTA
  source 1..20: mol_type = other DNA
tgagatgtgaacagactctg

SEQ ID NO: 58246 - DNA, 20 bp, synthetic construct
  misc_feature 1..20: note = Description of Artificial Sequence: Synthetic oligonucleotide
  misc_feature 1..20: note = Target: SCN10A; (+) strand; PAM type: YTN; PAM sequence: CTC
  source 1..20: mol_type = other DNA
tggaatgtattcaaaagctg

SEQ ID NO: 58247 - DNA, 20 bp, synthetic construct
  misc_feature 1..20: note = Description of Artificial Sequence: Synthetic oligonucleotide
  misc_feature 1..20: note = Target: SCN10A; (+) strand; PAM type: YTN; PAM sequence: CTG
  source 1..20: mol_type = other DNA
gaatgtattcaaaagctgcc

SEQ ID NO: 58248 - DNA, 20 bp, synthetic construct
  misc_feature 1..20: note = Description of Artificial Sequence: Synthetic oligonucleotide
  misc_feature 1..20: note = Target: SCN10A; (+) strand; PAM type: YTN; PAM sequence: TTC
  source 1..20: mol_type = other DNA
aaaagctgcctctttagcta

SEQ ID NO: 58249 - DNA, 20 bp, synthetic construct
  misc_feature 1..20: note = Description of Artificial Sequence: Synthetic oligonucleotide
  misc_feature 1..20: note = Target: SCN10A; (+) strand; PAM type: YTN; PAM sequence: CTG
  source 1..20: mol_type = other DNA
cctctttagctacacaacag

SEQ ID NO: 58250 - DNA, 20 bp, synthetic construct
  misc_feature 1..20: note = Description of Artificial Sequence: Synthetic oligonucleotide
  misc_feature 1..20: note = Target: SCN10A; (+) strand; PAM type: YTN; PAM sequence: CTC
  source 1..20: mol_type = other DNA
tttagctacacaacagaaag

SEQ ID NO: 58251 - DNA, 20 bp, synthetic construct
  misc_feature 1..20: note = Description of Artificial Sequence: Synthetic oligonucleotide
  misc_feature 1..20: note = Target: SCN10A; (+) strand; PAM type: YTN; PAM sequence: CTT
  source 1..20: mol_type = other DNA
tagctacacaacagaaaggt

SEQ ID NO: 58252 - DNA, 20 bp, synthetic construct
  misc_feature 1..20: note = Description of Artificial Sequence: Synthetic oligonucleotide
  misc_feature 1..20: note = Target: SCN10A; (+) strand; PAM type: YTN; PAM sequence: TTT
  source 1..20: mol_type = other DNA
agctacacaacagaaaggtc

SEQ ID NO: 58253 - DNA, 20 bp, synthetic construct
  misc_feature 1..20: note = Description of Artificial Sequence: Synthetic oligonucleotide
  misc_feature 1..20: note = Target: SCN10A; (+) strand; PAM type: YTN; PAM sequence: TTA
  source 1..20: mol_type = other DNA
gctacacaacagaaaggtcc

SEQ ID NO: 58254 - DNA, 20 bp, synthetic construct
  misc_feature 1..20: note = Description of Artificial Sequence: Synthetic oligonucleotide
  misc_feature 1..20: note = Target: SCN10A; (+) strand; PAM type: YTN; PAM sequence: CTA
  source 1..20: mol_type = other DNA
cacaacagaaaggtccagcc

SEQ ID NO: 58255 - DNA, 20 bp, synthetic construct
  misc_feature 1..20: note = Description of Artificial Sequence: Synthetic oligonucleotide
  misc_feature 1..20: note = Target: SCN10A; (+) strand; PAM type: YTN; PAM sequence: TTT
  source 1..20: mol_type = other DNA
cagcctcagaaaagagtgct

SEQ ID NO: 58256 - DNA, 20 bp, synthetic construct
  misc_feature 1..20: note = Description of Artificial Sequence: Synthetic oligonucleotide
  misc_feature 1..20: note = Target: SCN10A; (+) strand; PAM type: YTN; PAM sequence: TTC
  source 1..20: mol_type = other DNA
agcctcagaaaagagtgctt

SEQ ID NO: 58257 - DNA, 20 bp, synthetic construct
  misc_feature 1..20: note = Description of Artificial Sequence: Synthetic oligonucleotide
  misc_feature 1..20: note = Target: SCN10A; (+) strand; PAM type: YTN; PAM sequence: CTC
  source 1..20: mol_type = other DNA
agaaaagagtgcttttccca

SEQ ID NO: 58258 - DNA, 20 bp, synthetic construct
  misc_feature 1..20: note = Description of Artificial Sequence: Synthetic oligonucleotide
  misc_feature 1..20: note = Target: SCN10A; (+) strand; PAM type: YTN; PAM sequence: CTT
  source 1..20: mol_type = other DNA
ttcccatataaatggggcag

SEQ ID NO: 58259 - DNA, 20 bp, synthetic construct
  misc_feature 1..20: note = Description of Artificial Sequence: Synthetic oligonucleotide
  misc_feature 1..20: note = Target: SCN10A; (+) strand; PAM type: YTN; PAM sequence: TTT
  source 1..20: mol_type = other DNA
tcccatataaatggggcagg

SEQ ID NO: 58260 - DNA, 20 bp, synthetic construct
  misc_feature 1..20: note = Description of Artificial Sequence: Synthetic oligonucleotide
  misc_feature 1..20: note = Target: SCN10A; (+) strand; PAM type: YTN; PAM sequence: TTT
  source 1..20: mol_type = other DNA
cccatataaatggggcaggc

SEQ ID NO: 58261 - DNA, 20 bp, synthetic construct
  misc_feature 1..20: note = Description of Artificial Sequence: Synthetic oligonucleotide
  misc_feature 1..20: note = Target: SCN10A; (+) strand; PAM type: YTN; PAM sequence: TTC
  source 1..20: mol_type = other DNA
ccatataaatggggcaggca

SEQ ID NO: 58262 - DNA, 20 bp, synthetic construct
  misc_feature 1..20: note = Description of Artificial Sequence: Synthetic oligonucleotide
  misc_feature 1..20: note = Target: SCN10A; (+) strand; PAM type: YTN; PAM sequence: TTC
  source 1..20: mol_type = other DNA
tacagcacgagatgcgaagt

SEQ ID NO: 58263 - DNA, 20 bp, synthetic construct
  misc_feature 1..20: note = Description of Artificial Sequence: Synthetic oligonucleotide
  misc_feature 1..20: note = Target: SCN10A; (+) strand; PAM type: YTN; PAM sequence: CTA
  source 1..20: mol_type = other DNA
cagcacgagatgcgaagtct

SEQ ID NO: 58264 - DNA, 20 bp, synthetic construct
  misc_feature 1..20: note = Description of Artificial Sequence: Synthetic oligonucleotide
  misc_feature 1..20: note = Target: SCN10A; (+) strand; PAM type: YTN; PAM sequence: CTA
  source 1..20: mol_type = other DNA
tagaaagcattcattttctt

SEQ ID NO: 58265 - DNA, 20 bp, synthetic construct
  misc_feature 1..20: note = Description of Artificial Sequence: Synthetic oligonucleotide
  misc_feature 1..20: note = Target: SCN10A; (+) strand; PAM type: YTN; PAM sequence: TTC
  source 1..20: mol_type = other DNA
attttcttcccttcccacca

SEQ ID NO: 58266 - DNA, 20 bp, synthetic construct
  misc_feature 1..20: note = Description of Artificial Sequence: Synthetic oligonucleotide
  misc_feature 1..20: note = Target: SCN10A; (+) strand; PAM type: YTN; PAM sequence: TTT
  source 1..20: mol_type = other DNA
tcttcccttcccaccaattt

SEQ ID NO: 58267 - DNA, 20 bp, synthetic construct
  misc_feature 1..20: note = Description of Artificial Sequence: Synthetic oligonucleotide
  misc_feature 1..20: note = Target: SCN10A; (+) strand; PAM type: YTN; PAM sequence: TTT
  source 1..20: mol_type = other DNA
cttcccttcccaccaatttt

SEQ ID NO: 58268 - DNA, 20 bp, synthetic construct
  misc_feature 1..20: note = Description of Artificial Sequence: Synthetic oligonucleotide
  misc_feature 1..20: note = Target: SCN10A; (+) strand; PAM type: YTN; PAM sequence: TTC
  source 1..20: mol_type = other DNA
ttcccttcccaccaatttta

SEQ ID NO: 58269 - DNA, 20 bp, synthetic construct
  misc_feature 1..20: note = Description of Artificial Sequence: Synthetic oligonucleotide
  misc_feature 1..20: note = Target: SCN10A; (+) strand; PAM type: YTN; PAM sequence: CTT
  source 1..20: mol_type = other DNA
cccttcccaccaattttaca

SEQ ID NO: 58270 - DNA, 20 bp, synthetic construct
  misc_feature 1..20: note = Description of Artificial Sequence: Synthetic oligonucleotide
  misc_feature 1..20: note = Target: SCN10A; (+) strand; PAM type: YTN; PAM sequence: TTC
  source 1..20: mol_type = other DNA
ccttcccaccaattttacaa

SEQ ID NO: 58271 - DNA, 20 bp, synthetic construct
  misc_feature 1..20: note = Description of Artificial Sequence: Synthetic oligonucleotide
  misc_feature 1..20: note = Target: SCN10A; (+) strand; PAM type: YTN; PAM sequence: CTT
  source 1..20: mol_type = other DNA
cccaccaattttacaagtga

SEQ ID NO: 58272 - DNA, 20 bp, synthetic construct
  misc_feature 1..20: note = Description of Artificial Sequence: Synthetic oligonucleotide
  misc_feature 1..20: note = Target: SCN10A; (+) strand; PAM type: YTN; PAM sequence: TTC
  source 1..20: mol_type = other DNA
ccaccaattttacaagtgag

SEQ ID NO: 58273 - DNA, 20 bp, synthetic construct
  misc_feature 1..20: note = Description of Artificial Sequence: Synthetic oligonucleotide
  misc_feature 1..20: note = Target: SCN10A; (+) strand; PAM type: YTN; PAM sequence: TTT
  source 1..20: mol_type = other DNA
tacaagtgaggaaattgaag

SEQ ID NO: 58274 - DNA, 20 bp, synthetic construct
  misc_feature 1..20: note = Description of Artificial Sequence: Synthetic oligonucleotide
  misc_feature 1..20: note = Target: SCN10A; (+) strand; PAM type: YTN; PAM sequence: TTT
  source 1..20: mol_type = other DNA
acaagtgaggaaattgaagt

SEQ ID NO: 58275 - DNA, 20 bp, synthetic construct
  misc_feature 1..20: note = Description of Artificial Sequence: Synthetic oligonucleotide
  misc_feature 1..20: note = Target: SCN10A; (+) strand; PAM type: YTN; PAM sequence: TTA
  source 1..20: mol_type = other DNA
caagtgaggaaattgaagtt

SEQ ID NO: 58276 - DNA, 20 bp, synthetic construct
  misc_feature 1..20: note = Description of Artificial Sequence: Synthetic oligonucleotide
  misc_feature 1..20: note = Target: SCN10A; (+) strand; PAM type: YTN; PAM sequence: TTG
  source 1..20: mol_type = other DNA
aagttaagaggggaaagact

SEQ ID NO: 58277 - DNA, 20 bp, synthetic construct
  misc_feature 1..20: note = Description of Artificial Sequence: Synthetic oligonucleotide
  misc_feature 1..20: note = Target: SCN10A; (+) strand; PAM type: YTN; PAM sequence: TTA
  source 1..20: mol_type = other DNA
agaggggaaagactttagcc

SEQ ID NO: 58278 - DNA, 20 bp, synthetic construct
  misc_feature 1..20: note = Description of Artificial Sequence: Synthetic oligonucleotide
  misc_feature 1..20: note = Target: SCN10A; (+) strand; PAM type: YTN; PAM sequence: CTT
  source 1..20: mol_type = other DNA
tagccctggtcagccagaca

SEQ ID NO: 58279 - DNA, 20 bp, synthetic construct
  misc_feature 1..20: note = Description of Artificial Sequence: Synthetic oligonucleotide
  misc_feature 1..20: note = Target: SCN10A; (+) strand; PAM type: YTN; PAM sequence: TTT
  source 1..20: mol_type = other DNA
agccctggtcagccagacaa

SEQ ID NO: 58280 - DNA, 20 bp, synthetic construct
  misc_feature 1..20: note = Description of Artificial Sequence: Synthetic oligonucleotide
  misc_feature 1..20: note = Target: SCN10A; (+) strand; PAM type: YTN; PAM sequence: TTA
  source 1..20: mol_type = other DNA
gccctggtcagccagacaat

SEQ ID NO: 58281 - DNA, 20 bp, synthetic construct
  misc_feature 1..20: note = Description of Artificial Sequence: Synthetic oligonucleotide
  misc_feature 1..20: note = Target: SCN10A; (+) strand; PAM type: YTN; PAM sequence: CTG
  source 1..20: mol_type = other DNA
gtcagccagacaattggtgg

SEQ ID NO: 58282 - DNA, 20 bp, synthetic construct
  misc_feature 1..20: note = Description of Artificial Sequence: Synthetic oligonucleotide
  misc_feature 1..20: note = Target: SCN10A; (+) strand; PAM type: YTN; PAM sequence: TTG
  source 1..20: mol_type = other DNA
gtggaaaagttaggattcca

SEQ ID NO: 58283 - DNA, 20 bp, synthetic construct
  misc_feature 1..20: note = Description of Artificial Sequence: Synthetic oligonucleotide
  misc_feature 1..20: note = Target: SCN10A; (+) strand; PAM type: YTN; PAM sequence: TTA
  source 1..20: mol_type = other DNA
ggattccaactggcatttcc

SEQ ID NO: 58284 - DNA, 20 bp, synthetic construct
  misc_feature 1..20: note = Description of Artificial Sequence: Synthetic oligonucleotide
  misc_feature 1..20: note = Target: SCN10A; (+) strand; PAM type: YTN; PAM sequence: TTC
  source 1..20: mol_type = other DNA
caactggcatttccagatcc

SEQ ID NO: 58285 - DNA, 20 bp, synthetic construct
  misc_feature 1..20: note = Description of Artificial Sequence: Synthetic oligonucleotide
  misc_feature 1..20: note = Target: SCN10A; (+) strand; PAM type: YTN; PAM sequence: CTG
  source 1..20: mol_type = other DNA
gcatttccagatcccaggac

SEQ ID NO: 58286 - DNA, 20 bp, synthetic construct
  misc_feature 1..20: note = Description of Artificial Sequence: Synthetic oligonucleotide
  misc_feature 1..20: note = Target: SCN10A; (+) strand; PAM type: YTN; PAM sequence: TTT
  source 1..20: mol_type = other DNA
ccagatcccaggacagtgct

SEQ ID NO: 58287 - DNA, 20 bp, synthetic construct
  misc_feature 1..20: note = Description of Artificial Sequence: Synthetic oligonucleotide
  misc_feature 1..20: note = Target: SCN10A; (+) strand; PAM type: YTN; PAM sequence: TTC
  source 1..20: mol_type = other DNA
cagatcccaggacagtgctc

SEQ ID NO: 58288 - DNA, 20 bp, synthetic construct
  misc_feature 1..20: note = Description of Artificial Sequence: Synthetic oligonucleotide
  misc_feature 1..20: note = Target: SCN10A; (+) strand; PAM type: YTN; PAM sequence: CTC
  source 1..20: mol_type = other DNA
tttcctgctccacccagcct

SEQ ID NO: 58289 - DNA, 20 bp, synthetic construct
  misc_feature 1..20: note = Description of Artificial Sequence: Synthetic oligonucleotide
  misc_feature 1..20: note = Target: SCN10A; (+) strand; PAM type: YTN; PAM sequence: CTT
  source 1..20: mol_type = other DNA
tcctgctccacccagcctca

SEQ ID NO: 58290 - DNA, 20 bp, synthetic construct
  misc_feature 1..20: note = Description of Artificial Sequence: Synthetic oligonucleotide
  misc_feature 1..20: note = Target: SCN10A; (+) strand; PAM type: YTN; PAM sequence: TTT
  source 1..20: mol_type = other DNA
cctgctccacccagcctcaa

SEQ ID NO: 58291 - DNA, 20 bp, synthetic construct
  misc_feature 1..20: note = Description of Artificial Sequence: Synthetic oligonucleotide
  misc_feature 1..20: note = Target: SCN10A; (+) strand; PAM type: YTN; PAM sequence: TTC
  source 1..20: mol_type = other DNA
ctgctccacccagcctcaat

SEQ ID NO: 58292 - DNA, 20 bp, synthetic construct
  misc_feature 1..20: note = Description of Artificial Sequence: Synthetic oligonucleotide
  misc_feature 1..20: note = Target: SCN10A; (+) strand; PAM type: YTN; PAM sequence: CTG
  source 1..20: mol_type = other DNA
ctccacccagcctcaatctc

SEQ ID NO: 58293 - DNA, 20 bp, synthetic construct
  misc_feature 1..20: note = Description of Artificial Sequence: Synthetic oligonucleotide
  misc_feature 1..20: note = Target: SCN10A; (+) strand; PAM type: YTN; PAM sequence: CTC
  source 1..20: mol_type = other DNA
cacccagcctcaatctcaaa

SEQ ID NO: 58294 - DNA, 20 bp, synthetic construct
  misc_feature 1..20: note = Description of Artificial Sequence: Synthetic oligonucleotide
  misc_feature 1..20: note = Target: SCN10A; (+) strand; PAM type: YTN; PAM sequence: CTC
  source 1..20: mol_type = other DNA
aatctcaaactgaaaaatat

SEQ ID NO: 58295 - DNA, 20 bp, synthetic construct
  misc_feature 1..20: note = Description of Artificial Sequence: Synthetic oligonucleotide
  misc_feature 1..20: note = Target: SCN10A; (+) strand; PAM type: YTN; PAM sequence: CTC
  source 1..20: mol_type = other DNA
aaactgaaaaatatcaggat

SEQ ID NO: 58296 - DNA, 20 bp, synthetic construct
  misc_feature 1..20: note = Description of Artificial Sequence: Synthetic oligonucleotide
  misc_feature 1..20: note = Target: SCN10A; (+) strand; PAM type: YTN; PAM sequence: CTG
  source 1..20: mol_type = other DNA
aaaaatatcaggatcccaga

SEQ ID NO: 58297 - DNA, 20 bp, synthetic construct
  misc_feature 1..20: note = Description of Artificial Sequence: Synthetic oligonucleotide
  misc_feature 1..20: note = Target: SCN10A; (+) strand; PAM type: YTN; PAM sequence: CTC
  source 1..20: mol_type = other DNA
atgatacaggtcagcatcac

SEQ ID NO: 58298 - DNA, 20 bp, synthetic construct
  misc_feature 1..20: note = Description of Artificial Sequence: Synthetic oligonucleotide
  misc_feature 1..20: note = Target: SCN10A; (+) strand; PAM type: YTN; PAM sequence: CTT
  source 1..20: mol_type = other DNA
tatgatataacgctggtgtg

SEQ ID NO: 58299 - DNA, 20 bp, synthetic construct
  misc_feature 1..20: note = Description of Artificial Sequence: Synthetic oligonucleotide
  misc_feature 1..20: note = Target: SCN10A; (+) strand; PAM type: YTN; PAM sequence: TTT
  source 1..20: mol_type = other DNA
atgatataacgctggtgtgg

SEQ ID NO: 58300 - DNA, 20 bp, synthetic construct
  misc_feature 1..20: note = Description of Artificial Sequence: Synthetic oligonucleotide
  misc_feature 1..20: note = Target: SCN10A; (+) strand; PAM type: YTN; PAM sequence: TTA
  source 1..20: mol_type = other DNA
tgatataacgctggtgtgga

SEQ ID NO: 58301 - DNA, 20 bp, synthetic construct
  misc_feature 1..20: note = Description of Artificial Sequence: Synthetic oligonucleotide
  misc_feature 1..20: note = Target: SCN10A; (+) strand; PAM type: YTN; PAM sequence: CTG
  source 1..20: mol_type = other DNA
gtgtggacatacatttaaaa

SEQ ID NO: 58302 - DNA, 20 bp, synthetic construct
  misc_feature 1..20: note = Description of Artificial Sequence: Synthetic oligonucleotide
  misc_feature 1..20: note = Target: SCN10A; (+) strand; PAM type: YTN; PAM sequence: TTT
  source 1..20: mol_type = other DNA
aaaaatattaattttaatgg

SEQ ID NO: 58303 - DNA, 20 bp, synthetic construct
  misc_feature 1..20: note = Description of Artificial Sequence: Synthetic oligonucleotide
  misc_feature 1..20: note = Target: SCN10A; (+) strand; PAM type: YTN; PAM sequence: TTA
  source 1..20: mol_type = other DNA
aaaatattaattttaatgga

SEQ ID NO: 58304 - DNA, 20 bp, synthetic construct
  misc_feature 1..20: note = Description of Artificial Sequence: Synthetic oligonucleotide
  misc_feature 1..20: note = Target: SCN10A; (+) strand; PAM type: YTN; PAM sequence: TTA
  source 1..20: mol_type = other DNA
attttaatggatatctcaaa

SEQ ID NO: 58305 - DNA, 20 bp, synthetic construct
  misc_feature 1..20: note = Description of Artificial Sequence: Synthetic oligonucleotide
  misc_feature 1..20: note = Target: SCN10A; (+) strand; PAM type: YTN; PAM sequence: TTT
  source 1..20: mol_type = other DNA
taatggatatctcaaaggct

SEQ ID NO: 58306 - DNA, 20 bp, synthetic construct
  misc_feature 1..20: note = Description of Artificial Sequence: Synthetic oligonucleotide
  misc_feature 1..20: note = Target: SCN10A; (+) strand; PAM type: YTN; PAM sequence: TTT
  source 1..20: mol_type = other DNA
aatggatatctcaaaggctt

SEQ ID NO: 58307 - DNA, 20 bp, synthetic construct
  misc_feature 1..20: note = Description of Artificial Sequence: Synthetic oligonucleotide
  misc_feature 1..20: note = Target: SCN10A; (+) strand; PAM type: YTN; PAM sequence: TTA
  source 1..20: mol_type = other DNA
atggatatctcaaaggcttt

SEQ ID NO: 58308 - DNA, 20 bp, synthetic construct
  misc_feature 1..20: note = Description of Artificial Sequence: Synthetic oligonucleotide
  misc_feature 1..20: note = Target: SCN10A; (+) strand; PAM type: YTN; PAM sequence: CTC
  source 1..20: mol_type = other DNA
aaaggcttttcatgacatag

SEQ ID NO: 58309 - DNA, 20 bp, synthetic construct
  misc_feature 1..20: note = Description of Artificial Sequence: Synthetic oligonucleotide
  misc_feature 1..20: note = Target: SCN10A; (+) strand; PAM type: YTN; PAM sequence: CTT
  source 1..20: mol_type = other DNA
ttcatgacataggccacagg

SEQ ID NO: 58310 - DNA, 20 bp, synthetic construct
  misc_feature 1..20: note = Description of Artificial Sequence: Synthetic oligonucleotide
  misc_feature 1..20: note = Target: SCN10A; (+) strand; PAM type: YTN; PAM sequence: TTT
  source 1..20: mol_type = other DNA
tcatgacataggccacaggt

SEQ ID NO: 58311 - DNA, 20 bp, synthetic construct
  misc_feature 1..20: note = Description of Artificial Sequence: Synthetic oligonucleotide
  misc_feature 1..20: note = Target: SCN10A; (+) strand; PAM type: YTN; PAM sequence: TTT
  source 1..20: mol_type = other DNA
catgacataggccacaggtg

SEQ ID NO: 58312 - DNA, 20 bp, synthetic construct
  misc_feature 1..20: note = Description of Artificial Sequence: Synthetic oligonucleotide
  misc_feature 1..20: note = Target: SCN10A; (+) strand; PAM type: YTN; PAM sequence: TTC
  source 1..20: mol_type = other DNA
atgacataggccacaggtgt

SEQ ID NO: 58313 - DNA, 20 bp, synthetic construct
  misc_feature 1..20: note = Description of Artificial Sequence: Synthetic oligonucleotide
  misc_feature 1..20: note = Target: SCN10A; (+) strand; PAM type: YTN; PAM sequence: TTA
  source 1..20: mol_type = other DNA
ccctgggtcagagcagttgt

SEQ ID NO: 58314 - DNA, 20 bp, synthetic construct
  misc_feature 1..20: note = Description of Artificial Sequence: Synthetic oligonucleotide
  misc_feature 1..20: note = Target: SCN10A; (+) strand; PAM type: YTN; PAM sequence: CTG
  source 1..20: mol_type = other DNA
ggtcagagcagttgtccgac

SEQ ID NO: 58315 - DNA, 20 bp, synthetic construct
  misc_feature 1..20: note = Description of Artificial Sequence: Synthetic oligonucleotide
  misc_feature 1..20: note = Target: SCN10A; (+) strand; PAM type: YTN; PAM sequence: TTG
  source 1..20: mol_type = other DNA
tccgacagctctcacatgca

SEQ ID NO: 58316 - DNA, 20 bp, synthetic construct
  misc_feature 1..20: note = Description of Artificial Sequence: Synthetic oligonucleotide
  misc_feature 1..20: note = Target: SCN10A; (+) strand; PAM type: YTN; PAM sequence: CTC
  source 1..20: mol_type = other DNA
tcacatgcagtcatgcaaaa

SEQ ID NO: 58317 - DNA, 20 bp, synthetic construct
  misc_feature 1..20: note = Description of Artificial Sequence: Synthetic oligonucleotide
  misc_feature 1..20: note = Target: SCN10A; (+) strand; PAM type: YTN; PAM sequence: CTC
  source 1..20: mol_type = other DNA
acatgcagtcatgcaaaatc

SEQ ID NO: 58318 - DNA, 20 bp, synthetic construct
  misc_feature 1..20: note = Description of Artificial Sequence: Synthetic oligonucleotide
  misc_feature 1..20: note = Target: SCN10A; (+) strand; PAM type: YTN; PAM sequence: CTA
  source 1..20: mol_type = other DNA
aataatattgccaatctctg

SEQ ID NO: 58319 - DNA, 20 bp, synthetic construct
  misc_feature 1..20: note = Description of Artificial Sequence: Synthetic oligonucleotide
  misc_feature 1..20: note = Target: SCN10A; (+) strand; PAM type: YTN; PAM sequence: TTG
  source 1..20: mol_type = other DNA
ccaatctctgtatggtgctc

SEQ ID NO: 58320 - DNA, 20 bp, synthetic construct
  misc_feature 1..20: note = Description of Artificial Sequence: Synthetic oligonucleotide
  misc_feature 1..20: note = Target: SCN10A; (+) strand; PAM type: YTN; PAM sequence: CTC
  source 1..20: mol_type = other DNA
tgtatggtgctccacagagg

SEQ ID NO: 58321 - DNA, 20 bp, synthetic construct
  misc_feature 1..20: note = Description of Artificial Sequence: Synthetic oligonucleotide
  misc_feature 1..20: note = Target: SCN10A; (+) strand; PAM type: YTN; PAM sequence: CTG
  source 1..20: mol_type = other DNA
tatggtgctccacagaggac

SEQ ID NO: 58322 - DNA, 20 bp, synthetic construct
  misc_feature 1..20: note = Description of Artificial Sequence: Synthetic oligonucleotide
  misc_feature 1..20: note = Target: SCN10A; (+) strand; PAM type: YTN; PAM sequence: CTC
  source 1..20: mol_type = other DNA
cacagaggactaccttggac

SEQ ID NO: 58323 - DNA, 20 bp, synthetic construct
  misc_feature 1..20: note = Description of Artificial Sequence: Synthetic oligonucleotide
  misc_feature 1..20: note = Target: SCN10A; (+) strand; PAM type: YTN; PAM sequence: CTA
  source 1..20: mol_type = other DNA
ccttggaccttcagtaatgt

SEQ ID NO: 58324 - DNA, 20 bp, synthetic construct
  misc_feature 1..20: note = Description of Artificial Sequence: Synthetic oligonucleotide
  misc_feature 1..20: note = Target: SCN10A; (+) strand; PAM type: YTN; PAM sequence: CTT
  source 1..20: mol_type = other DNA
ggaccttcagtaatgttctt

SEQ ID NO: 58325 - DNA, 20 bp, synthetic construct
  misc_feature 1..20: note = Description of Artificial Sequence: Synthetic oligonucleotide
  misc_feature 1..20: note = Target: SCN10A; (+) strand; PAM type: YTN; PAM sequence: TTG
  source 1..20: mol_type = other DNA
gaccttcagtaatgttcttg

SEQ ID NO: 58326 - DNA, 20 bp, synthetic construct
  misc_feature 1..20: note = Description of Artificial Sequence: Synthetic oligonucleotide
  misc_feature 1..20: note = Target: SCN10A; (+) strand; PAM type: YTN; PAM sequence: CTT
  source 1..20: mol_type = other DNA
cagtaatgttcttgttctat

SEQ ID NO: 58327 - DNA, 20 bp, synthetic construct
  misc_feature 1..20: note = Description of Artificial Sequence: Synthetic oligonucleotide
  misc_feature 1..20: note = Target: SCN10A; (+) strand; PAM type: YTN; PAM sequence: TTC
  source 1..20: mol_type = other DNA
agtaatgttcttgttctata

SEQ ID NO: 58328 - DNA, 20 bp, synthetic construct
  misc_feature 1..20: note = Description of Artificial Sequence: Synthetic oligonucleotide
  misc_feature 1..20: note = Target: SCN10A; (+) strand; PAM type: YTN; PAM sequence: TTC
  source 1..20: mol_type = other DNA
ttgttctatatctttggaag

SEQ ID NO: 58329 - DNA, 20 bp, synthetic construct
  misc_feature 1..20: note = Description of Artificial Sequence: Synthetic oligonucleotide
  misc_feature 1..20: note = Target: SCN10A; (+) strand; PAM type: YTN; PAM sequence: CTT
  source 1..20: mol_type = other DNA
gttctatatctttggaagtt

SEQ ID NO: 58330 - DNA, 20 bp, synthetic construct
  misc_feature 1..20: note = Description of Artificial Sequence: Synthetic oligonucleotide
  misc_feature 1..20: note = Target: SCN10A; (+) strand; PAM type: YTN; PAM sequence: TTG
  source 1..20: mol_type = other DNA
ttctatatctttggaagttc

SEQ ID NO: 58331 - DNA, 20 bp, synthetic construct
  misc_feature 1..20: note = Description of Artificial Sequence: Synthetic oligonucleotide
  misc_feature 1..20: note = Target: SCN10A; (+) strand; PAM type: YTN; PAM sequence: TTC
  source 1..20: mol_type = other DNA
tatatctttggaagttctgg

SEQ ID NO: 58332 - DNA, 20 bp, synthetic construct
  misc_feature 1..20: note = Description of Artificial Sequence: Synthetic oligonucleotide
  misc_feature 1..20: note = Target: SCN10A; (+) strand; PAM type: YTN; PAM sequence: CTA
  source 1..20: mol_type = other DNA
tatctttggaagttctggtc

SEQ ID NO: 58333 - DNA, 20 bp, synthetic construct
  misc_feature 1..20: note = Description of Artificial Sequence: Synthetic oligonucleotide
  misc_feature 1..20: note = Target: SCN10A; (+) strand; PAM type: YTN; PAM sequence: CTT
  source 1..20: mol_type = other DNA
tggaagttctggtcctgaga

SEQ ID NO: 58334 - DNA, 20 bp, synthetic construct
  misc_feature 1..20: note = Description of Artificial Sequence: Synthetic oligonucleotide
  misc_feature 1..20: note = Target: SCN10A; (+) strand; PAM type: YTN; PAM sequence: TTT
  source 1..20: mol_type = other DNA
ggaagttctggtcctgagaa

SEQ ID NO: 58335 - DNA, 20 bp, synthetic construct
  misc_feature 1..20: note = Description of Artificial Sequence: Synthetic oligonucleotide
  misc_feature 1..20: note = Target: SCN10A; (+) strand; PAM type: YTN; PAM sequence: TTG
  source 1..20: mol_type = other DNA
gaagttctggtcctgagaag

SEQ ID NO: 58336 - DNA, 20 bp, synthetic construct
  misc_feature 1..20: note = Description of Artificial Sequence: Synthetic oligonucleotide
  misc_feature 1..20: note = Target: SCN10A; (+) strand; PAM type: YTN; PAM sequence: TTC
  source 1..20: mol_type = other DNA
tggtcctgagaagtttgtct

SEQ ID NO: 58337 - DNA, 20 bp, synthetic construct
  misc_feature 1..20: note = Description of Artificial Sequence: Synthetic oligonucleotide
  misc_feature 1..20: note = Target: SCN10A; (+) strand; PAM type: YTN; PAM sequence: CTG
  source 1..20: mol_type = other DNA
gtcctgagaagtttgtctca

SEQ ID NO: 58338 - DNA, 20 bp, synthetic construct
  misc_feature 1..20: note = Description of Artificial Sequence: Synthetic oligonucleotide
  misc_feature 1..20: note = Target: SCN10A; (+) strand; PAM type: YTN; PAM sequence: CTG
  source 1..20: mol_type = other DNA
agaagtttgtctcagtaaat

SEQ ID NO: 58339 - DNA, 20 bp, synthetic construct
  misc_feature 1..20: note = Description of Artificial Sequence: Synthetic oligonucleotide
  misc_feature 1..20: note = Target: SCN10A; (+) strand; PAM type: YTN; PAM sequence: TTT
  source 1..20: mol_type = other DNA
gtctcagtaaatataatctg

SEQ ID NO: 58340 - DNA, 20 bp, synthetic construct
  misc_feature 1..20: note = Description of Artificial Sequence: Synthetic oligonucleotide
  misc_feature 1..20: note = Target: SCN10A; (+) strand; PAM type: YTN; PAM sequence: TTG
  source 1..20: mol_type = other DNA
tctcagtaaatataatctga

SEQ ID NO: 58341 - DNA, 20 bp, synthetic construct
  misc_feature 1..20: note = Description of Artificial Sequence: Synthetic oligonucleotide
  misc_feature 1..20: note = Target: SCN10A; (+) strand; PAM type: YTN; PAM sequence: CTC
  source 1..20: mol_type = other DNA
agtaaatataatctgattac

SEQ ID NO: 58342 - DNA, 20 bp, synthetic construct
  misc_feature 1..20: note = Description of Artificial Sequence: Synthetic oligonucleotide
  misc_feature 1..20: note = Target: SCN10A; (+) strand; PAM type: YTN; PAM sequence: CTG
  source 1..20: mol_type = other DNA
attacaacaaaaataaaagg

SEQ ID NO: 58343 - DNA, 20 bp, synthetic construct
  misc_feature 1..20: note = Description of Artificial Sequence: Synthetic oligonucleotide
  misc_feature 1..20: note = Target: SCN10A; (+) strand; PAM type: YTN; PAM sequence: TTA
  source 1..20: mol_type = other DNA
caacaaaaataaaaggacaa

SEQ ID NO: 58344 - DNA, 20 bp, synthetic construct
  misc_feature 1..20: note = Description of Artificial Sequence: Synthetic oligonucleotide
  misc_feature 1..20: note = Target: SCN10A; (+) strand; PAM type: YTN; PAM sequence: TTT
  source 1..20: mol_type = other DNA
tctggagagtaagagaaccc

SEQ ID NO: 58345 - DNA, 20 bp, synthetic construct
  misc_feature 1..20: note = Description of Artificial Sequence: Synthetic oligonucleotide
  misc_feature 1..20: note = Target: SCN10A; (+) strand; PAM type: YTN; PAM sequence: TTT
  source 1..20: mol_type = other DNA
ctggagagtaagagaaccca

SEQ ID NO: 58346 - DNA, 20 bp, synthetic construct
  misc_feature 1..20: note = Description of Artificial Sequence: Synthetic oligonucleotide
  misc_feature 1..20: note = Target: SCN10A; (+) strand; PAM type: YTN; PAM sequence: TTC
  source 1..20: mol_type = other DNA
tggagagtaagagaacccat

SEQ ID NO: 58347 - DNA, 20 bp, synthetic construct
  misc_feature 1..20: note = Description of Artificial Sequence: Synthetic oligonucleotide
  misc_feature 1..20: note = Target: SCN10A; (+) strand; PAM type: YTN; PAM sequence: CTG
  source 1..20: mol_type = other DNA
gagagtaagagaacccatga

SEQ ID NO: 58348 - DNA, 20 bp, synthetic construct
  misc_feature 1..20: note = Description of Artificial Sequence: Synthetic oligonucleotide
  misc_feature 1..20: note = Target: SCN10A; (+) strand; PAM type: YTN; PAM sequence: CTG
  source 1..20: mol_type = other DNA
atattgaaattcagaaggga

SEQ ID NO: 58349 - DNA, 20 bp, synthetic construct
  misc_feature 1..20: note = Description of Artificial Sequence: Synthetic oligonucleotide
  misc_feature 1..20: note = Target: SCN10A; (+) strand; PAM type: YTN; PAM sequence: TTG
  source 1..20: mol_type = other DNA
aaattcagaagggaaatcac

SEQ ID NO: 58350 - DNA, 20 bp, synthetic construct
  misc_feature 1..20: note = Description of Artificial Sequence: Synthetic oligonucleotide
  misc_feature 1..20: note = Target: SCN10A; (+) strand; PAM type: YTN; PAM sequence: TTC
  source 1..20: mol_type = other DNA
agaagggaaatcacagtgga

SEQ ID NO: 58351 - DNA, 20 bp, synthetic construct
  misc_feature 1..20: note = Description of Artificial Sequence: Synthetic oligonucleotide
  misc_feature 1..20: note = Target: SCN10A; (+) strand; PAM type: YTN; PAM sequence: CTC
  source 1..20: mol_type = other DNA
ttagcttctgactcctattt

SEQ ID NO: 58352 - DNA, 20 bp, synthetic construct
  misc_feature 1..20: note = Description of Artificial Sequence: Synthetic oligonucleotide
  misc_feature 1..20: note = Target: SCN10A; (+) strand; PAM type: YTN; PAM sequence: CTT
  source 1..20: mol_type = other DNA
agcttctgactcctatttgt

SEQ ID NO: 58353 - DNA, 20 bp, synthetic construct
  misc_feature 1..20: note = Description of Artificial Sequence: Synthetic oligonucleotide
  misc_feature 1..20: note = Target: SCN10A; (+) strand; PAM type: YTN; PAM sequence: TTA
  source 1..20: mol_type = other DNA
gcttctgactcctatttgtg

SEQ ID NO: 58354 - DNA, 20 bp, synthetic construct
  misc_feature 1..20: note = Description of Artificial Sequence: Synthetic oligonucleotide
  misc_feature 1..20: note = Target: SCN10A; (+) strand; PAM type: YTN; PAM sequence: CTT
  source 1..20: mol_type = other DNA
ctgactcctatttgtgtatg

SEQ ID NO: 58355 - DNA, 20 bp, synthetic construct
  misc_feature 1..20: note = Description of Artificial Sequence: Synthetic oligonucleotide
  misc_feature 1..20: note = Target: SCN10A; (+) strand; PAM type: YTN; PAM sequence: TTC
  source 1..20: mol_type = other DNA
tgactcctatttgtgtatga

SEQ ID NO: 58356 - DNA, 20 bp, synthetic construct
  misc_feature 1..20: note = Description of Artificial Sequence: Synthetic oligonucleotide
  misc_feature 1..20: note = Target: SCN10A; (+) strand; PAM type: YTN; PAM sequence: CTG
  source 1..20: mol_type = other DNA
actcctatttgtgtatgatg

SEQ ID NO: 58357 - DNA, 20 bp, synthetic construct
  misc_feature 1..20: note = Description of Artificial Sequence: Synthetic oligonucleotide
  misc_feature 1..20: note = Target: SCN10A; (+) strand; PAM type: YTN; PAM sequence: CTC
  source 1..20: mol_type = other DNA
ctatttgtgtatgatggttt

SEQ ID NO: 58358 - DNA, 20 bp, synthetic construct
  misc_feature 1..20: note = Description of Artificial Sequence: Synthetic oligonucleotide
  misc_feature 1..20: note = Target: SCN10A; (+) strand; PAM type: YTN; PAM sequence: CTA
  source 1..20: mol_type = other DNA
tttgtgtatgatggtttttt

SEQ ID NO: 58359 - DNA, 20 bp, synthetic construct
  misc_feature 1..20: note = Description of Artificial Sequence: Synthetic oligonucleotide
  misc_feature 1..20: note = Target: SCN10A; (+) strand; PAM type: YTN; PAM sequence: TTT
  source 1..20: mol_type = other DNA
gtgtatgatggttttttcaa

SEQ ID NO: 58360 - DNA, 20 bp, synthetic construct
  misc_feature 1..20: note = Description of Artificial Sequence: Synthetic oligonucleotide
  misc_feature 1..20: note = Target: SCN10A; (+) strand; PAM type: YTN; PAM sequence: TTG
  source 1..20: mol_type = other DNA
tgtatgatggttttttcaaa

SEQ ID NO: 58361 - DNA, 20 bp, synthetic construct
  misc_feature 1..20: note = Description of Artificial Sequence: Synthetic oligonucleotide
  misc_feature 1..20: note = Target: SCN10A; (+) strand; PAM type: YTN; PAM sequence: TTT
  source 1..20: mol_type = other DNA
tttcaaaggtggttaccagt

SEQ ID NO: 58362 - DNA, 20 bp, synthetic construct
  misc_feature 1..20: note = Description of Artificial Sequence: Synthetic oligonucleotide
  misc_feature 1..20: note = Target: SCN10A; (+) strand; PAM type: YTN; PAM sequence: TTT
  source 1..20: mol_type = other DNA
ttcaaaggtggttaccagtt

SEQ ID NO: 58363 - DNA, 20 bp, synthetic construct
  misc_feature 1..20: note = Description of Artificial Sequence: Synthetic oligonucleotide
  misc_feature 1..20: note = Target: SCN10A; (+) strand; PAM type: YTN; PAM sequence: TTT
  source 1..20: mol_type = other DNA
tcaaaggtggttaccagttg

SEQ ID NO: 58364 - DNA, 20 bp, synthetic construct
  misc_feature 1..20: note = Description of Artificial Sequence: Synthetic oligonucleotide
  misc_feature 1..20: note = Target: SCN10A; (+) strand; PAM type: YTN; PAM sequence: TTT
  source 1..20: mol_type = other DNA
caaaggtggttaccagttgc

SEQ ID NO: 58365 - DNA, 20 bp, synthetic construct
  misc_feature 1..20: note = Description of Artificial Sequence: Synthetic oligonucleotide
  misc_feature 1..20: note = Target: SCN10A; (+) strand; PAM type: YTN; PAM sequence: TTC
  source 1..20: mol_type = other DNA
aaaggtggttaccagttgca

SEQ ID NO: 58366 - DNA, 20 bp, synthetic construct
  misc_feature 1..20: note = Description of Artificial Sequence: Synthetic oligonucleotide
  misc_feature 1..20: note = Target: SCN10A; (+) strand; PAM type: YTN; PAM sequence: TTA
  source 1..20: mol_type = other DNA
ccagttgcattccctgccca

SEQ ID NO: 58367 - DNA, 20 bp, synthetic construct
  misc_feature 1..20: note = Description of Artificial Sequence: Synthetic oligonucleotide
  misc_feature 1..20: note = Target: SCN10A; (+) strand; PAM type: YTN; PAM sequence: TTG
  source 1..20: mol_type = other DNA
cattccctgcccagttctga

SEQ ID NO: 58368 - DNA, 20 bp, synthetic construct
  misc_feature 1..20: note = Description of Artificial Sequence: Synthetic oligonucleotide
  misc_feature 1..20: note = Target: SCN10A; (+) strand; PAM type: YTN; PAM sequence: TTC
  source 1..20: mol_type = other DNA
cctgcccagttctgacattg

SEQ ID NO: 58369 - DNA, 20 bp, synthetic construct
  misc_feature 1..20: note = Description of Artificial Sequence: Synthetic oligonucleotide
  misc_feature 1..20: note = Target: SCN10A; (+) strand; PAM type: YTN; PAM sequence: CTG
  source 1..20: mol_type = other DNA
cccagttctgacattgtgac

SEQ ID NO: 58370 - DNA, 20 bp, synthetic construct
  misc_feature 1..20: note = Description of Artificial Sequence: Synthetic oligonucleotide
  misc_feature 1..20: note = Target: SCN10A; (+) strand; PAM type: YTN; PAM sequence: TTC
  source 1..20: mol_type = other DNA
tgacattgtgaccagtggca

SEQ ID NO: 58371 - DNA, 20 bp, synthetic construct
  misc_feature 1..20: note = Description of Artificial Sequence: Synthetic oligonucleotide
  misc_feature 1..20: note = Target: SCN10A; (+) strand; PAM type: YTN; PAM sequence: CTG
  source 1..20: mol_type = other DNA
acattgtgaccagtggcatg

SEQ ID NO: 58372 - DNA, 20 bp, synthetic construct
  misc_feature 1..20: note = Description of Artificial Sequence: Synthetic oligonucleotide
  misc_feature 1..20: note = Target: SCN10A; (+) strand; PAM type: YTN; PAM sequence: TTG
  source 1..20: mol_type = other DNA
tgaccagtggcatgcattgg

SEQ ID NO: 58373 - DNA, 20 bp, synthetic construct
  misc_feature 1..20: note = Description of Artificial Sequence: Synthetic oligonucleotide
  misc_feature 1..20: note = Target: SCN10A; (+) strand; PAM type: YTN; PAM sequence: TTG
  source 1..20: mol_type = other DNA
gtgaggctgtagctgggtgt

SEQ ID NO: 58374 - DNA, 20 bp, synthetic construct
  misc_feature 1..20: note = Description of Artificial Sequence: Synthetic oligonucleotide
  misc_feature 1..20: note = Target: SCN10A; (+) strand; PAM type: YTN; PAM sequence: CTG
  source 1..20: mol_type = other DNA
tagctgggtgtgatctgcaa

SEQ ID NO: 58375 - DNA, 20 bp, synthetic construct
  misc_feature 1..20: note = Description of Artificial Sequence: Synthetic oligonucleotide
  misc_feature 1..20: note = Target: SCN10A; (+) strand; PAM type: YTN; PAM sequence: CTG
  source 1..20: mol_type = other DNA
ggtgtgatctgcaatgggaa

SEQ ID NO: 58376 - DNA, 20 bp, synthetic construct
  misc_feature 1..20: note = Description of Artificial Sequence: Synthetic oligonucleotide
  misc_feature 1..20: note = Target: SCN10A; (+) strand; PAM type: YTN; PAM sequence: CTG
  source 1..20: mol_type = other DNA
caatgggaaagagttaacac

SEQ ID NO: 58377 - DNA, 20 bp, synthetic construct
  misc_feature 1..20: note = Description of Artificial Sequence: Synthetic oligonucleotide
  misc_feature 1..20: note = Target: SCN10A; (+) strand; PAM type: YTN; PAM sequence: TTA
  source 1..20: mol_type = other DNA
acacagagcagaaggacgca

SEQ ID NO: 58378 - DNA, 20 bp, synthetic construct
  misc_feature 1..20: note = Description of Artificial Sequence: Synthetic oligonucleotide
  misc_feature 1..20: note = Target: SCN10A; (+) strand; PAM type: YTN; PAM sequence: CTG
  source 1..20: mol_type = other DNA
aacatatccaggctggagtg

SEQ ID NO: 58379 - DNA, 20 bp, synthetic construct
  misc_feature 1..20: note = Description of Artificial Sequence: Synthetic oligonucleotide
  misc_feature 1..20: note = Target: SCN10A; (+) strand; PAM type: YTN; PAM sequence: CTG
  source 1..20: mol_type = other DNA
gagtgttctcactagggccc

SEQ ID NO: 58380 - DNA, 20 bp, synthetic construct
  misc_feature 1..20: note = Description of Artificial Sequence: Synthetic oligonucleotide
  misc_feature 1..20: note = Target: SCN10A; (+) strand; PAM type: YTN; PAM sequence: TTC
  source 1..20: mol_type = other DNA
tcactagggcccaggggcaa

SEQ ID NO: 58381 - DNA, 20 bp, synthetic construct
  misc_feature 1..20: note = Description of Artificial Sequence: Synthetic oligonucleotide
  misc_feature 1..20: note = Target: SCN10A; (+) strand; PAM type: YTN; PAM sequence: CTC
  source 1..20: mol_type = other DNA
actagggcccaggggcaatc

SEQ ID NO: 58382 - DNA, 20 bp, synthetic construct
  misc_feature 1..20: note = Description of Artificial Sequence: Synthetic oligonucleotide
  misc_feature 1..20: note = Target: SCN10A; (+) strand; PAM type: YTN; PAM sequence: CTA
  source 1..20: mol_type = other DNA
gggcccaggggcaatcagct

SEQ ID NO: 58383 - DNA, 20 bp, synthetic construct
  misc_feature 1..20: note = Description of Artificial Sequence: Synthetic oligonucleotide
  misc_feature 1..20: note = Target: SCN10A; (+) strand; PAM type: YTN; PAM sequence: CTC
  source 1..20: mol_type = other DNA
catactggtggcttcatctt

SEQ ID NO: 58384 - DNA, 20 bp, synthetic construct
  misc_feature 1..20: note = Description of Artificial Sequence: Synthetic oligonucleotide
  misc_feature 1..20: note = Target: SCN10A; (+) strand; PAM type: YTN; PAM sequence: CTG
  source 1..20: mol_type = other DNA
gtggcttcatcttcattttg

SEQ ID NO: 58385 - DNA, 20 bp, synthetic construct
  misc_feature 1..20: note = Description of Artificial Sequence: Synthetic oligonucleotide
  misc_feature 1..20: note = Target: SCN10A; (+) strand; PAM type: YTN; PAM sequence: CTT
  source 1..20: mol_type = other DNA
catcttcattttgtattgag

SEQ ID NO: 58386 - DNA, 20 bp, synthetic construct
  misc_feature 1..20: note = Description of Artificial Sequence: Synthetic oligonucleotide
  misc_feature 1..20: note = Target: SCN10A; (+) strand; PAM type: YTN; PAM sequence: TTC
  source 1..20: mol_type = other DNA
atcttcattttgtattgagc

SEQ ID NO: 58387 - DNA, 20 bp, synthetic construct
  misc_feature 1..20: note = Description of Artificial Sequence: Synthetic oligonucleotide
  misc_feature 1..20: note = Target: SCN10A; (+) strand; PAM type: YTN; PAM sequence: CTT
  source 1..20: mol_type = other DNA
cattttgtattgagctagat

SEQ ID NO: 58388 - DNA, 20 bp, synthetic construct
  misc_feature 1..20: note = Description of Artificial Sequence: Synthetic oligonucleotide
  misc_feature 1..20: note = Target: SCN10A; (+) strand; PAM type: YTN; PAM sequence: TTC
  source 1..20: mol_type = other DNA
attttgtattgagctagatg

SEQ ID NO: 58389 - DNA, 20 bp, synthetic construct
  misc_feature 1..20: note = Description of Artificial Sequence: Synthetic oligonucleotide
  misc_feature 1..20: note = Target: SCN10A; (+) strand; PAM type: YTN; PAM sequence: TTT
  source 1..20: mol_type = other DNA
tgtattgagctagatgtcct

SEQ ID NO: 58390 - DNA, 20 bp, synthetic construct
  misc_feature 1..20: note = Description of Artificial Sequence: Synthetic oligonucleotide
  misc_feature 1..20: note = Target: SCN10A; (+) strand; PAM type: YTN; PAM sequence: TTT
  source 1..20: mol_type = other DNA
gtattgagctagatgtcctc

SEQ ID NO: 58391 - DNA, 20 bp, synthetic construct
  misc_feature 1..20: note = Description of Artificial Sequence: Synthetic oligonucleotide
  misc_feature 1..20: note = Target: SCN10A; (+) strand; PAM type: YTN; PAM sequence: TTG
  source 1..20: mol_type = other DNA
tattgagctagatgtcctca

SEQ ID NO: 58392 - DNA, 20 bp, synthetic construct
  misc_feature 1..20: note = Description of Artificial Sequence: Synthetic oligonucleotide
  misc_feature 1..20: note = Target: SCN10A; (+) strand; PAM type: YTN; PAM sequence: TTG
  source 1..20: mol_type = other DNA
agctagatgtcctcatgttg

SEQ ID NO: 58393 - DNA, 20 bp, synthetic construct
  misc_feature 1..20: note = Description of Artificial Sequence: Synthetic oligonucleotide
  misc_feature 1..20: note = Target: SCN10A; (+) strand; PAM type: YTN; PAM sequence: CTA
  source 1..20: mol_type = other DNA
gatgtcctcatgttgactct

SEQ ID NO: 58394 - DNA, 20 bp, synthetic construct
  misc_feature 1..20: note = Description of Artificial Sequence: Synthetic oligonucleotide
  misc_feature 1..20: note = Target: SCN10A; (+) strand; PAM type: YTN; PAM sequence: CTC
  source 1..20: mol_type = other DNA
atgttgactctatcactaag

SEQ ID NO: 58395 - DNA, 20 bp, synthetic construct
  misc_feature 1..20: note = Description of Artificial Sequence: Synthetic oligonucleotide
  misc_feature 1..20: note = Target: SCN10A; (+) strand; PAM type: YTN; PAM sequence: TTG
  source 1..20: mol_type = other DNA
actctatcactaaggcctct

SEQ ID NO: 58396 - DNA, 20 bp, synthetic construct
  misc_feature 1..20: note = Description of Artificial Sequence: Synthetic oligonucleotide
  misc_feature 1..20: note = Target: SCN10A; (+) strand; PAM type: YTN; PAM sequence: CTC
  source 1..20: mol_type = other DNA
tatcactaaggcctctagtg

SEQ ID NO: 58397 - DNA, 20 bp, synthetic construct
  misc_feature 1..20: note = Description of Artificial Sequence: Synthetic oligonucleotide
  misc_feature 1..20: note = Target: SCN10A; (+) strand; PAM type: YTN; PAM sequence: CTA
  source 1..20: mol_type = other DNA
tcactaaggcctctagtgac

SEQ ID NO: 58398 - DNA, 20 bp, synthetic construct
  misc_feature 1..20: note = Description of Artificial Sequence: Synthetic oligonucleotide
  misc_feature 1..20: note = Target: SCN10A; (+) strand; PAM type: YTN; PAM sequence: CTA
  source 1..20: mol_type = other DNA
aggcctctagtgacactctc

SEQ ID NO: 58399 - DNA, 20 bp, synthetic construct
  misc_feature 1..20: note = Description of Artificial Sequence: Synthetic oligonucleotide
  misc_feature 1..20: note = Target: SCN10A; (+) strand; PAM type: YTN; PAM sequence: CTC
  source 1..20: mol_type = other DNA
tagtgacactctcataggac

SEQ ID NO: 58400 - DNA, 20 bp, synthetic construct
  misc_feature 1..20: note = Description of Artificial Sequence: Synthetic oligonucleotide
  misc_feature 1..20: note = Target: SCN10A; (+) strand; PAM type: YTN; PAM sequence: CTA
  source 1..20: mol_type = other DNA
gtgacactctcataggacgg

SEQ ID NO: 58401 - DNA, 20 bp, synthetic construct
  misc_feature 1..20: note = Description of Artificial Sequence: Synthetic oligonucleotide
  misc_feature 1..20: note = Target: SCN10A; (+) strand; PAM type: YTN; PAM sequence: CTC
  source 1..20: mol_type = other DNA
tcataggacggtgggaatga

SEQ ID NO: 58402 - DNA, 20 bp, synthetic construct
  misc_feature 1..20: note = Description of Artificial Sequence: Synthetic oligonucleotide
  misc_feature 1..20: note = Target: SCN10A; (+) strand; PAM type: YTN; PAM sequence: CTC
  source 1..20: mol_type = other DNA
ataggacggtgggaatgatg

SEQ ID NO: 58403 - DNA, 20 bp, synthetic construct
  misc_feature 1..20: note = Description of Artificial Sequence: Synthetic oligonucleotide
  misc_feature 1..20: note = Target: SCN10A; (+) strand; PAM type: YTN; PAM sequence: TTT
  source 1..20: mol_type = other DNA
cagatttgtctgggagtaca

SEQ ID NO: 58404 - DNA, 20 bp, synthetic construct
  misc_feature 1..20: note = Description of Artificial Sequence: Synthetic oligonucleotide
  misc_feature 1..20: note = Target: SCN10A; (+) strand; PAM type: YTN; PAM sequence: TTC
  source 1..20: mol_type = other DNA
agatttgtctgggagtacac

SEQ ID NO: 58405 - DNA, 20 bp, synthetic construct
  misc_feature 1..20: note = Description of Artificial Sequence: Synthetic oligonucleotide
  misc_feature 1..20: note = Target: SCN10A; (+) strand; PAM type: YTN; PAM sequence: TTT
  source 1..20: mol_type = other DNA
gtctgggagtacacaatttt

SEQ ID NO: 58406 - DNA, 20 bp, synthetic construct
  misc_feature 1..20: note = Description of Artificial Sequence: Synthetic oligonucleotide
  misc_feature 1..20: note = Target: SCN10A; (+) strand; PAM type: YTN; PAM sequence: TTG
  source 1..20: mol_type = other DNA
tctgggagtacacaattttc

SEQ ID NO: 58407 - DNA, 20 bp, synthetic construct
  misc_feature 1..20: note = Description of Artificial Sequence: Synthetic oligonucleotide
  misc_feature 1..20: note = Target: SCN10A; (+) strand; PAM type: YTN; PAM sequence: CTG
  source 1..20: mol_type = other DNA
ggagtacacaattttcattt

SEQ ID NO: 58408 - DNA, 20 bp, synthetic construct
  misc_feature 1..20: note = Description of Artificial Sequence: Synthetic oligonucleotide
  misc_feature 1..20: note = Target: SCN10A; (+) strand; PAM type: YTN; PAM sequence: TTT
  source 1..20: mol_type = other DNA
tcatttgctgtgaatgcaac

SEQ ID NO: 58409 - DNA, 20 bp, synthetic construct
  misc_feature 1..20: note = Description of Artificial Sequence: Synthetic oligonucleotide
  misc_feature 1..20: note = Target: SCN10A; (+) strand; PAM type: YTN; PAM sequence: TTT
  source 1..20: mol_type = other DNA
catttgctgtgaatgcaaca

SEQ ID NO: 58410 - DNA, 20 bp, synthetic construct
  misc_feature 1..20: note = Description of Artificial Sequence: Synthetic oligonucleotide
  misc_feature 1..20: note = Target: SCN10A; (+) strand; PAM type: YTN; PAM sequence: TTC
  source 1..20: mol_type = other DNA
atttgctgtgaatgcaacaa

SEQ ID NO: 58411 - DNA, 20 bp, synthetic construct
  misc_feature 1..20: note = Description of Artificial Sequence: Synthetic oligonucleotide
  misc_feature 1..20: note = Target: SCN10A; (+) strand; PAM type: YTN; PAM sequence: TTT
  source 1..20: mol_type = other DNA
gctgtgaatgcaacaaaacc

SEQ ID NO: 58412 - DNA, 20 bp, synthetic construct
  misc_feature 1..20: note = Description of Artificial Sequence: Synthetic oligonucleotide
  misc_feature 1..20: note = Target: SCN10A; (+) strand; PAM type: YTN; PAM sequence: TTG
  source 1..20: mol_type = other DNA
ctgtgaatgcaacaaaacct

SEQ ID NO: 58413 - DNA, 20 bp, synthetic construct
  misc_feature 1..20: note = Description of Artificial Sequence: Synthetic oligonucleotide
  misc_feature 1..20: note = Target: SCN10A; (+) strand; PAM type: YTN; PAM sequence: CTG
  source 1..20: mol_type = other DNA
tgaatgcaacaaaaccttca

SEQ ID NO: 58414 - DNA, 20 bp, synthetic construct
  misc_feature 1..20: note = Description of Artificial Sequence: Synthetic oligonucleotide
  misc_feature 1..20: note = Target: SCN10A; (+) strand; PAM type: YTN; PAM sequence: CTT
  source 1..20: mol_type = other DNA
catctgggagtgatgcagcc

SEQ ID NO: 58415 - DNA, 20 bp, synthetic construct
  misc_feature 1..20: note = Description of Artificial Sequence: Synthetic oligonucleotide
  misc_feature 1..20: note = Target: SCN10A; (+) strand; PAM type: YTN; PAM sequence: TTC
  source 1..20: mol_type = other DNA
atctgggagtgatgcagcct

SEQ ID NO: 58416 - DNA, 20 bp, synthetic construct
  misc_feature 1..20: note = Description of Artificial Sequence: Synthetic oligonucleotide
  misc_feature 1..20: note = Target: SCN10A; (+) strand; PAM type: YTN; PAM sequence: CTG
  source 1..20: mol_type = other DNA
ggagtgatgcagcctcctcc

SEQ ID NO: 58417 - DNA, 20 bp, synthetic construct
  misc_feature 1..20: note = Description of Artificial Sequence: Synthetic oligonucleotide
  misc_feature 1..20: note = Target: SCN10A; (+) strand; PAM type: YTN; PAM sequence: CTC
  source 1..20: mol_type = other DNA
ctcctcagctctgggcacac

SEQ ID NO: 58418 - DNA, 20 bp, synthetic construct
  misc_feature 1..20: note = Description of Artificial Sequence: Synthetic oligonucleotide
  misc_feature 1..20: note = Target: SCN10A; (+) strand; PAM type: YTN; PAM sequence: CTC
  source 1..20: mol_type = other DNA
ctcagctctgggcacacatg

SEQ ID NO: 58419 - DNA, 20 bp, synthetic construct
  misc_feature 1..20: note = Description of Artificial Sequence: Synthetic oligonucleotide
  misc_feature 1..20: note = Target: SCN10A; (+) strand; PAM type: YTN; PAM sequence: CTC
  source 1..20: mol_type = other DNA
agctctgggcacacatgggg

SEQ ID NO: 58420 - DNA, 20 bp, synthetic construct
  misc_feature 1..20: note = Description of Artificial Sequence: Synthetic oligonucleotide
  misc_feature 1..20: note = Target: SCN10A; (+) strand; PAM type: YTN; PAM sequence: CTC
  source 1..20: mol_type = other DNA
tgggcacacatggggtgtta

SEQ ID NO: 58421 - DNA, 20 bp, synthetic construct
  misc_feature 1..20: note = Description of Artificial Sequence: Synthetic oligonucleotide
  misc_feature 1..20: note = Target: SCN10A; (+) strand; PAM type: YTN; PAM sequence: CTG
  source 1..20: mol_type = other DNA
ggcacacatggggtgttaga

SEQ ID NO: 58422 - DNA, 20 bp, synthetic construct
  misc_feature 1..20: note = Description of Artificial Sequence: Synthetic oligonucleotide
  misc_feature 1..20: note = Target: SCN10A; (+) strand; PAM type: YTN; PAM sequence: TTA
  source 1..20: mol_type = other DNA
gagagtgccatggagcggtg

SEQ ID NO: 58423 - DNA, 20 bp, synthetic construct
  misc_feature 1..20: note = Description of Artificial Sequence: Synthetic oligonucleotide
  misc_feature 1..20: note = Target: SCN10A; (+) strand; PAM type: YTN; PAM sequence: CTC
  source 1..20: mol_type = other DNA
cgataggccttttgaatgac

SEQ ID NO: 58424 - DNA, 20 bp, synthetic construct
  misc_feature 1..20: note = Description of Artificial Sequence: Synthetic oligonucleotide
  misc_feature 1..20: note = Target: SCN10A; (+) strand; PAM type: YTN; PAM sequence: CTT
  source 1..20: mol_type = other DNA
ttgaatgacagtggctgaaa

SEQ ID NO: 58425 - DNA, 20 bp, synthetic construct
  misc_feature 1..20: note = Description of Artificial Sequence: Synthetic oligonucleotide
  misc_feature 1..20: note = Target: SCN10A; (+) strand; PAM type: YTN; PAM sequence: TTT
  source 1..20: mol_type = other DNA
tgaatgacagtggctgaaat

SEQ ID NO: 58426 - DNA, 20 bp, synthetic construct
  misc_feature 1..20: note = Description of Artificial Sequence: Synthetic oligonucleotide
  misc_feature 1..20: note = Target: SCN10A; (+) strand; PAM type: YTN; PAM sequence: TTT
  source 1..20: mol_type = other DNA
gaatgacagtggctgaaatg

SEQ ID NO: 58427 - DNA, 20 bp, synthetic construct
  misc_feature 1..20: note = Description of Artificial Sequence: Synthetic oligonucleotide
  misc_feature 1..20: note = Target: SCN10A; (+) strand; PAM type: YTN; PAM sequence: TTG
  source 1..20: mol_type = other DNA
aatgacagtggctgaaatgt

SEQ ID NO: 58428 - DNA, 20 bp, synthetic construct
  misc_feature 1..20: note = Description of Artificial Sequence: Synthetic oligonucleotide
  misc_feature 1..20: note = Target: SCN10A; (+) strand; PAM type: YTN; PAM sequence: CTG
  source 1..20: mol_type = other DNA
aaatgtcttcttgcttccat

SEQ ID NO: 58429 - DNA, 20 bp, synthetic construct
  misc_feature 1..20: note = Description of Artificial Sequence: Synthetic oligonucleotide
  misc_feature 1..20: note = Target: SCN10A; (+) strand; PAM type: YTN; PAM sequence: CTT
  source 1..20: mol_type = other DNA
cttgcttccatcggagagtg

SEQ ID NO: 58430 - DNA, 20 bp, synthetic construct
  misc_feature 1..20: note = Description of Artificial Sequence: Synthetic oligonucleotide
  misc_feature 1..20: note = Target: SCN10A; (+) strand; PAM type: YTN; PAM sequence: TTC
  source 1..20: mol_type = other DNA
ttgcttccatcggagagtgg

SEQ ID NO: 58431 - DNA, 20 bp, synthetic construct
  misc_feature 1..20: note = Description of Artificial Sequence: Synthetic oligonucleotide
  misc_feature 1..20: note = Target: SCN10A; (+) strand; PAM type: YTN; PAM sequence: CTT
  source 1..20: mol_type = other DNA
gcttccatcggagagtggtt

SEQ ID NO: 58432 - DNA, 20 bp, synthetic construct
  misc_feature 1..20: note = Description of Artificial Sequence: Synthetic oligonucleotide
  misc_feature 1..20: note = Target: SCN10A; (+) strand; PAM type: YTN; PAM sequence: TTG
  source 1..20: mol_type = other DNA
cttccatcggagagtggttg

SEQ ID NO: 58433 - DNA, 20 bp, synthetic construct
  misc_feature 1..20: note = Description of Artificial Sequence: Synthetic oligonucleotide
  misc_feature 1..20: note = Target: SCN10A; (+) strand; PAM type: YTN; PAM sequence: CTT
  source 1..20: mol_type = other DNA
ccatcggagagtggttgcta

SEQ ID NO: 58434 - DNA, 20 bp, synthetic construct
  misc_feature 1..20: note = Description of Artificial Sequence: Synthetic oligonucleotide
  misc_feature 1..20: note = Target: SCN10A; (+) strand; PAM type: YTN; PAM sequence: TTC
  source 1..20: mol_type = other DNA
catcggagagtggttgctat

SEQ ID NO: 58435 - DNA, 20 bp, synthetic construct
  misc_feature 1..20: note = Description of Artificial Sequence: Synthetic oligonucleotide
  misc_feature 1..20: note = Target: SCN10A; (+) strand; PAM type: YTN; PAM sequence: TTG
  source 1..20: mol_type = other DNA
ctattggttcataggatgat

SEQ ID NO: 58436 - DNA, 20 bp, synthetic construct
  misc_feature 1..20: note = Description of Artificial Sequence: Synthetic oligonucleotide
  misc_feature 1..20: note = Target: SCN10A; (+) strand; PAM type: YTN; PAM sequence: CTA
  source 1..20: mol_type = other DNA
ttggttcataggatgatttt

SEQ ID NO: 58437 - DNA, 20 bp, synthetic construct
  misc_feature 1..20: note = Description of Artificial Sequence: Synthetic oligonucleotide
  misc_feature 1..20: note = Target: SCN10A; (+) strand; PAM type: YTN; PAM sequence: TTG
  source 1..20: mol_type = other DNA
gttcataggatgattttgaa

SEQ ID NO: 58438 - DNA, 20 bp, synthetic construct
  misc_feature 1..20: note = Description of Artificial Sequence: Synthetic oligonucleotide
  misc_feature 1..20: note = Target: SCN10A; (+) strand; PAM type: YTN; PAM sequence: TTC
  source 1..20: mol_type = other DNA
ataggatgattttgaaagat

SEQ ID NO: 58439 - DNA, 20 bp, synthetic construct
  misc_feature 1..20: note = Description of Artificial Sequence: Synthetic oligonucleotide
  misc_feature 1..20: note = Target: SCN10A; (+) strand; PAM type: YTN; PAM sequence: TTT
  source 1..20: mol_type = other DNA
tgaaagattagttgccataa

SEQ ID NO: 58440 - DNA, 20 bp, synthetic construct
  misc_feature 1..20: note = Description of Artificial Sequence: Synthetic oligonucleotide
  misc_feature 1..20: note = Target: SCN10A; (+) strand; PAM type: YTN; PAM sequence: TTT
  source 1..20: mol_type = other DNA
gaaagattagttgccataaa

SEQ ID NO: 58441 - DNA, 20 bp, synthetic construct
  misc_feature 1..20: note = Description of Artificial Sequence: Synthetic oligonucleotide
  misc_feature 1..20: note = Target: SCN10A; (+) strand; PAM type: YTN; PAM sequence: TTG
  source 1..20: mol_type = other DNA
aaagattagttgccataaac

SEQ ID NO: 58442 - DNA, 20 bp, synthetic construct
  misc_feature 1..20: note = Description of Artificial Sequence: Synthetic oligonucleotide
  misc_feature 1..20: note = Target: SCN10A; (+) strand; PAM type: YTN; PAM sequence: TTA
  source 1..20: mol_type = other DNA
gttgccataaacttctcctc

SEQ ID NO: 58443 - DNA, 20 bp, synthetic construct
  misc_feature 1..20: note = Description of Artificial Sequence: Synthetic oligonucleotide
  misc_feature 1..20: note = Target: SCN10A; (+) strand; PAM type: YTN; PAM sequence: TTG
  source 1..20: mol_type = other DNA
ccataaacttctcctccata

SEQ ID NO: 58444 - DNA, 20 bp, synthetic construct
  misc_feature 1..20: note = Description of Artificial Sequence: Synthetic oligonucleotide
  misc_feature 1..20: note = Target: SCN10A; (+) strand; PAM type: YTN; PAM sequence: CTT
  source 1..20: mol_type = other DNA
ctcctccatatttgccttca

SEQ ID NO: 58445 - DNA, 20 bp, synthetic construct
  misc_feature 1..20: note = Description of Artificial Sequence: Synthetic oligonucleotide
  misc_feature 1..20: note = Target: SCN10A; (+) strand; PAM type: YTN; PAM sequence: TTC
  source 1..20: mol_type = other DNA
tcctccatatttgccttcag

SEQ ID NO: 58446 - DNA, 20 bp, synthetic construct
  misc_feature 1..20: note = Description of Artificial Sequence: Synthetic oligonucleotide
  misc_feature 1..20: note = Target: SCN10A; (+) strand; PAM type: YTN; PAM sequence: CTC
  source 1..20: mol_type = other DNA
ctccatatttgccttcagag

SEQ ID NO: 58447 - DNA, 20 bp, synthetic construct
  misc_feature 1..20: note = Description of Artificial Sequence: Synthetic oligonucleotide
  misc_feature 1..20: note = Target: SCN10A; (+) strand; PAM type: YTN; PAM sequence: CTC
  source 1..20: mol_type = other DNA
catatttgccttcagagaat

SEQ ID NO: 58448 - DNA, 20 bp, synthetic construct
  misc_feature 1..20: note = Description of Artificial Sequence: Synthetic oligonucleotide
  misc_feature 1..20: note = Target: SCN10A; (+) strand; PAM type: YTN; PAM sequence: TTT
  source 1..20: mol_type = other DNA
gccttcagagaatccaactc

SEQ ID NO: 58449 - DNA, 20 bp, synthetic construct
  misc_feature 1..20: note = Description of Artificial Sequence: Synthetic oligonucleotide
  misc_feature 1..20: note = Target: SCN10A; (+) strand; PAM type: YTN; PAM sequence: TTG
  source 1..20: mol_type = other DNA
ccttcagagaatccaactcc

SEQ ID NO: 58450 - DNA, 20 bp, synthetic construct
  misc_feature 1..20: note = Description of Artificial Sequence: Synthetic oligonucleotide
  misc_feature 1..20: note = Target: SCN10A; (+) strand; PAM type: YTN; PAM sequence: CTT
  source 1..20: mol_type = other DNA
cagagaatccaactccccgg

SEQ ID NO: 58451 - DNA, 20 bp, synthetic construct
  misc_feature 1..20: note = Description of Artificial Sequence: Synthetic oligonucleotide
  misc_feature 1..20: note = Target: SCN10A; (+) strand; PAM type: YTN; PAM sequence: TTC
  source 1..20: mol_type = other DNA
agagaatccaactccccgga

SEQ ID NO: 58452 - DNA, 20 bp, synthetic construct
  misc_feature 1..20: note = Description of Artificial Sequence: Synthetic oligonucleotide
  misc_feature 1..20: note = Target: SCN10A; (+) strand; PAM type: YTN; PAM sequence: CTC
  source 1..20: mol_type = other DNA
cccggattctcctaggacat

SEQ ID NO: 58453 - DNA, 20 bp, synthetic construct
  misc_feature 1..20: note = Description of Artificial Sequence: Synthetic oligonucleotide
  misc_feature 1..20: note = Target: SCN10A; (+) strand; PAM type: YTN; PAM sequence: TTC
  source 1..20: mol_type = other DNA
tcctaggacattcttggtga

SEQ ID NO: 58454 - DNA, 20 bp, synthetic construct
  misc_feature 1..20: note = Description of Artificial Sequence: Synthetic oligonucleotide
  misc_feature 1..20: note = Target: SCN10A; (+) strand; PAM type: YTN; PAM sequence: CTC
  source 1..20: mol_type = other DNA
ctaggacattcttggtgaaa

SEQ ID NO: 58455 - DNA, 20 bp, synthetic construct
  misc_feature 1..20: note = Description of Artificial Sequence: Synthetic oligonucleotide
  misc_feature 1..20: note = Target: SCN10A; (+) strand; PAM type: YTN; PAM sequence: CTA
  source 1..20: mol_type = other DNA
ggacattcttggtgaaagca

SEQ ID NO: 58456 - DNA, 20 bp, synthetic construct
  misc_feature 1..20: note = Description of Artificial Sequence: Synthetic oligonucleotide
  misc_feature 1..20: note = Target: SCN10A; (+) strand; PAM type: YTN; PAM sequence: TTC
  source 1..20: mol_type = other DNA
ttggtgaaagcaaaaaggat

SEQ ID NO: 58457 - DNA, 20 bp, synthetic construct
  misc_feature 1..20: note = Description of Artificial Sequence: Synthetic oligonucleotide
  misc_feature 1..20: note = Target: SCN10A; (+) strand; PAM type: YTN; PAM sequence: CTT
  source 1..20: mol_type = other DNA
ggtgaaagcaaaaaggatgt

SEQ ID NO: 58458 - DNA, 20 bp, synthetic construct
  misc_feature 1..20: note = Description of Artificial Sequence: Synthetic oligonucleotide
  misc_feature 1..20: note = Target: SCN10A; (+) strand; PAM type: YTN; PAM sequence: TTG
  source 1..20: mol_type = other DNA
gtgaaagcaaaaaggatgtc

SEQ ID NO: 58459 - DNA, 20 bp, synthetic construct
  misc_feature 1..20: note = Description of Artificial Sequence: Synthetic oligonucleotide
  misc_feature 1..20: note = Target: SCN10A; (+) strand; PAM type: YTN; PAM sequence: CTT
  source 1..20: mol_type = other DNA
atctccagggaccaaaggca

SEQ ID NO: 58460 - DNA, 20 bp, synthetic construct
  misc_feature 1..20: note = Description of Artificial Sequence: Synthetic oligonucleotide
  misc_feature 1..20: note = Target: SCN10A; (+) strand; PAM type: YTN; PAM sequence: TTA
  source 1..20: mol_type = other DNA
tctccagggaccaaaggcag

SEQ ID NO: 58461 - DNA, 20 bp, synthetic construct
  misc_feature 1..20: note = Description of Artificial Sequence: Synthetic oligonucleotide
  misc_feature 1..20: note = Target: SCN10A; (+) strand; PAM type: YTN; PAM sequence: CTC
  source 1..20: mol_type = other DNA
cagggaccaaaggcaggtcc

SEQ ID NO: 58462 - DNA, 20 bp, synthetic construct
  misc_feature 1..20: note = Description of Artificial Sequence: Synthetic oligonucleotide
  misc_feature 1..20: note = Target: SCN10A; (+) strand; PAM type: YTN; PAM sequence: CTG
  source 1..20: mol_type = other DNA
gatcagtatatttcgattgg

SEQ ID NO: 58463 - DNA, 20 bp, synthetic construct
  misc_feature 1..20: note = Description of Artificial Sequence: Synthetic oligonucleotide
  misc_feature 1..20: note = Target: SCN10A; (+) strand; PAM type: YTN; PAM sequence: TTT
  source 1..20: mol_type = other DNA
cgattgggttttgggattct

SEQ ID NO: 58464 - DNA, 20 bp, synthetic construct
  misc_feature 1..20: note = Description of Artificial Sequence: Synthetic oligonucleotide
  misc_feature 1..20: note = Target: SCN10A; (+) strand; PAM type: YTN; PAM sequence: TTC
  source 1..20: mol_type = other DNA
gattgggttttgggattctc

SEQ ID NO: 58465 - DNA, 20 bp, synthetic construct
  misc_feature 1..20: note = Description of Artificial Sequence: Synthetic oligonucleotide
  misc_feature 1..20: note = Target: SCN10A; (+) strand; PAM type: YTN; PAM sequence: TTG
  source 1..20: mol_type = other DNA
ggttttgggattctcagggg

SEQ ID NO: 58466 - DNA, 20 bp, synthetic construct
  misc_feature 1..20: note = Description of Artificial Sequence: Synthetic oligonucleotide
  misc_feature 1..20: note = Target: SCN10A; (+) strand; PAM type: YTN; PAM sequence: TTT
  source 1..20: mol_type = other DNA
tgggattctcaggggaccag

SEQ ID NO: 58467 - DNA, 20 bp, synthetic construct
  misc_feature 1..20: note = Description of Artificial Sequence: Synthetic oligonucleotide
  misc_feature 1..20: note = Target: SCN10A; (+) strand; PAM type: YTN; PAM sequence: TTT
  source 1..20: mol_type = other DNA
gggattctcaggggaccaga

SEQ ID NO: 58468 - DNA, 20 bp, synthetic construct
  misc_feature 1..20: note = Description of Artificial Sequence: Synthetic oligonucleotide
  misc_feature 1..20: note = Target: SCN10A; (+) strand; PAM type: YTN; PAM sequence: TTG
  source 1..20: mol_type = other DNA
ggattctcaggggaccagag

SEQ ID NO: 58469 - DNA, 20 bp, synthetic construct
  misc_feature 1..20: note = Description of Artificial Sequence: Synthetic oligonucleotide
  misc_feature 1..20: note = Target: SCN10A; (+) strand; PAM type: YTN; PAM sequence: TTC
  source 1..20: mol_type = other DNA
tcaggggaccagagagagtg

SEQ ID NO: 58470 - DNA, 20 bp, synthetic construct
  misc_feature 1..20: note = Description of Artificial Sequence: Synthetic oligonucleotide
  misc_feature 1..20: note = Target: SCN10A; (+) strand; PAM type: YTN; PAM sequence: CTC
  source 1..20: mol_type = other DNA
aggggaccagagagagtgtc

SEQ ID NO: 58471 - DNA, 20 bp, synthetic construct
  misc_feature 1..20: note = Description of Artificial Sequence: Synthetic oligonucleotide
  misc_feature 1..20: note = Target: SCN10A; (+) strand; PAM type: YTN; PAM sequence: CTG
  source 1..20: mol_type = other DNA
caaagtccgagagagcagaa

SEQ ID NO: 58472 - DNA, 20 bp, synthetic construct
  misc_feature 1..20: note = Description of Artificial Sequence: Synthetic oligonucleotide
  misc_feature 1..20: note = Target: SCN10A; (+) strand; PAM type: YTN; PAM sequence: CTG
  source 1..20: mol_type = other DNA
agtggcctctgggtcaaact

SEQ ID NO: 58473 - DNA, 20 bp, synthetic construct
  misc_feature 1..20: note = Description of Artificial Sequence: Synthetic oligonucleotide
  misc_feature 1..20: note = Target: SCN10A; (+) strand; PAM type: YTN; PAM sequence: CTC
  source 1..20: mol_type = other DNA
tgggtcaaacttctcccagg

SEQ ID NO: 58474 - DNA, 20 bp, synthetic construct
  misc_feature 1..20: note = Description of Artificial Sequence: Synthetic oligonucleotide
  misc_feature 1..20: note = Target: SCN10A; (+) strand; PAM type: YTN; PAM sequence: CTG
  source 1..20: mol_type = other DNA
ggtcaaacttctcccaggtc

SEQ ID NO: 58475 - DNA, 20 bp, synthetic construct
  misc_feature 1..20: note = Description of Artificial Sequence: Synthetic oligonucleotide
  misc_feature 1..20: note = Target: SCN10A; (+) strand; PAM type: YTN; PAM sequence: CTT
  source 1..20: mol_type = other DNA
ctcccaggtctcatagaaca

SEQ ID NO: 58476 - DNA, 20 bp, synthetic construct
  misc_feature 1..20: note = Description of Artificial Sequence: Synthetic oligonucleotide
  misc_feature 1..20: note = Target: SCN10A; (+) strand; PAM type: YTN; PAM sequence: TTC
  source 1..20: mol_type = other DNA
tcccaggtctcatagaacat

SEQ ID NO: 58477 - DNA, 20 bp, synthetic construct
  misc_feature 1..20: note = Description of Artificial Sequence: Synthetic oligonucleotide
  misc_feature 1..20: note = Target: SCN10A; (+) strand; PAM type: YTN; PAM sequence: CTC
  source 1..20: mol_type = other DNA
ccaggtctcatagaacatgt

SEQ ID NO: 58478 - DNA, 20 bp, synthetic construct
  misc_feature 1..20: note = Description of Artificial Sequence: Synthetic oligonucleotide
  misc_feature 1..20: note = Target: SCN10A; (+) strand; PAM type: YTN; PAM sequence: CTC
  source 1..20: mol_type = other DNA
atagaacatgtcaaagtcgt

SEQ ID NO: 58479 - DNA, 20 bp, synthetic construct
  misc_feature 1..20: note = Description of Artificial Sequence: Synthetic oligonucleotide
  misc_feature 1..20: note = Target: SCN10A; (+) strand; PAM type: YTN; PAM sequence: CTC
  source 1..20: mol_type = other DNA
actcaggggctcagtgctct

SEQ ID NO: 58480 - DNA, 20 bp, synthetic construct
  misc_feature 1..20: note = Description of Artificial Sequence: Synthetic oligonucleotide
  misc_feature 1..20: note = Target: SCN10A; (+) strand; PAM type: YTN; PAM sequence: CTC
  source 1..20: mol_type = other DNA
aggggctcagtgctctcctc

SEQ ID NO: 58481 - DNA, 20 bp, synthetic construct
  misc_feature 1..20: note = Description of Artificial Sequence: Synthetic oligonucleotide
  misc_feature 1..20: note = Target: SCN10A; (+) strand; PAM type: YTN; PAM sequence: CTC
  source 1..20: mol_type = other DNA
agtgctctcctccgtggcca

SEQ ID NO: 58482 - DNA, 20 bp, synthetic construct
  misc_feature 1..20: note = Description of Artificial Sequence: Synthetic oligonucleotide
  misc_feature 1..20: note = Target: SCN10A; (+) strand; PAM type: YTN; PAM sequence: CTC
  source 1..20: mol_type = other DNA
tcctccgtggccacattgaa

SEQ ID NO: 58483 - DNA, 20 bp, synthetic construct
  misc_feature 1..20: note = Description of Artificial Sequence: Synthetic oligonucleotide
  misc_feature 1..20: note = Target: SCN10A; (+) strand; PAM type: YTN; PAM sequence: CTC
  source 1..20: mol_type = other DNA
ctccgtggccacattgaagt

SEQ ID NO: 58484 - DNA, 20 bp, synthetic construct
  misc_feature 1..20: note = Description of Artificial Sequence: Synthetic oligonucleotide
  misc_feature 1..20: note = Target: SCN10A; (+) strand; PAM type: YTN; PAM sequence: CTC
  source 1..20: mol_type = other DNA
cgtggccacattgaagttct

SEQ ID NO: 58485 - DNA, 20 bp, synthetic construct
  misc_feature 1..20: note = Description of Artificial Sequence: Synthetic oligonucleotide
  misc_feature 1..20: note = Target: SCN10A; (+) strand; PAM type: YTN; PAM sequence: TTG
  source 1..20: mol_type = other DNA
aagttctccagaatcactgc

SEQ ID NO: 58486 - DNA, 20 bp, synthetic construct
  misc_feature 1..20: note = Description of Artificial Sequence: Synthetic oligonucleotide
  misc_feature 1..20: note = Target: SCN10A; (+) strand; PAM type: YTN; PAM sequence: TTC
  source 1..20: mol_type = other DNA
tccagaatcactgcaatgta

SEQ ID NO: 58487 - DNA, 20 bp, synthetic construct
  misc_feature 1..20: note = Description of Artificial Sequence: Synthetic oligonucleotide
  misc_feature 1..20: note = Target: SCN10A; (+) strand; PAM type: YTN; PAM sequence: CTC
  source 1..20: mol_type = other DNA
cagaatcactgcaatgtaca

SEQ ID NO: 58488 - DNA, 20 bp, synthetic construct
  misc_feature 1..20: note = Description of Artificial Sequence: Synthetic oligonucleotide
  misc_feature 1..20: note = Target: SCN10A; (+) strand; PAM type: YTN; PAM sequence: CTG
  source 1..20: mol_type = other DNA
caatgtacatgttgaccatg

SEQ ID NO: 58489 - DNA, 20 bp, synthetic construct
  misc_feature 1..20: note = Description of Artificial Sequence: Synthetic oligonucleotide
  misc_feature 1..20: note = Target: SCN10A; (+) strand; PAM type: YTN; PAM sequence: TTG
  source 1..20: mol_type = other DNA
accatgatgaggaaggagat

SEQ ID NO: 58490 - DNA, 20 bp, synthetic construct
  misc_feature 1..20: note = Description of Artificial Sequence: Synthetic oligonucleotide
  misc_feature 1..20: note = Target: SCN10A; (+) strand; PAM type: YTN; PAM sequence: CTA
  source 1..20: mol_type = other DNA
cggctgggctcccacagtcc

SEQ ID NO: 58491 - DNA, 20 bp, synthetic construct
  misc_feature 1..20: note = Description of Artificial Sequence: Synthetic oligonucleotide
  misc_feature 1..20: note = Target: SCN10A; (+) strand; PAM type: YTN; PAM sequence: CTG
  source 1..20: mol_type = other DNA
ggctcccacagtcccctctg

SEQ ID NO: 58492 - DNA, 20 bp, synthetic construct
  misc_feature 1..20: note = Description of Artificial Sequence: Synthetic oligonucleotide
  misc_feature 1..20: note = Target: SCN10A; (+) strand; PAM type: YTN; PAM sequence: CTC
  source 1..20: mol_type = other DNA
ccacagtcccctctggtgcc

SEQ ID NO: 58493 - DNA, 20 bp, synthetic construct
  misc_feature 1..20: note = Description of Artificial Sequence: Synthetic oligonucleotide
  misc_feature 1..20: note = Target: SCN10A; (+) strand; PAM type: YTN; PAM sequence: CTC
  source 1..20: mol_type = other DNA
tggtgccattgctgttgggc

SEQ ID NO: 58494 - DNA, 20 bp, synthetic construct
  misc_feature 1..20: note = Description of Artificial Sequence: Synthetic oligonucleotide
  misc_feature 1..20: note = Target: SCN10A; (+) strand; PAM type: YTN; PAM sequence: CTG
  source 1..20: mol_type = other DNA
gtgccattgctgttgggcag

SEQ ID NO: 58495 - DNA, 20 bp, synthetic construct
  misc_feature 1..20: note = Description of Artificial Sequence: Synthetic oligonucleotide
  misc_feature 1..20: note = Target: SCN10A; (+) strand; PAM type: YTN; PAM sequence: TTG
  source 1..20: mol_type = other DNA
ctgttgggcagattggggtc

SEQ ID NO: 58496 - DNA, 20 bp, synthetic construct
  misc_feature 1..20: note = Description of Artificial Sequence: Synthetic oligonucleotide
  misc_feature 1..20: note = Target: SCN10A; (+) strand; PAM type: YTN; PAM sequence: CTG
  source 1..20: mol_type = other DNA
ttgggcagattggggtcaca

SEQ ID NO: 58497 - DNA, 20 bp, synthetic construct
  misc_feature 1..20: note = Description of Artificial Sequence: Synthetic oligonucleotide
  misc_feature 1..20: note = Target: SCN10A; (+) strand; PAM type: YTN; PAM sequence: TTG
  source 1..20: mol_type = other DNA
ggcagattggggtcacagta

SEQ ID NO: 58498 - DNA, 20 bp, synthetic construct
  misc_feature 1..20: note = Description of Artificial Sequence: Synthetic oligonucleotide
  misc_feature 1..20: note = Target: SCN10A; (+) strand; PAM type: YTN; PAM sequence: TTG
  source 1..20: mol_type = other DNA
gggtcacagtaggggggccc

SEQ ID NO: 58499 - DNA, 20 bp, synthetic construct
  misc_feature 1..20: note = Description of Artificial Sequence: Synthetic oligonucleotide
  misc_feature 1..20: note = Target: SCN10A; (+) strand; PAM type: YTN; PAM sequence: CTG
  source 1..20: mol_type = other DNA
tgttgaggatggggctgagg

SEQ ID NO: 58500 - DNA, 20 bp, synthetic construct
  misc_feature 1..20: note = Description of Artificial Sequence: Synthetic oligonucleotide
  misc_feature 1..20: note = Target: SCN10A; (+) strand; PAM type: YTN; PAM sequence: TTG
  source 1..20: mol_type = other DNA
aggatggggctgaggaggcc

SEQ ID NO: 58501 - DNA, 20 bp, synthetic construct
  misc_feature 1..20: note = Description of Artificial Sequence: Synthetic oligonucleotide
  misc_feature 1..20: note = Target: SCN10A; (+) strand; PAM type: YTN; PAM sequence: CTG
  source 1..20: mol_type = other DNA
aggaggccatcccagccggc

SEQ ID NO: 58502 - DNA, 20 bp, synthetic construct
  misc_feature 1..20: note = Description of Artificial Sequence: Synthetic oligonucleotide
  misc_feature 1..20: note = Target: SCN10A; (+) strand; PAM type: YTN; PAM sequence: CTG
  source 1..20: mol_type = other DNA
gaagaggcacagcatgctgt

SEQ ID NO: 58503 - DNA, 20 bp, synthetic construct
  misc_feature 1..20: note = Description of Artificial Sequence: Synthetic oligonucleotide
  misc_feature 1..20: note = Target: SCN10A; (+) strand; PAM type: YTN; PAM sequence: CTG
  source 1..20: mol_type = other DNA
ttggcgaaggtctggaagtt

SEQ ID NO: 58504 - DNA, 20 bp, synthetic construct
  misc_feature 1..20: note = Description of Artificial Sequence: Synthetic oligonucleotide
  misc_feature 1..20: note = Target: SCN10A; (+) strand; PAM type: YTN; PAM sequence: TTG
  source 1..20: mol_type = other DNA
gcgaaggtctggaagttgaa

SEQ ID NO: 58505 - DNA, 20 bp, synthetic construct
  misc_feature 1..20: note = Description of Artificial Sequence: Synthetic oligonucleotide
  misc_feature 1..20: note = Target: SCN10A; (+) strand; PAM type: YTN; PAM sequence: CTG
  source 1..20: mol_type = other DNA
gaagttgaacatgtcgtcga

SEQ ID NO: 58506 - DNA, 20 bp, synthetic construct
  misc_feature 1..20: note = Description of Artificial Sequence: Synthetic oligonucleotide
  misc_feature 1..20: note = Target: SCN10A; (+) strand; PAM type: YTN; PAM sequence: TTG
  source 1..20: mol_type = other DNA
aacatgtcgtcgatgccagc

SEQ ID NO: 58507 - DNA, 20 bp, synthetic construct
  misc_feature 1..20: note = Description of Artificial Sequence: Synthetic oligonucleotide
  misc_feature 1..20: note = Target: SCN10A; (+) strand; PAM type: YTN; PAM sequence: CTC
  source 1..20: mol_type = other DNA
ccacctcacatggggaaagc

SEQ ID NO: 58508 - DNA, 20 bp, synthetic construct
  misc_feature 1..20: note = Description of Artificial Sequence: Synthetic oligonucleotide
  misc_feature 1..20: note = Target: SCN10A; (+) strand; PAM type: YTN; PAM sequence: CTC
  source 1..20: mol_type = other DNA
acatggggaaagctggacat

SEQ ID NO: 58509 - DNA, 20 bp, synthetic construct
  misc_feature 1..20: note = Description of Artificial Sequence: Synthetic oligonucleotide
  misc_feature 1..20: note = Target: SCN10A; (+) strand; PAM type: YTN; PAM sequence: CTG
  source 1..20: mol_type = other DNA
gacataccgaagatagagta

SEQ ID NO: 58510 - DNA, 20 bp, synthetic construct
  misc_feature 1..20: note = Description of Artificial Sequence: Synthetic oligonucleotide
  misc_feature 1..20: note = Target: SCN10A; (+) strand; PAM type: YTN; PAM sequence: TTG
  source 1..20: mol_type = other DNA
aagagggcaggcagggacat

SEQ ID NO: 58511 - DNA, 20 bp, synthetic construct
  misc_feature 1..20: note = Description of Artificial Sequence: Synthetic oligonucleotide
  misc_feature 1..20: note = Target: SCN10A; (+) strand; PAM type: YTN; PAM sequence: CTT
  source 1..20: mol_type = other DNA
ggccgctcggatcagtctga

SEQ ID NO: 58512 - DNA, 20 bp, synthetic construct
  misc_feature 1..20: note = Description of Artificial Sequence: Synthetic oligonucleotide
  misc_feature 1..20: note = Target: SCN10A; (+) strand; PAM type: YTN; PAM sequence: TTG
  source 1..20: mol_type = other DNA
gccgctcggatcagtctgag

SEQ ID NO: 58513 - DNA, 20 bp, synthetic construct
  misc_feature 1..20: note = Description of Artificial Sequence: Synthetic oligonucleotide
  misc_feature 1..20: note = Target: SCN10A; (+) strand; PAM type: YTN; PAM sequence: CTC
  source 1..20: mol_type = other DNA
ggatcagtctgaggatgcgg

SEQ ID NO: 58514 - DNA, 20 bp, synthetic construct
  misc_feature 1..20: note = Description of Artificial Sequence: Synthetic oligonucleotide
  misc_feature 1..20: note = Target: SCN10A; (+) strand; PAM type: YTN; PAM sequence: CTG
  source 1..20: mol_type = other DNA
aggatgcggccaattcgggc

SEQ ID NO: 58515 - DNA, 20 bp, synthetic construct
  misc_feature 1..20: note = Description of Artificial Sequence: Synthetic oligonucleotide
  misc_feature 1..20: note = Target: SCN10A; (+) strand; PAM type: YTN; PAM sequence: TTC
  source 1..20: mol_type = other DNA
gggccaggcggatgactctg

SEQ ID NO: 58516 - DNA, 20 bp, synthetic construct
  misc_feature 1..20: note = Description of Artificial Sequence: Synthetic oligonucleotide
  misc_feature 1..20: note = Target: SCN10A; (+) strand; PAM type: YTN; PAM sequence: CTC
  source 1..20: mol_type = other DNA
tgaagagcgttggggagaag

SEQ ID NO: 58517 - DNA, 20 bp, synthetic construct
  misc_feature 1..20: note = Description of Artificial Sequence: Synthetic oligonucleotide
  misc_feature 1..20: note = Target: SCN10A; (+) strand; PAM type: YTN; PAM sequence: CTG
  source 1..20: mol_type = other DNA
aagagcgttggggagaagta

SEQ ID NO: 58518 - DNA, 20 bp, synthetic construct
  misc_feature 1..20: note = Description of Artificial Sequence: Synthetic oligonucleotide
  misc_feature 1..20: note = Target: SCN10A; (+) strand; PAM type: YTN; PAM sequence: TTG
  source 1..20: mol_type = other DNA
gggagaagtaactttgaagt

SEQ ID NO: 58519 - DNA, 20 bp, synthetic construct
  misc_feature 1..20: note = Description of Artificial Sequence: Synthetic oligonucleotide
  misc_feature 1..20: note = Target: SCN10A; (+) strand; PAM type: YTN; PAM sequence: CTT
  source 1..20: mol_type = other DNA
tgaagtgacttaagaattgc

SEQ ID NO: 58520 - DNA, 20 bp, synthetic construct
  misc_feature 1..20: note = Description of Artificial Sequence: Synthetic oligonucleotide
  misc_feature 1..20: note = Target: SCN10A; (+) strand; PAM type: YTN; PAM sequence: TTT
  source 1..20: mol_type = other DNA
gaagtgacttaagaattgca

SEQ ID NO: 58521 - DNA, 20 bp, synthetic construct
  misc_feature 1..20: note = Description of Artificial Sequence: Synthetic oligonucleotide
  misc_feature 1..20: note = Target: SCN10A; (+) strand; PAM type: YTN; PAM sequence: TTG
  source 1..20: mol_type = other DNA
aagtgacttaagaattgcag

SEQ ID NO: 58522 - DNA, 20 bp, synthetic construct
  misc_feature 1..20: note = Description of Artificial Sequence: Synthetic oligonucleotide
  misc_feature 1..20: note = Target: SCN10A; (+) strand; PAM type: YTN; PAM sequence: CTT
  source 1..20: mol_type = other DNA
aagaattgcagaaaaaatca

SEQ ID NO: 58523 - DNA, 20 bp, synthetic construct
  misc_feature 1..20: note = Description of Artificial Sequence: Synthetic oligonucleotide
  misc_feature 1..20: note = Target: SCN10A; (+) strand; PAM type: YTN; PAM sequence: TTA
  source 1..20: mol_type = other DNA
agaattgcagaaaaaatcag

SEQ ID NO: 58524 - DNA, 20 bp, synthetic construct
  misc_feature 1..20: note = Description of Artificial Sequence: Synthetic oligonucleotide
  misc_feature 1..20: note = Target: SCN10A; (+) strand; PAM type: YTN; PAM sequence: TTG
  source 1..20: mol_type = other DNA
cagaaaaaatcaggccttta

SEQ ID NO: 58525 - DNA, 20 bp, synthetic construct
  misc_feature 1..20: note = Description of Artificial Sequence: Synthetic oligonucleotide
  misc_feature 1..20: note = Target: SCN10A; (+) strand; PAM type: YTN; PAM sequence: CTT
  source 1..20: mol_type = other DNA
taaaagaaggaagaaattat

SEQ ID NO: 58526 - DNA, 20 bp, synthetic construct
  misc_feature 1..20: note = Description of Artificial Sequence: Synthetic oligonucleotide
  misc_feature 1..20: note = Target: SCN10A; (+) strand; PAM type: YTN; PAM sequence: TTT
  source 1..20: mol_type = other DNA
aaaagaaggaagaaattatc

SEQ ID NO: 58527 - DNA, 20 bp, synthetic construct
  misc_feature 1..20: note = Description of Artificial Sequence: Synthetic oligonucleotide
  misc_feature 1..20: note = Target: SCN10A; (+) strand; PAM type: YTN; PAM sequence: TTA
  source 1..20: mol_type = other DNA
aaagaaggaagaaattatct

SEQ ID NO: 58528 - DNA, 20 bp, synthetic construct
  misc_feature 1..20: note = Description of Artificial Sequence: Synthetic oligonucleotide
  misc_feature 1..20: note = Target: SCN10A; (+) strand; PAM type: YTN; PAM sequence: TTA
  source 1..20: mol_type = other DNA
tctaattagtatctccagcc

SEQ ID NO: 58529 - DNA, 20 bp, synthetic construct
  misc_feature 1..20: note = Description of Artificial Sequence: Synthetic oligonucleotide
  misc_feature 1..20: note = Target: SCN10A; (+) strand; PAM type: YTN; PAM sequence: CTA
  source 1..20: mol_type = other DNA
attagtatctccagccatga

SEQ ID NO: 58530 - DNA, 20 bp, synthetic construct
  misc_feature 1..20: note = Description of Artificial Sequence: Synthetic oligonucleotide
  misc_feature 1..20: note = Target: SCN10A; (+) strand; PAM type: YTN; PAM sequence: TTA
  source 1..20: mol_type = other DNA
gtatctccagccatgagacg

SEQ ID NO: 58531 - DNA, 20 bp, synthetic construct
  misc_feature 1..20: note = Description of Artificial Sequence: Synthetic oligonucleotide
  misc_feature 1..20: note = Target: SCN10A; (+) strand; PAM type: YTN; PAM sequence: CTC
  source 1..20: mol_type = other DNA
cagccatgagacgtgacaaa

SEQ ID NO: 58532 - DNA, 20 bp, synthetic construct
  misc_feature 1..20: note = Description of Artificial Sequence: Synthetic oligonucleotide
  misc_feature 1..20: note = Target: SCN10A; (+) strand; PAM type: YTN; PAM sequence: TTG
  source 1..20: mol_type = other DNA
gctgtgatgacactctgctt

SEQ ID NO: 58533 - DNA, 20 bp, synthetic construct
  misc_feature 1..20: note = Description of Artificial Sequence: Synthetic oligonucleotide
  misc_feature 1..20: note = Target: SCN10A; (+) strand; PAM type: YTN; PAM sequence: CTG
  source 1..20: mol_type = other DNA
tgatgacactctgctttgct

SEQ ID NO: 58534 - DNA, 20 bp, synthetic construct
  misc_feature 1..20: note = Description of Artificial Sequence: Synthetic oligonucleotide
  misc_feature 1..20: note = Target: SCN10A; (+) strand; PAM type: YTN; PAM sequence: CTC
  source 1..20: mol_type = other DNA
tgctttgcttggtatagact

SEQ ID NO: 58535 - DNA, 20 bp, synthetic construct
  misc_feature 1..20: note = Description of Artificial Sequence: Synthetic oligonucleotide
  misc_feature 1..20: note = Target: SCN10A; (+) strand; PAM type: YTN; PAM sequence: CTG
  source 1..20: mol_type = other DNA
ctttgcttggtatagactgc

SEQ ID NO: 58536 - DNA, 20 bp, synthetic construct
  misc_feature 1..20: note = Description of Artificial Sequence: Synthetic oligonucleotide
  misc_feature 1..20: note = Target: SCN10A; (+) strand; PAM type: YTN; PAM sequence: CTT
  source 1..20: mol_type = other DNA
tgcttggtatagactgccac

SEQ ID NO: 58537 - DNA, 20 bp, synthetic construct
  misc_feature 1..20: note = Description of Artificial Sequence: Synthetic oligonucleotide
  misc_feature 1..20: note = Target: SCN10A; (+) strand; PAM type: YTN; PAM sequence: TTT
  source 1..20: mol_type = other DNA
gcttggtatagactgccact

SEQ ID NO: 58538 - DNA, 20 bp, synthetic construct
  misc_feature 1..20: note = Description of Artificial Sequence: Synthetic oligonucleotide
  misc_feature 1..20: note = Target: SCN10A; (+) strand; PAM type: YTN; PAM sequence: TTG
  source 1..20: mol_type = other DNA
cttggtatagactgccactt

SEQ ID NO: 58539 - DNA, 20 bp, synthetic construct
  misc_feature 1..20: note = Description of Artificial Sequence: Synthetic oligonucleotide
  misc_feature 1..20: note = Target: SCN10A; (+) strand; PAM type: YTN; PAM sequence: CTT
  source 1..20: mol_type = other DNA
ggtatagactgccacttggg

SEQ ID NO: 58540 - DNA, 20 bp, synthetic construct
  misc_feature 1..20: note = Description of Artificial Sequence: Synthetic oligonucleotide
  misc_feature 1..20: note = Target: SCN10A; (+) strand; PAM type: YTN; PAM sequence: TTG
  source 1..20: mol_type = other DNA
gtatagactgccacttgggc

SEQ ID NO: 58541 - DNA, 20 bp, synthetic construct
  misc_feature 1..20: note = Description of Artificial Sequence: Synthetic oligonucleotide
  misc_feature 1..20: note = Target: SCN10A; (+) strand; PAM type: YTN; PAM sequence: CTG
  source 1..20: mol_type = other DNA
ccacttgggcatccacattt

SEQ ID NO: 58542 - DNA, 20 bp, synthetic construct
  misc_feature 1..20: note = Description of Artificial Sequence: Synthetic oligonucleotide
  misc_feature 1..20: note = Target: SCN10A; (+) strand; PAM type: YTN; PAM sequence: CTT
  source 1..20: mol_type = other DNA
gggcatccacatttgaggac

SEQ ID NO: 58543 - DNA, 20 bp, synthetic construct
  misc_feature 1..20: note = Description of Artificial Sequence: Synthetic oligonucleotide
  misc_feature 1..20: note = Target: SCN10A; (+) strand; PAM type: YTN; PAM sequence: TTG
  source 1..20: mol_type = other DNA
ggcatccacatttgaggact

SEQ ID NO: 58544 - DNA, 20 bp, synthetic construct
  misc_feature 1..20: note = Description of Artificial Sequence: Synthetic oligonucleotide
  misc_feature 1..20: note = Target: SCN10A; (+) strand; PAM type: YTN; PAM sequence: TTT
  source 1..20: mol_type = other DNA
gaggactctgggccctcaga

SEQ ID NO: 58545 - DNA, 20 bp, synthetic construct
  misc_feature 1..20: note = Description of Artificial Sequence: Synthetic oligonucleotide
  misc_feature 1..20: note = Target: SCN10A; (+) strand; PAM type: YTN; PAM sequence: TTG
  source 1..20: mol_type = other DNA
aggactctgggccctcagag

SEQ ID NO: 58546 - DNA, 20 bp, synthetic construct
  misc_feature 1..20: note = Description of Artificial Sequence: Synthetic oligonucleotide
  misc_feature 1..20: note = Target: SCN10A; (+) strand; PAM type: YTN; PAM sequence: CTC
  source 1..20: mol_type = other DNA
tgggccctcagagcctggca

SEQ ID NO: 58547 - DNA, 20 bp, synthetic construct
  misc_feature 1..20: note = Description of Artificial Sequence: Synthetic oligonucleotide
  misc_feature 1..20: note = Target: SCN10A; (+) strand; PAM type: YTN; PAM sequence: CTG
  source 1..20: mol_type = other DNA
ggccctcagagcctggcatg

SEQ ID NO: 58548 - DNA, 20 bp, synthetic construct
  misc_feature 1..20: note = Description of Artificial Sequence: Synthetic oligonucleotide
  misc_feature 1..20: note = Target: SCN10A; (+) strand; PAM type: YTN; PAM sequence: CTC
  source 1..20: mol_type = other DNA
agagcctggcatggtaggta

SEQ ID NO: 58549 - DNA, 20 bp, synthetic construct
  misc_feature 1..20: note = Description of Artificial Sequence: Synthetic oligonucleotide
  misc_feature 1..20: note = Target: SCN10A; (+) strand; PAM type: YTN; PAM sequence: CTG
  source 1..20: mol_type = other DNA
gcatggtaggtagcacaaag

SEQ ID NO: 58550 - DNA, 20 bp, synthetic construct
  misc_feature 1..20: note = Description of Artificial Sequence: Synthetic oligonucleotide
  misc_feature 1..20: note = Target: SCN10A; (+) strand; PAM type: YTN; PAM sequence: CTC
  source 1..20: mol_type = other DNA
agtaaatgcccattgcataa

SEQ ID NO: 58551 - DNA, 20 bp, synthetic construct
  misc_feature 1..20: note = Description of Artificial Sequence: Synthetic oligonucleotide
  misc_feature 1..20: note = Target: SCN10A; (+) strand; PAM type: YTN; PAM sequence: TTG
  source 1..20: mol_type = other DNA
cataagtcctctcttcctcc

SEQ ID NO: 58552 - DNA, 20 bp, synthetic construct
  misc_feature 1..20: note = Description of Artificial Sequence: Synthetic oligonucleotide
  misc_feature 1..20: note = Target: SCN10A; (+) strand; PAM type: YTN; PAM sequence: CTC
  source 1..20: mol_type = other DNA
tcttcctcctccgtcttacc

SEQ ID NO: 58553 - DNA, 20 bp, synthetic construct
  misc_feature 1..20: note = Description of Artificial Sequence: Synthetic oligonucleotide
  misc_feature 1..20: note = Target: SCN10A; (+) strand; PAM type: YTN; PAM sequence: CTC
  source 1..20: mol_type = other DNA
ttcctcctccgtcttaccct

SEQ ID NO: 58554 - DNA, 20 bp, synthetic construct
  misc_feature 1..20: note = Description of Artificial Sequence: Synthetic oligonucleotide
  misc_feature 1..20: note = Target: SCN10A; (+) strand; PAM type: YTN; PAM sequence: CTT
  source 1..20: mol_type = other DNA
cctcctccgtcttacccttc

SEQ ID NO: 58555 - DNA, 20 bp, synthetic construct
  misc_feature 1..20: note = Description of Artificial Sequence: Synthetic oligonucleotide
  misc_feature 1..20: note = Target: SCN10A; (+) strand; PAM type: YTN; PAM sequence: TTC
  source 1..20: mol_type = other DNA
ctcctccgtcttacccttcc

SEQ ID NO: 58556 - DNA, 20 bp, synthetic construct
  misc_feature 1..20: note = Description of Artificial Sequence: Synthetic oligonucleotide
  misc_feature 1..20: note = Target: SCN10A; (+) strand; PAM type: YTN; PAM sequence: CTC
  source 1..20: mol_type = other DNA
ctccgtcttacccttcctac

SEQ ID NO: 58557 - DNA, 20 bp, synthetic construct
  misc_feature 1..20: note = Description of Artificial Sequence: Synthetic oligonucleotide
  misc_feature 1..20: note = Target: SCN10A; (+) strand; PAM type: YTN; PAM sequence: CTC
  source 1..20: mol_type = other DNA
cgtcttacccttcctaccat

SEQ ID NO: 58558 - DNA, 20 bp, synthetic construct
  misc_feature 1..20: note = Description of Artificial Sequence: Synthetic oligonucleotide
  misc_feature 1..20: note = Target: SCN10A; (+) strand; PAM type: YTN; PAM sequence: CTT
  source 1..20: mol_type = other DNA
acccttcctaccatgttatc

SEQ ID NO: 58559 - DNA, 20 bp, synthetic construct
  misc_feature 1..20: note = Description of Artificial Sequence: Synthetic oligonucleotide
  misc_feature 1..20: note = Target: SCN10A; (+) strand; PAM type: YTN; PAM sequence: TTA
  source 1..20: mol_type = other DNA
cccttcctaccatgttatct

SEQ ID NO: 58560 - DNA, 20 bp, synthetic construct
  misc_feature 1..20: note = Description of Artificial Sequence: Synthetic oligonucleotide
  misc_feature 1..20: note = Target: SCN10A; (+) strand; PAM type: YTN; PAM sequence: CTT
  source 1..20: mol_type = other DNA
cctaccatgttatctttgcc

SEQ ID NO: 58561 - DNA, 20 bp, synthetic construct
  misc_feature 1..20: note = Description of Artificial Sequence: Synthetic oligonucleotide
  misc_feature 1..20: note = Target: SCN10A; (+) strand; PAM type: YTN; PAM sequence: TTC
  source 1..20: mol_type = other DNA
ctaccatgttatctttgcct

SEQ ID NO: 58562 - DNA, 20 bp, synthetic construct
  misc_feature 1..20: note = Description of Artificial Sequence: Synthetic oligonucleotide
  misc_feature 1..20: note = Target: SCN10A; (+) strand; PAM type: YTN; PAM sequence: CTA
  source 1..20: mol_type = other DNA
ccatgttatctttgcctccg

SEQ ID NO: 58563 - DNA, 20 bp, synthetic construct
  misc_feature 1..20: note = Description of Artificial Sequence: Synthetic oligonucleotide
  misc_feature 1..20: note = Target: SCN10A; (+) strand; PAM type: YTN; PAM sequence: TTA
  source 1..20: mol_type = other DNA
tctttgcctccgcctagaat

SEQ ID NO: 58564 - DNA, 20 bp, synthetic construct
  misc_feature 1..20: note = Description of Artificial Sequence: Synthetic oligonucleotide
  misc_feature 1..20: note = Target: SCN10A; (+) strand; PAM type: YTN; PAM sequence: CTT
  source 1..20: mol_type = other DNA
tgcctccgcctagaatatcc

SEQ ID NO: 58565 - DNA, 20 bp, synthetic construct
  misc_feature 1..20: note = Description of Artificial Sequence: Synthetic oligonucleotide
  misc_feature 1..20: note = Target: SCN10A; (+) strand; PAM type: YTN; PAM sequence: TTT
  source 1..20: mol_type = other DNA
gcctccgcctagaatatcct

SEQ ID NO: 58566 - DNA, 20 bp, synthetic construct
  misc_feature 1..20: note = Description of Artificial Sequence: Synthetic oligonucleotide
  misc_feature 1..20: note = Target: SCN10A; (+) strand; PAM type: YTN; PAM sequence: TTG
  source 1..20: mol_type = other DNA
cctccgcctagaatatcctc

SEQ ID NO: 58567 - DNA, 20 bp, synthetic construct
  misc_feature 1..20: note = Description of Artificial Sequence: Synthetic oligonucleotide
  misc_feature 1..20: note = Target: SCN10A; (+) strand; PAM type: YTN; PAM sequence: CTC
  source 1..20: mol_type = other DNA
cgcctagaatatcctcttgg

SEQ ID NO: 58568 - DNA, 20 bp, synthetic construct
  misc_feature 1..20: note = Description of Artificial Sequence: Synthetic oligonucleotide
  misc_feature 1..20: note = Target: SCN10A; (+) strand; PAM type: YTN; PAM sequence: CTA
  source 1..20: mol_type = other DNA
gaatatcctcttggtcaacc

SEQ ID NO: 58569 - DNA, 20 bp, synthetic construct
  misc_feature 1..20: note = Description of Artificial Sequence: Synthetic oligonucleotide
  misc_feature 1..20: note = Target: SCN10A; (+) strand; PAM type: YTN; PAM sequence: CTC
  source 1..20: mol_type = other DNA
ttggtcaacctccacagtca

SEQ ID NO: 58570 - DNA, 20 bp, synthetic construct
  misc_feature 1..20: note = Description of Artificial Sequence: Synthetic oligonucleotide
  misc_feature 1..20: note = Target: SCN10A; (+) strand; PAM type: YTN; PAM sequence: CTT
  source 1..20: mol_type = other DNA
ggtcaacctccacagtcaaa

SEQ ID NO: 58571 - DNA, 20 bp, synthetic construct
  misc_feature 1..20: note = Description of Artificial Sequence: Synthetic oligonucleotide
  misc_feature 1..20: note = Target: SCN10A; (+) strand; PAM type: YTN; PAM sequence: TTG
  source 1..20: mol_type = other DNA
gtcaacctccacagtcaaaa

SEQ ID NO: 58572 - DNA, 20 bp, synthetic construct
  misc_feature 1..20: note = Description of Artificial Sequence: Synthetic oligonucleotide
  misc_feature 1..20: note = Target: SCN10A; (+) strand; PAM type: YTN; PAM sequence: CTC
  source 1..20: mol_type = other DNA
cacagtcaaaaacttatctt

SEQ ID NO: 58573 - DNA, 20 bp, synthetic construct
  misc_feature 1..20: note = Description of Artificial Sequence: Synthetic oligonucleotide
  misc_feature 1..20: note = Target: SCN10A; (+) strand; PAM type: YTN; PAM sequence: CTT
  source 1..20: mol_type = other DNA
atcttctgcagccaagttca

SEQ ID NO: 58574 - DNA, 20 bp, synthetic construct
  misc_feature 1..20: note = Description of Artificial Sequence: Synthetic oligonucleotide
  misc_feature 1..20: note = Target: SCN10A; (+) strand; PAM type: YTN; PAM sequence: TTA
  source 1..20: mol_type = other DNA
tcttctgcagccaagttcag

SEQ ID NO: 58575 - DNA, 20 bp, synthetic construct
  misc_feature 1..20: note = Description of Artificial Sequence: Synthetic oligonucleotide
  misc_feature 1..20: note = Target: SCN10A; (+) strand; PAM type: YTN; PAM sequence: CTT
  source 1..20: mol_type = other DNA
ctgcagccaagttcagctgg

SEQ ID NO: 58576 - DNA, 20 bp, synthetic construct
  misc_feature 1..20: note = Description of Artificial Sequence: Synthetic oligonucleotide
  misc_feature 1..20: note = Target: SCN10A; (+) strand; PAM type: YTN; PAM sequence: TTC
  source 1..20: mol_type = other DNA
tgcagccaagttcagctgga

SEQ ID NO: 58577 - DNA, 20 bp, synthetic construct
  misc_feature 1..20: note = Description of Artificial Sequence: Synthetic oligonucleotide
  misc_feature 1..20: note = Target: SCN10A; (+) strand; PAM type: YTN; PAM sequence: CTG
  source 1..20: mol_type = other DNA
cagccaagttcagctggaag

SEQ ID NO: 58578 - DNA, 20 bp, synthetic construct
  misc_feature 1..20: note = Description of Artificial Sequence: Synthetic oligonucleotide
  misc_feature 1..20: note = Target: SCN10A; (+) strand; PAM type: YTN; PAM sequence: TTC
  source 1..20: mol_type = other DNA
agctggaagtgactgcagtt

SEQ ID NO: 58579 - DNA, 20 bp, synthetic construct
  misc_feature 1..20: note = Description of Artificial Sequence: Synthetic oligonucleotide
  misc_feature 1..20: note = Target: SCN10A; (+) strand; PAM type: YTN; PAM sequence: CTG
  source 1..20: mol_type = other DNA
gaagtgactgcagtttattc

SEQ ID NO: 58580 - DNA, 20 bp, synthetic construct
  misc_feature 1..20: note = Description of Artificial Sequence: Synthetic oligonucleotide
  misc_feature 1..20: note = Target: SCN10A; (+) strand; PAM type: YTN; PAM sequence: CTG
  source 1..20: mol_type = other DNA
cagtttattccacaggctca

SEQ ID NO: 58581 - DNA, 20 bp, synthetic construct
  misc_feature 1..20: note = Description of Artificial Sequence: Synthetic oligonucleotide
  misc_feature 1..20: note = Target: SCN10A; (+) strand; PAM type: YTN; PAM sequence: TTT
  source 1..20: mol_type = other DNA
attccacaggctcacagtct

SEQ ID NO: 58582 - DNA, 20 bp, synthetic construct
  misc_feature 1..20: note = Description of Artificial Sequence: Synthetic oligonucleotide
  misc_feature 1..20: note = Target: SCN10A; (+) strand; PAM type: YTN; PAM sequence: TTA
  source 1..20: mol_type = other DNA
ttccacaggctcacagtctt

SEQ ID NO: 58583 - DNA, 20 bp, synthetic construct
  misc_feature 1..20: note = Description of Artificial Sequence: Synthetic oligonucleotide
  misc_feature 1..20: note = Target: SCN10A; (+) strand; PAM type: YTN; PAM sequence: TTC
  source 1..20: mol_type = other DNA
cacaggctcacagtctttgg

SEQ ID NO: 58584 - DNA, 20 bp, synthetic construct
  misc_feature 1..20: note = Description of Artificial Sequence: Synthetic oligonucleotide
  misc_feature 1..20: note = Target: SCN10A; (+) strand; PAM type: YTN; PAM sequence: CTC
  source 1..20: mol_type = other DNA
acagtctttggcctgttttt

SEQ ID NO: 58585 - DNA, 20 bp, synthetic construct
  misc_feature 1..20: note = Description of Artificial Sequence: Synthetic oligonucleotide
  misc_feature 1..20: note = Target: SCN10A; (+) strand; PAM type: YTN; PAM sequence: CTT
  source 1..20: mol_type = other DNA
tggcctgttttttcctatga

SEQ ID NO: 58586 - DNA, 20 bp, synthetic construct
  misc_feature 1..20: note = Description of Artificial Sequence: Synthetic oligonucleotide
  misc_feature 1..20: note = Target: SCN10A; (+) strand; PAM type: YTN; PAM sequence: TTT
  source 1..20: mol_type = other DNA
ggcctgttttttcctatgac

SEQ ID NO: 58587 - DNA, 20 bp, synthetic construct
  misc_feature 1..20: note = Description of Artificial Sequence: Synthetic oligonucleotide
  misc_feature 1..20: note = Target: SCN10A; (+) strand; PAM type: YTN; PAM sequence: TTG
  source 1..20: mol_type = other DNA
gcctgttttttcctatgaca

SEQ ID NO: 58588 - DNA, 20 bp, synthetic construct
  misc_feature 1..20: note = Description of Artificial Sequence: Synthetic oligonucleotide
  misc_feature 1..20: note = Target: SCN10A; (+) strand; PAM type: YTN; PAM sequence: CTG
  source 1..20: mol_type = other DNA
ttttttcctatgacacagac

SEQ ID NO: 58589 - DNA, 20 bp, synthetic construct
  misc_feature 1..20: note = Description of Artificial Sequence: Synthetic oligonucleotide
  misc_feature 1..20: note = Target: SCN10A; (+) strand; PAM type: YTN; PAM sequence: TTT
  source 1..20: mol_type = other DNA
tttcctatgacacagaccct

SEQ ID NO: 58590 - DNA, 20 bp, synthetic construct
  misc_feature 1..20: note = Description of Artificial Sequence: Synthetic oligonucleotide
  misc_feature 1..20: note = Target: SCN10A; (+) strand; PAM type: YTN; PAM sequence: TTT
  source 1..20: mol_type = other DNA
ttcctatgacacagaccctg

SEQ ID NO: 58591 - DNA, 20 bp, synthetic construct
  misc_feature 1..20: note = Description of Artificial Sequence: Synthetic oligonucleotide
  misc_feature 1..20: note = Target: SCN10A; (+) strand; PAM type: YTN; PAM sequence: TTT
  source 1..20: mol_type = other DNA
tcctatgacacagaccctgc

SEQ ID NO: 58592 - DNA, 20 bp, synthetic construct
  misc_feature 1..20: note = Description of Artificial Sequence: Synthetic oligonucleotide
  misc_feature 1..20: note = Target: SCN10A; (+) strand; PAM type: YTN; PAM sequence: TTT
  source 1..20: mol_type = other DNA
cctatgacacagaccctgct

SEQ ID NO: 58593 - DNA, 20 bp, synthetic construct
  misc_feature 1..20: note = Description of Artificial Sequence: Synthetic oligonucleotide
  misc_feature 1..20: note = Target: SCN10A; (+) strand; PAM type: YTN; PAM sequence: TTC
  source 1..20: mol_type = other DNA
ctatgacacagaccctgctc

SEQ ID NO: 58594 - DNA, 20 bp, synthetic construct
  misc_feature 1..20: note = Description of Artificial Sequence: Synthetic oligonucleotide
  misc_feature 1..20: note = Target: SCN10A; (+) strand; PAM type: YTN; PAM sequence: CTA
  source 1..20: mol_type = other DNA
tgacacagaccctgctcctc

SEQ ID NO: 58595 - DNA, 20 bp, synthetic construct
  misc_feature 1..20: note = Description of Artificial Sequence: Synthetic oligonucleotide
  misc_feature 1..20: note = Target: SCN10A; (+) strand; PAM type: YTN; PAM sequence: CTG
  source 1..20: mol_type = other DNA
ctcctccctgatactgcagc

SEQ ID NO: 58596 - DNA, 20 bp, synthetic construct
  misc_feature 1..20: note = Description of Artificial Sequence: Synthetic oligonucleotide
  misc_feature 1..20: note = Target: SCN10A; (+) strand; PAM type: YTN; PAM sequence: CTC
  source 1..20: mol_type = other DNA
ctccctgatactgcagcctt

SEQ ID NO: 58597 - DNA, 20 bp, synthetic construct
  misc_feature 1..20: note = Description of Artificial Sequence: Synthetic oligonucleotide
  misc_feature 1..20: note = Target: SCN10A; (+) strand; PAM type: YTN; PAM sequence: CTC
  source 1..20: mol_type = other DNA
cctgatactgcagcctttgg

SEQ ID NO: 58598 - DNA, 20 bp, synthetic construct
  misc_feature 1..20: note = Description of Artificial Sequence: Synthetic oligonucleotide
  misc_feature 1..20: note = Target: SCN10A; (+) strand; PAM type: YTN; PAM sequence: CTG
  source 1..20: mol_type = other DNA
atactgcagcctttgggtca

SEQ ID NO: 58599 - DNA, 20 bp, synthetic construct
  misc_feature 1..20: note = Description of Artificial Sequence: Synthetic oligonucleotide
  misc_feature 1..20: note = Target: SCN10A; (+) strand; PAM type: YTN; PAM sequence: CTG
  source 1..20: mol_type = other DNA
cagcctttgggtcatgccct

SEQ ID NO: 58600 - DNA, 20 bp, synthetic construct
  misc_feature 1..20: note = Description of Artificial Sequence: Synthetic oligonucleotide
  misc_feature 1..20: note = Target: SCN10A; (+) strand; PAM type: YTN; PAM sequence: CTT
  source 1..20: mol_type = other DNA
tgggtcatgccctttcctcc

SEQ ID NO: 58601 - DNA, 20 bp, synthetic construct
  misc_feature 1..20: note = Description of Artificial Sequence: Synthetic oligonucleotide
  misc_feature 1..20: note = Target: SCN10A; (+) strand; PAM type: YTN; PAM sequence: TTT
  source 1..20: mol_type = other DNA
gggtcatgccctttcctcca

SEQ ID NO: 58602 - DNA, 20 bp, synthetic construct
  misc_feature 1..20: note = Description of Artificial Sequence: Synthetic oligonucleotide
  misc_feature 1..20: note = Target: SCN10A; (+) strand; PAM type: YTN; PAM sequence: TTG
  source 1..20: mol_type = other DNA
ggtcatgccctttcctccac

SEQ ID NO: 58603 - DNA, 20 bp, synthetic construct
  misc_feature 1..20: note = Description of Artificial Sequence: Synthetic oligonucleotide
  misc_feature 1..20: note = Target: SCN10A; (+) strand; PAM type: YTN; PAM sequence: CTT
  source 1..20: mol_type = other DNA
tcctccaccctggtcctgtg

SEQ ID NO: 58604 - DNA, 20 bp, synthetic construct
  misc_feature 1..20: note = Description of Artificial Sequence: Synthetic oligonucleotide
  misc_feature 1..20: note = Target: SCN10A; (+) strand; PAM type: YTN; PAM sequence: TTT
  source 1..20: mol_type = other DNA
cctccaccctggtcctgtgc

SEQ ID NO: 58605 - DNA, 20 bp, synthetic construct
  misc_feature 1..20: note = Description of Artificial Sequence: Synthetic oligonucleotide
  misc_feature 1..20: note = Target: SCN10A; (+) strand; PAM type: YTN; PAM sequence: TTC
  source 1..20: mol_type = other DNA
ctccaccctggtcctgtgct

SEQ ID NO: 58606 - DNA, 20 bp, synthetic construct
  misc_feature 1..20: note = Description of Artificial Sequence: Synthetic oligonucleotide
  misc_feature 1..20: note = Target: SCN10A; (+) strand; PAM type: YTN; PAM sequence: CTC
  source 1..20: mol_type = other DNA
caccctggtcctgtgctctg

SEQ ID NO: 58607 - DNA, 20 bp, synthetic construct
  misc_feature 1..20: note = Description of Artificial Sequence: Synthetic oligonucleotide
  misc_feature 1..20: note = Target: SCN10A; (+) strand; PAM type: YTN; PAM sequence: CTG
  source 1..20: mol_type = other DNA
gtcctgtgctctgtgaaggc

SEQ ID NO: 58608 - DNA, 20 bp, synthetic construct
  misc_feature 1..20: note = Description of Artificial Sequence: Synthetic oligonucleotide
  misc_feature 1..20: note = Target: SCN10A; (+) strand; PAM type: YTN; PAM sequence: CTG
  source 1..20: mol_type = other DNA
tgctctgtgaaggccaggac

SEQ ID NO: 58609 - DNA, 20 bp, synthetic construct
  misc_feature 1..20: note = Description of Artificial Sequence: Synthetic oligonucleotide
  misc_feature 1..20: note = Target: SCN10A; (+) strand; PAM type: YTN; PAM sequence: CTC
  source 1..20: mol_type = other DNA
tgtgaaggccaggacccctt

SEQ ID NO: 58610 - DNA, 20 bp, synthetic construct
  misc_feature 1..20: note = Description of Artificial Sequence: Synthetic oligonucleotide
  misc_feature 1..20: note = Target: SCN10A; (+) strand; PAM type: YTN; PAM sequence: CTG
  source 1..20: mol_type = other DNA
tgaaggccaggaccccttat

SEQ ID NO: 58611 - DNA, 20 bp, synthetic construct
  misc_feature 1..20: note = Description of Artificial Sequence: Synthetic oligonucleotide
  misc_feature 1..20: note = Target: SCN10A; (+) strand; PAM type: YTN; PAM sequence: CTT
  source 1..20: mol_type = other DNA
atgattcctctccctacctc

SEQ ID NO: 58612 - DNA, 20 bp, synthetic construct
  misc_feature 1..20: note = Description of Artificial Sequence: Synthetic oligonucleotide
  misc_feature 1..20: note = Target: SCN10A; (+) strand; PAM type: YTN; PAM sequence: TTA
  source 1..20: mol_type = other DNA
tgattcctctccctacctcc

SEQ ID NO: 58613 - DNA, 20 bp, synthetic construct
  misc_feature 1..20: note = Description of Artificial Sequence: Synthetic oligonucleotide
  misc_feature 1..20: note = Target: SCN10A; (+) strand; PAM type: YTN; PAM sequence: TTC
  source 1..20: mol_type = other DNA
ctctccctacctcctactgt

SEQ ID NO: 58614 - DNA, 20 bp, synthetic construct
  misc_feature 1..20: note = Description of Artificial Sequence: Synthetic oligonucleotide
  misc_feature 1..20: note = Target: SCN10A; (+) strand; PAM type: YTN; PAM sequence: CTC
  source 1..20: mol_type = other DNA
tccctacctcctactgtgaa

SEQ ID NO: 58615 - DNA, 20 bp, synthetic construct
  misc_feature 1..20: note = Description of Artificial Sequence: Synthetic oligonucleotide
  misc_feature 1..20: note = Target: SCN10A; (+) strand; PAM type: YTN; PAM sequence: CTC
  source 1..20: mol_type = other DNA
cctacctcctactgtgaaga

SEQ ID NO: 58616 - DNA, 20 bp, synthetic construct
  misc_feature 1..20: note = Description of Artificial Sequence: Synthetic oligonucleotide
  misc_feature 1..20: note = Target: SCN10A; (+) strand; PAM type: YTN; PAM sequence: CTA
  source 1..20: mol_type = other DNA
cctcctactgtgaagattga

SEQ ID NO: 58617 - DNA, 20 bp, synthetic construct
  misc_feature 1..20: note = Description of Artificial Sequence: Synthetic oligonucleotide
  misc_feature 1..20: note = Target: SCN10A; (+) strand; PAM type: YTN; PAM sequence: CTC
  source 1..20: mol_type = other DNA
ctactgtgaagattgactct

SEQ ID NO: 58618 - DNA, 20 bp, synthetic construct
  misc_feature 1..20: note = Description of Artificial Sequence: Synthetic oligonucleotide
  misc_feature 1..20: note = Target: SCN10A; (+) strand; PAM type: YTN; PAM sequence: CTA
  source 1..20: mol_type = other DNA
ctgtgaagattgactctgtt

SEQ ID NO: 58619 - DNA, 20 bp, synthetic construct
  misc_feature 1..20: note = Description of Artificial Sequence: Synthetic oligonucleotide
  misc_feature 1..20: note = Target: SCN10A; (+) strand; PAM type: YTN; PAM sequence: CTG
  source 1..20: mol_type = other DNA
tgaagattgactctgtttct

SEQ ID NO: 58620 - DNA, 20 bp, synthetic construct
  misc_feature 1..20: note = Description of Artificial Sequence: Synthetic oligonucleotide
  misc_feature 1..20: note = Target: SCN10A; (+) strand; PAM type: YTN; PAM sequence: TTG
  source 1..20: mol_type = other DNA
actctgtttctggcacccgg

SEQ ID NO: 58621 - DNA, 20 bp, synthetic construct
  misc_feature 1..20: note = Description of Artificial Sequence: Synthetic oligonucleotide
  misc_feature 1..20: note = Target: SCN10A; (+) strand; PAM type: YTN; PAM sequence: CTC
  source 1..20: mol_type = other DNA
tgtttctggcacccggtcct

SEQ ID NO: 58622 - DNA, 20 bp, synthetic construct
  misc_feature 1..20: note = Description of Artificial Sequence: Synthetic oligonucleotide
  misc_feature 1..20: note = Target: SCN10A; (+) strand; PAM type: YTN; PAM sequence: CTG
  source 1..20: mol_type = other DNA
tttctggcacccggtcctgt

SEQ ID NO: 58623 - DNA, 20 bp, synthetic construct
  misc_feature 1..20: note = Description of Artificial Sequence: Synthetic oligonucleotide
  misc_feature 1..20: note = Target: SCN10A; (+) strand; PAM type: YTN; PAM sequence: TTT
  source 1..20: mol_type = other DNA
ctggcacccggtcctgtggc

SEQ ID NO: 58624 - DNA, 20 bp, synthetic construct
  misc_feature 1..20: note = Description of Artificial Sequence: Synthetic oligonucleotide
  misc_feature 1..20: note = Target: SCN10A; (+) strand; PAM type: YTN; PAM sequence: TTC
  source 1..20: mol_type = other DNA
tggcacccggtcctgtggct

SEQ ID NO: 58625 - DNA, 20 bp, synthetic construct
  misc_feature 1..20: note = Description of Artificial Sequence: Synthetic oligonucleotide
  misc_feature 1..20: note = Target: SCN10A; (+) strand; PAM type: YTN; PAM sequence: CTG
  source 1..20: mol_type = other DNA
gcacccggtcctgtggctaa

SEQ ID NO: 58626 - DNA, 20 bp, synthetic construct
  misc_feature 1..20: note = Description of Artificial Sequence: Synthetic oligonucleotide
  misc_feature 1..20: note = Target: SCN10A; (+) strand; PAM type: YTN; PAM sequence: CTG
  source 1..20: mol_type = other DNA
tggctaattgtacggagcct

SEQ ID NO: 58627 - DNA, 20 bp, synthetic construct
  misc_feature 1..20: note = Description of Artificial Sequence: Synthetic oligonucleotide
  misc_feature 1..20: note = Target: SCN10A; (+) strand; PAM type: YTN; PAM sequence: CTA
  source 1..20: mol_type = other DNA
attgtacggagcctggtgtt

SEQ ID NO: 58628 - DNA, 20 bp, synthetic construct
  misc_feature 1..20: note = Description of Artificial Sequence: Synthetic oligonucleotide
  misc_feature 1..20: note = Target: SCN10A; (+) strand; PAM type: YTN; PAM sequence: TTG
  source 1..20: mol_type = other DNA
tacggagcctggtgttaatt

SEQ ID NO: 58629 - DNA, 20 bp, synthetic construct
  misc_feature 1..20: note = Description of Artificial Sequence: Synthetic oligonucleotide
  misc_feature 1..20: note = Target: SCN10A; (+) strand; PAM type: YTN; PAM sequence: CTG
  source 1..20: mol_type = other DNA
gtgttaattacaagggggcc

SEQ ID NO: 58630 - DNA, 20 bp, synthetic construct
  misc_feature 1..20: note = Description of Artificial Sequence: Synthetic oligonucleotide
  misc_feature 1..20: note = Target: SCN10A; (+) strand; PAM type: YTN; PAM sequence: TTA
  source 1..20: mol_type = other DNA
attacaagggggcctgagga

SEQ ID NO: 58631 - DNA, 20 bp, synthetic construct
  misc_feature 1..20: note = Description of Artificial Sequence: Synthetic oligonucleotide
  misc_feature 1..20: note = Target: SCN10A; (+) strand; PAM type: YTN; PAM sequence: TTA
  source 1..20: mol_type = other DNA
caagggggcctgaggattcg

SEQ ID NO: 58632 - DNA, 20 bp, synthetic construct
  misc_feature 1..20: note = Description of Artificial Sequence: Synthetic oligonucleotide
  misc_feature 1..20: note = Target: SCN10A; (+) strand; PAM type: YTN; PAM sequence: CTG
  source 1..20: mol_type = other DNA
aggattcgggcaactggctg

SEQ ID NO: 58633 - DNA, 20 bp, synthetic construct
  misc_feature 1..20: note = Description of Artificial Sequence: Synthetic oligonucleotide
  misc_feature 1..20: note = Target: SCN10A; (+) strand; PAM type: YTN; PAM sequence: TTC
  source 1..20: mol_type = other DNA
gggcaactggctgacagcta

SEQ ID NO: 58634 - DNA, 20 bp, synthetic construct
  misc_feature 1..20: note = Description of Artificial Sequence: Synthetic oligonucleotide
  misc_feature 1..20: note = Target: SCN10A; (+) strand; PAM type: YTN; PAM sequence: CTG
  source 1..20: mol_type = other DNA
gctgacagctaaagcataag

SEQ ID NO: 58635 - DNA, 20 bp, synthetic construct
  misc_feature 1..20: note = Description of Artificial Sequence: Synthetic oligonucleotide
  misc_feature 1..20: note = Target: SCN10A; (+) strand; PAM type: YTN; PAM sequence: CTG
  source 1..20: mol_type = other DNA
acagctaaagcataagggat

SEQ ID NO: 58636 - DNA, 20 bp, synthetic construct
  misc_feature 1..20: note = Description of Artificial Sequence: Synthetic oligonucleotide
  misc_feature 1..20: note = Target: SCN10A; (+) strand; PAM type: YTN; PAM sequence: CTA
  source 1..20: mol_type = other DNA
aagcataagggatttgaatg

SEQ ID NO: 58637 - DNA, 20 bp, synthetic construct
  misc_feature 1..20: note = Description of Artificial Sequence: Synthetic oligonucleotide
  misc_feature 1..20: note = Target: SCN10A; (+) strand; PAM type: YTN; PAM sequence: TTT
  source 1..20: mol_type = other DNA
gaatgaccagctgtctgcac

SEQ ID NO: 58638 - DNA, 20 bp, synthetic construct
  misc_feature 1..20: note = Description of Artificial Sequence: Synthetic oligonucleotide
  misc_feature 1..20: note = Target: SCN10A; (+) strand; PAM type: YTN; PAM sequence: TTG
  source 1..20: mol_type = other DNA
aatgaccagctgtctgcaca

SEQ ID NO: 58639 - DNA, 20 bp, synthetic construct
  misc_feature 1..20: note = Description of Artificial Sequence: Synthetic oligonucleotide
  misc_feature 1..20: note = Target: SCN10A; (+) strand; PAM type: YTN; PAM sequence: CTG
  source 1..20: mol_type = other DNA
tctgcacaatgccttaattt

SEQ ID NO: 58640 - DNA, 20 bp, synthetic construct
  misc_feature 1..20: note = Description of Artificial Sequence: Synthetic oligonucleotide
  misc_feature 1..20: note = Target: SCN10A; (+) strand; PAM type: YTN; PAM sequence: CTG
  source 1..20: mol_type = other DNA
cacaatgccttaatttgttt

SEQ ID NO: 58641 - DNA, 20 bp, synthetic construct
  misc_feature 1..20: note = Description of Artificial Sequence: Synthetic oligonucleotide
  misc_feature 1..20: note = Target: SCN10A; (+) strand; PAM type: YTN; PAM sequence: CTT
  source 1..20: mol_type = other DNA
aatttgtttttttttttttt

SEQ ID NO: 58642 - DNA, 20 bp, synthetic construct
  misc_feature 1..20: note = Description of Artificial Sequence: Synthetic oligonucleotide
  misc_feature 1..20: note = Target: SCN10A; (+) strand; PAM type: YTN; PAM sequence: TTA
  source 1..20: mol_type = other DNA
atttgttttttttttttttt

SEQ ID NO: 58643 - DNA, 20 bp, synthetic construct
  misc_feature 1..20: note = Description of Artificial Sequence: Synthetic oligonucleotide
  misc_feature 1..20: note = Target: SCN10A; (+) strand; PAM type: YTN; PAM sequence: TTT
  source 1..20: mol_type = other DNA
gttttttttttttttttttc

SEQ ID NO: 58644 - DNA, 20 bp, synthetic construct
  misc_feature 1..20: note = Description of Artificial Sequence: Synthetic oligonucleotide
  misc_feature 1..20: note = Target: SCN10A; (+) strand; PAM type: YTN; PAM sequence: TTG
  source 1..20: mol_type = other DNA
ttttttttttttttttttcg

SEQ ID NO: 58645 - DNA, 20 bp, synthetic construct
  misc_feature 1..20: note = Description of Artificial Sequence: Synthetic oligonucleotide
  misc_feature 1..20: note = Target: SCN10A; (+) strand; PAM type: YTN; PAM sequence: TTT
  source 1..20: mol_type = other DNA
tttttttttttttttcggtt

SEQ ID NO: 58646 - DNA, 20 bp, synthetic construct
  misc_feature 1..20: note = Description of Artificial Sequence: Synthetic oligonucleotide
  misc_feature 1..20: note = Target: SCN10A; (+) strand; PAM type: YTN; PAM sequence: TTT
  source 1..20: mol_type = other DNA
ttttttttttttttcggttc

SEQ ID NO: 58647 - DNA, 20 bp, synthetic construct
  misc_feature 1..20: note = Description of Artificial Sequence: Synthetic oligonucleotide
  misc_feature 1..20: note = Target: SCN10A; (+) strand; PAM type: YTN; PAM sequence: TTT
  source 1..20: mol_type = other DNA
tttttttttttttcggttcc

SEQ ID NO: 58648 - DNA, 20 bp, synthetic construct
  misc_feature 1..20: note = Description of Artificial Sequence: Synthetic oligonucleotide
  misc_feature 1..20: note = Target: SCN10A; (+) strand; PAM type: YTN; PAM sequence: TTT
  source 1..20: mol_type = other DNA
ttttttttttttcggttcca

SEQ ID NO: 58649 - DNA, 20 bp, synthetic construct
  misc_feature 1..20: note = Description of Artificial Sequence: Synthetic oligonucleotide
  misc_feature 1..20: note = Target: SCN10A; (+) strand; PAM type: YTN; PAM sequence: TTT
  source 1..20: mol_type = other DNA
tttttttttttcggttccag

SEQ ID NO: 58650 - DNA, 20 bp, synthetic construct
  misc_feature 1..20: note = Description of Artificial Sequence: Synthetic oligonucleotide
  misc_feature 1..20: note = Target: SCN10A; (+) strand; PAM type: YTN; PAM sequence: TTT
  source 1..20: mol_type = other DNA
ttttttttttcggttccagc

SEQ ID NO: 58651 - DNA, 20 bp, synthetic construct
  misc_feature 1..20: note = Description of Artificial Sequence: Synthetic oligonucleotide
  misc_feature 1..20: note = Target: SCN10A; (+) strand; PAM type: YTN; PAM sequence: TTT
  source 1..20: mol_type = other DNA
tttttttttcggttccagct

SEQ ID NO: 58652 - DNA, 20 bp, synthetic construct
  misc_feature 1..20: note = Description of Artificial Sequence: Synthetic oligonucleotide
  misc_feature 1..20: note = Target: SCN10A; (+) strand; PAM type: YTN; PAM sequence: TTT
  source 1..20: mol_type = other DNA
ttttttttcggttccagctg

SEQ ID NO: 58653 - DNA, 20 bp, synthetic construct
  misc_feature 1..20: note = Description of Artificial Sequence: Synthetic oligonucleotide
  misc_feature 1..20: note = Target: SCN10A; (+) strand; PAM type: YTN; PAM sequence: TTT
  source 1..20: mol_type = other DNA
tttttttcggttccagctgt

SEQ ID NO: 58654 - DNA, 20 bp, synthetic construct
  misc_feature 1..20: note = Description of Artificial Sequence: Synthetic oligonucleotide
  misc_feature 1..20: note = Target: SCN10A; (+) strand; PAM type: YTN; PAM sequence: TTT
  source 1..20: mol_type = other DNA
ttttttcggttccagctgtt

SEQ ID NO: 58655 - DNA, 20 bp, synthetic construct
  misc_feature 1..20: note = Description of Artificial Sequence: Synthetic oligonucleotide
  misc_feature 1..20: note = Target: SCN10A; (+) strand; PAM type: YTN; PAM sequence: TTT
  source 1..20: mol_type = other DNA
tttttcggttccagctgttt

SEQ ID NO: 58656 - DNA, 20 bp, synthetic construct
  misc_feature 1..20: note = Description of Artificial Sequence: Synthetic oligonucleotide
  misc_feature 1..20: note = Target: SCN10A; (+) strand; PAM type: YTN; PAM sequence: TTT
  source 1..20: mol_type = other DNA
ttttcggttccagctgtttt

SEQ ID NO: 58657 - DNA, 20 bp, synthetic construct
  misc_feature 1..20: note = Description of Artificial Sequence: Synthetic oligonucleotide
  misc_feature 1..20: note = Target: SCN10A; (+) strand; PAM type: YTN; PAM sequence: TTT
  source 1..20: mol_type = other DNA
tttcggttccagctgttttt

SEQ ID NO: 58658 - DNA, 20 bp, synthetic construct
  misc_feature 1..20: note = Description of Artificial Sequence: Synthetic oligonucleotide
  misc_feature 1..20: note = Target: SCN10A; (+) strand; PAM type: YTN; PAM sequence: TTT
  source 1..20: mol_type = other DNA
ttcggttccagctgtttttg

SEQ ID NO: 58659 - DNA, 20 bp, synthetic construct
  misc_feature 1..20: note = Description of Artificial Sequence: Synthetic oligonucleotide
  misc_feature 1..20: note = Target: SCN10A; (+) strand; PAM type: YTN; PAM sequence: TTT
  source 1..20: mol_type = other DNA
tcggttccagctgtttttga

SEQ ID NO: 58660 - DNA, 20 bp, synthetic construct
  misc_feature 1..20: note = Description of Artificial Sequence: Synthetic oligonucleotide
  misc_feature 1..20: note = Target: SCN10A; (+) strand; PAM type: YTN; PAM sequence: TTT
  source 1..20: mol_type = other DNA
cggttccagctgtttttgaa

SEQ ID NO: 58661 - DNA, 20 bp, synthetic construct
  misc_feature 1..20: note = Description of Artificial Sequence: Synthetic oligonucleotide
  misc_feature 1..20: note = Target: SCN10A; (+) strand; PAM type: YTN; PAM sequence: TTC
  source 1..20: mol_type = other DNA
ggttccagctgtttttgaac

SEQ ID NO: 58662 - DNA, 20 bp, synthetic construct
  misc_feature 1..20: note = Description of Artificial Sequence: Synthetic oligonucleotide
  misc_feature 1..20: note = Target: SCN10A; (+) strand; PAM type: YTN; PAM sequence: TTC
  source 1..20: mol_type = other DNA
cagctgtttttgaactttat

SEQ ID NO: 58663 - DNA, 20 bp, synthetic construct
  misc_feature 1..20: note = Description of Artificial Sequence: Synthetic oligonucleotide
  misc_feature 1..20: note = Target: SCN10A; (+) strand; PAM type: YTN; PAM sequence: CTG
  source 1..20: mol_type = other DNA
tttttgaactttatgttagg

SEQ ID NO: 58664 - DNA, 20 bp, synthetic construct
  misc_feature 1..20: note = Description of Artificial Sequence: Synthetic oligonucleotide
  misc_feature 1..20: note = Target: SCN10A; (+) strand; PAM type: YTN; PAM sequence: TTT
  source 1..20: mol_type = other DNA
ttgaactttatgttagggcc

SEQ ID NO: 58665 - DNA, 20 bp, synthetic construct
  misc_feature 1..20: note = Description of Artificial Sequence: Synthetic oligonucleotide
  misc_feature 1..20: note = Target: SCN10A; (+) strand; PAM type: YTN; PAM sequence: TTT
  source 1..20: mol_type = other DNA
tgaactttatgttagggcct

SEQ ID NO: 58666 - DNA, 20 bp, synthetic construct
  misc_feature 1..20: note = Description of Artificial Sequence: Synthetic oligonucleotide
  misc_feature 1..20: note = Target: SCN10A; (+) strand; PAM type: YTN; PAM sequence: TTT
  source 1..20: mol_type = other DNA
gaactttatgttagggcctg

SEQ ID NO: 58667 - DNA, 20 bp, synthetic construct
  misc_feature 1..20: note = Description of Artificial Sequence: Synthetic oligonucleotide
  misc_feature 1..20: note = Target: SCN10A; (+) strand; PAM type: YTN; PAM sequence: TTG
  source 1..20: mol_type = other DNA
aactttatgttagggcctgg

SEQ ID NO: 58668 - DNA, 20 bp, synthetic construct
  misc_feature 1..20: note = Description of Artificial Sequence: Synthetic oligonucleotide
  misc_feature 1..20: note = Target: SCN10A; (+) strand; PAM type: YTN; PAM sequence: CTT
  source 1..20: mol_type = other DNA
tatgttagggcctggagata

SEQ ID NO: 58669 - DNA, 20 bp, synthetic construct
  misc_feature 1..20: note = Description of Artificial Sequence: Synthetic oligonucleotide
  misc_feature 1..20: note = Target: SCN10A; (+) strand; PAM type: YTN; PAM sequence: TTT
  source 1..20: mol_type = other DNA
atgttagggcctggagatag

SEQ ID NO: 58670 - DNA, 20 bp, synthetic construct
  misc_feature 1..20: note = Description of Artificial Sequence: Synthetic oligonucleotide
  misc_feature 1..20: note = Target: SCN10A; (+) strand; PAM type: YTN; PAM sequence: TTA
  source 1..20: mol_type = other DNA
tgttagggcctggagatagg

SEQ ID NO: 58671 - DNA, 20 bp, synthetic construct
  misc_feature 1..20: note = Description of Artificial Sequence: Synthetic oligonucleotide
  misc_feature 1..20: note = Target: SCN10A; (+) strand; PAM type: YTN; PAM sequence: TTA
  source 1..20: mol_type = other DNA
gggcctggagataggttttt

SEQ ID NO: 58672 - DNA, 20 bp, synthetic construct
  misc_feature 1..20: note = Description of Artificial Sequence: Synthetic oligonucleotide
  misc_feature 1..20: note = Target: SCN10A; (+) strand; PAM type: YTN; PAM sequence: CTG
  source 1..20: mol_type = other DNA
gagataggtttttttggggg

SEQ ID NO: 58673 - DNA, 20 bp, synthetic construct
  misc_feature 1..20: note = Description of Artificial Sequence: Synthetic oligonucleotide
  misc_feature 1..20: note = Target: SCN10A; (+) strand; PAM type: YTN; PAM sequence: TTT
  source 1..20: mol_type = other DNA
ttttgggggagtcagttact

SEQ ID NO: 58674 - DNA, 20 bp, synthetic construct
  misc_feature 1..20: note = Description of Artificial Sequence: Synthetic oligonucleotide
  misc_feature 1..20: note = Target: SCN10A; (+) strand; PAM type: YTN; PAM sequence: TTT
  source 1..20: mol_type = other DNA
tttgggggagtcagttactg

SEQ ID NO: 58675 - DNA, 20 bp, synthetic construct
  misc_feature 1..20: note = Description of Artificial Sequence: Synthetic oligonucleotide
  misc_feature 1..20: note = Target: SCN10A; (+) strand; PAM type: YTN; PAM sequence: TTT
  source 1..20: mol_type = other DNA
ttgggggagtcagttactgc

SEQ ID NO: 58676 - DNA, 20 bp, synthetic construct
  misc_feature 1..20: note = Description of Artificial Sequence: Synthetic oligonucleotide
  misc_feature 1..20: note = Target: SCN10A; (+) strand; PAM type: YTN; PAM sequence: TTT
  source 1..20: mol_type = other DNA
tgggggagtcagttactgcc

SEQ ID NO: 58677 - DNA, 20 bp, synthetic construct
  misc_feature 1..20: note = Description of Artificial Sequence: Synthetic oligonucleotide
  misc_feature 1..20: note = Target: SCN10A; (+) strand; PAM type: YTN; PAM sequence: TTT
  source 1..20: mol_type = other DNA
gggggagtcagttactgccc

SEQ ID NO: 58678 - DNA, 20 bp, synthetic construct
  misc_feature 1..20: note = Description of Artificial Sequence: Synthetic oligonucleotide
  misc_feature 1..20: note = Target: SCN10A; (+) strand; PAM type: YTN; PAM sequence: TTG
  source 1..20: mol_type = other DNA
ggggagtcagttactgcccc

SEQ ID NO: 58679 - DNA, 20 bp, synthetic construct
  misc_feature 1..20: note = Description of Artificial Sequence: Synthetic oligonucleotide
  misc_feature 1..20: note = Target: SCN10A; (+) strand; PAM type: YTN; PAM sequence: TTA
  source 1..20: mol_type = other DNA
ctgcccccaactccaactat

SEQ ID NO: 58680 - DNA, 20 bp, synthetic construct
  misc_feature 1..20: note = Description of Artificial Sequence: Synthetic oligonucleotide
  misc_feature 1..20: note = Target: SCN10A; (+) strand; PAM type: YTN; PAM sequence: CTG
  source 1..20: mol_type = other DNA
cccccaactccaactatgaa

SEQ ID NO: 58681 - DNA, 20 bp, synthetic construct
  misc_feature 1..20: note = Description of Artificial Sequence: Synthetic oligonucleotide
  misc_feature 1..20: note = Target: SCN10A; (+) strand; PAM type: YTN; PAM sequence: CTC
  source 1..20: mol_type = other DNA
caactatgaacaaagttgga

SEQ ID NO: 58682 - DNA, 20 bp, synthetic construct
  misc_feature 1..20: note = Description of Artificial Sequence: Synthetic oligonucleotide
  misc_feature 1..20: note = Target: SCN10A; (+) strand; PAM type: YTN; PAM sequence: CTA
  source 1..20: mol_type = other DNA
tgaacaaagttggaaatata

SEQ ID NO: 58683 - DNA, 20 bp, synthetic construct
  misc_feature 1..20: note = Description of Artificial Sequence: Synthetic oligonucleotide
  misc_feature 1..20: note = Target: SCN10A; (+) strand; PAM type: YTN; PAM sequence: TTG
  source 1..20: mol_type = other DNA
gaaatataaagaatgtatat

SEQ ID NO: 58684 - DNA, 20 bp, synthetic construct
  misc_feature 1..20: note = Description of Artificial Sequence: Synthetic oligonucleotide
  misc_feature 1..20: note = Target: SCN10A; (+) strand; PAM type: YTN; PAM sequence: CTC
  source 1..20: mol_type = other DNA
tatatgatgtctaacttgaa

SEQ ID NO: 58685 - DNA, 20 bp, synthetic construct
  misc_feature 1..20: note = Description of Artificial Sequence: Synthetic oligonucleotide
  misc_feature 1..20: note = Target: SCN10A; (+) strand; PAM type: YTN; PAM sequence: CTA
  source 1..20: mol_type = other DNA
tatgatgtctaacttgaaga

SEQ ID NO: 58686 - DNA, 20 bp, synthetic construct
  misc_feature 1..20: note = Description of Artificial Sequence: Synthetic oligonucleotide
  misc_feature 1..20: note = Target: SCN10A; (+) strand; PAM type: YTN; PAM sequence: CTA
  source 1..20: mol_type = other DNA
acttgaagatgtttgatttt

SEQ ID NO: 58687 - DNA, 20 bp, synthetic construct
  misc_feature 1..20: note = Description of Artificial Sequence: Synthetic oligonucleotide
  misc_feature 1..20: note = Target: SCN10A; (+) strand; PAM type: YTN; PAM sequence: CTT
  source 1..20: mol_type = other DNA
gaagatgtttgatttttggt

SEQ ID NO: 58688 - DNA, 20 bp, synthetic construct
  misc_feature 1..20: note = Description of Artificial Sequence: Synthetic oligonucleotide
  misc_feature 1..20: note = Target: SCN10A; (+) strand; PAM type: YTN; PAM sequence: TTG
  source 1..20: mol_type = other DNA
aagatgtttgatttttggtc

SEQ ID NO: 58689 - DNA, 20 bp, synthetic construct
  misc_feature 1..20: note = Description of Artificial Sequence: Synthetic oligonucleotide
  misc_feature 1..20: note = Target: SCN10A; (+) strand; PAM type: YTN; PAM sequence: TTT
  source 1..20: mol_type = other DNA
gatttttggtcttggggacc

SEQ ID NO: 58690 - DNA, 20 bp, synthetic construct
  misc_feature 1..20: note = Description of Artificial Sequence: Synthetic oligonucleotide
  misc_feature 1..20: note = Target: SCN10A; (+) strand; PAM type: YTN; PAM sequence: TTG
  source 1..20: mol_type = other DNA
atttttggtcttggggacct

SEQ ID NO: 58691 - DNA, 20 bp, synthetic construct
  misc_feature 1..20: note = Description of Artificial Sequence: Synthetic oligonucleotide
  misc_feature 1..20: note = Target: SCN10A; (+) strand; PAM type: YTN; PAM sequence: TTT
  source 1..20: mol_type = other DNA
ttggtcttggggacctgggg

SEQ ID NO: 58692 - DNA, 20 bp, synthetic construct
  misc_feature 1..20: note = Description of Artificial Sequence: Synthetic oligonucleotide
  misc_feature 1..20: note = Target: SCN10A; (+) strand; PAM type: YTN; PAM sequence: TTT
  source 1..20: mol_type = other DNA
tggtcttggggacctgggga

SEQ ID NO: 58693 - DNA, 20 bp, synthetic construct
  misc_feature 1..20: note = Description of Artificial Sequence: Synthetic oligonucleotide
  misc_feature 1..20: note = Target: SCN10A; (+) strand; PAM type: YTN; PAM sequence: TTT
  source 1..20: mol_type = other DNA
ggtcttggggacctggggag

SEQ ID NO: 58694 - DNA, 20 bp, synthetic construct
  misc_feature 1..20: note = Description of Artificial Sequence: Synthetic oligonucleotide
  misc_feature 1..20: note = Target: SCN10A; (+) strand; PAM type: YTN; PAM sequence: TTG
  source 1..20: mol_type = other DNA
gtcttggggacctggggagc

SEQ ID NO: 58695 - DNA, 20 bp, synthetic construct
  misc_feature 1..20: note = Description of Artificial Sequence: Synthetic oligonucleotide
  misc_feature 1..20: note = Target: SCN10A; (+) strand; PAM type: YTN; PAM sequence: CTT
  source 1..20: mol_type = other DNA
ggggacctggggagccttat

SEQ ID NO: 58696 - DNA, 20 bp, synthetic construct
  misc_feature 1..20: note = Description of Artificial Sequence: Synthetic oligonucleotide
  misc_feature 1..20: note = Target: SCN10A; (+) strand; PAM type: YTN; PAM sequence: TTG
  source 1..20: mol_type = other DNA
gggacctggggagccttatt

SEQ ID NO: 58697 - DNA, 20 bp, synthetic construct
  misc_feature 1..20: note = Description of Artificial Sequence: Synthetic oligonucleotide
  misc_feature 1..20: note = Target: SCN10A; (+) strand; PAM type: YTN; PAM sequence: CTG
  source 1..20: mol_type = other DNA
gggagccttatttgtaccaa

SEQ ID NO: 58698 - DNA, 20 bp, synthetic construct
  misc_feature 1..20: note = Description of Artificial Sequence: Synthetic oligonucleotide
  misc_feature 1..20: note = Target: SCN10A; (+) strand; PAM type: YTN; PAM sequence: CTT
  source 1..20: mol_type = other DNA
atttgtaccaaaggcctcca

SEQ ID NO: 58699 - DNA, 20 bp, synthetic construct
  misc_feature 1..20: note = Description of Artificial Sequence: Synthetic oligonucleotide
  misc_feature 1..20: note = Target: SCN10A; (+) strand; PAM type: YTN; PAM sequence: TTA
  source 1..20: mol_type = other DNA
tttgtaccaaaggcctccac

SEQ ID NO: 58700 - DNA, 20 bp, synthetic construct
  misc_feature 1..20: note = Description of Artificial Sequence: Synthetic oligonucleotide
  misc_feature 1..20: note = Target: SCN10A; (+) strand; PAM type: YTN; PAM sequence: TTT
  source 1..20: mol_type = other DNA
gtaccaaaggcctccaccaa

SEQ ID NO: 58701 - DNA, 20 bp, synthetic construct
  misc_feature 1..20: note = Description of Artificial Sequence: Synthetic oligonucleotide
  misc_feature 1..20: note = Target: SCN10A; (+) strand; PAM type: YTN; PAM sequence: TTG
  source 1..20: mol_type = other DNA
taccaaaggcctccaccaaa

SEQ ID NO: 58702 - DNA, 20 bp, synthetic construct
  misc_feature 1..20: note = Description of Artificial Sequence: Synthetic oligonucleotide
  misc_feature 1..20: note = Target: SCN10A; (+) strand; PAM type: YTN; PAM sequence: CTC
  source 1..20: mol_type = other DNA
caccaaagatgaggcaaggc

SEQ ID NO: 58703 - DNA, 20 bp, synthetic construct
  misc_feature 1..20: note = Description of Artificial Sequence: Synthetic oligonucleotide
  misc_feature 1..20: note = Target: SCN10A; (+) strand; PAM type: YTN; PAM sequence: CTT
  source 1..20: mol_type = other DNA
taggtaagagagggttcaac

SEQ ID NO: 58704 - DNA, 20 bp, synthetic construct
  misc_feature 1..20: note = Description of Artificial Sequence: Synthetic oligonucleotide
  misc_feature 1..20: note = Target: SCN10A; (+) strand; PAM type: YTN; PAM sequence: TTT
  source 1..20: mol_type = other DNA
aggtaagagagggttcaaca

SEQ ID NO: 58705 - DNA, 20 bp, synthetic construct
  misc_feature 1..20: note = Description of Artificial Sequence: Synthetic oligonucleotide
  misc_feature 1..20: note = Target: SCN10A; (+) strand; PAM type: YTN; PAM sequence: TTA
  source 1..20: mol_type = other DNA
ggtaagagagggttcaacat

SEQ ID NO: 58706 - DNA, 20 bp, synthetic construct
  misc_feature 1..20: note = Description of Artificial Sequence: Synthetic oligonucleotide
  misc_feature 1..20: note = Target: SCN10A; (+) strand; PAM type: YTN; PAM sequence: TTC
  source 1..20: mol_type = other DNA
aacatctcacaggaaaaatg

SEQ ID NO: 58707 - DNA, 20 bp, synthetic construct
  misc_feature 1..20: note = Description of Artificial Sequence: Synthetic oligonucleotide
  misc_feature 1..20: note = Target: SCN10A; (+) strand; PAM type: YTN; PAM sequence: CTC
  source 1..20: mol_type = other DNA
acaggaaaaatggtgaggga

SEQ ID NO: 58708 - DNA, 20 bp, synthetic construct
  misc_feature 1..20: note = Description of Artificial Sequence: Synthetic oligonucleotide
  misc_feature 1..20: note = Target: SCN10A; (+) strand; PAM type: YTN; PAM sequence: CTC
  source 1..20: mol_type = other DNA
tcgctccttgccaggttccc

SEQ ID NO: 58709 - DNA, 20 bp, synthetic construct
  misc_feature 1..20: note = Description of Artificial Sequence: Synthetic oligonucleotide
  misc_feature 1..20: note = Target: SCN10A; (+) strand; PAM type: YTN; PAM sequence: CTC
  source 1..20: mol_type = other DNA
gctccttgccaggttccctg

SEQ ID NO: 58710 - DNA, 20 bp, synthetic construct
  misc_feature 1..20: note = Description of Artificial Sequence: Synthetic oligonucleotide
  misc_feature 1..20: note = Target: SCN10A; (+) strand; PAM type: YTN; PAM sequence: CTC
  source 1..20: mol_type = other DNA
cttgccaggttccctgggcc

SEQ ID NO: 58711 - DNA, 20 bp, synthetic construct
  misc_feature 1..20: note = Description of Artificial Sequence: Synthetic oligonucleotide
  misc_feature 1..20: note = Target: SCN10A; (+) strand; PAM type: YTN; PAM sequence: CTT
  source 1..20: mol_type = other DNA
gccaggttccctgggccctc

SEQ ID NO: 58712 - DNA, 20 bp, synthetic construct
  misc_feature 1..20: note = Description of Artificial Sequence: Synthetic oligonucleotide
  misc_feature 1..20: note = Target: SCN10A; (+) strand; PAM type: YTN; PAM sequence: TTG
  source 1..20: mol_type = other DNA
ccaggttccctgggccctct

SEQ ID NO: 58713 - DNA, 20 bp, synthetic construct
  misc_feature 1..20: note = Description of Artificial Sequence: Synthetic oligonucleotide
  misc_feature 1..20: note = Target: SCN10A; (+) strand; PAM type: YTN; PAM sequence: TTC
  source 1..20: mol_type = other DNA
cctgggccctctcccctact

SEQ ID NO: 58714 - DNA, 20 bp, synthetic construct
  misc_feature 1..20: note = Description of Artificial Sequence: Synthetic oligonucleotide
  misc_feature 1..20: note = Target: SCN10A; (+) strand; PAM type: YTN; PAM sequence: CTG
  source 1..20: mol_type = other DNA
ggccctctcccctacttgct

SEQ ID NO: 58715 - DNA, 20 bp, synthetic construct
  misc_feature 1..20: note = Description of Artificial Sequence: Synthetic oligonucleotide
  misc_feature 1..20: note = Target: SCN10A; (+) strand; PAM type: YTN; PAM sequence: CTC
  source 1..20: mol_type = other DNA
tcccctacttgctctttgtt

SEQ ID NO: 58716 - DNA, 20 bp, synthetic construct
  misc_feature 1..20: note = Description of Artificial Sequence: Synthetic oligonucleotide
  misc_feature 1..20: note = Target: SCN10A; (+) strand; PAM type: YTN; PAM sequence: CTC
  source 1..20: mol_type = other DNA
ccctacttgctctttgttgt

SEQ ID NO: 58717 - DNA, 20 bp, synthetic construct
  misc_feature 1..20: note = Description of Artificial Sequence: Synthetic oligonucleotide
  misc_feature 1..20: note = Target: SCN10A; (+) strand; PAM type: YTN; PAM sequence: CTA
  source 1..20: mol_type = other DNA
cttgctctttgttgttatgc

SEQ ID NO: 58718 - DNA, 20 bp, synthetic construct
  misc_feature 1..20: note = Description of Artificial Sequence: Synthetic oligonucleotide
  misc_feature 1..20: note = Target: SCN10A; (+) strand; PAM type: YTN; PAM sequence: CTT
  source 1..20: mol_type = other DNA
gctctttgttgttatgcaca

SEQ ID NO: 58719 - DNA, 20 bp, synthetic construct
  misc_feature 1..20: note = Description of Artificial Sequence: Synthetic oligonucleotide
  misc_feature 1..20: note = Target: SCN10A; (+) strand; PAM type: YTN; PAM sequence: TTG
  source 1..20: mol_type = other DNA
ctctttgttgttatgcacat

SEQ ID NO: 58720 - DNA, 20 bp, synthetic construct
  misc_feature 1..20: note = Description of Artificial Sequence: Synthetic oligonucleotide
  misc_feature 1..20: note = Target: SCN10A; (+) strand; PAM type: YTN; PAM sequence: CTC
  source 1..20: mol_type = other DNA
tttgttgttatgcacatggg

SEQ ID NO: 58721 - DNA, 20 bp, synthetic construct
  misc_feature 1..20: note = Description of Artificial Sequence: Synthetic oligonucleotide
  misc_feature 1..20: note = Target: SCN10A; (+) strand; PAM type: YTN; PAM sequence: CTT
  source 1..20: mol_type = other DNA
tgttgttatgcacatgggtc

SEQ ID NO: 58722 - DNA, 20 bp, synthetic construct
  misc_feature 1..20: note = Description of Artificial Sequence: Synthetic oligonucleotide
  misc_feature 1..20: note = Target: SCN10A; (+) strand; PAM type: YTN; PAM sequence: TTT
  source 1..20: mol_type = other DNA
gttgttatgcacatgggtca

SEQ ID NO: 58723 - DNA, 20 bp, synthetic construct
  misc_feature 1..20: note = Description of Artificial Sequence: Synthetic oligonucleotide
  misc_feature 1..20: note = Target: SCN10A; (+) strand; PAM type: YTN; PAM sequence: TTG
  source 1..20: mol_type = other DNA
ttgttatgcacatgggtcac

SEQ ID NO: 58724 - DNA, 20 bp, synthetic construct
  misc_feature 1..20: note = Description of Artificial Sequence: Synthetic oligonucleotide
  misc_feature 1..20: note = Target: SCN10A; (+) strand; PAM type: YTN; PAM sequence: TTG
  source 1..20: mol_type = other DNA
ttatgcacatgggtcacaat

SEQ ID NO: 58725 - DNA, 20 bp, synthetic construct
  misc_feature 1..20: note = Description of Artificial Sequence: Synthetic oligonucleotide
  misc_feature 1..20: note = Target: SCN10A; (+) strand; PAM type: YTN; PAM sequence: TTA
  source 1..20: mol_type = other DNA
tgcacatgggtcacaatatt

SEQ ID NO: 58726 - DNA, 20 bp, synthetic construct
  misc_feature 1..20: note = Description of Artificial Sequence: Synthetic oligonucleotide
  misc_feature 1..20: note = Target: SCN10A; (+) strand; PAM type: YTN; PAM sequence: TTG
  source 1..20: mol_type = other DNA
tgttggaaagaggaagaaag

SEQ ID NO: 58727 - DNA, 20 bp, synthetic construct
  misc_feature 1..20: note = Description of Artificial Sequence: Synthetic oligonucleotide
  misc_feature 1..20: note = Target: SCN10A; (+) strand; PAM type: YTN; PAM sequence: TTG
  source 1..20: mol_type = other DNA
gaaagaggaagaaagtagaa

SEQ ID NO: 58728 - DNA, 20 bp, synthetic construct
  misc_feature 1..20: note = Description of Artificial Sequence: Synthetic oligonucleotide
  misc_feature 1..20: note = Target: SCN10A; (+) strand; PAM type: YTN; PAM sequence: CTT
  source 1..20: mol_type = other DNA
gggaaataattataattttg

SEQ ID NO: 58729 - DNA, 20 bp, synthetic construct
  misc_feature 1..20: note = Description of Artificial Sequence: Synthetic oligonucleotide
  misc_feature 1..20: note = Target: SCN10A; (+) strand; PAM type: YTN; PAM sequence: TTG
  source 1..20: mol_type = other DNA
ggaaataattataattttgg

SEQ ID NO: 58730 - DNA, 20 bp, synthetic construct
  misc_feature 1..20: note = Description of Artificial Sequence: Synthetic oligonucleotide
  misc_feature 1..20: note = Target: SCN10A; (+) strand; PAM type: YTN; PAM sequence: TTA
  source 1..20: mol_type = other DNA
taattttggattataaaatc

SEQ ID NO: 58731 - DNA, 20 bp, synthetic construct
  misc_feature 1..20: note = Description of Artificial Sequence: Synthetic oligonucleotide
  misc_feature 1..20: note = Target: SCN10A; (+) strand; PAM type: YTN; PAM sequence: TTT
  source 1..20: mol_type = other DNA
tggattataaaatctttgtg

SEQ ID NO: 58732 - DNA, 20 bp, synthetic construct
  misc_feature 1..20: note = Description of Artificial Sequence: Synthetic oligonucleotide
  misc_feature 1..20: note = Target: SCN10A; (+) strand; PAM type: YTN; PAM sequence: TTT
  source 1..20: mol_type = other DNA
ggattataaaatctttgtgg

SEQ ID NO: 58733 - DNA, 20 bp, synthetic construct
  misc_feature 1..20: note = Description of Artificial Sequence: Synthetic oligonucleotide
  misc_feature 1..20: note = Target: SCN10A; (+) strand; PAM type: YTN; PAM sequence: TTG
  source 1..20: mol_type = other DNA
gattataaaatctttgtgga

SEQ ID NO: 58734 - DNA, 20 bp, synthetic construct
  misc_feature 1..20: note = Description of Artificial Sequence: Synthetic oligonucleotide
  misc_feature 1..20: note = Target: SCN10A; (+) strand; PAM type: YTN; PAM sequence: TTA
  source 1..20: mol_type = other DNA
taaaatctttgtggaagacc

SEQ ID NO: 58735 - DNA, 20 bp, synthetic construct
  misc_feature 1..20: note = Description of Artificial Sequence: Synthetic oligonucleotide
  misc_feature 1..20: note = Target: SCN10A; (+) strand; PAM type: YTN; PAM sequence: CTT
  source 1..20: mol_type = other DNA
tgtggaagaccttctgtgaa

SEQ ID NO: 58736 - DNA, 20 bp, synthetic construct
  misc_feature 1..20: note = Description of Artificial Sequence: Synthetic oligonucleotide
  misc_feature 1..20: note = Target: SCN10A; (+) strand; PAM type: YTN; PAM sequence: TTT
  source 1..20: mol_type = other DNA
gtggaagaccttctgtgaat

SEQ ID NO: 58737 - DNA, 20 bp, synthetic construct
  misc_feature 1..20: note = Description of Artificial Sequence: Synthetic oligonucleotide
  misc_feature 1..20: note = Target: SCN10A; (+) strand; PAM type: YTN; PAM sequence: TTG
  source 1..20: mol_type = other DNA
tggaagaccttctgtgaatt

SEQ ID NO: 58738 - DNA, 20 bp, synthetic construct
  misc_feature 1..20: note = Description of Artificial Sequence: Synthetic oligonucleotide
  misc_feature 1..20: note = Target: SCN10A; (+) strand; PAM type: YTN; PAM sequence: CTT
  source 1..20: mol_type = other DNA
ctgtgaatttccagtttaac

SEQ ID NO: 58739 - DNA, 20 bp, synthetic construct
  misc_feature 1..20: note = Description of Artificial Sequence: Synthetic oligonucleotide
  misc_feature 1..20: note = Target: SCN10A; (+) strand; PAM type: YTN; PAM sequence: TTC
  source 1..20: mol_type = other DNA
tgtgaatttccagtttaact

SEQ ID NO: 58740 - DNA, 20 bp, synthetic construct
  misc_feature 1..20: note = Description of Artificial Sequence: Synthetic oligonucleotide
  misc_feature 1..20: note = Target: SCN10A; (+) strand; PAM type: YTN; PAM sequence: CTG
  source 1..20: mol_type = other DNA
tgaatttccagtttaactag

SEQ ID NO: 58741 - DNA, 20 bp, synthetic construct
  misc_feature 1..20: note = Description of Artificial Sequence: Synthetic oligonucleotide
  misc_feature 1..20: note = Target: SCN10A; (+) strand; PAM type: YTN; PAM sequence: TTT
  source 1..20: mol_type = other DNA
ccagtttaactaggacatgt

SEQ ID NO: 58742 - DNA, 20 bp, synthetic construct
  misc_feature 1..20: note = Description of Artificial Sequence: Synthetic oligonucleotide
  misc_feature 1..20: note = Target: SCN10A; (+) strand; PAM type: YTN; PAM sequence: TTC
  source 1..20: mol_type = other DNA
cagtttaactaggacatgtt

SEQ ID NO: 58743 - DNA, 20 bp, synthetic construct
  misc_feature 1..20: note = Description of Artificial Sequence: Synthetic oligonucleotide
  misc_feature 1..20: note = Target: SCN10A; (+) strand; PAM type: YTN; PAM sequence: TTT
  source 1..20: mol_type = other DNA
aactaggacatgttcccatc

SEQ ID NO: 58744 - DNA, 20 bp, synthetic construct
  misc_feature 1..20: note = Description of Artificial Sequence: Synthetic oligonucleotide
  misc_feature 1..20: note = Target: SCN10A; (+) strand; PAM type: YTN; PAM sequence: TTA
  source 1..20: mol_type = other DNA
actaggacatgttcccatcg

SEQ ID NO: 58745 - DNA, 20 bp, synthetic construct
  misc_feature 1..20: note = Description of Artificial Sequence: Synthetic oligonucleotide
  misc_feature 1..20: note = Target: SCN10A; (+) strand; PAM type: YTN; PAM sequence: CTA
  source 1..20: mol_type = other DNA
ggacatgttcccatcgtgta

SEQ ID NO: 58746 - DNA, 20 bp, synthetic construct
  misc_feature 1..20: note = Description of Artificial Sequence: Synthetic oligonucleotide
  misc_feature 1..20: note = Target: SCN10A; (+) strand; PAM type: YTN; PAM sequence: TTC
  source 1..20: mol_type = other DNA
ccatcgtgtagggtacatta

SEQ ID NO: 58747 - DNA, 20 bp, synthetic construct
  misc_feature 1..20: note = Description of Artificial Sequence: Synthetic oligonucleotide
  misc_feature 1..20: note = Target: SCN10A; (+) strand; PAM type: YTN; PAM sequence: TTA
  source 1..20: mol_type = other DNA
tttgtctacatactctggta

SEQ ID NO: 58748 - DNA, 20 bp, synthetic construct
  misc_feature 1..20: note = Description of Artificial Sequence: Synthetic oligonucleotide
  misc_feature 1..20: note = Target: SCN10A; (+) strand; PAM type: YTN; PAM sequence: TTT
  source 1..20: mol_type = other DNA
gtctacatactctggtaaaa

SEQ ID NO: 58749 - DNA, 20 bp, synthetic construct
  misc_feature 1..20: note = Description of Artificial Sequence: Synthetic oligonucleotide
  misc_feature 1..20: note = Target: SCN10A; (+) strand; PAM type: YTN; PAM sequence: TTG
  source 1..20: mol_type = other DNA
tctacatactctggtaaaat

SEQ ID NO: 58750 - DNA, 20 bp, synthetic construct
  misc_feature 1..20: note = Description of Artificial Sequence: Synthetic oligonucleotide
  misc_feature 1..20: note = Target: SCN10A; (+) strand; PAM type: YTN; PAM sequence: CTA
  source 1..20: mol_type = other DNA
catactctggtaaaattttc

SEQ ID NO: 58751 - DNA, 20 bp, synthetic construct
  misc_feature 1..20: note = Description of Artificial Sequence: Synthetic oligonucleotide
  misc_feature 1..20: note = Target: SCN10A; (+) strand; PAM type: YTN; PAM sequence: CTC
  source 1..20: mol_type = other DNA
tggtaaaattttctgccaga

SEQ ID NO: 58752 - DNA, 20 bp, synthetic construct
  misc_feature 1..20: note = Description of Artificial Sequence: Synthetic oligonucleotide
  misc_feature 1..20: note = Target: SCN10A; (+) strand; PAM type: YTN; PAM sequence: CTG
  source 1..20: mol_type = other DNA
gtaaaattttctgccagaca

SEQ ID NO: 58753 - DNA, 20 bp, synthetic construct
  misc_feature 1..20: note = Description of Artificial Sequence: Synthetic oligonucleotide
  misc_feature 1..20: note = Target: SCN10A; (+) strand; PAM type: YTN; PAM sequence: TTT
  source 1..20: mol_type = other DNA
tctgccagacaactggtcta

SEQ ID NO: 58754 - DNA, 20 bp, synthetic construct
  misc_feature 1..20: note = Description of Artificial Sequence: Synthetic oligonucleotide
  misc_feature 1..20: note = Target: SCN10A; (+) strand; PAM type: YTN; PAM sequence: TTT
  source 1..20: mol_type = other DNA
ctgccagacaactggtctac

SEQ ID NO: 58755 - DNA, 20 bp, synthetic construct
  misc_feature 1..20: note = Description of Artificial Sequence: Synthetic oligonucleotide
  misc_feature 1..20: note = Target: SCN10A; (+) strand; PAM type: YTN; PAM sequence: TTC
  source 1..20: mol_type = other DNA
tgccagacaactggtctaca

SEQ ID NO: 58756 - DNA, 20 bp, synthetic construct
  misc_feature 1..20: note = Description of Artificial Sequence: Synthetic oligonucleotide
  misc_feature 1..20: note = Target: SCN10A; (+) strand; PAM type: YTN; PAM sequence: CTG
  source 1..20: mol_type = other DNA
ccagacaactggtctacagc

SEQ ID NO: 58757 - DNA, 20 bp, synthetic construct
  misc_feature 1..20: note = Description of Artificial Sequence: Synthetic oligonucleotide
  misc_feature 1..20: note = Target: SCN10A; (+) strand; PAM type: YTN; PAM sequence: CTG
  source 1..20: mol_type = other DNA
gtctacagcacattttaatt

SEQ ID NO: 58758 - DNA, 20 bp, synthetic construct
  misc_feature 1..20: note = Description of Artificial Sequence: Synthetic oligonucleotide
  misc_feature 1..20: note = Target: SCN10A; (+) strand; PAM type: YTN; PAM sequence: CTA
  source 1..20: mol_type = other DNA
cagcacattttaatttgctc

SEQ ID NO: 58759 - DNA, 20 bp, synthetic construct
  misc_feature 1..20: note = Description of Artificial Sequence: Synthetic oligonucleotide
  misc_feature 1..20: note = Target: SCN10A; (+) strand; PAM type: YTN; PAM sequence: TTT
  source 1..20: mol_type = other DNA
taatttgctccaggatctta

SEQ ID NO: 58760 - DNA, 20 bp, synthetic construct
  misc_feature 1..20: note = Description of Artificial Sequence: Synthetic oligonucleotide
  misc_feature 1..20: note = Target: SCN10A; (+) strand; PAM type: YTN; PAM sequence: TTT
  source 1..20: mol_type = other DNA
aatttgctccaggatcttat

SEQ ID NO: 58761 - DNA, 20 bp, synthetic construct
  misc_feature 1..20: note = Description of Artificial Sequence: Synthetic oligonucleotide
  misc_feature 1..20: note = Target: SCN10A; (+) strand; PAM type: YTN; PAM sequence: TTA
  source 1..20: mol_type = other DNA
atttgctccaggatcttatt

SEQ ID NO: 58762 - DNA, 20 bp, synthetic construct
  misc_feature 1..20: note = Description of Artificial Sequence: Synthetic oligonucleotide
  misc_feature 1..20: note = Target: SCN10A; (+) strand; PAM type: YTN; PAM sequence: TTT
  source 1..20: mol_type = other DNA
gctccaggatcttattttaa

SEQ ID NO: 58763 - DNA, 20 bp, synthetic construct
  misc_feature 1..20: note = Description of Artificial Sequence: Synthetic oligonucleotide
  misc_feature 1..20: note = Target: SCN10A; (+) strand; PAM type: YTN; PAM sequence: TTG
  source 1..20: mol_type = other DNA
ctccaggatcttattttaag

SEQ ID NO: 58764 - DNA, 20 bp, synthetic construct
  misc_feature 1..20: note = Description of Artificial Sequence: Synthetic oligonucleotide
  misc_feature 1..20: note = Target: SCN10A; (+) strand; PAM type: YTN; PAM sequence: CTC
  source 1..20: mol_type = other DNA
caggatcttattttaaggga

SEQ ID NO: 58765 - DNA, 20 bp, synthetic construct
  misc_feature 1..20: note = Description of Artificial Sequence: Synthetic oligonucleotide
  misc_feature 1..20: note = Target: SCN10A; (+) strand; PAM type: YTN; PAM sequence: CTT
  source 1..20: mol_type = other DNA
attttaagggagaatggttc

SEQ ID NO: 58766 - DNA, 20 bp, synthetic construct
  misc_feature 1..20: note = Description of Artificial Sequence: Synthetic oligonucleotide
  misc_feature 1..20: note = Target: SCN10A; (+) strand; PAM type: YTN; PAM sequence: TTA
  source 1..20: mol_type = other DNA
ttttaagggagaatggttcc

SEQ ID NO: 58767 - DNA, 20 bp, synthetic construct
  misc_feature 1..20: note = Description of Artificial Sequence: Synthetic oligonucleotide
  misc_feature 1..20: note = Target: SCN10A; (+) strand; PAM type: YTN; PAM sequence: TTT
  source 1..20: mol_type = other DNA
taagggagaatggttcctcg

SEQ ID NO: 58768 - DNA, 20 bp, synthetic construct
  misc_feature 1..20: note = Description of Artificial Sequence: Synthetic oligonucleotide
  misc_feature 1..20: note = Target: SCN10A; (+) strand; PAM type: YTN; PAM sequence: TTT
  source 1..20: mol_type = other DNA
aagggagaatggttcctcgt

SEQ ID NO: 58769 - DNA, 20 bp, synthetic construct
  misc_feature 1..20: note = Description of Artificial Sequence: Synthetic oligonucleotide
  misc_feature 1..20: note = Target: SCN10A; (+) strand; PAM type: YTN; PAM sequence: TTA
  source 1..20: mol_type = other DNA
agggagaatggttcctcgta

SEQ ID NO: 58770 - DNA, 20 bp, synthetic construct
  misc_feature 1..20: note = Description of Artificial Sequence: Synthetic oligonucleotide
  misc_feature 1..20: note = Target: SCN10A; (+) strand; PAM type: YTN; PAM sequence: TTC
  source 1..20: mol_type = other DNA
ctcgtacttgtaacaattag

SEQ ID NO: 58771 - DNA, 20 bp, synthetic construct
  misc_feature 1..20: note = Description of Artificial Sequence: Synthetic oligonucleotide
  misc_feature 1..20: note = Target: SCN10A; (+) strand; PAM type: YTN; PAM sequence: CTC
  source 1..20: mol_type = other DNA
gtacttgtaacaattagata

SEQ ID NO: 58772 - DNA, 20 bp, synthetic construct
  misc_feature 1..20: note = Description of Artificial Sequence: Synthetic oligonucleotide
  misc_feature 1..20: note = Target: SCN10A; (+) strand; PAM type: YTN; PAM sequence: CTT
  source 1..20: mol_type = other DNA
gtaacaattagatactcaat

SEQ ID NO: 58773 - DNA, 20 bp, synthetic construct
  misc_feature 1..20: note = Description of Artificial Sequence: Synthetic oligonucleotide
  misc_feature 1..20: note = Target: SCN10A; (+) strand; PAM type: YTN; PAM sequence: TTG
  source 1..20: mol_type = other DNA
taacaattagatactcaatc

SEQ ID NO: 58774 - DNA, 20 bp, synthetic construct
  misc_feature 1..20: note = Description of Artificial Sequence: Synthetic oligonucleotide
  misc_feature 1..20: note = Target: SCN10A; (+) strand; PAM type: YTN; PAM sequence: TTA
  source 1..20: mol_type = other DNA
gatactcaatcacctcttgt

SEQ ID NO: 58775 - DNA, 20 bp, synthetic construct
  misc_feature 1..20: note = Description of Artificial Sequence: Synthetic oligonucleotide
  misc_feature 1..20: note = Target: SCN10A; (+) strand; PAM type: YTN; PAM sequence: CTC
  source 1..20: mol_type = other DNA
aatcacctcttgttggtggg

SEQ ID NO: 58776 - DNA, 20 bp, synthetic construct
  misc_feature 1..20: note = Description of Artificial Sequence: Synthetic oligonucleotide
  misc_feature 1..20: note = Target: SCN10A; (+) strand; PAM type: YTN; PAM sequence: CTC
  source 1..20: mol_type = other DNA
ttgttggtgggaaagaagaa

SEQ ID NO: 58777 - DNA, 20 bp, synthetic construct
  misc_feature 1..20: note = Description of Artificial Sequence: Synthetic oligonucleotide
  misc_feature 1..20: note = Target: SCN10A; (+) strand; PAM type: YTN; PAM sequence: CTT
  source 1..20: mol_type = other DNA
gttggtgggaaagaagaaag

SEQ ID NO: 58778 - DNA, 20 bp, synthetic construct
  misc_feature 1..20: note = Description of Artificial Sequence: Synthetic oligonucleotide
  misc_feature 1..20: note = Target: SCN10A; (+) strand; PAM type: YTN; PAM sequence: TTG
  source 1..20: mol_type = other DNA
ttggtgggaaagaagaaagg

SEQ ID NO: 58779 - DNA, 20 bp, synthetic construct
  misc_feature 1..20: note = Description of Artificial Sequence: Synthetic oligonucleotide
  misc_feature 1..20: note = Target: SCN10A; (+) strand; PAM type: YTN; PAM sequence: TTG
  source 1..20: mol_type = other DNA
gtgggaaagaagaaagggag

SEQ ID NO: 58780 - DNA, 20 bp, synthetic construct
  misc_feature 1..20: note = Description of Artificial Sequence: Synthetic oligonucleotide
  misc_feature 1..20: note = Target: SCN10A; (+) strand; PAM type: YTN; PAM sequence: TTG
  source 1..20: mol_type = other DNA
atatgtgggttttttctgct

SEQ ID NO: 58781 - DNA, 20 bp, synthetic construct
  misc_feature 1..20: note = Description of Artificial Sequence: Synthetic oligonucleotide
  misc_feature 1..20: note = Target: SCN10A; (+) strand; PAM type: YTN; PAM sequence: TTT
  source 1..20: mol_type = other DNA
tttctgcttattttccagct

SEQ ID NO: 58782 - DNA, 20 bp, synthetic construct
  misc_feature 1..20: note = Description of Artificial Sequence: Synthetic oligonucleotide
  misc_feature 1..20: note = Target: SCN10A; (+) strand; PAM type: YTN; PAM sequence: TTT
  source 1..20: mol_type = other DNA
ttctgcttattttccagctc

SEQ ID NO: 58783 - DNA, 20 bp, synthetic construct
  misc_feature 1..20: note = Description of Artificial Sequence: Synthetic oligonucleotide
  misc_feature 1..20: note = Target: SCN10A; (+) strand; PAM type: YTN; PAM sequence: TTT
  source 1..20: mol_type = other DNA
tctgcttattttccagctct

SEQ ID NO: 58784 - DNA, 20 bp, synthetic construct
  misc_feature 1..20: note = Description of Artificial Sequence: Synthetic oligonucleotide
  misc_feature 1..20: note = Target: SCN10A; (+) strand; PAM type: YTN; PAM sequence: TTT
  source 1..20: mol_type = other DNA
ctgcttattttccagctcta

SEQ ID NO: 58785 - DNA, 20 bp, synthetic construct
  misc_feature 1..20: note = Description of Artificial Sequence: Synthetic oligonucleotide
  misc_feature 1..20: note = Target: SCN10A; (+) strand; PAM type: YTN; PAM sequence: TTC
  source 1..20: mol_type = other DNA
tgcttattttccagctctat

SEQ ID NO: 58786 - DNA, 20 bp, synthetic construct
  misc_feature 1..20: note = Description of Artificial Sequence: Synthetic oligonucleotide
  misc_feature 1..20: note = Target: SCN10A; (+) strand; PAM type: YTN; PAM sequence: CTG
  source 1..20: mol_type = other DNA
cttattttccagctctataa

SEQ ID NO: 58787 - DNA, 20 bp, synthetic construct
  misc_feature 1..20: note = Description of Artificial Sequence: Synthetic oligonucleotide
  misc_feature 1..20: note = Target: SCN10A; (+) strand; PAM type: YTN; PAM sequence: CTT
  source 1..20: mol_type = other DNA
attttccagctctataaggg

SEQ ID NO: 58788 - DNA, 20 bp, synthetic construct
  misc_feature 1..20: note = Description of Artificial Sequence: Synthetic oligonucleotide
  misc_feature 1..20: note = Target: SCN10A; (+) strand; PAM type: YTN; PAM sequence: TTA
  source 1..20: mol_type = other DNA
ttttccagctctataaggga

SEQ ID NO: 58789 - DNA, 20 bp, synthetic construct
  misc_feature 1..20: note = Description of Artificial Sequence: Synthetic oligonucleotide
  misc_feature 1..20: note = Target: SCN10A; (+) strand; PAM type: YTN; PAM sequence: TTT
  source 1..20: mol_type = other DNA
tccagctctataagggattc

SEQ ID NO: 58790 - DNA, 20 bp, synthetic construct
  misc_feature 1..20: note = Description of Artificial Sequence: Synthetic oligonucleotide
  misc_feature 1..20: note = Target: SCN10A; (+) strand; PAM type: YTN; PAM sequence: TTT
  source 1..20: mol_type = other DNA
ccagctctataagggattcc

SEQ ID NO: 58791 - DNA, 20 bp, synthetic construct
  misc_feature 1..20: note = Description of Artificial Sequence: Synthetic oligonucleotide
  misc_feature 1..20: note = Target: SCN10A; (+) strand; PAM type: YTN; PAM sequence: TTC
  source 1..20: mol_type = other DNA
cagctctataagggattcct

SEQ ID NO: 58792 - DNA, 20 bp, synthetic construct
  misc_feature 1..20: note = Description of Artificial Sequence: Synthetic oligonucleotide
  misc_feature 1..20: note = Target: SCN10A; (+) strand; PAM type: YTN; PAM sequence: CTC
  source 1..20: mol_type = other DNA
tataagggattcctgcccca

SEQ ID NO: 58793 - DNA, 20 bp, synthetic construct
  misc_feature 1..20: note = Description of Artificial Sequence: Synthetic oligonucleotide
  misc_feature 1..20: note = Target: SCN10A; (+) strand; PAM type: YTN; PAM sequence: CTA
  source 1..20: mol_type = other DNA
taagggattcctgccccagc

SEQ ID NO: 58794 - DNA, 20 bp, synthetic construct
  misc_feature 1..20: note = Description of Artificial Sequence: Synthetic oligonucleotide
  misc_feature 1..20: note = Target: SCN10A; (+) strand; PAM type: YTN; PAM sequence: TTC
  source 1..20: mol_type = other DNA
ctgccccagcggatggtgct

SEQ ID NO: 58795 - DNA, 20 bp, synthetic construct
  misc_feature 1..20: note = Description of Artificial Sequence: Synthetic oligonucleotide
  misc_feature 1..20: note = Target: SCN10A; (+) strand; PAM type: YTN; PAM sequence: CTG
  source 1..20: mol_type = other DNA
ccccagcggatggtgctacc

SEQ ID NO: 58796 - DNA, 20 bp, synthetic construct
  misc_feature 1..20: note = Description of Artificial Sequence: Synthetic oligonucleotide
  misc_feature 1..20: note = Target: SCN10A; (+) strand; PAM type: YTN; PAM sequence: CTA
  source 1..20: mol_type = other DNA
ccctgtaagccacaggaact

SEQ ID NO: 58797 - DNA, 20 bp, synthetic construct
  misc_feature 1..20: note = Description of Artificial Sequence: Synthetic oligonucleotide
  misc_feature 1..20: note = Target: SCN10A; (+) strand; PAM type: YTN; PAM sequence: CTG
  source 1..20: mol_type = other DNA
taagccacaggaactggtag

SEQ ID NO: 58798 - DNA, 20 bp, synthetic construct
  misc_feature 1..20: note = Description of Artificial Sequence: Synthetic oligonucleotide
  misc_feature 1..20: note = Target: SCN10A; (+) strand; PAM type: YTN; PAM sequence: CTG
  source 1..20: mol_type = other DNA
gtagttaagatatccccatc

SEQ ID NO: 58799 - DNA, 20 bp, synthetic construct
  misc_feature 1..20: note = Description of Artificial Sequence: Synthetic oligonucleotide
  misc_feature 1..20: note = Target: SCN10A; (+) strand; PAM type: YTN; PAM sequence: TTA
  source 1..20: mol_type = other DNA
agatatccccatcatagaac

SEQ ID NO: 58800 - DNA, 20 bp, synthetic construct
  misc_feature 1..20: note = Description of Artificial Sequence: Synthetic oligonucleotide
  misc_feature 1..20: note = Target: SCN10A; (+) strand; PAM type: YTN; PAM sequence: CTA
  source 1..20: mol_type = other DNA
agtacttggctatgttttat

SEQ ID NO: 58801 - DNA, 20 bp, synthetic construct
  misc_feature 1..20: note = Description of Artificial Sequence: Synthetic oligonucleotide
  misc_feature 1..20: note = Target: SCN10A; (+) strand; PAM type: YTN; PAM sequence: CTT
  source 1..20: mol_type = other DNA
ggctatgttttatttctata

SEQ ID NO: 58802 - DNA, 20 bp, synthetic construct
  misc_feature 1..20: note = Description of Artificial Sequence: Synthetic oligonucleotide
  misc_feature 1..20: note = Target: SCN10A; (+) strand; PAM type: YTN; PAM sequence: TTG
  source 1..20: mol_type = other DNA
gctatgttttatttctatat

SEQ ID NO: 58803 - DNA, 20 bp, synthetic construct
  misc_feature 1..20: note = Description of Artificial Sequence: Synthetic oligonucleotide
  misc_feature 1..20: note = Target: SCN10A; (+) strand; PAM type: YTN; PAM sequence: CTA
  source 1..20: mol_type = other DNA
tgttttatttctatattact

SEQ ID NO: 58804 - DNA, 20 bp, synthetic construct
  misc_feature 1..20: note = Description of Artificial Sequence: Synthetic oligonucleotide
  misc_feature 1..20: note = Target: SCN10A; (+) strand; PAM type: YTN; PAM sequence: TTT
  source 1..20: mol_type = other DNA
tatttctatattactgatac

SEQ ID NO: 58805 - DNA, 20 bp, synthetic construct
  misc_feature 1..20: note = Description of Artificial Sequence: Synthetic oligonucleotide
  misc_feature 1..20: note = Target: SCN10A; (+) strand; PAM type: YTN; PAM sequence: TTT
  source 1..20: mol_type = other DNA
atttctatattactgataca

SEQ ID NO: 58806 - DNA, 20 bp, synthetic construct
  misc_feature 1..20: note = Description of Artificial Sequence: Synthetic oligonucleotide
  misc_feature 1..20: note = Target: SCN10A; (+) strand; PAM type: YTN; PAM sequence: TTA
  source 1..20: mol_type = other DNA
tttctatattactgatacac

SEQ ID NO: 58807 - DNA, 20 bp, synthetic construct
  misc_feature 1..20: note = Description of Artificial Sequence: Synthetic oligonucleotide
  misc_feature 1..20: note = Target: SCN10A; (+) strand; PAM type: YTN; PAM sequence: TTT
  source 1..20: mol_type = other DNA
ctatattactgatacacaaa

SEQ ID NO: 58808 - DNA, 20 bp, synthetic construct
  misc_feature 1..20: note = Description of Artificial Sequence: Synthetic oligonucleotide
  misc_feature 1..20: note = Target: SCN10A; (+) strand; PAM type: YTN; PAM sequence: TTC
  source 1..20: mol_type = other DNA
tatattactgatacacaaac

SEQ ID NO: 58809 - DNA, 20 bp, synthetic construct
  misc_feature 1..20: note = Description of Artificial Sequence: Synthetic oligonucleotide
  misc_feature 1..20: note = Target: SCN10A; (+) strand; PAM type: YTN; PAM sequence: CTA
  source 1..20: mol_type = other DNA
tattactgatacacaaacaa

SEQ ID NO: 58810 - DNA, 20 bp, synthetic construct
  misc_feature 1..20: note = Description of Artificial Sequence: Synthetic oligonucleotide
  misc_feature 1..20: note = Target: SCN10A; (+) strand; PAM type: YTN; PAM sequence: TTA
  source 1..20: mol_type = other DNA
ctgatacacaaacaagctcc

SEQ ID NO: 58811 - DNA, 20 bp, synthetic construct
  misc_feature 1..20: note = Description of Artificial Sequence: Synthetic oligonucleotide
  misc_feature 1..20: note = Target: SCN10A; (+) strand; PAM type: YTN; PAM sequence: CTG
  source 1..20: mol_type = other DNA
atacacaaacaagctccctt

SEQ ID NO: 58812 - DNA, 20 bp, synthetic construct
  misc_feature 1..20: note = Description of Artificial Sequence: Synthetic oligonucleotide
  misc_feature 1..20: note = Target: SCN10A; (+) strand; PAM type: YTN; PAM sequence: CTC
  source 1..20: mol_type = other DNA
ccttctttaatataaaatca

SEQ ID NO: 58813 - DNA, 20 bp, synthetic construct
  misc_feature 1..20: note = Description of Artificial Sequence: Synthetic oligonucleotide
  misc_feature 1..20: note = Target: SCN10A; (+) strand; PAM type: YTN; PAM sequence: CTT
  source 1..20: mol_type = other DNA
ctttaatataaaatcaaaat

SEQ ID NO: 58814 - DNA, 20 bp, synthetic construct
  misc_feature 1..20: note = Description of Artificial Sequence: Synthetic oligonucleotide
  misc_feature 1..20: note = Target: SCN10A; (+) strand; PAM type: YTN; PAM sequence: TTC
  source 1..20: mol_type = other DNA
tttaatataaaatcaaaata

SEQ ID NO: 58815 - DNA, 20 bp, synthetic construct
  misc_feature 1..20: note = Description of Artificial Sequence: Synthetic oligonucleotide
  misc_feature 1..20: note = Target: SCN10A; (+) strand; PAM type: YTN; PAM sequence: CTT
  source 1..20: mol_type = other DNA
taatataaaatcaaaatagc

SEQ ID NO: 58816 - DNA, 20 bp, synthetic construct
  misc_feature 1..20: note = Description of Artificial Sequence: Synthetic oligonucleotide
  misc_feature 1..20: note = Target: SCN10A; (+) strand; PAM type: YTN; PAM sequence: TTT
  source 1..20: mol_type = other DNA
aatataaaatcaaaatagcc

SEQ ID NO: 58817 - DNA, 20 bp, synthetic construct
  misc_feature 1..20: note = Description of Artificial Sequence: Synthetic oligonucleotide
  misc_feature 1..20: note = Target: SCN10A; (+) strand; PAM type: YTN; PAM sequence: TTA
  source 1..20: mol_type = other DNA
atataaaatcaaaatagcct

SEQ ID NO: 58818 - DNA, 20 bp, synthetic construct
  misc_feature 1..20: note = Description of Artificial Sequence: Synthetic oligonucleotide
  misc_feature 1..20: note = Target: SCN10A; (+) strand; PAM type: YTN; PAM sequence: CTT
  source 1..20: mol_type = other DNA
tggaatctttcattttggaa

SEQ ID NO: 58819 - DNA, 20 bp, synthetic construct
  misc_feature 1..20: note = Description of Artificial Sequence: Synthetic oligonucleotide
  misc_feature 1..20: note = Target: SCN10A; (+) strand; PAM type: YTN; PAM sequence: TTT
  source 1..20: mol_type = other DNA
ggaatctttcattttggaag

SEQ ID NO: 58820 - DNA, 20 bp, synthetic construct
  misc_feature 1..20: note = Description of Artificial Sequence: Synthetic oligonucleotide
  misc_feature 1..20: note = Target: SCN10A; (+) strand; PAM type: YTN; PAM sequence: TTG
  source 1..20: mol_type = other DNA
gaatctttcattttggaaga

SEQ ID NO: 58821 - DNA, 20 bp, synthetic construct
  misc_feature 1..20: note = Description of Artificial Sequence: Synthetic oligonucleotide
  misc_feature 1..20: note = Target: SCN10A; (+) strand; PAM type: YTN; PAM sequence: CTT
  source 1..20: mol_type = other DNA
tcattttggaagacaaacaa

SEQ ID NO: 58822 - DNA, 20 bp, synthetic construct
  misc_feature 1..20: note = Description of Artificial Sequence: Synthetic oligonucleotide
  misc_feature 1..20: note = Target: SCN10A; (+) strand; PAM type: YTN; PAM sequence: TTT
  source 1..20: mol_type = other DNA
cattttggaagacaaacaaa

SEQ ID NO: 58823 - DNA, 20 bp, synthetic construct
  misc_feature 1..20: note = Description of Artificial Sequence: Synthetic oligonucleotide
  misc_feature 1..20: note = Target: SCN10A; (+) strand; PAM type: YTN; PAM sequence: TTC
  source 1..20: mol_type = other DNA
attttggaagacaaacaaaa

SEQ ID NO: 58824 - DNA, 20 bp, synthetic construct
  misc_feature 1..20: note = Description of Artificial Sequence: Synthetic oligonucleotide
  misc_feature 1..20: note = Target: SCN10A; (+) strand; PAM type: YTN; PAM sequence: TTT
  source 1..20: mol_type = other DNA
tggaagacaaacaaaacaaa

SEQ ID NO: 58825 - DNA, 20 bp, synthetic construct
  misc_feature 1..20: note = Description of Artificial Sequence: Synthetic oligonucleotide
  misc_feature 1..20: note = Target: SCN10A; (+) strand; PAM type: YTN; PAM sequence: TTT
  source 1..20: mol_type = other DNA
ggaagacaaacaaaacaaaa

SEQ ID NO: 58826 - DNA, 20 bp, synthetic construct
  misc_feature 1..20: note = Description of Artificial Sequence: Synthetic oligonucleotide
  misc_feature 1..20: note = Target: SCN10A; (+) strand; PAM type: YTN; PAM sequence: TTG
  source 1..20: mol_type = other DNA
gaagacaaacaaaacaaaac

SEQ ID NO: 58827 - DNA, 20 bp, synthetic construct
  misc_feature 1..20: note = Description of Artificial Sequence: Synthetic oligonucleotide
  misc_feature 1..20: note = Target: SCN10A; (+) strand; PAM type: YTN; PAM sequence: CTA
  source 1..20: mol_type = other DNA
accaaccaaccaacaaaaac

SEQ ID NO: 58828 - DNA, 20 bp, synthetic construct
  misc_feature 1..20: note = Description of Artificial Sequence: Synthetic oligonucleotide
  misc_feature 1..20: note = Target: SCN10A; (+) strand; PAM type: YTN; PAM sequence: CTC
  source 1..20: mol_type = other DNA
ctattatgctaagtgagata

SEQ ID NO: 58829 - DNA, 20 bp, synthetic construct
  misc_feature 1..20: note = Description of Artificial Sequence: Synthetic oligonucleotide
  misc_feature 1..20: note = Target: SCN10A; (+) strand; PAM type: YTN; PAM sequence: CTA
  source 1..20: mol_type = other DNA
ttatgctaagtgagataagc

SEQ ID NO: 58830 - DNA, 20 bp, synthetic construct
  misc_feature 1..20: note = Description of Artificial Sequence: Synthetic oligonucleotide
  misc_feature 1..20: note = Target: SCN10A; (+) strand; PAM type: YTN; PAM sequence: TTA
  source 1..20: mol_type = other DNA
tgctaagtgagataagccag

SEQ ID NO: 58831 - DNA, 20 bp, synthetic construct
  misc_feature 1..20: note = Description of Artificial Sequence: Synthetic oligonucleotide
  misc_feature 1..20: note = Target: SCN10A; (+) strand; PAM type: YTN; PAM sequence: CTA
  source 1..20: mol_type = other DNA
agtgagataagccagacaca

SEQ ID NO: 58832 - DNA, 20 bp, synthetic construct
  misc_feature 1..20: note = Description of Artificial Sequence: Synthetic oligonucleotide
  misc_feature 1..20: note = Target: SCN10A; (+) strand; PAM type: YTN; PAM sequence: TTG
  source 1..20: mol_type = other DNA
catttatataaggaatctaa

SEQ ID NO: 58833 - DNA, 20 bp, synthetic construct
  misc_feature 1..20: note = Description of Artificial Sequence: Synthetic oligonucleotide
  misc_feature 1..20: note = Target: SCN10A; (+) strand; PAM type: YTN; PAM sequence: TTT
  source 1..20: mol_type = other DNA
atataaggaatctaaaatag

SEQ ID NO: 58834 - DNA, 20 bp, synthetic construct
  misc_feature 1..20: note = Description of Artificial Sequence: Synthetic oligonucleotide
  misc_feature 1..20: note = Target: SCN10A; (+) strand; PAM type: YTN; PAM sequence: TTA
  source 1..20: mol_type = other DNA
tataaggaatctaaaatagt

SEQ ID NO: 58835 - DNA, 20 bp, synthetic construct
  misc_feature 1..20: note = Description of Artificial Sequence: Synthetic oligonucleotide
  misc_feature 1..20: note = Target: SCN10A; (+) strand; PAM type: YTN; PAM sequence: CTA
  source 1..20: mol_type = other DNA
aaatagtcaaactcatggga

SEQ ID NO: 58836 - DNA, 20 bp, synthetic construct
  misc_feature 1..20: note = Description of Artificial Sequence: Synthetic oligonucleotide
  misc_feature 1..20: note = Target: SCN10A; (+) strand; PAM type: YTN; PAM sequence: CTC
  source 1..20: mol_type = other DNA
atgggagcagagaatagaat

SEQ ID NO: 58837 - DNA, 20 bp, synthetic construct
  misc_feature 1..20: note = Description of Artificial Sequence: Synthetic oligonucleotide
  misc_feature 1..20: note = Target: SCN10A; (+) strand; PAM type: YTN; PAM sequence: TTT
  source 1..20: mol_type = other DNA
ccaggagctgggaggagggg

SEQ ID NO: 58838 - DNA, 20 bp, synthetic construct
  misc_feature 1..20: note = Description of Artificial Sequence: Synthetic oligonucleotide
  misc_feature 1..20: note = Target: SCN10A; (+) strand; PAM type: YTN; PAM sequence: TTC
  source 1..20: mol_type = other DNA
caggagctgggaggagggga

SEQ ID NO: 58839 - DNA, 20 bp, synthetic construct
  misc_feature 1..20: note = Description of Artificial Sequence: Synthetic oligonucleotide
  misc_feature 1..20: note = Target: SCN10A; (+) strand; PAM type: YTN; PAM sequence: CTG
  source 1..20: mol_type = other DNA
ggaggaggggaaattgggga

SEQ ID NO: 58840 - DNA, 20 bp, synthetic construct
  misc_feature 1..20: note = Description of Artificial Sequence: Synthetic oligonucleotide
  misc_feature 1..20: note = Target: SCN10A; (+) strand; PAM type: YTN; PAM sequence: TTG
  source 1..20: mol_type = other DNA
gggaggtacttgtcaaagtg

SEQ ID NO: 58841 - DNA, 20 bp, synthetic construct
  misc_feature 1..20: note = Description of Artificial Sequence: Synthetic oligonucleotide
  misc_feature 1..20: note = Target: SCN10A; (+) strand; PAM type: YTN; PAM sequence: CTT
  source 1..20: mol_type = other DNA
gtcaaagtgtacaaacttcc

SEQ ID NO: 58842 - DNA, 20 bp, synthetic construct
  misc_feature 1..20: note = Description of Artificial Sequence: Synthetic oligonucleotide
  misc_feature 1..20: note = Target: SCN10A; (+) strand; PAM type: YTN; PAM sequence: TTG
  source 1..20: mol_type = other DNA
tcaaagtgtacaaacttcca

SEQ ID NO: 58843 - DNA, 20 bp, synthetic construct
  misc_feature 1..20: note = Description of Artificial Sequence: Synthetic oligonucleotide
  misc_feature 1..20: note = Target: SCN10A; (+) strand; PAM type: YTN; PAM sequence: CTT
  source 1..20: mol_type = other DNA
ccagttatgtgacatgaata

SEQ ID NO: 58844 - DNA, 20 bp, synthetic construct
  misc_feature 1..20: note = Description of Artificial Sequence: Synthetic oligonucleotide
  misc_feature 1..20: note = Target: SCN10A; (+) strand; PAM type: YTN; PAM sequence: TTC
  source 1..20: mol_type = other DNA
cagttatgtgacatgaataa

SEQ ID NO: 58845 - DNA, 20 bp, synthetic construct
  misc_feature 1..20: note = Description of Artificial Sequence: Synthetic oligonucleotide
  misc_feature 1..20: note = Target: SCN10A; (+) strand; PAM type: YTN; PAM sequence: TTA
  source 1..20: mol_type = other DNA
tgtgacatgaataaatccta

SEQ ID NO: 58846 - DNA, 20 bp, synthetic construct
  misc_feature 1..20: note = Description of Artificial Sequence: Synthetic oligonucleotide
  misc_feature 1..20: note = Target: SCN10A; (+) strand; PAM type: YTN; PAM sequence: CTA
  source 1..20: mol_type = other DNA
gagctctacttatagcatag

SEQ ID NO: 58847 - DNA, 20 bp, synthetic construct
  misc_feature 1..20: note = Description of Artificial Sequence: Synthetic oligonucleotide
  misc_feature 1..20: note = Target: SCN10A; (+) strand; PAM type: YTN; PAM sequence: CTC
  source 1..20: mol_type = other DNA
tacttatagcatagtcccta

SEQ ID NO: 58848 - DNA, 20 bp, synthetic construct
  misc_feature 1..20: note = Description of Artificial Sequence: Synthetic oligonucleotide
  misc_feature 1..20: note = Target: SCN10A; (+) strand; PAM type: YTN; PAM sequence: CTA
  source 1..20: mol_type = other DNA
cttatagcatagtccctata

SEQ ID NO: 58849 - DNA, 20 bp, synthetic construct
  misc_feature 1..20: note = Description of Artificial Sequence: Synthetic oligonucleotide
  misc_feature 1..20: note = Target: SCN10A; (+) strand; PAM type: YTN; PAM sequence: CTT
  source 1..20: mol_type = other DNA
atagcatagtccctatagtt

SEQ ID NO: 58850 - DNA, 20 bp, synthetic construct
  misc_feature 1..20: note = Description of Artificial Sequence: Synthetic oligonucleotide
  misc_feature 1..20: note = Target: SCN10A; (+) strand; PAM type: YTN; PAM sequence: TTA
  source 1..20: mol_type = other DNA
tagcatagtccctatagtta

SEQ ID NO: 58851 - DNA, 20 bp, synthetic construct
  misc_feature 1..20: note = Description of Artificial Sequence: Synthetic oligonucleotide
  misc_feature 1..20: note = Target: SCN10A; (+) strand; PAM type: YTN; PAM sequence: CTA
  source 1..20: mol_type = other DNA
tagttagcaataccgtgttg

SEQ ID NO: 58852 - DNA, 20 bp, synthetic construct
  misc_feature 1..20: note = Description of Artificial Sequence: Synthetic oligonucleotide
  misc_feature 1..20: note = Target: SCN10A; (+) strand; PAM type: YTN; PAM sequence: TTA
  source 1..20: mol_type = other DNA
gcaataccgtgttgtctacc

SEQ ID NO: 58853 - DNA, 20 bp, synthetic construct
  misc_feature 1..20: note = Description of Artificial Sequence: Synthetic oligonucleotide
  misc_feature 1..20: note = Target: SCN10A; (+) strand; PAM type: YTN; PAM sequence: TTG
  source 1..20: mol_type = other DNA
tctacctaaaaatttgccaa

SEQ ID NO: 58854 - DNA, 20 bp, synthetic construct
  misc_feature 1..20: note = Description of Artificial Sequence: Synthetic oligonucleotide
  misc_feature 1..20: note = Target: SCN10A; (+) strand; PAM type: YTN; PAM sequence: CTA
  source 1..20: mol_type = other DNA
cctaaaaatttgccaagaga

SEQ ID NO: 58855 - DNA, 20 bp, synthetic construct
  misc_feature 1..20: note = Description of Artificial Sequence: Synthetic oligonucleotide
  misc_feature 1..20: note = Target: SCN10A; (+) strand; PAM type: YTN; PAM sequence: CTA
  source 1..20: mol_type = other DNA
aaaatttgccaagagaataa

SEQ ID NO: 58856 - DNA, 20 bp, synthetic construct
  misc_feature 1..20: note = Description of Artificial Sequence: Synthetic oligonucleotide
  misc_feature 1..20: note = Target: SCN10A; (+) strand; PAM type: YTN; PAM sequence: TTT
  source 1..20: mol_type = other DNA
gccaagagaataaatcttaa

SEQ ID NO: 58857 - DNA, 20 bp, synthetic construct
  misc_feature 1..20: note = Description of Artificial Sequence: Synthetic oligonucleotide
  misc_feature 1..20: note = Target: SCN10A; (+) strand; PAM type: YTN; PAM sequence: TTG
  source 1..20: mol_type = other DNA
ccaagagaataaatcttaag

SEQ ID NO: 58858 - DNA, 20 bp, synthetic construct
  misc_feature 1..20: note = Description of Artificial Sequence: Synthetic oligonucleotide
  misc_feature 1..20: note = Target: SCN10A; (+) strand; PAM type: YTN; PAM sequence: CTT
  source 1..20: mol_type = other DNA
aagtgttcctagcacccaat

SEQ ID NO: 58859 - DNA, 20 bp, synthetic construct
  misc_feature 1..20: note = Description of Artificial Sequence: Synthetic oligonucleotide
  misc_feature 1..20: note = Target: SCN10A; (+) strand; PAM type: YTN; PAM sequence: TTA
  source 1..20: mol_type = other DNA
agtgttcctagcacccaata

SEQ ID NO: 58860 - DNA, 20 bp, synthetic construct
  misc_feature 1..20: note = Description of Artificial Sequence: Synthetic oligonucleotide
  misc_feature 1..20: note = Target: SCN10A; (+) strand; PAM type: YTN; PAM sequence: TTC
  source 1..20: mol_type = other DNA
ctagcacccaataaataaat

SEQ ID NO: 58861 - DNA, 20 bp, synthetic construct
  misc_feature 1..20: note = Description of Artificial Sequence: Synthetic oligonucleotide
  misc_feature 1..20: note = Target: SCN10A; (+) strand; PAM type: YTN; PAM sequence: CTA
  source 1..20: mol_type = other DNA
gcacccaataaataaataaa

SEQ ID NO: 58862 - DNA, 20 bp, synthetic construct
  misc_feature 1..20: note = Description of Artificial Sequence: Synthetic oligonucleotide
  misc_feature 1..20: note = Target: SCN10A; (+) strand; PAM type: YTN; PAM sequence: TTT
  source 1..20: mol_type = other DNA
ggaggttatggacatgtttc

SEQ ID NO: 58863 - DNA, 20 bp, synthetic construct
  misc_feature 1..20: note = Description of Artificial Sequence: Synthetic oligonucleotide
  misc_feature 1..20: note = Target: SCN10A; (+) strand; PAM type: YTN; PAM sequence: TTG
  source 1..20: mol_type = other DNA
gaggttatggacatgtttct

SEQ ID NO: 58864 - DNA, 20 bp, synthetic construct
  misc_feature 1..20: note = Description of Artificial Sequence: Synthetic oligonucleotide
  misc_feature 1..20: note = Target: SCN10A; (+) strand; PAM type: YTN; PAM sequence: TTA
  source 1..20: mol_type = other DNA
tggacatgtttctggcattg

SEQ ID NO: 58865 - DNA, 20 bp, synthetic construct
  misc_feature 1..20: note = Description of Artificial Sequence: Synthetic oligonucleotide
  misc_feature 1..20: note = Target: SCN10A; (+) strand; PAM type: YTN; PAM sequence: TTT
  source 1..20: mol_type = other DNA
ctggcattgatggtggtgat

SEQ ID NO: 58866 - DNA, 20 bp, synthetic construct
  misc_feature 1..20: note = Description of Artificial Sequence: Synthetic oligonucleotide
  misc_feature 1..20: note = Target: SCN10A; (+) strand; PAM type: YTN; PAM sequence: TTC
  source 1..20: mol_type = other DNA
tggcattgatggtggtgatg

SEQ ID NO: 58867 - DNA, 20 bp, synthetic construct
  misc_feature 1..20: note = Description of Artificial Sequence: Synthetic oligonucleotide
  misc_feature 1..20: note = Target: SCN10A; (+) strand; PAM type: YTN; PAM sequence: CTG
  source 1..20: mol_type = other DNA
gcattgatggtggtgatggt

SEQ ID NO: 58868 - DNA, 20 bp, synthetic construct
  misc_feature 1..20: note = Description of Artificial Sequence: Synthetic oligonucleotide
  misc_feature 1..20: note = Target: SCN10A; (+) strand; PAM type: YTN; PAM sequence: TTG
  source 1..20: mol_type = other DNA
atggtggtgatggtttcatg

SEQ ID NO: 58869 - DNA, 20 bp, synthetic construct
  misc_feature 1..20: note = Description of Artificial Sequence: Synthetic oligonucleotide
  misc_feature 1..20: note = Target: SCN10A; (+) strand; PAM type: YTN; PAM sequence: TTT
  source 1..20: mol_type = other DNA
catgggtgtatacttatctc

SEQ ID NO: 58870 - DNA, 20 bp, synthetic construct
  misc_feature 1..20: note = Description of Artificial Sequence: Synthetic oligonucleotide
  misc_feature 1..20: note = Target: SCN10A; (+) strand; PAM type: YTN; PAM sequence: TTC
  source 1..20: mol_type = other DNA
atgggtgtatacttatctcc

SEQ ID NO: 58871 - DNA, 20 bp, synthetic construct
  misc_feature 1..20: note = Description of Artificial Sequence: Synthetic oligonucleotide
  misc_feature 1..20: note = Target: SCN10A; (+) strand; PAM type: YTN; PAM sequence: CTT
  source 1..20: mol_type = other DNA
atctccaaactcataaagtt

SEQ ID NO: 58872 - DNA, 20 bp, synthetic construct
  misc_feature 1..20: note = Description of Artificial Sequence: Synthetic oligonucleotide
  misc_feature 1..20: note = Target: SCN10A; (+) strand; PAM type: YTN; PAM sequence: TTA
  source 1..20: mol_type = other DNA
tctccaaactcataaagttg

SEQ ID NO: 58873 - DNA, 20 bp, synthetic construct
  misc_feature 1..20: note = Description of Artificial Sequence: Synthetic oligonucleotide
  misc_feature 1..20: note = Target: SCN10A; (+) strand; PAM type: YTN; PAM sequence: CTC
  source 1..20: mol_type = other DNA
caaactcataaagttgtgta

SEQ ID NO: 58874 - DNA, 20 bp, synthetic construct
  misc_feature 1..20: note = Description of Artificial Sequence: Synthetic oligonucleotide
  misc_feature 1..20: note = Target: SCN10A; (+) strand; PAM type: YTN; PAM sequence: CTC
  source 1..20: mol_type = other DNA
ataaagttgtgtacattaaa

SEQ ID NO: 58875 - DNA, 20 bp, synthetic construct
  misc_feature 1..20: note = Description of Artificial Sequence: Synthetic oligonucleotide
  misc_feature 1..20: note = Target: SCN10A; (+) strand; PAM type: YTN; PAM sequence: TTG
  source 1..20: mol_type = other DNA
tgtacattaaacatgtatag

SEQ ID NO: 58876 - DNA, 20 bp, synthetic construct
  misc_feature 1..20: note = Description of Artificial Sequence: Synthetic oligonucleotide
  misc_feature 1..20: note = Target: SCN10A; (+) strand; PAM type: YTN; PAM sequence: TTA
  source 1..20: mol_type = other DNA
aacatgtatagctttttaca

SEQ ID NO: 58877 - DNA, 20 bp, synthetic construct
  misc_feature 1..20: note = Description of Artificial Sequence: Synthetic oligonucleotide
  misc_feature 1..20: note = Target: SCN10A; (+) strand; PAM type: YTN; PAM sequence: CTT
  source 1..20: mol_type = other DNA
tttacatgtggatcatacct

SEQ ID NO: 58878 - DNA, 20 bp, synthetic construct
  misc_feature 1..20: note = Description of Artificial Sequence: Synthetic oligonucleotide
  misc_feature 1..20: note = Target: SCN10A; (+) strand; PAM type: YTN; PAM sequence: TTT
  source 1..20: mol_type = other DNA
ttacatgtggatcatacctc

SEQ ID NO: 58879 - DNA, 20 bp, synthetic construct
  misc_feature 1..20: note = Description of Artificial Sequence: Synthetic oligonucleotide
  misc_feature 1..20: note = Target: SCN10A; (+) strand; PAM type: YTN; PAM sequence: TTT
  source 1..20: mol_type = other DNA
tacatgtggatcatacctca

SEQ ID NO: 58880 - DNA, 20 bp, synthetic construct
  misc_feature 1..20: note = Description of Artificial Sequence: Synthetic oligonucleotide
  misc_feature 1..20: note = Target: SCN10A; (+) strand; PAM type: YTN; PAM sequence: TTT
  source 1..20: mol_type = other DNA
acatgtggatcatacctcaa

SEQ ID NO: 58881 - DNA, 20 bp, synthetic construct
  misc_feature 1..20: note = Description of Artificial Sequence: Synthetic oligonucleotide
  misc_feature 1..20: note = Target: SCN10A; (+) strand; PAM type: YTN; PAM sequence: TTA
  source 1..20: mol_type = other DNA
catgtggatcatacctcaat

SEQ ID NO: 58882 - DNA, 20 bp, synthetic construct
  misc_feature 1..20: note = Description of Artificial Sequence: Synthetic oligonucleotide
  misc_feature 1..20: note = Target: SCN10A; (+) strand; PAM type: YTN; PAM sequence: CTC
  source 1..20: mol_type = other DNA
aataaagtgttaaaaaacag

SEQ ID NO: 58883 - DNA, 20 bp, synthetic construct
  misc_feature 1..20: note = Description of Artificial Sequence: Synthetic oligonucleotide
  misc_feature 1..20: note = Target: SCN10A; (+) strand; PAM type: YTN; PAM sequence: TTA
  source 1..20: mol_type = other DNA
aaaaacagagcagcaatatc

SEQ ID NO: 58884 - DNA, 20 bp, synthetic construct
  misc_feature 1..20: note = Description of Artificial Sequence: Synthetic oligonucleotide
  misc_feature 1..20: note = Target: SCN10A; (+) strand; PAM type: YTN; PAM sequence: CTG
  source 1..20: mol_type = other DNA
aaatccccggaaatacacgc

SEQ ID NO: 58885 - DNA, 20 bp, synthetic construct
  misc_feature 1..20: note = Description of Artificial Sequence: Synthetic oligonucleotide
  misc_feature 1..20: note = Target: SCN10A; (+) strand; PAM type: YTN; PAM sequence: CTG
  source 1..20: mol_type = other DNA
tgtttcagcaccaaggtggg

SEQ ID NO: 58886 - DNA, 20 bp, synthetic construct
  misc_feature 1..20: note = Description of Artificial Sequence: Synthetic oligonucleotide
  misc_feature 1..20: note = Target: SCN10A; (+) strand; PAM type: YTN; PAM sequence: TTT
  source 1..20: mol_type = other DNA
cagcaccaaggtggggaggt

SEQ ID NO: 58887 - DNA, 20 bp, synthetic construct
  misc_feature 1..20: note = Description of Artificial Sequence: Synthetic oligonucleotide
  misc_feature 1..20: note = Target: SCN10A; (+) strand; PAM type: YTN; PAM sequence: TTC
  source 1..20: mol_type = other DNA
agcaccaaggtggggaggtt

SEQ ID NO: 58888 - DNA, 20 bp, synthetic construct
  misc_feature 1..20: note = Description of Artificial Sequence: Synthetic oligonucleotide
  misc_feature 1..20: note = Target: SCN10A; (+) strand; PAM type: YTN; PAM sequence: TTG
  source 1..20: mol_type = other DNA
atgaaatgctgttaagttgt

SEQ ID NO: 58889 - DNA, 20 bp, synthetic construct
  misc_feature 1..20: note = Description of Artificial Sequence: Synthetic oligonucleotide
  misc_feature 1..20: note = Target: SCN10A; (+) strand; PAM type: YTN; PAM sequence: CTG
  source 1..20: mol_type = other DNA
ttaagttgtatttagatact

SEQ ID NO: 58890 - DNA, 20 bp, synthetic construct
  misc_feature 1..20: note = Description of Artificial Sequence: Synthetic oligonucleotide
  misc_feature 1..20: note = Target: SCN10A; (+) strand; PAM type: YTN; PAM sequence: TTA
  source 1..20: mol_type = other DNA
agttgtatttagatactctc

SEQ ID NO: 58891 - DNA, 20 bp, synthetic construct
  misc_feature 1..20: note = Description of Artificial Sequence: Synthetic oligonucleotide
  misc_feature 1..20: note = Target: SCN10A; (+) strand; PAM type: YTN; PAM sequence: TTG
  source 1..20: mol_type = other DNA
tatttagatactctcagctc

SEQ ID NO: 58892 - DNA, 20 bp, synthetic construct
  misc_feature 1..20: note = Description of Artificial Sequence: Synthetic oligonucleotide
  misc_feature 1..20: note = Target: SCN10A; (+) strand; PAM type: YTN; PAM sequence: TTT
  source 1..20: mol_type = other DNA
agatactctcagctcttgtt

SEQ ID NO: 58893 - DNA, 20 bp, synthetic construct
  misc_feature 1..20: note = Description of Artificial Sequence: Synthetic oligonucleotide
  misc_feature 1..20: note = Target: SCN10A; (+) strand; PAM type: YTN; PAM sequence: TTA
  source 1..20: mol_type = other DNA
gatactctcagctcttgtta

SEQ ID NO: 58894 - DNA, 20 bp, synthetic construct
  misc_feature 1..20: note = Description of Artificial Sequence: Synthetic oligonucleotide
  misc_feature 1..20: note = Target: SCN10A; (+) strand; PAM type: YTN; PAM sequence: CTC
  source 1..20: mol_type = other DNA
tcagctcttgttactaaatc

SEQ ID NO: 58895 - DNA, 20 bp, synthetic construct
  misc_feature 1..20: note = Description of Artificial Sequence: Synthetic oligonucleotide
  misc_feature 1..20: note = Target: SCN10A; (+) strand; PAM type: YTN; PAM sequence: CTC
  source 1..20: mol_type = other DNA
agctcttgttactaaatcag

SEQ ID NO: 58896 - DNA, 20 bp, synthetic construct
  misc_feature 1..20: note = Description of Artificial Sequence: Synthetic oligonucleotide
  misc_feature 1..20: note = Target: SCN10A; (+) strand; PAM type: YTN; PAM sequence: CTC
  source 1..20: mol_type = other DNA
ttgttactaaatcagtggca

SEQ ID NO: 58897 - DNA, 20 bp, synthetic construct
  misc_feature 1..20: note = Description of Artificial Sequence: Synthetic oligonucleotide
  misc_feature 1..20: note = Target: SCN10A; (+) strand; PAM type: YTN; PAM sequence: CTT
  source 1..20: mol_type = other DNA
gttactaaatcagtggcaaa

SEQ ID NO: 58898 - DNA, 20 bp, synthetic construct
  misc_feature 1..20: note = Description of Artificial Sequence: Synthetic oligonucleotide
  misc_feature 1..20: note = Target: SCN10A; (+) strand; PAM type: YTN; PAM sequence: TTG
  source 1..20: mol_type = other DNA
ttactaaatcagtggcaaat

SEQ ID NO: 58899 - DNA, 20 bp, synthetic construct
  misc_feature 1..20: note = Description of Artificial Sequence: Synthetic oligonucleotide
  misc_feature 1..20: note = Target: SCN10A; (+) strand; PAM type: YTN; PAM sequence: TTA
  source 1..20: mol_type = other DNA
ctaaatcagtggcaaattaa

SEQ ID NO: 58900 - DNA, 20 bp, synthetic construct
  misc_feature 1..20: note = Description of Artificial Sequence: Synthetic oligonucleotide
  misc_feature 1..20: note = Target: SCN10A; (+) strand; PAM type: YTN; PAM sequence: CTA
  source 1..20: mol_type = other DNA
aatcagtggcaaattaaatc

SEQ ID NO: 58901 - DNA, 20 bp, synthetic construct
  misc_feature 1..20: note = Description of Artificial Sequence: Synthetic oligonucleotide
  misc_feature 1..20: note = Target: SCN10A; (+) strand; PAM type: YTN; PAM sequence: TTA
  source 1..20: mol_type = other DNA
aatctacagctacaccccga

SEQ ID NO: 58902 - DNA, 20 bp, synthetic construct
  misc_feature 1..20: note = Description of Artificial Sequence: Synthetic oligonucleotide
  misc_feature 1..20: note = Target: SCN10A; (+) strand; PAM type: YTN; PAM sequence: CTA
  source 1..20: mol_type = other DNA
cagctacaccccgacatgaa

SEQ ID NO: 58903 - DNA, 20 bp, synthetic construct
  misc_feature 1..20: note = Description of Artificial Sequence: Synthetic oligonucleotide
  misc_feature 1..20: note = Target: SCN10A; (+) strand; PAM type: YTN; PAM sequence: CTA
  source 1..20: mol_type = other DNA
caccccgacatgaaaagtaa

SEQ ID NO: 58904 - DNA, 20 bp, synthetic construct
  misc_feature 1..20: note = Description of Artificial Sequence: Synthetic oligonucleotide
  misc_feature 1..20: note = Target: SCN10A; (+) strand; PAM type: YTN; PAM sequence: TTT
  source 1..20: mol_type = other DNA
ataatgccaggtgaagctgg

SEQ ID NO: 58905 - DNA, 20 bp, synthetic construct
  misc_feature 1..20: note = Description of Artificial Sequence: Synthetic oligonucleotide
  misc_feature 1..20: note = Target: SCN10A; (+) strand; PAM type: YTN; PAM sequence: TTA
  source 1..20: mol_type = other DNA
taatgccaggtgaagctggt

SEQ ID NO: 58906 - DNA, 20 bp, synthetic construct
  misc_feature 1..20: note = Description of Artificial Sequence: Synthetic oligonucleotide
  misc_feature 1..20: note = Target: SCN10A; (+) strand; PAM type: YTN; PAM sequence: CTG
  source 1..20: mol_type = other DNA
gtgagcatgatttggccttt

SEQ ID NO: 58907 - DNA, 20 bp, synthetic construct
  misc_feature 1..20: note = Description of Artificial Sequence: Synthetic oligonucleotide
  misc_feature 1..20: note = Target: SCN10A; (+) strand; PAM type: YTN; PAM sequence: TTT
  source 1..20: mol_type = other DNA
ggcctttatagggtcaaact

SEQ ID NO: 58908 - DNA, 20 bp, synthetic construct
  misc_feature 1..20: note = Description of Artificial Sequence: Synthetic oligonucleotide
  misc_feature 1..20: note = Target: SCN10A; (+) strand; PAM type: YTN; PAM sequence: TTG
  source 1..20: mol_type = other DNA
gcctttatagggtcaaactt

SEQ ID NO: 58909 - DNA, 20 bp, synthetic construct
  misc_feature 1..20: note = Description of Artificial Sequence: Synthetic oligonucleotide
  misc_feature 1..20: note = Target: SCN10A; (+) strand; PAM type: YTN; PAM sequence: CTT
  source 1..20: mol_type = other DNA
tatagggtcaaacttcagct

SEQ ID NO: 58910 - DNA, 20 bp, synthetic construct
  misc_feature 1..20: note = Description of Artificial Sequence: Synthetic oligonucleotide
  misc_feature 1..20: note = Target: SCN10A; (+) strand; PAM type: YTN; PAM sequence: TTT
  source 1..20: mol_type = other DNA
atagggtcaaacttcagcta

SEQ ID NO: 58911 - DNA, 20 bp, synthetic construct
  misc_feature 1..20: note = Description of Artificial Sequence: Synthetic oligonucleotide
  misc_feature 1..20: note = Target: SCN10A; (+) strand; PAM type: YTN; PAM sequence: TTA
  source 1..20: mol_type = other DNA
tagggtcaaacttcagctaa

SEQ ID NO: 58912 - DNA, 20 bp, synthetic construct
  misc_feature 1..20: note = Description of Artificial Sequence: Synthetic oligonucleotide
  misc_feature 1..20: note = Target: SCN10A; (+) strand; PAM type: YTN; PAM sequence: CTT
  source 1..20: mol_type = other DNA
cagctaacccataagcccag

SEQ ID NO: 58913 - DNA, 20 bp, synthetic construct
  misc_feature 1..20: note = Description of Artificial Sequence: Synthetic oligonucleotide
  misc_feature 1..20: note = Target: SCN10A; (+) strand; PAM type: YTN; PAM sequence: TTC
  source 1..20: mol_type = other DNA
agctaacccataagcccagg

SEQ ID NO: 58914 - DNA, 20 bp, synthetic construct
  misc_feature 1..20: note = Description of Artificial Sequence: Synthetic oligonucleotide
  misc_feature 1..20: note = Target: SCN10A; (+) strand; PAM type: YTN; PAM sequence: CTA
  source 1..20: mol_type = other DNA
acccataagcccagggacag

SEQ ID NO: 58915 - DNA, 20 bp, synthetic construct
  misc_feature 1..20: note = Description of Artificial Sequence: Synthetic oligonucleotide
  misc_feature 1..20: note = Target: SCN10A; (+) strand; PAM type: YTN; PAM sequence: CTC
  source 1..20: mol_type = other DNA
ttggctgttggtgacaggca

SEQ ID NO: 58916 - DNA, 20 bp, synthetic construct
  misc_feature 1..20: note = Description of Artificial Sequence: Synthetic oligonucleotide
  misc_feature 1..20: note = Target: SCN10A; (+) strand; PAM type: YTN; PAM sequence: CTT
  source 1..20: mol_type = other DNA
ggctgttggtgacaggcagc

SEQ ID NO: 58917 - DNA, 20 bp, synthetic construct
  misc_feature 1..20: note = Description of Artificial Sequence: Synthetic oligonucleotide
  misc_feature 1..20: note = Target: SCN10A; (+) strand; PAM type: YTN; PAM sequence: TTG
  source 1..20: mol_type = other DNA
gctgttggtgacaggcagca

SEQ ID NO: 58918 - DNA, 20 bp, synthetic construct
  misc_feature 1..20: note = Description of Artificial Sequence: Synthetic oligonucleotide
  misc_feature 1..20: note = Target: SCN10A; (+) strand; PAM type: YTN; PAM sequence: CTG
  source 1..20: mol_type = other DNA
ttggtgacaggcagcaagtt

SEQ ID NO: 58919 - DNA, 20 bp, synthetic construct
  misc_feature 1..20: note = Description of Artificial Sequence: Synthetic oligonucleotide
  misc_feature 1..20: note = Target: SCN10A; (+) strand; PAM type: YTN; PAM sequence: TTG
  source 1..20: mol_type = other DNA
gtgacaggcagcaagttcat

SEQ ID NO: 58920 - DNA, 20 bp, synthetic construct
  misc_feature 1..20: note = Description of Artificial Sequence: Synthetic oligonucleotide
  misc_feature 1..20: note = Target: SCN10A; (+) strand; PAM type: YTN; PAM sequence: TTC
  source 1..20: mol_type = other DNA
attagaagattggagcctgt

SEQ ID NO: 58921 - DNA, 20 bp, synthetic construct
  misc_feature 1..20: note = Description of Artificial Sequence: Synthetic oligonucleotide
  misc_feature 1..20: note = Target: SCN10A; (+) strand; PAM type: YTN; PAM sequence: TTA
  source 1..20: mol_type = other DNA
gaagattggagcctgttcta

SEQ ID NO: 58922 - DNA, 20 bp, synthetic construct
  misc_feature 1..20: note = Description of Artificial Sequence: Synthetic oligonucleotide
  misc_feature 1..20: note = Target: SCN10A; (+) strand; PAM type: YTN; PAM sequence: TTG
  source 1..20: mol_type = other DNA
gagcctgttctaaactcagc

SEQ ID NO: 58923 - DNA, 20 bp, synthetic construct
  misc_feature 1..20: note = Description of Artificial Sequence: Synthetic oligonucleotide
  misc_feature 1..20: note = Target: SCN10A; (+) strand; PAM type: YTN; PAM sequence: CTG
  source 1..20: mol_type = other DNA
ttctaaactcagcttcaacc

SEQ ID NO: 58924 - DNA, 20 bp, synthetic construct
  misc_feature 1..20: note = Description of Artificial Sequence: Synthetic oligonucleotide
  misc_feature 1..20: note = Target: SCN10A; (+) strand; PAM type: YTN; PAM sequence: TTC
  source 1..20: mol_type = other DNA
taaactcagcttcaaccctt

SEQ ID NO: 58925 - DNA, 20 bp, synthetic construct
  misc_feature 1..20: note = Description of Artificial Sequence: Synthetic oligonucleotide
  misc_feature 1..20: note = Target: SCN10A; (+) strand; PAM type: YTN; PAM sequence: CTA
  source 1..20: mol_type = other DNA
aactcagcttcaacccttgg

SEQ ID NO: 58926 - DNA, 20 bp, synthetic construct
  misc_feature 1..20: note = Description of Artificial Sequence: Synthetic oligonucleotide
  misc_feature 1..20: note = Target: SCN10A; (+) strand; PAM type: YTN; PAM sequence: CTC
  source 1..20: mol_type = other DNA
agcttcaacccttggaaact

SEQ ID NO: 58927 - DNA, 20 bp, synthetic construct
  misc_feature 1..20: note = Description of Artificial Sequence: Synthetic oligonucleotide
  misc_feature 1..20: note = Target: SCN10A; (+) strand; PAM type: YTN; PAM sequence: CTT
  source 1..20: mol_type = other DNA
caacccttggaaactctgtg

SEQ ID NO: 58928 - DNA, 20 bp, synthetic construct
  misc_feature 1..20: note = Description of Artificial Sequence: Synthetic oligonucleotide
  misc_feature 1..20: note = Target: SCN10A; (+) strand; PAM type: YTN; PAM sequence: TTC
  source 1..20: mol_type = other DNA
aacccttggaaactctgtga

SEQ ID NO: 58929 - DNA, 20 bp, synthetic construct
  misc_feature 1..20: note = Description of Artificial Sequence: Synthetic oligonucleotide
  misc_feature 1..20: note = Target: SCN10A; (+) strand; PAM type: YTN; PAM sequence: CTT
  source 1..20: mol_type = other DNA
ggaaactctgtgaccctgca

SEQ ID NO: 58930 - DNA, 20 bp, synthetic construct
  misc_feature 1..20: note = Description of Artificial Sequence: Synthetic oligonucleotide
  misc_feature 1..20: note = Target: SCN10A; (+) strand; PAM type: YTN; PAM sequence: TTG
  source 1..20: mol_type = other DNA
gaaactctgtgaccctgcat

SEQ ID NO: 58931 - DNA, 20 bp, synthetic construct
  misc_feature 1..20: note = Description of Artificial Sequence: Synthetic oligonucleotide
  misc_feature 1..20: note = Target: SCN10A; (+) strand; PAM type: YTN; PAM sequence: CTC
  source 1..20: mol_type = other DNA
tgtgaccctgcataatattc

SEQ ID NO: 58932 - DNA, 20 bp, synthetic construct
  misc_feature 1..20: note = Description of Artificial Sequence: Synthetic oligonucleotide
  misc_feature 1..20: note = Target: SCN10A; (+) strand; PAM type: YTN; PAM sequence: CTG
  source 1..20: mol_type = other DNA
tgaccctgcataatattctt

SEQ ID NO: 58933 - DNA, 20 bp, synthetic construct
  misc_feature 1..20: note = Description of Artificial Sequence: Synthetic oligonucleotide
  misc_feature 1..20: note = Target: SCN10A; (+) strand; PAM type: YTN; PAM sequence: CTG
  source 1..20: mol_type = other DNA
cataatattcttgatctctg

SEQ ID NO: 58934 - DNA, 20 bp, synthetic construct
  misc_feature 1..20: note = Description of Artificial Sequence: Synthetic oligonucleotide
  misc_feature 1..20: note = Target: SCN10A; (+) strand; PAM type: YTN; PAM sequence: TTC
  source 1..20: mol_type = other DNA
ttgatctctgagtctcaatt

SEQ ID NO: 58935 - DNA, 20 bp, synthetic construct
  misc_feature 1..20: note = Description of Artificial Sequence: Synthetic oligonucleotide
  misc_feature 1..20: note = Target: SCN10A; (+) strand; PAM type: YTN; PAM sequence: CTT
  source 1..20: mol_type = other DNA
gatctctgagtctcaatttt

SEQ ID NO: 58936 - DNA, 20 bp, synthetic construct
  misc_feature 1..20: note = Description of Artificial Sequence: Synthetic oligonucleotide
  misc_feature 1..20: note = Target: SCN10A; (+) strand; PAM type: YTN; PAM sequence: TTG
  source 1..20: mol_type = other DNA
atctctgagtctcaatttta

SEQ ID NO: 58937 - DNA, 20 bp, synthetic construct
  misc_feature 1..20: note = Description of Artificial Sequence: Synthetic oligonucleotide
  misc_feature 1..20: note = Target: SCN10A; (+) strand; PAM type: YTN; PAM sequence: CTC
  source 1..20: mol_type = other DNA
tgagtctcaattttaaatgt

SEQ ID NO: 58938 - DNA, 20 bp, synthetic construct
  misc_feature 1..20: note = Description of Artificial Sequence: Synthetic oligonucleotide
  misc_feature 1..20: note = Target: SCN10A; (+) strand; PAM type: YTN; PAM sequence: CTG
  source 1..20: mol_type = other DNA
agtctcaattttaaatgtat

SEQ ID NO: 58939 - DNA, 20 bp, synthetic construct
  misc_feature 1..20: note = Description of Artificial Sequence: Synthetic oligonucleotide
  misc_feature 1..20: note = Target: SCN10A; (+) strand; PAM type: YTN; PAM sequence: CTC
  source 1..20: mol_type = other DNA
aattttaaatgtataaaata

SEQ ID NO: 58940 - DNA, 20 bp, synthetic construct
  misc_feature 1..20: note = Description of Artificial Sequence: Synthetic oligonucleotide
  misc_feature 1..20: note = Target: SCN10A; (+) strand; PAM type: YTN; PAM sequence: TTT
  source 1..20: mol_type = other DNA
taaatgtataaaataaggat

SEQ ID NO: 58941 - DNA, 20 bp, synthetic construct
  misc_feature 1..20: note = Description of Artificial Sequence: Synthetic oligonucleotide
  misc_feature 1..20: note = Target: SCN10A; (+) strand; PAM type: YTN; PAM sequence: TTT
  source 1..20: mol_type = other DNA
aaatgtataaaataaggata

SEQ ID NO: 58942 - DNA, 20 bp, synthetic construct
  misc_feature 1..20: note = Description of Artificial Sequence: Synthetic oligonucleotide
  misc_feature 1..20: note = Target: SCN10A; (+) strand; PAM type: YTN; PAM sequence: TTA
  source 1..20: mol_type = other DNA
aatgtataaaataaggataa

SEQ ID NO: 58943 - DNA, 20 bp, synthetic construct
  misc_feature 1..20: note = Description of Artificial Sequence: Synthetic oligonucleotide
  misc_feature 1..20: note = Target: SCN10A; (+) strand; PAM type: YTN; PAM sequence: CTG
  source 1..20: mol_type = other DNA
cttgacagggctgctgtgaa

SEQ ID NO: 58944 - DNA, 20 bp, synthetic construct
  misc_feature 1..20: note = Description of Artificial Sequence: Synthetic oligonucleotide
  misc_feature 1..20: note = Target: SCN10A; (+) strand; PAM type: YTN; PAM sequence: CTT
  source 1..20: mol_type = other DNA
gacagggctgctgtgaacat

SEQ ID NO: 58945 - DNA, 20 bp, synthetic construct
  misc_feature 1..20: note = Description of Artificial Sequence: Synthetic oligonucleotide
  misc_feature 1..20: note = Target: SCN10A; (+) strand; PAM type: YTN; PAM sequence: TTG
  source 1..20: mol_type = other DNA
acagggctgctgtgaacatt

SEQ ID NO: 58946 - DNA, 20 bp, synthetic construct
  misc_feature 1..20: note = Description of Artificial Sequence: Synthetic oligonucleotide
  misc_feature 1..20: note = Target: SCN10A; (+) strand; PAM type: YTN; PAM sequence: CTG
  source 1..20: mol_type = other DNA
ctgtgaacattcatggagcc

SEQ ID NO: 58947 - DNA, 20 bp, synthetic construct
  misc_feature 1..20: note = Description of Artificial Sequence: Synthetic oligonucleotide
  misc_feature 1..20: note = Target: SCN10A; (+) strand; PAM type: YTN; PAM sequence: CTG
  source 1..20: mol_type = other DNA
tgaacattcatggagcccag

SEQ ID NO: 58948 - DNA, 20 bp, synthetic construct
  misc_feature 1..20: note = Description of Artificial Sequence: Synthetic oligonucleotide
  misc_feature 1..20: note = Target: SCN10A; (+) strand; PAM type: YTN; PAM sequence: TTC
  source 1..20: mol_type = other DNA
atggagcccagctcagtgct

SEQ ID NO: 58949 - DNA, 20 bp, synthetic construct
  misc_feature 1..20: note = Description of Artificial Sequence: Synthetic oligonucleotide
  misc_feature 1..20: note = Target: SCN10A; (+) strand; PAM type: YTN; PAM sequence: CTC
  source 1..20: mol_type = other DNA
agtgctcagaacttaggaag

SEQ ID NO: 58950 - DNA, 20 bp, synthetic construct
  misc_feature 1..20: note = Description of Artificial Sequence: Synthetic oligonucleotide
  misc_feature 1..20: note = Target: SCN10A; (+) strand; PAM type: YTN; PAM sequence: CTC
  source 1..20: mol_type = other DNA
agaacttaggaagtattcag

SEQ ID NO: 58951 - DNA, 20 bp, synthetic construct
  misc_feature 1..20: note = Description of Artificial Sequence: Synthetic oligonucleotide
  misc_feature 1..20: note = Target: SCN10A; (+) strand; PAM type: YTN; PAM sequence: CTT
  source 1..20: mol_type = other DNA
aggaagtattcagtcaaggc

SEQ ID NO: 58952 - DNA, 20 bp, synthetic construct
  misc_feature 1..20: note = Description of Artificial Sequence: Synthetic oligonucleotide
  misc_feature 1..20: note = Target: SCN10A; (+) strand; PAM type: YTN; PAM sequence: TTA
  source 1..20: mol_type = other DNA
ggaagtattcagtcaaggca

SEQ ID NO: 58953 - DNA, 20 bp, synthetic construct
  misc_feature 1..20: note = Description of Artificial Sequence: Synthetic oligonucleotide
  misc_feature 1..20: note = Target: SCN10A; (+) strand; PAM type: YTN; PAM sequence: TTC
  source 1..20: mol_type = other DNA
agtcaaggcagctccatttc

SEQ ID NO: 58954 - DNA, 20 bp, synthetic construct
  misc_feature 1..20: note = Description of Artificial Sequence: Synthetic oligonucleotide
  misc_feature 1..20: note = Target: SCN10A; (+) strand; PAM type: YTN; PAM sequence: CTC
  source 1..20: mol_type = other DNA
catttccccatgttagcctc

SEQ ID NO: 58955 - DNA, 20 bp, synthetic construct
  misc_feature 1..20: note = Description of Artificial Sequence: Synthetic oligonucleotide
  misc_feature 1..20: note = Target: SCN10A; (+) strand; PAM type: YTN; PAM sequence: TTT
  source 1..20: mol_type = other DNA
ccccatgttagcctctaact

SEQ ID NO: 58956 - DNA, 20 bp, synthetic construct
  misc_feature 1..20: note = Description of Artificial Sequence: Synthetic oligonucleotide
  misc_feature 1..20: note = Target: SCN10A; (+) strand; PAM type: YTN; PAM sequence: TTC
  source 1..20: mol_type = other DNA
cccatgttagcctctaactc

SEQ ID NO: 58957 - DNA, 20 bp, synthetic construct
  misc_feature 1..20: note = Description of Artificial Sequence: Synthetic oligonucleotide
  misc_feature 1..20: note = Target: SCN10A; (+) strand; PAM type: YTN; PAM sequence: TTA
  source 1..20: mol_type = other DNA
gcctctaactctagtaattt

SEQ ID NO: 58958 - DNA, 20 bp, synthetic construct
  misc_feature 1..20: note = Description of Artificial Sequence: Synthetic oligonucleotide
  misc_feature 1..20: note = Target: SCN10A; (+) strand; PAM type: YTN; PAM sequence: CTC
  source 1..20: mol_type = other DNA
taactctagtaattttctct

SEQ ID NO: 58959 - DNA, 20 bp, synthetic construct
  misc_feature 1..20: note = Description of Artificial Sequence: Synthetic oligonucleotide
  misc_feature 1..20: note = Target: SCN10A; (+) strand; PAM type: YTN; PAM sequence: CTA
  source 1..20: mol_type = other DNA
actctagtaattttctctga

SEQ ID NO: 58960 - DNA, 20 bp, synthetic construct
  misc_feature 1..20: note = Description of Artificial Sequence: Synthetic oligonucleotide
  misc_feature 1..20: note = Target: SCN10A; (+) strand; PAM type: YTN; PAM sequence: CTC
  source 1..20: mol_type = other DNA
tagtaattttctctgaacac

SEQ ID NO: 58961 - DNA, 20 bp, synthetic construct
  misc_feature 1..20: note = Description of Artificial Sequence: Synthetic oligonucleotide
  misc_feature 1..20: note = Target: SCN10A; (+) strand; PAM type: YTN; PAM sequence: CTA
  source 1..20: mol_type = other DNA
gtaattttctctgaacacca

SEQ ID NO: 58962 - DNA, 20 bp, synthetic construct
  misc_feature 1..20: note = Description of Artificial Sequence: Synthetic oligonucleotide
  misc_feature 1..20: note = Target: SCN10A; (+) strand; PAM type: YTN; PAM sequence: TTT
  source 1..20: mol_type = other DNA
tctctgaacaccactggacc

SEQ ID NO: 58963 - DNA, 20 bp, synthetic construct
  misc_feature 1..20: note = Description of Artificial Sequence: Synthetic oligonucleotide
  misc_feature 1..20: note = Target: SCN10A; (+) strand; PAM type: YTN; PAM sequence: TTT
  source 1..20: mol_type = other DNA
ctctgaacaccactggaccc

SEQ ID NO: 58964 - DNA, 20 bp, synthetic construct
  misc_feature 1..20: note = Description of Artificial Sequence: Synthetic oligonucleotide
  misc_feature 1..20: note = Target: SCN10A; (+) strand; PAM type: YTN; PAM sequence: TTC
  source 1..20: mol_type = other DNA
tctgaacaccactggaccca

SEQ ID NO: 58965 - DNA, 20 bp, synthetic construct
  misc_feature 1..20: note = Description of Artificial Sequence: Synthetic oligonucleotide
  misc_feature 1..20: note = Target: SCN10A; (+) strand; PAM type: YTN; PAM sequence: CTC
  source 1..20: mol_type = other DNA
tgaacaccactggacccaaa

SEQ ID NO: 58966 - DNA, 20 bp, synthetic construct
  misc_feature 1..20: note = Description of Artificial Sequence: Synthetic oligonucleotide
  misc_feature 1..20: note = Target: SCN10A; (+) strand; PAM type: YTN; PAM sequence: CTG
  source 1..20: mol_type = other DNA
aacaccactggacccaaaat

SEQ ID NO: 58967 - DNA, 20 bp, synthetic construct
  misc_feature 1..20: note = Description of Artificial Sequence: Synthetic oligonucleotide
  misc_feature 1..20: note = Target: SCN10A; (+) strand; PAM type: YTN; PAM sequence: CTG
  source 1..20: mol_type = other DNA
gacccaaaatactgggcctg

SEQ ID NO: 58968 - DNA, 20 bp, synthetic construct
  misc_feature 1..20: note = Description of Artificial Sequence: Synthetic oligonucleotide
  misc_feature 1..20: note = Target: SCN10A; (+) strand; PAM type: YTN; PAM sequence: CTG
  source 1..20: mol_type = other DNA
ggcctgtcattcaacaacac

SEQ ID NO: 58969 - DNA, 20 bp, synthetic construct
  misc_feature 1..20: note = Description of Artificial Sequence: Synthetic oligonucleotide
  misc_feature 1..20: note = Target: SCN10A; (+) strand; PAM type: YTN; PAM sequence: CTG
  source 1..20: mol_type = other DNA
tcattcaacaacacccagac

SEQ ID NO: 58970 - DNA, 20 bp, synthetic construct
  misc_feature 1..20: note = Description of Artificial Sequence: Synthetic oligonucleotide
  misc_feature 1..20: note = Target: SCN10A; (+) strand; PAM type: YTN; PAM sequence: TTC
  source 1..20: mol_type = other DNA
aacaacacccagactgggcc

SEQ ID NO: 58971 - DNA, 20 bp, synthetic construct
  misc_feature 1..20: note = Description of Artificial Sequence: Synthetic oligonucleotide
  misc_feature 1..20: note = Target: SCN10A; (+) strand; PAM type: YTN; PAM sequence: CTG
  source 1..20: mol_type = other DNA
ggccttaacagtattaattt

SEQ ID NO: 58972 - DNA, 20 bp, synthetic construct
  misc_feature 1..20: note = Description of Artificial Sequence: Synthetic oligonucleotide
  misc_feature 1..20: note = Target: SCN10A; (+) strand; PAM type: YTN; PAM sequence: CTT
  source 1..20: mol_type = other DNA
aacagtattaatttcttggc

SEQ ID NO: 58973 - DNA, 20 bp, synthetic construct
  misc_feature 1..20: note = Description of Artificial Sequence: Synthetic oligonucleotide
  misc_feature 1..20: note = Target: SCN10A; (+) strand; PAM type: YTN; PAM sequence: TTA
  source 1..20: mol_type = other DNA
acagtattaatttcttggca

SEQ ID NO: 58974 - DNA, 20 bp, synthetic construct
  misc_feature 1..20: note = Description of Artificial Sequence: Synthetic oligonucleotide
  misc_feature 1..20: note = Target: SCN10A; (+) strand; PAM type: YTN; PAM sequence: TTA
  source 1..20: mol_type = other DNA
atttcttggcattgatatct

SEQ ID NO: 58975 - DNA, 20 bp, synthetic construct
  misc_feature 1..20: note = Description of Artificial Sequence: Synthetic oligonucleotide
  misc_feature 1..20: note = Target: SCN10A; (+) strand; PAM type: YTN; PAM sequence: TTT
  source 1..20: mol_type = other DNA
cttggcattgatatcttgac

SEQ ID NO: 58976 - DNA, 20 bp, synthetic construct
  misc_feature 1..20: note = Description of Artificial Sequence: Synthetic oligonucleotide
  misc_feature 1..20: note = Target: SCN10A; (+) strand; PAM type: YTN; PAM sequence: TTC
  source 1..20: mol_type = other DNA
ttggcattgatatcttgact

SEQ ID NO: 58977 - DNA, 20 bp, synthetic construct
  misc_feature 1..20: note = Description of Artificial Sequence: Synthetic oligonucleotide
  misc_feature 1..20: note = Target: SCN10A; (+) strand; PAM type: YTN; PAM sequence: CTT
  source 1..20: mol_type = other DNA
ggcattgatatcttgacttt

SEQ ID NO: 58978 - DNA, 20 bp, synthetic construct
  misc_feature 1..20: note = Description of Artificial Sequence: Synthetic oligonucleotide
  misc_feature 1..20: note = Target: SCN10A; (+) strand; PAM type: YTN; PAM sequence: TTG
  source 1..20: mol_type = other DNA
gcattgatatcttgactttt

SEQ ID NO: 58979 - DNA, 20 bp, synthetic construct
  misc_feature 1..20: note = Description of Artificial Sequence: Synthetic oligonucleotide
  misc_feature 1..20: note = Target: SCN10A; (+) strand; PAM type: YTN; PAM sequence: TTG
  source 1..20: mol_type = other DNA
atatcttgacttttctatca

SEQ ID NO: 58980 - DNA, 20 bp, synthetic construct
  misc_feature 1..20: note = Description of Artificial Sequence: Synthetic oligonucleotide
  misc_feature 1..20: note = Target: SCN10A; (+) strand; PAM type: YTN; PAM sequence: CTT
  source 1..20: mol_type = other DNA
gacttttctatcactcatgt

SEQ ID NO: 58981 - DNA, 20 bp, synthetic construct
  misc_feature 1..20: note = Description of Artificial Sequence: Synthetic oligonucleotide
  misc_feature 1..20: note = Target: SCN10A; (+) strand; PAM type: YTN; PAM sequence: TTG
  source 1..20: mol_type = other DNA
acttttctatcactcatgtt

SEQ ID NO: 58982 - DNA, 20 bp, synthetic construct
  misc_feature 1..20: note = Description of Artificial Sequence: Synthetic oligonucleotide
  misc_feature 1..20: note = Target: SCN10A; (+) strand; PAM type: YTN; PAM sequence: CTT
  source 1..20: mol_type = other DNA
ttctatcactcatgttccct

SEQ ID NO: 58983 - DNA, 20 bp, synthetic construct
  misc_feature 1..20: note = Description of Artificial Sequence: Synthetic oligonucleotide
  misc_feature 1..20: note = Target: SCN10A; (+) strand; PAM type: YTN; PAM sequence: TTT
  source 1..20: mol_type = other DNA
tctatcactcatgttcccta

SEQ ID NO: 58984 - DNA, 20 bp, synthetic construct
  misc_feature 1..20: note = Description of Artificial Sequence: Synthetic oligonucleotide
  misc_feature 1..20: note = Target: SCN10A; (+) strand; PAM type: YTN; PAM sequence: TTT
  source 1..20: mol_type = other DNA
ctatcactcatgttccctaa

SEQ ID NO: 58985 - DNA, 20 bp, synthetic construct
  misc_feature 1..20: note = Description of Artificial Sequence: Synthetic oligonucleotide
  misc_feature 1..20: note = Target: SCN10A; (+) strand; PAM type: YTN; PAM sequence: TTC
  source 1..20: mol_type = other DNA
tatcactcatgttccctaat

SEQ ID NO: 58986 - DNA, 20 bp, synthetic construct
  misc_feature 1..20: note = Description of Artificial Sequence: Synthetic oligonucleotide
  misc_feature 1..20: note = Target: SCN10A; (+) strand; PAM type: YTN; PAM sequence: CTA
  source 1..20: mol_type = other DNA
tcactcatgttccctaatag

SEQ ID NO: 58987 - DNA, 20 bp, synthetic construct
  misc_feature 1..20: note = Description of Artificial Sequence: Synthetic oligonucleotide
  misc_feature 1..20: note = Target: SCN10A; (+) strand; PAM type: YTN; PAM sequence: CTC
  source 1..20: mol_type = other DNA
atgttccctaatagaacagt

SEQ ID NO: 58988 - DNA, 20 bp, synthetic construct
  misc_feature 1..20: note = Description of Artificial Sequence: Synthetic oligonucleotide
  misc_feature 1..20: note = Target: SCN10A; (+) strand; PAM type: YTN; PAM sequence: TTC
  source 1..20: mol_type = other DNA
cctaatagaacagttgtgta

SEQ ID NO: 58989 - DNA, 20 bp, synthetic construct
  misc_feature 1..20: note = Description of Artificial Sequence: Synthetic oligonucleotide
  misc_feature 1..20: note = Target: SCN10A; (+) strand; PAM type: YTN; PAM sequence: CTA
  source 1..20: mol_type = other DNA
atagaacagttgtgtagaga

SEQ ID NO: 58990 - DNA, 20 bp, synthetic construct
  misc_feature 1..20: note = Description of Artificial Sequence: Synthetic oligonucleotide
  misc_feature 1..20: note = Target: SCN10A; (+) strand; PAM type: YTN; PAM sequence: TTG
  source 1..20: mol_type = other DNA
tgtagagatttaattccaga

SEQ ID NO: 58991 - DNA, 20 bp, synthetic construct
  misc_feature 1..20: note = Description of Artificial Sequence: Synthetic oligonucleotide
  misc_feature 1..20: note = Target: SCN10A; (+) strand; PAM type: YTN; PAM sequence: TTT
  source 1..20: mol_type = other DNA
aattccagaccctagacttg

SEQ ID NO: 58992 - DNA, 20 bp, synthetic construct
  misc_feature 1..20: note = Description of Artificial Sequence: Synthetic oligonucleotide
  misc_feature 1..20: note = Target: SCN10A; (+) strand; PAM type: YTN; PAM sequence: TTA
  source 1..20: mol_type = other DNA
attccagaccctagacttga

SEQ ID NO: 58993 - DNA, 20 bp, synthetic construct
  misc_feature 1..20: note = Description of Artificial Sequence: Synthetic oligonucleotide
  misc_feature 1..20: note = Target: SCN10A; (+) strand; PAM type: YTN; PAM sequence: TTC
  source 1..20: mol_type = other DNA
cagaccctagacttgagaat

SEQ ID NO: 58994 - DNA, 20 bp, synthetic construct
  misc_feature 1..20: note = Description of Artificial Sequence: Synthetic oligonucleotide
  misc_feature 1..20: note = Target: SCN10A; (+) strand; PAM type: YTN; PAM sequence: CTA
  source 1..20: mol_type = other DNA
gacttgagaatctcctttga

SEQ ID NO: 58995 - DNA, 20 bp, synthetic construct
  misc_feature 1..20: note = Description of Artificial Sequence: Synthetic oligonucleotide
  misc_feature 1..20: note = Target: SCN10A; (+) strand; PAM type: YTN; PAM sequence: CTT
  source 1..20: mol_type = other DNA
gagaatctcctttgaacaat

SEQ ID NO: 58996 - DNA, 20 bp, synthetic construct
  misc_feature 1..20: note = Description of Artificial Sequence: Synthetic oligonucleotide
  misc_feature 1..20: note = Target: SCN10A; (+) strand; PAM type: YTN; PAM sequence: TTG
  source 1..20: mol_type = other DNA
agaatctcctttgaacaatc

SEQ ID NO: 58997 - DNA, 20 bp, synthetic construct
  misc_feature 1..20: note = Description of Artificial Sequence: Synthetic oligonucleotide
  misc_feature 1..20: note = Target: SCN10A; (+) strand; PAM type: YTN; PAM sequence: CTC
  source 1..20: mol_type = other DNA
ctttgaacaatctcctccca

SEQ ID NO: 58998 - DNA, 20 bp, synthetic construct
  misc_feature 1..20: note = Description of Artificial Sequence: Synthetic oligonucleotide
  misc_feature 1..20: note = Target: SCN10A; (+) strand; PAM type: YTN; PAM sequence: CTT
  source 1..20: mol_type = other DNA
tgaacaatctcctcccagtc

SEQ ID NO: 58999 - DNA, 20 bp, synthetic construct
  misc_feature 1..20: note = Description of Artificial Sequence: Synthetic oligonucleotide
  misc_feature 1..20: note = Target: SCN10A; (+) strand; PAM type: YTN; PAM sequence: TTT
  source 1..20: mol_type = other DNA
gaacaatctcctcccagtct

SEQ ID NO: 59000 - DNA, 20 bp, synthetic construct
  misc_feature 1..20: note = Description of Artificial Sequence: Synthetic oligonucleotide
  misc_feature 1..20: note = Target: SCN10A; (+) strand; PAM type: YTN; PAM sequence: TTG
  source 1..20: mol_type = other DNA
aacaatctcctcccagtctt

SEQ ID NO: 59001 - DNA, 20 bp, synthetic construct
  misc_feature 1..20: note = Description of Artificial Sequence: Synthetic oligonucleotide
  misc_feature 1..20: note = Target: SCN10A; (+) strand; PAM type: YTN; PAM sequence: CTC
  source 1..20: mol_type = other DNA
ctcccagtctttcctcactt

SEQ ID NO: 59002 - DNA, 20 bp, synthetic construct
  misc_feature 1..20: note = Description of Artificial Sequence: Synthetic oligonucleotide
  misc_feature 1..20: note = Target: SCN10A; (+) strand; PAM type: YTN; PAM sequence: CTC
  source 1..20: mol_type = other DNA
ccagtctttcctcactttga

SEQ ID NO: 59003 - DNA, 20 bp, synthetic construct
  misc_feature 1..20: note = Description of Artificial Sequence: Synthetic oligonucleotide
  misc_feature 1..20: note = Target: SCN10A; (+) strand; PAM type: YTN; PAM sequence: CTT
  source 1..20: mol_type = other DNA
tcctcactttgatggcaatc

SEQ ID NO: 59004 - DNA, 20 bp, synthetic construct
  misc_feature 1..20: note = Description of Artificial Sequence: Synthetic oligonucleotide
  misc_feature 1..20: note = Target: SCN10A; (+) strand; PAM type: YTN; PAM sequence: TTT
  source 1..20: mol_type = other DNA
cctcactttgatggcaatcc

SEQ ID NO: 59005 - DNA, 20 bp, synthetic construct
  misc_feature 1..20: note = Description of Artificial Sequence: Synthetic oligonucleotide
  misc_feature 1..20: note = Target: SCN10A; (+) strand; PAM type: YTN; PAM sequence: TTC
  source 1..20: mol_type = other DNA
ctcactttgatggcaatcca

SEQ ID NO: 59006 - DNA, 20 bp, synthetic construct
  misc_feature 1..20: note = Description of Artificial Sequence: Synthetic oligonucleotide
  misc_feature 1..20: note = Target: SCN10A; (+) strand; PAM type: YTN; PAM sequence: CTC
  source 1..20: mol_type = other DNA
actttgatggcaatccatct

SEQ ID NO: 59007 - DNA, 20 bp, synthetic construct
  misc_feature 1..20: note = Description of Artificial Sequence: Synthetic oligonucleotide
  misc_feature 1..20: note = Target: SCN10A; (+) strand; PAM type: YTN; PAM sequence: CTT
  source 1..20: mol_type = other DNA
tgatggcaatccatctcctt

SEQ ID NO: 59008 - DNA, 20 bp, synthetic construct
  misc_feature 1..20: note = Description of Artificial Sequence: Synthetic oligonucleotide
  misc_feature 1..20: note = Target: SCN10A; (+) strand; PAM type: YTN; PAM sequence: TTT
  source 1..20: mol_type = other DNA
gatggcaatccatctccttt

SEQ ID NO: 59009 - DNA, 20 bp, synthetic construct
  misc_feature 1..20: note = Description of Artificial Sequence: Synthetic oligonucleotide
  misc_feature 1..20: note = Target: SCN10A; (+) strand; PAM type: YTN; PAM sequence: TTG
  source 1..20: mol_type = other DNA
atggcaatccatctcctttt

SEQ ID NO: 59010 - DNA, 20 bp, synthetic construct
  misc_feature 1..20: note = Description of Artificial Sequence: Synthetic oligonucleotide
  misc_feature 1..20: note = Target: SCN10A; (+) strand; PAM type: YTN; PAM sequence: CTC
  source 1..20: mol_type = other DNA
cttttccagaacagatttta

SEQ ID NO: 59011 - DNA, 20 bp, synthetic construct
  misc_feature 1..20: note = Description of Artificial Sequence: Synthetic oligonucleotide
  misc_feature 1..20: note = Target: SCN10A; (+) strand; PAM type: YTN; PAM sequence: CTT
  source 1..20: mol_type = other DNA
ttccagaacagattttaaga

SEQ ID NO: 59012 - DNA, 20 bp, synthetic construct
  misc_feature 1..20: note = Description of Artificial Sequence: Synthetic oligonucleotide
  misc_feature 1..20: note = Target: SCN10A; (+) strand; PAM type: YTN; PAM sequence: TTT
  source 1..20: mol_type = other DNA
tccagaacagattttaagac

SEQ ID NO: 59013 - DNA, 20 bp, synthetic construct
  misc_feature 1..20: note = Description of Artificial Sequence: Synthetic oligonucleotide
  misc_feature 1..20: note = Target: SCN10A; (+) strand; PAM type: YTN; PAM sequence: TTT
  source 1..20: mol_type = other DNA
ccagaacagattttaagact

SEQ ID NO: 59014 - DNA, 20 bp, synthetic construct
  misc_feature 1..20: note = Description of Artificial Sequence: Synthetic oligonucleotide
  misc_feature 1..20: note = Target: SCN10A; (+) strand; PAM type: YTN; PAM sequence: TTC
  source 1..20: mol_type = other DNA
cagaacagattttaagactc

SEQ ID NO: 59015 - DNA, 20 bp, synthetic construct
  misc_feature 1..20: note = Description of Artificial Sequence: Synthetic oligonucleotide
  misc_feature 1..20: note = Target: SCN10A; (+) strand; PAM type: YTN; PAM sequence: TTT
  source 1..20: mol_type = other DNA
taagactcatctcacattac

SEQ ID NO: 59016 - DNA, 20 bp, synthetic construct
  misc_feature 1..20: note = Description of Artificial Sequence: Synthetic oligonucleotide
  misc_feature 1..20: note = Target: SCN10A; (+) strand; PAM type: YTN; PAM sequence: TTT
  source 1..20: mol_type = other DNA
aagactcatctcacattaca

SEQ ID NO: 59017 - DNA, 20 bp, synthetic construct
  misc_feature 1..20: note = Description of Artificial Sequence: Synthetic oligonucleotide
  misc_feature 1..20: note = Target: SCN10A; (+) strand; PAM type: YTN; PAM sequence: TTA
  source 1..20: mol_type = other DNA
agactcatctcacattacac

SEQ ID NO: 59018 - DNA, 20 bp, synthetic construct
  misc_feature 1..20: note = Description of Artificial Sequence: Synthetic oligonucleotide
  misc_feature 1..20: note = Target: SCN10A; (+) strand; PAM type: YTN; PAM sequence: CTC
  source 1..20: mol_type = other DNA
atctcacattacaccacctg

SEQ ID NO: 59019 - DNA, 20 bp, synthetic construct
  misc_feature 1..20: note = Description of Artificial Sequence: Synthetic oligonucleotide
  misc_feature 1..20: note = Target: SCN10A; (+) strand; PAM type: YTN; PAM sequence: CTC
  source 1..20: mol_type = other DNA
acattacaccacctgccccc

SEQ ID NO: 59020 - DNA, 20 bp, synthetic construct
  misc_feature 1..20: note = Description of Artificial Sequence: Synthetic oligonucleotide
  misc_feature 1..20: note = Target: SCN10A; (+) strand; PAM type: YTN; PAM sequence: TTA
  source 1..20: mol_type = other DNA
caccacctgccccctgcttt

SEQ ID NO: 59021 - DNA, 20 bp, synthetic construct
  misc_feature 1..20: note = Description of Artificial Sequence: Synthetic oligonucleotide
  misc_feature 1..20: note = Target: SCN10A; (+) strand; PAM type: YTN; PAM sequence: CTG
  source 1..20: mol_type = other DNA
ccccctgctttcaagaccat

SEQ ID NO: 59022 - DNA, 20 bp, synthetic construct
  misc_feature 1..20: note = Description of Artificial Sequence: Synthetic oligonucleotide
  misc_feature 1..20: note = Target: SCN10A; (+) strand; PAM type: YTN; PAM sequence: CTG
  source 1..20: mol_type = other DNA
ctttcaagaccataaaagta

SEQ ID NO: 59023 - DNA, 20 bp, synthetic construct
  misc_feature 1..20: note = Description of Artificial Sequence: Synthetic oligonucleotide
  misc_feature 1..20: note = Target: SCN10A; (+) strand; PAM type: YTN; PAM sequence: CTT
  source 1..20: mol_type = other DNA
tcaagaccataaaagtaagg

SEQ ID NO: 59024 - DNA, 20 bp, synthetic construct
  misc_feature 1..20: note = Description of Artificial Sequence: Synthetic oligonucleotide
  misc_feature 1..20: note = Target: SCN10A; (+) strand; PAM type: YTN; PAM sequence: TTT
  source 1..20: mol_type = other DNA
caagaccataaaagtaaggt

SEQ ID NO: 59025 - DNA, 20 bp, synthetic construct
  misc_feature 1..20: note = Description of Artificial Sequence: Synthetic oligonucleotide
  misc_feature 1..20: note = Target: SCN10A; (+) strand; PAM type: YTN; PAM sequence: TTC
  source 1..20: mol_type = other DNA
aagaccataaaagtaaggtc

SEQ ID NO: 59026 - DNA, 20 bp, synthetic construct
  misc_feature 1..20: note = Description of Artificial Sequence: Synthetic oligonucleotide
  misc_feature 1..20: note = Target: SCN10A; (+) strand; PAM type: YTN; PAM sequence: CTG
  source 1..20: mol_type = other DNA
ctggagactccatcatctta

SEQ ID NO: 59027 - DNA, 20 bp, synthetic construct
  misc_feature 1..20: note = Description of Artificial Sequence: Synthetic oligonucleotide
  misc_feature 1..20: note = Target: SCN10A; (+) strand; PAM type: YTN; PAM sequence: CTG
  source 1..20: mol_type = other DNA
gagactccatcatcttacgg

SEQ ID NO: 59028 - DNA, 20 bp, synthetic construct
  misc_feature 1..20: note = Description of Artificial Sequence: Synthetic oligonucleotide
  misc_feature 1..20: note = Target: SCN10A; (+) strand; PAM type: YTN; PAM sequence: CTC
  source 1..20: mol_type = other DNA
catcatcttacggtctgagg

SEQ ID NO: 59029 - DNA, 20 bp, synthetic construct
  misc_feature 1..20: note = Description of Artificial Sequence: Synthetic oligonucleotide
  misc_feature 1..20: note = Target: SCN10A; (+) strand; PAM type: YTN; PAM sequence: CTT
  source 1..20: mol_type = other DNA
acggtctgaggttctcagga

SEQ ID NO: 59030 - DNA, 20 bp, synthetic construct
  misc_feature 1..20: note = Description of Artificial Sequence: Synthetic oligonucleotide
  misc_feature 1..20: note = Target: SCN10A; (+) strand; PAM type: YTN; PAM sequence: TTA
  source 1..20: mol_type = other DNA
cggtctgaggttctcaggag

SEQ ID NO: 59031 - DNA, 20 bp, synthetic construct
  misc_feature 1..20: note = Description of Artificial Sequence: Synthetic oligonucleotide
  misc_feature 1..20: note = Target: SCN10A; (+) strand; PAM type: YTN; PAM sequence: CTG
  source 1..20: mol_type = other DNA
aggttctcaggaggagtgat

SEQ ID NO: 59032 - DNA, 20 bp, synthetic construct
  misc_feature 1..20: note = Description of Artificial Sequence: Synthetic oligonucleotide
  misc_feature 1..20: note = Target: SCN10A; (+) strand; PAM type: YTN; PAM sequence: TTC
  source 1..20: mol_type = other DNA
tcaggaggagtgattattcc

SEQ ID NO: 59033 - DNA, 20 bp, synthetic construct
  misc_feature 1..20: note = Description of Artificial Sequence: Synthetic oligonucleotide
  misc_feature 1..20: note = Target: SCN10A; (+) strand; PAM type: YTN; PAM sequence: CTC
  source 1..20: mol_type = other DNA
aggaggagtgattattccct

SEQ ID NO: 59034 - DNA, 20 bp, synthetic construct
  misc_feature 1..20: note = Description of Artificial Sequence: Synthetic oligonucleotide
  misc_feature 1..20: note = Target: SCN10A; (+) strand; PAM type: YTN; PAM sequence: TTA
  source 1..20: mol_type = other DNA
ttccctgtcagcccctgagg

SEQ ID NO: 59035 - DNA, 20 bp, synthetic construct
  misc_feature 1..20: note = Description of Artificial Sequence: Synthetic oligonucleotide
  misc_feature 1..20: note = Target: SCN10A; (+) strand; PAM type: YTN; PAM sequence: TTC
  source 1..20: mol_type = other DNA
cctgtcagcccctgaggttc

SEQ ID NO: 59036 - DNA, 20 bp, synthetic construct
  misc_feature 1..20: note = Description of Artificial Sequence: Synthetic oligonucleotide
  misc_feature 1..20: note = Target: SCN10A; (+) strand; PAM type: YTN; PAM sequence: CTG
  source 1..20: mol_type = other DNA
tcagcccctgaggttctagc

SEQ ID NO: 59037 - DNA, 20 bp, synthetic construct
  misc_feature 1..20: note = Description of Artificial Sequence: Synthetic oligonucleotide
  misc_feature 1..20: note = Target: SCN10A; (+) strand; PAM type: YTN; PAM sequence: CTG
  source 1..20: mol_type = other DNA
aggttctagccatgggctgt

SEQ ID NO: 59038 - DNA, 20 bp, synthetic construct
  misc_feature 1..20: note = Description of Artificial Sequence: Synthetic oligonucleotide
  misc_feature 1..20: note = Target: SCN10A; (+) strand; PAM type: YTN; PAM sequence: TTC
  source 1..20: mol_type = other DNA
tagccatgggctgtgcacac

SEQ ID NO: 59039 - DNA, 20 bp, synthetic construct
  misc_feature 1..20: note = Description of Artificial Sequence: Synthetic oligonucleotide
  misc_feature 1..20: note = Target: SCN10A; (+) strand; PAM type: YTN; PAM sequence: CTA
  source 1..20: mol_type = other DNA
gccatgggctgtgcacacag

SEQ ID NO: 59040 - DNA, 20 bp, synthetic construct
  misc_feature 1..20: note = Description of Artificial Sequence: Synthetic oligonucleotide
  misc_feature 1..20: note = Target: SCN10A; (+) strand; PAM type: YTN; PAM sequence: CTG
  source 1..20: mol_type = other DNA
tgcacacagtaggtgcctga

SEQ ID NO: 59041 - DNA, 20 bp, synthetic construct
  misc_feature 1..20: note = Description of Artificial Sequence: Synthetic oligonucleotide
  misc_feature 1..20: note = Target: SCN10A; (+) strand; PAM type: YTN; PAM sequence: CTG
  source 1..20: mol_type = other DNA
aaaacacttcgtgtgagcat

SEQ ID NO: 59042 - DNA, 20 bp, synthetic construct
  misc_feature 1..20: note = Description of Artificial Sequence: Synthetic oligonucleotide
  misc_feature 1..20: note = Target: SCN10A; (+) strand; PAM type: YTN; PAM sequence: CTT
  source 1..20: mol_type = other DNA
cgtgtgagcatggagaaggc

SEQ ID NO: 59043 - DNA, 20 bp, synthetic construct
  misc_feature 1..20: note = Description of Artificial Sequence: Synthetic oligonucleotide
  misc_feature 1..20: note = Target: SCN10A; (+) strand; PAM type: YTN; PAM sequence: TTC
  source 1..20: mol_type = other DNA
gtgtgagcatggagaaggcc

SEQ ID NO: 59044 - DNA, 20 bp, synthetic construct
  misc_feature 1..20: note = Description of Artificial Sequence: Synthetic oligonucleotide
  misc_feature 1..20: note = Target: SCN10A; (+) strand; PAM type: YTN; PAM sequence: CTC
  source 1..20: mol_type = other DNA
ttcatttcactgagagagca

SEQ ID NO: 59045 - DNA, 20 bp, synthetic construct
  misc_feature 1..20: note = Description of Artificial Sequence: Synthetic oligonucleotide
  misc_feature 1..20: note = Target: SCN10A; (+) strand; PAM type: YTN; PAM sequence: CTT
  source 1..20: mol_type = other DNA
catttcactgagagagcagc

SEQ ID NO: 59046 - DNA, 20 bp, synthetic construct
  misc_feature 1..20: note = Description of Artificial Sequence: Synthetic oligonucleotide
  misc_feature 1..20: note = Target: SCN10A; (+) strand; PAM type: YTN; PAM sequence: TTC
  source 1..20: mol_type = other DNA
atttcactgagagagcagcc

SEQ ID NO: 59047 - DNA, 20 bp, synthetic construct
  misc_feature 1..20: note = Description of Artificial Sequence: Synthetic oligonucleotide
  misc_feature 1..20: note = Target: SCN10A; (+) strand; PAM type: YTN; PAM sequence: TTT
  source 1..20: mol_type = other DNA
cactgagagagcagcccaag

SEQ ID NO: 59048 - DNA, 20 bp, synthetic construct
  misc_feature 1..20: note = Description of Artificial Sequence: Synthetic oligonucleotide
  misc_feature 1..20: note = Target: SCN10A; (+) strand; PAM type: YTN; PAM sequence: TTC
  source 1..20: mol_type = other DNA
actgagagagcagcccaagg

SEQ ID NO: 59049 - DNA, 20 bp, synthetic construct
  misc_feature 1..20: note = Description of Artificial Sequence: Synthetic oligonucleotide
  misc_feature 1..20: note = Target: SCN10A; (+) strand; PAM type: YTN; PAM sequence: CTG
  source 1..20: mol_type = other DNA
agagagcagcccaaggcatt

SEQ ID NO: 59050 - DNA, 20 bp, synthetic construct
  misc_feature 1..20: note = Description of Artificial Sequence: Synthetic oligonucleotide
  misc_feature 1..20: note = Target: SCN10A; (+) strand; PAM type: YTN; PAM sequence: TTT
  source 1..20: mol_type = other DNA
aaaacttgctactcttggaa

SEQ ID NO: 59051 - DNA, 20 bp, synthetic construct
  misc_feature 1..20: note = Description of Artificial Sequence: Synthetic oligonucleotide
  misc_feature 1..20: note = Target: SCN10A; (+) strand; PAM type: YTN; PAM sequence: TTA
  source 1..20: mol_type = other DNA
aaacttgctactcttggaaa

SEQ ID NO: 59052 - DNA, 20 bp, synthetic construct
  misc_feature 1..20: note = Description of Artificial Sequence: Synthetic oligonucleotide
  misc_feature 1..20: note = Target: SCN10A; (+) strand; PAM type: YTN; PAM sequence: CTT
  source 1..20: mol_type = other DNA
gctactcttggaaagctgca

SEQ ID NO: 59053 - DNA, 20 bp, synthetic construct
  misc_feature 1..20: note = Description of Artificial Sequence: Synthetic oligonucleotide
  misc_feature 1..20: note = Target: SCN10A; (+) strand; PAM type: YTN; PAM sequence: TTG
  source 1..20: mol_type = other DNA
ctactcttggaaagctgcaa

SEQ ID NO: 59054 - DNA, 20 bp, synthetic construct
  misc_feature 1..20: note = Description of Artificial Sequence: Synthetic oligonucleotide
  misc_feature 1..20: note = Target: SCN10A; (+) strand; PAM type: YTN; PAM sequence: CTA
  source 1..20: mol_type = other DNA
ctcttggaaagctgcaaata

SEQ ID NO: 59055 - DNA, 20 bp, synthetic construct
  misc_feature 1..20: note = Description of Artificial Sequence: Synthetic oligonucleotide
  misc_feature 1..20: note = Target: SCN10A; (+) strand; PAM type: YTN; PAM sequence: CTC
  source 1..20: mol_type = other DNA
ttggaaagctgcaaatacag

SEQ ID NO: 59056 - DNA, 20 bp, synthetic construct
  misc_feature 1..20: note = Description of Artificial Sequence: Synthetic oligonucleotide
  misc_feature 1..20: note = Target: SCN10A; (+) strand; PAM type: YTN; PAM sequence: CTT
  source 1..20: mol_type = other DNA
ggaaagctgcaaatacaggg

SEQ ID NO: 59057 - DNA, 20 bp, synthetic construct
  misc_feature 1..20: note = Description of Artificial Sequence: Synthetic oligonucleotide
  misc_feature 1..20: note = Target: SCN10A; (+) strand; PAM type: YTN; PAM sequence: TTG
  source 1..20: mol_type = other DNA
gaaagctgcaaatacagggt

SEQ ID NO: 59058 - DNA, 20 bp, synthetic construct
  misc_feature 1..20: note = Description of Artificial Sequence: Synthetic oligonucleotide
  misc_feature 1..20: note = Target: SCN10A; (+) strand; PAM type: YTN; PAM sequence: CTG
  source 1..20: mol_type = other DNA
caaatacagggttcttctaa

SEQ ID NO: 59059 - DNA, 20 bp, synthetic construct
  misc_feature 1..20: note = Description of Artificial Sequence: Synthetic oligonucleotide
  misc_feature 1..20: note = Target: SCN10A; (+) strand; PAM type: YTN; PAM sequence: TTC
  source 1..20: mol_type = other DNA
ttctaacataaacacgtatt

SEQ ID NO: 59060 - DNA, 20 bp, synthetic construct
  misc_feature 1..20: note = Description of Artificial Sequence: Synthetic oligonucleotide
  misc_feature 1..20: note = Target: SCN10A; (+) strand; PAM type: YTN; PAM sequence: CTT
  source 1..20: mol_type = other DNA
ctaacataaacacgtatttc

SEQ ID NO: 59061 - DNA, 20 bp, synthetic construct
  misc_feature 1..20: note = Description of Artificial Sequence: Synthetic oligonucleotide
  misc_feature 1..20: note = Target: SCN10A; (+) strand; PAM type: YTN; PAM sequence: TTC
  source 1..20: mol_type = other DNA
taacataaacacgtatttca

SEQ ID NO: 59062 - DNA, 20 bp, synthetic construct
  misc_feature 1..20: note = Description of Artificial Sequence: Synthetic oligonucleotide
  misc_feature 1..20: note = Target: SCN10A; (+) strand; PAM type: YTN; PAM sequence: CTA
  source 1..20: mol_type = other DNA
acataaacacgtatttcaaa

SEQ ID NO: 59063 - DNA, 20 bp, synthetic construct
  misc_feature 1..20: note = Description of Artificial Sequence: Synthetic oligonucleotide
  misc_feature 1..20: note = Target: SCN10A; (+) strand; PAM type: YTN; PAM sequence: TTT
  source 1..20: mol_type = other DNA
caaaaagttggttggttatt

SEQ ID NO: 59064 - DNA, 20 bp, synthetic construct
  misc_feature 1..20: note = Description of Artificial Sequence: Synthetic oligonucleotide
  misc_feature 1..20: note = Target: SCN10A; (+) strand; PAM type: YTN; PAM sequence: TTC
  source 1..20: mol_type = other DNA
aaaaagttggttggttattt

SEQ ID NO: 59065 - DNA, 20 bp, synthetic construct
  misc_feature 1..20: note = Description of Artificial Sequence: Synthetic oligonucleotide
  misc_feature 1..20: note = Target: SCN10A; (+) strand; PAM type: YTN; PAM sequence: TTG
  source 1..20: mol_type = other DNA
gttggttatttccttggttt

SEQ ID NO: 59066 - DNA, 20 bp, synthetic construct
  misc_feature 1..20: note = Description of Artificial Sequence: Synthetic oligonucleotide
  misc_feature 1..20: note = Target: SCN10A; (+) strand; PAM type: YTN; PAM sequence: TTG
  source 1..20: mol_type = other DNA
gttatttccttggttttaga

SEQ ID NO: 59067 - DNA, 20 bp, synthetic construct
  misc_feature 1..20: note = Description of Artificial Sequence: Synthetic oligonucleotide
  misc_feature 1..20: note = Target: SCN10A; (+) strand; PAM type: YTN; PAM sequence: TTA
  source 1..20: mol_type = other DNA
tttccttggttttagaagag

SEQ ID NO: 59068 - DNA, 20 bp, synthetic construct
  misc_feature 1..20: note = Description of Artificial Sequence: Synthetic oligonucleotide
  misc_feature 1..20: note = Target: SCN10A; (+) strand; PAM type: YTN; PAM sequence: TTT
  source 1..20: mol_type = other DNA
ccttggttttagaagagcat

SEQ ID NO: 59069 - DNA, 20 bp, synthetic construct
  misc_feature 1..20: note = Description of Artificial Sequence: Synthetic oligonucleotide
  misc_feature 1..20: note = Target: SCN10A; (+) strand; PAM type: YTN; PAM sequence: TTC
  source 1..20: mol_type = other DNA
cttggttttagaagagcatc

SEQ ID NO: 59070 - DNA, 20 bp, synthetic construct
  misc_feature 1..20: note = Description of Artificial Sequence: Synthetic oligonucleotide
  misc_feature 1..20: note = Target: SCN10A; (+) strand; PAM type: YTN; PAM sequence: CTT
  source 1..20: mol_type = other DNA
ggttttagaagagcatccca

SEQ ID NO: 59071 - DNA, 20 bp, synthetic construct
  misc_feature 1..20: note = Description of Artificial Sequence: Synthetic oligonucleotide
  misc_feature 1..20: note = Target: SCN10A; (+) strand; PAM type: YTN; PAM sequence: TTG
  source 1..20: mol_type = other DNA
gttttagaagagcatcccaa

SEQ ID NO: 59072 - DNA, 20 bp, synthetic construct
  misc_feature 1..20: note = Description of Artificial Sequence: Synthetic oligonucleotide
  misc_feature 1..20: note = Target: SCN10A; (+) strand; PAM type: YTN; PAM sequence: TTT
  source 1..20: mol_type = other DNA
tagaagagcatcccaaagac

SEQ ID NO: 59073 - DNA, 20 bp, synthetic construct
  misc_feature 1..20: note = Description of Artificial Sequence: Synthetic oligonucleotide
  misc_feature 1..20: note = Target: SCN10A; (+) strand; PAM type: YTN; PAM sequence: TTT
  source 1..20: mol_type = other DNA
agaagagcatcccaaagacc

SEQ ID NO: 59074 - DNA, 20 bp, synthetic construct
  misc_feature 1..20: note = Description of Artificial Sequence: Synthetic oligonucleotide
  misc_feature 1..20: note = Target: SCN10A; (+) strand; PAM type: YTN; PAM sequence: TTA
  source 1..20: mol_type = other DNA
gaagagcatcccaaagaccc

SEQ ID NO: 59075 - DNA, 20 bp, synthetic construct
  misc_feature 1..20: note = Description of Artificial Sequence: Synthetic oligonucleotide
  misc_feature 1..20: note = Target: SCN10A; (+) strand; PAM type: YTN; PAM sequence: CTT
  source 1..20: mol_type = other DNA
ccccaccacgtggctgccca

SEQ ID NO: 59076 - DNA, 20 bp, synthetic construct
  misc_feature 1..20: note = Description of Artificial Sequence: Synthetic oligonucleotide
  misc_feature 1..20: note = Target: SCN10A; (+) strand; PAM type: YTN; PAM sequence: TTC
  source 1..20: mol_type = other DNA
cccaccacgtggctgcccac

SEQ ID NO: 59077 - DNA, 20 bp, synthetic construct
  misc_feature 1..20: note = Description of Artificial Sequence: Synthetic oligonucleotide
  misc_feature 1..20: note = Target: SCN10A; (+) strand; PAM type: YTN; PAM sequence: CTG
  source 1..20: mol_type = other DNA
cccacttactcgcaatggag

SEQ ID NO: 59078 - DNA, 20 bp, synthetic construct
  misc_feature 1..20: note = Description of Artificial Sequence: Synthetic oligonucleotide
  misc_feature 1..20: note = Target: SCN10A; (+) strand; PAM type: YTN; PAM sequence: CTT
  source 1..20: mol_type = other DNA
actcgcaatggagagaacca

SEQ ID NO: 59079 - DNA, 20 bp, synthetic construct
  misc_feature 1..20: note = Description of Artificial Sequence: Synthetic oligonucleotide
  misc_feature 1..20: note = Target: SCN10A; (+) strand; PAM type: YTN; PAM sequence: TTA
  source 1..20: mol_type = other DNA
ctcgcaatggagagaaccac

SEQ ID NO: 59080 - DNA, 20 bp, synthetic construct
  misc_feature 1..20: note = Description of Artificial Sequence: Synthetic oligonucleotide
  misc_feature 1..20: note = Target: SCN10A; (+) strand; PAM type: YTN; PAM sequence: CTC
  source 1..20: mol_type = other DNA
gcaatggagagaaccaccac

SEQ ID NO: 59081 - DNA, 20 bp, synthetic construct
  misc_feature 1..20: note = Description of Artificial Sequence: Synthetic oligonucleotide
  misc_feature 1..20: note = Target: SCN10A; (+) strand; PAM type: YTN; PAM sequence: TTC
  source 1..20: mol_type = other DNA
cagccatttgtgaagtagta

SEQ ID NO: 59082 - DNA, 20 bp, synthetic construct
  misc_feature 1..20: note = Description of Artificial Sequence: Synthetic oligonucleotide
  misc_feature 1..20: note = Target: SCN10A; (+) strand; PAM type: YTN; PAM sequence: TTT
  source 1..20: mol_type = other DNA
gtgaagtagtactgcctcaa

SEQ ID NO: 59083 - DNA, 20 bp, synthetic construct
  misc_feature 1..20: note = Description of Artificial Sequence: Synthetic oligonucleotide
  misc_feature 1..20: note = Target: SCN10A; (+) strand; PAM type: YTN; PAM sequence: TTG
  source 1..20: mol_type = other DNA
tgaagtagtactgcctcaaa

SEQ ID NO: 59084 - DNA, 20 bp, synthetic construct
  misc_feature 1..20: note = Description of Artificial Sequence: Synthetic oligonucleotide
  misc_feature 1..20: note = Target: SCN10A; (+) strand; PAM type: YTN; PAM sequence: CTG
  source 1..20: mol_type = other DNA
cctcaaagcgaacatcttca

SEQ ID NO: 59085 - DNA, 20 bp, synthetic construct
  misc_feature 1..20: note = Description of Artificial Sequence: Synthetic oligonucleotide
  misc_feature 1..20: note = Target: SCN10A; (+) strand; PAM type: YTN; PAM sequence: CTC
  source 1..20: mol_type = other DNA
aaagcgaacatcttcatgac

SEQ ID NO: 59086 - DNA, 20 bp, synthetic construct
  misc_feature 1..20: note = Description of Artificial Sequence: Synthetic oligonucleotide
  misc_feature 1..20: note = Target: SCN10A; (+) strand; PAM type: YTN; PAM sequence: CTT
  source 1..20: mol_type = other DNA
catgacacattcgcctgtga

SEQ ID NO: 59087 - DNA, 20 bp, synthetic construct
  misc_feature 1..20: note = Description of Artificial Sequence: Synthetic oligonucleotide
  misc_feature 1..20: note = Target: SCN10A; (+) strand; PAM type: YTN; PAM sequence: TTC
  source 1..20: mol_type = other DNA
atgacacattcgcctgtgaa

SEQ ID NO: 59088 - DNA, 20 bp, synthetic construct
  misc_feature 1..20: note = Description of Artificial Sequence: Synthetic oligonucleotide
  misc_feature 1..20: note = Target: SCN10A; (+) strand; PAM type: YTN; PAM sequence: TTC
  source 1..20: mol_type = other DNA
gcctgtgaagacggccacaa

SEQ ID NO: 59089 - DNA, 20 bp, synthetic construct
  misc_feature 1..20: note = Description of Artificial Sequence: Synthetic oligonucleotide
  misc_feature 1..20: note = Target: SCN10A; (+) strand; PAM type: YTN; PAM sequence: CTG
  source 1..20: mol_type = other DNA
tgaagacggccacaaagaac

SEQ ID NO: 59090 - DNA, 20 bp, synthetic construct
  misc_feature 1..20: note = Description of Artificial Sequence: Synthetic oligonucleotide
  misc_feature 1..20: note = Target: SCN10A; (+) strand; PAM type: YTN; PAM sequence: CTG
  source 1..20: mol_type = other DNA
gttgattttgcccagaattt

SEQ ID NO: 59091 - DNA, 20 bp, synthetic construct
  misc_feature 1..20: note = Description of Artificial Sequence: Synthetic oligonucleotide
  misc_feature 1..20: note = Target: SCN10A; (+) strand; PAM type: YTN; PAM sequence: TTG
  source 1..20: mol_type = other DNA
attttgcccagaattttcgt

SEQ ID NO: 59092 - DNA, 20 bp, synthetic construct
  misc_feature 1..20: note = Description of Artificial Sequence: Synthetic oligonucleotide
  misc_feature 1..20: note = Target: SCN10A; (+) strand; PAM type: YTN; PAM sequence: TTT
  source 1..20: mol_type = other DNA
tgcccagaattttcgtcttt

SEQ ID NO: 59093 - DNA, 20 bp, synthetic construct
  misc_feature 1..20: note = Description of Artificial Sequence: Synthetic oligonucleotide
  misc_feature 1..20: note = Target: SCN10A; (+) strand; PAM type: YTN; PAM sequence: TTT
  source 1..20: mol_type = other DNA
gcccagaattttcgtctttt

SEQ ID NO: 59094 - DNA, 20 bp, synthetic construct
  misc_feature 1..20: note = Description of Artificial Sequence: Synthetic oligonucleotide
  misc_feature 1..20: note = Target: SCN10A; (+) strand; PAM type: YTN; PAM sequence: TTG
  source 1..20: mol_type = other DNA
cccagaattttcgtcttttc

SEQ ID NO: 59095 - DNA, 20 bp, synthetic construct
  misc_feature 1..20: note = Description of Artificial Sequence: Synthetic oligonucleotide
  misc_feature 1..20: note = Target: SCN10A; (+) strand; PAM type: YTN; PAM sequence: TTT
  source 1..20: mol_type = other DNA
tcgtcttttcttcactttgg

SEQ ID NO: 59096 - DNA, 20 bp, synthetic construct
  misc_feature 1..20: note = Description of Artificial Sequence: Synthetic oligonucleotide
  misc_feature 1..20: note = Target: SCN10A; (+) strand; PAM type: YTN; PAM sequence: TTT
  source 1..20: mol_type = other DNA
cgtcttttcttcactttggt

SEQ ID NO: 59097 - DNA, 20 bp, synthetic construct
  misc_feature 1..20: note = Description of Artificial Sequence: Synthetic oligonucleotide
  misc_feature 1..20: note = Target: SCN10A; (+) strand; PAM type: YTN; PAM sequence: TTC
  source 1..20: mol_type = other DNA
gtcttttcttcactttggtc

SEQ ID NO: 59098 - DNA, 20 bp, synthetic construct
  misc_feature 1..20: note = Description of Artificial Sequence: Synthetic oligonucleotide
  misc_feature 1..20: note = Target: SCN10A; (+) strand; PAM type: YTN; PAM sequence: CTT
  source 1..20: mol_type = other DNA
ttcttcactttggtcatcag

SEQ ID NO: 59099 - DNA, 20 bp, synthetic construct
  misc_feature 1..20: note = Description of Artificial Sequence: Synthetic oligonucleotide
  misc_feature 1..20: note = Target: SCN10A; (+) strand; PAM type: YTN; PAM sequence: TTT
  source 1..20: mol_type = other DNA
tcttcactttggtcatcagt

SEQ ID NO: 59100 - DNA, 20 bp, synthetic construct
  misc_feature 1..20: note = Description of Artificial Sequence: Synthetic oligonucleotide
  misc_feature 1..20: note = Target: SCN10A; (+) strand; PAM type: YTN; PAM sequence: TTT
  source 1..20: mol_type = other DNA
cttcactttggtcatcagtc

SEQ ID NO: 59101 - DNA, 20 bp, synthetic construct
  misc_feature 1..20: note = Description of Artificial Sequence: Synthetic oligonucleotide
  misc_feature 1..20: note = Target: SCN10A; (+) strand; PAM type: YTN; PAM sequence: TTC
  source 1..20: mol_type = other DNA
ttcactttggtcatcagtct

SEQ ID NO: 59102 - DNA, 20 bp, synthetic construct
  misc_feature 1..20: note = Description of Artificial Sequence: Synthetic oligonucleotide
  misc_feature 1..20: note = Target: SCN10A; (+) strand; PAM type: YTN; PAM sequence: CTT
  source 1..20: mol_type = other DNA
cactttggtcatcagtctcc

SEQ ID NO: 59103 - DNA, 20 bp, synthetic construct
  misc_feature 1..20: note = Description of Artificial Sequence: Synthetic oligonucleotide
  misc_feature 1..20: note = Target: SCN10A; (+) strand; PAM type: YTN; PAM sequence: TTC
  source 1..20: mol_type = other DNA
actttggtcatcagtctcca

SEQ ID NO: 59104 - DNA, 20 bp, synthetic construct
  misc_feature 1..20: note = Description of Artificial Sequence: Synthetic oligonucleotide
  misc_feature 1..20: note = Target: SCN10A; (+) strand; PAM type: YTN; PAM sequence: CTT
  source 1..20: mol_type = other DNA
tggtcatcagtctccaccat

SEQ ID NO: 59105 - DNA, 20 bp, synthetic construct
  misc_feature 1..20: note = Description of Artificial Sequence: Synthetic oligonucleotide
  misc_feature 1..20: note = Target: SCN10A; (+) strand; PAM type: YTN; PAM sequence: TTT
  source 1..20: mol_type = other DNA
ggtcatcagtctccaccatc

SEQ ID NO: 59106 - DNA, 20 bp, synthetic construct
  misc_feature 1..20: note = Description of Artificial Sequence: Synthetic oligonucleotide
  misc_feature 1..20: note = Target: SCN10A; (+) strand; PAM type: YTN; PAM sequence: TTG
  source 1..20: mol_type = other DNA
gtcatcagtctccaccatca

SEQ ID NO: 59107 - DNA, 20 bp, synthetic construct
  misc_feature 1..20: note = Description of Artificial Sequence: Synthetic oligonucleotide
  misc_feature 1..20: note = Target: SCN10A; (+) strand; PAM type: YTN; PAM sequence: CTC
  source 1..20: mol_type = other DNA
caccatcatggtgatcatgt

SEQ ID NO: 59108 - DNA, 20 bp, synthetic construct
  misc_feature 1..20: note = Description of Artificial Sequence: Synthetic oligonucleotide
  misc_feature 1..20: note = Target: SCN10A; (+) strand; PAM type: YTN; PAM sequence: TTG
  source 1..20: mol_type = other DNA
aggcagatgaggaccatgat

SEQ ID NO: 59109 - DNA, 20 bp, synthetic construct
  misc_feature 1..20: note = Description of Artificial Sequence: Synthetic oligonucleotide
  misc_feature 1..20: note = Target: SCN10A; (+) strand; PAM type: YTN; PAM sequence: CTT
  source 1..20: mol_type = other DNA
gtctggtcacgatgtcaaag

SEQ ID NO: 59110 - DNA, 20 bp, synthetic construct
  misc_feature 1..20: note = Description of Artificial Sequence: Synthetic oligonucleotide
  misc_feature 1..20: note = Target: SCN10A; (+) strand; PAM type: YTN; PAM sequence: TTG
  source 1..20: mol_type = other DNA
tctggtcacgatgtcaaaga

SEQ ID NO: 59111 - DNA, 20 bp, synthetic construct
  misc_feature 1..20: note = Description of Artificial Sequence: Synthetic oligonucleotide
  misc_feature 1..20: note = Target: SCN10A; (+) strand; PAM type: YTN; PAM sequence: CTG
  source 1..20: mol_type = other DNA
gtcacgatgtcaaagacaaa

SEQ ID NO: 59112 - DNA, 20 bp, synthetic construct
  misc_feature 1..20: note = Description of Artificial Sequence: Synthetic oligonucleotide
  misc_feature 1..20: note = Target: SCN10A; (+) strand; PAM type: YTN; PAM sequence: CTG
  source 1..20: mol_type = other DNA
gaacttgttctgagaaaaca

SEQ ID NO: 59113 - DNA, 20 bp, synthetic construct
  misc_feature 1..20: note = Description of Artificial Sequence: Synthetic oligonucleotide
  misc_feature 1..20: note = Target: SCN10A; (+) strand; PAM type: YTN; PAM sequence: CTT
  source 1..20: mol_type = other DNA
gttctgagaaaacaagagat

SEQ ID NO: 59114 - DNA, 20 bp, synthetic construct
  misc_feature 1..20: note = Description of Artificial Sequence: Synthetic oligonucleotide
  misc_feature 1..20: note = Target: SCN10A; (+) strand; PAM type: YTN; PAM sequence: TTG
  source 1..20: mol_type = other DNA
ttctgagaaaacaagagata

SEQ ID NO: 59115 - DNA, 20 bp, synthetic construct
  misc_feature 1..20: note = Description of Artificial Sequence: Synthetic oligonucleotide
  misc_feature 1..20: note = Target: SCN10A; (+) strand; PAM type: YTN; PAM sequence: TTC
  source 1..20: mol_type = other DNA
tgagaaaacaagagatagtg

SEQ ID NO: 59116 - DNA, 20 bp, synthetic construct
  misc_feature 1..20: note = Description of Artificial Sequence: Synthetic oligonucleotide
  misc_feature 1..20: note = Target: SCN10A; (+) strand; PAM type: YTN; PAM sequence: CTG
  source 1..20: mol_type = other DNA
agaaaacaagagatagtggc

SEQ ID NO: 59117 - DNA, 20 bp, synthetic construct
  misc_feature 1..20: note = Description of Artificial Sequence: Synthetic oligonucleotide
  misc_feature 1..20: note = Target: SCN10A; (+) strand; PAM type: YTN; PAM sequence: CTT
  source 1..20: mol_type = other DNA
tgggccagcacaaaccaggc

SEQ ID NO: 59118 - DNA, 20 bp, synthetic construct
  misc_feature 1..20: note = Description of Artificial Sequence: Synthetic oligonucleotide
  misc_feature 1..20: note = Target: SCN10A; (+) strand; PAM type: YTN; PAM sequence: TTT
  source 1..20: mol_type = other DNA
gggccagcacaaaccaggca

SEQ ID NO: 59119 - DNA, 20 bp, synthetic construct
  misc_feature 1..20: note = Description of Artificial Sequence: Synthetic oligonucleotide
  misc_feature 1..20: note = Target: SCN10A; (+) strand; PAM type: YTN; PAM sequence: TTG
  source 1..20: mol_type = other DNA
ggccagcacaaaccaggcat

SEQ ID NO: 59120 - DNA, 20 bp, synthetic construct
  misc_feature 1..20: note = Description of Artificial Sequence: Synthetic oligonucleotide
  misc_feature 1..20: note = Target: SCN10A; (+) strand; PAM type: YTN; PAM sequence: CTG
  source 1..20: mol_type = other DNA
tgttatctgtagatgagttt

SEQ ID NO: 59121 - DNA, 20 bp, synthetic construct
  misc_feature 1..20: note = Description of Artificial Sequence: Synthetic oligonucleotide
  misc_feature 1..20: note = Target: SCN10A; (+) strand; PAM type: YTN; PAM sequence: TTA
  source 1..20: mol_type = other DNA
tctgtagatgagttttgtct

SEQ ID NO: 59122 - DNA, 20 bp, synthetic construct
  misc_feature 1..20: note = Description of Artificial Sequence: Synthetic oligonucleotide
  misc_feature 1..20: note = Target: SCN10A; (+) strand; PAM type: YTN; PAM sequence: CTG
  source 1..20: mol_type = other DNA
tagatgagttttgtctccat

SEQ ID NO: 59123 - DNA, 20 bp, synthetic construct
  misc_feature 1..20: note = Description of Artificial Sequence: Synthetic oligonucleotide
  misc_feature 1..20: note = Target: SCN10A; (+) strand; PAM type: YTN; PAM sequence: TTT
  source 1..20: mol_type = other DNA
tgtctccatcacactccaca

SEQ ID NO: 59124 - DNA, 20 bp, synthetic construct
  misc_feature 1..20: note = Description of Artificial Sequence: Synthetic oligonucleotide
  misc_feature 1..20: note = Target: SCN10A; (+) strand; PAM type: YTN; PAM sequence: TTT
  source 1..20: mol_type = other DNA
gtctccatcacactccacat

SEQ ID NO: 59125 - DNA, 20 bp, synthetic construct
  misc_feature 1..20: note = Description of Artificial Sequence: Synthetic oligonucleotide
  misc_feature 1..20: note = Target: SCN10A; (+) strand; PAM type: YTN; PAM sequence: TTG
  source 1..20: mol_type = other DNA
tctccatcacactccacatc

SEQ ID NO: 59126 - DNA, 20 bp, synthetic construct
  misc_feature 1..20: note = Description of Artificial Sequence: Synthetic oligonucleotide
  misc_feature 1..20: note = Target: SCN10A; (+) strand; PAM type: YTN; PAM sequence: CTC
  source 1..20: mol_type = other DNA
catcacactccacatcttaa

SEQ ID NO: 59127 - DNA, 20 bp, synthetic construct
  misc_feature 1..20: note = Description of Artificial Sequence: Synthetic oligonucleotide
  misc_feature 1..20: note = Target: SCN10A; (+) strand; PAM type: YTN; PAM sequence: CTC
  source 1..20: mol_type = other DNA
cacatcttaacagaagcgaa

SEQ ID NO: 59128 - DNA, 20 bp, synthetic construct
  misc_feature 1..20: note = Description of Artificial Sequence: Synthetic oligonucleotide
  misc_feature 1..20: note = Target: SCN10A; (+) strand; PAM type: YTN; PAM sequence: CTT
  source 1..20: mol_type = other DNA
aacagaagcgaaatactatc

SEQ ID NO: 59129 - DNA, 20 bp, synthetic construct
  misc_feature 1..20: note = Description of Artificial Sequence: Synthetic oligonucleotide
  misc_feature 1..20: note = Target: SCN10A; (+) strand; PAM type: YTN; PAM sequence: TTA
  source 1..20: mol_type = other DNA
acagaagcgaaatactatcc

SEQ ID NO: 59130 - DNA, 20 bp, synthetic construct
  misc_feature 1..20: note = Description of Artificial Sequence: Synthetic oligonucleotide
  misc_feature 1..20: note = Target: SCN10A; (+) strand; PAM type: YTN; PAM sequence: CTA
  source 1..20: mol_type = other DNA
tccttacctcttccaaaatt

SEQ ID NO: 59131 - DNA, 20 bp, synthetic construct
  misc_feature 1..20: note = Description of Artificial Sequence: Synthetic oligonucleotide
  misc_feature 1..20: note = Target: SCN10A; (+) strand; PAM type: YTN; PAM sequence: CTT
  source 1..20: mol_type = other DNA
acctcttccaaaatttcact

SEQ ID NO: 59132 - DNA, 20 bp, synthetic construct
  misc_feature 1..20: note = Description of Artificial Sequence: Synthetic oligonucleotide
  misc_feature 1..20: note = Target: SCN10A; (+) strand; PAM type: YTN; PAM sequence: TTA
  source 1..20: mol_type = other DNA
cctcttccaaaatttcactt

SEQ ID NO: 59133 - DNA, 20 bp, synthetic construct
  misc_feature 1..20: note = Description of Artificial Sequence: Synthetic oligonucleotide
  misc_feature 1..20: note = Target: SCN10A; (+) strand; PAM type: YTN; PAM sequence: CTC
  source 1..20: mol_type = other DNA
ttccaaaatttcacttttag

SEQ ID NO: 59134 - DNA, 20 bp, synthetic construct
  misc_feature 1..20: note = Description of Artificial Sequence: Synthetic oligonucleotide
  misc_feature 1..20: note = Target: SCN10A; (+) strand; PAM type: YTN; PAM sequence: CTT
  source 1..20: mol_type = other DNA
ccaaaatttcacttttagtt

SEQ ID NO: 59135 - DNA, 20 bp, synthetic construct
  misc_feature 1..20: note = Description of Artificial Sequence: Synthetic oligonucleotide
  misc_feature 1..20: note = Target: SCN10A; (+) strand; PAM type: YTN; PAM sequence: TTC
  source 1..20: mol_type = other DNA
caaaatttcacttttagttg

SEQ ID NO: 59136 - DNA, 20 bp, synthetic construct
  misc_feature 1..20: note = Description of Artificial Sequence: Synthetic oligonucleotide
  misc_feature 1..20: note = Target: SCN10A; (+) strand; PAM type: YTN; PAM sequence: TTT
  source 1..20: mol_type = other DNA
cacttttagttgactctacc

SEQ ID NO: 59137 - DNA, 20 bp, synthetic construct
  misc_feature 1..20: note = Description of Artificial Sequence: Synthetic oligonucleotide
  misc_feature 1..20: note = Target: SCN10A; (+) strand; PAM type: YTN; PAM sequence: TTC
  source 1..20: mol_type = other DNA
acttttagttgactctacct

SEQ ID NO: 59138 - DNA, 20 bp, synthetic construct
  misc_feature 1..20: note = Description of Artificial Sequence: Synthetic oligonucleotide
  misc_feature 1..20: note = Target: SCN10A; (+) strand; PAM type: YTN; PAM sequence: CTT
  source 1..20: mol_type = other DNA
ttagttgactctacctcatt

SEQ ID NO: 59139 - DNA, 20 bp, synthetic construct
  misc_feature 1..20: note = Description of Artificial Sequence: Synthetic oligonucleotide
  misc_feature 1..20: note = Target: SCN10A; (+) strand; PAM type: YTN; PAM sequence: TTT
  source 1..20: mol_type = other DNA
tagttgactctacctcattg

SEQ ID NO: 59140 - DNA, 20 bp, synthetic construct
  misc_feature 1..20: note = Description of Artificial Sequence: Synthetic oligonucleotide
  misc_feature 1..20: note = Target: SCN10A; (+) strand; PAM type: YTN; PAM sequence: TTT
  source 1..20: mol_type = other DNA
agttgactctacctcattgc

SEQ ID NO: 59141 - DNA, 20 bp, synthetic construct
  misc_feature 1..20: note = Description of Artificial Sequence: Synthetic oligonucleotide
  misc_feature 1..20: note = Target: SCN10A; (+) strand; PAM type: YTN; PAM sequence: TTA
  source 1..20: mol_type = other DNA
gttgactctacctcattgcc

SEQ ID NO: 59142 - DNA, 20 bp, synthetic construct
  misc_feature 1..20: note = Description of Artificial Sequence: Synthetic oligonucleotide
  misc_feature 1..20: note = Target: SCN10A; (+) strand; PAM type: YTN; PAM sequence: TTG
  source 1..20: mol_type = other DNA
actctacctcattgccccag

SEQ ID NO: 59143 - DNA, 20 bp, synthetic construct
  misc_feature 1..20: note = Description of Artificial Sequence: Synthetic oligonucleotide
  misc_feature 1..20: note = Target: SCN10A; (+) strand; PAM type: YTN; PAM sequence: CTC
  source 1..20: mol_type = other DNA
tacctcattgccccagttca

SEQ ID NO: 59144 - DNA, 20 bp, synthetic construct
  misc_feature 1..20: note = Description of Artificial Sequence: Synthetic oligonucleotide
  misc_feature 1..20: note = Target: SCN10A; (+) strand; PAM type: YTN; PAM sequence: CTA
  source 1..20: mol_type = other DNA
cctcattgccccagttcaag

SEQ ID NO: 59145 - DNA, 20 bp, synthetic construct
  misc_feature 1..20: note = Description of Artificial Sequence: Synthetic oligonucleotide
  misc_feature 1..20: note = Target: SCN10A; (+) strand; PAM type: YTN; PAM sequence: CTC
  source 1..20: mol_type = other DNA
attgccccagttcaagtcct

SEQ ID NO: 59146 - DNA, 20 bp, synthetic construct
  misc_feature 1..20: note = Description of Artificial Sequence: Synthetic oligonucleotide
  misc_feature 1..20: note = Target: SCN10A; (+) strand; PAM type: YTN; PAM sequence: TTG
  source 1..20: mol_type = other DNA
ccccagttcaagtccttaat

SEQ ID NO: 59147 - DNA, 20 bp, synthetic construct
  misc_feature 1..20: note = Description of Artificial Sequence: Synthetic oligonucleotide
  misc_feature 1..20: note = Target: SCN10A; (+) strand; PAM type: YTN; PAM sequence: TTC
  source 1..20: mol_type = other DNA
aagtccttaatacctctcct

SEQ ID NO: 59148 - DNA, 20 bp, synthetic construct
  misc_feature 1..20: note = Description of Artificial Sequence: Synthetic oligonucleotide
  misc_feature 1..20: note = Target: SCN10A; (+) strand; PAM type: YTN; PAM sequence: CTT
  source 1..20: mol_type = other DNA
aatacctctcctggcccttt

SEQ ID NO: 59149 - DNA, 20 bp, synthetic construct
  misc_feature 1..20: note = Description of Artificial Sequence: Synthetic oligonucleotide
  misc_feature 1..20: note = Target: SCN10A; (+) strand; PAM type: YTN; PAM sequence: TTA
  source 1..20: mol_type = other DNA
atacctctcctggccctttg

SEQ ID NO: 59150 - DNA, 20 bp, synthetic construct
  misc_feature 1..20: note = Description of Artificial Sequence: Synthetic oligonucleotide
  misc_feature 1..20: note = Target: SCN10A; (+) strand; PAM type: YTN; PAM sequence: CTC
  source 1..20: mol_type = other DNA
tcctggccctttgatgccac

SEQ ID NO: 59151 - DNA, 20 bp, synthetic construct
  misc_feature 1..20: note = Description of Artificial Sequence: Synthetic oligonucleotide
  misc_feature 1..20: note = Target: SCN10A; (+) strand; PAM type: YTN; PAM sequence: CTC
  source 1..20: mol_type = other DNA
ctggccctttgatgccacca

SEQ ID NO: 59152 - DNA, 20 bp, synthetic construct
  misc_feature 1..20: note = Description of Artificial Sequence: Synthetic oligonucleotide
  misc_feature 1..20: note = Target: SCN10A; (+) strand; PAM type: YTN; PAM sequence: CTG
  source 1..20: mol_type = other DNA
gccctttgatgccaccaggc

SEQ ID NO: 59153 - DNA, 20 bp, synthetic construct
  misc_feature 1..20: note = Description of Artificial Sequence: Synthetic oligonucleotide
  misc_feature 1..20: note = Target: SCN10A; (+) strand; PAM type: YTN; PAM sequence: CTT
  source 1..20: mol_type = other DNA
tgatgccaccaggcccttct

SEQ ID NO: 59154 - DNA, 20 bp, synthetic construct
  misc_feature 1..20: note = Description of Artificial Sequence: Synthetic oligonucleotide
  misc_feature 1..20: note = Target: SCN10A; (+) strand; PAM type: YTN; PAM sequence: TTT
  source 1..20: mol_type = other DNA
gatgccaccaggcccttctt

SEQ ID NO: 59155 - DNA, 20 bp, synthetic construct
  misc_feature 1..20: note = Description of Artificial Sequence: Synthetic oligonucleotide
  misc_feature 1..20: note = Target: SCN10A; (+) strand; PAM type: YTN; PAM sequence: TTG
  source 1..20: mol_type = other DNA
atgccaccaggcccttcttt

SEQ ID NO: 59156 - DNA, 20 bp, synthetic construct
  misc_feature 1..20: note = Description of Artificial Sequence: Synthetic oligonucleotide
  misc_feature 1..20: note = Target: SCN10A; (+) strand; PAM type: YTN; PAM sequence: CTT
  source 1..20: mol_type = other DNA
cttttgtcctggtctgtgcc

SEQ ID NO: 59157 - DNA, 20 bp, synthetic construct
  misc_feature 1..20: note = Description of Artificial Sequence: Synthetic oligonucleotide
  misc_feature 1..20: note = Target: SCN10A; (+) strand; PAM type: YTN; PAM sequence: TTC
  source 1..20: mol_type = other DNA
ttttgtcctggtctgtgccc

SEQ ID NO: 59158 - DNA, 20 bp, synthetic construct
  misc_feature 1..20: note = Description of Artificial Sequence: Synthetic oligonucleotide
  misc_feature 1..20: note = Target: SCN10A; (+) strand; PAM type: YTN; PAM sequence: CTT
  source 1..20: mol_type = other DNA
ttgtcctggtctgtgccctt

SEQ ID NO: 59159 - DNA, 20 bp, synthetic construct
  misc_feature 1..20: note = Description of Artificial Sequence: Synthetic oligonucleotide
  misc_feature 1..20: note = Target: SCN10A; (+) strand; PAM type: YTN; PAM sequence: TTT
  source 1..20: mol_type = other DNA
tgtcctggtctgtgcccttg

SEQ ID NO: 59160 - DNA, 20 bp, synthetic construct
  misc_feature 1..20: note = Description of Artificial Sequence: Synthetic oligonucleotide
  misc_feature 1..20: note = Target: SCN10A; (+) strand; PAM type: YTN; PAM sequence: TTT
  source 1..20: mol_type = other DNA
gtcctggtctgtgcccttgc

SEQ ID NO: 59161 - DNA, 20 bp, synthetic construct
  misc_feature 1..20: note = Description of Artificial Sequence: Synthetic oligonucleotide
  misc_feature 1..20: note = Target: SCN10A; (+) strand; PAM type: YTN; PAM sequence: TTG
  source 1..20: mol_type = other DNA
tcctggtctgtgcccttgcc

SEQ ID NO: 59162 - DNA, 20 bp, synthetic construct
  misc_feature 1..20: note = Description of Artificial Sequence: Synthetic oligonucleotide
  misc_feature 1..20: note = Target: SCN10A; (+) strand; PAM type: YTN; PAM sequence: CTG
  source 1..20: mol_type = other DNA
gtctgtgcccttgcctctat

SEQ ID NO: 59163 - DNA, 20 bp, synthetic construct
  misc_feature 1..20: note = Description of Artificial Sequence: Synthetic oligonucleotide
  misc_feature 1..20: note = Target: SCN10A; (+) strand; PAM type: YTN; PAM sequence: CTG
  source 1..20: mol_type = other DNA
tgcccttgcctctattcaca

SEQ ID NO: 59164 - DNA, 20 bp, synthetic construct
  misc_feature 1..20: note = Description of Artificial Sequence: Synthetic oligonucleotide
  misc_feature 1..20: note = Target: SCN10A; (+) strand; PAM type: YTN; PAM sequence: CTT
  source 1..20: mol_type = other DNA
gcctctattcacaatgccct

SEQ ID NO: 59165 - DNA, 20 bp, synthetic construct
  misc_feature 1..20: note = Description of Artificial Sequence: Synthetic oligonucleotide
  misc_feature 1..20: note = Target: SCN10A; (+) strand; PAM type: YTN; PAM sequence: TTG
  source 1..20: mol_type = other DNA
cctctattcacaatgccctc

SEQ ID NO: 59166 - DNA, 20 bp, synthetic construct
  misc_feature 1..20: note = Description of Artificial Sequence: Synthetic oligonucleotide
  misc_feature 1..20: note = Target: SCN10A; (+) strand; PAM type: YTN; PAM sequence: CTC
  source 1..20: mol_type = other DNA
tattcacaatgccctcctat

SEQ ID NO: 59167 - DNA, 20 bp, synthetic construct
  misc_feature 1..20: note = Description of Artificial Sequence: Synthetic oligonucleotide
  misc_feature 1..20: note = Target: SCN10A; (+) strand; PAM type: YTN; PAM sequence: CTA
  source 1..20: mol_type = other DNA
ttcacaatgccctcctatct

SEQ ID NO: 59168 - DNA, 20 bp, synthetic construct
  misc_feature 1..20: note = Description of Artificial Sequence: Synthetic oligonucleotide
  misc_feature 1..20: note = Target: SCN10A; (+) strand; PAM type: YTN; PAM sequence: TTC
  source 1..20: mol_type = other DNA
acaatgccctcctatctcct

SEQ ID NO: 59169 - DNA, 20 bp, synthetic construct
  misc_feature 1..20: note = Description of Artificial Sequence: Synthetic oligonucleotide
  misc_feature 1..20: note = Target: SCN10A; (+) strand; PAM type: YTN; PAM sequence: CTC
  source 1..20: mol_type = other DNA
ctatctcctctcttggctgt

SEQ ID NO: 59170 - DNA, 20 bp, synthetic construct
  misc_feature 1..20: note = Description of Artificial Sequence: Synthetic oligonucleotide
  misc_feature 1..20: note = Target: SCN10A; (+) strand; PAM type: YTN; PAM sequence: CTA
  source 1..20: mol_type = other DNA
tctcctctcttggctgtcta

SEQ ID NO: 59171 - DNA, 20 bp, synthetic construct
  misc_feature 1..20: note = Description of Artificial Sequence: Synthetic oligonucleotide
  misc_feature 1..20: note = Target: SCN10A; (+) strand; PAM type: YTN; PAM sequence: CTC
  source 1..20: mol_type = other DNA
ctctcttggctgtctaaatt

SEQ ID NO: 59172 - DNA, 20 bp, synthetic construct
  misc_feature 1..20: note = Description of Artificial Sequence: Synthetic oligonucleotide
  misc_feature 1..20: note = Target: SCN10A; (+) strand; PAM type: YTN; PAM sequence: CTC
  source 1..20: mol_type = other DNA
tcttggctgtctaaattcca

SEQ ID NO: 59173 - DNA, 20 bp, synthetic construct
  misc_feature 1..20: note = Description of Artificial Sequence: Synthetic oligonucleotide
  misc_feature 1..20: note = Target: SCN10A; (+) strand; PAM type: YTN; PAM sequence: CTC
  source 1..20: mol_type = other DNA
ttggctgtctaaattccaac

SEQ ID NO: 59174 - DNA, 20 bp, synthetic construct
  misc_feature 1..20: note = Description of Artificial Sequence: Synthetic oligonucleotide
  misc_feature 1..20: note = Target: SCN10A; (+) strand; PAM type: YTN; PAM sequence: CTT
  source 1..20: mol_type = other DNA
ggctgtctaaattccaacag

SEQ ID NO: 59175 - DNA, 20 bp, synthetic construct
  misc_feature 1..20: note = Description of Artificial Sequence: Synthetic oligonucleotide
  misc_feature 1..20: note = Target: SCN10A; (+) strand; PAM type: YTN; PAM sequence: TTG
  source 1..20: mol_type = other DNA
gctgtctaaattccaacagt

SEQ ID NO: 59176 - DNA, 20 bp, synthetic construct
  misc_feature 1..20: note = Description of Artificial Sequence: Synthetic oligonucleotide
  misc_feature 1..20: note = Target: SCN10A; (+) strand; PAM type: YTN; PAM sequence: CTG
  source 1..20: mol_type = other DNA
tctaaattccaacagtcttg

SEQ ID NO: 59177 - DNA, 20 bp, synthetic construct
  misc_feature 1..20: note = Description of Artificial Sequence: Synthetic oligonucleotide
  misc_feature 1..20: note = Target: SCN10A; (+) strand; PAM type: YTN; PAM sequence: CTA
  source 1..20: mol_type = other DNA
aattccaacagtcttgagta

SEQ ID NO: 59178 - DNA, 20 bp, synthetic construct
  misc_feature 1..20: note = Description of Artificial Sequence: Synthetic oligonucleotide
  misc_feature 1..20: note = Target: SCN10A; (+) strand; PAM type: YTN; PAM sequence: TTC
  source 1..20: mol_type = other DNA
caacagtcttgagtaatcca

SEQ ID NO: 59179 - DNA, 20 bp, synthetic construct
  misc_feature 1..20: note = Description of Artificial Sequence: Synthetic oligonucleotide
  misc_feature 1..20: note = Target: SCN10A; (+) strand; PAM type: YTN; PAM sequence: CTT
  source 1..20: mol_type = other DNA
gagtaatccatctcttttaa

SEQ ID NO: 59180 - DNA, 20 bp, synthetic construct
  misc_feature 1..20: note = Description of Artificial Sequence: Synthetic oligonucleotide
  misc_feature 1..20: note = Target: SCN10A; (+) strand; PAM type: YTN; PAM sequence: TTG
  source 1..20: mol_type = other DNA
agtaatccatctcttttaag

SEQ ID NO: 59181 - DNA, 20 bp, synthetic construct
  misc_feature 1..20: note = Description of Artificial Sequence: Synthetic oligonucleotide
  misc_feature 1..20: note = Target: SCN10A; (+) strand; PAM type: YTN; PAM sequence: CTC
  source 1..20: mol_type = other DNA
ttttaagctccacttactgc

SEQ ID NO: 59182 - DNA, 20 bp, synthetic construct
  misc_feature 1..20: note = Description of Artificial Sequence: Synthetic oligonucleotide
  misc_feature 1..20: note = Target: SCN10A; (+) strand; PAM type: YTN; PAM sequence: CTT
  source 1..20: mol_type = other DNA
ttaagctccacttactgcat

SEQ ID NO: 59183 - DNA, 20 bp, synthetic construct
  misc_feature 1..20: note = Description of Artificial Sequence: Synthetic oligonucleotide
  misc_feature 1..20: note = Target: SCN10A; (+) strand; PAM type: YTN; PAM sequence: TTT
  source 1..20: mol_type = other DNA
taagctccacttactgcatg

SEQ ID NO: 59184 - DNA, 20 bp, synthetic construct
  misc_feature 1..20: note = Description of Artificial Sequence: Synthetic oligonucleotide
  misc_feature 1..20: note = Target: SCN10A; (+) strand; PAM type: YTN; PAM sequence: TTT
  source 1..20: mol_type = other DNA
aagctccacttactgcatgg

SEQ ID NO: 59185 - DNA, 20 bp, synthetic construct
  misc_feature 1..20: note = Description of Artificial Sequence: Synthetic oligonucleotide
  misc_feature 1..20: note = Target: SCN10A; (+) strand; PAM type: YTN; PAM sequence: TTA
  source 1..20: mol_type = other DNA
agctccacttactgcatgga

SEQ ID NO: 59186 - DNA, 20 bp, synthetic construct
  misc_feature 1..20: note = Description of Artificial Sequence: Synthetic oligonucleotide
  misc_feature 1..20: note = Target: SCN10A; (+) strand; PAM type: YTN; PAM sequence: CTC
  source 1..20: mol_type = other DNA
cacttactgcatggagtgtc

SEQ ID NO: 59187 - DNA, 20 bp, synthetic construct
  misc_feature 1..20: note = Description of Artificial Sequence: Synthetic oligonucleotide
  misc_feature 1..20: note = Target: SCN10A; (+) strand; PAM type: YTN; PAM sequence: CTT
  source 1..20: mol_type = other DNA
actgcatggagtgtccctta

SEQ ID NO: 59188 - DNA, 20 bp, synthetic construct
  misc_feature 1..20: note = Description of Artificial Sequence: Synthetic oligonucleotide
  misc_feature 1..20: note = Target: SCN10A; (+) strand; PAM type: YTN; PAM sequence: TTA
  source 1..20: mol_type = other DNA
ctgcatggagtgtcccttag

SEQ ID NO: 59189 - DNA, 20 bp, synthetic construct
  misc_feature 1..20: note = Description of Artificial Sequence: Synthetic oligonucleotide
  misc_feature 1..20: note = Target: SCN10A; (+) strand; PAM type: YTN; PAM sequence: CTG
  source 1..20: mol_type = other DNA
catggagtgtcccttagtca

SEQ ID NO: 59190 - DNA, 20 bp, synthetic construct
  misc_feature 1..20: note = Description of Artificial Sequence: Synthetic oligonucleotide
  misc_feature 1..20: note = Target: SCN10A; (+) strand; PAM type: YTN; PAM sequence: CTT
  source 1..20: mol_type = other DNA
agtcacgtgacaacacacta

SEQ ID NO: 59191 - DNA, 20 bp, synthetic construct
  misc_feature 1..20: note = Description of Artificial Sequence: Synthetic oligonucleotide
  misc_feature 1..20: note = Target: SCN10A; (+) strand; PAM type: YTN; PAM sequence: TTA
  source 1..20: mol_type = other DNA
gtcacgtgacaacacactac

SEQ ID NO: 59192 - DNA, 20 bp, synthetic construct
  misc_feature 1..20: note = Description of Artificial Sequence: Synthetic oligonucleotide
  misc_feature 1..20: note = Target: SCN10A; (+) strand; PAM type: YTN; PAM sequence: CTA
  source 1..20: mol_type = other DNA
ccctgtccctttggggatcc

SEQ ID NO: 59193 - DNA, 20 bp, synthetic construct
  misc_feature 1..20: note = Description of Artificial Sequence: Synthetic oligonucleotide
  misc_feature 1..20: note = Target: SCN10A; (+) strand; PAM type: YTN; PAM sequence: CTG
  source 1..20: mol_type = other DNA
tccctttggggatcccactt

SEQ ID NO: 59194 - DNA, 20 bp, synthetic construct
  misc_feature 1..20: note = Description of Artificial Sequence: Synthetic oligonucleotide
  misc_feature 1..20: note = Target: SCN10A; (+) strand; PAM type: YTN; PAM sequence: CTT
  source 1..20: mol_type = other DNA
tggggatcccacttttcagt

SEQ ID NO: 59195 - DNA, 20 bp, synthetic construct
  misc_feature 1..20: note = Description of Artificial Sequence: Synthetic oligonucleotide
  misc_feature 1..20: note = Target: SCN10A; (+) strand; PAM type: YTN; PAM sequence: TTT
  source 1..20: mol_type = other DNA
ggggatcccacttttcagtc

SEQ ID NO: 59196 - DNA, 20 bp, synthetic construct
  misc_feature 1..20: note = Description of Artificial Sequence: Synthetic oligonucleotide
  misc_feature 1..20: note = Target: SCN10A; (+) strand; PAM type: YTN; PAM sequence: TTG
  source 1..20: mol_type = other DNA
gggatcccacttttcagtca

SEQ ID NO: 59197 - DNA, 20 bp, synthetic construct
  misc_feature 1..20: note = Description of Artificial Sequence: Synthetic oligonucleotide
  misc_feature 1..20: note = Target: SCN10A; (+) strand; PAM type: YTN; PAM sequence: CTT
  source 1..20: mol_type = other DNA
ttcagtcagcctcgagttct

SEQ ID NO: 59198 - DNA, 20 bp, synthetic construct
  misc_feature 1..20: note = Description of Artificial Sequence: Synthetic oligonucleotide
  misc_feature 1..20: note = Target: SCN10A; (+) strand; PAM type: YTN; PAM sequence: TTT
  source 1..20: mol_type = other DNA
tcagtcagcctcgagttcta

SEQ ID NO: 59199 - DNA, 20 bp, synthetic construct
  misc_feature 1..20: note = Description of Artificial Sequence: Synthetic oligonucleotide
  misc_feature 1..20: note = Target: SCN10A; (+) strand; PAM type: YTN; PAM sequence: TTT
  source 1..20: mol_type = other DNA
cagtcagcctcgagttctag

SEQ ID NO: 59200 - DNA, 20 bp, synthetic construct
  misc_feature 1..20: note = Description of Artificial Sequence: Synthetic oligonucleotide
  misc_feature 1..20: note = Target: SCN10A; (+) strand; PAM type: YTN; PAM sequence: TTC
  source 1..20: mol_type = other DNA
agtcagcctcgagttctagc

SEQ ID NO: 59201 - DNA, 20 bp, synthetic construct
  misc_feature 1..20: note = Description of Artificial Sequence: Synthetic oligonucleotide
  misc_feature 1..20: note = Target: SCN10A; (+) strand; PAM type: YTN; PAM sequence: CTC
  source 1..20: mol_type = other DNA
gagttctagcattttgtata

SEQ ID NO: 59202 - DNA, 20 bp, synthetic construct
  misc_feature 1..20: note = Description of Artificial Sequence: Synthetic oligonucleotide
  misc_feature 1..20: note = Target: SCN10A; (+) strand; PAM type: YTN; PAM sequence: TTC
  source 1..20: mol_type = other DNA
tagcattttgtatatgcgtc

SEQ ID NO: 59203 - DNA, 20 bp, synthetic construct
  misc_feature 1..20: note = Description of Artificial Sequence: Synthetic oligonucleotide
  misc_feature 1..20: note = Target: SCN10A; (+) strand; PAM type: YTN; PAM sequence: CTA
  source 1..20: mol_type = other DNA
gcattttgtatatgcgtctt

SEQ ID NO: 59204 - DNA, 20 bp, synthetic construct
  misc_feature 1..20: note = Description of Artificial Sequence: Synthetic oligonucleotide
  misc_feature 1..20: note = Target: SCN10A; (+) strand; PAM type: YTN; PAM sequence: TTT
  source 1..20: mol_type = other DNA
tgtatatgcgtcttctctac

SEQ ID NO: 59205 - DNA, 20 bp, synthetic construct
  misc_feature 1..20: note = Description of Artificial Sequence: Synthetic oligonucleotide
  misc_feature 1..20: note = Target: SCN10A; (+) strand; PAM type: YTN; PAM sequence: TTT
  source 1..20: mol_type = other DNA
gtatatgcgtcttctctact

SEQ ID NO: 59206 - DNA, 20 bp, synthetic construct
  misc_feature 1..20: note = Description of Artificial Sequence: Synthetic oligonucleotide
  misc_feature 1..20: note = Target: SCN10A; (+) strand; PAM type: YTN; PAM sequence: TTG
  source 1..20: mol_type = other DNA
tatatgcgtcttctctacta

SEQ ID NO: 59207 - DNA, 20 bp, synthetic construct
  misc_feature 1..20: note = Description of Artificial Sequence: Synthetic oligonucleotide
  misc_feature 1..20: note = Target: SCN10A; (+) strand; PAM type: YTN; PAM sequence: CTT
  source 1..20: mol_type = other DNA
ctctactagacaatgagctg

SEQ ID NO: 59208 - DNA, 20 bp, synthetic construct
  misc_feature 1..20: note = Description of Artificial Sequence: Synthetic oligonucleotide
  misc_feature 1..20: note = Target: SCN10A; (+) strand; PAM type: YTN; PAM sequence: TTC
  source 1..20: mol_type = other DNA
tctactagacaatgagctgt

SEQ ID NO: 59209 - DNA, 20 bp, synthetic construct
  misc_feature 1..20: note = Description of Artificial Sequence: Synthetic oligonucleotide
  misc_feature 1..20: note = Target: SCN10A; (+) strand; PAM type: YTN; PAM sequence: CTC
  source 1..20: mol_type = other DNA
tactagacaatgagctgttt

SEQ ID NO: 59210 - DNA, 20 bp, synthetic construct
  misc_feature 1..20: note = Description of Artificial Sequence: Synthetic oligonucleotide
  misc_feature 1..20: note = Target: SCN10A; (+) strand; PAM type: YTN; PAM sequence: CTA
  source 1..20: mol_type = other DNA
ctagacaatgagctgtttga

SEQ ID NO: 59211 - DNA, 20 bp, synthetic construct
  misc_feature 1..20: note = Description of Artificial Sequence: Synthetic oligonucleotide
  misc_feature 1..20: note = Target: SCN10A; (+) strand; PAM type: YTN; PAM sequence: CTA
  source 1..20: mol_type = other DNA
gacaatgagctgtttgagga

SEQ ID NO: 59212 - DNA, 20 bp, synthetic construct
  misc_feature 1..20: note = Description of Artificial Sequence: Synthetic oligonucleotide
  misc_feature 1..20: note = Target: SCN10A; (+) strand; PAM type: YTN; PAM sequence: CTG
  source 1..20: mol_type = other DNA
tttgaggacaagggctatac

SEQ ID NO: 59213 - DNA, 20 bp, synthetic construct
  misc_feature 1..20: note = Description of Artificial Sequence: Synthetic oligonucleotide
  misc_feature 1..20: note = Target: SCN10A; (+) strand; PAM type: YTN; PAM sequence: TTT
  source 1..20: mol_type = other DNA
gaggacaagggctatacctt

SEQ ID NO: 59214 - DNA, 20 bp, synthetic construct
  misc_feature 1..20: note = Description of Artificial Sequence: Synthetic oligonucleotide
  misc_feature 1..20: note = Target: SCN10A; (+) strand; PAM type: YTN; PAM sequence: TTG
  source 1..20: mol_type = other DNA
aggacaagggctataccttc

SEQ ID NO: 59215 - DNA, 20 bp, synthetic construct
  misc_feature 1..20: note = Description of Artificial Sequence: Synthetic oligonucleotide
  misc_feature 1..20: note = Target: SCN10A; (+) strand; PAM type: YTN; PAM sequence: CTA
  source 1..20: mol_type = other DNA
taccttccttaactttgttt

SEQ ID NO: 59216 - DNA, 20 bp, synthetic construct
  misc_feature 1..20: note = Description of Artificial Sequence: Synthetic oligonucleotide
  misc_feature 1..20: note = Target: SCN10A; (+) strand; PAM type: YTN; PAM sequence: CTT
  source 1..20: mol_type = other DNA
ccttaactttgtttccctgc

SEQ ID NO: 59217 - DNA, 20 bp, synthetic construct
  misc_feature 1..20: note = Description of Artificial Sequence: Synthetic oligonucleotide
  misc_feature 1..20: note = Target: SCN10A; (+) strand; PAM type: YTN; PAM sequence: TTC
  source 1..20: mol_type = other DNA
cttaactttgtttccctgca

SEQ ID NO: 59218 - DNA, 20 bp, synthetic construct
  misc_feature 1..20: note = Description of Artificial Sequence: Synthetic oligonucleotide
  misc_feature 1..20: note = Target: SCN10A; (+) strand; PAM type: YTN; PAM sequence: CTT
  source 1..20: mol_type = other DNA
aactttgtttccctgcagtg

SEQ ID NO: 59219 - DNA, 20 bp, synthetic construct
  misc_feature 1..20: note = Description of Artificial Sequence: Synthetic oligonucleotide
  misc_feature 1..20: note = Target: SCN10A; (+) strand; PAM type: YTN; PAM sequence: TTA
  source 1..20: mol_type = other DNA
actttgtttccctgcagtgc

SEQ ID NO: 59220 - DNA, 20 bp, synthetic construct
  misc_feature 1..20: note = Description of Artificial Sequence: Synthetic oligonucleotide
  misc_feature 1..20: note = Target: SCN10A; (+) strand; PAM type: YTN; PAM sequence: CTT
  source 1..20: mol_type = other DNA
tgtttccctgcagtgccctg

SEQ ID NO: 59221 - DNA, 20 bp, synthetic construct
  misc_feature 1..20: note = Description of Artificial Sequence: Synthetic oligonucleotide
  misc_feature 1..20: note = Target: SCN10A; (+) strand; PAM type: YTN; PAM sequence: TTT
  source 1..20: mol_type = other DNA
gtttccctgcagtgccctgc

SEQ ID NO: 59222 - DNA, 20 bp, synthetic construct
  misc_feature 1..20: note = Description of Artificial Sequence: Synthetic oligonucleotide
  misc_feature 1..20: note = Target: SCN10A; (+) strand; PAM type: YTN; PAM sequence: TTG
  source 1..20: mol_type = other DNA
tttccctgcagtgccctgca

SEQ ID NO: 59223 - DNA, 20 bp, synthetic construct
  misc_feature 1..20: note = Description of Artificial Sequence: Synthetic oligonucleotide
  misc_feature 1..20: note = Target: SCN10A; (+) strand; PAM type: YTN; PAM sequence: TTT
  source 1..20: mol_type = other DNA
ccctgcagtgccctgcacat

SEQ ID NO: 59224 - DNA, 20 bp, synthetic construct
  misc_feature 1..20: note = Description of Artificial Sequence: Synthetic oligonucleotide
  misc_feature 1..20: note = Target: SCN10A; (+) strand; PAM type: YTN; PAM sequence: TTC
  source 1..20: mol_type = other DNA
cctgcagtgccctgcacatt

SEQ ID NO: 59225 - DNA, 20 bp, synthetic construct
  misc_feature 1..20: note = Description of Artificial Sequence: Synthetic oligonucleotide
  misc_feature 1..20: note = Target: SCN10A; (+) strand; PAM type: YTN; PAM sequence: CTG
  source 1..20: mol_type = other DNA
cagtgccctgcacattgcaa

SEQ ID NO: 59226 - DNA, 20 bp, synthetic construct
  misc_feature 1..20: note = Description of Artificial Sequence: Synthetic oligonucleotide
  misc_feature 1..20: note = Target: SCN10A; (+) strand; PAM type: YTN; PAM sequence: CTG
  source 1..20: mol_type = other DNA
cacattgcaagagttcaaga

SEQ ID NO: 59227 - DNA, 20 bp, synthetic construct
  misc_feature 1..20: note = Description of Artificial Sequence: Synthetic oligonucleotide
  misc_feature 1..20: note = Target: SCN10A; (+) strand; PAM type: YTN; PAM sequence: TTG
  source 1..20: mol_type = other DNA
caagagttcaagagctgctt

SEQ ID NO: 59228 - DNA, 20 bp, synthetic construct
  misc_feature 1..20: note = Description of Artificial Sequence: Synthetic oligonucleotide
  misc_feature 1..20: note = Target: SCN10A; (+) strand; PAM type: YTN; PAM sequence: TTC
  source 1..20: mol_type = other DNA
aagagctgcttgaaatatta

SEQ ID NO: 59229 - DNA, 20 bp, synthetic construct
  misc_feature 1..20: note = Description of Artificial Sequence: Synthetic oligonucleotide
  misc_feature 1..20: note = Target: SCN10A; (+) strand; PAM type: YTN; PAM sequence: CTG
  source 1..20: mol_type = other DNA
cttgaaatattaatttgagc

SEQ ID NO: 59230 - DNA, 20 bp, synthetic construct
  misc_feature 1..20: note = Description of Artificial Sequence: Synthetic oligonucleotide
  misc_feature 1..20: note = Target: SCN10A; (+) strand; PAM type: YTN; PAM sequence: CTT
  source 1..20: mol_type = other DNA
gaaatattaatttgagctac

SEQ ID NO: 59231 - DNA, 20 bp, synthetic construct
  misc_feature 1..20: note = Description of Artificial Sequence: Synthetic oligonucleotide
  misc_feature 1..20: note = Target: SCN10A; (+) strand; PAM type: YTN; PAM sequence: TTG
  source 1..20: mol_type = other DNA
aaatattaatttgagctact

SEQ ID NO: 59232 - DNA, 20 bp, synthetic construct
  misc_feature 1..20: note = Description of Artificial Sequence: Synthetic oligonucleotide
  misc_feature 1..20: note = Target: SCN10A; (+) strand; PAM type: YTN; PAM sequence: TTA
  source 1..20: mol_type = other DNA
atttgagctactttgctgag

SEQ ID NO: 59233 - DNA, 20 bp, synthetic construct
  misc_feature 1..20: note = Description of Artificial Sequence: Synthetic oligonucleotide
  misc_feature 1..20: note = Target: SCN10A; (+) strand; PAM type: YTN; PAM sequence: TTT
  source 1..20: mol_type = other DNA
gagctactttgctgagagta

SEQ ID NO: 59234 - DNA, 20 bp, synthetic construct
  misc_feature 1..20: note = Description of Artificial Sequence: Synthetic oligonucleotide
  misc_feature 1..20: note = Target: SCN10A; (+) strand; PAM type: YTN; PAM sequence: TTG
  source 1..20: mol_type = other DNA
agctactttgctgagagtaa

SEQ ID NO: 59235 - DNA, 20 bp, synthetic construct
  misc_feature 1..20: note = Description of Artificial Sequence: Synthetic oligonucleotide
  misc_feature 1..20: note = Target: SCN10A; (+) strand; PAM type: YTN; PAM sequence: CTA
  source 1..20: mol_type = other DNA
ctttgctgagagtaaagtca

SEQ ID NO: 59236 - DNA, 20 bp, synthetic construct
  misc_feature 1..20: note = Description of Artificial Sequence: Synthetic oligonucleotide
  misc_feature 1..20: note = Target: SCN10A; (+) strand; PAM type: YTN; PAM sequence: CTT
  source 1..20: mol_type = other DNA
tgctgagagtaaagtcaagt

SEQ ID NO: 59237 - DNA, 20 bp, synthetic construct
  misc_feature 1..20: note = Description of Artificial Sequence: Synthetic oligonucleotide
  misc_feature 1..20: note = Target: SCN10A; (+) strand; PAM type: YTN; PAM sequence: TTT
  source 1..20: mol_type = other DNA
gctgagagtaaagtcaagtg

SEQ ID NO: 59238 - DNA, 20 bp, synthetic construct
  misc_feature 1..20: note = Description of Artificial Sequence: Synthetic oligonucleotide
  misc_feature 1..20: note = Target: SCN10A; (+) strand; PAM type: YTN; PAM sequence: TTG
  source 1..20: mol_type = other DNA
ctgagagtaaagtcaagtgc

SEQ ID NO: 59239 - DNA, 20 bp, synthetic construct
  misc_feature 1..20: note = Description of Artificial Sequence: Synthetic oligonucleotide
  misc_feature 1..20: note = Target: SCN10A; (+) strand; PAM type: YTN; PAM sequence: CTG
  source 1..20: mol_type = other DNA
agagtaaagtcaagtgcaaa

SEQ ID NO: 59240 - DNA, 20 bp, synthetic construct
  misc_feature 1..20: note = Description of Artificial Sequence: Synthetic oligonucleotide
  misc_feature 1..20: note = Target: SCN10A; (+) strand; PAM type: YTN; PAM sequence: CTT
  source 1..20: mol_type = other DNA
attcttggaaatgttccctc

SEQ ID NO: 59241 - DNA, 20 bp, synthetic construct
  misc_feature 1..20: note = Description of Artificial Sequence: Synthetic oligonucleotide
  misc_feature 1..20: note = Target: SCN10A; (+) strand; PAM type: YTN; PAM sequence: TTA
  source 1..20: mol_type = other DNA
ttcttggaaatgttccctct

SEQ ID NO: 59242 - DNA, 20 bp, synthetic construct
  misc_feature 1..20: note = Description of Artificial Sequence: Synthetic oligonucleotide
  misc_feature 1..20: note = Target: SCN10A; (+) strand; PAM type: YTN; PAM sequence: TTC
  source 1..20: mol_type = other DNA
ttggaaatgttccctctgtt

SEQ ID NO: 59243 - DNA, 20 bp, synthetic construct
  misc_feature 1..20: note = Description of Artificial Sequence: Synthetic oligonucleotide
  misc_feature 1..20: note = Target: SCN10A; (+) strand; PAM type: YTN; PAM sequence: CTT
  source 1..20: mol_type = other DNA
ggaaatgttccctctgttcc

SEQ ID NO: 59244 - DNA, 20 bp, synthetic construct
  misc_feature 1..20: note = Description of Artificial Sequence: Synthetic oligonucleotide
  misc_feature 1..20: note = Target: SCN10A; (+) strand; PAM type: YTN; PAM sequence: TTG
  source 1..20: mol_type = other DNA
gaaatgttccctctgttcct

SEQ ID NO: 59245 - DNA, 20 bp, synthetic construct
  misc_feature 1..20: note = Description of Artificial Sequence: Synthetic oligonucleotide
  misc_feature 1..20: note = Target: SCN10A; (+) strand; PAM type: YTN; PAM sequence: TTC
  source 1..20: mol_type = other DNA
cctctgttcctggtgctgtg

SEQ ID NO: 59246 - DNA, 20 bp, synthetic construct
  misc_feature 1..20: note = Description of Artificial Sequence: Synthetic oligonucleotide
  misc_feature 1..20: note = Target: SCN10A; (+) strand; PAM type: YTN; PAM sequence: CTC
  source 1..20: mol_type = other DNA
tgttcctggtgctgtgcaaa

SEQ ID NO: 59247 - DNA, 20 bp, synthetic construct
  misc_feature 1..20: note = Description of Artificial Sequence: Synthetic oligonucleotide
  misc_feature 1..20: note = Target: SCN10A; (+) strand; PAM type: YTN; PAM sequence: CTG
  source 1..20: mol_type = other DNA
ttcctggtgctgtgcaaatg

SEQ ID NO: 59248 - DNA, 20 bp, synthetic construct
  misc_feature 1..20: note = Description of Artificial Sequence: Synthetic oligonucleotide
  misc_feature 1..20: note = Target: SCN10A; (+) strand; PAM type: YTN; PAM sequence: TTC
  source 1..20: mol_type = other DNA
ctggtgctgtgcaaatgcct

SEQ ID NO: 59249 - DNA, 20 bp, synthetic construct
  misc_feature 1..20: note = Description of Artificial Sequence: Synthetic oligonucleotide
  misc_feature 1..20: note = Target: SCN10A; (+) strand; PAM type: YTN; PAM sequence: CTG
  source 1..20: mol_type = other DNA
gtgctgtgcaaatgcctaag

SEQ ID NO: 59250 - DNA, 20 bp, synthetic construct
  misc_feature 1..20: note = Description of Artificial Sequence: Synthetic oligonucleotide
  misc_feature 1..20: note = Target: SCN10A; (+) strand; PAM type: YTN; PAM sequence: CTG
  source 1..20: mol_type = other DNA
tgcaaatgcctaagcaaatg

SEQ ID NO: 59251 - DNA, 20 bp, synthetic construct
  misc_feature 1..20: note = Description of Artificial Sequence: Synthetic oligonucleotide
  misc_feature 1..20: note = Target: SCN10A; (+) strand; PAM type: YTN; PAM sequence: CTA
  source 1..20: mol_type = other DNA
agcaaatgcaggtatagggc

SEQ ID NO: 59252 - DNA, 20 bp, synthetic construct
  misc_feature 1..20: note = Description of Artificial Sequence: Synthetic oligonucleotide
  misc_feature 1..20: note = Target: SCN10A; (+) strand; PAM type: YTN; PAM sequence: CTT
  source 1..20: mol_type = other DNA
ggttgtttgcatcttggaag

SEQ ID NO: 59253 - DNA, 20 bp, synthetic construct
  misc_feature 1..20: note = Description of Artificial Sequence: Synthetic oligonucleotide
  misc_feature 1..20: note = Target: SCN10A; (+) strand; PAM type: YTN; PAM sequence: TTG
  source 1..20: mol_type = other DNA
gttgtttgcatcttggaagg

SEQ ID NO: 59254 - DNA, 20 bp, synthetic construct
  misc_feature 1..20: note = Description of Artificial Sequence: Synthetic oligonucleotide
  misc_feature 1..20: note = Target: SCN10A; (+) strand; PAM type: YTN; PAM sequence: TTG
  source 1..20: mol_type = other DNA
tttgcatcttggaaggaggc

SEQ ID NO: 59255 - DNA, 20 bp, synthetic construct
  misc_feature 1..20: note = Description of Artificial Sequence: Synthetic oligonucleotide
  misc_feature 1..20: note = Target: SCN10A; (+) strand; PAM type: YTN; PAM sequence: TTT
  source 1..20: mol_type = other DNA
gcatcttggaaggaggcaga

SEQ ID NO: 59256 - DNA, 20 bp, synthetic construct
  misc_feature 1..20: note = Description of Artificial Sequence: Synthetic oligonucleotide
  misc_feature 1..20: note = Target: SCN10A; (+) strand; PAM type: YTN; PAM sequence: TTG
  source 1..20: mol_type = other DNA
catcttggaaggaggcagag

SEQ ID NO: 59257 - DNA, 20 bp, synthetic construct
  misc_feature 1..20: note = Description of Artificial Sequence: Synthetic oligonucleotide
  misc_feature 1..20: note = Target: SCN10A; (+) strand; PAM type: YTN; PAM sequence: CTT
  source 1..20: mol_type = other DNA
ggaaggaggcagagtggcct

SEQ ID NO: 59258 - DNA, 20 bp, synthetic construct
  misc_feature 1..20: note = Description of Artificial Sequence: Synthetic oligonucleotide
  misc_feature 1..20: note = Target: SCN10A; (+) strand; PAM type: YTN; PAM sequence: TTG
  source 1..20: mol_type = other DNA
gaaggaggcagagtggcctg

SEQ ID NO: 59259 - DNA, 20 bp, synthetic construct
  misc_feature 1..20: note = Description of Artificial Sequence: Synthetic oligonucleotide
  misc_feature 1..20: note = Target: SCN10A; (+) strand; PAM type: YTN; PAM sequence: CTG
  source 1..20: mol_type = other DNA
gataaccaagagatcattta

SEQ ID NO: 59260 - DNA, 20 bp, synthetic construct
  misc_feature 1..20: note = Description of Artificial Sequence: Synthetic oligonucleotide
  misc_feature 1..20: note = Target: SCN10A; (+) strand; PAM type: YTN; PAM sequence: TTT
  source 1..20: mol_type = other DNA
atatctggttatttttatgg

SEQ ID NO: 59261 - DNA, 20 bp, synthetic construct
  misc_feature 1..20: note = Description of Artificial Sequence: Synthetic oligonucleotide
  misc_feature 1..20: note = Target: SCN10A; (+) strand; PAM type: YTN; PAM sequence: TTA
  source 1..20: mol_type = other DNA
tatctggttatttttatggt

SEQ ID NO: 59262 - DNA, 20 bp, synthetic construct
  misc_feature 1..20: note = Description of Artificial Sequence: Synthetic oligonucleotide
  misc_feature 1..20: note = Target: SCN10A; (+) strand; PAM type: YTN; PAM sequence: CTG
  source 1..20: mol_type = other DNA
gttatttttatggtgtcttt

SEQ ID NO: 59263 - DNA, 20 bp, synthetic construct
  misc_feature 1..20: note = Description of Artificial Sequence: Synthetic oligonucleotide
  misc_feature 1..20: note = Target: SCN10A; (+) strand; PAM type: YTN; PAM sequence: TTA
  source 1..20: mol_type = other DNA
tttttatggtgtctttaaaa

SEQ ID NO: 59264 - DNA, 20 bp, synthetic construct
  misc_feature 1..20: note = Description of Artificial Sequence: Synthetic oligonucleotide
  misc_feature 1..20: note = Target: SCN10A; (+) strand; PAM type: YTN; PAM sequence: TTT
  source 1..20: mol_type = other DNA
ttatggtgtctttaaaaagc

SEQ ID NO: 59265 - DNA, 20 bp, synthetic construct
  misc_feature 1..20: note = Description of Artificial Sequence: Synthetic oligonucleotide
  misc_feature 1..20: note = Target: SCN10A; (+) strand; PAM type: YTN; PAM sequence: TTT
  source 1..20: mol_type = other DNA
tatggtgtctttaaaaagct

SEQ ID NO: 59266 - DNA, 20 bp, synthetic construct
  misc_feature 1..20: note = Description of Artificial Sequence: Synthetic oligonucleotide
  misc_feature 1..20: note = Target: SCN10A; (+) strand; PAM type: YTN; PAM sequence: TTT
  source 1..20: mol_type = other DNA
atggtgtctttaaaaagctc

SEQ ID NO: 59267 - DNA, 20 bp, synthetic construct
  misc_feature 1..20: note = Description of Artificial Sequence: Synthetic oligonucleotide
  misc_feature 1..20: note = Target: SCN10A; (+) strand; PAM type: YTN; PAM sequence: TTA
  source 1..20: mol_type = other DNA
tggtgtctttaaaaagctcc

SEQ ID NO: 59268 - DNA, 20 bp, synthetic construct
  misc_feature 1..20: note = Description of Artificial Sequence: Synthetic oligonucleotide
  misc_feature 1..20: note = Target: SCN10A; (+) strand; PAM type: YTN; PAM sequence: CTT
  source 1..20: mol_type = other DNA
taaaaagctcctactgtgat

SEQ ID NO: 59269 - DNA, 20 bp, synthetic construct
  misc_feature 1..20: note = Description of Artificial Sequence: Synthetic oligonucleotide
  misc_feature 1..20: note = Target: SCN10A; (+) strand; PAM type: YTN; PAM sequence: TTT
  source 1..20: mol_type = other DNA
aaaaagctcctactgtgatc

SEQ ID NO: 59270 - DNA, 20 bp, synthetic construct
  misc_feature 1..20: note = Description of Artificial Sequence: Synthetic oligonucleotide
  misc_feature 1..20: note = Target: SCN10A; (+) strand; PAM type: YTN; PAM sequence: TTA
  source 1..20: mol_type = other DNA
aaaagctcctactgtgatct

SEQ ID NO: 59271 - DNA, 20 bp, synthetic construct
  misc_feature 1..20: note = Description of Artificial Sequence: Synthetic oligonucleotide
  misc_feature 1..20: note = Target: SCN10A; (+) strand; PAM type: YTN; PAM sequence: CTC
  source 1..20: mol_type = other DNA
ctactgtgatcttctcttct

SEQ ID NO: 59272 - DNA, 20 bp, synthetic construct
  misc_feature 1..20: note = Description of Artificial Sequence: Synthetic oligonucleotide
  misc_feature 1..20: note = Target: SCN10A; (+) strand; PAM type: YTN; PAM sequence: CTA
  source 1..20: mol_type = other DNA
ctgtgatcttctcttctttt

SEQ ID NO: 59273 - DNA, 20 bp, synthetic construct
  misc_feature 1..20: note = Description of Artificial Sequence: Synthetic oligonucleotide
  misc_feature 1..20: note = Target: SCN10A; (+) strand; PAM type: YTN; PAM sequence: CTG
  source 1..20: mol_type = other DNA
tgatcttctcttcttttagt

SEQ ID NO: 59274 - DNA, 20 bp, synthetic construct
  misc_feature 1..20: note = Description of Artificial Sequence: Synthetic oligonucleotide
  misc_feature 1..20: note = Target: SCN10A; (+) strand; PAM type: YTN; PAM sequence: CTT
  source 1..20: mol_type = other DNA
ctcttcttttagtgctgtga

SEQ ID NO: 59275 - DNA, 20 bp, synthetic construct
  misc_feature 1..20: note = Description of Artificial Sequence: Synthetic oligonucleotide
  misc_feature 1..20: note = Target: SCN10A; (+) strand; PAM type: YTN; PAM sequence: TTC
  source 1..20: mol_type = other DNA
tcttcttttagtgctgtgaa

SEQ ID NO: 59276 - DNA, 20 bp, synthetic construct
  misc_feature 1..20: note = Description of Artificial Sequence: Synthetic oligonucleotide
  misc_feature 1..20: note = Target: SCN10A; (+) strand; PAM type: YTN; PAM sequence: CTC
  source 1..20: mol_type = other DNA
ttcttttagtgctgtgaaca

SEQ ID NO: 59277 - DNA, 20 bp, synthetic construct
  misc_feature 1..20: note = Description of Artificial Sequence: Synthetic oligonucleotide
  misc_feature 1..20: note = Target: SCN10A; (+) strand; PAM type: YTN; PAM sequence: CTT
  source 1..20: mol_type = other DNA
cttttagtgctgtgaacatc

SEQ ID NO: 59278 - DNA, 20 bp, synthetic construct
  misc_feature 1..20: note = Description of Artificial Sequence: Synthetic oligonucleotide
  misc_feature 1..20: note = Target: SCN10A; (+) strand; PAM type: YTN; PAM sequence: TTC
  source 1..20: mol_type = other DNA
ttttagtgctgtgaacatct

SEQ ID NO: 59279 - DNA, 20 bp, synthetic construct
  misc_feature 1..20: note = Description of Artificial Sequence: Synthetic oligonucleotide
  misc_feature 1..20: note = Target: SCN10A; (+) strand; PAM type: YTN; PAM sequence: CTT
  source 1..20: mol_type = other DNA
ttagtgctgtgaacatctta

SEQ ID NO: 59280 - DNA, 20 bp, synthetic construct
  misc_feature 1..20: note = Description of Artificial Sequence: Synthetic oligonucleotide
  misc_feature 1..20: note = Target: SCN10A; (+) strand; PAM type: YTN; PAM sequence: TTT
  source 1..20: mol_type = other DNA
tagtgctgtgaacatcttac

SEQ ID NO: 59281 - DNA, 20 bp, synthetic construct
  misc_feature 1..20: note = Description of Artificial Sequence: Synthetic oligonucleotide
  misc_feature 1..20: note = Target: SCN10A; (+) strand; PAM type: YTN; PAM sequence: TTT
  source 1..20: mol_type = other DNA
agtgctgtgaacatcttact

SEQ ID NO: 59282 - DNA, 20 bp, synthetic construct
  misc_feature 1..20: note = Description of Artificial Sequence: Synthetic oligonucleotide
  misc_feature 1..20: note = Target: SCN10A; (+) strand; PAM type: YTN; PAM sequence: TTA
  source 1..20: mol_type = other DNA
gtgctgtgaacatcttactg

SEQ ID NO: 59283 - DNA, 20 bp, synthetic construct
  misc_feature 1..20: note = Description of Artificial Sequence: Synthetic oligonucleotide
  misc_feature 1..20: note = Target: SCN10A; (+) strand; PAM type: YTN; PAM sequence: CTG
  source 1..20: mol_type = other DNA
tgaacatcttactgctctgt

SEQ ID NO: 59284 - DNA, 20 bp, synthetic construct
  misc_feature 1..20: note = Description of Artificial Sequence: Synthetic oligonucleotide
  misc_feature 1..20: note = Target: SCN10A; (+) strand; PAM type: YTN; PAM sequence: CTT
  source 1..20: mol_type = other DNA
actgctctgtgagtccttga

SEQ ID NO: 59285 - DNA, 20 bp, synthetic construct
  misc_feature 1..20: note = Description of Artificial Sequence: Synthetic oligonucleotide
  misc_feature 1..20: note = Target: SCN10A; (+) strand; PAM type: YTN; PAM sequence: TTA
  source 1..20: mol_type = other DNA
ctgctctgtgagtccttgat

SEQ ID NO: 59286 - DNA, 20 bp, synthetic construct
  misc_feature 1..20: note = Description of Artificial Sequence: Synthetic oligonucleotide
  misc_feature 1..20: note = Target: SCN10A; (+) strand; PAM type: YTN; PAM sequence: CTG
  source 1..20: mol_type = other DNA
ctctgtgagtccttgatccc

SEQ ID NO: 59287 - DNA, 20 bp, synthetic construct
  misc_feature 1..20: note = Description of Artificial Sequence: Synthetic oligonucleotide
  misc_feature 1..20: note = Target: SCN10A; (+) strand; PAM type: YTN; PAM sequence: CTC
  source 1..20: mol_type = other DNA
tgtgagtccttgatcccaac

SEQ ID NO: 59288 - DNA, 20 bp, synthetic construct
  misc_feature 1..20: note = Description of Artificial Sequence: Synthetic oligonucleotide
  misc_feature 1..20: note = Target: SCN10A; (+) strand; PAM type: YTN; PAM sequence: CTG
  source 1..20: mol_type = other DNA
tgagtccttgatcccaaccc

SEQ ID NO: 59289 - DNA, 20 bp, synthetic construct
  misc_feature 1..20: note = Description of Artificial Sequence: Synthetic oligonucleotide
  misc_feature 1..20: note = Target: SCN10A; (+) strand; PAM type: YTN; PAM sequence: CTT
  source 1..20: mol_type = other DNA
gatcccaaccccattcccca

SEQ ID NO: 59290 - DNA, 20 bp, synthetic construct
  misc_feature 1..20: note = Description of Artificial Sequence: Synthetic oligonucleotide
  misc_feature 1..20: note = Target: SCN10A; (+) strand; PAM type: YTN; PAM sequence: TTG
  source 1..20: mol_type = other DNA
atcccaaccccattccccac

SEQ ID NO: 59291 - DNA, 20 bp, synthetic construct
  misc_feature 1..20: note = Description of Artificial Sequence: Synthetic oligonucleotide
  misc_feature 1..20: note = Target: SCN10A; (+) strand; PAM type: YTN; PAM sequence: TTC
  source 1..20: mol_type = other DNA
cccacgctttgaccttctcc

SEQ ID NO: 59292 - DNA, 20 bp, synthetic construct
  misc_feature 1..20: note = Description of Artificial Sequence: Synthetic oligonucleotide
  misc_feature 1..20: note = Target: SCN10A; (+) strand; PAM type: YTN; PAM sequence: CTT
  source 1..20: mol_type = other DNA
tgaccttctcccaaaacttc

SEQ ID NO: 59293 - DNA, 20 bp, synthetic construct
  misc_feature 1..20: note = Description of Artificial Sequence: Synthetic oligonucleotide
  misc_feature 1..20: note = Target: SCN10A; (+) strand; PAM type: YTN; PAM sequence: TTT
  source 1..20: mol_type = other DNA
gaccttctcccaaaacttct

SEQ ID NO: 59294 - DNA, 20 bp, synthetic construct
  misc_feature 1..20: note = Description of Artificial Sequence: Synthetic oligonucleotide
  misc_feature 1..20: note = Target: SCN10A; (+) strand; PAM type: YTN; PAM sequence: TTG
  source 1..20: mol_type = other DNA
accttctcccaaaacttctc

SEQ ID NO: 59295 - DNA, 20 bp, synthetic construct
  misc_feature 1..20: note = Description of Artificial Sequence: Synthetic oligonucleotide
  misc_feature 1..20: note = Target: SCN10A; (+) strand; PAM type: YTN; PAM sequence: CTT
  source 1..20: mol_type = other DNA
ctcccaaaacttctcctgac

SEQ ID NO: 59296 - DNA, 20 bp, synthetic construct
  misc_feature 1..20: note = Description of Artificial Sequence: Synthetic oligonucleotide
  misc_feature 1..20: note = Target: SCN10A; (+) strand; PAM type: YTN; PAM sequence: TTC
  source 1..20: mol_type = other DNA
tcccaaaacttctcctgacc

SEQ ID NO: 59297 - DNA, 20 bp, synthetic construct
  misc_feature 1..20: note = Description of Artificial Sequence: Synthetic oligonucleotide
  misc_feature 1..20: note = Target: SCN10A; (+) strand; PAM type: YTN; PAM sequence: CTC
  source 1..20: mol_type = other DNA
ccaaaacttctcctgacctc

SEQ ID NO: 59298 - DNA, 20 bp, synthetic construct
  misc_feature 1..20: note = Description of Artificial Sequence: Synthetic oligonucleotide
  misc_feature 1..20: note = Target: SCN10A; (+) strand; PAM type: YTN; PAM sequence: CTT
  source 1..20: mol_type = other DNA
ctcctgacctctatggagct

SEQ ID NO: 59299 - DNA, 20 bp, synthetic construct
  misc_feature 1..20: note = Description of Artificial Sequence: Synthetic oligonucleotide
  misc_feature 1..20: note = Target: SCN10A; (+) strand; PAM type: YTN; PAM sequence: TTC
  source 1..20: mol_type = other DNA
tcctgacctctatggagctc

SEQ ID NO: 59300 - DNA, 20 bp, synthetic construct
  misc_feature 1..20: note = Description of Artificial Sequence: Synthetic oligonucleotide
  misc_feature 1..20: note = Target: SCN10A; (+) strand; PAM type: YTN; PAM sequence: CTC
  source 1..20: mol_type = other DNA
ctgacctctatggagctcac

SEQ ID NO: 59301 - DNA, 20 bp, synthetic construct
  misc_feature 1..20: note = Description of Artificial Sequence: Synthetic oligonucleotide
  misc_feature 1..20: note = Target: SCN10A; (+) strand; PAM type: YTN; PAM sequence: CTG
  source 1..20: mol_type = other DNA
acctctatggagctcacctg

SEQ ID NO: 59302 - DNA, 20 bp, synthetic construct
  misc_feature 1..20: note = Description of Artificial Sequence: Synthetic oligonucleotide
  misc_feature 1..20: note = Target: SCN10A; (+) strand; PAM type: YTN; PAM sequence: CTC
  source 1..20: mol_type = other DNA
tatggagctcacctgccttg

SEQ ID NO: 59303 - DNA, 20 bp, synthetic construct
  misc_feature 1..20: note = Description of Artificial Sequence: Synthetic oligonucleotide
  misc_feature 1..20: note = Target: SCN10A; (+) strand; PAM type: YTN; PAM sequence: CTA
  source 1..20: mol_type = other DNA
tggagctcacctgccttgat

SEQ ID NO: 59304 - DNA, 20 bp, synthetic construct
  misc_feature 1..20: note = Description of Artificial Sequence: Synthetic oligonucleotide
  misc_feature 1..20: note = Target: SCN10A; (+) strand; PAM type: YTN; PAM sequence: CTC
  source 1..20: mol_type = other DNA
acctgccttgatctgcacat

SEQ ID NO: 59305 - DNA, 20 bp, synthetic construct
  misc_feature 1..20: note = Description of Artificial Sequence: Synthetic oligonucleotide
  misc_feature 1..20: note = Target: SCN10A; (+) strand; PAM type: YTN; PAM sequence: CTG
  source 1..20: mol_type = other DNA
ccttgatctgcacatatctc

SEQ ID NO: 59306 - DNA, 20 bp, synthetic construct
  misc_feature 1..20: note = Description of Artificial Sequence: Synthetic oligonucleotide
  misc_feature 1..20: note = Target: SCN10A; (+) strand; PAM type: YTN; PAM sequence: CTT
  source 1..20: mol_type = other DNA
gatctgcacatatctccccc

SEQ ID NO: 59307 - DNA, 20 bp, synthetic construct
  misc_feature 1..20: note = Description of Artificial Sequence: Synthetic oligonucleotide
  misc_feature 1..20: note = Target: SCN10A; (+) strand; PAM type: YTN; PAM sequence: TTG
  source 1..20: mol_type = other DNA
atctgcacatatctccccct

SEQ ID NO: 59308 - DNA, 20 bp, synthetic construct
  misc_feature 1..20: note = Description of Artificial Sequence: Synthetic oligonucleotide
  misc_feature 1..20: note = Target: SCN10A; (+) strand; PAM type: YTN; PAM sequence: CTG
  source 1..20: mol_type = other DNA
cacatatctccccctattca

SEQ ID NO: 59309 - DNA, 20 bp, synthetic construct
  misc_feature 1..20: note = Description of Artificial Sequence: Synthetic oligonucleotide
  misc_feature 1..20: note = Target: SCN10A; (+) strand; PAM type: YTN; PAM sequence: CTC
  source 1..20: mol_type = other DNA
cccctattcaaaggctgcca

SEQ ID NO: 59310 - DNA, 20 bp, synthetic construct
  misc_feature 1..20: note = Description of Artificial Sequence: Synthetic oligonucleotide
  misc_feature 1..20: note = Target: SCN10A; (+) strand; PAM type: YTN; PAM sequence: CTA
  source 1..20: mol_type = other DNA
ttcaaaggctgccattctcc

SEQ ID NO: 59311 - DNA, 20 bp, synthetic construct
  misc_feature 1..20: note = Description of Artificial Sequence: Synthetic oligonucleotide
  misc_feature 1..20: note = Target: SCN10A; (+) strand; PAM type: YTN; PAM sequence: TTC
  source 1..20: mol_type = other DNA
aaaggctgccattctcccct

SEQ ID NO: 59312 - DNA, 20 bp, synthetic construct
  misc_feature 1..20: note = Description of Artificial Sequence: Synthetic oligonucleotide
  misc_feature 1..20: note = Target: SCN10A; (+) strand; PAM type: YTN; PAM sequence: CTG
  source 1..20: mol_type = other DNA
ccattctcccctaccccatg

SEQ ID NO: 59313 - DNA, 20 bp, synthetic construct
  misc_feature 1..20: note = Description of Artificial Sequence: Synthetic oligonucleotide
  misc_feature 1..20: note = Target: SCN10A; (+) strand; PAM type: YTN; PAM sequence: TTC
  source 1..20: mol_type = other DNA
tcccctaccccatgtacctc

SEQ ID NO: 59314 - DNA, 20 bp, synthetic construct
  misc_feature 1..20: note = Description of Artificial Sequence: Synthetic oligonucleotide
  misc_feature 1..20: note = Target: SCN10A; (+) strand; PAM type: YTN; PAM sequence: CTC
  source 1..20: mol_type = other DNA
ccctaccccatgtacctcag

SEQ ID NO: 59315 - DNA, 20 bp, synthetic construct
  misc_feature 1..20: note = Description of Artificial Sequence: Synthetic oligonucleotide
  misc_feature 1..20: note = Target: SCN10A; (+) strand; PAM type: YTN; PAM sequence: CTA
  source 1..20: mol_type = other DNA
ccccatgtacctcaggggtt

SEQ ID NO: 59316 - DNA, 20 bp, synthetic construct
  misc_feature 1..20: note = Description of Artificial Sequence: Synthetic oligonucleotide
  misc_feature 1..20: note = Target: SCN10A; (+) strand; PAM type: YTN; PAM sequence: CTC
  source 1..20: mol_type = other DNA
aggggttaggcctggcgttc

SEQ ID NO: 59317 - DNA, 20 bp, synthetic construct
  misc_feature 1..20: note = Description of Artificial Sequence: Synthetic oligonucleotide
  misc_feature 1..20: note = Target: SCN10A; (+) strand; PAM type: YTN; PAM sequence: TTA
  source 1..20: mol_type = other DNA
ggcctggcgttctccttgtt

SEQ ID NO: 59318 - DNA, 20 bp, synthetic construct
  misc_feature 1..20: note = Description of Artificial Sequence: Synthetic oligonucleotide
  misc_feature 1..20: note = Target: SCN10A; (+) strand; PAM type: YTN; PAM sequence: CTG
  source 1..20: mol_type = other DNA
gcgttctccttgttcaccac

SEQ ID NO: 59319 - DNA, 20 bp, synthetic construct
  misc_feature 1..20: note = Description of Artificial Sequence: Synthetic oligonucleotide
  misc_feature 1..20: note = Target: SCN10A; (+) strand; PAM type: YTN; PAM sequence: TTC
  source 1..20: mol_type = other DNA
tccttgttcaccactgaccc

SEQ ID NO: 59320 - DNA, 20 bp, synthetic construct
  misc_feature 1..20: note = Description of Artificial Sequence: Synthetic oligonucleotide
  misc_feature 1..20: note = Target: SCN10A; (+) strand; PAM type: YTN; PAM sequence: CTC
  source 1..20: mol_type = other DNA
cttgttcaccactgaccctt

SEQ ID NO: 59321 - DNA, 20 bp, synthetic construct
  misc_feature 1..20: note = Description of Artificial Sequence: Synthetic oligonucleotide
  misc_feature 1..20: note = Target: SCN10A; (+) strand; PAM type: YTN; PAM sequence: CTT
  source 1..20: mol_type = other DNA
gttcaccactgacccttcca

SEQ ID NO: 59322 - DNA, 20 bp, synthetic construct
  misc_feature 1..20: note = Description of Artificial Sequence: Synthetic oligonucleotide
  misc_feature 1..20: note = Target: SCN10A; (+) strand; PAM type: YTN; PAM sequence: TTG
  source 1..20: mol_type = other DNA
ttcaccactgacccttccac

SEQ ID NO: 59323 - DNA, 20 bp, synthetic construct
  misc_feature 1..20: note = Description of Artificial Sequence: Synthetic oligonucleotide
  misc_feature 1..20: note = Target: SCN10A; (+) strand; PAM type: YTN; PAM sequence: TTC
  source 1..20: mol_type = other DNA
accactgacccttccacacc

SEQ ID NO: 59324 - DNA, 20 bp, synthetic construct
  misc_feature 1..20: note = Description of Artificial Sequence: Synthetic oligonucleotide
  misc_feature 1..20: note = Target: SCN10A; (+) strand; PAM type: YTN; PAM sequence: CTG
  source 1..20: mol_type = other DNA
acccttccacaccactgctc

SEQ ID NO: 59325 - DNA, 20 bp, synthetic construct
  misc_feature 1..20: note = Description of Artificial Sequence: Synthetic oligonucleotide
  misc_feature 1..20: note = Target: SCN10A; (+) strand; PAM type: YTN; PAM sequence: CTT
  source 1..20: mol_type = other DNA
ccacaccactgctcttcctg

SEQ ID NO: 59326 - DNA, 20 bp, synthetic construct
  misc_feature 1..20: note = Description of Artificial Sequence: Synthetic oligonucleotide
  misc_feature 1..20: note = Target: SCN10A; (+) strand; PAM type: YTN; PAM sequence: TTC
  source 1..20: mol_type = other DNA
cacaccactgctcttcctgt

SEQ ID NO: 59327 - DNA, 20 bp, synthetic construct
  misc_feature 1..20: note = Description of Artificial Sequence: Synthetic oligonucleotide
  misc_feature 1..20: note = Target: SCN10A; (+) strand; PAM type: YTN; PAM sequence: CTG
  source 1..20: mol_type = other DNA
ctcttcctgtgtcttgtaaa

SEQ ID NO: 59328 - DNA, 20 bp, synthetic construct
  misc_feature 1..20: note = Description of Artificial Sequence: Synthetic oligonucleotide
  misc_feature 1..20: note = Target: SCN10A; (+) strand; PAM type: YTN; PAM sequence: CTC
  source 1..20: mol_type = other DNA
ttcctgtgtcttgtaaaacc

SEQ ID NO: 59329 - DNA, 20 bp, synthetic construct
  misc_feature 1..20: note = Description of Artificial Sequence: Synthetic oligonucleotide
  misc_feature 1..20: note = Target: SCN10A; (+) strand; PAM type: YTN; PAM sequence: CTT
  source 1..20: mol_type = other DNA
cctgtgtcttgtaaaacccc

SEQ ID NO: 59330 - DNA, 20 bp, synthetic construct
  misc_feature 1..20: note = Description of Artificial Sequence: Synthetic oligonucleotide
  misc_feature 1..20: note = Target: SCN10A; (+) strand; PAM type: YTN; PAM sequence: TTC
  source 1..20: mol_type = other DNA
ctgtgtcttgtaaaacccct

SEQ ID NO: 59331 - DNA, 20 bp, synthetic construct
  misc_feature 1..20: note = Description of Artificial Sequence: Synthetic oligonucleotide
  misc_feature 1..20: note = Target: SCN10A; (+) strand; PAM type: YTN; PAM sequence: CTG
  source 1..20: mol_type = other DNA
tgtcttgtaaaaccccttct

SEQ ID NO: 59332 - DNA, 20 bp, synthetic construct
  misc_feature 1..20: note = Description of Artificial Sequence: Synthetic oligonucleotide
  misc_feature 1..20: note = Target: SCN10A; (+) strand; PAM type: YTN; PAM sequence: CTT
  source 1..20: mol_type = other DNA
gtaaaaccccttcttgcttt

SEQ ID NO: 59333 - DNA, 20 bp, synthetic construct
  misc_feature 1..20: note = Description of Artificial Sequence: Synthetic oligonucleotide
  misc_feature 1..20: note = Target: SCN10A; (+) strand; PAM type: YTN; PAM sequence: TTG
  source 1..20: mol_type = other DNA
taaaaccccttcttgctttg

SEQ ID NO: 59334 - DNA, 20 bp, synthetic construct
  misc_feature 1..20: note = Description of Artificial Sequence: Synthetic oligonucleotide
  misc_feature 1..20: note = Target: SCN10A; (+) strand; PAM type: YTN; PAM sequence: CTT
  source 1..20: mol_type = other DNA
cttgctttgaagctttgcca

SEQ ID NO: 59335 - DNA, 20 bp, synthetic construct
  misc_feature 1..20: note = Description of Artificial Sequence: Synthetic oligonucleotide
  misc_feature 1..20: note = Target: SCN10A; (+) strand; PAM type: YTN; PAM sequence: TTC
  source 1..20: mol_type = other DNA
ttgctttgaagctttgccac

SEQ ID NO: 59336 - DNA, 20 bp, synthetic construct
  misc_feature 1..20: note = Description of Artificial Sequence: Synthetic oligonucleotide
  misc_feature 1..20: note = Target: SCN10A; (+) strand; PAM type: YTN; PAM sequence: CTT
  source 1..20: mol_type = other DNA
gctttgaagctttgccacct

SEQ ID NO: 59337 - DNA, 20 bp, synthetic construct
  misc_feature 1..20: note = Description of Artificial Sequence: Synthetic oligonucleotide
  misc_feature 1..20: note = Target: SCN10A; (+) strand; PAM type: YTN; PAM sequence: TTG
  source 1..20: mol_type = other DNA
ctttgaagctttgccaccta

SEQ ID NO: 59338 - DNA, 20 bp, synthetic construct
  misc_feature 1..20: note = Description of Artificial Sequence: Synthetic oligonucleotide
  misc_feature 1..20: note = Target: SCN10A; (+) strand; PAM type: YTN; PAM sequence: CTT
  source 1..20: mol_type = other DNA
tgaagctttgccacctagtt

SEQ ID NO: 59339 - DNA, 20 bp, synthetic construct
  misc_feature 1..20: note = Description of Artificial Sequence: Synthetic oligonucleotide
  misc_feature 1..20: note = Target: SCN10A; (+) strand; PAM type: YTN; PAM sequence: TTT
  source 1..20: mol_type = other DNA
gaagctttgccacctagttt

SEQ ID NO: 59340 - DNA, 20 bp, synthetic construct
  misc_feature 1..20: note = Description of Artificial Sequence: Synthetic oligonucleotide
  misc_feature 1..20: note = Target: SCN10A; (+) strand; PAM type: YTN; PAM sequence: TTG
  source 1..20: mol_type = other DNA
aagctttgccacctagtttt

SEQ ID NO: 59341 - DNA, 20 bp, synthetic construct
  misc_feature 1..20: note = Description of Artificial Sequence: Synthetic oligonucleotide
  misc_feature 1..20: note = Target: SCN10A; (+) strand; PAM type: YTN; PAM sequence: CTT
  source 1..20: mol_type = other DNA
tgccacctagttttgtcact

SEQ ID NO: 59342 - DNA, 20 bp, synthetic construct
  misc_feature 1..20: note = Description of Artificial Sequence: Synthetic oligonucleotide
  misc_feature 1..20: note = Target: SCN10A; (+) strand; PAM type: YTN; PAM sequence: TTT
  source 1..20: mol_type = other DNA
gccacctagttttgtcactt

SEQ ID NO: 59343 - DNA, 20 bp, synthetic construct
  misc_feature 1..20: note = Description of Artificial Sequence: Synthetic oligonucleotide
  misc_feature 1..20: note = Target: SCN10A; (+) strand; PAM type: YTN; PAM sequence: TTG
  source 1..20: mol_type = other DNA
ccacctagttttgtcacttc

SEQ ID NO: 59344 - DNA, 20 bp, synthetic construct
  misc_feature 1..20: note = Description of Artificial Sequence: Synthetic oligonucleotide
  misc_feature 1..20: note = Target: SCN10A; (+) strand; PAM type: YTN; PAM sequence: CTA
  source 1..20: mol_type = other DNA
gttttgtcacttcttcatta

SEQ ID NO: 59345 - DNA, 20 bp, synthetic construct
  misc_feature 1..20: note = Description of Artificial Sequence: Synthetic oligonucleotide
  misc_feature 1..20: note = Target: SCN10A; (+) strand; PAM type: YTN; PAM sequence: TTT
  source 1..20: mol_type = other DNA
tgtcacttcttcattactgc

SEQ ID NO: 59346 - DNA, 20 bp, synthetic construct
  misc_feature 1..20: note = Description of Artificial Sequence: Synthetic oligonucleotide
  misc_feature 1..20: note = Target: SCN10A; (+) strand; PAM type: YTN; PAM sequence: TTT
  source 1..20: mol_type = other DNA
gtcacttcttcattactgcc

SEQ ID NO: 59347 - DNA, 20 bp, synthetic construct
  misc_feature 1..20: note = Description of Artificial Sequence: Synthetic oligonucleotide
  misc_feature 1..20: note = Target: SCN10A; (+) strand; PAM type: YTN; PAM sequence: TTG
  source 1..20: mol_type = other DNA
tcacttcttcattactgccg

SEQ ID NO: 59348 - DNA, 20 bp, synthetic construct
  misc_feature 1..20: note = Description of Artificial Sequence: Synthetic oligonucleotide
  misc_feature 1..20: note = Target: SCN10A; (+) strand; PAM type: YTN; PAM sequence: CTT
  source 1..20: mol_type = other DNA
cttcattactgccgcttgcc

SEQ ID NO: 59349 - DNA, 20 bp, synthetic construct
  misc_feature 1..20: note = Description of Artificial Sequence: Synthetic oligonucleotide
  misc_feature 1..20: note = Target: SCN10A; (+) strand; PAM type: YTN; PAM sequence: TTC
  source 1..20: mol_type = other DNA
ttcattactgccgcttgcca

SEQ ID NO: 59350 - DNA, 20 bp, synthetic construct
  misc_feature 1..20: note = Description of Artificial Sequence: Synthetic oligonucleotide
  misc_feature 1..20: note = Target: SCN10A; (+) strand; PAM type: YTN; PAM sequence: CTT
  source 1..20: mol_type = other DNA
cattactgccgcttgccaaa

SEQ ID NO: 59351 - DNA, 20 bp, synthetic construct
  misc_feature 1..20: note = Description of Artificial Sequence: Synthetic oligonucleotide
  misc_feature 1..20: note = Target: SCN10A; (+) strand; PAM type: YTN; PAM sequence: TTC
  source 1..20: mol_type = other DNA
attactgccgcttgccaaac

SEQ ID NO: 59352 - DNA, 20 bp, synthetic construct
  misc_feature 1..20: note = Description of Artificial Sequence: Synthetic oligonucleotide
  misc_feature 1..20: note = Target: SCN10A; (+) strand; PAM type: YTN; PAM sequence: TTA
  source 1..20: mol_type = other DNA
ctgccgcttgccaaactctt

SEQ ID NO: 59353 - DNA, 20 bp, synthetic construct
  misc_feature 1..20: note = Description of Artificial Sequence: Synthetic oligonucleotide
  misc_feature 1..20: note = Target: SCN10A; (+) strand; PAM type: YTN; PAM sequence: CTG
  source 1..20: mol_type = other DNA
ccgcttgccaaactcttggt

SEQ ID NO: 59354 - DNA, 20 bp, synthetic construct
  misc_feature 1..20: note = Description of Artificial Sequence: Synthetic oligonucleotide
  misc_feature 1..20: note = Target: SCN10A; (+) strand; PAM type: YTN; PAM sequence: CTT
  source 1..20: mol_type = other DNA
gccaaactcttggtccctct

SEQ ID NO: 59355 - DNA, 20 bp, synthetic construct
  misc_feature 1..20: note = Description of Artificial Sequence: Synthetic oligonucleotide
  misc_feature 1..20: note = Target: SCN10A; (+) strand; PAM type: YTN; PAM sequence: TTG
  source 1..20: mol_type = other DNA
ccaaactcttggtccctctg

SEQ ID NO: 59356 - DNA, 20 bp, synthetic construct
  misc_feature 1..20: note = Description of Artificial Sequence: Synthetic oligonucleotide
  misc_feature 1..20: note = Target: SCN10A; (+) strand; PAM type: YTN; PAM sequence: CTC
  source 1..20: mol_type = other DNA
ttggtccctctgcctcagta

SEQ ID NO: 59357 - DNA, 20 bp, synthetic construct
  misc_feature 1..20: note = Description of Artificial Sequence: Synthetic oligonucleotide
  misc_feature 1..20: note = Target: SCN10A; (+) strand; PAM type: YTN; PAM sequence: CTT
  source 1..20: mol_type = other DNA
ggtccctctgcctcagtaat

SEQ ID NO: 59358 - DNA, 20 bp, synthetic construct
  misc_feature 1..20: note = Description of Artificial Sequence: Synthetic oligonucleotide
  misc_feature 1..20: note = Target: SCN10A; (+) strand; PAM type: YTN; PAM sequence: TTG
  source 1..20: mol_type = other DNA
gtccctctgcctcagtaatg

SEQ ID NO: 59359 - DNA, 20 bp, synthetic construct
  misc_feature 1..20: note = Description of Artificial Sequence: Synthetic oligonucleotide
  misc_feature 1..20: note = Target: SCN10A; (+) strand; PAM type: YTN; PAM sequence: CTC
  source 1..20: mol_type = other DNA
tgcctcagtaatgatgggtg

SEQ ID NO: 59360 - DNA, 20 bp, synthetic construct
  misc_feature 1..20: note = Description of Artificial Sequence: Synthetic oligonucleotide
  misc_feature 1..20: note = Target: SCN10A; (+) strand; PAM type: YTN; PAM sequence: CTG
  source 1..20: mol_type = other DNA
cctcagtaatgatgggtgag

SEQ ID NO: 59361 - DNA, 20 bp, synthetic construct
  misc_feature 1..20: note = Description of Artificial Sequence: Synthetic oligonucleotide
  misc_feature 1..20: note = Target: SCN10A; (+) strand; PAM type: YTN; PAM sequence: CTC
  source 1..20: mol_type = other DNA
agtaatgatgggtgaggctc

SEQ ID NO: 59362 - DNA, 20 bp, synthetic construct
  misc_feature 1..20: note = Description of Artificial Sequence: Synthetic oligonucleotide
  misc_feature 1..20: note = Target: SCN10A; (+) strand; PAM type: YTN; PAM sequence: CTC
  source 1..20: mol_type = other DNA
ttggccatatttgcccactc

SEQ ID NO: 59363 - DNA, 20 bp, synthetic construct
  misc_feature 1..20: note = Description of Artificial Sequence: Synthetic oligonucleotide
  misc_feature 1..20: note = Target: SCN10A; (+) strand; PAM type: YTN; PAM sequence: CTT
  source 1..20: mol_type = other DNA
ggccatatttgcccactctt

SEQ ID NO: 59364 - DNA, 20 bp, synthetic construct
  misc_feature 1..20: note = Description of Artificial Sequence: Synthetic oligonucleotide
  misc_feature 1..20: note = Target: SCN10A; (+) strand; PAM type: YTN; PAM sequence: TTG
  source 1..20: mol_type = other DNA
gccatatttgcccactcttg

SEQ ID NO: 59365 - DNA, 20 bp, synthetic construct
  misc_feature 1..20: note = Description of Artificial Sequence: Synthetic oligonucleotide
  misc_feature 1..20: note = Target: SCN10A; (+) strand; PAM type: YTN; PAM sequence: TTT
  source 1..20: mol_type = other DNA
gcccactcttggctattatc

SEQ ID NO: 59366 - DNA, 20 bp, synthetic construct
  misc_feature 1..20: note = Description of Artificial Sequence: Synthetic oligonucleotide
  misc_feature 1..20: note = Target: SCN10A; (+) strand; PAM type: YTN; PAM sequence: TTG
  source 1..20: mol_type = other DNA
cccactcttggctattatcc

SEQ ID NO: 59367 - DNA, 20 bp, synthetic construct
  misc_feature 1..20: note = Description of Artificial Sequence: Synthetic oligonucleotide
  misc_feature 1..20: note = Target: SCN10A; (+) strand; PAM type: YTN; PAM sequence: CTC
  source 1..20: mol_type = other DNA
ttggctattatcctaggcaa

SEQ ID NO: 59368 - DNA, 20 bp, synthetic construct
  misc_feature 1..20: note = Description of Artificial Sequence: Synthetic oligonucleotide
  misc_feature 1..20: note = Target: SCN10A; (+) strand; PAM type: YTN; PAM sequence: CTT
  source 1..20: mol_type = other DNA
ggctattatcctaggcaaca

SEQ ID NO: 59369 - DNA, 20 bp, synthetic construct
  misc_feature 1..20: note = Description of Artificial Sequence: Synthetic oligonucleotide
  misc_feature 1..20: note = Target: SCN10A; (+) strand; PAM type: YTN; PAM sequence: TTG
  source 1..20: mol_type = other DNA
gctattatcctaggcaacat

SEQ ID NO: 59370 - DNA, 20 bp, synthetic construct
  misc_feature 1..20: note = Description of Artificial Sequence: Synthetic oligonucleotide
  misc_feature 1..20: note = Target: SCN10A; (+) strand; PAM type: YTN; PAM sequence: CTA
  source 1..20: mol_type = other DNA
ttatcctaggcaacattaat

SEQ ID NO: 59371 - DNA, 20 bp, synthetic construct
  misc_feature 1..20: note = Description of Artificial Sequence: Synthetic oligonucleotide
  misc_feature 1..20: note = Target: SCN10A; (+) strand; PAM type: YTN; PAM sequence: TTA
  source 1..20: mol_type = other DNA
tcctaggcaacattaatgtc

SEQ ID NO: 59372 - DNA, 20 bp, synthetic construct
  misc_feature 1..20: note = Description of Artificial Sequence: Synthetic oligonucleotide
  misc_feature 1..20: note = Target: SCN10A; (+) strand; PAM type: YTN; PAM sequence: CTA
  source 1..20: mol_type = other DNA
ggcaacattaatgtccatgt

SEQ ID NO: 59373 - DNA, 20 bp, synthetic construct
  misc_feature 1..20: note = Description of Artificial Sequence: Synthetic oligonucleotide
  misc_feature 1..20: note = Target: SCN10A; (+) strand; PAM type: YTN; PAM sequence: TTA
  source 1..20: mol_type = other DNA
atgtccatgtgcattactct

SEQ ID NO: 59374 - DNA, 20 bp, synthetic construct
  misc_feature 1..20: note = Description of Artificial Sequence: Synthetic oligonucleotide
  misc_feature 1..20: note = Target: SCN10A; (+) strand; PAM type: YTN; PAM sequence: TTA
  source 1..20: mol_type = other DNA
ctctttgtctcttggtttat

SEQ ID NO: 59375 - DNA, 20 bp, synthetic construct
  misc_feature 1..20: note = Description of Artificial Sequence: Synthetic oligonucleotide
  misc_feature 1..20: note = Target: SCN10A; (+) strand; PAM type: YTN; PAM sequence: CTC
  source 1..20: mol_type = other DNA
tttgtctcttggtttattgc

SEQ ID NO: 59376 - DNA, 20 bp, synthetic construct
  misc_feature 1..20: note = Description of Artificial Sequence: Synthetic oligonucleotide
  misc_feature 1..20: note = Target: SCN10A; (+) strand; PAM type: YTN; PAM sequence: CTT
  source 1..20: mol_type = other DNA
tgtctcttggtttattgcac

SEQ ID NO: 59377 - DNA, 20 bp, synthetic construct
  misc_feature 1..20: note = Description of Artificial Sequence: Synthetic oligonucleotide
  misc_feature 1..20: note = Target: SCN10A; (+) strand; PAM type: YTN; PAM sequence: TTT
  source 1..20: mol_type = other DNA
gtctcttggtttattgcaca

SEQ ID NO: 59378 - DNA, 20 bp, synthetic construct
  misc_feature 1..20: note = Description of Artificial Sequence: Synthetic oligonucleotide
  misc_feature 1..20: note = Target: SCN10A; (+) strand; PAM type: YTN; PAM sequence: TTG
  source 1..20: mol_type = other DNA
tctcttggtttattgcacaa

SEQ ID NO: 59379 - DNA, 20 bp, synthetic construct
  misc_feature 1..20: note = Description of Artificial Sequence: Synthetic oligonucleotide
  misc_feature 1..20: note = Target: SCN10A; (+) strand; PAM type: YTN; PAM sequence: CTC
  source 1..20: mol_type = other DNA
ttggtttattgcacaaatct

SEQ ID NO: 59380 - DNA, 20 bp, synthetic construct
  misc_feature 1..20: note = Description of Artificial Sequence: Synthetic oligonucleotide
  misc_feature 1..20: note = Target: SCN10A; (+) strand; PAM type: YTN; PAM sequence: CTT
  source 1..20: mol_type = other DNA
ggtttattgcacaaatctct

SEQ ID NO: 59381 - DNA, 20 bp, synthetic construct
  misc_feature 1..20: note = Description of Artificial Sequence: Synthetic oligonucleotide
  misc_feature 1..20: note = Target: SCN10A; (+) strand; PAM type: YTN; PAM sequence: TTG
  source 1..20: mol_type = other DNA
gtttattgcacaaatctcta

SEQ ID NO: 59382 - DNA, 20 bp, synthetic construct
  misc_feature 1..20: note = Description of Artificial Sequence: Synthetic oligonucleotide
  misc_feature 1..20: note = Target: SCN10A; (+) strand; PAM type: YTN; PAM sequence: TTT
  source 1..20: mol_type = other DNA
attgcacaaatctctaatga

SEQ ID NO: 59383 - DNA, 20 bp, synthetic construct
  misc_feature 1..20: note = Description of Artificial Sequence: Synthetic oligonucleotide
  misc_feature 1..20: note = Target: SCN10A; (+) strand; PAM type: YTN; PAM sequence: TTA
  source 1..20: mol_type = other DNA
ttgcacaaatctctaatgac

SEQ ID NO: 59384 - DNA, 20 bp, synthetic construct
  misc_feature 1..20: note = Description of Artificial Sequence: Synthetic oligonucleotide
  misc_feature 1..20: note = Target: SCN10A; (+) strand; PAM type: YTN; PAM sequence: TTG
  source 1..20: mol_type = other DNA
cacaaatctctaatgaccta

SEQ ID NO: 59385 - DNA, 20 bp, synthetic construct
  misc_feature 1..20: note = Description of Artificial Sequence: Synthetic oligonucleotide
  misc_feature 1..20: note = Target: SCN10A; (+) strand; PAM type: YTN; PAM sequence: CTC
  source 1..20: mol_type = other DNA
taatgacctagtttctccta

SEQ ID NO: 59386 - DNA, 20 bp, synthetic construct
  misc_feature 1..20: note = Description of Artificial Sequence: Synthetic oligonucleotide
  misc_feature 1..20: note = Target: SCN10A; (+) strand; PAM type: YTN; PAM sequence: CTA
  source 1..20: mol_type = other DNA
atgacctagtttctcctaac

SEQ ID NO: 59387 - DNA, 20 bp, synthetic construct
  misc_feature 1..20: note = Description of Artificial Sequence: Synthetic oligonucleotide
  misc_feature 1..20: note = Target: SCN10A; (+) strand; PAM type: YTN; PAM sequence: CTA
  source 1..20: mol_type = other DNA
gtttctcctaacttaaagca

SEQ ID NO: 59388 - DNA, 20 bp, synthetic construct
  misc_feature 1..20: note = Description of Artificial Sequence: Synthetic oligonucleotide
  misc_feature 1..20: note = Target: SCN10A; (+) strand; PAM type: YTN; PAM sequence: TTT
  source 1..20: mol_type = other DNA
ctcctaacttaaagcagaat

SEQ ID NO: 59389 - DNA, 20 bp, synthetic construct
  misc_feature 1..20: note = Description of Artificial Sequence: Synthetic oligonucleotide
  misc_feature 1..20: note = Target: SCN10A; (+) strand; PAM type: YTN; PAM sequence: TTC
  source 1..20: mol_type = other DNA
tcctaacttaaagcagaata

SEQ ID NO: 59390 - DNA, 20 bp, synthetic construct
  misc_feature 1..20: note = Description of Artificial Sequence: Synthetic oligonucleotide
  misc_feature 1..20: note = Target: SCN10A; (+) strand; PAM type: YTN; PAM sequence: CTC
  source 1..20: mol_type = other DNA
ctaacttaaagcagaatatt

SEQ ID NO: 59391 - DNA, 20 bp, synthetic construct
  misc_feature 1..20: note = Description of Artificial Sequence: Synthetic oligonucleotide
  misc_feature 1..20: note = Target: SCN10A; (+) strand; PAM type: YTN; PAM sequence: CTA
  source 1..20: mol_type = other DNA
acttaaagcagaatatttca

SEQ ID NO: 59392 - DNA, 20 bp, synthetic construct
  misc_feature 1..20: note = Description of Artificial Sequence: Synthetic oligonucleotide
  misc_feature 1..20: note = Target: SCN10A; (+) strand; PAM type: YTN; PAM sequence: CTT
  source 1..20: mol_type = other DNA
aaagcagaatatttcagaaa

SEQ ID NO: 59393 - DNA, 20 bp, synthetic construct
  misc_feature 1..20: note = Description of Artificial Sequence: Synthetic oligonucleotide
  misc_feature 1..20: note = Target: SCN10A; (+) strand; PAM type: YTN; PAM sequence: TTA
  source 1..20: mol_type = other DNA
aagcagaatatttcagaaac

SEQ ID NO: 59394 - DNA, 20 bp, synthetic construct
  misc_feature 1..20: note = Description of Artificial Sequence: Synthetic oligonucleotide
  misc_feature 1..20: note = Target: SCN10A; (+) strand; PAM type: YTN; PAM sequence: TTT
  source 1..20: mol_type = other DNA
cagaaacttacatctccctc

SEQ ID NO: 59395 - DNA, 20 bp, synthetic construct
  misc_feature 1..20: note = Description of Artificial Sequence: Synthetic oligonucleotide
  misc_feature 1..20: note = Target: SCN10A; (+) strand; PAM type: YTN; PAM sequence: TTC
  source 1..20: mol_type = other DNA
agaaacttacatctccctcc

SEQ ID NO: 59396 - DNA, 20 bp, synthetic construct
  misc_feature 1..20: note = Description of Artificial Sequence: Synthetic oligonucleotide
  misc_feature 1..20: note = Target: SCN10A; (+) strand; PAM type: YTN; PAM sequence: CTT
  source 1..20: mol_type = other DNA
acatctccctccagctacca

SEQ ID NO: 59397 - DNA, 20 bp, synthetic construct
  misc_feature 1..20: note = Description of Artificial Sequence: Synthetic oligonucleotide
  misc_feature 1..20: note = Target: SCN10A; (+) strand; PAM type: YTN; PAM sequence: TTA
  source 1..20: mol_type = other DNA
catctccctccagctaccat

SEQ ID NO: 59398 - DNA, 20 bp, synthetic construct
  misc_feature 1..20: note = Description of Artificial Sequence: Synthetic oligonucleotide
  misc_feature 1..20: note = Target: SCN10A; (+) strand; PAM type: YTN; PAM sequence: CTC
  source 1..20: mol_type = other DNA
cctccagctaccatcttaga

SEQ ID NO: 59399 - DNA, 20 bp, synthetic construct
  misc_feature 1..20: note = Description of Artificial Sequence: Synthetic oligonucleotide
  misc_feature 1..20: note = Target: SCN10A; (+) strand; PAM type: YTN; PAM sequence: CTC
  source 1..20: mol_type = other DNA
cagctaccatcttagatctc

SEQ ID NO: 59400 - DNA, 20 bp, synthetic construct
  misc_feature 1..20: note = Description of Artificial Sequence: Synthetic oligonucleotide
  misc_feature 1..20: note = Target: SCN10A; (+) strand; PAM type: YTN; PAM sequence: CTA
  source 1..20: mol_type = other DNA
ccatcttagatctcttccca

SEQ ID NO: 59401 - DNA, 20 bp, synthetic construct
  misc_feature 1..20: note = Description of Artificial Sequence: Synthetic oligonucleotide
  misc_feature 1..20: note = Target: SCN10A; (+) strand; PAM type: YTN; PAM sequence: CTT
  source 1..20: mol_type = other DNA
agatctcttcccaccttcaa

SEQ ID NO: 59402 - DNA, 20 bp, synthetic construct
  misc_feature 1..20: note = Description of Artificial Sequence: Synthetic oligonucleotide
  misc_feature 1..20: note = Target: SCN10A; (+) strand; PAM type: YTN; PAM sequence: TTA
  source 1..20: mol_type = other DNA
gatctcttcccaccttcaaa

SEQ ID NO: 59403 - DNA, 20 bp, synthetic construct
  misc_feature 1..20: note = Description of Artificial Sequence: Synthetic oligonucleotide
  misc_feature 1..20: note = Target: SCN10A; (+) strand; PAM type: YTN; PAM sequence: CTC
  source 1..20: mol_type = other DNA
ttcccaccttcaaagcaaaa

SEQ ID NO: 59404 - DNA, 20 bp, synthetic construct
  misc_feature 1..20: note = Description of Artificial Sequence: Synthetic oligonucleotide
  misc_feature 1..20: note = Target: SCN10A; (+) strand; PAM type: YTN; PAM sequence: CTT
  source 1..20: mol_type = other DNA
cccaccttcaaagcaaaatt

SEQ ID NO: 59405 - DNA, 20 bp, synthetic construct
  misc_feature 1..20: note = Description of Artificial Sequence: Synthetic oligonucleotide
  misc_feature 1..20: note = Target: SCN10A; (+) strand; PAM type: YTN; PAM sequence: TTC
  source 1..20: mol_type = other DNA
ccaccttcaaagcaaaattt

SEQ ID NO: 59406 - DNA, 20 bp, synthetic construct
  misc_feature 1..20: note = Description of Artificial Sequence: Synthetic oligonucleotide
  misc_feature 1..20: note = Target: SCN10A; (+) strand; PAM type: YTN; PAM sequence: CTT
  source 1..20: mol_type = other DNA
caaagcaaaatttcttgaaa

SEQ ID NO: 59407 - DNA, 20 bp, synthetic construct
  misc_feature 1..20: note = Description of Artificial Sequence: Synthetic oligonucleotide
  misc_feature 1..20: note = Target: SCN10A; (+) strand; PAM type: YTN; PAM sequence: TTC
  source 1..20: mol_type = other DNA
aaagcaaaatttcttgaaag

SEQ ID NO: 59408 - DNA, 20 bp, synthetic construct
  misc_feature 1..20: note = Description of Artificial Sequence: Synthetic oligonucleotide
  misc_feature 1..20: note = Target: SCN10A; (+) strand; PAM type: YTN; PAM sequence: TTT
  source 1..20: mol_type = other DNA
cttgaaagagttgtgtacaa

SEQ ID NO: 59409 - DNA, 20 bp, synthetic construct
  misc_feature 1..20: note = Description of Artificial Sequence: Synthetic oligonucleotide
  misc_feature 1..20: note = Target: SCN10A; (+) strand; PAM type: YTN; PAM sequence: TTC
  source 1..20: mol_type = other DNA
ttgaaagagttgtgtacaat

SEQ ID NO: 59410 - DNA, 20 bp, synthetic construct
  misc_feature 1..20: note = Description of Artificial Sequence: Synthetic oligonucleotide
  misc_feature 1..20: note = Target: SCN10A; (+) strand; PAM type: YTN; PAM sequence: CTT
  source 1..20: mol_type = other DNA
gaaagagttgtgtacaatca

SEQ ID NO: 59411 - DNA, 20 bp, synthetic construct
  misc_feature 1..20: note = Description of Artificial Sequence: Synthetic oligonucleotide
  misc_feature 1..20: note = Target: SCN10A; (+) strand; PAM type: YTN; PAM sequence: TTG
  source 1..20: mol_type = other DNA
aaagagttgtgtacaatcag

SEQ ID NO: 59412 - DNA, 20 bp, synthetic construct
  misc_feature 1..20: note = Description of Artificial Sequence: Synthetic oligonucleotide
  misc_feature 1..20: note = Target: SCN10A; (+) strand; PAM type: YTN; PAM sequence: TTG
  source 1..20: mol_type = other DNA
tgtacaatcagtgtccctca

SEQ ID NO: 59413 - DNA, 20 bp, synthetic construct
  misc_feature 1..20: note = Description of Artificial Sequence: Synthetic oligonucleotide
  misc_feature 1..20: note = Target: SCN10A; (+) strand; PAM type: YTN; PAM sequence: CTC
  source 1..20: mol_type = other DNA
attcactcctcagcccacat

SEQ ID NO: 59414 - DNA, 20 bp, synthetic construct
  misc_feature 1..20: note = Description of Artificial Sequence: Synthetic oligonucleotide
  misc_feature 1..20: note = Target: SCN10A; (+) strand; PAM type: YTN; PAM sequence: TTC
  source 1..20: mol_type = other DNA
actcctcagcccacatcaac

SEQ ID NO: 59415 - DNA, 20 bp, synthetic construct
  misc_feature 1..20: note = Description of Artificial Sequence: Synthetic oligonucleotide
  misc_feature 1..20: note = Target: SCN10A; (+) strand; PAM type: YTN; PAM sequence: CTC
  source 1..20: mol_type = other DNA
ctcagcccacatcaacagag

SEQ ID NO: 59416 - DNA, 20 bp, synthetic construct
  misc_feature 1..20: note = Description of Artificial Sequence: Synthetic oligonucleotide
  misc_feature 1..20: note = Target: SCN10A; (+) strand; PAM type: YTN; PAM sequence: CTC
  source 1..20: mol_type = other DNA
agcccacatcaacagagctt

SEQ ID NO: 59417 - DNA, 20 bp, synthetic construct
  misc_feature 1..20: note = Description of Artificial Sequence: Synthetic oligonucleotide
  misc_feature 1..20: note = Target: SCN10A; (+) strand; PAM type: YTN; PAM sequence: CTT
  source 1..20: mol_type = other DNA
ttgcctctatcctgacagag

SEQ ID NO: 59418 - DNA, 20 bp, synthetic construct
  misc_feature 1..20: note = Description of Artificial Sequence: Synthetic oligonucleotide
  misc_feature 1..20: note = Target: SCN10A; (+) strand; PAM type: YTN; PAM sequence: TTT
  source 1..20: mol_type = other DNA
tgcctctatcctgacagaga

SEQ ID NO: 59419 - DNA, 20 bp, synthetic construct
  misc_feature 1..20: note = Description of Artificial Sequence: Synthetic oligonucleotide
  misc_feature 1..20: note = Target: SCN10A; (+) strand; PAM type: YTN; PAM sequence: TTT
  source 1..20: mol_type = other DNA
gcctctatcctgacagagat

SEQ ID NO: 59420 - DNA, 20 bp, synthetic construct
  misc_feature 1..20: note = Description of Artificial Sequence: Synthetic oligonucleotide
  misc_feature 1..20: note = Target: SCN10A; (+) strand; PAM type: YTN; PAM sequence: TTG
  source 1..20: mol_type = other DNA
cctctatcctgacagagatt

SEQ ID NO: 59421 - DNA, 20 bp, synthetic construct
  misc_feature 1..20: note = Description of Artificial Sequence: Synthetic oligonucleotide
  misc_feature 1..20: note = Target: SCN10A; (+) strand; PAM type: YTN; PAM sequence: CTC
  source 1..20: mol_type = other DNA
tatcctgacagagattgttc

SEQ ID NO: 59422 - DNA, 20 bp, synthetic construct
  misc_feature 1..20: note = Description of Artificial Sequence: Synthetic oligonucleotide
  misc_feature 1..20: note = Target: SCN10A; (+) strand; PAM type: YTN; PAM sequence: CTA
  source 1..20: mol_type = other DNA
tcctgacagagattgttctc

SEQ ID NO: 59423 - DNA, 20 bp, synthetic construct
  misc_feature 1..20: note = Description of Artificial Sequence: Synthetic oligonucleotide
  misc_feature 1..20: note = Target: SCN10A; (+) strand; PAM type: YTN; PAM sequence: CTG
  source 1..20: mol_type = other DNA
acagagattgttctcactaa

SEQ ID NO: 59424 - DNA, 20 bp, synthetic construct
  misc_feature 1..20: note = Description of Artificial Sequence: Synthetic oligonucleotide
  misc_feature 1..20: note = Target: SCN10A; (+) strand; PAM type: YTN; PAM sequence: TTG
  source 1..20: mol_type = other DNA
ttctcactaagatcatgaat

SEQ ID NO: 59425 - DNA, 20 bp, synthetic construct
  misc_feature 1..20: note = Description of Artificial Sequence: Synthetic oligonucleotide
  misc_feature 1..20: note = Target: SCN10A; (+) strand; PAM type: YTN; PAM sequence: TTC
  source 1..20: mol_type = other DNA
tcactaagatcatgaatgac

SEQ ID NO: 59426 - DNA, 20 bp, synthetic construct
  misc_feature 1..20: note = Description of Artificial Sequence: Synthetic oligonucleotide
  misc_feature 1..20: note = Target: SCN10A; (+) strand; PAM type: YTN; PAM sequence: CTC
  source 1..20: mol_type = other DNA
actaagatcatgaatgactt

SEQ ID NO: 59427 - DNA, 20 bp, synthetic construct
  misc_feature 1..20: note = Description of Artificial Sequence: Synthetic oligonucleotide
  misc_feature 1..20: note = Target: SCN10A; (+) strand; PAM type: YTN; PAM sequence: CTA
  source 1..20: mol_type = other DNA
agatcatgaatgacttccca

SEQ ID NO: 59428 - DNA, 20 bp, synthetic construct
  misc_feature 1..20: note = Description of Artificial Sequence: Synthetic oligonucleotide
  misc_feature 1..20: note = Target: SCN10A; (+) strand; PAM type: YTN; PAM sequence: CTT
  source 1..20: mol_type = other DNA
cccataatattagatccaag

SEQ ID NO: 59429 - DNA, 20 bp, synthetic construct
  misc_feature 1..20: note = Description of Artificial Sequence: Synthetic oligonucleotide
  misc_feature 1..20: note = Target: SCN10A; (+) strand; PAM type: YTN; PAM sequence: TTC
  source 1..20: mol_type = other DNA
ccataatattagatccaagg

SEQ ID NO: 59430 - DNA, 20 bp, synthetic construct
  misc_feature 1..20: note = Description of Artificial Sequence: Synthetic oligonucleotide
  misc_feature 1..20: note = Target: SCN10A; (+) strand; PAM type: YTN; PAM sequence: TTA
  source 1..20: mol_type = other DNA
gatccaaggacgcttgtctg

SEQ ID NO: 59431 - DNA, 20 bp, synthetic construct
  misc_feature 1..20: note = Description of Artificial Sequence: Synthetic oligonucleotide
  misc_feature 1..20: note = Target: SCN10A; (+) strand; PAM type: YTN; PAM sequence: CTT
  source 1..20: mol_type = other DNA
gtctgatattgcctagtacc

SEQ ID NO: 59432 - DNA, 20 bp, synthetic construct
  misc_feature 1..20: note = Description of Artificial Sequence: Synthetic oligonucleotide
  misc_feature 1..20: note = Target: SCN10A; (+) strand; PAM type: YTN; PAM sequence: TTG
  source 1..20: mol_type = other DNA
tctgatattgcctagtaccc

SEQ ID NO: 59433 - DNA, 20 bp, synthetic construct
  misc_feature 1..20: note = Description of Artificial Sequence: Synthetic oligonucleotide
  misc_feature 1..20: note = Target: SCN10A; (+) strand; PAM type: YTN; PAM sequence: CTG
  source 1..20: mol_type = other DNA
atattgcctagtacccttct

SEQ ID NO: 59434 - DNA, 20 bp, synthetic construct
  misc_feature 1..20: note = Description of Artificial Sequence: Synthetic oligonucleotide
  misc_feature 1..20: note = Target: SCN10A; (+) strand; PAM type: YTN; PAM sequence: TTG
  source 1..20: mol_type = other DNA
cctagtacccttctaccttg

SEQ ID NO: 59435 - DNA, 20 bp, synthetic construct
  misc_feature 1..20: note = Description of Artificial Sequence: Synthetic oligonucleotide
  misc_feature 1..20: note = Target: SCN10A; (+) strand; PAM type: YTN; PAM sequence: CTA
  source 1..20: mol_type = other DNA
gtacccttctaccttgaaat

SEQ ID NO: 59436 - DNA, 20 bp, synthetic construct
  misc_feature 1..20: note = Description of Artificial Sequence: Synthetic oligonucleotide
  misc_feature 1..20: note = Target: SCN10A; (+) strand; PAM type: YTN; PAM sequence: CTT
  source 1..20: mol_type = other DNA
ctaccttgaaatgttgcttt

SEQ ID NO: 59437 - DNA, 20 bp, synthetic construct
  misc_feature 1..20: note = Description of Artificial Sequence: Synthetic oligonucleotide
  misc_feature 1..20: note = Target: SCN10A; (+) strand; PAM type: YTN; PAM sequence: TTC
  source 1..20: mol_type = other DNA
taccttgaaatgttgctttc

SEQ ID NO: 59438 - DNA, 20 bp, synthetic construct
  misc_feature 1..20: note = Description of Artificial Sequence: Synthetic oligonucleotide
  misc_feature 1..20: note = Target: SCN10A; (+) strand; PAM type: YTN; PAM sequence: CTA
  source 1..20: mol_type = other DNA
ccttgaaatgttgctttctt

SEQ ID NO: 59439 - DNA, 20 bp, synthetic construct
  misc_feature 1..20: note = Description of Artificial Sequence: Synthetic oligonucleotide
  misc_feature 1..20: note = Target: SCN10A; (+) strand; PAM type: YTN; PAM sequence: CTT
  source 1..20: mol_type = other DNA
gaaatgttgctttcttggtc

SEQ ID NO: 59440 - DNA, 20 bp, synthetic construct
  misc_feature 1..20: note = Description of Artificial Sequence: Synthetic oligonucleotide
  misc_feature 1..20: note = Target: SCN10A; (+) strand; PAM type: YTN; PAM sequence: TTG
  source 1..20: mol_type = other DNA
aaatgttgctttcttggtct

SEQ ID NO: 59441 - DNA, 20 bp, synthetic construct
  misc_feature 1..20: note = Description of Artificial Sequence: Synthetic oligonucleotide
  misc_feature 1..20: note = Target: SCN10A; (+) strand; PAM type: YTN; PAM sequence: TTG
  source 1..20: mol_type = other DNA
ctttcttggtctccaccatg

SEQ ID NO: 59442 - DNA, 20 bp, synthetic construct
  misc_feature 1..20: note = Description of Artificial Sequence: Synthetic oligonucleotide
  misc_feature 1..20: note = Target: SCN10A; (+) strand; PAM type: YTN; PAM sequence: CTT
  source 1..20: mol_type = other DNA
tcttggtctccaccatgcct

SEQ ID NO: 59443 - DNA, 20 bp, synthetic construct
  misc_feature 1..20: note = Description of Artificial Sequence: Synthetic oligonucleotide
  misc_feature 1..20: note = Target: SCN10A; (+) strand; PAM type: YTN; PAM sequence: TTT
  source 1..20: mol_type = other DNA
cttggtctccaccatgcctt

SEQ ID NO: 59444 - DNA, 20 bp, synthetic construct
  misc_feature 1..20: note = Description of Artificial Sequence: Synthetic oligonucleotide
  misc_feature 1..20: note = Target: SCN10A; (+) strand; PAM type: YTN; PAM sequence: TTC
  source 1..20: mol_type = other DNA
ttggtctccaccatgcctta

SEQ ID NO: 59445 - DNA, 20 bp, synthetic construct
  misc_feature 1..20: note = Description of Artificial Sequence: Synthetic oligonucleotide
  misc_feature 1..20: note = Target: SCN10A; (+) strand; PAM type: YTN; PAM sequence: CTT
  source 1..20: mol_type = other DNA
ggtctccaccatgccttaca

SEQ ID NO: 59446 - DNA, 20 bp, synthetic construct
  misc_feature 1..20: note = Description of Artificial Sequence: Synthetic oligonucleotide
  misc_feature 1..20: note = Target: SCN10A; (+) strand; PAM type: YTN; PAM sequence: TTG
  source 1..20: mol_type = other DNA
gtctccaccatgccttacat

SEQ ID NO: 59447 - DNA, 20 bp, synthetic construct
  misc_feature 1..20: note = Description of Artificial Sequence: Synthetic oligonucleotide
  misc_feature 1..20: note = Target: SCN10A; (+) strand; PAM type: YTN; PAM sequence: CTC
  source 1..20: mol_type = other DNA
caccatgccttacatttctg

SEQ ID NO: 59448 - DNA, 20 bp, synthetic construct
  misc_feature 1..20: note = Description of Artificial Sequence: Synthetic oligonucleotide
  misc_feature 1..20: note = Target: SCN10A; (+) strand; PAM type: YTN; PAM sequence: CTT
  source 1..20: mol_type = other DNA
acatttctgcttcttttctt

SEQ ID NO: 59449 - DNA, 20 bp, synthetic construct
  misc_feature 1..20: note = Description of Artificial Sequence: Synthetic oligonucleotide
  misc_feature 1..20: note = Target: SCN10A; (+) strand; PAM type: YTN; PAM sequence: TTA
  source 1..20: mol_type = other DNA
catttctgcttcttttcttg

SEQ ID NO: 59450 - DNA, 20 bp, synthetic construct
  misc_feature 1..20: note = Description of Artificial Sequence: Synthetic oligonucleotide
  misc_feature 1..20: note = Target: SCN10A; (+) strand; PAM type: YTN; PAM sequence: TTT
  source 1..20: mol_type = other DNA
ctgcttcttttcttgccatt

SEQ ID NO: 59451 - DNA, 20 bp, synthetic construct
  misc_feature 1..20: note = Description of Artificial Sequence: Synthetic oligonucleotide
  misc_feature 1..20: note = Target: SCN10A; (+) strand; PAM type: YTN; PAM sequence: TTC
  source 1..20: mol_type = other DNA
tgcttcttttcttgccattt

SEQ ID NO: 59452 - DNA, 20 bp, synthetic construct
  misc_feature 1..20: note = Description of Artificial Sequence: Synthetic oligonucleotide
  misc_feature 1..20: note = Target: SCN10A; (+) strand; PAM type: YTN; PAM sequence: CTG
  source 1..20: mol_type = other DNA
cttcttttcttgccatttgt

SEQ ID NO: 59453 - DNA, 20 bp, synthetic construct
  misc_feature 1..20: note = Description of Artificial Sequence: Synthetic oligonucleotide
  misc_feature 1..20: note = Target: SCN10A; (+) strand; PAM type: YTN; PAM sequence: CTT
  source 1..20: mol_type = other DNA
cttttcttgccatttgtgat

SEQ ID NO: 59454 - DNA, 20 bp, synthetic construct
  misc_feature 1..20: note = Description of Artificial Sequence: Synthetic oligonucleotide
  misc_feature 1..20: note = Target: SCN10A; (+) strand; PAM type: YTN; PAM sequence: TTC
  source 1..20: mol_type = other DNA
ttttcttgccatttgtgatg

SEQ ID NO: 59455 - DNA, 20 bp, synthetic construct
  misc_feature 1..20: note = Description of Artificial Sequence: Synthetic oligonucleotide
  misc_feature 1..20: note = Target: SCN10A; (+) strand; PAM type: YTN; PAM sequence: CTT
  source 1..20: mol_type = other DNA
ttcttgccatttgtgatgct

SEQ ID NO: 59456 - DNA, 20 bp, synthetic construct
  misc_feature 1..20: note = Description of Artificial Sequence: Synthetic oligonucleotide
  misc_feature 1..20: note = Target: SCN10A; (+) strand; PAM type: YTN; PAM sequence: TTT
  source 1..20: mol_type = other DNA
tcttgccatttgtgatgctc

SEQ ID NO: 59457 - DNA, 20 bp, synthetic construct
  misc_feature 1..20: note = Description of Artificial Sequence: Synthetic oligonucleotide
  misc_feature 1..20: note = Target: SCN10A; (+) strand; PAM type: YTN; PAM sequence: TTT
  source 1..20: mol_type = other DNA
cttgccatttgtgatgctct

SEQ ID NO: 59458 - DNA, 20 bp, synthetic construct
  misc_feature 1..20: note = Description of Artificial Sequence: Synthetic oligonucleotide
  misc_feature 1..20: note = Target: SCN10A; (+) strand; PAM type: YTN; PAM sequence: TTC
  source 1..20: mol_type = other DNA
ttgccatttgtgatgctctt

SEQ ID NO: 59459 - DNA, 20 bp, synthetic construct
  misc_feature 1..20: note = Description of Artificial Sequence: Synthetic oligonucleotide
  misc_feature 1..20: note = Target: SCN10A; (+) strand; PAM type: YTN; PAM sequence: CTT
  source 1..20: mol_type = other DNA
gccatttgtgatgctctttt

SEQ ID NO: 59460 - DNA, 20 bp, synthetic construct
  misc_feature 1..20: note = Description of Artificial Sequence: Synthetic oligonucleotide
  misc_feature 1..20: note = Target: SCN10A; (+) strand; PAM type: YTN; PAM sequence: TTG
  source 1..20: mol_type = other DNA
ccatttgtgatgctctttta

SEQ ID NO: 59461 - DNA, 20 bp, synthetic construct
  misc_feature 1..20: note = Description of Artificial Sequence: Synthetic oligonucleotide
  misc_feature 1..20: note = Target: SCN10A; (+) strand; PAM type: YTN; PAM sequence: TTT
  source 1..20: mol_type = other DNA
gtgatgctcttttatagtct

SEQ ID NO: 59462 - DNA, 20 bp, synthetic construct
  misc_feature 1..20: note = Description of Artificial Sequence: Synthetic oligonucleotide
  misc_feature 1..20: note = Target: SCN10A; (+) strand; PAM type: YTN; PAM sequence: TTG
  source 1..20: mol_type = other DNA
tgatgctcttttatagtctc

SEQ ID NO: 59463 - DNA, 20 bp, synthetic construct
  misc_feature 1..20: note = Description of Artificial Sequence: Synthetic oligonucleotide
  misc_feature 1..20: note = Target: SCN10A; (+) strand; PAM type: YTN; PAM sequence: CTC
  source 1..20: mol_type = other DNA
ttttatagtctcctttaccc

SEQ ID NO: 59464 - DNA, 20 bp, synthetic construct
  misc_feature 1..20: note = Description of Artificial Sequence: Synthetic oligonucleotide
  misc_feature 1..20: note = Target: SCN10A; (+) strand; PAM type: YTN; PAM sequence: CTT
  source 1..20: mol_type = other DNA
ttatagtctcctttacccaa

SEQ ID NO: 59465 - DNA, 20 bp, synthetic construct
  misc_feature 1..20: note = Description of Artificial Sequence: Synthetic oligonucleotide
  misc_feature 1..20: note = Target: SCN10A; (+) strand; PAM type: YTN; PAM sequence: TTT
  source 1..20: mol_type = other DNA
tatagtctcctttacccaac

SEQ ID NO: 59466 - DNA, 20 bp, synthetic construct
  misc_feature 1..20: note = Description of Artificial Sequence: Synthetic oligonucleotide
  misc_feature 1..20: note = Target: SCN10A; (+) strand; PAM type: YTN; PAM sequence: TTT
  source 1..20: mol_type = other DNA
atagtctcctttacccaact

SEQ ID NO: 59467 - DNA, 20 bp, synthetic construct
  misc_feature 1..20: note = Description of Artificial Sequence: Synthetic oligonucleotide
  misc_feature 1..20: note = Target: SCN10A; (+) strand; PAM type: YTN; PAM sequence: TTA
  source 1..20: mol_type = other DNA
tagtctcctttacccaactt

SEQ ID NO: 59468 - DNA, 20 bp, synthetic construct
  misc_feature 1..20: note = Description of Artificial Sequence: Synthetic oligonucleotide
  misc_feature 1..20: note = Target: SCN10A; (+) strand; PAM type: YTN; PAM sequence: CTC
  source 1..20: mol_type = other DNA
ctttacccaacttttagaca

SEQ ID NO: 59469 - DNA, 20 bp, synthetic construct
  misc_feature 1..20: note = Description of Artificial Sequence: Synthetic oligonucleotide
  misc_feature 1..20: note = Target: SCN10A; (+) strand; PAM type: YTN; PAM sequence: CTT
  source 1..20: mol_type = other DNA
tacccaacttttagacatca

SEQ ID NO: 59470 - DNA, 20 bp, synthetic construct
  misc_feature 1..20: note = Description of Artificial Sequence: Synthetic oligonucleotide
  misc_feature 1..20: note = Target: SCN10A; (+) strand; PAM type: YTN; PAM sequence: TTT
  source 1..20: mol_type = other DNA
acccaacttttagacatcag

SEQ ID NO: 59471 - DNA, 20 bp, synthetic construct
  misc_feature 1..20: note = Description of Artificial Sequence: Synthetic oligonucleotide
  misc_feature 1..20: note = Target: SCN10A; (+) strand; PAM type: YTN; PAM sequence: TTA
  source 1..20: mol_type = other DNA
cccaacttttagacatcaga

SEQ ID NO: 59472 - DNA, 20 bp, synthetic construct
  misc_feature 1..20: note = Description of Artificial Sequence: Synthetic oligonucleotide
  misc_feature 1..20: note = Target: SCN10A; (+) strand; PAM type: YTN; PAM sequence: CTT
  source 1..20: mol_type = other DNA
ttagacatcagagttcttcg

SEQ ID NO: 59473 - DNA, 20 bp, synthetic construct
  misc_feature 1..20: note = Description of Artificial Sequence: Synthetic oligonucleotide
  misc_feature 1..20: note = Target: SCN10A; (+) strand; PAM type: YTN; PAM sequence: TTT
  source 1..20: mol_type = other DNA
tagacatcagagttcttcga

SEQ ID NO: 59474 - DNA, 20 bp, synthetic construct
  misc_feature 1..20: note = Description of Artificial Sequence: Synthetic oligonucleotide
  misc_feature 1..20: note = Target: SCN10A; (+) strand; PAM type: YTN; PAM sequence: TTT
  source 1..20: mol_type = other DNA
agacatcagagttcttcgag

SEQ ID NO: 59475 - DNA, 20 bp, synthetic construct
  misc_feature 1..20: note = Description of Artificial Sequence: Synthetic oligonucleotide
  misc_feature 1..20: note = Target: SCN10A; (+) strand; PAM type: YTN; PAM sequence: TTA
  source 1..20: mol_type = other DNA
gacatcagagttcttcgagg

SEQ ID NO: 59476 - DNA, 20 bp, synthetic construct
  misc_feature 1..20: note = Description of Artificial Sequence: Synthetic oligonucleotide
  misc_feature 1..20: note = Target: SCN10A; (+) strand; PAM type: YTN; PAM sequence: TTC
  source 1..20: mol_type = other DNA
ttcgaggctcagtcttgagc

SEQ ID NO: 59477 - DNA, 20 bp, synthetic construct
  misc_feature 1..20: note = Description of Artificial Sequence: Synthetic oligonucleotide
  misc_feature 1..20: note = Target: SCN10A; (+) strand; PAM type: YTN; PAM sequence: CTT
  source 1..20: mol_type = other DNA
cgaggctcagtcttgagcat

SEQ ID NO: 59478 - DNA, 20 bp, synthetic construct
  misc_feature 1..20: note = Description of Artificial Sequence: Synthetic oligonucleotide
  misc_feature 1..20: note = Target: SCN10A; (+) strand; PAM type: YTN; PAM sequence: TTC
  source 1..20: mol_type = other DNA
gaggctcagtcttgagcatc

SEQ ID NO: 59479 - DNA, 20 bp, synthetic construct
  misc_feature 1..20: note = Description of Artificial Sequence: Synthetic oligonucleotide
  misc_feature 1..20: note = Target: SCN10A; (+) strand; PAM type: YTN; PAM sequence: CTC
  source 1..20: mol_type = other DNA
agtcttgagcatcctttgct

SEQ ID NO: 59480 - DNA, 20 bp, synthetic construct
  misc_feature 1..20: note = Description of Artificial Sequence: Synthetic oligonucleotide
  misc_feature 1..20: note = Target: SCN10A; (+) strand; PAM type: YTN; PAM sequence: CTT
  source 1..20: mol_type = other DNA
gagcatcctttgctcttcac

SEQ ID NO: 59481 - DNA, 20 bp, synthetic construct
  misc_feature 1..20: note = Description of Artificial Sequence: Synthetic oligonucleotide
  misc_feature 1..20: note = Target: SCN10A; (+) strand; PAM type: YTN; PAM sequence: TTG
  source 1..20: mol_type = other DNA
agcatcctttgctcttcacc

SEQ ID NO: 59482 - DNA, 20 bp, synthetic construct
  misc_feature 1..20: note = Description of Artificial Sequence: Synthetic oligonucleotide
  misc_feature 1..20: note = Target: SCN10A; (+) strand; PAM type: YTN; PAM sequence: CTT
  source 1..20: mol_type = other DNA
tgctcttcaccccatttttt

SEQ ID NO: 59483 - DNA, 20 bp, synthetic construct
  misc_feature 1..20: note = Description of Artificial Sequence: Synthetic oligonucleotide
  misc_feature 1..20: note = Target: SCN10A; (+) strand; PAM type: YTN; PAM sequence: TTT
  source 1..20: mol_type = other DNA
gctcttcaccccattttttc

SEQ ID NO: 59484 - DNA, 20 bp, synthetic construct
  misc_feature 1..20: note = Description of Artificial Sequence: Synthetic oligonucleotide
  misc_feature 1..20: note = Target: SCN10A; (+) strand; PAM type: YTN; PAM sequence: TTG
  source 1..20: mol_type = other DNA
ctcttcaccccattttttct

SEQ ID NO: 59485 - DNA, 20 bp, synthetic construct
  misc_feature 1..20: note = Description of Artificial Sequence: Synthetic oligonucleotide
  misc_feature 1..20: note = Target: SCN10A; (+) strand; PAM type: YTN; PAM sequence: CTC
  source 1..20: mol_type = other DNA
ttcaccccattttttctccc

SEQ ID NO: 59486 - DNA, 20 bp, synthetic construct
  misc_feature 1..20: note = Description of Artificial Sequence: Synthetic oligonucleotide
  misc_feature 1..20: note = Target: SCN10A; (+) strand; PAM type: YTN; PAM sequence: CTT
  source 1..20: mol_type = other DNA
caccccattttttctccctt

SEQ ID NO: 59487 - DNA, 20 bp, synthetic construct
  misc_feature 1..20: note = Description of Artificial Sequence: Synthetic oligonucleotide
  misc_feature 1..20: note = Target: SCN10A; (+) strand; PAM type: YTN; PAM sequence: TTC
  source 1..20: mol_type = other DNA
accccattttttctcccttg

SEQ ID NO: 59488 - DNA, 20 bp, synthetic construct
  misc_feature 1..20: note = Description of Artificial Sequence: Synthetic oligonucleotide
  misc_feature 1..20: note = Target: SCN10A; (+) strand; PAM type: YTN; PAM sequence: TTT
  source 1..20: mol_type = other DNA
tttctcccttgacaatttat

SEQ ID NO: 59489 - DNA, 20 bp, synthetic construct
  misc_feature 1..20: note = Description of Artificial Sequence: Synthetic oligonucleotide
  misc_feature 1..20: note = Target: SCN10A; (+) strand; PAM type: YTN; PAM sequence: TTT
  source 1..20: mol_type = other DNA
ttctcccttgacaatttatc

SEQ ID NO: 59490 - DNA, 20 bp, synthetic construct
  misc_feature 1..20: note = Description of Artificial Sequence: Synthetic oligonucleotide
  misc_feature 1..20: note = Target: SCN10A; (+) strand; PAM type: YTN; PAM sequence: TTT
  source 1..20: mol_type = other DNA
tctcccttgacaatttatcc

SEQ ID NO: 59491 - DNA, 20 bp, synthetic construct
  misc_feature 1..20: note = Description of Artificial Sequence: Synthetic oligonucleotide
  misc_feature 1..20: note = Target: SCN10A; (+) strand; PAM type: YTN; PAM sequence: TTT
  source 1..20: mol_type = other DNA
ctcccttgacaatttatcca

SEQ ID NO: 59492 - DNA, 20 bp, synthetic construct
  misc_feature 1..20: note = Description of Artificial Sequence: Synthetic oligonucleotide
  misc_feature 1..20: note = Target: SCN10A; (+) strand; PAM type: YTN; PAM sequence: TTC
  source 1..20: mol_type = other DNA
tcccttgacaatttatccag

SEQ ID NO: 59493 - DNA, 20 bp, synthetic construct
  misc_feature 1..20: note = Description of Artificial Sequence: Synthetic oligonucleotide
  misc_feature 1..20: note = Target: SCN10A; (+) strand; PAM type: YTN; PAM sequence: CTC
  source 1..20: mol_type = other DNA
ccttgacaatttatccagcc

SEQ ID NO: 59494 - DNA, 20 bp, synthetic construct
  misc_feature 1..20: note = Description of Artificial Sequence: Synthetic oligonucleotide
  misc_feature 1..20: note = Target: SCN10A; (+) strand; PAM type: YTN; PAM sequence: CTT
  source 1..20: mol_type = other DNA
gacaatttatccagccagga

SEQ ID NO: 59495 - DNA, 20 bp, synthetic construct
  misc_feature 1..20: note = Description of Artificial Sequence: Synthetic oligonucleotide
  misc_feature 1..20: note = Target: SCN10A; (+) strand; PAM type: YTN; PAM sequence: TTG
  source 1..20: mol_type = other DNA
acaatttatccagccaggaa

SEQ ID NO: 59496 - DNA, 20 bp, synthetic construct
  misc_feature 1..20: note = Description of Artificial Sequence: Synthetic oligonucleotide
  misc_feature 1..20: note = Target: SCN10A; (+) strand; PAM type: YTN; PAM sequence: TTT
  source 1..20: mol_type = other DNA
atccagccaggaattaacat

SEQ ID NO: 59497 - DNA, 20 bp, synthetic construct
  misc_feature 1..20: note = Description of Artificial Sequence: Synthetic oligonucleotide
  misc_feature 1..20: note = Target: SCN10A; (+) strand; PAM type: YTN; PAM sequence: TTA
  source 1..20: mol_type = other DNA
tccagccaggaattaacata

SEQ ID NO: 59498 - DNA, 20 bp, synthetic construct
  misc_feature 1..20: note = Description of Artificial Sequence: Synthetic oligonucleotide
  misc_feature 1..20: note = Target: SCN10A; (+) strand; PAM type: YTN; PAM sequence: TTA
  source 1..20: mol_type = other DNA
acatatatgtgcaacttttg

SEQ ID NO: 59499 - DNA, 20 bp, synthetic construct
  misc_feature 1..20: note = Description of Artificial Sequence: Synthetic oligonucleotide
  misc_feature 1..20: note = Target: SCN10A; (+) strand; PAM type: YTN; PAM sequence: CTT
  source 1..20: mol_type = other DNA
ttggccaactgtttgcctct

SEQ ID NO: 59500 - DNA, 20 bp, synthetic construct
  misc_feature 1..20: note = Description of Artificial Sequence: Synthetic oligonucleotide
  misc_feature 1..20: note = Target: SCN10A; (+) strand; PAM type: YTN; PAM sequence: TTT
  source 1..20: mol_type = other DNA
tggccaactgtttgcctctg

SEQ ID NO: 59501 - DNA, 20 bp, synthetic construct
  misc_feature 1..20: note = Description of Artificial Sequence: Synthetic oligonucleotide
  misc_feature 1..20: note = Target: SCN10A; (+) strand; PAM type: YTN; PAM sequence: TTT
  source 1..20: mol_type = other DNA
ggccaactgtttgcctctgt

SEQ ID NO: 59502 - DNA, 20 bp, synthetic construct
  misc_feature 1..20: note = Description of Artificial Sequence: Synthetic oligonucleotide
  misc_feature 1..20: note = Target: SCN10A; (+) strand; PAM type: YTN; PAM sequence: TTG
  source 1..20: mol_type = other DNA
gccaactgtttgcctctgtc

SEQ ID NO: 59503 - DNA, 20 bp, synthetic construct
  misc_feature 1..20: note = Description of Artificial Sequence: Synthetic oligonucleotide
  misc_feature 1..20: note = Target: SCN10A; (+) strand; PAM type: YTN; PAM sequence: CTG
  source 1..20: mol_type = other DNA
tttgcctctgtcactggact

SEQ ID NO: 59504 - DNA, 20 bp, synthetic construct
  misc_feature 1..20: note = Description of Artificial Sequence: Synthetic oligonucleotide
  misc_feature 1..20: note = Target: SCN10A; (+) strand; PAM type: YTN; PAM sequence: TTT
  source 1..20: mol_type = other DNA
gcctctgtcactggactgta

SEQ ID NO: 59505 - DNA, 20 bp, synthetic construct
  misc_feature 1..20: note = Description of Artificial Sequence: Synthetic oligonucleotide
  misc_feature 1..20: note = Target: SCN10A; (+) strand; PAM type: YTN; PAM sequence: TTG
  source 1..20: mol_type = other DNA
cctctgtcactggactgtaa

SEQ ID NO: 59506 - DNA, 20 bp, synthetic construct
  misc_feature 1..20: note = Description of Artificial Sequence: Synthetic oligonucleotide
  misc_feature 1..20: note = Target: SCN10A; (+) strand; PAM type: YTN; PAM sequence: CTC
  source 1..20: mol_type = other DNA
tgtcactggactgtaaactg

SEQ ID NO: 59507 - DNA, 20 bp, synthetic construct
  misc_feature 1..20: note = Description of Artificial Sequence: Synthetic oligonucleotide
  misc_feature 1..20: note = Target: SCN10A; (+) strand; PAM type: YTN; PAM sequence: CTG
  source 1..20: mol_type = other DNA
tcactggactgtaaactgta

SEQ ID NO: 59508 - DNA, 20 bp, synthetic construct
  misc_feature 1..20: note = Description of Artificial Sequence: Synthetic oligonucleotide
  misc_feature 1..20: note = Target: SCN10A; (+) strand; PAM type: YTN; PAM sequence: CTG
  source 1..20: mol_type = other DNA
gactgtaaactgtaagagta

SEQ ID NO: 59509 - DNA, 20 bp, synthetic construct
  misc_feature 1..20: note = Description of Artificial Sequence: Synthetic oligonucleotide
  misc_feature 1..20: note = Target: SCN10A; (+) strand; PAM type: YTN; PAM sequence: CTG
  source 1..20: mol_type = other DNA
taaactgtaagagtaggaac

SEQ ID NO: 59510 - DNA, 20 bp, synthetic construct
  misc_feature 1..20: note = Description of Artificial Sequence: Synthetic oligonucleotide
  misc_feature 1..20: note = Target: SCN10A; (+) strand; PAM type: YTN; PAM sequence: CTG
  source 1..20: mol_type = other DNA
taagagtaggaactttgtct

SEQ ID NO: 59511 - DNA, 20 bp, synthetic construct
  misc_feature 1..20: note = Description of Artificial Sequence: Synthetic oligonucleotide
  misc_feature 1..20: note = Target: SCN10A; (+) strand; PAM type: YTN; PAM sequence: CTT
  source 1..20: mol_type = other DNA
tgtctgtcttgctcactgct

SEQ ID NO: 59512 - DNA, 20 bp, synthetic construct
  misc_feature 1..20: note = Description of Artificial Sequence: Synthetic oligonucleotide
  misc_feature 1..20: note = Target: SCN10A; (+) strand; PAM type: YTN; PAM sequence: TTT
  source 1..20: mol_type = other DNA
gtctgtcttgctcactgctc

SEQ ID NO: 59513 - DNA, 20 bp, synthetic construct
  misc_feature 1..20: note = Description of Artificial Sequence: Synthetic oligonucleotide
  misc_feature 1..20: note = Target: SCN10A; (+) strand; PAM type: YTN; PAM sequence: TTG
  source 1..20: mol_type = other DNA
tctgtcttgctcactgctct

SEQ ID NO: 59514 - DNA, 20 bp, synthetic construct
  misc_feature 1..20: note = Description of Artificial Sequence: Synthetic oligonucleotide
  misc_feature 1..20: note = Target: SCN10A; (+) strand; PAM type: YTN; PAM sequence: CTG
  source 1..20: mol_type = other DNA
tcttgctcactgctctaacc

SEQ ID NO: 59515 - DNA, 20 bp, synthetic construct
  misc_feature 1..20: note = Description of Artificial Sequence: Synthetic oligonucleotide
  misc_feature 1..20: note = Target: SCN10A; (+) strand; PAM type: YTN; PAM sequence: CTT
  source 1..20: mol_type = other DNA
gctcactgctctaaccctgg

SEQ ID NO: 59516 - DNA, 20 bp, synthetic construct
  misc_feature 1..20: note = Description of Artificial Sequence: Synthetic oligonucleotide
  misc_feature 1..20: note = Target: SCN10A; (+) strand; PAM type: YTN; PAM sequence: TTG
  source 1..20: mol_type = other DNA
ctcactgctctaaccctggt

SEQ ID NO: 59517 - DNA, 20 bp, synthetic construct
  misc_feature 1..20: note = Description of Artificial Sequence: Synthetic oligonucleotide
  misc_feature 1..20: note = Target: SCN10A; (+) strand; PAM type: YTN; PAM sequence: CTC
  source 1..20: mol_type = other DNA
actgctctaaccctggtgtc

SEQ ID NO: 59518 - DNA, 20 bp, synthetic construct
  misc_feature 1..20: note = Description of Artificial Sequence: Synthetic oligonucleotide
  misc_feature 1..20: note = Target: SCN10A; (+) strand; PAM type: YTN; PAM sequence: CTG
  source 1..20: mol_type = other DNA
ctctaaccctggtgtctgca

SEQ ID NO: 59519 - DNA, 20 bp, synthetic construct
  misc_feature 1..20: note = Description of Artificial Sequence: Synthetic oligonucleotide
  misc_feature 1..20: note = Target: SCN10A; (+) strand; PAM type: YTN; PAM sequence: CTC
  source 1..20: mol_type = other DNA
taaccctggtgtctgcatag

SEQ ID NO: 59520 - DNA, 20 bp, synthetic construct
  misc_feature 1..20: note = Description of Artificial Sequence: Synthetic oligonucleotide
  misc_feature 1..20: note = Target: SCN10A; (+) strand; PAM type: YTN; PAM sequence: CTA
  source 1..20: mol_type = other DNA
accctggtgtctgcatagtg

SEQ ID NO: 59521 - DNA, 20 bp, synthetic construct
  misc_feature 1..20: note = Description of Artificial Sequence: Synthetic oligonucleotide
  misc_feature 1..20: note = Target: SCN10A; (+) strand; PAM type: YTN; PAM sequence: CTG
  source 1..20: mol_type = other DNA
gtgtctgcatagtgcctggc

SEQ ID NO: 59522 - DNA, 20 bp, synthetic construct
  misc_feature 1..20: note = Description of Artificial Sequence: Synthetic oligonucleotide
  misc_feature 1..20: note = Target: SCN10A; (+) strand; PAM type: YTN; PAM sequence: CTG
  source 1..20: mol_type = other DNA
catagtgcctggctgcaaca

SEQ ID NO: 59523 - DNA, 20 bp, synthetic construct
  misc_feature 1..20: note = Description of Artificial Sequence: Synthetic oligonucleotide
  misc_feature 1..20: note = Target: SCN10A; (+) strand; PAM type: YTN; PAM sequence: CTG
  source 1..20: mol_type = other DNA
gctgcaacagatgctctgca

SEQ ID NO: 59524 - DNA, 20 bp, synthetic construct
  misc_feature 1..20: note = Description of Artificial Sequence: Synthetic oligonucleotide
  misc_feature 1..20: note = Target: SCN10A; (+) strand; PAM type: YTN; PAM sequence: CTG
  source 1..20: mol_type = other DNA
caacagatgctctgcaaatt

SEQ ID NO: 59525 - DNA, 20 bp, synthetic construct
  misc_feature 1..20: note = Description of Artificial Sequence: Synthetic oligonucleotide
  misc_feature 1..20: note = Target: SCN10A; (+) strand; PAM type: YTN; PAM sequence: CTC
  source 1..20: mol_type = other DNA
tgcaaatttgtaaatgaatg

SEQ ID NO: 59526 - DNA, 20 bp, synthetic construct
  misc_feature 1..20: note = Description of Artificial Sequence: Synthetic oligonucleotide
  misc_feature 1..20: note = Target: SCN10A; (+) strand; PAM type: YTN; PAM sequence: CTG
  source 1..20: mol_type = other DNA
caaatttgtaaatgaatgga

SEQ ID NO: 59527 - DNA, 20 bp, synthetic construct
  misc_feature 1..20: note = Description of Artificial Sequence: Synthetic oligonucleotide
  misc_feature 1..20: note = Target: SCN10A; (+) strand; PAM type: YTN; PAM sequence: TTT
  source 1..20: mol_type = other DNA
gtaaatgaatggaagacaga

SEQ ID NO: 59528 - DNA, 20 bp, synthetic construct
  misc_feature 1..20: note = Description of Artificial Sequence: Synthetic oligonucleotide
  misc_feature 1..20: note = Target: SCN10A; (+) strand; PAM type: YTN; PAM sequence: TTG
  source 1..20: mol_type = other DNA
taaatgaatggaagacagaa

SEQ ID NO: 59529 - DNA, 20 bp, synthetic construct
  misc_feature 1..20: note = Description of Artificial Sequence: Synthetic oligonucleotide
  misc_feature 1..20: note = Target: SCN10A; (+) strand; PAM type: YTN; PAM sequence: CTC
  source 1..20: mol_type = other DNA
tgagttaaccatagctcaaa

SEQ ID NO: 59530 - DNA, 20 bp, synthetic construct
  misc_feature 1..20: note = Description of Artificial Sequence: Synthetic oligonucleotide
  misc_feature 1..20: note = Target: SCN10A; (+) strand; PAM type: YTN; PAM sequence: CTG
  source 1..20: mol_type = other DNA
agttaaccatagctcaaatg

SEQ ID NO: 59531 - DNA, 20 bp, synthetic construct
  misc_feature 1..20: note = Description of Artificial Sequence: Synthetic oligonucleotide
  misc_feature 1..20: note = Target: SCN10A; (+) strand; PAM type: YTN; PAM sequence: TTA
  source 1..20: mol_type = other DNA
accatagctcaaatgaaaat

SEQ ID NO: 59532 - DNA, 20 bp, synthetic construct
  misc_feature 1..20: note = Description of Artificial Sequence: Synthetic oligonucleotide
  misc_feature 1..20: note = Target: SCN10A; (+) strand; PAM type: YTN; PAM sequence: CTC
  source 1..20: mol_type = other DNA
aaatgaaaatttaaagtcac

SEQ ID NO: 59533 - DNA, 20 bp, synthetic construct
  misc_feature 1..20: note = Description of Artificial Sequence: Synthetic oligonucleotide
  misc_feature 1..20: note = Target: SCN10A; (+) strand; PAM type: YTN; PAM sequence: TTT
  source 1..20: mol_type = other DNA
aaagtcaccctttatttgac

SEQ ID NO: 59534 - DNA, 20 bp, synthetic construct
  misc_feature 1..20: note = Description of Artificial Sequence: Synthetic oligonucleotide
  misc_feature 1..20: note = Target: SCN10A; (+) strand; PAM type: YTN; PAM sequence: TTA
  source 1..20: mol_type = other DNA
aagtcaccctttatttgact

SEQ ID NO: 59535 - DNA, 20 bp, synthetic construct
  misc_feature 1..20: note = Description of Artificial Sequence: Synthetic oligonucleotide
  misc_feature 1..20: note = Target: SCN10A; (+) strand; PAM type: YTN; PAM sequence: CTT
  source 1..20: mol_type = other DNA
tatttgactaaattcaattc

SEQ ID NO: 59536 - DNA, 20 bp, synthetic construct
  misc_feature 1..20: note = Description of Artificial Sequence: Synthetic oligonucleotide
  misc_feature 1..20: note = Target: SCN10A; (+) strand; PAM type: YTN; PAM sequence: TTT
  source 1..20: mol_type = other DNA
atttgactaaattcaattct

SEQ ID NO: 59537 - DNA, 20 bp, synthetic construct
  misc_feature 1..20: note = Description of Artificial Sequence: Synthetic oligonucleotide
  misc_feature 1..20: note = Target: SCN10A; (+) strand; PAM type: YTN; PAM sequence: TTA
  source 1..20: mol_type = other DNA
tttgactaaattcaattctg

SEQ ID NO: 59538 - DNA, 20 bp, synthetic construct
  misc_feature 1..20: note = Description of Artificial Sequence: Synthetic oligonucleotide
  misc_feature 1..20: note = Target: SCN10A; (+) strand; PAM type: YTN; PAM sequence: TTT
  source 1..20: mol_type = other DNA
gactaaattcaattctgtac

SEQ ID NO: 59539 - DNA, 20 bp, synthetic construct
  misc_feature 1..20: note = Description of Artificial Sequence: Synthetic oligonucleotide
  misc_feature 1..20: note = Target: SCN10A; (+) strand; PAM type: YTN; PAM sequence: TTG
  source 1..20: mol_type = other DNA
actaaattcaattctgtacc

SEQ ID NO: 59540 - DNA, 20 bp, synthetic construct
  misc_feature 1..20: note = Description of Artificial Sequence: Synthetic oligonucleotide
  misc_feature 1..20: note = Target: SCN10A; (+) strand; PAM type: YTN; PAM sequence: CTA
  source 1..20: mol_type = other DNA
aattcaattctgtaccaagg

SEQ ID NO: 59541 - DNA, 20 bp, synthetic construct
  misc_feature 1..20: note = Description of Artificial Sequence: Synthetic oligonucleotide
  misc_feature 1..20: note = Target: SCN10A; (+) strand; PAM type: YTN; PAM sequence: TTC
  source 1..20: mol_type = other DNA
aattctgtaccaagggtaca

SEQ ID NO: 59542 - DNA, 20 bp, synthetic construct
  misc_feature 1..20: note = Description of Artificial Sequence: Synthetic oligonucleotide
  misc_feature 1..20: note = Target: SCN10A; (+) strand; PAM type: YTN; PAM sequence: TTC
  source 1..20: mol_type = other DNA
tgtaccaagggtacatactg

SEQ ID NO: 59543 - DNA, 20 bp, synthetic construct
  misc_feature 1..20: note = Description of Artificial Sequence: Synthetic oligonucleotide
  misc_feature 1..20: note = Target: SCN10A; (+) strand; PAM type: YTN; PAM sequence: CTG
  source 1..20: mol_type = other DNA
taccaagggtacatactgaa

SEQ ID NO: 59544 - DNA, 20 bp, synthetic construct
  misc_feature 1..20: note = Description of Artificial Sequence: Synthetic oligonucleotide
  misc_feature 1..20: note = Target: SCN10A; (+) strand; PAM type: YTN; PAM sequence: CTG
  source 1..20: mol_type = other DNA
aatgtatgggatgtgcaagc

SEQ ID NO: 59545 - DNA, 20 bp, synthetic construct
  misc_feature 1..20: note = Description of Artificial Sequence: Synthetic oligonucleotide
  misc_feature 1..20: note = Target: SCN10A; (+) strand; PAM type: YTN; PAM sequence: CTC
  source 1..20: mol_type = other DNA
tgcatgagtggctatgaggg

SEQ ID NO: 59546 - DNA, 20 bp, synthetic construct
  misc_feature 1..20: note = Description of Artificial Sequence: Synthetic oligonucleotide
  misc_feature 1..20: note = Target: SCN10A; (+) strand; PAM type: YTN; PAM sequence: CTG
  source 1..20: mol_type = other DNA
catgagtggctatgagggag

SEQ ID NO: 59547 - DNA, 20 bp, synthetic construct
  misc_feature 1..20: note = Description of Artificial Sequence: Synthetic oligonucleotide
  misc_feature 1..20: note = Target: SCN10A; (+) strand; PAM type: YTN; PAM sequence: CTA
  source 1..20: mol_type = other DNA
tgagggaggaagagaagaac

SEQ ID NO: 59548 - DNA, 20 bp, synthetic construct
  misc_feature 1..20: note = Description of Artificial Sequence: Synthetic oligonucleotide
  misc_feature 1..20: note = Target: SCN10A; (+) strand; PAM type: YTN; PAM sequence: CTG
  source 1..20: mol_type = other DNA
tctgatcccttccagggagc

SEQ ID NO: 59549 - DNA, 20 bp, synthetic construct
  misc_feature 1..20: note = Description of Artificial Sequence: Synthetic oligonucleotide
  misc_feature 1..20: note = Target: SCN10A; (+) strand; PAM type: YTN; PAM sequence: CTG
  source 1..20: mol_type = other DNA
atcccttccagggagcccac

SEQ ID NO: 59550 - DNA, 20 bp, synthetic construct
  misc_feature 1..20: note = Description of Artificial Sequence: Synthetic oligonucleotide
  misc_feature 1..20: note = Target: SCN10A; (+) strand; PAM type: YTN; PAM sequence: CTT
  source 1..20: mol_type = other DNA
ccagggagcccacgggagct

SEQ ID NO: 59551 - DNA, 20 bp, synthetic construct
  misc_feature 1..20: note = Description of Artificial Sequence: Synthetic oligonucleotide
  misc_feature 1..20: note = Target: SCN10A; (+) strand; PAM type: YTN; PAM sequence: TTC
  source 1..20: mol_type = other DNA
cagggagcccacgggagctg

SEQ ID NO: 59552 - DNA, 20 bp, synthetic construct
  misc_feature 1..20: note = Description of Artificial Sequence: Synthetic oligonucleotide
  misc_feature 1..20: note = Target: SCN10A; (+) strand; PAM type: YTN; PAM sequence: CTG
  source 1..20: mol_type = other DNA
cacagcaagcagagggggaa

SEQ ID NO: 59553 - DNA, 20 bp, synthetic construct
  misc_feature 1..20: note = Description of Artificial Sequence: Synthetic oligonucleotide
  misc_feature 1..20: note = Target: SCN10A; (+) strand; PAM type: YTN; PAM sequence: CTG
  source 1..20: mol_type = other DNA
tgatgaggctgatccttgcc

SEQ ID NO: 59554 - DNA, 20 bp, synthetic construct
  misc_feature 1..20: note = Description of Artificial Sequence: Synthetic oligonucleotide
  misc_feature 1..20: note = Target: SCN10A; (+) strand; PAM type: YTN; PAM sequence: CTG
  source 1..20: mol_type = other DNA
atccttgccttctgcttcat

SEQ ID NO: 59555 - DNA, 20 bp, synthetic construct
  misc_feature 1..20: note = Description of Artificial Sequence: Synthetic oligonucleotide
  misc_feature 1..20: note = Target: SCN10A; (+) strand; PAM type: YTN; PAM sequence: CTT
  source 1..20: mol_type = other DNA
gccttctgcttcatggtggg

SEQ ID NO: 59556 - DNA, 20 bp, synthetic construct
  misc_feature 1..20: note = Description of Artificial Sequence: Synthetic oligonucleotide
  misc_feature 1..20: note = Target: SCN10A; (+) strand; PAM type: YTN; PAM sequence: TTG
  source 1..20: mol_type = other DNA
ccttctgcttcatggtgggg

SEQ ID NO: 59557 - DNA, 20 bp, synthetic construct
  misc_feature 1..20: note = Description of Artificial Sequence: Synthetic oligonucleotide
  misc_feature 1..20: note = Target: SCN10A; (+) strand; PAM type: YTN; PAM sequence: CTT
  source 1..20: mol_type = other DNA
ctgcttcatggtggggatgg

SEQ ID NO: 59558 - DNA, 20 bp, synthetic construct
  misc_feature 1..20: note = Description of Artificial Sequence: Synthetic oligonucleotide
  misc_feature 1..20: note = Target: SCN10A; (+) strand; PAM type: YTN; PAM sequence: TTC
  source 1..20: mol_type = other DNA
tgcttcatggtggggatggg

SEQ ID NO: 59559 - DNA, 20 bp, synthetic construct
  misc_feature 1..20: note = Description of Artificial Sequence: Synthetic oligonucleotide
  misc_feature 1..20: note = Target: SCN10A; (+) strand; PAM type: YTN; PAM sequence: CTG
  source 1..20: mol_type = other DNA
cttcatggtggggatgggtt

SEQ ID NO: 59560 - DNA, 20 bp, synthetic construct
  misc_feature 1..20: note = Description of Artificial Sequence: Synthetic oligonucleotide
  misc_feature 1..20: note = Target: SCN10A; (+) strand; PAM type: YTN; PAM sequence: CTT
  source 1..20: mol_type = other DNA
catggtggggatgggttgct

SEQ ID NO: 59561 - DNA, 20 bp, synthetic construct
  misc_feature 1..20: note = Description of Artificial Sequence: Synthetic oligonucleotide
  misc_feature 1..20: note = Target: SCN10A; (+) strand; PAM type: YTN; PAM sequence: TTC
  source 1..20: mol_type = other DNA
atggtggggatgggttgcta

SEQ ID NO: 59562 - DNA, 20 bp, synthetic construct
  misc_feature 1..20: note = Description of Artificial Sequence: Synthetic oligonucleotide
  misc_feature 1..20: note = Target: SCN10A; (+) strand; PAM type: YTN; PAM sequence: TTG
  source 1..20: mol_type = other DNA
ctatcctgttgggttagagc

SEQ ID NO: 59563 - DNA, 20 bp, synthetic construct
  misc_feature 1..20: note = Description of Artificial Sequence: Synthetic oligonucleotide
  misc_feature 1..20: note = Target: SCN10A; (+) strand; PAM type: YTN; PAM sequence: CTA
  source 1..20: mol_type = other DNA
tcctgttgggttagagcaaa

SEQ ID NO: 59564 - DNA, 20 bp, synthetic construct
  misc_feature 1..20: note = Description of Artificial Sequence: Synthetic oligonucleotide
  misc_feature 1..20: note = Target: SCN10A; (+) strand; PAM type: YTN; PAM sequence: CTG
  source 1..20: mol_type = other DNA
ttgggttagagcaaagaatc

SEQ ID NO: 59565 - DNA, 20 bp, synthetic construct
  misc_feature 1..20: note = Description of Artificial Sequence: Synthetic oligonucleotide
  misc_feature 1..20: note = Target: SCN10A; (+) strand; PAM type: YTN; PAM sequence: TTG
  source 1..20: mol_type = other DNA
ggttagagcaaagaatcaga

SEQ ID NO: 59566 - DNA, 20 bp, synthetic construct
  misc_feature 1..20: note = Description of Artificial Sequence: Synthetic oligonucleotide
  misc_feature 1..20: note = Target: SCN10A; (+) strand; PAM type: YTN; PAM sequence: TTA
  source 1..20: mol_type = other DNA
gagcaaagaatcagaccaaa

SEQ ID NO: 59567 - DNA, 20 bp, synthetic construct
  misc_feature 1..20: note = Description of Artificial Sequence: Synthetic oligonucleotide
  misc_feature 1..20: note = Target: SCN10A; (+) strand; PAM type: YTN; PAM sequence: CTT
  source 1..20: mol_type = other DNA
tgctcatggcagaactgctg

SEQ ID NO: 59568 - DNA, 20 bp, synthetic construct
  misc_feature 1..20: note = Description of Artificial Sequence: Synthetic oligonucleotide
  misc_feature 1..20: note = Target: SCN10A; (+) strand; PAM type: YTN; PAM sequence: TTT
  source 1..20: mol_type = other DNA
gctcatggcagaactgctgg

SEQ ID NO: 59569 - DNA, 20 bp, synthetic construct
  misc_feature 1..20: note = Description of Artificial Sequence: Synthetic oligonucleotide
  misc_feature 1..20: note = Target: SCN10A; (+) strand; PAM type: YTN; PAM sequence: TTG
  source 1..20: mol_type = other DNA
ctcatggcagaactgctggc

SEQ ID NO: 59570 - DNA, 20 bp, synthetic construct
  misc_feature 1..20: note = Description of Artificial Sequence: Synthetic oligonucleotide
  misc_feature 1..20: note = Target: SCN10A; (+) strand; PAM type: YTN; PAM sequence: CTC
  source 1..20: mol_type = other DNA
atggcagaactgctggctca

SEQ ID NO: 59571 - DNA, 20 bp, synthetic construct
  misc_feature 1..20: note = Description of Artificial Sequence: Synthetic oligonucleotide
  misc_feature 1..20: note = Target: SCN10A; (+) strand; PAM type: YTN; PAM sequence: CTG
  source 1..20: mol_type = other DNA
ctggctcacatctttcctgg

SEQ ID NO: 59572 - DNA, 20 bp, synthetic construct
  misc_feature 1..20: note = Description of Artificial Sequence: Synthetic oligonucleotide
  misc_feature 1..20: note = Target: SCN10A; (+) strand; PAM type: YTN; PAM sequence: CTG
  source 1..20: mol_type = other DNA
gctcacatctttcctggggc

SEQ ID NO: 59573 - DNA, 20 bp, synthetic construct
  misc_feature 1..20: note = Description of Artificial Sequence: Synthetic oligonucleotide
  misc_feature 1..20: note = Target: SCN10A; (+) strand; PAM type: YTN; PAM sequence: CTC
  source 1..20: mol_type = other DNA
acatctttcctggggcagga

SEQ ID NO: 59574 - DNA, 20 bp, synthetic construct
  misc_feature 1..20: note = Description of Artificial Sequence: Synthetic oligonucleotide
  misc_feature 1..20: note = Target: SCN10A; (+) strand; PAM type: YTN; PAM sequence: CTT
  source 1..20: mol_type = other DNA
tcctggggcaggagggggat

SEQ ID NO: 59575 - DNA, 20 bp, synthetic construct
  misc_feature 1..20: note = Description of Artificial Sequence: Synthetic oligonucleotide
  misc_feature 1..20: note = Target: SCN10A; (+) strand; PAM type: YTN; PAM sequence: TTT
  source 1..20: mol_type = other DNA
cctggggcaggagggggatt

SEQ ID NO: 59576 - DNA, 20 bp, synthetic construct
  misc_feature 1..20: note = Description of Artificial Sequence: Synthetic oligonucleotide
  misc_feature 1..20: note = Target: SCN10A; (+) strand; PAM type: YTN; PAM sequence: TTC
  source 1..20: mol_type = other DNA
ctggggcaggagggggattg

SEQ ID NO: 59577 - DNA, 20 bp, synthetic construct
  misc_feature 1..20: note = Description of Artificial Sequence: Synthetic oligonucleotide
  misc_feature 1..20: note = Target: SCN10A; (+) strand; PAM type: YTN; PAM sequence: CTG
  source 1..20: mol_type = other DNA
gggcaggagggggattgctg

SEQ ID NO: 59578 - DNA, 20 bp, synthetic construct
  misc_feature 1..20: note = Description of Artificial Sequence: Synthetic oligonucleotide
  misc_feature 1..20: note = Target: SCN10A; (+) strand; PAM type: YTN; PAM sequence: TTG
  source 1..20: mol_type = other DNA
ctgagccactaatcccttcc

SEQ ID NO: 59579 - DNA, 20 bp, synthetic construct
  misc_feature 1..20: note = Description of Artificial Sequence: Synthetic oligonucleotide
  misc_feature 1..20: note = Target: SCN10A; (+) strand; PAM type: YTN; PAM sequence: CTG
  source 1..20: mol_type = other DNA
agccactaatcccttccatt

SEQ ID NO: 59580 - DNA, 20 bp, synthetic construct
  misc_feature 1..20: note = Description of Artificial Sequence: Synthetic oligonucleotide
  misc_feature 1..20: note = Target: SCN10A; (+) strand; PAM type: YTN; PAM sequence: CTA
  source 1..20: mol_type = other DNA
atcccttccatttcatcact

SEQ ID NO: 59581 - DNA, 20 bp, synthetic construct
  misc_feature 1..20: note = Description of Artificial Sequence: Synthetic oligonucleotide
  misc_feature 1..20: note = Target: SCN10A; (+) strand; PAM type: YTN; PAM sequence: CTT
  source 1..20: mol_type = other DNA
ccatttcatcactgaaaatg

SEQ ID NO: 59582 - DNA, 20 bp, synthetic construct
  misc_feature 1..20: note = Description of Artificial Sequence: Synthetic oligonucleotide
  misc_feature 1..20: note = Target: SCN10A; (+) strand; PAM type: YTN; PAM sequence: TTC
  source 1..20: mol_type = other DNA
catttcatcactgaaaatgg

SEQ ID NO: 59583 - DNA, 20 bp, synthetic construct
  misc_feature 1..20: note = Description of Artificial Sequence: Synthetic oligonucleotide
  misc_feature 1..20: note = Target: SCN10A; (+) strand; PAM type: YTN; PAM sequence: TTT
  source 1..20: mol_type = other DNA
catcactgaaaatggtgaaa

SEQ ID NO: 59584 - DNA, 20 bp, synthetic construct
  misc_feature 1..20: note = Description of Artificial Sequence: Synthetic oligonucleotide
  misc_feature 1..20: note = Target: SCN10A; (+) strand; PAM type: YTN; PAM sequence: TTC
  source 1..20: mol_type = other DNA
atcactgaaaatggtgaaaa

SEQ ID NO: 59585 - DNA, 20 bp, synthetic construct
  misc_feature 1..20: note = Description of Artificial Sequence: Synthetic oligonucleotide
  misc_feature 1..20: note = Target: SCN10A; (+) strand; PAM type: YTN; PAM sequence: CTG
  source 1..20: mol_type = other DNA
aaaatggtgaaaaaatacag

SEQ ID NO: 59586 - DNA, 20 bp, synthetic construct
  misc_feature 1..20: note = Description of Artificial Sequence: Synthetic oligonucleotide
  misc_feature 1..20: note = Target: SCN10A; (+) strand; PAM type: YTN; PAM sequence: TTC
  source 1..20: mol_type = other DNA
atggtcacatgacttctaat

SEQ ID NO: 59587 - DNA, 20 bp, synthetic construct
  misc_feature 1..20: note = Description of Artificial Sequence: Synthetic oligonucleotide
  misc_feature 1..20: note = Target: SCN10A; (+) strand; PAM type: YTN; PAM sequence: CTT
  source 1..20: mol_type = other DNA
ctaattaaacagagcaggca

SEQ ID NO: 59588 - DNA, 20 bp, synthetic construct
  misc_feature 1..20: note = Description of Artificial Sequence: Synthetic oligonucleotide
  misc_feature 1..20: note = Target: SCN10A; (+) strand; PAM type: YTN; PAM sequence: TTC
  source 1..20: mol_type = other DNA
taattaaacagagcaggcaa

SEQ ID NO: 59589 - DNA, 20 bp, synthetic construct
  misc_feature 1..20: note = Description of Artificial Sequence: Synthetic oligonucleotide
  misc_feature 1..20: note = Target: SCN10A; (+) strand; PAM type: YTN; PAM sequence: CTA
  source 1..20: mol_type = other DNA
attaaacagagcaggcaacg

SEQ ID NO: 59590 - DNA, 20 bp, synthetic construct
  misc_feature 1..20: note = Description of Artificial Sequence: Synthetic oligonucleotide
  misc_feature 1..20: note = Target: SCN10A; (+) strand; PAM type: YTN; PAM sequence: TTA
  source 1..20: mol_type = other DNA
aacagagcaggcaacggcat

SEQ ID NO: 59591 - DNA, 20 bp, synthetic construct
  misc_feature 1..20: note = Description of Artificial Sequence: Synthetic oligonucleotide
  misc_feature 1..20: note = Target: SCN10A; (+) strand; PAM type: YTN; PAM sequence: TTA
  source 1..20: mol_type = other DNA
agtggctgggtgtgaagttt

SEQ ID NO: 59592 - DNA, 20 bp, synthetic construct
  misc_feature 1..20: note = Description of Artificial Sequence: Synthetic oligonucleotide
  misc_feature 1..20: note = Target: SCN10A; (+) strand; PAM type: YTN; PAM sequence: CTG
  source 1..20: mol_type = other DNA
ggtgtgaagtttgccctgga

SEQ ID NO: 59593 - DNA, 20 bp, synthetic construct
  misc_feature 1..20: note = Description of Artificial Sequence: Synthetic oligonucleotide
  misc_feature 1..20: note = Target: SCN10A; (+) strand; PAM type: YTN; PAM sequence: TTT
  source 1..20: mol_type = other DNA
gccctggatattctgacttt

SEQ ID NO: 59594 - DNA, 20 bp, synthetic construct
  misc_feature 1..20: note = Description of Artificial Sequence: Synthetic oligonucleotide
  misc_feature 1..20: note = Target: SCN10A; (+) strand; PAM type: YTN; PAM sequence: TTG
  source 1..20: mol_type = other DNA
ccctggatattctgacttta

SEQ ID NO: 59595 - DNA, 20 bp, synthetic construct
  misc_feature 1..20: note = Description of Artificial Sequence: Synthetic oligonucleotide
  misc_feature 1..20: note = Target: SCN10A; (+) strand; PAM type: YTN; PAM sequence: CTG
  source 1..20: mol_type = other DNA
gatattctgactttagggaa

SEQ ID NO: 59596 - DNA, 20 bp, synthetic construct
  misc_feature 1..20: note = Description of Artificial Sequence: Synthetic oligonucleotide
  misc_feature 1..20: note = Target: SCN10A; (+) strand; PAM type: YTN; PAM sequence: TTC
  source 1..20: mol_type = other DNA
tgactttagggaatggagta

SEQ ID NO: 59597 - DNA, 20 bp, synthetic construct
  misc_feature 1..20: note = Description of Artificial Sequence: Synthetic oligonucleotide
  misc_feature 1..20: note = Target: SCN10A; (+) strand; PAM type: YTN; PAM sequence: CTG
  source 1..20: mol_type = other DNA
actttagggaatggagtagc

SEQ ID NO: 59598 - DNA, 20 bp, synthetic construct
  misc_feature 1..20: note = Description of Artificial Sequence: Synthetic oligonucleotide
  misc_feature 1..20: note = Target: SCN10A; (+) strand; PAM type: YTN; PAM sequence: CTT
  source 1..20: mol_type = other DNA
tagggaatggagtagcttgc

SEQ ID NO: 59599 - DNA, 20 bp, synthetic construct
  misc_feature 1..20: note = Description of Artificial Sequence: Synthetic oligonucleotide
  misc_feature 1..20: note = Target: SCN10A; (+) strand; PAM type: YTN; PAM sequence: TTT
  source 1..20: mol_type = other DNA
agggaatggagtagcttgct

SEQ ID NO: 59600 - DNA, 20 bp, synthetic construct
  misc_feature 1..20: note = Description of Artificial Sequence: Synthetic oligonucleotide
  misc_feature 1..20: note = Target: SCN10A; (+) strand; PAM type: YTN; PAM sequence: TTA
  source 1..20: mol_type = other DNA
gggaatggagtagcttgcta

SEQ ID NO: 59601 - DNA, 20 bp, synthetic construct
  misc_feature 1..20: note = Description of Artificial Sequence: Synthetic oligonucleotide
  misc_feature 1..20: note = Target: SCN10A; (+) strand; PAM type: YTN; PAM sequence: CTT
  source 1..20: mol_type = other DNA
gctagctgctcttggattag

SEQ ID NO: 59602 - DNA, 20 bp, synthetic construct
  misc_feature 1..20: note = Description of Artificial Sequence: Synthetic oligonucleotide
  misc_feature 1..20: note = Target: SCN10A; (+) strand; PAM type: YTN; PAM sequence: TTG
  source 1..20: mol_type = other DNA
ctagctgctcttggattagc

SEQ ID NO: 59603 - DNA, 20 bp, synthetic construct
  misc_feature 1..20: note = Description of Artificial Sequence: Synthetic oligonucleotide
  misc_feature 1..20: note = Target: SCN10A; (+) strand; PAM type: YTN; PAM sequence: CTA
  source 1..20: mol_type = other DNA
gctgctcttggattagccca

SEQ ID NO: 59604 - DNA, 20 bp, synthetic construct
  misc_feature 1..20: note = Description of Artificial Sequence: Synthetic oligonucleotide
  misc_feature 1..20: note = Target: SCN10A; (+) strand; PAM type: YTN; PAM sequence: CTG
  source 1..20: mol_type = other DNA
ctcttggattagcccacggt

SEQ ID NO: 59605 - DNA, 20 bp, synthetic construct
  misc_feature 1..20: note = Description of Artificial Sequence: Synthetic oligonucleotide
  misc_feature 1..20: note = Target: SCN10A; (+) strand; PAM type: YTN; PAM sequence: CTC
  source 1..20: mol_type = other DNA
ttggattagcccacggtcag

SEQ ID NO: 59606 - DNA, 20 bp, synthetic construct
  misc_feature 1..20: note = Description of Artificial Sequence: Synthetic oligonucleotide
  misc_feature 1..20: note = Target: SCN10A; (+) strand; PAM type: YTN; PAM sequence: CTT
  source 1..20: mol_type = other DNA
ggattagcccacggtcaggg

SEQ ID NO: 59607 - DNA, 20 bp, synthetic construct
  misc_feature 1..20: note = Description of Artificial Sequence: Synthetic oligonucleotide
  misc_feature 1..20: note = Target: SCN10A; (+) strand; PAM type: YTN; PAM sequence: TTG
  source 1..20: mol_type = other DNA
gattagcccacggtcaggga

SEQ ID NO: 59608 - DNA, 20 bp, synthetic construct
  misc_feature 1..20: note = Description of Artificial Sequence: Synthetic oligonucleotide
  misc_feature 1..20: note = Target: SCN10A; (+) strand; PAM type: YTN; PAM sequence: TTA
  source 1..20: mol_type = other DNA
gcccacggtcagggatcata

SEQ ID NO: 59609 - DNA, 20 bp, synthetic construct
  misc_feature 1..20: note = Description of Artificial Sequence: Synthetic oligonucleotide
  misc_feature 1..20: note = Target: SCN10A; (+) strand; PAM type: YTN; PAM sequence: CTT
  source 1..20: mol_type = other DNA
tgcaacccttggtgctctca

SEQ ID NO: 59610 - DNA, 20 bp, synthetic construct
  misc_feature 1..20: note = Description of Artificial Sequence: Synthetic oligonucleotide
  misc_feature 1..20: note = Target: SCN10A; (+) strand; PAM type: YTN; PAM sequence: TTT
  source 1..20: mol_type = other DNA
gcaacccttggtgctctcag

SEQ ID NO: 59611 - DNA, 20 bp, synthetic construct
  misc_feature 1..20: note = Description of Artificial Sequence: Synthetic oligonucleotide
  misc_feature 1..20: note = Target: SCN10A; (+) strand; PAM type: YTN; PAM sequence: TTG
  source 1..20: mol_type = other DNA
caacccttggtgctctcaga

SEQ ID NO: 59612 - DNA, 20 bp, synthetic construct
  misc_feature 1..20: note = Description of Artificial Sequence: Synthetic oligonucleotide
  misc_feature 1..20: note = Target: SCN10A; (+) strand; PAM type: YTN; PAM sequence: CTT
  source 1..20: mol_type = other DNA
ggtgctctcagagacgatga

SEQ ID NO: 59613 - DNA, 20 bp, synthetic construct
  misc_feature 1..20: note = Description of Artificial Sequence: Synthetic oligonucleotide
  misc_feature 1..20: note = Target: SCN10A; (+) strand; PAM type: YTN; PAM sequence: TTG
  source 1..20: mol_type = other DNA
gtgctctcagagacgatgaa

SEQ ID NO: 59614 - DNA, 20 bp, synthetic construct
  misc_feature 1..20: note = Description of Artificial Sequence: Synthetic oligonucleotide
  misc_feature 1..20: note = Target: SCN10A; (+) strand; PAM type: YTN; PAM sequence: CTC
  source 1..20: mol_type = other DNA
tcagagacgatgaagtgggt

SEQ ID NO: 59615 - DNA, 20 bp, synthetic construct
  misc_feature 1..20: note = Description of Artificial Sequence: Synthetic oligonucleotide
  misc_feature 1..20: note = Target: SCN10A; (+) strand; PAM type: YTN; PAM sequence: CTC
  source 1..20: mol_type = other DNA
agagacgatgaagtgggtga

SEQ ID NO: 59616 - DNA, 20 bp, synthetic construct
  misc_feature 1..20: note = Description of Artificial Sequence: Synthetic oligonucleotide
  misc_feature 1..20: note = Target: SCN10A; (+) strand; PAM type: YTN; PAM sequence: TTG
  source 1..20: mol_type = other DNA
attatgtgatattctctaga

SEQ ID NO: 59617 - DNA, 20 bp, synthetic construct
  misc_feature 1..20: note = Description of Artificial Sequence: Synthetic oligonucleotide
  misc_feature 1..20: note = Target: SCN10A; (+) strand; PAM type: YTN; PAM sequence: TTA
  source 1..20: mol_type = other DNA
tgtgatattctctagagcct

SEQ ID NO: 59618 - DNA, 20 bp, synthetic construct
  misc_feature 1..20: note = Description of Artificial Sequence: Synthetic oligonucleotide
  misc_feature 1..20: note = Target: SCN10A; (+) strand; PAM type: YTN; PAM sequence: TTC
  source 1..20: mol_type = other DNA
tctagagcctattatatttc

SEQ ID NO: 59619 - DNA, 20 bp, synthetic construct
  misc_feature 1..20: note = Description of Artificial Sequence: Synthetic oligonucleotide
  misc_feature 1..20: note = Target: SCN10A; (+) strand; PAM type: YTN; PAM sequence: CTC
  source 1..20: mol_type = other DNA
tagagcctattatatttcta

SEQ ID NO: 59620 - DNA, 20 bp, synthetic construct
  misc_feature 1..20: note = Description of Artificial Sequence: Synthetic oligonucleotide
  misc_feature 1..20: note = Target: SCN10A; (+) strand; PAM type: YTN; PAM sequence: CTA
  source 1..20: mol_type = other DNA
gagcctattatatttctata

SEQ ID NO: 59621 - DNA, 20 bp, synthetic construct
  misc_feature 1..20: note = Description of Artificial Sequence: Synthetic oligonucleotide
  misc_feature 1..20: note = Target: SCN10A; (+) strand; PAM type: YTN; PAM sequence: CTA
  source 1..20: mol_type = other DNA
ttatatttctataaagtgga

SEQ ID NO: 59622 - DNA, 20 bp, synthetic construct
  misc_feature 1..20: note = Description of Artificial Sequence: Synthetic oligonucleotide
  misc_feature 1..20: note = Target: SCN10A; (+) strand; PAM type: YTN; PAM sequence: TTA
  source 1..20: mol_type = other DNA
tatttctataaagtggagta

SEQ ID NO: 59623 - DNA, 20 bp, synthetic construct
  misc_feature 1..20: note = Description of Artificial Sequence: Synthetic oligonucleotide
  misc_feature 1..20: note = Target: SCN10A; (+) strand; PAM type: YTN; PAM sequence: TTT
  source 1..20: mol_type = other DNA
ctataaagtggagtatgtga

SEQ ID NO: 59624 - DNA, 20 bp, synthetic construct
  misc_feature 1..20: note = Description of Artificial Sequence: Synthetic oligonucleotide
  misc_feature 1..20: note = Target: SCN10A; (+) strand; PAM type: YTN; PAM sequence: TTC
  source 1..20: mol_type = other DNA
tataaagtggagtatgtgag

SEQ ID NO: 59625 - DNA, 20 bp, synthetic construct
  misc_feature 1..20: note = Description of Artificial Sequence: Synthetic oligonucleotide
  misc_feature 1..20: note = Target: SCN10A; (+) strand; PAM type: YTN; PAM sequence: CTA
  source 1..20: mol_type = other DNA
taaagtggagtatgtgagag

SEQ ID NO: 59626 - DNA, 20 bp, synthetic construct
  misc_feature 1..20: note = Description of Artificial Sequence: Synthetic oligonucleotide
  misc_feature 1..20: note = Target: SCN10A; (+) strand; PAM type: YTN; PAM sequence: CTG
  source 1..20: mol_type = other DNA
cttttattgatttctgtagc

SEQ ID NO: 59627 - DNA, 20 bp, synthetic construct
  misc_feature 1..20: note = Description of Artificial Sequence: Synthetic oligonucleotide
  misc_feature 1..20: note = Target: SCN10A; (+) strand; PAM type: YTN; PAM sequence: CTT
  source 1..20: mol_type = other DNA
ttattgatttctgtagcagg

SEQ ID NO: 59628 - DNA, 20 bp, synthetic construct
  misc_feature 1..20: note = Description of Artificial Sequence: Synthetic oligonucleotide
  misc_feature 1..20: note = Target: SCN10A; (+) strand; PAM type: YTN; PAM sequence: TTT
  source 1..20: mol_type = other DNA
tattgatttctgtagcaggg

SEQ ID NO: 59629 - DNA, 20 bp, synthetic construct
  misc_feature 1..20: note = Description of Artificial Sequence: Synthetic oligonucleotide
  misc_feature 1..20: note = Target: SCN10A; (+) strand; PAM type: YTN; PAM sequence: TTT
  source 1..20: mol_type = other DNA
attgatttctgtagcaggga

SEQ ID NO: 59630 - DNA, 20 bp, synthetic construct
  misc_feature 1..20: note = Description of Artificial Sequence: Synthetic oligonucleotide
  misc_feature 1..20: note = Target: SCN10A; (+) strand; PAM type: YTN; PAM sequence: TTA
  source 1..20: mol_type = other DNA
ttgatttctgtagcagggaa

SEQ ID NO: 59631 - DNA, 20 bp, synthetic construct
  misc_feature 1..20: note = Description of Artificial Sequence: Synthetic oligonucleotide
  misc_feature 1..20: note = Target: SCN10A; (+) strand; PAM type: YTN; PAM sequence: TTG
  source 1..20: mol_type = other DNA
atttctgtagcagggaatgt

SEQ ID NO: 59632 - DNA, 20 bp, synthetic construct
  misc_feature 1..20: note = Description of Artificial Sequence: Synthetic oligonucleotide
  misc_feature 1..20: note = Target: SCN10A; (+) strand; PAM type: YTN; PAM sequence: TTT
  source 1..20: mol_type = other DNA
ctgtagcagggaatgttaaa

SEQ ID NO: 59633 - DNA, 20 bp, synthetic construct
  misc_feature 1..20: note = Description of Artificial Sequence: Synthetic oligonucleotide
  misc_feature 1..20: note = Target: SCN10A; (+) strand; PAM type: YTN; PAM sequence: TTC
  source 1..20: mol_type = other DNA
tgtagcagggaatgttaaag

SEQ ID NO: 59634 - DNA, 20 bp, synthetic construct
  misc_feature 1..20: note = Description of Artificial Sequence: Synthetic oligonucleotide
  misc_feature 1..20: note = Target: SCN10A; (+) strand; PAM type: YTN; PAM sequence: CTG
  source 1..20: mol_type = other DNA
tagcagggaatgttaaagaa

SEQ ID NO: 59635 - DNA, 20 bp, synthetic construct
  misc_feature 1..20: note = Description of Artificial Sequence: Synthetic oligonucleotide
  misc_feature 1..20: note = Target: SCN10A; (+) strand; PAM type: YTN; PAM sequence: TTA
  source 1..20: mol_type = other DNA
aagaataaaatttcccagtc

SEQ ID NO: 59636 - DNA, 20 bp, synthetic construct
  misc_feature 1..20: note = Description of Artificial Sequence: Synthetic oligonucleotide
  misc_feature 1..20: note = Target: SCN10A; (+) strand; PAM type: YTN; PAM sequence: TTT
  source 1..20: mol_type = other DNA
cccagtcttgtggaatcctt

SEQ ID NO: 59637 - DNA, 20 bp, synthetic construct
  misc_feature 1..20: note = Description of Artificial Sequence: Synthetic oligonucleotide
  misc_feature 1..20: note = Target: SCN10A; (+) strand; PAM type: YTN; PAM sequence: TTC
  source 1..20: mol_type = other DNA
ccagtcttgtggaatcctta

SEQ ID NO: 59638 - DNA, 20 bp, synthetic construct
  misc_feature 1..20: note = Description of Artificial Sequence: Synthetic oligonucleotide
  misc_feature 1..20: note = Target: SCN10A; (+) strand; PAM type: YTN; PAM sequence: CTT
  source 1..20: mol_type = other DNA
gtggaatccttaacttttcc

SEQ ID NO: 59639 - DNA, 20 bp, synthetic construct
  misc_feature 1..20: note = Description of Artificial Sequence: Synthetic oligonucleotide
  misc_feature 1..20: note = Target: SCN10A; (+) strand; PAM type: YTN; PAM sequence: TTG
  source 1..20: mol_type = other DNA
tggaatccttaacttttcct

SEQ ID NO: 59640 - DNA, 20 bp, synthetic construct
  misc_feature 1..20: note = Description of Artificial Sequence: Synthetic oligonucleotide
  misc_feature 1..20: note = Target: SCN10A; (+) strand; PAM type: YTN; PAM sequence: CTT
  source 1..20: mol_type = other DNA
aacttttcctatggaagaaa

SEQ ID NO: 59641 - DNA, 20 bp, synthetic construct
  misc_feature 1..20: note = Description of Artificial Sequence: Synthetic oligonucleotide
  misc_feature 1..20: note = Target: SCN10A; (+) strand; PAM type: YTN; PAM sequence: TTA
  source 1..20: mol_type = other DNA
acttttcctatggaagaaac

SEQ ID NO: 59642 - DNA, 20 bp, synthetic construct
  misc_feature 1..20: note = Description of Artificial Sequence: Synthetic oligonucleotide
  misc_feature 1..20: note = Target: SCN10A; (+) strand; PAM type: YTN; PAM sequence: CTT
  source 1..20: mol_type = other DNA
ttcctatggaagaaacaaga

SEQ ID NO: 59643 - DNA, 20 bp, synthetic construct
  misc_feature 1..20: note = Description of Artificial Sequence: Synthetic oligonucleotide
  misc_feature 1..20: note = Target: SCN10A; (+) strand; PAM type: YTN; PAM sequence: TTT
  source 1..20: mol_type = other DNA
tcctatggaagaaacaagat

SEQ ID NO: 59644 - DNA, 20 bp, synthetic construct
  misc_feature 1..20: note = Description of Artificial Sequence: Synthetic oligonucleotide
  misc_feature 1..20: note = Target: SCN10A; (+) strand; PAM type: YTN; PAM sequence: TTT
  source 1..20: mol_type = other DNA
cctatggaagaaacaagatt

SEQ ID NO: 59645 - DNA, 20 bp, synthetic construct
  misc_feature 1..20: note = Description of Artificial Sequence: Synthetic oligonucleotide
  misc_feature 1..20: note = Target: SCN10A; (+) strand; PAM type: YTN; PAM sequence: TTC
  source 1..20: mol_type = other DNA
ctatggaagaaacaagattt

SEQ ID NO: 59646 - DNA, 20 bp, synthetic construct
  misc_feature 1..20: note = Description of Artificial Sequence: Synthetic oligonucleotide
  misc_feature 1..20: note = Target: SCN10A; (+) strand; PAM type: YTN; PAM sequence: CTA
  source 1..20: mol_type = other DNA
tggaagaaacaagatttaga

SEQ ID NO: 59647 - DNA, 20 bp, synthetic construct
  misc_feature 1..20: note = Description of Artificial Sequence: Synthetic oligonucleotide
  misc_feature 1..20: note = Target: SCN10A; (+) strand; PAM type: YTN; PAM sequence: TTT
  source 1..20: mol_type = other DNA
agagcctgagcatcatcaga

SEQ ID NO: 59648 - DNA, 20 bp, synthetic construct
  misc_feature 1..20: note = Description of Artificial Sequence: Synthetic oligonucleotide
  misc_feature 1..20: note = Target: SCN10A; (+) strand; PAM type: YTN; PAM sequence: TTA
  source 1..20: mol_type = other DNA
gagcctgagcatcatcagag

SEQ ID NO: 59649 - DNA, 20 bp, synthetic construct
  misc_feature 1..20: note = Description of Artificial Sequence: Synthetic oligonucleotide
  misc_feature 1..20: note = Target: SCN10A; (+) strand; PAM type: YTN; PAM sequence: CTG
  source 1..20: mol_type = other DNA
agcatcatcagaggtgagag

SEQ ID NO: 59650 - DNA, 20 bp, synthetic construct
  misc_feature 1..20: note = Description of Artificial Sequence: Synthetic oligonucleotide
  misc_feature 1..20: note = Target: SCN10A; (+) strand; PAM type: YTN; PAM sequence: CTC
  source 1..20: mol_type = other DNA
ctatgtggtcccaggtaagc

SEQ ID NO: 59651 - DNA, 20 bp, synthetic construct
  misc_feature 1..20: note = Description of Artificial Sequence: Synthetic oligonucleotide
  misc_feature 1..20: note = Target: SCN10A; (+) strand; PAM type: YTN; PAM sequence: CTA
  source 1..20: mol_type = other DNA
tgtggtcccaggtaagctct

SEQ ID NO: 59652 - DNA, 20 bp, synthetic construct
  misc_feature 1..20: note = Description of Artificial Sequence: Synthetic oligonucleotide
  misc_feature 1..20: note = Target: SCN10A; (+) strand; PAM type: YTN; PAM sequence: CTC
  source 1..20: mol_type = other DNA
tgtcatgaaatggcacccat

SEQ ID NO: 59653 - DNA, 20 bp, synthetic construct
  misc_feature 1..20: note = Description of Artificial Sequence: Synthetic oligonucleotide
  misc_feature 1..20: note = Target: SCN10A; (+) strand; PAM type: YTN; PAM sequence: CTG
  source 1..20: mol_type = other DNA
tcatgaaatggcacccatgc

SEQ ID NO: 59654 - DNA, 20 bp, synthetic construct
  misc_feature 1..20: note = Description of Artificial Sequence: Synthetic oligonucleotide
  misc_feature 1..20: note = Target: SCN10A; (+) strand; PAM type: YTN; PAM sequence: CTG
  source 1..20: mol_type = other DNA
atggggcagaaatcctgtgt

SEQ ID NO: 59655 - DNA, 20 bp, synthetic construct
  misc_feature 1..20: note = Description of Artificial Sequence: Synthetic oligonucleotide
  misc_feature 1..20: note = Target: SCN10A; (+) strand; PAM type: YTN; PAM sequence: CTG
  source 1..20: mol_type = other DNA
tgtcagtgctttgctggtat

SEQ ID NO: 59656 - DNA, 20 bp, synthetic construct
  misc_feature 1..20: note = Description of Artificial Sequence: Synthetic oligonucleotide
  misc_feature 1..20: note = Target: SCN10A; (+) strand; PAM type: YTN; PAM sequence: CTT
  source 1..20: mol_type = other DNA
tgctggtatgaccagcttga

SEQ ID NO: 59657 - DNA, 20 bp, synthetic construct
  misc_feature 1..20: note = Description of Artificial Sequence: Synthetic oligonucleotide
  misc_feature 1..20: note = Target: SCN10A; (+) strand; PAM type: YTN; PAM sequence: TTT
  source 1..20: mol_type = other DNA
gctggtatgaccagcttgac

SEQ ID NO: 59658 - DNA, 20 bp, synthetic construct
  misc_feature 1..20: note = Description of Artificial Sequence: Synthetic oligonucleotide
  misc_feature 1..20: note = Target: SCN10A; (+) strand; PAM type: YTN; PAM sequence: TTG
  source 1..20: mol_type = other DNA
ctggtatgaccagcttgacc

SEQ ID NO: 59659 - DNA, 20 bp, synthetic construct
  misc_feature 1..20: note = Description of Artificial Sequence: Synthetic oligonucleotide
  misc_feature 1..20: note = Target: SCN10A; (+) strand; PAM type: YTN; PAM sequence: CTG
  source 1..20: mol_type = other DNA
gtatgaccagcttgaccttt

SEQ ID NO: 59660 - DNA, 20 bp, synthetic construct
  misc_feature 1..20: note = Description of Artificial Sequence: Synthetic oligonucleotide
  misc_feature 1..20: note = Target: SCN10A; (+) strand; PAM type: YTN; PAM sequence: CTT
  source 1..20: mol_type = other DNA
gacctttggggctcctaagg

SEQ ID NO: 59661 - DNA, 20 bp, synthetic construct
  misc_feature 1..20: note = Description of Artificial Sequence: Synthetic oligonucleotide
  misc_feature 1..20: note = Target: SCN10A; (+) strand; PAM type: YTN; PAM sequence: TTG
  source 1..20: mol_type = other DNA
acctttggggctcctaaggg

SEQ ID NO: 59662 - DNA, 20 bp, synthetic construct
  misc_feature 1..20: note = Description of Artificial Sequence: Synthetic oligonucleotide
  misc_feature 1..20: note = Target: SCN10A; (+) strand; PAM type: YTN; PAM sequence: CTT
  source 1..20: mol_type = other DNA
tggggctcctaaggggagaa

SEQ ID NO: 59663 - DNA, 20 bp, synthetic construct
  misc_feature 1..20: note = Description of Artificial Sequence: Synthetic oligonucleotide
  misc_feature 1..20: note = Target: SCN10A; (+) strand; PAM type: YTN; PAM sequence: TTT
  source 1..20: mol_type = other DNA
ggggctcctaaggggagaag

SEQ ID NO: 59664 - DNA, 20 bp, synthetic construct
  misc_feature 1..20: note = Description of Artificial Sequence: Synthetic oligonucleotide
  misc_feature 1..20: note = Target: SCN10A; (+) strand; PAM type: YTN; PAM sequence: TTG
  source 1..20: mol_type = other DNA
gggctcctaaggggagaagg

SEQ ID NO: 59665 - DNA, 20 bp, synthetic construct
  misc_feature 1..20: note = Description of Artificial Sequence: Synthetic oligonucleotide
  misc_feature 1..20: note = Target: SCN10A; (+) strand; PAM type: YTN; PAM sequence: CTC
  source 1..20: mol_type = other DNA
ctaaggggagaaggtggaca

SEQ ID NO: 59666 - DNA, 20 bp, synthetic construct
  misc_feature 1..20: note = Description of Artificial Sequence: Synthetic oligonucleotide
  misc_feature 1..20: note = Target: SCN10A; (+) strand; PAM type: YTN; PAM sequence: CTA
  source 1..20: mol_type = other DNA
aggggagaaggtggacattc

SEQ ID NO: 59667 - DNA, 20 bp, synthetic construct
  misc_feature 1..20: note = Description of Artificial Sequence: Synthetic oligonucleotide
  misc_feature 1..20: note = Target: SCN10A; (+) strand; PAM type: YTN; PAM sequence: TTC
  source 1..20: mol_type = other DNA
cagggccaataatctggcca

SEQ ID NO: 59668 - DNA, 20 bp, synthetic construct
  misc_feature 1..20: note = Description of Artificial Sequence: Synthetic oligonucleotide
  misc_feature 1..20: note = Target: SCN10A; (+) strand; PAM type: YTN; PAM sequence: CTG
  source 1..20: mol_type = other DNA
gccaaaagcaagctgggcct

SEQ ID NO: 59669 - DNA, 20 bp, synthetic construct
  misc_feature 1..20: note = Description of Artificial Sequence: Synthetic oligonucleotide
  misc_feature 1..20: note = Target: SCN10A; (+) strand; PAM type: YTN; PAM sequence: CTG
  source 1..20: mol_type = other DNA
ggcctgggaagaagggtctt

SEQ ID NO: 59670 - DNA, 20 bp, synthetic construct
  misc_feature 1..20: note = Description of Artificial Sequence: Synthetic oligonucleotide
  misc_feature 1..20: note = Target: SCN10A; (+) strand; PAM type: YTN; PAM sequence: CTG
  source 1..20: mol_type = other DNA
ggaagaagggtcttagttgg

SEQ ID NO: 59671 - DNA, 20 bp, synthetic construct
  misc_feature 1..20: note = Description of Artificial Sequence: Synthetic oligonucleotide
  misc_feature 1..20: note = Target: SCN10A; (+) strand; PAM type: YTN; PAM sequence: CTT
  source 1..20: mol_type = other DNA
agttgggagtgggaatttcc

SEQ ID NO: 59672 - DNA, 20 bp, synthetic construct
  misc_feature 1..20: note = Description of Artificial Sequence: Synthetic oligonucleotide
  misc_feature 1..20: note = Target: SCN10A; (+) strand; PAM type: YTN; PAM sequence: TTA
  source 1..20: mol_type = other DNA
gttgggagtgggaatttcct

SEQ ID NO: 59673 - DNA, 20 bp, synthetic construct
  misc_feature 1..20: note = Description of Artificial Sequence: Synthetic oligonucleotide
  misc_feature 1..20: note = Target: SCN10A; (+) strand; PAM type: YTN; PAM sequence: TTG
  source 1..20: mol_type = other DNA
ggagtgggaatttccttttg

SEQ ID NO: 59674 - DNA, 20 bp, synthetic construct
  misc_feature 1..20: note = Description of Artificial Sequence: Synthetic oligonucleotide
  misc_feature 1..20: note = Target: SCN10A; (+) strand; PAM type: YTN; PAM sequence: TTT
  source 1..20: mol_type = other DNA
ccttttgccttggatttctt

SEQ ID NO: 59675 - DNA, 20 bp, synthetic construct
  misc_feature 1..20: note = Description of Artificial Sequence: Synthetic oligonucleotide
  misc_feature 1..20: note = Target: SCN10A; (+) strand; PAM type: YTN; PAM sequence: TTC
  source 1..20: mol_type = other DNA
cttttgccttggatttcttt

SEQ ID NO: 59676 - DNA, 20 bp, synthetic construct
  misc_feature 1..20: note = Description of Artificial Sequence: Synthetic oligonucleotide
  misc_feature 1..20: note = Target: SCN10A; (+) strand; PAM type: YTN; PAM sequence: CTT
  source 1..20: mol_type = other DNA
ttgccttggatttctttctt

SEQ ID NO: 59677 - DNA, 20 bp, synthetic construct
  misc_feature 1..20: note = Description of Artificial Sequence: Synthetic oligonucleotide
  misc_feature 1..20: note = Target: SCN10A; (+) strand; PAM type: YTN; PAM sequence: TTT
  source 1..20: mol_type = other DNA
tgccttggatttctttcttg

SEQ ID NO: 59678 - DNA, 20 bp, synthetic construct
  misc_feature 1..20: note = Description of Artificial Sequence: Synthetic oligonucleotide
  misc_feature 1..20: note = Target: SCN10A; (+) strand; PAM type: YTN; PAM sequence: TTT
  source 1..20: mol_type = other DNA
gccttggatttctttcttgg

SEQ ID NO: 59679 - DNA, 20 bp, synthetic construct
  misc_feature 1..20: note = Description of Artificial Sequence: Synthetic oligonucleotide
  misc_feature 1..20: note = Target: SCN10A; (+) strand; PAM type: YTN; PAM sequence: TTG
  source 1..20: mol_type = other DNA
ccttggatttctttcttggt

SEQ ID NO: 59680 - DNA, 20 bp, synthetic construct
  misc_feature 1..20: note = Description of Artificial Sequence: Synthetic oligonucleotide
  misc_feature 1..20: note = Target: SCN10A; (+) strand; PAM type: YTN; PAM sequence: CTT
  source 1..20: mol_type = other DNA
ggatttctttcttggttcta

SEQ ID NO: 59681 - DNA, 20 bp, synthetic construct
  misc_feature 1..20: note = Description of Artificial Sequence: Synthetic oligonucleotide
  misc_feature 1..20: note = Target: SCN10A; (+) strand; PAM type: YTN; PAM sequence: TTG
  source 1..20: mol_type = other DNA
gatttctttcttggttctag

SEQ ID NO: 59682 - DNA, 20 bp, synthetic construct
  misc_feature 1..20: note = Description of Artificial Sequence: Synthetic oligonucleotide
  misc_feature 1..20: note = Target: SCN10A; (+) strand; PAM type: YTN; PAM sequence: TTT
  source 1..20: mol_type = other DNA
ctttcttggttctagacttt

SEQ ID NO: 59683 - DNA, 20 bp, synthetic construct
  misc_feature 1..20: note = Description of Artificial Sequence: Synthetic oligonucleotide
  misc_feature 1..20: note = Target: SCN10A; (+) strand; PAM type: YTN; PAM sequence: TTC
  source 1..20: mol_type = other DNA
tttcttggttctagactttg

SEQ ID NO: 59684 - DNA, 20 bp, synthetic construct
  misc_feature 1..20: note = Description of Artificial Sequence: Synthetic oligonucleotide
  misc_feature 1..20: note = Target: SCN10A; (+) strand; PAM type: YTN; PAM sequence: CTT
  source 1..20: mol_type = other DNA
tcttggttctagactttgaa

SEQ ID NO: 59685 - DNA, 20 bp, synthetic construct
  misc_feature 1..20: note = Description of Artificial Sequence: Synthetic oligonucleotide
  misc_feature 1..20: note = Target: SCN10A; (+) strand; PAM type: YTN; PAM sequence: TTT
  source 1..20: mol_type = other DNA
cttggttctagactttgaag

SEQ ID NO: 59686 - DNA, 20 bp, synthetic construct
  misc_feature 1..20: note = Description of Artificial Sequence: Synthetic oligonucleotide
  misc_feature 1..20: note = Target: SCN10A; (+) strand; PAM type: YTN; PAM sequence: TTC
  source 1..20: mol_type = other DNA
ttggttctagactttgaaga

SEQ ID NO: 59687 - DNA, 20 bp, synthetic construct
  misc_feature 1..20: note = Description of Artificial Sequence: Synthetic oligonucleotide
  misc_feature 1..20: note = Target: SCN10A; (+) strand; PAM type: YTN; PAM sequence: CTT
  source 1..20: mol_type = other DNA
ggttctagactttgaagagg

SEQ ID NO: 59688 - DNA, 20 bp, synthetic construct
  misc_feature 1..20: note = Description of Artificial Sequence: Synthetic oligonucleotide
  misc_feature 1..20: note = Target: SCN10A; (+) strand; PAM type: YTN; PAM sequence: TTG
  source 1..20: mol_type = other DNA
gttctagactttgaagaggg

SEQ ID NO: 59689 - DNA, 20 bp, synthetic construct
  misc_feature 1..20: note = Description of Artificial Sequence: Synthetic oligonucleotide
  misc_feature 1..20: note = Target: SCN10A; (+) strand; PAM type: YTN; PAM sequence: TTC
  source 1..20: mol_type = other DNA
tagactttgaagagggaaga

SEQ ID NO: 59690 - DNA, 20 bp, synthetic construct
  misc_feature 1..20: note = Description of Artificial Sequence: Synthetic oligonucleotide
  misc_feature 1..20: note = Target: SCN10A; (+) strand; PAM type: YTN; PAM sequence: CTA
  source 1..20: mol_type = other DNA
gactttgaagagggaagatg

SEQ ID NO: 59691 - DNA, 20 bp, synthetic construct
  misc_feature 1..20: note = Description of Artificial Sequence: Synthetic oligonucleotide
  misc_feature 1..20: note = Target: SCN10A; (+) strand; PAM type: YTN; PAM sequence: CTT
  source 1..20: mol_type = other DNA
tgaagagggaagatgatccg

SEQ ID NO: 59692 - DNA, 20 bp, synthetic construct
  misc_feature 1..20: note = Description of Artificial Sequence: Synthetic oligonucleotide
  misc_feature 1..20: note = Target: SCN10A; (+) strand; PAM type: YTN; PAM sequence: TTT
  source 1..20: mol_type = other DNA
gaagagggaagatgatccgg

SEQ ID NO: 59693 - DNA, 20 bp, synthetic construct
  misc_feature 1..20: note = Description of Artificial Sequence: Synthetic oligonucleotide
  misc_feature 1..20: note = Target: SCN10A; (+) strand; PAM type: YTN; PAM sequence: TTG
  source 1..20: mol_type = other DNA
aagagggaagatgatccggc

SEQ ID NO: 59694 - DNA, 20 bp, synthetic construct
  misc_feature 1..20: note = Description of Artificial Sequence: Synthetic oligonucleotide
  misc_feature 1..20: note = Target: SCN10A; (+) strand; PAM type: YTN; PAM sequence: CTT
  source 1..20: mol_type = other DNA
gtgccactgggcatgtgggt

SEQ ID NO: 59695 - DNA, 20 bp, synthetic construct
  misc_feature 1..20: note = Description of Artificial Sequence: Synthetic oligonucleotide
  misc_feature 1..20: note = Target: SCN10A; (+) strand; PAM type: YTN; PAM sequence: TTG
  source 1..20: mol_type = other DNA
tgccactgggcatgtgggtg

SEQ ID NO: 59696 - DNA, 20 bp, synthetic construct
  misc_feature 1..20: note = Description of Artificial Sequence: Synthetic oligonucleotide
  misc_feature 1..20: note = Target: SCN10A; (+) strand; PAM type: YTN; PAM sequence: CTG
  source 1..20: mol_type = other DNA
ggcatgtgggtgtcaaagat

SEQ ID NO: 59697 - DNA, 20 bp, synthetic construct
  misc_feature 1..20: note = Description of Artificial Sequence: Synthetic oligonucleotide
  misc_feature 1..20: note = Target: SCN10A; (+) strand; PAM type: YTN; PAM sequence: TTG
  source 1..20: mol_type = other DNA
cctgccatttggatgctggt

SEQ ID NO: 59698 - DNA, 20 bp, synthetic construct
  misc_feature 1..20: note = Description of Artificial Sequence: Synthetic oligonucleotide
  misc_feature 1..20: note = Target: SCN10A; (+) strand; PAM type: YTN; PAM sequence: CTG
  source 1..20: mol_type = other DNA
ccatttggatgctggtcagg

SEQ ID NO: 59699 - DNA, 20 bp, synthetic construct
  misc_feature 1..20: note = Description of Artificial Sequence: Synthetic oligonucleotide
  misc_feature 1..20: note = Target: SCN10A; (+) strand; PAM type: YTN; PAM sequence: TTT
  source 1..20: mol_type = other DNA
ggatgctggtcaggagctag

SEQ ID NO: 59700 - DNA, 20 bp, synthetic construct
  misc_feature 1..20: note = Description of Artificial Sequence: Synthetic oligonucleotide
  misc_feature 1..20: note = Target: SCN10A; (+) strand; PAM type: YTN; PAM sequence: TTG
  source 1..20: mol_type = other DNA
gatgctggtcaggagctagg

SEQ ID NO: 59701 - DNA, 20 bp, synthetic construct
  misc_feature 1..20: note = Description of Artificial Sequence: Synthetic oligonucleotide
  misc_feature 1..20: note = Target: SCN10A; (+) strand; PAM type: YTN; PAM sequence: CTG
  source 1..20: mol_type = other DNA
gtcaggagctaggatggtcc

SEQ ID NO: 59702 - DNA, 20 bp, synthetic construct
  misc_feature 1..20: note = Description of Artificial Sequence: Synthetic oligonucleotide
  misc_feature 1..20: note = Target: SCN10A; (+) strand; PAM type: YTN; PAM sequence: CTA
  source 1..20: mol_type = other DNA
ggatggtccaagacctatgg

SEQ ID NO: 59703 - DNA, 20 bp, synthetic construct
  misc_feature 1..20: note = Description of Artificial Sequence: Synthetic oligonucleotide
  misc_feature 1..20: note = Target: SCN10A; (+) strand; PAM type: YTN; PAM sequence: CTA
  source 1..20: mol_type = other DNA
tgggtcctggagtgcagcca

SEQ ID NO: 59704 - DNA, 20 bp, synthetic construct
  misc_feature 1..20: note = Description of Artificial Sequence: Synthetic oligonucleotide
  misc_feature 1..20: note = Target: SCN10A; (+) strand; PAM type: YTN; PAM sequence: CTG
  source 1..20: mol_type = other DNA
gagtgcagccatctgcaggt

SEQ ID NO: 59705 - DNA, 20 bp, synthetic construct
  misc_feature 1..20: note = Description of Artificial Sequence: Synthetic oligonucleotide
  misc_feature 1..20: note = Target: SCN10A; (+) strand; PAM type: YTN; PAM sequence: CTG
  source 1..20: mol_type = other DNA
caggtgctgcttggactctg

SEQ ID NO: 59706 - DNA, 20 bp, synthetic construct
  misc_feature 1..20: note = Description of Artificial Sequence: Synthetic oligonucleotide
  misc_feature 1..20: note = Target: SCN10A; (+) strand; PAM type: YTN; PAM sequence: CTG
  source 1..20: mol_type = other DNA
cttggactctgctttgtgct

SEQ ID NO: 59707 - DNA, 20 bp, synthetic construct
  misc_feature 1..20: note = Description of Artificial Sequence: Synthetic oligonucleotide
  misc_feature 1..20: note = Target: SCN10A; (+) strand; PAM type: YTN; PAM sequence: CTT
  source 1..20: mol_type = other DNA
ggactctgctttgtgctgat

SEQ ID NO: 59708 - DNA, 20 bp, synthetic construct
  misc_feature 1..20: note = Description of Artificial Sequence: Synthetic oligonucleotide
  misc_feature 1..20: note = Target: SCN10A; (+) strand; PAM type: YTN; PAM sequence: TTG
  source 1..20: mol_type = other DNA
gactctgctttgtgctgatt

SEQ ID NO: 59709 - DNA, 20 bp, synthetic construct
  misc_feature 1..20: note = Description of Artificial Sequence: Synthetic oligonucleotide
  misc_feature 1..20: note = Target: SCN10A; (+) strand; PAM type: YTN; PAM sequence: CTC
  source 1..20: mol_type = other DNA
tgctttgtgctgatttctct

SEQ ID NO: 59710 - DNA, 20 bp, synthetic construct
  misc_feature 1..20: note = Description of Artificial Sequence: Synthetic oligonucleotide
  misc_feature 1..20: note = Target: SCN10A; (+) strand; PAM type: YTN; PAM sequence: CTG
  source 1..20: mol_type = other DNA
ctttgtgctgatttctctgt

SEQ ID NO: 59711 - DNA, 20 bp, synthetic construct
  misc_feature 1..20: note = Description of Artificial Sequence: Synthetic oligonucleotide
  misc_feature 1..20: note = Target: SCN10A; (+) strand; PAM type: YTN; PAM sequence: CTT
  source 1..20: mol_type = other DNA
tgtgctgatttctctgttgg

SEQ ID NO: 59712 - DNA, 20 bp, synthetic construct
  misc_feature 1..20: note = Description of Artificial Sequence: Synthetic oligonucleotide
  misc_feature 1..20: note = Target: SCN10A; (+) strand; PAM type: YTN; PAM sequence: TTT
  source 1..20: mol_type = other DNA
gtgctgatttctctgttggc

SEQ ID NO: 59713 - DNA, 20 bp, synthetic construct
  misc_feature 1..20: note = Description of Artificial Sequence: Synthetic oligonucleotide
  misc_feature 1..20: note = Target: SCN10A; (+) strand; PAM type: YTN; PAM sequence: TTG
  source 1..20: mol_type = other DNA
tgctgatttctctgttggca

SEQ ID NO: 59714 - DNA, 20 bp, synthetic construct
  misc_feature 1..20: note = Description of Artificial Sequence: Synthetic oligonucleotide
  misc_feature 1..20: note = Target: SCN10A; (+) strand; PAM type: YTN; PAM sequence: CTG
  source 1..20: mol_type = other DNA
atttctctgttggcatccct

SEQ ID NO: 59715 - DNA, 20 bp, synthetic construct
  misc_feature 1..20: note = Description of Artificial Sequence: Synthetic oligonucleotide
  misc_feature 1..20: note = Target: SCN10A; (+) strand; PAM type: YTN; PAM sequence: TTT
  source 1..20: mol_type = other DNA
ctctgttggcatccctgcca

SEQ ID NO: 59716 - DNA, 20 bp, synthetic construct
  misc_feature 1..20: note = Description of Artificial Sequence: Synthetic oligonucleotide
  misc_feature 1..20: note = Target: SCN10A; (+) strand; PAM type: YTN; PAM sequence: TTC
  source 1..20: mol_type = other DNA
tctgttggcatccctgccac

SEQ ID NO: 59717 - DNA, 20 bp, synthetic construct
  misc_feature 1..20: note = Description of Artificial Sequence: Synthetic oligonucleotide
  misc_feature 1..20: note = Target: SCN10A; (+) strand; PAM type: YTN; PAM sequence: CTC
  source 1..20: mol_type = other DNA
tgttggcatccctgccactt

SEQ ID NO: 59718 - DNA, 20 bp, synthetic construct
  misc_feature 1..20: note = Description of Artificial Sequence: Synthetic oligonucleotide
  misc_feature 1..20: note = Target: SCN10A; (+) strand; PAM type: YTN; PAM sequence: CTG
  source 1..20: mol_type = other DNA
ttggcatccctgccacttca

SEQ ID NO: 59719 - DNA, 20 bp, synthetic construct
  misc_feature 1..20: note = Description of Artificial Sequence: Synthetic oligonucleotide
  misc_feature 1..20: note = Target: SCN10A; (+) strand; PAM type: YTN; PAM sequence: TTG
  source 1..20: mol_type = other DNA
gcatccctgccacttcaaag

SEQ ID NO: 59720 - DNA, 20 bp, synthetic construct
  misc_feature 1..20: note = Description of Artificial Sequence: Synthetic oligonucleotide
  misc_feature 1..20: note = Target: SCN10A; (+) strand; PAM type: YTN; PAM sequence: CTG
  source 1..20: mol_type = other DNA
ccacttcaaagttttgttta

SEQ ID NO: 59721 - DNA, 20 bp, synthetic construct
  misc_feature 1..20: note = Description of Artificial Sequence: Synthetic oligonucleotide
  misc_feature 1..20: note = Target: SCN10A; (+) strand; PAM type: YTN; PAM sequence: CTT
  source 1..20: mol_type = other DNA
caaagttttgtttaaatgtt

SEQ ID NO: 59722 - DNA, 20 bp, synthetic construct
  misc_feature 1..20: note = Description of Artificial Sequence: Synthetic oligonucleotide
  misc_feature 1..20: note = Target: SCN10A; (+) strand; PAM type: YTN; PAM sequence: TTC
  source 1..20: mol_type = other DNA
aaagttttgtttaaatgttc

SEQ ID NO: 59723 - DNA, 20 bp, synthetic construct
  misc_feature 1..20: note = Description of Artificial Sequence: Synthetic oligonucleotide
  misc_feature 1..20: note = Target: SCN10A; (+) strand; PAM type: YTN; PAM sequence: TTT
  source 1..20: mol_type = other DNA
tgtttaaatgttctagcctt

SEQ ID NO: 59724 - DNA, 20 bp, synthetic construct
  misc_feature 1..20: note = Description of Artificial Sequence: Synthetic oligonucleotide
  misc_feature 1..20: note = Target: SCN10A; (+) strand; PAM type: YTN; PAM sequence: TTT
  source 1..20: mol_type = other DNA
gtttaaatgttctagccttg

SEQ ID NO: 59725 - DNA, 20 bp, synthetic construct
  misc_feature 1..20: note = Description of Artificial Sequence: Synthetic oligonucleotide
  misc_feature 1..20: note = Target: SCN10A; (+) strand; PAM type: YTN; PAM sequence: TTG
  source 1..20: mol_type = other DNA
tttaaatgttctagccttgc

SEQ ID NO: 59726 - DNA, 20 bp, synthetic construct
  misc_feature 1..20: note = Description of Artificial Sequence: Synthetic oligonucleotide
  misc_feature 1..20: note = Target: SCN10A; (+) strand; PAM type: YTN; PAM sequence: TTT
  source 1..20: mol_type = other DNA
aaatgttctagccttgcctc

SEQ ID NO: 59727 - DNA, 20 bp, synthetic construct
  misc_feature 1..20: note = Description of Artificial Sequence: Synthetic oligonucleotide
  misc_feature 1..20: note = Target: SCN10A; (+) strand; PAM type: YTN; PAM sequence: TTA
  source 1..20: mol_type = other DNA
aatgttctagccttgcctca

SEQ ID NO: 59728 - DNA, 20 bp, synthetic construct
  misc_feature 1..20: note = Description of Artificial Sequence: Synthetic oligonucleotide
  misc_feature 1..20: note = Target: SCN10A; (+) strand; PAM type: YTN; PAM sequence: TTC
  source 1..20: mol_type = other DNA
tagccttgcctcagctatgc

SEQ ID NO: 59729 - DNA, 20 bp, synthetic construct
  misc_feature 1..20: note = Description of Artificial Sequence: Synthetic oligonucleotide
  misc_feature 1..20: note = Target: SCN10A; (+) strand; PAM type: YTN; PAM sequence: CTA
  source 1..20: mol_type = other DNA
gccttgcctcagctatgcga

SEQ ID NO: 59730 - DNA, 20 bp, synthetic construct
  misc_feature 1..20: note = Description of Artificial Sequence: Synthetic oligonucleotide
  misc_feature 1..20: note = Target: SCN10A; (+) strand; PAM type: YTN; PAM sequence: CTT
  source 1..20: mol_type = other DNA
gcctcagctatgcgaaatta

SEQ ID NO: 59731 - DNA, 20 bp, synthetic construct
  misc_feature 1..20: note = Description of Artificial Sequence: Synthetic oligonucleotide
  misc_feature 1..20: note = Target: SCN10A; (+) strand; PAM type: YTN; PAM sequence: TTG
  source 1..20: mol_type = other DNA
cctcagctatgcgaaattag

SEQ ID NO: 59732 - DNA, 20 bp, synthetic construct
  misc_feature 1..20: note = Description of Artificial Sequence: Synthetic oligonucleotide
  misc_feature 1..20: note = Target: SCN10A; (+) strand; PAM type: YTN; PAM sequence: CTC
  source 1..20: mol_type = other DNA
agctatgcgaaattagggaa

SEQ ID NO: 59733 - DNA, 20 bp, synthetic construct
  misc_feature 1..20: note = Description of Artificial Sequence: Synthetic oligonucleotide
  misc_feature 1..20: note = Target: SCN10A; (+) strand; PAM type: YTN; PAM sequence: CTA
  source 1..20: mol_type = other DNA
tgcgaaattagggaacaaag

SEQ ID NO: 59734 - DNA, 20 bp, synthetic construct
  misc_feature 1..20: note = Description of Artificial Sequence: Synthetic oligonucleotide
  misc_feature 1..20: note = Target: SCN10A; (+) strand; PAM type: YTN; PAM sequence: TTA
  source 1..20: mol_type = other DNA
gggaacaaaggaaagagtgt

SEQ ID NO: 59735 - DNA, 20 bp, synthetic construct
  misc_feature 1..20: note = Description of Artificial Sequence: Synthetic oligonucleotide
  misc_feature 1..20: note = Target: SCN10A; (+) strand; PAM type: YTN; PAM sequence: TTT
  source 1..20: mol_type = other DNA
accttgcttgggccagaata

SEQ ID NO: 59736 - DNA, 20 bp, synthetic construct
  misc_feature 1..20: note = Description of Artificial Sequence: Synthetic oligonucleotide
  misc_feature 1..20: note = Target: SCN10A; (+) strand; PAM type: YTN; PAM sequence: TTA
  source 1..20: mol_type = other DNA
ccttgcttgggccagaatat

SEQ ID NO: 59737 - DNA, 20 bp, synthetic construct
  misc_feature 1..20: note = Description of Artificial Sequence: Synthetic oligonucleotide
  misc_feature 1..20: note = Target: SCN10A; (+) strand; PAM type: YTN; PAM sequence: CTT
  source 1..20: mol_type = other DNA
gcttgggccagaatattaag

SEQ ID NO: 59738 - DNA, 20 bp, synthetic construct
  misc_feature 1..20: note = Description of Artificial Sequence: Synthetic oligonucleotide
  misc_feature 1..20: note = Target: SCN10A; (+) strand; PAM type: YTN; PAM sequence: TTG
  source 1..20: mol_type = other DNA
cttgggccagaatattaagg

SEQ ID NO: 59739 - DNA, 20 bp, synthetic construct
  misc_feature 1..20: note = Description of Artificial Sequence: Synthetic oligonucleotide
  misc_feature 1..20: note = Target: SCN10A; (+) strand; PAM type: YTN; PAM sequence: CTT
  source 1..20: mol_type = other DNA
gggccagaatattaagggga

SEQ ID NO: 59740 - DNA, 20 bp, synthetic construct
  misc_feature 1..20: note = Description of Artificial Sequence: Synthetic oligonucleotide
  misc_feature 1..20: note = Target: SCN10A; (+) strand; PAM type: YTN; PAM sequence: TTG
  source 1..20: mol_type = other DNA
ggccagaatattaaggggag

SEQ ID NO: 59741 - DNA, 20 bp, synthetic construct
  misc_feature 1..20: note = Description of Artificial Sequence: Synthetic oligonucleotide
  misc_feature 1..20: note = Target: SCN10A; (+) strand; PAM type: YTN; PAM sequence: TTA
  source 1..20: mol_type = other DNA
aggggagagccacgttcctc

SEQ ID NO: 59742 - DNA, 20 bp, synthetic construct
  misc_feature 1..20: note = Description of Artificial Sequence: Synthetic oligonucleotide
  misc_feature 1..20: note = Target: SCN10A; (+) strand; PAM type: YTN; PAM sequence: TTC
  source 1..20: mol_type = other DNA
ctccactaaggctagcaaaa

SEQ ID NO: 59743 - DNA, 20 bp, synthetic construct
  misc_feature 1..20: note = Description of Artificial Sequence: Synthetic oligonucleotide
  misc_feature 1..20: note = Target: SCN10A; (+) strand; PAM type: YTN; PAM sequence: CTC
  source 1..20: mol_type = other DNA
cactaaggctagcaaaaggt

SEQ ID NO: 59744 - DNA, 20 bp, synthetic construct
  misc_feature 1..20: note = Description of Artificial Sequence: Synthetic oligonucleotide
  misc_feature 1..20: note = Target: SCN10A; (+) strand; PAM type: YTN; PAM sequence: CTA
  source 1..20: mol_type = other DNA
aggctagcaaaaggttgaga

SEQ ID NO: 59745 - DNA, 20 bp, synthetic construct
  misc_feature 1..20: note = Description of Artificial Sequence: Synthetic oligonucleotide
  misc_feature 1..20: note = Target: SCN10A; (+) strand; PAM type: YTN; PAM sequence: CTA
  source 1..20: mol_type = other DNA
gcaaaaggttgagagtgaat

SEQ ID NO: 59746 - DNA, 20 bp, synthetic construct
  misc_feature 1..20: note = Description of Artificial Sequence: Synthetic oligonucleotide
  misc_feature 1..20: note = Target: SCN10A; (+) strand; PAM type: YTN; PAM sequence: TTG
  source 1..20: mol_type = other DNA
agagtgaattactaatccac

SEQ ID NO: 59747 - DNA, 20 bp, synthetic construct
  misc_feature 1..20: note = Description of Artificial Sequence: Synthetic oligonucleotide
  misc_feature 1..20: note = Target: SCN10A; (+) strand; PAM type: YTN; PAM sequence: TTA
  source 1..20: mol_type = other DNA
ctaatccactcttcttccat

SEQ ID NO: 59748 - DNA, 20 bp, synthetic construct
  misc_feature 1..20: note = Description of Artificial Sequence: Synthetic oligonucleotide
  misc_feature 1..20: note = Target: SCN10A; (+) strand; PAM type: YTN; PAM sequence: CTA
  source 1..20: mol_type = other DNA
atccactcttcttccattca

SEQ ID NO: 59749 - DNA, 20 bp, synthetic construct
  misc_feature 1..20: note = Description of Artificial Sequence: Synthetic oligonucleotide
  misc_feature 1..20: note = Target: SCN10A; (+) strand; PAM type: YTN; PAM sequence: CTC
  source 1..20: mol_type = other DNA
ttcttccattcaaaggatgg

SEQ ID NO: 59750 - DNA, 20 bp, synthetic construct
  misc_feature 1..20: note = Description of Artificial Sequence: Synthetic oligonucleotide
  misc_feature 1..20: note = Target: SCN10A; (+) strand; PAM type: YTN; PAM sequence: CTT
  source 1..20: mol_type = other DNA
cttccattcaaaggatggag

SEQ ID NO: 59751 - DNA, 20 bp, synthetic construct
  misc_feature 1..20: note = Description of Artificial Sequence: Synthetic oligonucleotide
  misc_feature 1..20: note = Target: SCN10A; (+) strand; PAM type: YTN; PAM sequence: TTC
  source 1..20: mol_type = other DNA
ttccattcaaaggatggaga

SEQ ID NO: 59752 - DNA, 20 bp, synthetic construct
  misc_feature 1..20: note = Description of Artificial Sequence: Synthetic oligonucleotide
  misc_feature 1..20: note = Target: SCN10A; (+) strand; PAM type: YTN; PAM sequence: CTT
  source 1..20: mol_type = other DNA
ccattcaaaggatggagaat

SEQ ID NO: 59753 - DNA, 20 bp, synthetic construct
  misc_feature 1..20: note = Description of Artificial Sequence: Synthetic oligonucleotide
  misc_feature 1..20: note = Target: SCN10A; (+) strand; PAM type: YTN; PAM sequence: TTC
  source 1..20: mol_type = other DNA
cattcaaaggatggagaatc

SEQ ID NO: 59754 - DNA, 20 bp, synthetic construct
  misc_feature 1..20: note = Description of Artificial Sequence: Synthetic oligonucleotide
  misc_feature 1..20: note = Target: SCN10A; (+) strand; PAM type: YTN; PAM sequence: TTC
  source 1..20: mol_type = other DNA
aaaggatggagaatctcagg

SEQ ID NO: 59755 - DNA, 20 bp, synthetic construct
  misc_feature 1..20: note = Description of Artificial Sequence: Synthetic oligonucleotide
  misc_feature 1..20: note = Target: SCN10A; (+) strand; PAM type: YTN; PAM sequence: CTC
  source 1..20: mol_type = other DNA
aggaacagaattggttatga

SEQ ID NO: 59756 - DNA, 20 bp, synthetic construct
  misc_feature 1..20: note = Description of Artificial Sequence: Synthetic oligonucleotide
  misc_feature 1..20: note = Target: SCN10A; (+) strand; PAM type: YTN; PAM sequence: TTG
  source 1..20: mol_type = other DNA
gttatgaggtttcacttccc

SEQ ID NO: 59757 - DNA, 20 bp, synthetic construct
  misc_feature 1..20: note = Description of Artificial Sequence: Synthetic oligonucleotide
  misc_feature 1..20: note = Target: SCN10A; (+) strand; PAM type: YTN; PAM sequence: TTA
  source 1..20: mol_type = other DNA
tgaggtttcacttcccctcc

SEQ ID NO: 59758 - DNA, 20 bp, synthetic construct
  misc_feature 1..20: note = Description of Artificial Sequence: Synthetic oligonucleotide
  misc_feature 1..20: note = Target: SCN10A; (+) strand; PAM type: YTN; PAM sequence: TTT
  source 1..20: mol_type = other DNA
cacttcccctccacatgtgg

SEQ ID NO: 59759 - DNA, 20 bp, synthetic construct
  misc_feature 1..20: note = Description of Artificial Sequence: Synthetic oligonucleotide
  misc_feature 1..20: note = Target: SCN10A; (+) strand; PAM type: YTN; PAM sequence: TTC
  source 1..20: mol_type = other DNA
acttcccctccacatgtgga

SEQ ID NO: 59760 - DNA, 20 bp, synthetic construct
  misc_feature 1..20: note = Description of Artificial Sequence: Synthetic oligonucleotide
  misc_feature 1..20: note = Target: SCN10A; (+) strand; PAM type: YTN; PAM sequence: CTT
  source 1..20: mol_type = other DNA
cccctccacatgtggaggtc

SEQ ID NO: 59761 - DNA, 20 bp, synthetic construct
  misc_feature 1..20: note = Description of Artificial Sequence: Synthetic oligonucleotide
  misc_feature 1..20: note = Target: SCN10A; (+) strand; PAM type: YTN; PAM sequence: TTC
  source 1..20: mol_type = other DNA
ccctccacatgtggaggtct

SEQ ID NO: 59762 - DNA, 20 bp, synthetic construct
  misc_feature 1..20: note = Description of Artificial Sequence: Synthetic oligonucleotide
  misc_feature 1..20: note = Target: SCN10A; (+) strand; PAM type: YTN; PAM sequence: CTC
  source 1..20: mol_type = other DNA
cacatgtggaggtctccccc

SEQ ID NO: 59763 - DNA, 20 bp, synthetic construct
  misc_feature 1..20: note = Description of Artificial Sequence: Synthetic oligonucleotide
  misc_feature 1..20: note = Target: SCN10A; (+) strand; PAM type: YTN; PAM sequence: CTC
  source 1..20: mol_type = other DNA
cccctgtgccatcctcggag

SEQ ID NO: 59764 - DNA, 20 bp, synthetic construct
  misc_feature 1..20: note = Description of Artificial Sequence: Synthetic oligonucleotide
  misc_feature 1..20: note = Target: SCN10A; (+) strand; PAM type: YTN; PAM sequence: CTG
  source 1..20: mol_type = other DNA
tgccatcctcggaggatctt

SEQ ID NO: 59765 - DNA, 20 bp, synthetic construct
  misc_feature 1..20: note = Description of Artificial Sequence: Synthetic oligonucleotide
  misc_feature 1..20: note = Target: SCN10A; (+) strand; PAM type: YTN; PAM sequence: CTC
  source 1..20: mol_type = other DNA
ggaggatcttagttgcagct

SEQ ID NO: 59766 - DNA, 20 bp, synthetic construct
  misc_feature 1..20: note = Description of Artificial Sequence: Synthetic oligonucleotide
  misc_feature 1..20: note = Target: SCN10A; (+) strand; PAM type: YTN; PAM sequence: CTT
  source 1..20: mol_type = other DNA
agttgcagcttaattaggag

SEQ ID NO: 59767 - DNA, 20 bp, synthetic construct
  misc_feature 1..20: note = Description of Artificial Sequence: Synthetic oligonucleotide
  misc_feature 1..20: note = Target: SCN10A; (+) strand; PAM type: YTN; PAM sequence: TTA
  source 1..20: mol_type = other DNA
gttgcagcttaattaggaga

SEQ ID NO: 59768 - DNA, 20 bp, synthetic construct
  misc_feature 1..20: note = Description of Artificial Sequence: Synthetic oligonucleotide
  misc_feature 1..20: note = Target: SCN10A; (+) strand; PAM type: YTN; PAM sequence: TTG
  source 1..20: mol_type = other DNA
cagcttaattaggagaaatg

SEQ ID NO: 59769 - DNA, 20 bp, synthetic construct
  misc_feature 1..20: note = Description of Artificial Sequence: Synthetic oligonucleotide
  misc_feature 1..20: note = Target: SCN10A; (+) strand; PAM type: YTN; PAM sequence: CTT
  source 1..20: mol_type = other DNA
aattaggagaaatggtgatt

SEQ ID NO: 59770 - DNA, 20 bp, synthetic construct
  misc_feature 1..20: note = Description of Artificial Sequence: Synthetic oligonucleotide
  misc_feature 1..20: note = Target: SCN10A; (+) strand; PAM type: YTN; PAM sequence: TTA
  source 1..20: mol_type = other DNA
attaggagaaatggtgattt

SEQ ID NO: 59771 - DNA, 20 bp, synthetic construct
  misc_feature 1..20: note = Description of Artificial Sequence: Synthetic oligonucleotide
  misc_feature 1..20: note = Target: SCN10A; (+) strand; PAM type: YTN; PAM sequence: TTA
  source 1..20: mol_type = other DNA
ggagaaatggtgattttgtt

SEQ ID NO: 59772 - DNA, 20 bp, synthetic construct
  misc_feature 1..20: note = Description of Artificial Sequence: Synthetic oligonucleotide
  misc_feature 1..20: note = Target: SCN10A; (+) strand; PAM type: YTN; PAM sequence: TTT
  source 1..20: mol_type = other DNA
tgttgcaggtcttcctgcct

SEQ ID NO: 59773 - DNA, 20 bp, synthetic construct
  misc_feature 1..20: note = Description of Artificial Sequence: Synthetic oligonucleotide
  misc_feature 1..20: note = Target: SCN10A; (+) strand; PAM type: YTN; PAM sequence: TTT
  source 1..20: mol_type = other DNA
gttgcaggtcttcctgcctg

SEQ ID NO: 59774 - DNA, 20 bp, synthetic construct
  misc_feature 1..20: note = Description of Artificial Sequence: Synthetic oligonucleotide
  misc_feature 1..20: note = Target: SCN10A; (+) strand; PAM type: YTN; PAM sequence: TTG
  source 1..20: mol_type = other DNA
ttgcaggtcttcctgcctga

SEQ ID NO: 59775 - DNA, 20 bp, synthetic construct
  misc_feature 1..20: note = Description of Artificial Sequence: Synthetic oligonucleotide
  misc_feature 1..20: note = Target: SCN10A; (+) strand; PAM type: YTN; PAM sequence: TTG
  source 1..20: mol_type = other DNA
caggtcttcctgcctgacca

SEQ ID NO: 59776 - DNA, 20 bp, synthetic construct
  misc_feature 1..20: note = Description of Artificial Sequence: Synthetic oligonucleotide
  misc_feature 1..20: note = Target: SCN10A; (+) strand; PAM type: YTN; PAM sequence: CTT
  source 1..20: mol_type = other DNA
cctgcctgaccatcaactcc

SEQ ID NO: 59777 - DNA, 20 bp, synthetic construct
  misc_feature 1..20: note = Description of Artificial Sequence: Synthetic oligonucleotide
  misc_feature 1..20: note = Target: SCN10A; (+) strand; PAM type: YTN; PAM sequence: TTC
  source 1..20: mol_type = other DNA
ctgcctgaccatcaactccg

SEQ ID NO: 59778 - DNA, 20 bp, synthetic construct
  misc_feature 1..20: note = Description of Artificial Sequence: Synthetic oligonucleotide
  misc_feature 1..20: note = Target: SCN10A; (+) strand; PAM type: YTN; PAM sequence: CTG
  source 1..20: mol_type = other DNA
cctgaccatcaactccgtct

SEQ ID NO: 59779 - DNA, 20 bp, synthetic construct
  misc_feature 1..20: note = Description of Artificial Sequence: Synthetic oligonucleotide
  misc_feature 1..20: note = Target: SCN10A; (+) strand; PAM type: YTN; PAM sequence: CTG
  source 1..20: mol_type = other DNA
accatcaactccgtctccca

SEQ ID NO: 59780 - DNA, 20 bp, synthetic construct
  misc_feature 1..20: note = Description of Artificial Sequence: Synthetic oligonucleotide
  misc_feature 1..20: note = Target: SCN10A; (+) strand; PAM type: YTN; PAM sequence: CTC
  source 1..20: mol_type = other DNA
cgtctcccactcctatttac

SEQ ID NO: 59781 - DNA, 20 bp, synthetic construct
  misc_feature 1..20: note = Description of Artificial Sequence: Synthetic oligonucleotide
  misc_feature 1..20: note = Target: SCN10A; (+) strand; PAM type: YTN; PAM sequence: CTC
  source 1..20: mol_type = other DNA
ccactcctatttactgcctg

SEQ ID NO: 59782 - DNA, 20 bp, synthetic construct
  misc_feature 1..20: note = Description of Artificial Sequence: Synthetic oligonucleotide
  misc_feature 1..20: note = Target: SCN10A; (+) strand; PAM type: YTN; PAM sequence: CTC
  source 1..20: mol_type = other DNA
ctatttactgcctggaattt

SEQ ID NO: 59783 - DNA, 20 bp, synthetic construct
  misc_feature 1..20: note = Description of Artificial Sequence: Synthetic oligonucleotide
  misc_feature 1..20: note = Target: SCN10A; (+) strand; PAM type: YTN; PAM sequence: CTA
  source 1..20: mol_type = other DNA
tttactgcctggaatttcaa

SEQ ID NO: 59784 - DNA, 20 bp, synthetic construct
  misc_feature 1..20: note = Description of Artificial Sequence: Synthetic oligonucleotide
  misc_feature 1..20: note = Target: SCN10A; (+) strand; PAM type: YTN; PAM sequence: TTT
  source 1..20: mol_type = other DNA
actgcctggaatttcaacat

SEQ ID NO: 59785 - DNA, 20 bp, synthetic construct
  misc_feature 1..20: note = Description of Artificial Sequence: Synthetic oligonucleotide
  misc_feature 1..20: note = Target: SCN10A; (+) strand; PAM type: YTN; PAM sequence: TTA
  source 1..20: mol_type = other DNA
ctgcctggaatttcaacatt

SEQ ID NO: 59786 - DNA, 20 bp, synthetic construct
  misc_feature 1..20: note = Description of Artificial Sequence: Synthetic oligonucleotide
  misc_feature 1..20: note = Target: SCN10A; (+) strand; PAM type: YTN; PAM sequence: CTG
  source 1..20: mol_type = other DNA
cctggaatttcaacattagg

SEQ ID NO: 59787 - DNA, 20 bp, synthetic construct
  misc_feature 1..20: note = Description of Artificial Sequence: Synthetic oligonucleotide
  misc_feature 1..20: note = Target: SCN10A; (+) strand; PAM type: YTN; PAM sequence: CTG
  source 1..20: mol_type = other DNA
gaatttcaacattagggtca

SEQ ID NO: 59788 - DNA, 20 bp, synthetic construct
  misc_feature 1..20: note = Description of Artificial Sequence: Synthetic oligonucleotide
  misc_feature 1..20: note = Target: SCN10A; (+) strand; PAM type: YTN; PAM sequence: TTT
  source 1..20: mol_type = other DNA
caacattagggtcatgcctt

SEQ ID NO: 59789 - DNA, 20 bp, synthetic construct
  misc_feature 1..20: note = Description of Artificial Sequence: Synthetic oligonucleotide
  misc_feature 1..20: note = Target: SCN10A; (+) strand; PAM type: YTN; PAM sequence: TTC
  source 1..20: mol_type = other DNA
aacattagggtcatgccttt

SEQ ID NO: 59790 - DNA, 20 bp, synthetic construct
  misc_feature 1..20: note = Description of Artificial Sequence: Synthetic oligonucleotide
  misc_feature 1..20: note = Target: SCN10A; (+) strand; PAM type: YTN; PAM sequence: TTA
  source 1..20: mol_type = other DNA
gggtcatgcctttgtaggta

SEQ ID NO: 59791 - DNA, 20 bp, synthetic construct
  misc_feature 1..20: note = Description of Artificial Sequence: Synthetic oligonucleotide
  misc_feature 1..20: note = Target: SCN10A; (+) strand; PAM type: YTN; PAM sequence: CTT
  source 1..20: mol_type = other DNA
tgtaggtagatgccctctcc

SEQ ID NO: 59792 - DNA, 20 bp, synthetic construct
  misc_feature 1..20: note = Description of Artificial Sequence: Synthetic oligonucleotide
  misc_feature 1..20: note = Target: SCN10A; (+) strand; PAM type: YTN; PAM sequence: TTT
  source 1..20: mol_type = other DNA
gtaggtagatgccctctcca

SEQ ID NO: 59793 - DNA, 20 bp, synthetic construct
  misc_feature 1..20: note = Description of Artificial Sequence: Synthetic oligonucleotide
  misc_feature 1..20: note = Target: SCN10A; (+) strand; PAM type: YTN; PAM sequence: TTG
  source 1..20: mol_type = other DNA
taggtagatgccctctccag

SEQ ID NO: 59794 - DNA, 20 bp, synthetic construct
  misc_feature 1..20: note = Description of Artificial Sequence: Synthetic oligonucleotide
  misc_feature 1..20: note = Target: SCN10A; (+) strand; PAM type: YTN; PAM sequence: CTC
  source 1..20: mol_type = other DNA
tccagggtccctttttgaaa

SEQ ID NO: 59795 - DNA, 20 bp, synthetic construct
  misc_feature 1..20: note = Description of Artificial Sequence: Synthetic oligonucleotide
  misc_feature 1..20: note = Target: SCN10A; (+) strand; PAM type: YTN; PAM sequence: CTC
  source 1..20: mol_type = other DNA
cagggtccctttttgaaata

SEQ ID NO: 59796 - DNA, 20 bp, synthetic construct
  misc_feature 1..20: note = Description of Artificial Sequence: Synthetic oligonucleotide
  misc_feature 1..20: note = Target: SCN10A; (+) strand; PAM type: YTN; PAM sequence: CTT
  source 1..20: mol_type = other DNA
tttgaaatatgatttatctt

SEQ ID NO: 59797 - DNA, 20 bp, synthetic construct
  misc_feature 1..20: note = Description of Artificial Sequence: Synthetic oligonucleotide
  misc_feature 1..20: note = Target: SCN10A; (+) strand; PAM type: YTN; PAM sequence: TTT
  source 1..20: mol_type = other DNA
ttgaaatatgatttatcttg

SEQ ID NO: 59798 - DNA, 20 bp, synthetic construct
  misc_feature 1..20: note = Description of Artificial Sequence: Synthetic oligonucleotide
  misc_feature 1..20: note = Target: SCN10A; (+) strand; PAM type: YTN; PAM sequence: TTT
  source 1..20: mol_type = other DNA
tgaaatatgatttatcttgt

SEQ ID NO: 59799 - DNA, 20 bp, synthetic construct
  misc_feature 1..20: note = Description of Artificial Sequence: Synthetic oligonucleotide
  misc_feature 1..20: note = Target: SCN10A; (+) strand; PAM type: YTN; PAM sequence: TTT
  source 1..20: mol_type = other DNA
gaaatatgatttatcttgtc

SEQ ID NO: 59800 - DNA, 20 bp, synthetic construct
  misc_feature 1..20: note = Description of Artificial Sequence: Synthetic oligonucleotide
  misc_feature 1..20: note = Target: SCN10A; (+) strand; PAM type: YTN; PAM sequence: TTG
  source 1..20: mol_type = other DNA
aaatatgatttatcttgtcc

SEQ ID NO: 59801 - DNA, 20 bp, synthetic construct
  misc_feature 1..20: note = Description of Artificial Sequence: Synthetic oligonucleotide
  misc_feature 1..20: note = Target: SCN10A; (+) strand; PAM type: YTN; PAM sequence: TTT
  source 1..20: mol_type = other DNA
atcttgtcctaagaatgttg

SEQ ID NO: 59802 - DNA, 20 bp, synthetic construct
  misc_feature 1..20: note = Description of Artificial Sequence: Synthetic oligonucleotide
  misc_feature 1..20: note = Target: SCN10A; (+) strand; PAM type: YTN; PAM sequence: TTA
  source 1..20: mol_type = other DNA
tcttgtcctaagaatgttgt

SEQ ID NO: 59803 - DNA, 20 bp, synthetic construct
  misc_feature 1..20: note = Description of Artificial Sequence: Synthetic oligonucleotide
  misc_feature 1..20: note = Target: SCN10A; (+) strand; PAM type: YTN; PAM sequence: CTT
  source 1..20: mol_type = other DNA
gtcctaagaatgttgtcttc

SEQ ID NO: 59804 - DNA, 20 bp, synthetic construct
  misc_feature 1..20: note = Description of Artificial Sequence: Synthetic oligonucleotide
  misc_feature 1..20: note = Target: SCN10A; (+) strand; PAM type: YTN; PAM sequence: TTG
  source 1..20: mol_type = other DNA
tcctaagaatgttgtcttcc

SEQ ID NO: 59805 - DNA, 20 bp, synthetic construct
  misc_feature 1..20: note = Description of Artificial Sequence: Synthetic oligonucleotide
  misc_feature 1..20: note = Target: SCN10A; (+) strand; PAM type: YTN; PAM sequence: CTA
  source 1..20: mol_type = other DNA
agaatgttgtcttccttgag

SEQ ID NO: 59806 - DNA, 20 bp, synthetic construct
  misc_feature 1..20: note = Description of Artificial Sequence: Synthetic oligonucleotide
  misc_feature 1..20: note = Target: SCN10A; (+) strand; PAM type: YTN; PAM sequence: TTG
  source 1..20: mol_type = other DNA
tcttccttgaggggaggaag

SEQ ID NO: 59807 - DNA, 20 bp, synthetic construct
  misc_feature 1..20: note = Description of Artificial Sequence: Synthetic oligonucleotide
  misc_feature 1..20: note = Target: SCN10A; (+) strand; PAM type: YTN; PAM sequence: CTT
  source 1..20: mol_type = other DNA
ccttgaggggaggaagcttt

SEQ ID NO: 59808 - DNA, 20 bp, synthetic construct
  misc_feature 1..20: note = Description of Artificial Sequence: Synthetic oligonucleotide
  misc_feature 1..20: note = Target: SCN10A; (+) strand; PAM type: YTN; PAM sequence: TTC
  source 1..20: mol_type = other DNA
cttgaggggaggaagctttc

SEQ ID NO: 59809 - DNA, 20 bp, synthetic construct
  misc_feature 1..20: note = Description of Artificial Sequence: Synthetic oligonucleotide
  misc_feature 1..20: note = Target: SCN10A; (+) strand; PAM type: YTN; PAM sequence: CTT
  source 1..20: mol_type = other DNA
gaggggaggaagctttcttt

SEQ ID NO: 59810 - DNA, 20 bp, synthetic construct
  misc_feature 1..20: note = Description of Artificial Sequence: Synthetic oligonucleotide
  misc_feature 1..20: note = Target: SCN10A; (+) strand; PAM type: YTN; PAM sequence: TTG
  source 1..20: mol_type = other DNA
aggggaggaagctttctttg

SEQ ID NO: 59811 - DNA, 20 bp, synthetic construct
  misc_feature 1..20: note = Description of Artificial Sequence: Synthetic oligonucleotide
  misc_feature 1..20: note = Target: SCN10A; (+) strand; PAM type: YTN; PAM sequence: CTT
  source 1..20: mol_type = other DNA
tctttggcagcctatggggt

SEQ ID NO: 59812 - DNA, 20 bp, synthetic construct
  misc_feature 1..20: note = Description of Artificial Sequence: Synthetic oligonucleotide
  misc_feature 1..20: note = Target: SCN10A; (+) strand; PAM type: YTN; PAM sequence: TTT
  source 1..20: mol_type = other DNA
ctttggcagcctatggggtt

SEQ ID NO: 59813 - DNA, 20 bp, synthetic construct
  misc_feature 1..20: note = Description of Artificial Sequence: Synthetic oligonucleotide
  misc_feature 1..20: note = Target: SCN10A; (+) strand; PAM type: YTN; PAM sequence: TTC
  source 1..20: mol_type = other DNA
tttggcagcctatggggttg

SEQ ID NO: 59814 - DNA, 20 bp, synthetic construct
  misc_feature 1..20: note = Description of Artificial Sequence: Synthetic oligonucleotide
  misc_feature 1..20: note = Target: SCN10A; (+) strand; PAM type: YTN; PAM sequence: CTT
  source 1..20: mol_type = other DNA
tggcagcctatggggttggg

SEQ ID NO: 59815 - DNA, 20 bp, synthetic construct
  misc_feature 1..20: note = Description of Artificial Sequence: Synthetic oligonucleotide
  misc_feature 1..20: note = Target: SCN10A; (+) strand; PAM type: YTN; PAM sequence: TTT
  source 1..20: mol_type = other DNA
ggcagcctatggggttgggt

SEQ ID NO: 59816 - DNA, 20 bp, synthetic construct
  misc_feature 1..20: note = Description of Artificial Sequence: Synthetic oligonucleotide
  misc_feature 1..20: note = Target: SCN10A; (+) strand; PAM type: YTN; PAM sequence: TTG
  source 1..20: mol_type = other DNA
gcagcctatggggttgggtg

SEQ ID NO: 59817 - DNA, 20 bp, synthetic construct
  misc_feature 1..20: note = Description of Artificial Sequence: Synthetic oligonucleotide
  misc_feature 1..20: note = Target: SCN10A; (+) strand; PAM type: YTN; PAM sequence: CTA
  source 1..20: mol_type = other DNA
tggggttgggtgatgacagg

SEQ ID NO: 59818 - DNA, 20 bp, synthetic construct
  misc_feature 1..20: note = Description of Artificial Sequence: Synthetic oligonucleotide
  misc_feature 1..20: note = Target: SCN10A; (+) strand; PAM type: YTN; PAM sequence: TTG
  source 1..20: mol_type = other DNA
ggtgatgacagggaagaagc

SEQ ID NO: 59819 - DNA, 20 bp, synthetic construct
  misc_feature 1..20: note = Description of Artificial Sequence: Synthetic oligonucleotide
  misc_feature 1..20: note = Target: SCN10A; (+) strand; PAM type: YTN; PAM sequence: CTG
  source 1..20: mol_type = other DNA
ggatgtcaaagagagattga

SEQ ID NO: 59820 - DNA, 20 bp, synthetic construct
  misc_feature 1..20: note = Description of Artificial Sequence: Synthetic oligonucleotide
  misc_feature 1..20: note = Target: SCN10A; (+) strand; PAM type: YTN; PAM sequence: TTG
  source 1..20: mol_type = other DNA
agtagtatgtgggggaaggt

SEQ ID NO: 59821 - DNA, 20 bp, synthetic construct
  misc_feature 1..20: note = Description of Artificial Sequence: Synthetic oligonucleotide
  misc_feature 1..20: note = Target: SCN10A; (+) strand; PAM type: YTN; PAM sequence: CTT
  source 1..20: mol_type = other DNA
tcatgtttttgccaagggtt

SEQ ID NO: 59822 - DNA, 20 bp, synthetic construct
  misc_feature 1..20: note = Description of Artificial Sequence: Synthetic oligonucleotide
  misc_feature 1..20: note = Target: SCN10A; (+) strand; PAM type: YTN; PAM sequence: TTT
  source 1..20: mol_type = other DNA
catgtttttgccaagggttg

SEQ ID NO: 59823 - DNA, 20 bp, synthetic construct
  misc_feature 1..20: note = Description of Artificial Sequence: Synthetic oligonucleotide
  misc_feature 1..20: note = Target: SCN10A; (+) strand; PAM type: YTN; PAM sequence: TTC
  source 1..20: mol_type = other DNA
atgtttttgccaagggttgt

SEQ ID NO: 59824 - DNA, 20 bp, synthetic construct
  misc_feature 1..20: note = Description of Artificial Sequence: Synthetic oligonucleotide
  misc_feature 1..20: note = Target: SCN10A; (+) strand; PAM type: YTN; PAM sequence: TTT
  source 1..20: mol_type = other DNA
ttgccaagggttgtccctag

SEQ ID NO: 59825 - DNA, 20 bp, synthetic construct
  misc_feature 1..20: note = Description of Artificial Sequence: Synthetic oligonucleotide
  misc_feature 1..20: note = Target: SCN10A; (+) strand; PAM type: YTN; PAM sequence: TTT
  source 1..20: mol_type = other DNA
tgccaagggttgtccctagc

SEQ ID NO: 59826 - DNA, 20 bp, synthetic construct
  misc_feature 1..20: note = Description of Artificial Sequence: Synthetic oligonucleotide
  misc_feature 1..20: note = Target: SCN10A; (+) strand; PAM type: YTN; PAM sequence: TTT
  source 1..20: mol_type = other DNA
gccaagggttgtccctagca

SEQ ID NO: 59827 - DNA, 20 bp, synthetic construct
  misc_feature 1..20: note = Description of Artificial Sequence: Synthetic oligonucleotide
  misc_feature 1..20: note = Target: SCN10A; (+) strand; PAM type: YTN; PAM sequence: TTG
  source 1..20: mol_type = other DNA
ccaagggttgtccctagcac

SEQ ID NO: 59828 - DNA, 20 bp, synthetic construct
  misc_feature 1..20: note = Description of Artificial Sequence: Synthetic oligonucleotide
  misc_feature 1..20: note = Target: SCN10A; (+) strand; PAM type: YTN; PAM sequence: TTG
  source 1..20: mol_type = other DNA
tccctagcacacacctcctt

SEQ ID NO: 59829 - DNA, 20 bp, synthetic construct
  misc_feature 1..20: note = Description of Artificial Sequence: Synthetic oligonucleotide
  misc_feature 1..20: note = Target: SCN10A; (+) strand; PAM type: YTN; PAM sequence: CTA
  source 1..20: mol_type = other DNA
gcacacacctccttggcatc

SEQ ID NO: 59830 - DNA, 20 bp, synthetic construct
  misc_feature 1..20: note = Description of Artificial Sequence: Synthetic oligonucleotide
  misc_feature 1..20: note = Target: SCN10A; (+) strand; PAM type: YTN; PAM sequence: CTC
  source 1..20: mol_type = other DNA
cttggcatctggctcaaatg

SEQ ID NO: 59831 - DNA, 20 bp, synthetic construct
  misc_feature 1..20: note = Description of Artificial Sequence: Synthetic oligonucleotide
  misc_feature 1..20: note = Target: SCN10A; (+) strand; PAM type: YTN; PAM sequence: CTT
  source 1..20: mol_type = other DNA
ggcatctggctcaaatgtgg

SEQ ID NO: 59832 - DNA, 20 bp, synthetic construct
  misc_feature 1..20: note = Description of Artificial Sequence: Synthetic oligonucleotide
  misc_feature 1..20: note = Target: SCN10A; (+) strand; PAM type: YTN; PAM sequence: TTG
  source 1..20: mol_type = other DNA
gcatctggctcaaatgtgga

SEQ ID NO: 59833 - DNA, 20 bp, synthetic construct
  misc_feature 1..20: note = Description of Artificial Sequence: Synthetic oligonucleotide
  misc_feature 1..20: note = Target: SCN10A; (+) strand; PAM type: YTN; PAM sequence: CTG
  source 1..20: mol_type = other DNA
gctcaaatgtggattcaatc

SEQ ID NO: 59834 - DNA, 20 bp, synthetic construct
  misc_feature 1..20: note = Description of Artificial Sequence: Synthetic oligonucleotide
  misc_feature 1..20: note = Target: SCN10A; (+) strand; PAM type: YTN; PAM sequence: CTC
  source 1..20: mol_type = other DNA
aaatgtggattcaatcttac

SEQ ID NO: 59835 - DNA, 20 bp, synthetic construct
  misc_feature 1..20: note = Description of Artificial Sequence: Synthetic oligonucleotide
  misc_feature 1..20: note = Target: SCN10A; (+) strand; PAM type: YTN; PAM sequence: TTC
  source 1..20: mol_type = other DNA
aatcttactccagccacaag

SEQ ID NO: 59836 - DNA, 20 bp, synthetic construct
  misc_feature 1..20: note = Description of Artificial Sequence: Synthetic oligonucleotide
  misc_feature 1..20: note = Target: SCN10A; (+) strand; PAM type: YTN; PAM sequence: CTT
  source 1..20: mol_type = other DNA
actccagccacaagtaaagg

SEQ ID NO: 59837 - DNA, 20 bp, synthetic construct
  misc_feature 1..20: note = Description of Artificial Sequence: Synthetic oligonucleotide
  misc_feature 1..20: note = Target: SCN10A; (+) strand; PAM type: YTN; PAM sequence: TTA
  source 1..20: mol_type = other DNA
ctccagccacaagtaaaggc

SEQ ID NO: 59838 - DNA, 20 bp, synthetic construct
  misc_feature 1..20: note = Description of Artificial Sequence: Synthetic oligonucleotide
  misc_feature 1..20: note = Target: SCN10A; (+) strand; PAM type: YTN; PAM sequence: CTC
  source 1..20: mol_type = other DNA
cagccacaagtaaaggccag

SEQ ID NO: 59839 - DNA, 20 bp, synthetic construct
  misc_feature 1..20: note = Description of Artificial Sequence: Synthetic oligonucleotide
  misc_feature 1..20: note = Target: SCN10A; (+) strand; PAM type: YTN; PAM sequence: CTC
  source 1..20: mol_type = other DNA
agctgcttgcttctcagtaa

SEQ ID NO: 59840 - DNA, 20 bp, synthetic construct
  misc_feature 1..20: note = Description of Artificial Sequence: Synthetic oligonucleotide
  misc_feature 1..20: note = Target: SCN10A; (+) strand; PAM type: YTN; PAM sequence: CTG
  source 1..20: mol_type = other DNA
cttgcttctcagtaagtctt

SEQ ID NO: 59841 - DNA, 20 bp, synthetic construct
  misc_feature 1..20: note = Description of Artificial Sequence: Synthetic oligonucleotide
  misc_feature 1..20: note = Target: SCN10A; (+) strand; PAM type: YTN; PAM sequence: CTT
  source 1..20: mol_type = other DNA
gcttctcagtaagtcttagg

SEQ ID NO: 59842 - DNA, 20 bp, synthetic construct
  misc_feature 1..20: note = Description of Artificial Sequence: Synthetic oligonucleotide
  misc_feature 1..20: note = Target: SCN10A; (+) strand; PAM type: YTN; PAM sequence: TTG
  source 1..20: mol_type = other DNA
cttctcagtaagtcttaggg

SEQ ID NO: 59843 - DNA, 20 bp, synthetic construct
  misc_feature 1..20: note = Description of Artificial Sequence: Synthetic oligonucleotide
  misc_feature 1..20: note = Target: SCN10A; (+) strand; PAM type: YTN; PAM sequence: CTT
  source 1..20: mol_type = other DNA
ctcagtaagtcttagggtcc

SEQ ID NO: 59844 - DNA, 20 bp, synthetic construct
  misc_feature 1..20: note = Description of Artificial Sequence: Synthetic oligonucleotide
  misc_feature 1..20: note = Target: SCN10A; (+) strand; PAM type: YTN; PAM sequence: TTC
  source 1..20: mol_type = other DNA
tcagtaagtcttagggtcct

SEQ ID NO: 59845 - DNA, 20 bp, synthetic construct
  misc_feature 1..20: note = Description of Artificial Sequence: Synthetic oligonucleotide
  misc_feature 1..20: note = Target: SCN10A; (+) strand; PAM type: YTN; PAM sequence: CTC
  source 1..20: mol_type = other DNA
agtaagtcttagggtcctcc

SEQ ID NO: 59846 - DNA, 20 bp, synthetic construct
  misc_feature 1..20: note = Description of Artificial Sequence: Synthetic oligonucleotide
  misc_feature 1..20: note = Target: SCN10A; (+) strand; PAM type: YTN; PAM sequence: CTT
  source 1..20: mol_type = other DNA
agggtcctcctctcattacc

SEQ ID NO: 59847 - DNA, 20 bp, synthetic construct
  misc_feature 1..20: note = Description of Artificial Sequence: Synthetic oligonucleotide
  misc_feature 1..20: note = Target: SCN10A; (+) strand; PAM type: YTN; PAM sequence: TTA
  source 1..20: mol_type = other DNA
gggtcctcctctcattaccc

SEQ ID NO: 59848 - DNA, 20 bp, synthetic construct
  misc_feature 1..20: note = Description of Artificial Sequence: Synthetic oligonucleotide
  misc_feature 1..20: note = Target: SCN10A; (+) strand; PAM type: YTN; PAM sequence: CTC
  source 1..20: mol_type = other DNA
ctctcattacccatgacttg

SEQ ID NO: 59849 - DNA, 20 bp, synthetic construct
  misc_feature 1..20: note = Description of Artificial Sequence: Synthetic oligonucleotide
  misc_feature 1..20: note = Target: SCN10A; (+) strand; PAM type: YTN; PAM sequence: CTC
  source 1..20: mol_type = other DNA
tcattacccatgacttgaat

SEQ ID NO: 59850 - DNA, 20 bp, synthetic construct
  misc_feature 1..20: note = Description of Artificial Sequence: Synthetic oligonucleotide
  misc_feature 1..20: note = Target: SCN10A; (+) strand; PAM type: YTN; PAM sequence: CTC
  source 1..20: mol_type = other DNA
attacccatgacttgaatgt

SEQ ID NO: 59851 - DNA, 20 bp, synthetic construct
  misc_feature 1..20: note = Description of Artificial Sequence: Synthetic oligonucleotide
  misc_feature 1..20: note = Target: SCN10A; (+) strand; PAM type: YTN; PAM sequence: TTA
  source 1..20: mol_type = other DNA
cccatgacttgaatgtggtt

SEQ ID NO: 59852 - DNA, 20 bp, synthetic construct
  misc_feature 1..20: note = Description of Artificial Sequence: Synthetic oligonucleotide
  misc_feature 1..20: note = Target: SCN10A; (+) strand; PAM type: YTN; PAM sequence: CTT
  source 1..20: mol_type = other DNA
gaatgtggttgggactcagc

SEQ ID NO: 59853 - DNA, 20 bp, synthetic construct
  misc_feature 1..20: note = Description of Artificial Sequence: Synthetic oligonucleotide
  misc_feature 1..20: note = Target: SCN10A; (+) strand; PAM type: YTN; PAM sequence: TTG
  source 1..20: mol_type = other DNA
aatgtggttgggactcagcc

SEQ ID NO: 59854 - DNA, 20 bp, synthetic construct
  misc_feature 1..20: note = Description of Artificial Sequence: Synthetic oligonucleotide
  misc_feature 1..20: note = Target: SCN10A; (+) strand; PAM type: YTN; PAM sequence: TTG
  source 1..20: mol_type = other DNA
ggactcagcctttcacctaa

SEQ ID NO: 59855 - DNA, 20 bp, synthetic construct
  misc_feature 1..20: note = Description of Artificial Sequence: Synthetic oligonucleotide
  misc_feature 1..20: note = Target: SCN10A; (+) strand; PAM type: YTN; PAM sequence: CTC
  source 1..20: mol_type = other DNA
agcctttcacctaattttaa

SEQ ID NO: 59856 - DNA, 20 bp, synthetic construct
  misc_feature 1..20: note = Description of Artificial Sequence: Synthetic oligonucleotide
  misc_feature 1..20: note = Target: SCN10A; (+) strand; PAM type: YTN; PAM sequence: CTT
  source 1..20: mol_type = other DNA
tcacctaattttaattttga

SEQ ID NO: 59857 - DNA, 20 bp, synthetic construct
  misc_feature 1..20: note = Description of Artificial Sequence: Synthetic oligonucleotide
  misc_feature 1..20: note = Target: SCN10A; (+) strand; PAM type: YTN; PAM sequence: TTT
  source 1..20: mol_type = other DNA
cacctaattttaattttgag

SEQ ID NO: 59858 - DNA, 20 bp, synthetic construct
  misc_feature 1..20: note = Description of Artificial Sequence: Synthetic oligonucleotide
  misc_feature 1..20: note = Target: SCN10A; (+) strand; PAM type: YTN; PAM sequence: TTC
  source 1..20: mol_type = other DNA
acctaattttaattttgagc

SEQ ID NO: 59859 - DNA, 20 bp, synthetic construct
  misc_feature 1..20: note = Description of Artificial Sequence: Synthetic oligonucleotide
  misc_feature 1..20: note = Target: SCN10A; (+) strand; PAM type: YTN; PAM sequence: CTA
  source 1..20: mol_type = other DNA
attttaattttgagcctgct

SEQ ID NO: 59860 - DNA, 20 bp, synthetic construct
  misc_feature 1..20: note = Description of Artificial Sequence: Synthetic oligonucleotide
  misc_feature 1..20: note = Target: SCN10A; (+) strand; PAM type: YTN; PAM sequence: TTT
  source 1..20: mol_type = other DNA
taattttgagcctgctcctc

SEQ ID NO: 59861 - DNA, 20 bp, synthetic construct
  misc_feature 1..20: note = Description of Artificial Sequence: Synthetic oligonucleotide
  misc_feature 1..20: note = Target: SCN10A; (+) strand; PAM type: YTN; PAM sequence: TTT
  source 1..20: mol_type = other DNA
aattttgagcctgctcctct

SEQ ID NO: 59862 - DNA, 20 bp, synthetic construct
  misc_feature 1..20: note = Description of Artificial Sequence: Synthetic oligonucleotide
  misc_feature 1..20: note = Target: SCN10A; (+) strand; PAM type: YTN; PAM sequence: TTA
  source 1..20: mol_type = other DNA
attttgagcctgctcctctc

SEQ ID NO: 59863 - DNA, 20 bp, synthetic construct
  misc_feature 1..20: note = Description of Artificial Sequence: Synthetic oligonucleotide
  misc_feature 1..20: note = Target: SCN10A; (+) strand; PAM type: YTN; PAM sequence: TTT
  source 1..20: mol_type = other DNA
tgagcctgctcctctccact

SEQ ID NO: 59864 - DNA, 20 bp, synthetic construct
  misc_feature 1..20: note = Description of Artificial Sequence: Synthetic oligonucleotide
  misc_feature 1..20: note = Target: SCN10A; (+) strand; PAM type: YTN; PAM sequence: TTT
  source 1..20: mol_type = other DNA
gagcctgctcctctccactg

SEQ ID NO: 59865 - DNA, 20 bp, synthetic construct
  misc_feature 1..20: note = Description of Artificial Sequence: Synthetic oligonucleotide
  misc_feature 1..20: note = Target: SCN10A; (+) strand; PAM type: YTN; PAM sequence: TTG
  source 1..20: mol_type = other DNA
agcctgctcctctccactga

SEQ ID NO: 59866 - DNA, 20 bp, synthetic construct
  misc_feature 1..20: note = Description of Artificial Sequence: Synthetic oligonucleotide
  misc_feature 1..20: note = Target: SCN10A; (+) strand; PAM type: YTN; PAM sequence: CTG
  source 1..20: mol_type = other DNA
ctcctctccactgaacttgt

SEQ ID NO: 59867 - DNA, 20 bp, synthetic construct
  misc_feature 1..20: note = Description of Artificial Sequence: Synthetic oligonucleotide
  misc_feature 1..20: note = Target: SCN10A; (+) strand; PAM type: YTN; PAM sequence: CTC
  source 1..20: mol_type = other DNA
ctctccactgaacttgttga

SEQ ID NO: 59868 - DNA, 20 bp, synthetic construct
  misc_feature 1..20: note = Description of Artificial Sequence: Synthetic oligonucleotide
  misc_feature 1..20: note = Target: SCN10A; (+) strand; PAM type: YTN; PAM sequence: CTC
  source 1..20: mol_type = other DNA
tccactgaacttgttgatgg

SEQ ID NO: 59869 - DNA, 20 bp, synthetic construct
  misc_feature 1..20: note = Description of Artificial Sequence: Synthetic oligonucleotide
  misc_feature 1..20: note = Target: SCN10A; (+) strand; PAM type: YTN; PAM sequence: CTC
  source 1..20: mol_type = other DNA
cactgaacttgttgatggag

SEQ ID NO: 59870 - DNA, 20 bp, synthetic construct
  misc_feature 1..20: note = Description of Artificial Sequence: Synthetic oligonucleotide
  misc_feature 1..20: note = Target: SCN10A; (+) strand; PAM type: YTN; PAM sequence: CTG
  source 1..20: mol_type = other DNA
aacttgttgatggagggata

SEQ ID NO: 59871 - DNA, 20 bp, synthetic construct
  misc_feature 1..20: note = Description of Artificial Sequence: Synthetic oligonucleotide
  misc_feature 1..20: note = Target: SCN10A; (+) strand; PAM type: YTN; PAM sequence: CTT
  source 1..20: mol_type = other DNA
gttgatggagggatactcaa

SEQ ID NO: 59872 - DNA, 20 bp, synthetic construct
  misc_feature 1..20: note = Description of Artificial Sequence: Synthetic oligonucleotide
  misc_feature 1..20: note = Target: SCN10A; (+) strand; PAM type: YTN; PAM sequence: TTG
  source 1..20: mol_type = other DNA
ttgatggagggatactcaat

SEQ ID NO: 59873 - DNA, 20 bp, synthetic construct
  misc_feature 1..20: note = Description of Artificial Sequence: Synthetic oligonucleotide
  misc_feature 1..20: note = Target: SCN10A; (+) strand; PAM type: YTN; PAM sequence: TTG
  source 1..20: mol_type = other DNA
atggagggatactcaatgag

SEQ ID NO: 59874 - DNA, 20 bp, synthetic construct
  misc_feature 1..20: note = Description of Artificial Sequence: Synthetic oligonucleotide
  misc_feature 1..20: note = Target: SCN10A; (+) strand; PAM type: YTN; PAM sequence: CTC
  source 1..20: mol_type = other DNA
aatgagcctaaggacttttg

SEQ ID NO: 59875 - DNA, 20 bp, synthetic construct
  misc_feature 1..20: note = Description of Artificial Sequence: Synthetic oligonucleotide
  misc_feature 1..20: note = Target: SCN10A; (+) strand; PAM type: YTN; PAM sequence: CTA
  source 1..20: mol_type = other DNA
aggacttttgctcaggttca

SEQ ID NO: 59876 - DNA, 20 bp, synthetic construct
  misc_feature 1..20: note = Description of Artificial Sequence: Synthetic oligonucleotide
  misc_feature 1..20: note = Target: SCN10A; (+) strand; PAM type: YTN; PAM sequence: CTT
  source 1..20: mol_type = other DNA
ttgctcaggttcactcaaat

SEQ ID NO: 59877 - DNA, 20 bp, synthetic construct
  misc_feature 1..20: note = Description of Artificial Sequence: Synthetic oligonucleotide
  misc_feature 1..20: note = Target: SCN10A; (+) strand; PAM type: YTN; PAM sequence: TTT
  source 1..20: mol_type = other DNA
tgctcaggttcactcaaatc

SEQ ID NO: 59878 - DNA, 20 bp, synthetic construct
  misc_feature 1..20: note = Description of Artificial Sequence: Synthetic oligonucleotide
  misc_feature 1..20: note = Target: SCN10A; (+) strand; PAM type: YTN; PAM sequence: TTT
  source 1..20: mol_type = other DNA
gctcaggttcactcaaatcc

SEQ ID NO: 59879 - DNA, 20 bp, synthetic construct
  misc_feature 1..20: note = Description of Artificial Sequence: Synthetic oligonucleotide
  misc_feature 1..20: note = Target: SCN10A; (+) strand; PAM type: YTN; PAM sequence: TTG
  source 1..20: mol_type = other DNA
ctcaggttcactcaaatcca

SEQ ID NO: 59880 - DNA, 20 bp, synthetic construct
  misc_feature 1..20: note = Description of Artificial Sequence: Synthetic oligonucleotide
  misc_feature 1..20: note = Target: SCN10A; (+) strand; PAM type: YTN; PAM sequence: CTC
  source 1..20: mol_type = other DNA
aggttcactcaaatccagtt

SEQ ID NO: 59881 - DNA, 20 bp, synthetic construct
  misc_feature 1..20: note = Description of Artificial Sequence: Synthetic oligonucleotide
  misc_feature 1..20: note = Target: SCN10A; (+) strand; PAM type: YTN; PAM sequence: TTC
  source 1..20: mol_type = other DNA
actcaaatccagttatcttg

SEQ ID NO: 59882 - DNA, 20 bp, synthetic construct
  misc_feature 1..20: note = Description of Artificial Sequence: Synthetic oligonucleotide
  misc_feature 1..20: note = Target: SCN10A; (+) strand; PAM type: YTN; PAM sequence: CTC
  source 1..20: mol_type = other DNA
aaatccagttatcttgattg

SEQ ID NO: 59883 - DNA, 20 bp, synthetic construct
  misc_feature 1..20: note = Description of Artificial Sequence: Synthetic oligonucleotide
  misc_feature 1..20: note = Target: SCN10A; (+) strand; PAM type: YTN; PAM sequence: TTA
  source 1..20: mol_type = other DNA
tcttgattgtatgggtgatt

SEQ ID NO: 59884 - DNA, 20 bp, synthetic construct
  misc_feature 1..20: note = Description of Artificial Sequence: Synthetic oligonucleotide
  misc_feature 1..20: note = Target: SCN10A; (+) strand; PAM type: YTN; PAM sequence: CTT
  source 1..20: mol_type = other DNA
gattgtatgggtgatttagg

SEQ ID NO: 59885 - DNA, 20 bp, synthetic construct
  misc_feature 1..20: note = Description of Artificial Sequence: Synthetic oligonucleotide
  misc_feature 1..20: note = Target: SCN10A; (+) strand; PAM type: YTN; PAM sequence: TTG
  source 1..20: mol_type = other DNA
attgtatgggtgatttagga

SEQ ID NO: 59886 - DNA, 20 bp, synthetic construct
  misc_feature 1..20: note = Description of Artificial Sequence: Synthetic oligonucleotide
  misc_feature 1..20: note = Target: SCN10A; (+) strand; PAM type: YTN; PAM sequence: TTG
  source 1..20: mol_type = other DNA
tatgggtgatttaggaagaa

SEQ ID NO: 59887 - DNA, 20 bp, synthetic construct
  misc_feature 1..20: note = Description of Artificial Sequence: Synthetic oligonucleotide
  misc_feature 1..20: note = Target: SCN10A; (+) strand; PAM type: YTN; PAM sequence: TTT
  source 1..20: mol_type = other DNA
aggaagaaagctgtgcccct

SEQ ID NO: 59888 - DNA, 20 bp, synthetic construct
  misc_feature 1..20: note = Description of Artificial Sequence: Synthetic oligonucleotide
  misc_feature 1..20: note = Target: SCN10A; (+) strand; PAM type: YTN; PAM sequence: TTA
  source 1..20: mol_type = other DNA
ggaagaaagctgtgccccta

SEQ ID NO: 59889 - DNA, 20 bp, synthetic construct
  misc_feature 1..20: note = Description of Artificial Sequence: Synthetic oligonucleotide
  misc_feature 1..20: note = Target: SCN10A; (+) strand; PAM type: YTN; PAM sequence: CTG
  source 1..20: mol_type = other DNA
tgcccctacagaggtctgaa

SEQ ID NO: 59890 - DNA, 20 bp, synthetic construct
  misc_feature 1..20: note = Description of Artificial Sequence: Synthetic oligonucleotide
  misc_feature 1..20: note = Target: SCN10A; (+) strand; PAM type: YTN; PAM sequence: CTA
  source 1..20: mol_type = other DNA
cagaggtctgaacctcctat

SEQ ID NO: 59891 - DNA, 20 bp, synthetic construct
  misc_feature 1..20: note = Description of Artificial Sequence: Synthetic oligonucleotide
  misc_feature 1..20: note = Target: SCN10A; (+) strand; PAM type: YTN; PAM sequence: CTG
  source 1..20: mol_type = other DNA
aacctcctatcactccccac

SEQ ID NO: 59892 - DNA, 20 bp, synthetic construct
  misc_feature 1..20: note = Description of Artificial Sequence: Synthetic oligonucleotide
  misc_feature 1..20: note = Target: SCN10A; (+) strand; PAM type: YTN; PAM sequence: CTC
  source 1..20: mol_type = other DNA
ctatcactccccactcccca

SEQ ID NO: 59893 - DNA, 20 bp, synthetic construct
  misc_feature 1..20: note = Description of Artificial Sequence: Synthetic oligonucleotide
  misc_feature 1..20: note = Target: SCN10A; (+) strand; PAM type: YTN; PAM sequence: CTA
  source 1..20: mol_type = other DNA
tcactccccactccccattg

SEQ ID NO: 59894 - DNA, 20 bp, synthetic construct
  misc_feature 1..20: note = Description of Artificial Sequence: Synthetic oligonucleotide
  misc_feature 1..20: note = Target: SCN10A; (+) strand; PAM type: YTN; PAM sequence: CTC
  source 1..20: mol_type = other DNA
cccactccccattgtaatac

SEQ ID NO: 59895 - DNA, 20 bp, synthetic construct
  misc_feature 1..20: note = Description of Artificial Sequence: Synthetic oligonucleotide
  misc_feature 1..20: note = Target: SCN10A; (+) strand; PAM type: YTN; PAM sequence: CTC
  source 1..20: mol_type = other DNA
cccattgtaatacttcttat

SEQ ID NO: 59896 - DNA, 20 bp, synthetic construct
  misc_feature 1..20: note = Description of Artificial Sequence: Synthetic oligonucleotide
  misc_feature 1..20: note = Target: SCN10A; (+) strand; PAM type: YTN; PAM sequence: TTG
  source 1..20: mol_type = other DNA
taatacttcttatcagaatc

SEQ ID NO: 59897 - DNA, 20 bp, synthetic construct
  misc_feature 1..20: note = Description of Artificial Sequence: Synthetic oligonucleotide
  misc_feature 1..20: note = Target: SCN10A; (+) strand; PAM type: YTN; PAM sequence: CTT
  source 1..20: mol_type = other DNA
cttatcagaatctagactag

SEQ ID NO: 59898 - DNA, 20 bp, synthetic construct
  misc_feature 1..20: note = Description of Artificial Sequence: Synthetic oligonucleotide
  misc_feature 1..20: note = Target: SCN10A; (+) strand; PAM type: YTN; PAM sequence: TTC
  source 1..20: mol_type = other DNA
ttatcagaatctagactagt

SEQ ID NO: 59899 - DNA, 20 bp, synthetic construct
  misc_feature 1..20: note = Description of Artificial Sequence: Synthetic oligonucleotide
  misc_feature 1..20: note = Target: SCN10A; (+) strand; PAM type: YTN; PAM sequence: CTT
  source 1..20: mol_type = other DNA
atcagaatctagactagtaa

SEQ ID NO: 59900 - DNA, 20 bp, synthetic construct
  misc_feature 1..20: note = Description of Artificial Sequence: Synthetic oligonucleotide
  misc_feature 1..20: note = Target: SCN10A; (+) strand; PAM type: YTN; PAM sequence: TTA
  source 1..20: mol_type = other DNA
tcagaatctagactagtaat

SEQ ID NO: 59901 - DNA, 20 bp, synthetic construct
  misc_feature 1..20: note = Description of Artificial Sequence: Synthetic oligonucleotide
  misc_feature 1..20: note = Target: SCN10A; (+) strand; PAM type: YTN; PAM sequence: CTA
  source 1..20: mol_type = other DNA
gactagtaataaattcatga

SEQ ID NO: 59902 - DNA, 20 bp, synthetic construct
  misc_feature 1..20: note = Description of Artificial Sequence: Synthetic oligonucleotide
  misc_feature 1..20: note = Target: SCN10A; (+) strand; PAM type: YTN; PAM sequence: CTA
  source 1..20: mol_type = other DNA
gtaataaattcatgaccact

SEQ ID NO: 59903 - DNA, 20 bp, synthetic construct
  misc_feature 1..20: note = Description of Artificial Sequence: Synthetic oligonucleotide
  misc_feature 1..20: note = Target: SCN10A; (+) strand; PAM type: YTN; PAM sequence: TTC
  source 1..20: mol_type = other DNA
atgaccactatttcaaaata

SEQ ID NO: 59904 - DNA, 20 bp, synthetic construct
  misc_feature 1..20: note = Description of Artificial Sequence: Synthetic oligonucleotide
  misc_feature 1..20: note = Target: SCN10A; (+) strand; PAM type: YTN; PAM sequence: CTA
  source 1..20: mol_type = other DNA
tttcaaaatacagtgtcaaa

SEQ ID NO: 59905 - DNA, 20 bp, synthetic construct
  misc_feature 1..20: note = Description of Artificial Sequence: Synthetic oligonucleotide
  misc_feature 1..20: note = Target: SCN10A; (+) strand; PAM type: YTN; PAM sequence: TTT
  source 1..20: mol_type = other DNA
caaaatacagtgtcaaaagt

SEQ ID NO: 59906 - DNA, 20 bp, synthetic construct
  misc_feature 1..20: note = Description of Artificial Sequence: Synthetic oligonucleotide
  misc_feature 1..20: note = Target: SCN10A; (+) strand; PAM type: YTN; PAM sequence: TTC
  source 1..20: mol_type = other DNA
aaaatacagtgtcaaaagtc

SEQ ID NO: 59907 - DNA, 20 bp, synthetic construct
  misc_feature 1..20: note = Description of Artificial Sequence: Synthetic oligonucleotide
  misc_feature 1..20: note = Target: SCN10A; (+) strand; PAM type: YTN; PAM sequence: CTT
  source 1..20: mol_type = other DNA
ttttctcttgtaaatgtttt

SEQ ID NO: 59908 - DNA, 20 bp, synthetic construct
  misc_feature 1..20: note = Description of Artificial Sequence: Synthetic oligonucleotide
  misc_feature 1..20: note = Target: SCN10A; (+) strand; PAM type: YTN; PAM sequence: TTT
  source 1..20: mol_type = other DNA
tttctcttgtaaatgttttt

SEQ ID NO: 59909 - DNA, 20 bp, synthetic construct
  misc_feature 1..20: note = Description of Artificial Sequence: Synthetic oligonucleotide
  misc_feature 1..20: note = Target: SCN10A; (+) strand; PAM type: YTN; PAM sequence: TTT
  source 1..20: mol_type = other DNA
ttctcttgtaaatgtttttc

SEQ ID NO: 59910 - DNA, 20 bp, synthetic construct
  misc_feature 1..20: note = Description of Artificial Sequence: Synthetic oligonucleotide
  misc_feature 1..20: note = Target: SCN10A; (+) strand; PAM type: YTN; PAM sequence: TTT
  source 1..20: mol_type = other DNA
tctcttgtaaatgtttttca

SEQ ID NO: 59911 - DNA, 20 bp, synthetic construct
  misc_feature 1..20: note = Description of Artificial Sequence: Synthetic oligonucleotide
  misc_feature 1..20: note = Target: SCN10A; (+) strand; PAM type: YTN; PAM sequence: TTT
  source 1..20: mol_type = other DNA
ctcttgtaaatgtttttcac

SEQ ID NO: 59912 - DNA, 20 bp, synthetic construct
  misc_feature 1..20: note = Description of Artificial Sequence: Synthetic oligonucleotide
  misc_feature 1..20: note = Target: SCN10A; (+) strand; PAM type: YTN; PAM sequence: TTC
  source 1..20: mol_type = other DNA
tcttgtaaatgtttttcact

SEQ ID NO: 59913 - DNA, 20 bp, synthetic construct
  misc_feature 1..20: note = Description of Artificial Sequence: Synthetic oligonucleotide
  misc_feature 1..20: note = Target: SCN10A; (+) strand; PAM type: YTN; PAM sequence: CTC
  source 1..20: mol_type = other DNA
ttgtaaatgtttttcacttt

SEQ ID NO: 59914 - DNA, 20 bp, synthetic construct
  misc_feature 1..20: note = Description of Artificial Sequence: Synthetic oligonucleotide
  misc_feature 1..20: note = Target: SCN10A; (+) strand; PAM type: YTN; PAM sequence: CTT
  source 1..20: mol_type = other DNA
gtaaatgtttttcactttgt

SEQ ID NO: 59915 - DNA, 20 bp, synthetic construct
  misc_feature 1..20: note = Description of Artificial Sequence: Synthetic oligonucleotide
  misc_feature 1..20: note = Target: SCN10A; (+) strand; PAM type: YTN; PAM sequence: TTG
  source 1..20: mol_type = other DNA
taaatgtttttcactttgtt

SEQ ID NO: 59916 - DNA, 20 bp, synthetic construct
  misc_feature 1..20: note = Description of Artificial Sequence: Synthetic oligonucleotide
  misc_feature 1..20: note = Target: SCN10A; (+) strand; PAM type: YTN; PAM sequence: TTT
  source 1..20: mol_type = other DNA
ttcactttgttctgacaaag

SEQ ID NO: 59917 - DNA, 20 bp, synthetic construct
  misc_feature 1..20: note = Description of Artificial Sequence: Synthetic oligonucleotide
  misc_feature 1..20: note = Target: SCN10A; (+) strand; PAM type: YTN; PAM sequence: TTT
  source 1..20: mol_type = other DNA
tcactttgttctgacaaagt

SEQ ID NO: 59918 - DNA, 20 bp, synthetic construct
  misc_feature 1..20: note = Description of Artificial Sequence: Synthetic oligonucleotide
  misc_feature 1..20: note = Target: SCN10A; (+) strand; PAM type: YTN; PAM sequence: TTT
  source 1..20: mol_type = other DNA
cactttgttctgacaaagtt

SEQ ID NO: 59919 - DNA, 20 bp, synthetic construct
  misc_feature 1..20: note = Description of Artificial Sequence: Synthetic oligonucleotide
  misc_feature 1..20: note = Target: SCN10A; (+) strand; PAM type: YTN; PAM sequence: TTC
  source 1..20: mol_type = other DNA
actttgttctgacaaagttt

SEQ ID NO: 59920 - DNA, 20 bp, synthetic construct
  misc_feature 1..20: note = Description of Artificial Sequence: Synthetic oligonucleotide
  misc_feature 1..20: note = Target: SCN10A; (+) strand; PAM type: YTN; PAM sequence: CTT
  source 1..20: mol_type = other DNA
tgttctgacaaagtttgaag

SEQ ID NO: 59921 - DNA, 20 bp, synthetic construct
  misc_feature 1..20: note = Description of Artificial Sequence: Synthetic oligonucleotide
  misc_feature 1..20: note = Target: SCN10A; (+) strand; PAM type: YTN; PAM sequence: TTT
  source 1..20: mol_type = other DNA
gttctgacaaagtttgaagt

SEQ ID NO: 59922 - DNA, 20 bp, synthetic construct
  misc_feature 1..20: note = Description of Artificial Sequence: Synthetic oligonucleotide
  misc_feature 1..20: note = Target: SCN10A; (+) strand; PAM type: YTN; PAM sequence: TTG
  source 1..20: mol_type = other DNA
ttctgacaaagtttgaagta

SEQ ID NO: 59923 - DNA, 20 bp, synthetic construct
  misc_feature 1..20: note = Description of Artificial Sequence: Synthetic oligonucleotide
  misc_feature 1..20: note = Target: SCN10A; (+) strand; PAM type: YTN; PAM sequence: TTC
  source 1..20: mol_type = other DNA
tgacaaagtttgaagtaaat

SEQ ID NO: 59924 - DNA, 20 bp, synthetic construct
  misc_feature 1..20: note = Description of Artificial Sequence: Synthetic oligonucleotide
  misc_feature 1..20: note = Target: SCN10A; (+) strand; PAM type: YTN; PAM sequence: CTG
  source 1..20: mol_type = other DNA
acaaagtttgaagtaaatta

SEQ ID NO: 59925 - DNA, 20 bp, synthetic construct
  misc_feature 1..20: note = Description of Artificial Sequence: Synthetic oligonucleotide
  misc_feature 1..20: note = Target: SCN10A; (+) strand; PAM type: YTN; PAM sequence: TTT
  source 1..20: mol_type = other DNA
gaagtaaattatgcaaatcc

SEQ ID NO: 59926 - DNA, 20 bp, synthetic construct
  misc_feature 1..20: note = Description of Artificial Sequence: Synthetic oligonucleotide
  misc_feature 1..20: note = Target: SCN10A; (+) strand; PAM type: YTN; PAM sequence: TTG
  source 1..20: mol_type = other DNA
aagtaaattatgcaaatcct

SEQ ID NO: 59927 - DNA, 20 bp, synthetic construct
  misc_feature 1..20: note = Description of Artificial Sequence: Synthetic oligonucleotide
  misc_feature 1..20: note = Target: SCN10A; (+) strand; PAM type: YTN; PAM sequence: TTA
  source 1..20: mol_type = other DNA
tgcaaatcctataccttgat

SEQ ID NO: 59928 - DNA, 20 bp, synthetic construct
  misc_feature 1..20: note = Description of Artificial Sequence: Synthetic oligonucleotide
  misc_feature 1..20: note = Target: SCN10A; (+) strand; PAM type: YTN; PAM sequence: CTA
  source 1..20: mol_type = other DNA
taccttgatttaaaaaaatc

SEQ ID NO: 59929 - DNA, 20 bp, synthetic construct
  misc_feature 1..20: note = Description of Artificial Sequence: Synthetic oligonucleotide
  misc_feature 1..20: note = Target: SCN10A; (+) strand; PAM type: YTN; PAM sequence: CTT
  source 1..20: mol_type = other DNA
gatttaaaaaaatctaatag

SEQ ID NO: 59930 - DNA, 20 bp, synthetic construct
  misc_feature 1..20: note = Description of Artificial Sequence: Synthetic oligonucleotide
  misc_feature 1..20: note = Target: SCN10A; (+) strand; PAM type: YTN; PAM sequence: TTG
  source 1..20: mol_type = other DNA
atttaaaaaaatctaatagc

SEQ ID NO: 59931 - DNA, 20 bp, synthetic construct
  misc_feature 1..20: note = Description of Artificial Sequence: Synthetic oligonucleotide
  misc_feature 1..20: note = Target: SCN10A; (+) strand; PAM type: YTN; PAM sequence: TTT
  source 1..20: mol_type = other DNA
aaaaaaatctaatagcttgg

SEQ ID NO: 59932 - DNA, 20 bp, synthetic construct
  misc_feature 1..20: note = Description of Artificial Sequence: Synthetic oligonucleotide
  misc_feature 1..20: note = Target: SCN10A; (+) strand; PAM type: YTN; PAM sequence: TTA
  source 1..20: mol_type = other DNA
aaaaaatctaatagcttggc

SEQ ID NO: 59933 - DNA, 20 bp, synthetic construct
  misc_feature 1..20: note = Description of Artificial Sequence: Synthetic oligonucleotide
  misc_feature 1..20: note = Target: SCN10A; (+) strand; PAM type: YTN; PAM sequence: CTA
  source 1..20: mol_type = other DNA
atagcttggctaacagaatg

SEQ ID NO: 59934 - DNA, 20 bp, synthetic construct
  misc_feature 1..20: note = Description of Artificial Sequence: Synthetic oligonucleotide
  misc_feature 1..20: note = Target: SCN10A; (+) strand; PAM type: YTN; PAM sequence: CTT
  source 1..20: mol_type = other DNA
ggctaacagaatgcatgtct

SEQ ID NO: 59935 - DNA, 20 bp, synthetic construct
  misc_feature 1..20: note = Description of Artificial Sequence: Synthetic oligonucleotide
  misc_feature 1..20: note = Target: SCN10A; (+) strand; PAM type: YTN; PAM sequence: TTG
  source 1..20: mol_type = other DNA
gctaacagaatgcatgtctc

SEQ ID NO: 59936 - DNA, 20 bp, synthetic construct
  misc_feature 1..20: note = Description of Artificial Sequence: Synthetic oligonucleotide
  misc_feature 1..20: note = Target: SCN10A; (+) strand; PAM type: YTN; PAM sequence: CTA
  source 1..20: mol_type = other DNA
acagaatgcatgtctccata

SEQ ID NO: 59937 - DNA, 20 bp, synthetic construct
  misc_feature 1..20: note = Description of Artificial Sequence: Synthetic oligonucleotide
  misc_feature 1..20: note = Target: SCN10A; (+) strand; PAM type: YTN; PAM sequence: CTC
  source 1..20: mol_type = other DNA
cataattcatttagggaaag

SEQ ID NO: 59938 - DNA, 20 bp, synthetic construct
  misc_feature 1..20: note = Description of Artificial Sequence: Synthetic oligonucleotide
  misc_feature 1..20: note = Target: SCN10A; (+) strand; PAM type: YTN; PAM sequence: TTC
  source 1..20: mol_type = other DNA
atttagggaaaggcttgttc

SEQ ID NO: 59939 - DNA, 20 bp, synthetic construct
  misc_feature 1..20: note = Description of Artificial Sequence: Synthetic oligonucleotide
  misc_feature 1..20: note = Target: SCN10A; (+) strand; PAM type: YTN; PAM sequence: TTT
  source 1..20: mol_type = other DNA
agggaaaggcttgttccttt

SEQ ID NO: 59940 - DNA, 20 bp, synthetic construct
  misc_feature 1..20: note = Description of Artificial Sequence: Synthetic oligonucleotide
  misc_feature 1..20: note = Target: SCN10A; (+) strand; PAM type: YTN; PAM sequence: TTA
  source 1..20: mol_type = other DNA
gggaaaggcttgttcctttg

SEQ ID NO: 59941 - DNA, 20 bp, synthetic construct
  misc_feature 1..20: note = Description of Artificial Sequence: Synthetic oligonucleotide
  misc_feature 1..20: note = Target: SCN10A; (+) strand; PAM type: YTN; PAM sequence: CTT
  source 1..20: mol_type = other DNA
gttcctttgttaaatgtcct

SEQ ID NO: 59942 - DNA, 20 bp, synthetic construct
  misc_feature 1..20: note = Description of Artificial Sequence: Synthetic oligonucleotide
  misc_feature 1..20: note = Target: SCN10A; (+) strand; PAM type: YTN; PAM sequence: TTG
  source 1..20: mol_type = other DNA
ttcctttgttaaatgtcctt

SEQ ID NO: 59943 - DNA, 20 bp, synthetic construct
  misc_feature 1..20: note = Description of Artificial Sequence: Synthetic oligonucleotide
  misc_feature 1..20: note = Target: SCN10A; (+) strand; PAM type: YTN; PAM sequence: TTC
  source 1..20: mol_type = other DNA
ctttgttaaatgtcctttgg

SEQ ID NO: 59944 - DNA, 20 bp, synthetic construct
  misc_feature 1..20: note = Description of Artificial Sequence: Synthetic oligonucleotide
  misc_feature 1..20: note = Target: SCN10A; (+) strand; PAM type: YTN; PAM sequence: CTT
  source 1..20: mol_type = other DNA
tgttaaatgtcctttggact

SEQ ID NO: 59945 - DNA, 20 bp, synthetic construct
  misc_feature 1..20: note = Description of Artificial Sequence: Synthetic oligonucleotide
  misc_feature 1..20: note = Target: SCN10A; (+) strand; PAM type: YTN; PAM sequence: TTT
  source 1..20: mol_type = other DNA
gttaaatgtcctttggactt

SEQ ID NO: 59946 - DNA, 20 bp, synthetic construct
  misc_feature 1..20: note = Description of Artificial Sequence: Synthetic oligonucleotide
  misc_feature 1..20: note = Target: SCN10A; (+) strand; PAM type: YTN; PAM sequence: TTG
  source 1..20: mol_type = other DNA
ttaaatgtcctttggacttt

SEQ ID NO: 59947 - DNA, 20 bp, synthetic construct
  misc_feature 1..20: note = Description of Artificial Sequence: Synthetic oligonucleotide
  misc_feature 1..20: note = Target: SCN10A; (+) strand; PAM type: YTN; PAM sequence: TTA
  source 1..20: mol_type = other DNA
aatgtcctttggacttttcc

SEQ ID NO: 59948 - DNA, 20 bp, synthetic construct
  misc_feature 1..20: note = Description of Artificial Sequence: Synthetic oligonucleotide
  misc_feature 1..20: note = Target: SCN10A; (+) strand; PAM type: YTN; PAM sequence: CTT
  source 1..20: mol_type = other DNA
tggacttttcccttgtgtgg

SEQ ID NO: 59949 - DNA, 20 bp, synthetic construct
  misc_feature 1..20: note = Description of Artificial Sequence: Synthetic oligonucleotide
  misc_feature 1..20: note = Target: SCN10A; (+) strand; PAM type: YTN; PAM sequence: TTT
  source 1..20: mol_type = other DNA
ggacttttcccttgtgtggg

SEQ ID NO: 59950 - DNA, 20 bp, synthetic construct
  misc_feature 1..20: note = Description of Artificial Sequence: Synthetic oligonucleotide
  misc_feature 1..20: note = Target: SCN10A; (+) strand; PAM type: YTN; PAM sequence: TTG
  source 1..20: mol_type = other DNA
gacttttcccttgtgtgggg

SEQ ID NO: 59951 - DNA, 20 bp, synthetic construct
  misc_feature 1..20: note = Description of Artificial Sequence: Synthetic oligonucleotide
  misc_feature 1..20: note = Target: SCN10A; (+) strand; PAM type: YTN; PAM sequence: CTT
  source 1..20: mol_type = other DNA
ttcccttgtgtggggaaggg

SEQ ID NO: 59952 - DNA, 20 bp, synthetic construct
  misc_feature 1..20: note = Description of Artificial Sequence: Synthetic oligonucleotide
  misc_feature 1..20: note = Target: SCN10A; (+) strand; PAM type: YTN; PAM sequence: TTT
  source 1..20: mol_type = other DNA
tcccttgtgtggggaagggc

SEQ ID NO: 59953 - DNA, 20 bp, synthetic construct
  misc_feature 1..20: note = Description of Artificial Sequence: Synthetic oligonucleotide
  misc_feature 1..20: note = Target: SCN10A; (+) strand; PAM type: YTN; PAM sequence: TTT
  source 1..20: mol_type = other DNA
cccttgtgtggggaagggct

SEQ ID NO: 59954 - DNA, 20 bp, synthetic construct
  misc_feature 1..20: note = Description of Artificial Sequence: Synthetic oligonucleotide
  misc_feature 1..20: note = Target: SCN10A; (+) strand; PAM type: YTN; PAM sequence: TTC
  source 1..20: mol_type = other DNA
ccttgtgtggggaagggcta

SEQ ID NO: 59955 - DNA, 20 bp, synthetic construct
  misc_feature 1..20: note = Description of Artificial Sequence: Synthetic oligonucleotide
  misc_feature 1..20: note = Target: SCN10A; (+) strand; PAM type: YTN; PAM sequence: CTT
  source 1..20: mol_type = other DNA
gtgtggggaagggctaatga

SEQ ID NO: 59956 - DNA, 20 bp, synthetic construct
  misc_feature 1..20: note = Description of Artificial Sequence: Synthetic oligonucleotide
  misc_feature 1..20: note = Target: SCN10A; (+) strand; PAM type: YTN; PAM sequence: TTG
  source 1..20: mol_type = other DNA
tgtggggaagggctaatgaa

SEQ ID NO: 59957 - DNA, 20 bp, synthetic construct
  misc_feature 1..20: note = Description of Artificial Sequence: Synthetic oligonucleotide
  misc_feature 1..20: note = Target: SCN10A; (+) strand; PAM type: YTN; PAM sequence: CTA
  source 1..20: mol_type = other DNA
atgaaattgtgtcatcagca

SEQ ID NO: 59958 - DNA, 20 bp, synthetic construct
  misc_feature 1..20: note = Description of Artificial Sequence: Synthetic oligonucleotide
  misc_feature 1..20: note = Target: SCN10A; (+) strand; PAM type: YTN; PAM sequence: TTG
  source 1..20: mol_type = other DNA
tgtcatcagcaatacctgtg

SEQ ID NO: 59959 - DNA, 20 bp, synthetic construct
  misc_feature 1..20: note = Description of Artificial Sequence: Synthetic oligonucleotide
  misc_feature 1..20: note = Target: SCN10A; (+) strand; PAM type: YTN; PAM sequence: CTG
  source 1..20: mol_type = other DNA
tgattttcttcactaatgct

SEQ ID NO: 59960 - DNA, 20 bp, synthetic construct
  misc_feature 1..20: note = Description of Artificial Sequence: Synthetic oligonucleotide
  misc_feature 1..20: note = Target: SCN10A; (+) strand; PAM type: YTN; PAM sequence: TTT
  source 1..20: mol_type = other DNA
tcttcactaatgctgcatct

SEQ ID NO: 59961 - DNA, 20 bp, synthetic construct
  misc_feature 1..20: note = Description of Artificial Sequence: Synthetic oligonucleotide
  misc_feature 1..20: note = Target: SCN10A; (+) strand; PAM type: YTN; PAM sequence: TTT
  source 1..20: mol_type = other DNA
cttcactaatgctgcatctt

SEQ ID NO: 59962 - DNA, 20 bp, synthetic construct
  misc_feature 1..20: note = Description of Artificial Sequence: Synthetic oligonucleotide
  misc_feature 1..20: note = Target: SCN10A; (+) strand; PAM type: YTN; PAM sequence: TTC
  source 1..20: mol_type = other DNA
ttcactaatgctgcatctta

SEQ ID NO: 59963 - DNA, 20 bp, synthetic construct
  misc_feature 1..20: note = Description of Artificial Sequence: Synthetic oligonucleotide
  misc_feature 1..20: note = Target: SCN10A; (+) strand; PAM type: YTN; PAM sequence: CTT
  source 1..20: mol_type = other DNA
cactaatgctgcatcttagc

SEQ ID NO: 59964 - DNA, 20 bp, synthetic construct
  misc_feature 1..20: note = Description of Artificial Sequence: Synthetic oligonucleotide
  misc_feature 1..20: note = Target: SCN10A; (+) strand; PAM type: YTN; PAM sequence: TTC
  source 1..20: mol_type = other DNA
actaatgctgcatcttagcc

SEQ ID NO: 59965 - DNA, 20 bp, synthetic construct
  misc_feature 1..20: note = Description of Artificial Sequence: Synthetic oligonucleotide
  misc_feature 1..20: note = Target: SCN10A; (+) strand; PAM type: YTN; PAM sequence: CTA
  source 1..20: mol_type = other DNA
atgctgcatcttagccacag

SEQ ID NO: 59966 - DNA, 20 bp, synthetic construct
  misc_feature 1..20: note = Description of Artificial Sequence: Synthetic oligonucleotide
  misc_feature 1..20: note = Target: SCN10A; (+) strand; PAM type: YTN; PAM sequence: CTG
  source 1..20: mol_type = other DNA
catcttagccacagaaagtt

SEQ ID NO: 59967 - DNA, 20 bp, synthetic construct
  misc_feature 1..20: note = Description of Artificial Sequence: Synthetic oligonucleotide
  misc_feature 1..20: note = Target: SCN10A; (+) strand; PAM type: YTN; PAM sequence: CTT
  source 1..20: mol_type = other DNA
agccacagaaagtttatgta

SEQ ID NO: 59968 - DNA, 20 bp, synthetic construct
  misc_feature 1..20: note = Description of Artificial Sequence: Synthetic oligonucleotide
  misc_feature 1..20: note = Target: SCN10A; (+) strand; PAM type: YTN; PAM sequence: TTA
  source 1..20: mol_type = other DNA
gccacagaaagtttatgtag

SEQ ID NO: 59969 - DNA, 20 bp, synthetic construct
  misc_feature 1..20: note = Description of Artificial Sequence: Synthetic oligonucleotide
  misc_feature 1..20: note = Target: SCN10A; (+) strand; PAM type: YTN; PAM sequence: TTT
  source 1..20: mol_type = other DNA
atgtagaaggacacagggcc

SEQ ID NO: 59970 - DNA, 20 bp, synthetic construct
  misc_feature 1..20: note = Description of Artificial Sequence: Synthetic oligonucleotide
  misc_feature 1..20: note = Target: SCN10A; (+) strand; PAM type: YTN; PAM sequence: TTA
  source 1..20: mol_type = other DNA
tgtagaaggacacagggcca

SEQ ID NO: 59971 - DNA, 20 bp, synthetic construct
  misc_feature 1..20: note = Description of Artificial Sequence: Synthetic oligonucleotide
  misc_feature 1..20: note = Target: SCN10A; (+) strand; PAM type: YTN; PAM sequence: TTC
  source 1..20: mol_type = other DNA
cattcactggagtggatggc

SEQ ID NO: 59972 - DNA, 20 bp, synthetic construct
  misc_feature 1..20: note = Description of Artificial Sequence: Synthetic oligonucleotide
  misc_feature 1..20: note = Target: SCN10A; (+) strand; PAM type: YTN; PAM sequence: TTC
  source 1..20: mol_type = other DNA
actggagtggatggctcaga

SEQ ID NO: 59973 - DNA, 20 bp, synthetic construct
  misc_feature 1..20: note = Description of Artificial Sequence: Synthetic oligonucleotide
  misc_feature 1..20: note = Target: SCN10A; (+) strand; PAM type: YTN; PAM sequence: CTG
  source 1..20: mol_type = other DNA
gagtggatggctcagaaatt

SEQ ID NO: 59974 - DNA, 20 bp, synthetic construct
  misc_feature 1..20: note = Description of Artificial Sequence: Synthetic oligonucleotide
  misc_feature 1..20: note = Target: SCN10A; (+) strand; PAM type: YTN; PAM sequence: CTC
  source 1..20: mol_type = other DNA
agaaattctttgaagacgat

SEQ ID NO: 59975 - DNA, 20 bp, synthetic construct
  misc_feature 1..20: note = Description of Artificial Sequence: Synthetic oligonucleotide
  misc_feature 1..20: note = Target: SCN10A; (+) strand; PAM type: YTN; PAM sequence: TTC
  source 1..20: mol_type = other DNA
tttgaagacgatcaacaata

SEQ ID NO: 59976 - DNA, 20 bp, synthetic construct
  misc_feature 1..20: note = Description of Artificial Sequence: Synthetic oligonucleotide
  misc_feature 1..20: note = Target: SCN10A; (+) strand; PAM type: YTN; PAM sequence: CTT
  source 1..20: mol_type = other DNA
tgaagacgatcaacaataat

SEQ ID NO: 59977 - DNA, 20 bp, synthetic construct
  misc_feature 1..20: note = Description of Artificial Sequence: Synthetic oligonucleotide
  misc_feature 1..20: note = Target: SCN10A; (+) strand; PAM type: YTN; PAM sequence: TTT
  source 1..20: mol_type = other DNA
gaagacgatcaacaataatt

SEQ ID NO: 59978 - DNA, 20 bp, synthetic construct
  misc_feature 1..20: note = Description of Artificial Sequence: Synthetic oligonucleotide
  misc_feature 1..20: note = Target: SCN10A; (+) strand; PAM type: YTN; PAM sequence: TTG
  source 1..20: mol_type = other DNA
aagacgatcaacaataattt

SEQ ID NO: 59979 - DNA, 20 bp, synthetic construct
  misc_feature 1..20: note = Description of Artificial Sequence: Synthetic oligonucleotide
  misc_feature 1..20: note = Target: SCN10A; (+) strand; PAM type: YTN; PAM sequence: TTT
  source 1..20: mol_type = other DNA
ctgacacatcaacatcttca

SEQ ID NO: 59980 - DNA, 20 bp, synthetic construct
  misc_feature 1..20: note = Description of Artificial Sequence: Synthetic oligonucleotide
  misc_feature 1..20: note = Target: SCN10A; (+) strand; PAM type: YTN; PAM sequence: TTC
  source 1..20: mol_type = other DNA
tgacacatcaacatcttcac

SEQ ID NO: 59981 - DNA, 20 bp, synthetic construct
  misc_feature 1..20: note = Description of Artificial Sequence: Synthetic oligonucleotide
  misc_feature 1..20: note = Target: SCN10A; (+) strand; PAM type: YTN; PAM sequence: CTG
  source 1..20: mol_type = other DNA
acacatcaacatcttcaccc

SEQ ID NO: 59982 - DNA, 20 bp, synthetic construct
  misc_feature 1..20: note = Description of Artificial Sequence: Synthetic oligonucleotide
  misc_feature 1..20: note = Target: SCN10A; (+) strand; PAM type: YTN; PAM sequence: CTT
  source 1..20: mol_type = other DNA
cacccccaaacctgttcatc

SEQ ID NO: 59983 - DNA, 20 bp, synthetic construct
  misc_feature 1..20: note = Description of Artificial Sequence: Synthetic oligonucleotide
  misc_feature 1..20: note = Target: SCN10A; (+) strand; PAM type: YTN; PAM sequence: TTC
  source 1..20: mol_type = other DNA
acccccaaacctgttcatcc

SEQ ID NO: 59984 - DNA, 20 bp, synthetic construct
  misc_feature 1..20: note = Description of Artificial Sequence: Synthetic oligonucleotide
  misc_feature 1..20: note = Target: SCN10A; (+) strand; PAM type: YTN; PAM sequence: CTG
  source 1..20: mol_type = other DNA
ttcatccattcccaaaaaag

SEQ ID NO: 59985 - DNA, 20 bp, synthetic construct
  misc_feature 1..20: note = Description of Artificial Sequence: Synthetic oligonucleotide
  misc_feature 1..20: note = Target: SCN10A; (+) strand; PAM type: YTN; PAM sequence: TTC
  source 1..20: mol_type = other DNA
atccattcccaaaaaagtgc

SEQ ID NO: 59986 - DNA, 20 bp, synthetic construct
  misc_feature 1..20: note = Description of Artificial Sequence: Synthetic oligonucleotide
  misc_feature 1..20: note = Target: SCN10A; (+) strand; PAM type: YTN; PAM sequence: TTC
  source 1..20: mol_type = other DNA
ccaaaaaagtgctatcttag

SEQ ID NO: 59987 - DNA, 20 bp, synthetic construct
  misc_feature 1..20: note = Description of Artificial Sequence: Synthetic oligonucleotide
  misc_feature 1..20: note = Target: SCN10A; (+) strand; PAM type: YTN; PAM sequence: CTA
  source 1..20: mol_type = other DNA
tcttagggcctctcagaggc

SEQ ID NO: 59988 - DNA, 20 bp, synthetic construct
  misc_feature 1..20: note = Description of Artificial Sequence: Synthetic oligonucleotide
  misc_feature 1..20: note = Target: SCN10A; (+) strand; PAM type: YTN; PAM sequence: CTT
  source 1..20: mol_type = other DNA
agggcctctcagaggcttga

SEQ ID NO: 59989 - DNA, 20 bp, synthetic construct
  misc_feature 1..20: note = Description of Artificial Sequence: Synthetic oligonucleotide
  misc_feature 1..20: note = Target: SCN10A; (+) strand; PAM type: YTN; PAM sequence: TTA
  source 1..20: mol_type = other DNA
gggcctctcagaggcttgat

SEQ ID NO: 59990 - DNA, 20 bp, synthetic construct
  misc_feature 1..20: note = Description of Artificial Sequence: Synthetic oligonucleotide
  misc_feature 1..20: note = Target: SCN10A; (+) strand; PAM type: YTN; PAM sequence: CTC
  source 1..20: mol_type = other DNA
tcagaggcttgatgttttct

SEQ ID NO: 59991 - DNA, 20 bp, synthetic construct
  misc_feature 1..20: note = Description of Artificial Sequence: Synthetic oligonucleotide
  misc_feature 1..20: note = Target: SCN10A; (+) strand; PAM type: YTN; PAM sequence: CTC
  source 1..20: mol_type = other DNA
agaggcttgatgttttctat

SEQ ID NO: 59992 - DNA, 20 bp, synthetic construct
  misc_feature 1..20: note = Description of Artificial Sequence: Synthetic oligonucleotide
  misc_feature 1..20: note = Target: SCN10A; (+) strand; PAM type: YTN; PAM sequence: CTT
  source 1..20: mol_type = other DNA
gatgttttctatcttctggc

SEQ ID NO: 59993 - DNA, 20 bp, synthetic construct
  misc_feature 1..20: note = Description of Artificial Sequence: Synthetic oligonucleotide
  misc_feature 1..20: note = Target: SCN10A; (+) strand; PAM type: YTN; PAM sequence: TTG
  source 1..20: mol_type = other DNA
atgttttctatcttctggca

SEQ ID NO: 59994 - DNA, 20 bp, synthetic construct
  misc_feature 1..20: note = Description of Artificial Sequence: Synthetic oligonucleotide
  misc_feature 1..20: note = Target: SCN10A; (+) strand; PAM type: YTN; PAM sequence: TTT
  source 1..20: mol_type = other DNA
tctatcttctggcagaagac

SEQ ID NO: 59995 - DNA, 20 bp, synthetic construct
  misc_feature 1..20: note = Description of Artificial Sequence: Synthetic oligonucleotide
  misc_feature 1..20: note = Target: SCN10A; (+) strand; PAM type: YTN; PAM sequence: TTT
  source 1..20: mol_type = other DNA
ctatcttctggcagaagact

SEQ ID NO: 59996 - DNA, 20 bp, synthetic construct
  misc_feature 1..20: note = Description of Artificial Sequence: Synthetic oligonucleotide
  misc_feature 1..20: note = Target: SCN10A; (+) strand; PAM type: YTN; PAM sequence: TTC
  source 1..20: mol_type = other DNA
tatcttctggcagaagactg

SEQ ID NO: 59997 - DNA, 20 bp, synthetic construct
  misc_feature 1..20: note = Description of Artificial Sequence: Synthetic oligonucleotide
  misc_feature 1..20: note = Target: SCN10A; (+) strand; PAM type: YTN; PAM sequence: CTA
  source 1..20: mol_type = other DNA
tcttctggcagaagactgag

SEQ ID NO: 59998 - DNA, 20 bp, synthetic construct
  misc_feature 1..20: note = Description of Artificial Sequence: Synthetic oligonucleotide
  misc_feature 1..20: note = Target: SCN10A; (+) strand; PAM type: YTN; PAM sequence: CTT
  source 1..20: mol_type = other DNA
ctggcagaagactgagaaga

SEQ ID NO: 59999 - DNA, 20 bp, synthetic construct
  misc_feature 1..20: note = Description of Artificial Sequence: Synthetic oligonucleotide
  misc_feature 1..20: note = Target: SCN10A; (+) strand; PAM type: YTN; PAM sequence: TTC
  source 1..20: mol_type = other DNA
tggcagaagactgagaagaa

SEQ ID NO: 60000 - DNA, 20 bp, synthetic construct
  misc_feature 1..20: note = Description of Artificial Sequence: Synthetic oligonucleotide
  misc_feature 1..20: note = Target: SCN10A; (+) strand; PAM type: YTN; PAM sequence: CTG
  source 1..20: mol_type = other DNA
gcagaagactgagaagaact

SEQ ID NO: 60001 - DNA, 20 bp, synthetic construct
  misc_feature 1..20: note = Description of Artificial Sequence: Synthetic oligonucleotide
  misc_feature 1..20: note = Target: SCN10A; (+) strand; PAM type: YTN; PAM sequence: CTG
  source 1..20: mol_type = other DNA
agaagaacttaggtgatatc

SEQ ID NO: 60002 - DNA, 20 bp, synthetic construct
  misc_feature 1..20: note = Description of Artificial Sequence: Synthetic oligonucleotide
  misc_feature 1..20: note = Target: SCN10A; (+) strand; PAM type: YTN; PAM sequence: CTT
  source 1..20: mol_type = other DNA
aggtgatatcatgtgtggta

SEQ ID NO: 60003 - DNA, 20 bp, synthetic construct
  misc_feature 1..20: note = Description of Artificial Sequence: Synthetic oligonucleotide
  misc_feature 1..20: note = Target: SCN10A; (+) strand; PAM type: YTN; PAM sequence: TTA
  source 1..20: mol_type = other DNA
ggtgatatcatgtgtggtat

SEQ ID NO: 60004 - DNA, 20 bp, synthetic construct
  misc_feature 1..20: note = Description of Artificial Sequence: Synthetic oligonucleotide
  misc_feature 1..20: note = Target: SCN10A; (+) strand; PAM type: YTN; PAM sequence: TTT
  source 1..20: mol_type = other DNA
aatggaggaacgcaaagcca

SEQ ID NO: 60005 - DNA, 20 bp, synthetic construct
  misc_feature 1..20: note = Description of Artificial Sequence: Synthetic oligonucleotide
  misc_feature 1..20: note = Target: SCN10A; (+) strand; PAM type: YTN; PAM sequence: TTA
  source 1..20: mol_type = other DNA
atggaggaacgcaaagccat

SEQ ID NO: 60006 - DNA, 20 bp, synthetic construct
  misc_feature 1..20: note = Description of Artificial Sequence: Synthetic oligonucleotide
  misc_feature 1..20: note = Target: SCN10A; (+) strand; PAM type: YTN; PAM sequence: CTC
  source 1..20: mol_type = other DNA
ttgagatctttatgaaaaaa

SEQ ID NO: 60007 - DNA, 20 bp, synthetic construct
  misc_feature 1..20: note = Description of Artificial Sequence: Synthetic oligonucleotide
  misc_feature 1..20: note = Target: SCN10A; (+) strand; PAM type: YTN; PAM sequence: CTT
  source 1..20: mol_type = other DNA
gagatctttatgaaaaaagg

SEQ ID NO: 60008 - DNA, 20 bp, synthetic construct
  misc_feature 1..20: note = Description of Artificial Sequence: Synthetic oligonucleotide
  misc_feature 1..20: note = Target: SCN10A; (+) strand; PAM type: YTN; PAM sequence: TTG
  source 1..20: mol_type = other DNA
agatctttatgaaaaaagga

SEQ ID NO: 60009 - DNA, 20 bp, synthetic construct
  misc_feature 1..20: note = Description of Artificial Sequence: Synthetic oligonucleotide
  misc_feature 1..20: note = Target: SCN10A; (+) strand; PAM type: YTN; PAM sequence: CTT
  source 1..20: mol_type = other DNA
tatgaaaaaaggagtgaaac

SEQ ID NO: 60010 - DNA, 20 bp, synthetic construct
  misc_feature 1..20: note = Description of Artificial Sequence: Synthetic oligonucleotide
  misc_feature 1..20: note = Target: SCN10A; (+) strand; PAM type: YTN; PAM sequence: TTT
  source 1..20: mol_type = other DNA
atgaaaaaaggagtgaaact

SEQ ID NO: 60011 - DNA, 20 bp, synthetic construct
  misc_feature 1..20: note = Description of Artificial Sequence: Synthetic oligonucleotide
  misc_feature 1..20: note = Target: SCN10A; (+) strand; PAM type: YTN; PAM sequence: TTA
  source 1..20: mol_type = other DNA
tgaaaaaaggagtgaaacta

SEQ ID NO: 60012 - DNA, 20 bp, synthetic construct
  misc_feature 1..20: note = Description of Artificial Sequence: Synthetic oligonucleotide
  misc_feature 1..20: note = Target: SCN10A; (+) strand; PAM type: YTN; PAM sequence: CTA
  source 1..20: mol_type = other DNA
gagtctggccctaatttttg

SEQ ID NO: 60013 - DNA, 20 bp, synthetic construct
  misc_feature 1..20: note = Description of Artificial Sequence: Synthetic oligonucleotide
  misc_feature 1..20: note = Target: SCN10A; (+) strand; PAM type: YTN; PAM sequence: CTG
  source 1..20: mol_type = other DNA
gccctaatttttgcccaatc

SEQ ID NO: 60014 - DNA, 20 bp, synthetic construct
  misc_feature 1..20: note = Description of Artificial Sequence: Synthetic oligonucleotide
  misc_feature 1..20: note = Target: SCN10A; (+) strand; PAM type: YTN; PAM sequence: CTA
  source 1..20: mol_type = other DNA
atttttgcccaatctttaaa

SEQ ID NO: 60015 - DNA, 20 bp, synthetic construct
  misc_feature 1..20: note = Description of Artificial Sequence: Synthetic oligonucleotide
  misc_feature 1..20: note = Target: SCN10A; (+) strand; PAM type: YTN; PAM sequence: TTT
  source 1..20: mol_type = other DNA
ttgcccaatctttaaactcg

SEQ ID NO: 60016 - DNA, 20 bp, synthetic construct
  misc_feature 1..20: note = Description of Artificial Sequence: Synthetic oligonucleotide
  misc_feature 1..20: note = Target: SCN10A; (+) strand; PAM type: YTN; PAM sequence: TTT
  source 1..20: mol_type = other DNA
tgcccaatctttaaactcga

SEQ ID NO: 60017 - DNA, 20 bp, synthetic construct
  misc_feature 1..20: note = Description of Artificial Sequence: Synthetic oligonucleotide
  misc_feature 1..20: note = Target: SCN10A; (+) strand; PAM type: YTN; PAM sequence: TTT
  source 1..20: mol_type = other DNA
gcccaatctttaaactcgag

SEQ ID NO: 60018 - DNA, 20 bp, synthetic construct
  misc_feature 1..20: note = Description of Artificial Sequence: Synthetic oligonucleotide
  misc_feature 1..20: note = Target: SCN10A; (+) strand; PAM type: YTN; PAM sequence: TTG
  source 1..20: mol_type = other DNA
cccaatctttaaactcgagt

SEQ ID NO: 60019 - DNA, 20 bp, synthetic construct
  misc_feature 1..20: note = Description of Artificial Sequence: Synthetic oligonucleotide
  misc_feature 1..20: note = Target: SCN10A; (+) strand; PAM type: YTN; PAM sequence: CTT
  source 1..20: mol_type = other DNA
taaactcgagtgggataact

SEQ ID NO: 60020 - DNA, 20 bp, synthetic construct
  misc_feature 1..20: note = Description of Artificial Sequence: Synthetic oligonucleotide
  misc_feature 1..20: note = Target: SCN10A; (+) strand; PAM type: YTN; PAM sequence: TTT
  source 1..20: mol_type = other DNA
aaactcgagtgggataactt

SEQ ID NO: 60021 - DNA, 20 bp, synthetic construct
  misc_feature 1..20: note = Description of Artificial Sequence: Synthetic oligonucleotide
  misc_feature 1..20: note = Target: SCN10A; (+) strand; PAM type: YTN; PAM sequence: TTA
  source 1..20: mol_type = other DNA
aactcgagtgggataacttt

SEQ ID NO: 60022 - DNA, 20 bp, synthetic construct
  misc_feature 1..20: note = Description of Artificial Sequence: Synthetic oligonucleotide
  misc_feature 1..20: note = Target: SCN10A; (+) strand; PAM type: YTN; PAM sequence: CTC
  source 1..20: mol_type = other DNA
gagtgggataacttttggtt

SEQ ID NO: 60023 - DNA, 20 bp, synthetic construct
  misc_feature 1..20: note = Description of Artificial Sequence: Synthetic oligonucleotide
  misc_feature 1..20: note = Target: SCN10A; (+) strand; PAM type: YTN; PAM sequence: CTT
  source 1..20: mol_type = other DNA
ttggttcctactgggccact

SEQ ID NO: 60024 - DNA, 20 bp, synthetic construct
  misc_feature 1..20: note = Description of Artificial Sequence: Synthetic oligonucleotide
  misc_feature 1..20: note = Target: SCN10A; (+) strand; PAM type: YTN; PAM sequence: TTT
  source 1..20: mol_type = other DNA
tggttcctactgggccactt

SEQ ID NO: 60025 - DNA, 20 bp, synthetic construct
  misc_feature 1..20: note = Description of Artificial Sequence: Synthetic oligonucleotide
  misc_feature 1..20: note = Target: SCN10A; (+) strand; PAM type: YTN; PAM sequence: TTT
  source 1..20: mol_type = other DNA
ggttcctactgggccacttg

SEQ ID NO: 60026 - DNA, 20 bp, synthetic construct
  misc_feature 1..20: note = Description of Artificial Sequence: Synthetic oligonucleotide
  misc_feature 1..20: note = Target: SCN10A; (+) strand; PAM type: YTN; PAM sequence: TTG
  source 1..20: mol_type = other DNA
gttcctactgggccacttga

SEQ ID NO: 60027 - DNA, 20 bp, synthetic construct
  misc_feature 1..20: note = Description of Artificial Sequence: Synthetic oligonucleotide
  misc_feature 1..20: note = Target: SCN10A; (+) strand; PAM type: YTN; PAM sequence: TTC
  source 1..20: mol_type = other DNA
ctactgggccacttgaccac

SEQ ID NO: 60028 - DNA, 20 bp, synthetic construct
  misc_feature 1..20: note = Description of Artificial Sequence: Synthetic oligonucleotide
  misc_feature 1..20: note = Target: SCN10A; (+) strand; PAM type: YTN; PAM sequence: CTA
  source 1..20: mol_type = other DNA
ctgggccacttgaccactac

SEQ ID NO: 60029 - DNA, 20 bp, synthetic construct
  misc_feature 1..20: note = Description of Artificial Sequence: Synthetic oligonucleotide
  misc_feature 1..20: note = Target: SCN10A; (+) strand; PAM type: YTN; PAM sequence: CTG
  source 1..20: mol_type = other DNA
ggccacttgaccactaccat

SEQ ID NO: 60030 - DNA, 20 bp, synthetic construct
  misc_feature 1..20: note = Description of Artificial Sequence: Synthetic oligonucleotide
  misc_feature 1..20: note = Target: SCN10A; (+) strand; PAM type: YTN; PAM sequence: CTT
  source 1..20: mol_type = other DNA
gaccactaccatgactgcat

SEQ ID NO: 60031 - DNA, 20 bp, synthetic construct
  misc_feature 1..20: note = Description of Artificial Sequence: Synthetic oligonucleotide
  misc_feature 1..20: note = Target: SCN10A; (+) strand; PAM type: YTN; PAM sequence: TTG
  source 1..20: mol_type = other DNA
accactaccatgactgcatc

SEQ ID NO: 60032 - DNA, 20 bp, synthetic construct
  misc_feature 1..20: note = Description of Artificial Sequence: Synthetic oligonucleotide
  misc_feature 1..20: note = Target: SCN10A; (+) strand; PAM type: YTN; PAM sequence: CTA
  source 1..20: mol_type = other DNA
ccatgactgcatcttggatc

SEQ ID NO: 60033 - DNA, 20 bp, synthetic construct
  misc_feature 1..20: note = Description of Artificial Sequence: Synthetic oligonucleotide
  misc_feature 1..20: note = Target: SCN10A; (+) strand; PAM type: YTN; PAM sequence: CTG
  source 1..20: mol_type = other DNA
catcttggatcctgacaggg

SEQ ID NO: 60034 - DNA, 20 bp, synthetic construct
  misc_feature 1..20: note = Description of Artificial Sequence: Synthetic oligonucleotide
  misc_feature 1..20: note = Target: SCN10A; (+) strand; PAM type: YTN; PAM sequence: CTT
  source 1..20: mol_type = other DNA
ggatcctgacaggggagttg

SEQ ID NO: 60035 - DNA, 20 bp, synthetic construct
  misc_feature 1..20: note = Description of Artificial Sequence: Synthetic oligonucleotide
  misc_feature 1..20: note = Target: SCN10A; (+) strand; PAM type: YTN; PAM sequence: TTG
  source 1..20: mol_type = other DNA
gatcctgacaggggagttgg

SEQ ID NO: 60036 - DNA, 20 bp, synthetic construct
  misc_feature 1..20: note = Description of Artificial Sequence: Synthetic oligonucleotide
  misc_feature 1..20: note = Target: SCN10A; (+) strand; PAM type: YTN; PAM sequence: CTG
  source 1..20: mol_type = other DNA
acaggggagttgggttgttg

SEQ ID NO: 60037 - DNA, 20 bp, synthetic construct
  misc_feature 1..20: note = Description of Artificial Sequence: Synthetic oligonucleotide
  misc_feature 1..20: note = Target: SCN10A; (+) strand; PAM type: YTN; PAM sequence: TTG
  source 1..20: mol_type = other DNA
ggttgttgtcatttcctctc

SEQ ID NO: 60038 - DNA, 20 bp, synthetic construct
  misc_feature 1..20: note = Description of Artificial Sequence: Synthetic oligonucleotide
  misc_feature 1..20: note = Target: SCN10A; (+) strand; PAM type: YTN; PAM sequence: TTG
  source 1..20: mol_type = other DNA
ttgtcatttcctctctatac

SEQ ID NO: 60039 - DNA, 20 bp, synthetic construct
  misc_feature 1..20: note = Description of Artificial Sequence: Synthetic oligonucleotide
  misc_feature 1..20: note = Target: SCN10A; (+) strand; PAM type: YTN; PAM sequence: TTG
  source 1..20: mol_type = other DNA
tcatttcctctctatacctg

SEQ ID NO: 60040 - DNA, 20 bp, synthetic construct
  misc_feature 1..20: note = Description of Artificial Sequence: Synthetic oligonucleotide
  misc_feature 1..20: note = Target: SCN10A; (+) strand; PAM type: YTN; PAM sequence: TTT
  source 1..20: mol_type = other DNA
cctctctatacctgtaggcg

SEQ ID NO: 60041 - DNA, 20 bp, synthetic construct
  misc_feature 1..20: note = Description of Artificial Sequence: Synthetic oligonucleotide
  misc_feature 1..20: note = Target: SCN10A; (+) strand; PAM type: YTN; PAM sequence: TTC
  source 1..20: mol_type = other DNA
ctctctatacctgtaggcgt

SEQ ID NO: 60042 - DNA, 20 bp, synthetic construct
  misc_feature 1..20: note = Description of Artificial Sequence: Synthetic oligonucleotide
  misc_feature 1..20: note = Target: SCN10A; (+) strand; PAM type: YTN; PAM sequence: CTC
  source 1..20: mol_type = other DNA
tctatacctgtaggcgtggg

SEQ ID NO: 60043 - DNA, 20 bp, synthetic construct
  misc_feature 1..20: note = Description of Artificial Sequence: Synthetic oligonucleotide
  misc_feature 1..20: note = Target: SCN10A; (+) strand; PAM type: YTN; PAM sequence: CTC
  source 1..20: mol_type = other DNA
tatacctgtaggcgtggggt

SEQ ID NO: 60044 - DNA, 20 bp, synthetic construct
  misc_feature 1..20: note = Description of Artificial Sequence: Synthetic oligonucleotide
  misc_feature 1..20: note = Target: SCN10A; (+) strand; PAM type: YTN; PAM sequence: CTA
  source 1..20: mol_type = other DNA
tacctgtaggcgtggggtag

SEQ ID NO: 60045 - DNA, 20 bp, synthetic construct
  misc_feature 1..20: note = Description of Artificial Sequence: Synthetic oligonucleotide
  misc_feature 1..20: note = Target: SCN10A; (+) strand; PAM type: YTN; PAM sequence: CTG
  source 1..20: mol_type = other DNA
taggcgtggggtagaatata

SEQ ID NO: 60046 - DNA, 20 bp, synthetic construct
  misc_feature 1..20: note = Description of Artificial Sequence: Synthetic oligonucleotide
  misc_feature 1..20: note = Target: SCN10A; (+) strand; PAM type: YTN; PAM sequence: CTG
  source 1..20: mol_type = other DNA
gagatctactgcgacctaga

SEQ ID NO: 60047 - DNA, 20 bp, synthetic construct
  misc_feature 1..20: note = Description of Artificial Sequence: Synthetic oligonucleotide
  misc_feature 1..20: note = Target: SCN10A; (+) strand; PAM type: YTN; PAM sequence: CTA
  source 1..20: mol_type = other DNA
ctgcgacctagaccatgata

SEQ ID NO: 60048 - DNA, 20 bp, synthetic construct
  misc_feature 1..20: note = Description of Artificial Sequence: Synthetic oligonucleotide
  misc_feature 1..20: note = Target: SCN10A; (+) strand; PAM type: YTN; PAM sequence: CTG
  source 1..20: mol_type = other DNA
cgacctagaccatgatacat

SEQ ID NO: 60049 - DNA, 20 bp, synthetic construct
  misc_feature 1..20: note = Description of Artificial Sequence: Synthetic oligonucleotide
  misc_feature 1..20: note = Target: SCN10A; (+) strand; PAM type: YTN; PAM sequence: CTA
  source 1..20: mol_type = other DNA
gaccatgatacataaccaca

SEQ ID NO: 60050 - DNA, 20 bp, synthetic construct
  misc_feature 1..20: note = Description of Artificial Sequence: Synthetic oligonucleotide
  misc_feature 1..20: note = Target: SCN10A; (+) strand; PAM type: YTN; PAM sequence: TTT
  source 1..20: mol_type = other DNA
aatccctgggttctaactac

SEQ ID NO: 60051 - DNA, 20 bp, synthetic construct
  misc_feature 1..20: note = Description of Artificial Sequence: Synthetic oligonucleotide
  misc_feature 1..20: note = Target: SCN10A; (+) strand; PAM type: YTN; PAM sequence: TTA
  source 1..20: mol_type = other DNA
atccctgggttctaactacc

SEQ ID NO: 60052 - DNA, 20 bp, synthetic construct
  misc_feature 1..20: note = Description of Artificial Sequence: Synthetic oligonucleotide
  misc_feature 1..20: note = Target: SCN10A; (+) strand; PAM type: YTN; PAM sequence: CTG
  source 1..20: mol_type = other DNA
ggttctaactacccttactg

SEQ ID NO: 60053 - DNA, 20 bp, synthetic construct
  misc_feature 1..20: note = Description of Artificial Sequence: Synthetic oligonucleotide
  misc_feature 1..20: note = Target: SCN10A; (+) strand; PAM type: YTN; PAM sequence: TTC
  source 1..20: mol_type = other DNA
taactacccttactgtcact

SEQ ID NO: 60054 - DNA, 20 bp, synthetic construct
  misc_feature 1..20: note = Description of Artificial Sequence: Synthetic oligonucleotide
  misc_feature 1..20: note = Target: SCN10A; (+) strand; PAM type: YTN; PAM sequence: CTA
  source 1..20: mol_type = other DNA
actacccttactgtcactta

SEQ ID NO: 60055 - DNA, 20 bp, synthetic construct
  misc_feature 1..20: note = Description of Artificial Sequence: Synthetic oligonucleotide
  misc_feature 1..20: note = Target: SCN10A; (+) strand; PAM type: YTN; PAM sequence: CTA
  source 1..20: mol_type = other DNA
cccttactgtcacttagctt

SEQ ID NO: 60056 - DNA, 20 bp, synthetic construct
  misc_feature 1..20: note = Description of Artificial Sequence: Synthetic oligonucleotide
  misc_feature 1..20: note = Target: SCN10A; (+) strand; PAM type: YTN; PAM sequence: CTT
  source 1..20: mol_type = other DNA
actgtcacttagcttaacct

SEQ ID NO: 60057 - DNA, 20 bp, synthetic construct
  misc_feature 1..20: note = Description of Artificial Sequence: Synthetic oligonucleotide
  misc_feature 1..20: note = Target: SCN10A; (+) strand; PAM type: YTN; PAM sequence: TTA
  source 1..20: mol_type = other DNA
ctgtcacttagcttaacctg

SEQ ID NO: 60058 - DNA, 20 bp, synthetic construct
  misc_feature 1..20: note = Description of Artificial Sequence: Synthetic oligonucleotide
  misc_feature 1..20: note = Target: SCN10A; (+) strand; PAM type: YTN; PAM sequence: CTG
  source 1..20: mol_type = other DNA
tcacttagcttaacctgcct

SEQ ID NO: 60059 - DNA, 20 bp, synthetic construct
  misc_feature 1..20: note = Description of Artificial Sequence: Synthetic oligonucleotide
  misc_feature 1..20: note = Target: SCN10A; (+) strand; PAM type: YTN; PAM sequence: CTT
  source 1..20: mol_type = other DNA
agcttaacctgcctccaatc

SEQ ID NO: 60060 - DNA, 20 bp, synthetic construct
  misc_feature 1..20: note = Description of Artificial Sequence: Synthetic oligonucleotide
  misc_feature 1..20: note = Target: SCN10A; (+) strand; PAM type: YTN; PAM sequence: TTA
  source 1..20: mol_type = other DNA
gcttaacctgcctccaatcc

SEQ ID NO: 60061 - DNA, 20 bp, synthetic construct
  misc_feature 1..20: note = Description of Artificial Sequence: Synthetic oligonucleotide
  misc_feature 1..20: note = Target: SCN10A; (+) strand; PAM type: YTN; PAM sequence: CTT
  source 1..20: mol_type = other DNA
aacctgcctccaatcctgta

SEQ ID NO: 60062 - DNA, 20 bp, synthetic construct
  misc_feature 1..20: note = Description of Artificial Sequence: Synthetic oligonucleotide
  misc_feature 1..20: note = Target: SCN10A; (+) strand; PAM type: YTN; PAM sequence: TTA
  source 1..20: mol_type = other DNA
acctgcctccaatcctgtac

SEQ ID NO: 60063 - DNA, 20 bp, synthetic construct
  misc_feature 1..20: note = Description of Artificial Sequence: Synthetic oligonucleotide
  misc_feature 1..20: note = Target: SCN10A; (+) strand; PAM type: YTN; PAM sequence: CTG
  source 1..20: mol_type = other DNA
cctccaatcctgtacttgaa

SEQ ID NO: 60064 - DNA, 20 bp, synthetic construct
  misc_feature 1..20: note = Description of Artificial Sequence: Synthetic oligonucleotide
  misc_feature 1..20: note = Target: SCN10A; (+) strand; PAM type: YTN; PAM sequence: CTC
  source 1..20: mol_type = other DNA
caatcctgtacttgaactct

SEQ ID NO: 60065 - DNA, 20 bp, synthetic construct
  misc_feature 1..20: note = Description of Artificial Sequence: Synthetic oligonucleotide
  misc_feature 1..20: note = Target: SCN10A; (+) strand; PAM type: YTN; PAM sequence: CTG
  source 1..20: mol_type = other DNA
tacttgaactctaaaactgt

SEQ ID NO: 60066 - DNA, 20 bp, synthetic construct
  misc_feature 1..20: note = Description of Artificial Sequence: Synthetic oligonucleotide
  misc_feature 1..20: note = Target: SCN10A; (+) strand; PAM type: YTN; PAM sequence: CTT
  source 1..20: mol_type = other DNA
gaactctaaaactgttggag

SEQ ID NO: 60067 - DNA, 20 bp, synthetic construct
  misc_feature 1..20: note = Description of Artificial Sequence: Synthetic oligonucleotide
  misc_feature 1..20: note = Target: SCN10A; (+) strand; PAM type: YTN; PAM sequence: TTG
  source 1..20: mol_type = other DNA
aactctaaaactgttggaga

SEQ ID NO: 60068 - DNA, 20 bp, synthetic construct
  misc_feature 1..20: note = Description of Artificial Sequence: Synthetic oligonucleotide
  misc_feature 1..20: note = Target: SCN10A; (+) strand; PAM type: YTN; PAM sequence: CTC
  source 1..20: mol_type = other DNA
taaaactgttggagaaactc

SEQ ID NO: 60069 - DNA, 20 bp, synthetic construct
  misc_feature 1..20: note = Description of Artificial Sequence: Synthetic oligonucleotide
  misc_feature 1..20: note = Target: SCN10A; (+) strand; PAM type: YTN; PAM sequence: CTA
  source 1..20: mol_type = other DNA
aaactgttggagaaactcag

SEQ ID NO: 60070 - DNA, 20 bp, synthetic construct
  misc_feature 1..20: note = Description of Artificial Sequence: Synthetic oligonucleotide
  misc_feature 1..20: note = Target: SCN10A; (+) strand; PAM type: YTN; PAM sequence: CTG
  source 1..20: mol_type = other DNA
ttggagaaactcagtgcttc

SEQ ID NO: 60071 - DNA, 20 bp, synthetic construct
  misc_feature 1..20: note = Description of Artificial Sequence: Synthetic oligonucleotide
  misc_feature 1..20: note = Target: SCN10A; (+) strand; PAM type: YTN; PAM sequence: TTG
  source 1..20: mol_type = other DNA
gagaaactcagtgcttcccc

SEQ ID NO: 60072 - DNA, 20 bp, synthetic construct
  misc_feature 1..20: note = Description of Artificial Sequence: Synthetic oligonucleotide
  misc_feature 1..20: note = Target: SCN10A; (+) strand; PAM type: YTN; PAM sequence: CTC
  source 1..20: mol_type = other DNA
agtgcttcccccaacagatt

SEQ ID NO: 60073 - DNA, 20 bp, synthetic construct
  misc_feature 1..20: note = Description of Artificial Sequence: Synthetic oligonucleotide
  misc_feature 1..20: note = Target: SCN10A; (+) strand; PAM type: YTN; PAM sequence: CTT
  source 1..20: mol_type = other DNA
cccccaacagattcatttca

SEQ ID NO: 60074 - DNA, 20 bp, synthetic construct
  misc_feature 1..20: note = Description of Artificial Sequence: Synthetic oligonucleotide
  misc_feature 1..20: note = Target: SCN10A; (+) strand; PAM type: YTN; PAM sequence: TTC
  source 1..20: mol_type = other DNA
ccccaacagattcatttcaa

SEQ ID NO: 60075 - DNA, 20 bp, synthetic construct
  misc_feature 1..20: note = Description of Artificial Sequence: Synthetic oligonucleotide
  misc_feature 1..20: note = Target: SCN10A; (+) strand; PAM type: YTN; PAM sequence: TTC
  source 1..20: mol_type = other DNA
atttcaaatagctgtaaaag

SEQ ID NO: 60076 - DNA, 20 bp, synthetic construct
  misc_feature 1..20: note = Description of Artificial Sequence: Synthetic oligonucleotide
  misc_feature 1..20: note = Target: SCN10A; (+) strand; PAM type: YTN; PAM sequence: TTT
  source 1..20: mol_type = other DNA
caaatagctgtaaaaggtat

SEQ ID NO: 60077 - DNA, 20 bp, synthetic construct
  misc_feature 1..20: note = Description of Artificial Sequence: Synthetic oligonucleotide
  misc_feature 1..20: note = Target: SCN10A; (+) strand; PAM type: YTN; PAM sequence: TTC
  source 1..20: mol_type = other DNA
aaatagctgtaaaaggtatg

SEQ ID NO: 60078 - DNA, 20 bp, synthetic construct
  misc_feature 1..20: note = Description of Artificial Sequence: Synthetic oligonucleotide
  misc_feature 1..20: note = Target: SCN10A; (+) strand; PAM type: YTN; PAM sequence: CTG
  source 1..20: mol_type = other DNA
taaaaggtatgtttactcca

SEQ ID NO: 60079 - DNA, 20 bp, synthetic construct
  misc_feature 1..20: note = Description of Artificial Sequence: Synthetic oligonucleotide
  misc_feature 1..20: note = Target: SCN10A; (+) strand; PAM type: YTN; PAM sequence: TTT
  source 1..20: mol_type = other DNA
actccagaagaccagagttg

SEQ ID NO: 60080 - DNA, 20 bp, synthetic construct
  misc_feature 1..20: note = Description of Artificial Sequence: Synthetic oligonucleotide
  misc_feature 1..20: note = Target: SCN10A; (+) strand; PAM type: YTN; PAM sequence: TTA
  source 1..20: mol_type = other DNA
ctccagaagaccagagttgc

SEQ ID NO: 60081 - DNA, 20 bp, synthetic construct
  misc_feature 1..20: note = Description of Artificial Sequence: Synthetic oligonucleotide
  misc_feature 1..20: note = Target: SCN10A; (+) strand; PAM type: YTN; PAM sequence: CTC
  source 1..20: mol_type = other DNA
cagaagaccagagttgcttc

SEQ ID NO: 60082 - DNA, 20 bp, synthetic construct
  misc_feature 1..20: note = Description of Artificial Sequence: Synthetic oligonucleotide
  misc_feature 1..20: note = Target: SCN10A; (+) strand; PAM type: YTN; PAM sequence: TTG
  source 1..20: mol_type = other DNA
cttcttttgaacttctcatt

SEQ ID NO: 60083 - DNA, 20 bp, synthetic construct
  misc_feature 1..20: note = Description of Artificial Sequence: Synthetic oligonucleotide
  misc_feature 1..20: note = Target: SCN10A; (+) strand; PAM type: YTN; PAM sequence: CTT
  source 1..20: mol_type = other DNA
cttttgaacttctcattcct

SEQ ID NO: 60084 - DNA, 20 bp, synthetic construct
  misc_feature 1..20: note = Description of Artificial Sequence: Synthetic oligonucleotide
  misc_feature 1..20: note = Target: SCN10A; (+) strand; PAM type: YTN; PAM sequence: TTC
  source 1..20: mol_type = other DNA
ttttgaacttctcattcctt

SEQ ID NO: 60085 - DNA, 20 bp, synthetic construct
  misc_feature 1..20: note = Description of Artificial Sequence: Synthetic oligonucleotide
  misc_feature 1..20: note = Target: SCN10A; (+) strand; PAM type: YTN; PAM sequence: CTT
  source 1..20: mol_type = other DNA
ttgaacttctcattccttgg

SEQ ID NO: 60086 - DNA, 20 bp, synthetic construct
  misc_feature 1..20: note = Description of Artificial Sequence: Synthetic oligonucleotide
  misc_feature 1..20: note = Target: SCN10A; (+) strand; PAM type: YTN; PAM sequence: TTT
  source 1..20: mol_type = other DNA
tgaacttctcattccttggg

SEQ ID NO: 60087 - DNA, 20 bp, synthetic construct
  misc_feature 1..20: note = Description of Artificial Sequence: Synthetic oligonucleotide
  misc_feature 1..20: note = Target: SCN10A; (+) strand; PAM type: YTN; PAM sequence: TTT
  source 1..20: mol_type = other DNA
gaacttctcattccttgggc

SEQ ID NO: 60088 - DNA, 20 bp, synthetic construct
  misc_feature 1..20: note = Description of Artificial Sequence: Synthetic oligonucleotide
  misc_feature 1..20: note = Target: SCN10A; (+) strand; PAM type: YTN; PAM sequence: TTG
  source 1..20: mol_type = other DNA
aacttctcattccttgggcc

SEQ ID NO: 60089 - DNA, 20 bp, synthetic construct
  misc_feature 1..20: note = Description of Artificial Sequence: Synthetic oligonucleotide
  misc_feature 1..20: note = Target: SCN10A; (+) strand; PAM type: YTN; PAM sequence: CTT
  source 1..20: mol_type = other DNA
ctcattccttgggcctagga

SEQ ID NO: 60090 - DNA, 20 bp, synthetic construct
  misc_feature 1..20: note = Description of Artificial Sequence: Synthetic oligonucleotide
  misc_feature 1..20: note = Target: SCN10A; (+) strand; PAM type: YTN; PAM sequence: TTC
  source 1..20: mol_type = other DNA
tcattccttgggcctaggaa

SEQ ID NO: 60091 - DNA, 20 bp, synthetic construct
  misc_feature 1..20: note = Description of Artificial Sequence: Synthetic oligonucleotide
  misc_feature 1..20: note = Target: SCN10A; (+) strand; PAM type: YTN; PAM sequence: CTC
  source 1..20: mol_type = other DNA
attccttgggcctaggaacc

SEQ ID NO: 60092 - DNA, 20 bp, synthetic construct
  misc_feature 1..20: note = Description of Artificial Sequence: Synthetic oligonucleotide
  misc_feature 1..20: note = Target: SCN10A; (+) strand; PAM type: YTN; PAM sequence: TTC
  source 1..20: mol_type = other DNA
cttgggcctaggaaccctca

SEQ ID NO: 60093 - DNA, 20 bp, synthetic construct
  misc_feature 1..20: note = Description of Artificial Sequence: Synthetic oligonucleotide
  misc_feature 1..20: note = Target: SCN10A; (+) strand; PAM type: YTN; PAM sequence: CTT
  source 1..20: mol_type = other DNA
gggcctaggaaccctcatca

SEQ ID NO: 60094 - DNA, 20 bp, synthetic construct
  misc_feature 1..20: note = Description of Artificial Sequence: Synthetic oligonucleotide
  misc_feature 1..20: note = Target: SCN10A; (+) strand; PAM type: YTN; PAM sequence: TTG
  source 1..20: mol_type = other DNA
ggcctaggaaccctcatcac

SEQ ID NO: 60095 - DNA, 20 bp, synthetic construct
  misc_feature 1..20: note = Description of Artificial Sequence: Synthetic oligonucleotide
  misc_feature 1..20: note = Target: SCN10A; (+) strand; PAM type: YTN; PAM sequence: CTA
  source 1..20: mol_type = other DNA
ggaaccctcatcaccctcat

SEQ ID NO: 60096 - DNA, 20 bp, synthetic construct
  misc_feature 1..20: note = Description of Artificial Sequence: Synthetic oligonucleotide
  misc_feature 1..20: note = Target: SCN10A; (+) strand; PAM type: YTN; PAM sequence: CTC
  source 1..20: mol_type = other DNA
atcaccctcatcccaacgtc

SEQ ID NO: 60097 - DNA, 20 bp, synthetic construct
  misc_feature 1..20: note = Description of Artificial Sequence: Synthetic oligonucleotide
  misc_feature 1..20: note = Target: SCN10A; (+) strand; PAM type: YTN; PAM sequence: CTC
  source 1..20: mol_type = other DNA
atcccaacgtcaacccagat

SEQ ID NO: 60098 - DNA, 20 bp, synthetic construct
  misc_feature 1..20: note = Description of Artificial Sequence: Synthetic oligonucleotide
  misc_feature 1..20: note = Target: SCN10A; (+) strand; PAM type: YTN; PAM sequence: CTT
  source 1..20: mol_type = other DNA
ctcttccataaacagcactc

SEQ ID NO: 60099 - DNA, 20 bp, synthetic construct
  misc_feature 1..20: note = Description of Artificial Sequence: Synthetic oligonucleotide
  misc_feature 1..20: note = Target: SCN10A; (+) strand; PAM type: YTN; PAM sequence: TTC
  source 1..20: mol_type = other DNA
tcttccataaacagcactcc

SEQ ID NO: 60100 - DNA, 20 bp, synthetic construct
  misc_feature 1..20: note = Description of Artificial Sequence: Synthetic oligonucleotide
  misc_feature 1..20: note = Target: SCN10A; (+) strand; PAM type: YTN; PAM sequence: CTC
  source 1..20: mol_type = other DNA
ttccataaacagcactccct

SEQ ID NO: 60101 - DNA, 20 bp, synthetic construct
  misc_feature 1..20: note = Description of Artificial Sequence: Synthetic oligonucleotide
  misc_feature 1..20: note = Target: SCN10A; (+) strand; PAM type: YTN; PAM sequence: CTT
  source 1..20: mol_type = other DNA
ccataaacagcactccctca

SEQ ID NO: 60102 - DNA, 20 bp, synthetic construct
  misc_feature 1..20: note = Description of Artificial Sequence: Synthetic oligonucleotide
  misc_feature 1..20: note = Target: SCN10A; (+) strand; PAM type: YTN; PAM sequence: TTC
  source 1..20: mol_type = other DNA
cataaacagcactccctcag

SEQ ID NO: 60103 - DNA, 20 bp, synthetic construct
  misc_feature 1..20: note = Description of Artificial Sequence: Synthetic oligonucleotide
  misc_feature 1..20: note = Target: SCN10A; (+) strand; PAM type: YTN; PAM sequence: CTC
  source 1..20: mol_type = other DNA
cctcaggcccctgcctgaca

SEQ ID NO: 60104 - DNA, 20 bp, synthetic construct
  misc_feature 1..20: note = Description of Artificial Sequence: Synthetic oligonucleotide
  misc_feature 1..20: note = Target: SCN10A; (+) strand; PAM type: YTN; PAM sequence: CTC
  source 1..20: mol_type = other DNA
aggcccctgcctgacacagg

SEQ ID NO: 60105 - DNA, 20 bp, synthetic construct
  misc_feature 1..20: note = Description of Artificial Sequence: Synthetic oligonucleotide
  misc_feature 1..20: note = Target: SCN10A; (+) strand; PAM type: YTN; PAM sequence: CTG
  source 1..20: mol_type = other DNA
cctgacacaggcatagactg

SEQ ID NO: 60106 - DNA, 20 bp, synthetic construct
  misc_feature 1..20: note = Description of Artificial Sequence: Synthetic oligonucleotide
  misc_feature 1..20: note = Target: SCN10A; (+) strand; PAM type: YTN; PAM sequence: CTG
  source 1..20: mol_type = other DNA
acacaggcatagactgtcat

SEQ ID NO: 60107 - DNA, 20 bp, synthetic construct
  misc_feature 1..20: note = Description of Artificial Sequence: Synthetic oligonucleotide
  misc_feature 1..20: note = Target: SCN10A; (+) strand; PAM type: YTN; PAM sequence: CTG
  source 1..20: mol_type = other DNA
tcatgttggattcacagaca

SEQ ID NO: 60108 - DNA, 20 bp, synthetic construct
  misc_feature 1..20: note = Description of Artificial Sequence: Synthetic oligonucleotide
  misc_feature 1..20: note = Target: SCN10A; (+) strand; PAM type: YTN; PAM sequence: TTG
  source 1..20: mol_type = other DNA
gattcacagacaggctgtgc

SEQ ID NO: 60109 - DNA, 20 bp, synthetic construct
  misc_feature 1..20: note = Description of Artificial Sequence: Synthetic oligonucleotide
  misc_feature 1..20: note = Target: SCN10A; (+) strand; PAM type: YTN; PAM sequence: TTC
  source 1..20: mol_type = other DNA
acagacaggctgtgctagag

SEQ ID NO: 60110 - DNA, 20 bp, synthetic construct
  misc_feature 1..20: note = Description of Artificial Sequence: Synthetic oligonucleotide
  misc_feature 1..20: note = Target: SCN10A; (+) strand; PAM type: YTN; PAM sequence: CTG
  source 1..20: mol_type = other DNA
tgctagaggaaacctctggg

SEQ ID NO: 60111 - DNA, 20 bp, synthetic construct
  misc_feature 1..20: note = Description of Artificial Sequence: Synthetic oligonucleotide
  misc_feature 1..20: note = Target: SCN10A; (+) strand; PAM type: YTN; PAM sequence: CTA
  source 1..20: mol_type = other DNA
gaggaaacctctggggctca

SEQ ID NO: 60112 - DNA, 20 bp, synthetic construct
  misc_feature 1..20: note = Description of Artificial Sequence: Synthetic oligonucleotide
  misc_feature 1..20: note = Target: SCN10A; (+) strand; PAM type: YTN; PAM sequence: CTC
  source 1..20: mol_type = other DNA
tggggctcaccaggggccgt

SEQ ID NO: 60113 - DNA, 20 bp, synthetic construct
  misc_feature 1..20: note = Description of Artificial Sequence: Synthetic oligonucleotide
  misc_feature 1..20: note = Target: SCN10A; (+) strand; PAM type: YTN; PAM sequence: CTG
  source 1..20: mol_type = other DNA
gggctcaccaggggccgtgg

SEQ ID NO: 60114 - DNA, 20 bp, synthetic construct
  misc_feature 1..20: note = Description of Artificial Sequence: Synthetic oligonucleotide
  misc_feature 1..20: note = Target: SCN10A; (+) strand; PAM type: YTN; PAM sequence: CTC
  source 1..20: mol_type = other DNA
accaggggccgtgggatggg

SEQ ID NO: 60115 - DNA, 20 bp, synthetic construct
  misc_feature 1..20: note = Description of Artificial Sequence: Synthetic oligonucleotide
  misc_feature 1..20: note = Target: SCN10A; (+) strand; PAM type: YTN; PAM sequence: CTT
  source 1..20: mol_type = other DNA
ctggggcttcttggagccca

SEQ ID NO: 60116 - DNA, 20 bp, synthetic construct
  misc_feature 1..20: note = Description of Artificial Sequence: Synthetic oligonucleotide
  misc_feature 1..20: note = Target: SCN10A; (+) strand; PAM type: YTN; PAM sequence: TTC
  source 1..20: mol_type = other DNA
tggggcttcttggagcccaa

SEQ ID NO: 60117 - DNA, 20 bp, synthetic construct
  misc_feature 1..20: note = Description of Artificial Sequence: Synthetic oligonucleotide
  misc_feature 1..20: note = Target: SCN10A; (+) strand; PAM type: YTN; PAM sequence: CTG
  source 1..20: mol_type = other DNA
gggcttcttggagcccaact

SEQ ID NO: 60118 - DNA, 20 bp, synthetic construct
  misc_feature 1..20: note = Description of Artificial Sequence: Synthetic oligonucleotide
  misc_feature 1..20: note = Target: SCN10A; (+) strand; PAM type: YTN; PAM sequence: CTT
  source 1..20: mol_type = other DNA
cttggagcccaacttcttca

SEQ ID NO: 60119 - DNA, 20 bp, synthetic construct
  misc_feature 1..20: note = Description of Artificial Sequence: Synthetic oligonucleotide
  misc_feature 1..20: note = Target: SCN10A; (+) strand; PAM type: YTN; PAM sequence: TTC
  source 1..20: mol_type = other DNA
ttggagcccaacttcttcat

SEQ ID NO: 60120 - DNA, 20 bp, synthetic construct
  misc_feature 1..20: note = Description of Artificial Sequence: Synthetic oligonucleotide
  misc_feature 1..20: note = Target: SCN10A; (+) strand; PAM type: YTN; PAM sequence: CTT
  source 1..20: mol_type = other DNA
ggagcccaacttcttcatgg

SEQ ID NO: 60121 - DNA, 20 bp, synthetic construct
  misc_feature 1..20: note = Description of Artificial Sequence: Synthetic oligonucleotide
  misc_feature 1..20: note = Target: SCN10A; (+) strand; PAM type: YTN; PAM sequence: TTG
  source 1..20: mol_type = other DNA
gagcccaacttcttcatggc

SEQ ID NO: 60122 - DNA, 20 bp, synthetic construct
  misc_feature 1..20: note = Description of Artificial Sequence: Synthetic oligonucleotide
  misc_feature 1..20: note = Target: SCN10A; (+) strand; PAM type: YTN; PAM sequence: CTT
  source 1..20: mol_type = other DNA
cttcatggcattgtagtatt

SEQ ID NO: 60123 - DNA, 20 bp, synthetic construct
  misc_feature 1..20: note = Description of Artificial Sequence: Synthetic oligonucleotide
  misc_feature 1..20: note = Target: SCN10A; (+) strand; PAM type: YTN; PAM sequence: TTC
  source 1..20: mol_type = other DNA
ttcatggcattgtagtattt

SEQ ID NO: 60124 - DNA, 20 bp, synthetic construct
  misc_feature 1..20: note = Description of Artificial Sequence: Synthetic oligonucleotide
  misc_feature 1..20: note = Target: SCN10A; (+) strand; PAM type: YTN; PAM sequence: CTT
  source 1..20: mol_type = other DNA
catggcattgtagtatttct

SEQ ID NO: 60125 - DNA, 20 bp, synthetic construct
  misc_feature 1..20: note = Description of Artificial Sequence: Synthetic oligonucleotide
  misc_feature 1..20: note = Target: SCN10A; (+) strand; PAM type: YTN; PAM sequence: TTC
  source 1..20: mol_type = other DNA
atggcattgtagtatttctt

SEQ ID NO: 60126 - DNA, 20 bp, synthetic construct
  misc_feature 1..20: note = Description of Artificial Sequence: Synthetic oligonucleotide
  misc_feature 1..20: note = Target: SCN10A; (+) strand; PAM type: YTN; PAM sequence: TTG
  source 1..20: mol_type = other DNA
tagtatttcttctgctcctc

SEQ ID NO: 60127 - DNA, 20 bp, synthetic construct
  misc_feature 1..20: note = Description of Artificial Sequence: Synthetic oligonucleotide
  misc_feature 1..20: note = Target: SCN10A; (+) strand; PAM type: YTN; PAM sequence: TTT
  source 1..20: mol_type = other DNA
cttctgctcctctgtcatga

SEQ ID NO: 60128 - DNA, 20 bp, synthetic construct
  misc_feature 1..20: note = Description of Artificial Sequence: Synthetic oligonucleotide
  misc_feature 1..20: note = Target: SCN10A; (+) strand; PAM type: YTN; PAM sequence: TTC
  source 1..20: mol_type = other DNA
ttctgctcctctgtcatgaa

SEQ ID NO: 60129 - DNA, 20 bp, synthetic construct
  misc_feature 1..20: note = Description of Artificial Sequence: Synthetic oligonucleotide
  misc_feature 1..20: note = Target: SCN10A; (+) strand; PAM type: YTN; PAM sequence: CTT
  source 1..20: mol_type = other DNA
ctgctcctctgtcatgaaga

SEQ ID NO: 60130 - DNA, 20 bp, synthetic construct
  misc_feature 1..20: note = Description of Artificial Sequence: Synthetic oligonucleotide
  misc_feature 1..20: note = Target: SCN10A; (+) strand; PAM type: YTN; PAM sequence: TTC
  source 1..20: mol_type = other DNA
tgctcctctgtcatgaagat

SEQ ID NO: 60131 - DNA, 20 bp, synthetic construct
  misc_feature 1..20: note = Description of Artificial Sequence: Synthetic oligonucleotide
  misc_feature 1..20: note = Target: SCN10A; (+) strand; PAM type: YTN; PAM sequence: CTG
  source 1..20: mol_type = other DNA
ctcctctgtcatgaagatgt

SEQ ID NO: 60132 - DNA, 20 bp, synthetic construct
  misc_feature 1..20: note = Description of Artificial Sequence: Synthetic oligonucleotide
  misc_feature 1..20: note = Target: SCN10A; (+) strand; PAM type: YTN; PAM sequence: CTC
  source 1..20: mol_type = other DNA
ctctgtcatgaagatgtcct

SEQ ID NO: 60133 - DNA, 20 bp, synthetic construct
  misc_feature 1..20: note = Description of Artificial Sequence: Synthetic oligonucleotide
  misc_feature 1..20: note = Target: SCN10A; (+) strand; PAM type: YTN; PAM sequence: CTC
  source 1..20: mol_type = other DNA
tgtcatgaagatgtcctggc

SEQ ID NO: 60134 - DNA, 20 bp, synthetic construct
  misc_feature 1..20: note = Description of Artificial Sequence: Synthetic oligonucleotide
  misc_feature 1..20: note = Target: SCN10A; (+) strand; PAM type: YTN; PAM sequence: CTG
  source 1..20: mol_type = other DNA
tcatgaagatgtcctggccc

SEQ ID NO: 60135 - DNA, 20 bp, synthetic construct
  misc_feature 1..20: note = Description of Artificial Sequence: Synthetic oligonucleotide
  misc_feature 1..20: note = Target: SCN10A; (+) strand; PAM type: YTN; PAM sequence: CTG
  source 1..20: mol_type = other DNA
gccccctaagtgcagagagg

SEQ ID NO: 60136 - DNA, 20 bp, synthetic construct
  misc_feature 1..20: note = Description of Artificial Sequence: Synthetic oligonucleotide
  misc_feature 1..20: note = Target: SCN10A; (+) strand; PAM type: YTN; PAM sequence: CTA
  source 1..20: mol_type = other DNA
agtgcagagagggccacact

SEQ ID NO: 60137 - DNA, 20 bp, synthetic construct
  misc_feature 1..20: note = Description of Artificial Sequence: Synthetic oligonucleotide
  misc_feature 1..20: note = Target: SCN10A; (+) strand; PAM type: YTN; PAM sequence: CTG
  source 1..20: mol_type = other DNA
ttactaaagcaagaggaacc

SEQ ID NO: 60138 - DNA, 20 bp, synthetic construct
  misc_feature 1..20: note = Description of Artificial Sequence: Synthetic oligonucleotide
  misc_feature 1..20: note = Target: SCN10A; (+) strand; PAM type: YTN; PAM sequence: TTA
  source 1..20: mol_type = other DNA
ctaaagcaagaggaaccccc

SEQ ID NO: 60139 - DNA, 20 bp, synthetic construct
  misc_feature 1..20: note = Description of Artificial Sequence: Synthetic oligonucleotide
  misc_feature 1..20: note = Target: SCN10A; (+) strand; PAM type: YTN; PAM sequence: CTA
  source 1..20: mol_type = other DNA
aagcaagaggaaccccctac

SEQ ID NO: 60140 - DNA, 20 bp, synthetic construct
  misc_feature 1..20: note = Description of Artificial Sequence: Synthetic oligonucleotide
  misc_feature 1..20: note = Target: SCN10A; (+) strand; PAM type: YTN; PAM sequence: CTA
  source 1..20: mol_type = other DNA
cggataccaaaatcagaaca

SEQ ID NO: 60141 - DNA, 20 bp, synthetic construct
  misc_feature 1..20: note = Description of Artificial Sequence: Synthetic oligonucleotide
  misc_feature 1..20: note = Target: SCN10A; (+) strand; PAM type: YTN; PAM sequence: CTT
  source 1..20: mol_type = other DNA
ctcccctcctctgcagatag

SEQ ID NO: 60142 - DNA, 20 bp, synthetic construct
  misc_feature 1..20: note = Description of Artificial Sequence: Synthetic oligonucleotide
  misc_feature 1..20: note = Target: SCN10A; (+) strand; PAM type: YTN; PAM sequence: TTC
  source 1..20: mol_type = other DNA
tcccctcctctgcagataga

SEQ ID NO: 60143 - DNA, 20 bp, synthetic construct
  misc_feature 1..20: note = Description of Artificial Sequence: Synthetic oligonucleotide
  misc_feature 1..20: note = Target: SCN10A; (+) strand; PAM type: YTN; PAM sequence: CTC
  source 1..20: mol_type = other DNA
ccctcctctgcagatagaca

SEQ ID NO: 60144 - DNA, 20 bp, synthetic construct
  misc_feature 1..20: note = Description of Artificial Sequence: Synthetic oligonucleotide
  misc_feature 1..20: note = Target: SCN10A; (+) strand; PAM type: YTN; PAM sequence: CTC
  source 1..20: mol_type = other DNA
ctctgcagatagacaaacca

SEQ ID NO: 60145 - DNA, 20 bp, synthetic construct
  misc_feature 1..20: note = Description of Artificial Sequence: Synthetic oligonucleotide
  misc_feature 1..20: note = Target: SCN10A; (+) strand; PAM type: YTN; PAM sequence: CTC
  source 1..20: mol_type = other DNA
tgcagatagacaaaccaagc

SEQ ID NO: 60146 - DNA, 20 bp, synthetic construct
  misc_feature 1..20: note = Description of Artificial Sequence: Synthetic oligonucleotide
  misc_feature 1..20: note = Target: SCN10A; (+) strand; PAM type: YTN; PAM sequence: CTG
  source 1..20: mol_type = other DNA
cagatagacaaaccaagccc

SEQ ID NO: 60147 - DNA, 20 bp, synthetic construct
  misc_feature 1..20: note = Description of Artificial Sequence: Synthetic oligonucleotide
  misc_feature 1..20: note = Target: SCN10A; (+) strand; PAM type: YTN; PAM sequence: CTT
  source 1..20: mol_type = other DNA
gccacatccagtgtcggaac

SEQ ID NO: 60148 - DNA, 20 bp, synthetic construct
  misc_feature 1..20: note = Description of Artificial Sequence: Synthetic oligonucleotide
  misc_feature 1..20: note = Target: SCN10A; (+) strand; PAM type: YTN; PAM sequence: TTG
  source 1..20: mol_type = other DNA
ccacatccagtgtcggaacg

SEQ ID NO: 60149 - DNA, 20 bp, synthetic construct
  misc_feature 1..20: note = Description of Artificial Sequence: Synthetic oligonucleotide
  misc_feature 1..20: note = Target: SCN10A; (+) strand; PAM type: YTN; PAM sequence: CTG
  source 1..20: mol_type = other DNA
agttccattgctgactccct

SEQ ID NO: 60150 - DNA, 20 bp, synthetic construct
  misc_feature 1..20: note = Description of Artificial Sequence: Synthetic oligonucleotide
  misc_feature 1..20: note = Target: SCN10A; (+) strand; PAM type: YTN; PAM sequence: TTC
  source 1..20: mol_type = other DNA
cattgctgactccctgcctg

SEQ ID NO: 60151 - DNA, 20 bp, synthetic construct
  misc_feature 1..20: note = Description of Artificial Sequence: Synthetic oligonucleotide
  misc_feature 1..20: note = Target: SCN10A; (+) strand; PAM type: YTN; PAM sequence: TTG
  source 1..20: mol_type = other DNA
ctgactccctgcctgggtct

SEQ ID NO: 60152 - DNA, 20 bp, synthetic construct
  misc_feature 1..20: note = Description of Artificial Sequence: Synthetic oligonucleotide
  misc_feature 1..20: note = Target: SCN10A; (+) strand; PAM type: YTN; PAM sequence: CTG
  source 1..20: mol_type = other DNA
actccctgcctgggtctcta

SEQ ID NO: 60153 - DNA, 20 bp, synthetic construct
  misc_feature 1..20: note = Description of Artificial Sequence: Synthetic oligonucleotide
  misc_feature 1..20: note = Target: SCN10A; (+) strand; PAM type: YTN; PAM sequence: CTC
  source 1..20: mol_type = other DNA
cctgcctgggtctctaaagc

SEQ ID NO: 60154 - DNA, 20 bp, synthetic construct
  misc_feature 1..20: note = Description of Artificial Sequence: Synthetic oligonucleotide
  misc_feature 1..20: note = Target: SCN10A; (+) strand; PAM type: YTN; PAM sequence: CTG
  source 1..20: mol_type = other DNA
cctgggtctctaaagcaaag

SEQ ID NO: 60155 - DNA, 20 bp, synthetic construct
  misc_feature 1..20: note = Description of Artificial Sequence: Synthetic oligonucleotide
  misc_feature 1..20: note = Target: SCN10A; (+) strand; PAM type: YTN; PAM sequence: CTG
  source 1..20: mol_type = other DNA
ggtctctaaagcaaagccag

SEQ ID NO: 60156 - DNA, 20 bp, synthetic construct
  misc_feature 1..20: note = Description of Artificial Sequence: Synthetic oligonucleotide
  misc_feature 1..20: note = Target: SCN10A; (+) strand; PAM type: YTN; PAM sequence: CTC
  source 1..20: mol_type = other DNA
taaagcaaagccagtttctg

SEQ ID NO: 60157 - DNA, 20 bp, synthetic construct
  misc_feature 1..20: note = Description of Artificial Sequence: Synthetic oligonucleotide
  misc_feature 1..20: note = Target: SCN10A; (+) strand; PAM type: YTN; PAM sequence: CTA
  source 1..20: mol_type = other DNA
aagcaaagccagtttctgtt

SEQ ID NO: 60158 - DNA, 20 bp, synthetic construct
  misc_feature 1..20: note = Description of Artificial Sequence: Synthetic oligonucleotide
  misc_feature 1..20: note = Target: SCN10A; (+) strand; PAM type: YTN; PAM sequence: TTT
  source 1..20: mol_type = other DNA
ctgttctccagggatccaga

SEQ ID NO: 60159 - DNA, 20 bp, synthetic construct
  misc_feature 1..20: note = Description of Artificial Sequence: Synthetic oligonucleotide
  misc_feature 1..20: note = Target: SCN10A; (+) strand; PAM type: YTN; PAM sequence: TTC
  source 1..20: mol_type = other DNA
tgttctccagggatccagag

SEQ ID NO: 60160 - DNA, 20 bp, synthetic construct
  misc_feature 1..20: note = Description of Artificial Sequence: Synthetic oligonucleotide
  misc_feature 1..20: note = Target: SCN10A; (+) strand; PAM type: YTN; PAM sequence: CTG
  source 1..20: mol_type = other DNA
ttctccagggatccagagat

SEQ ID NO: 60161 - DNA, 20 bp, synthetic construct
  misc_feature 1..20: note = Description of Artificial Sequence: Synthetic oligonucleotide
  misc_feature 1..20: note = Target: SCN10A; (+) strand; PAM type: YTN; PAM sequence: TTC
  source 1..20: mol_type = other DNA
tccagggatccagagatgct

SEQ ID NO: 60162 - DNA, 20 bp, synthetic construct
  misc_feature 1..20: note = Description of Artificial Sequence: Synthetic oligonucleotide
  misc_feature 1..20: note = Target: SCN10A; (+) strand; PAM type: YTN; PAM sequence: CTC
  source 1..20: mol_type = other DNA
cagggatccagagatgctgg

SEQ ID NO: 60163 - DNA, 20 bp, synthetic construct
  misc_feature 1..20: note = Description of Artificial Sequence: Synthetic oligonucleotide
  misc_feature 1..20: note = Target: SCN10A; (+) strand; PAM type: YTN; PAM sequence: CTG
  source 1..20: mol_type = other DNA
gataaagggtggggagggtt

SEQ ID NO: 60164 - DNA, 20 bp, synthetic construct
  misc_feature 1..20: note = Description of Artificial Sequence: Synthetic oligonucleotide
  misc_feature 1..20: note = Target: SCN10A; (+) strand; PAM type: YTN; PAM sequence: TTG
  source 1..20: mol_type = other DNA
gtaaacaggactcaaggaga

SEQ ID NO: 60165 - DNA, 20 bp, synthetic construct
  misc_feature 1..20: note = Description of Artificial Sequence: Synthetic oligonucleotide
  misc_feature 1..20: note = Target: SCN10A; (+) strand; PAM type: YTN; PAM sequence: CTC
  source 1..20: mol_type = other DNA
aaggagaaggtacatgttgg

SEQ ID NO: 60166 - DNA, 20 bp, synthetic construct
  misc_feature 1..20: note = Description of Artificial Sequence: Synthetic oligonucleotide
  misc_feature 1..20: note = Target: SCN10A; (+) strand; PAM type: YTN; PAM sequence: TTG
  source 1..20: mol_type = other DNA
gttcaaatctgagccttgga

SEQ ID NO: 60167 - DNA, 20 bp, synthetic construct
  misc_feature 1..20: note = Description of Artificial Sequence: Synthetic oligonucleotide
  misc_feature 1..20: note = Target: SCN10A; (+) strand; PAM type: YTN; PAM sequence: TTC
  source 1..20: mol_type = other DNA
aaatctgagccttggatcta

SEQ ID NO: 60168 - DNA, 20 bp, synthetic construct
  misc_feature 1..20: note = Description of Artificial Sequence: Synthetic oligonucleotide
  misc_feature 1..20: note = Target: SCN10A; (+) strand; PAM type: YTN; PAM sequence: CTG
  source 1..20: mol_type = other DNA
agccttggatctagcctgtt

SEQ ID NO: 60169 - DNA, 20 bp, synthetic construct
  misc_feature 1..20: note = Description of Artificial Sequence: Synthetic oligonucleotide
  misc_feature 1..20: note = Target: SCN10A; (+) strand; PAM type: YTN; PAM sequence: CTT
  source 1..20: mol_type = other DNA
ggatctagcctgttcattcc

SEQ ID NO: 60170 - DNA, 20 bp, synthetic construct
  misc_feature 1..20: note = Description of Artificial Sequence: Synthetic oligonucleotide
  misc_feature 1..20: note = Target: SCN10A; (+) strand; PAM type: YTN; PAM sequence: TTG
  source 1..20: mol_type = other DNA
gatctagcctgttcattcca

SEQ ID NO: 60171 - DNA, 20 bp, synthetic construct
  misc_feature 1..20: note = Description of Artificial Sequence: Synthetic oligonucleotide
  misc_feature 1..20: note = Target: SCN10A; (+) strand; PAM type: YTN; PAM sequence: CTA
  source 1..20: mol_type = other DNA
gcctgttcattccagtaaaa

SEQ ID NO: 60172 - DNA, 20 bp, synthetic construct
  misc_feature 1..20: note = Description of Artificial Sequence: Synthetic oligonucleotide
  misc_feature 1..20: note = Target: SCN10A; (+) strand; PAM type: YTN; PAM sequence: CTG
  source 1..20: mol_type = other DNA
ttcattccagtaaaattctt

SEQ ID NO: 60173 - DNA, 20 bp, synthetic construct
  misc_feature 1..20: note = Description of Artificial Sequence: Synthetic oligonucleotide
  misc_feature 1..20: note = Target: SCN10A; (+) strand; PAM type: YTN; PAM sequence: TTC
  source 1..20: mol_type = other DNA
attccagtaaaattctttgg

SEQ ID NO: 60174 - DNA, 20 bp, synthetic construct
  misc_feature 1..20: note = Description of Artificial Sequence: Synthetic oligonucleotide
  misc_feature 1..20: note = Target: SCN10A; (+) strand; PAM type: YTN; PAM sequence: TTC
  source 1..20: mol_type = other DNA
cagtaaaattctttgggctt

SEQ ID NO: 60175 - DNA, 20 bp, synthetic construct
  misc_feature 1..20: note = Description of Artificial Sequence: Synthetic oligonucleotide
  misc_feature 1..20: note = Target: SCN10A; (+) strand; PAM type: YTN; PAM sequence: TTC
  source 1..20: mol_type = other DNA
tttgggcttctagagtcaca

SEQ ID NO: 60176 - DNA, 20 bp, synthetic construct
  misc_feature 1..20: note = Description of Artificial Sequence: Synthetic oligonucleotide
  misc_feature 1..20: note = Target: SCN10A; (+) strand; PAM type: YTN; PAM sequence: CTT
  source 1..20: mol_type = other DNA
tgggcttctagagtcacagt

SEQ ID NO: 60177 - DNA, 20 bp, synthetic construct
  misc_feature 1..20: note = Description of Artificial Sequence: Synthetic oligonucleotide
  misc_feature 1..20: note = Target: SCN10A; (+) strand; PAM type: YTN; PAM sequence: TTT
  source 1..20: mol_type = other DNA
gggcttctagagtcacagtc

SEQ ID NO: 60178 - DNA, 20 bp, synthetic construct
  misc_feature 1..20: note = Description of Artificial Sequence: Synthetic oligonucleotide
  misc_feature 1..20: note = Target: SCN10A; (+) strand; PAM type: YTN; PAM sequence: TTG
  source 1..20: mol_type = other DNA
ggcttctagagtcacagtcc

SEQ ID NO: 60179 - DNA, 20 bp, synthetic construct
  misc_feature 1..20: note = Description of Artificial Sequence: Synthetic oligonucleotide
  misc_feature 1..20: note = Target: SCN10A; (+) strand; PAM type: YTN; PAM sequence: CTT
  source 1..20: mol_type = other DNA
ctagagtcacagtccctccc

SEQ ID NO: 60180 - DNA, 20 bp, synthetic construct
  misc_feature 1..20: note = Description of Artificial Sequence: Synthetic oligonucleotide
  misc_feature 1..20: note = Target: SCN10A; (+) strand; PAM type: YTN; PAM sequence: TTC
  source 1..20: mol_type = other DNA
tagagtcacagtccctccca

SEQ ID NO: 60181 - DNA, 20 bp, synthetic construct
  misc_feature 1..20: note = Description of Artificial Sequence: Synthetic oligonucleotide
  misc_feature 1..20: note = Target: SCN10A; (+) strand; PAM type: YTN; PAM sequence: CTA
  source 1..20: mol_type = other DNA
gagtcacagtccctcccagg

SEQ ID NO: 60182 - DNA, 20 bp, synthetic construct
  misc_feature 1..20: note = Description of Artificial Sequence: Synthetic oligonucleotide
  misc_feature 1..20: note = Target: SCN10A; (+) strand; PAM type: YTN; PAM sequence: CTC
  source 1..20: mol_type = other DNA
ccagggggcaagagatttcc

SEQ ID NO: 60183 - DNA, 20 bp, synthetic construct
  misc_feature 1..20: note = Description of Artificial Sequence: Synthetic oligonucleotide
  misc_feature 1..20: note = Target: SCN10A; (+) strand; PAM type: YTN; PAM sequence: TTT
  source 1..20: mol_type = other DNA
cctgaggaccttgaagcaaa

SEQ ID NO: 60184 - DNA, 20 bp, synthetic construct
  misc_feature 1..20: note = Description of Artificial Sequence: Synthetic oligonucleotide
  misc_feature 1..20: note = Target: SCN10A; (+) strand; PAM type: YTN; PAM sequence: TTC
  source 1..20: mol_type = other DNA
ctgaggaccttgaagcaaag

SEQ ID NO: 60185 - DNA, 20 bp, synthetic construct
  misc_feature 1..20: note = Description of Artificial Sequence: Synthetic oligonucleotide
  misc_feature 1..20: note = Target: SCN10A; (+) strand; PAM type: YTN; PAM sequence: CTG
  source 1..20: mol_type = other DNA
aggaccttgaagcaaagact

SEQ ID NO: 60186 - DNA, 20 bp, synthetic construct
  misc_feature 1..20: note = Description of Artificial Sequence: Synthetic oligonucleotide
  misc_feature 1..20: note = Target: SCN10A; (+) strand; PAM type: YTN; PAM sequence: CTT
  source 1..20: mol_type = other DNA
gaagcaaagactctgggagg

SEQ ID NO: 60187 - DNA, 20 bp, synthetic construct
  misc_feature 1..20: note = Description of Artificial Sequence: Synthetic oligonucleotide
  misc_feature 1..20: note = Target: SCN10A; (+) strand; PAM type: YTN; PAM sequence: TTG
  source 1..20: mol_type = other DNA
aagcaaagactctgggaggg

SEQ ID NO: 60188 - DNA, 20 bp, synthetic construct
  misc_feature 1..20: note = Description of Artificial Sequence: Synthetic oligonucleotide
  misc_feature 1..20: note = Target: SCN10A; (+) strand; PAM type: YTN; PAM sequence: CTC
  source 1..20: mol_type = other DNA
tgggagggacagaagccctc

SEQ ID NO: 60189 - DNA, 20 bp, synthetic construct
  misc_feature 1..20: note = Description of Artificial Sequence: Synthetic oligonucleotide
  misc_feature 1..20: note = Target: SCN10A; (+) strand; PAM type: YTN; PAM sequence: CTG
  source 1..20: mol_type = other DNA
ggagggacagaagccctcaa

SEQ ID NO: 60190 - DNA, 20 bp, synthetic construct
  misc_feature 1..20: note = Description of Artificial Sequence: Synthetic oligonucleotide
  misc_feature 1..20: note = Target: SCN10A; (+) strand; PAM type: YTN; PAM sequence: CTC
  source 1..20: mol_type = other DNA
aaatcttttctggagaggag

SEQ ID NO: 60191 - DNA, 20 bp, synthetic construct
  misc_feature 1..20: note = Description of Artificial Sequence: Synthetic oligonucleotide
  misc_feature 1..20: note = Target: SCN10A; (+) strand; PAM type: YTN; PAM sequence: CTT
  source 1..20: mol_type = other DNA
ttctggagaggaggagatga

SEQ ID NO: 60192 - DNA, 20 bp, synthetic construct
  misc_feature 1..20: note = Description of Artificial Sequence: Synthetic oligonucleotide
  misc_feature 1..20: note = Target: SCN10A; (+) strand; PAM type: YTN; PAM sequence: TTT
  source 1..20: mol_type = other DNA
tctggagaggaggagatgag

SEQ ID NO: 60193 - DNA, 20 bp, synthetic construct
  misc_feature 1..20: note = Description of Artificial Sequence: Synthetic oligonucleotide
  misc_feature 1..20: note = Target: SCN10A; (+) strand; PAM type: YTN; PAM sequence: TTT
  source 1..20: mol_type = other DNA
ctggagaggaggagatgagg

SEQ ID NO: 60194 - DNA, 20 bp, synthetic construct
  misc_feature 1..20: note = Description of Artificial Sequence: Synthetic oligonucleotide
  misc_feature 1..20: note = Target: SCN10A; (+) strand; PAM type: YTN; PAM sequence: TTC
  source 1..20: mol_type = other DNA
tggagaggaggagatgagga

SEQ ID NO: 60195 - DNA, 20 bp, synthetic construct
  misc_feature 1..20: note = Description of Artificial Sequence: Synthetic oligonucleotide
  misc_feature 1..20: note = Target: SCN10A; (+) strand; PAM type: YTN; PAM sequence: CTG
  source 1..20: mol_type = other DNA
gagaggaggagatgaggaca

SEQ ID NO: 60196 - DNA, 20 bp, synthetic construct
  misc_feature 1..20: note = Description of Artificial Sequence: Synthetic oligonucleotide
  misc_feature 1..20: note = Target: SCN10A; (+) strand; PAM type: YTN; PAM sequence: TTA
  source 1..20: mol_type = other DNA
ctgccttatccttgggtcct

SEQ ID NO: 60197 - DNA, 20 bp, synthetic construct
  misc_feature 1..20: note = Description of Artificial Sequence: Synthetic oligonucleotide
  misc_feature 1..20: note = Target: SCN10A; (+) strand; PAM type: YTN; PAM sequence: CTG
  source 1..20: mol_type = other DNA
ccttatccttgggtccttgg

SEQ ID NO: 60198 - DNA, 20 bp, synthetic construct
  misc_feature 1..20: note = Description of Artificial Sequence: Synthetic oligonucleotide
  misc_feature 1..20: note = Target: SCN10A; (+) strand; PAM type: YTN; PAM sequence: CTT
  source 1..20: mol_type = other DNA
atccttgggtccttggtctc

SEQ ID NO: 60199 - DNA, 20 bp, synthetic construct
  misc_feature 1..20: note = Description of Artificial Sequence: Synthetic oligonucleotide
  misc_feature 1..20: note = Target: SCN10A; (+) strand; PAM type: YTN; PAM sequence: TTA
  source 1..20: mol_type = other DNA
tccttgggtccttggtctca

SEQ ID NO: 60200 - DNA, 20 bp, synthetic construct
  misc_feature 1..20: note = Description of Artificial Sequence: Synthetic oligonucleotide
  misc_feature 1..20: note = Target: SCN10A; (+) strand; PAM type: YTN; PAM sequence: CTT
  source 1..20: mol_type = other DNA
gggtccttggtctcagaggg

SEQ ID NO: 60201 - DNA, 20 bp, synthetic construct
  misc_feature 1..20: note = Description of Artificial Sequence: Synthetic oligonucleotide
  misc_feature 1..20: note = Target: SCN10A; (+) strand; PAM type: YTN; PAM sequence: TTG
  source 1..20: mol_type = other DNA
ggtccttggtctcagaggga

SEQ ID NO: 60202 - DNA, 20 bp, synthetic construct
  misc_feature 1..20: note = Description of Artificial Sequence: Synthetic oligonucleotide
  misc_feature 1..20: note = Target: SCN10A; (+) strand; PAM type: YTN; PAM sequence: CTT
  source 1..20: mol_type = other DNA
ggtctcagagggacctctgg

SEQ ID NO: 60203 - DNA, 20 bp, synthetic construct
  misc_feature 1..20: note = Description of Artificial Sequence: Synthetic oligonucleotide
  misc_feature 1..20: note = Target: SCN10A; (+) strand; PAM type: YTN; PAM sequence: TTG
  source 1..20: mol_type = other DNA
gtctcagagggacctctggt

SEQ ID NO: 60204 - DNA, 20 bp, synthetic construct
  misc_feature 1..20: note = Description of Artificial Sequence: Synthetic oligonucleotide
  misc_feature 1..20: note = Target: SCN10A; (+) strand; PAM type: YTN; PAM sequence: CTC
  source 1..20: mol_type = other DNA
agagggacctctggttctct

SEQ ID NO: 60205 - DNA, 20 bp, synthetic construct
  misc_feature 1..20: note = Description of Artificial Sequence: Synthetic oligonucleotide
  misc_feature 1..20: note = Target: SCN10A; (+) strand; PAM type: YTN; PAM sequence: CTC
  source 1..20: mol_type = other DNA
tggttctcttgaggccctgc

SEQ ID NO: 60206 - DNA, 20 bp, synthetic construct
  misc_feature 1..20: note = Description of Artificial Sequence: Synthetic oligonucleotide
  misc_feature 1..20: note = Target: SCN10A; (+) strand; PAM type: YTN; PAM sequence: CTG
  source 1..20: mol_type = other DNA
gttctcttgaggccctgcca

SEQ ID NO: 60207 - DNA, 20 bp, synthetic construct
  misc_feature 1..20: note = Description of Artificial Sequence: Synthetic oligonucleotide
  misc_feature 1..20: note = Target: SCN10A; (+) strand; PAM type: YTN; PAM sequence: TTC
  source 1..20: mol_type = other DNA
tcttgaggccctgccagtca

SEQ ID NO: 60208 - DNA, 20 bp, synthetic construct
  misc_feature 1..20: note = Description of Artificial Sequence: Synthetic oligonucleotide
  misc_feature 1..20: note = Target: SCN10A; (+) strand; PAM type: YTN; PAM sequence: CTC
  source 1..20: mol_type = other DNA
ttgaggccctgccagtcaca

SEQ ID NO: 60209 - DNA, 20 bp, synthetic construct
  misc_feature 1..20: note = Description of Artificial Sequence: Synthetic oligonucleotide
  misc_feature 1..20: note = Target: SCN10A; (+) strand; PAM type: YTN; PAM sequence: CTT
  source 1..20: mol_type = other DNA
gaggccctgccagtcacact

SEQ ID NO: 60210 - DNA, 20 bp, synthetic construct
  misc_feature 1..20: note = Description of Artificial Sequence: Synthetic oligonucleotide
  misc_feature 1..20: note = Target: SCN10A; (+) strand; PAM type: YTN; PAM sequence: TTG
  source 1..20: mol_type = other DNA
aggccctgccagtcacactg

SEQ ID NO: 60211 - DNA, 20 bp, synthetic construct
  misc_feature 1..20: note = Description of Artificial Sequence: Synthetic oligonucleotide
  misc_feature 1..20: note = Target: SCN10A; (+) strand; PAM type: YTN; PAM sequence: CTG
  source 1..20: mol_type = other DNA
ccagtcacactgccctctgc

SEQ ID NO: 60212 - DNA, 20 bp, synthetic construct
  misc_feature 1..20: note = Description of Artificial Sequence: Synthetic oligonucleotide
  misc_feature 1..20: note = Target: SCN10A; (+) strand; PAM type: YTN; PAM sequence: CTG
  source 1..20: mol_type = other DNA
ccctctgctgttacagtgcc

SEQ ID NO: 60213 - DNA, 20 bp, synthetic construct
  misc_feature 1..20: note = Description of Artificial Sequence: Synthetic oligonucleotide
  misc_feature 1..20: note = Target: SCN10A; (+) strand; PAM type: YTN; PAM sequence: CTC
  source 1..20: mol_type = other DNA
tgctgttacagtgccagaaa

SEQ ID NO: 60214 - DNA, 20 bp, synthetic construct
  misc_feature 1..20: note = Description of Artificial Sequence: Synthetic oligonucleotide
  misc_feature 1..20: note = Target: SCN10A; (+) strand; PAM type: YTN; PAM sequence: CTG
  source 1..20: mol_type = other DNA
ctgttacagtgccagaaact

SEQ ID NO: 60215 - DNA, 20 bp, synthetic construct
  misc_feature 1..20: note = Description of Artificial Sequence: Synthetic oligonucleotide
  misc_feature 1..20: note = Target: SCN10A; (+) strand; PAM type: YTN; PAM sequence: CTG
  source 1..20: mol_type = other DNA
ttacagtgccagaaactgca

SEQ ID NO: 60216 - DNA, 20 bp, synthetic construct
  misc_feature 1..20: note = Description of Artificial Sequence: Synthetic oligonucleotide
  misc_feature 1..20: note = Target: SCN10A; (+) strand; PAM type: YTN; PAM sequence: TTA
  source 1..20: mol_type = other DNA
cagtgccagaaactgcacca

SEQ ID NO: 60217 - DNA, 20 bp, synthetic construct
  misc_feature 1..20: note = Description of Artificial Sequence: Synthetic oligonucleotide
  misc_feature 1..20: note = Target: SCN10A; (+) strand; PAM type: YTN; PAM sequence: CTG
  source 1..20: mol_type = other DNA
caccaacgaagatgttttcc

SEQ ID NO: 60218 - DNA, 20 bp, synthetic construct
  misc_feature 1..20: note = Description of Artificial Sequence: Synthetic oligonucleotide
  misc_feature 1..20: note = Target: SCN10A; (+) strand; PAM type: YTN; PAM sequence: TTT
  source 1..20: mol_type = other DNA
tcctcccttaggattgggta

SEQ ID NO: 60219 - DNA, 20 bp, synthetic construct
  misc_feature 1..20: note = Description of Artificial Sequence: Synthetic oligonucleotide
  misc_feature 1..20: note = Target: SCN10A; (+) strand; PAM type: YTN; PAM sequence: TTT
  source 1..20: mol_type = other DNA
cctcccttaggattgggtat

SEQ ID NO: 60220 - DNA, 20 bp, synthetic construct
  misc_feature 1..20: note = Description of Artificial Sequence: Synthetic oligonucleotide
  misc_feature 1..20: note = Target: SCN10A; (+) strand; PAM type: YTN; PAM sequence: TTC
  source 1..20: mol_type = other DNA
ctcccttaggattgggtatt

SEQ ID NO: 60221 - DNA, 20 bp, synthetic construct
  misc_feature 1..20: note = Description of Artificial Sequence: Synthetic oligonucleotide
  misc_feature 1..20: note = Target: SCN10A; (+) strand; PAM type: YTN; PAM sequence: CTC
  source 1..20: mol_type = other DNA
ccttaggattgggtattagt

SEQ ID NO: 60222 - DNA, 20 bp, synthetic construct
  misc_feature 1..20: note = Description of Artificial Sequence: Synthetic oligonucleotide
  misc_feature 1..20: note = Target: SCN10A; (+) strand; PAM type: YTN; PAM sequence: CTT
  source 1..20: mol_type = other DNA
aggattgggtattagttttt

SEQ ID NO: 60223 - DNA, 20 bp, synthetic construct
  misc_feature 1..20: note = Description of Artificial Sequence: Synthetic oligonucleotide
  misc_feature 1..20: note = Target: SCN10A; (+) strand; PAM type: YTN; PAM sequence: TTA
  source 1..20: mol_type = other DNA
ggattgggtattagtttttc

SEQ ID NO: 60224 - DNA, 20 bp, synthetic construct
  misc_feature 1..20: note = Description of Artificial Sequence: Synthetic oligonucleotide
  misc_feature 1..20: note = Target: SCN10A; (+) strand; PAM type: YTN; PAM sequence: TTG
  source 1..20: mol_type = other DNA
ggtattagtttttctttagg

SEQ ID NO: 60225 - DNA, 20 bp, synthetic construct
  misc_feature 1..20: note = Description of Artificial Sequence: Synthetic oligonucleotide
  misc_feature 1..20: note = Target: SCN10A; (+) strand; PAM type: YTN; PAM sequence: TTA
  source 1..20: mol_type = other DNA
gtttttctttaggggccctt

SEQ ID NO: 60226 - DNA, 20 bp, synthetic construct
  misc_feature 1..20: note = Description of Artificial Sequence: Synthetic oligonucleotide
  misc_feature 1..20: note = Target: SCN10A; (+) strand; PAM type: YTN; PAM sequence: TTT
  source 1..20: mol_type = other DNA
ttctttaggggccctttgga

SEQ ID NO: 60227 - DNA, 20 bp, synthetic construct
  misc_feature 1..20: note = Description of Artificial Sequence: Synthetic oligonucleotide
  misc_feature 1..20: note = Target: SCN10A; (+) strand; PAM type: YTN; PAM sequence: TTT
  source 1..20: mol_type = other DNA
tctttaggggccctttggat

SEQ ID NO: 60228 - DNA, 20 bp, synthetic construct
  misc_feature 1..20: note = Description of Artificial Sequence: Synthetic oligonucleotide
  misc_feature 1..20: note = Target: SCN10A; (+) strand; PAM type: YTN; PAM sequence: TTT
  source 1..20: mol_type = other DNA
ctttaggggccctttggatt

SEQ ID NO: 60229 - DNA, 20 bp, synthetic construct
  misc_feature 1..20: note = Description of Artificial Sequence: Synthetic oligonucleotide
  misc_feature 1..20: note = Target: SCN10A; (+) strand; PAM type: YTN; PAM sequence: TTC
  source 1..20: mol_type = other DNA
tttaggggccctttggattt

SEQ ID NO: 60230 - DNA, 20 bp, synthetic construct
  misc_feature 1..20: note = Description of Artificial Sequence: Synthetic oligonucleotide
  misc_feature 1..20: note = Target: SCN10A; (+) strand; PAM type: YTN; PAM sequence: CTT
  source 1..20: mol_type = other DNA
taggggccctttggattttc

SEQ ID NO: 60231 - DNA, 20 bp, synthetic construct
  misc_feature 1..20: note = Description of Artificial Sequence: Synthetic oligonucleotide
  misc_feature 1..20: note = Target: SCN10A; (+) strand; PAM type: YTN; PAM sequence: TTT
  source 1..20: mol_type = other DNA
aggggccctttggattttct

SEQ ID NO: 60232 - DNA, 20 bp, synthetic construct
  misc_feature 1..20: note = Description of Artificial Sequence: Synthetic oligonucleotide
  misc_feature 1..20: note = Target: SCN10A; (+) strand; PAM type: YTN; PAM sequence: TTA
  source 1..20: mol_type = other DNA
ggggccctttggattttctt

SEQ ID NO: 60233 - DNA, 20 bp, synthetic construct
  misc_feature 1..20: note = Description of Artificial Sequence: Synthetic oligonucleotide
  misc_feature 1..20: note = Target: SCN10A; (+) strand; PAM type: YTN; PAM sequence: CTT
  source 1..20: mol_type = other DNA
tggattttcttcattcaaac

SEQ ID NO: 60234 - DNA, 20 bp, synthetic construct
  misc_feature 1..20: note = Description of Artificial Sequence: Synthetic oligonucleotide
  misc_feature 1..20: note = Target: SCN10A; (+) strand; PAM type: YTN; PAM sequence: TTT
  source 1..20: mol_type = other DNA
ggattttcttcattcaaact

SEQ ID NO: 60235 - DNA, 20 bp, synthetic construct
  misc_feature 1..20: note = Description of Artificial Sequence: Synthetic oligonucleotide
  misc_feature 1..20: note = Target: SCN10A; (+) strand; PAM type: YTN; PAM sequence: TTG
  source 1..20: mol_type = other DNA
gattttcttcattcaaactc

SEQ ID NO: 60236 - DNA, 20 bp, synthetic construct
  misc_feature 1..20: note = Description of Artificial Sequence: Synthetic oligonucleotide
  misc_feature 1..20: note = Target: SCN10A; (+) strand; PAM type: YTN; PAM sequence: TTT
  source 1..20: mol_type = other DNA
tcttcattcaaactctcacc

SEQ ID NO: 60237 - DNA, 20 bp, synthetic construct
  misc_feature 1..20: note = Description of Artificial Sequence: Synthetic oligonucleotide
  misc_feature 1..20: note = Target: SCN10A; (+) strand; PAM type: YTN; PAM sequence: TTT
  source 1..20: mol_type = other DNA
cttcattcaaactctcacct

SEQ ID NO: 60238 - DNA, 20 bp, synthetic construct
  misc_feature 1..20: note = Description of Artificial Sequence: Synthetic oligonucleotide
  misc_feature 1..20: note = Target: SCN10A; (+) strand; PAM type: YTN; PAM sequence: TTC
  source 1..20: mol_type = other DNA
ttcattcaaactctcacctt

SEQ ID NO: 60239 - DNA, 20 bp, synthetic construct
  misc_feature 1..20: note = Description of Artificial Sequence: Synthetic oligonucleotide
  misc_feature 1..20: note = Target: SCN10A; (+) strand; PAM type: YTN; PAM sequence: CTT
  source 1..20: mol_type = other DNA
cattcaaactctcaccttta

SEQ ID NO: 60240 - DNA, 20 bp, synthetic construct
  misc_feature 1..20: note = Description of Artificial Sequence: Synthetic oligonucleotide
  misc_feature 1..20: note = Target: SCN10A; (+) strand; PAM type: YTN; PAM sequence: TTC
  source 1..20: mol_type = other DNA
attcaaactctcacctttag

SEQ ID NO: 60241 - DNA, 20 bp, synthetic construct
  misc_feature 1..20: note = Description of Artificial Sequence: Synthetic oligonucleotide
  misc_feature 1..20: note = Target: SCN10A; (+) strand; PAM type: YTN; PAM sequence: TTC
  source 1..20: mol_type = other DNA
aaactctcacctttagcttc

SEQ ID NO: 60242 - DNA, 20 bp, synthetic construct
  misc_feature 1..20: note = Description of Artificial Sequence: Synthetic oligonucleotide
  misc_feature 1..20: note = Target: SCN10A; (+) strand; PAM type: YTN; PAM sequence: CTC
  source 1..20: mol_type = other DNA
tcacctttagcttcctgaca

SEQ ID NO: 60243 - DNA, 20 bp, synthetic construct
  misc_feature 1..20: note = Description of Artificial Sequence: Synthetic oligonucleotide
  misc_feature 1..20: note = Target: SCN10A; (+) strand; PAM type: YTN; PAM sequence: CTC
  source 1..20: mol_type = other DNA
acctttagcttcctgacata

SEQ ID NO: 60244 - DNA, 20 bp, synthetic construct
  misc_feature 1..20: note = Description of Artificial Sequence: Synthetic oligonucleotide
  misc_feature 1..20: note = Target: SCN10A; (+) strand; PAM type: YTN; PAM sequence: CTT
  source 1..20: mol_type = other DNA
tagcttcctgacataatttg

SEQ ID NO: 60245 - DNA, 20 bp, synthetic construct
  misc_feature 1..20: note = Description of Artificial Sequence: Synthetic oligonucleotide
  misc_feature 1..20: note = Target: SCN10A; (+) strand; PAM type: YTN; PAM sequence: TTT
  source 1..20: mol_type = other DNA
agcttcctgacataatttga

SEQ ID NO: 60246 - DNA, 20 bp, synthetic construct
  misc_feature 1..20: note = Description of Artificial Sequence: Synthetic oligonucleotide
  misc_feature 1..20: note = Target: SCN10A; (+) strand; PAM type: YTN; PAM sequence: TTA
  source 1..20: mol_type = other DNA
gcttcctgacataatttgaa

SEQ ID NO: 60247 - DNA, 20 bp, synthetic construct
  misc_feature 1..20: note = Description of Artificial Sequence: Synthetic oligonucleotide
  misc_feature 1..20: note = Target: SCN10A; (+) strand; PAM type: YTN; PAM sequence: CTT
  source 1..20: mol_type = other DNA
cctgacataatttgaaagcc

SEQ ID NO: 60248 - DNA, 20 bp, synthetic construct
  misc_feature 1..20: note = Description of Artificial Sequence: Synthetic oligonucleotide
  misc_feature 1..20: note = Target: SCN10A; (+) strand; PAM type: YTN; PAM sequence: TTC
  source 1..20: mol_type = other DNA
ctgacataatttgaaagcca

SEQ ID NO: 60249 - DNA, 20 bp, synthetic construct
  misc_feature 1..20: note = Description of Artificial Sequence: Synthetic oligonucleotide
  misc_feature 1..20: note = Target: SCN10A; (+) strand; PAM type: YTN; PAM sequence: CTG
  source 1..20: mol_type = other DNA
acataatttgaaagccacct

SEQ ID NO: 60250 - DNA, 20 bp, synthetic construct
  misc_feature 1..20: note = Description of Artificial Sequence: Synthetic oligonucleotide
  misc_feature 1..20: note = Target: SCN10A; (+) strand; PAM type: YTN; PAM sequence: TTT
  source 1..20: mol_type = other DNA
gaaagccacctattttaata

SEQ ID NO: 60251 - DNA, 20 bp, synthetic construct
  misc_feature 1..20: note = Description of Artificial Sequence: Synthetic oligonucleotide
  misc_feature 1..20: note = Target: SCN10A; (+) strand; PAM type: YTN; PAM sequence: TTG
  source 1..20: mol_type = other DNA
aaagccacctattttaataa

SEQ ID NO: 60252 - DNA, 20 bp, synthetic construct
  misc_feature 1..20: note = Description of Artificial Sequence: Synthetic oligonucleotide
  misc_feature 1..20: note = Target: SCN10A; (+) strand; PAM type: YTN; PAM sequence: CTA
  source 1..20: mol_type = other DNA
ttttaataacatgtttatgt

SEQ ID NO: 60253 - DNA, 20 bp, synthetic construct
  misc_feature 1..20: note = Description of Artificial Sequence: Synthetic oligonucleotide
  misc_feature 1..20: note = Target: SCN10A; (+) strand; PAM type: YTN; PAM sequence: TTT
  source 1..20: mol_type = other DNA
taataacatgtttatgtaag

SEQ ID NO: 60254 - DNA, 20 bp, synthetic construct
  misc_feature 1..20: note = Description of Artificial Sequence: Synthetic oligonucleotide
  misc_feature 1..20: note = Target: SCN10A; (+) strand; PAM type: YTN; PAM sequence: TTT
  source 1..20: mol_type = other DNA
aataacatgtttatgtaagt

SEQ ID NO: 60255 - DNA, 20 bp, synthetic construct
  misc_feature 1..20: note = Description of Artificial Sequence: Synthetic oligonucleotide
  misc_feature 1..20: note = Target: SCN10A; (+) strand; PAM type: YTN; PAM sequence: TTA
  source 1..20: mol_type = other DNA
ataacatgtttatgtaagtt

SEQ ID NO: 60256 - DNA, 20 bp, synthetic construct
  misc_feature 1..20: note = Description of Artificial Sequence: Synthetic oligonucleotide
  misc_feature 1..20: note = Target: SCN10A; (+) strand; PAM type: YTN; PAM sequence: TTT
  source 1..20: mol_type = other DNA
atgtaagttagtccctgcaa

SEQ ID NO: 60257 - DNA, 20 bp, synthetic construct
  misc_feature 1..20: note = Description of Artificial Sequence: Synthetic oligonucleotide
  misc_feature 1..20: note = Target: SCN10A; (+) strand; PAM type: YTN; PAM sequence: TTA
  source 1..20: mol_type = other DNA
tgtaagttagtccctgcaaa

SEQ ID NO: 60258 - DNA, 20 bp, synthetic construct
  misc_feature 1..20: note = Description of Artificial Sequence: Synthetic oligonucleotide
  misc_feature 1..20: note = Target: SCN10A; (+) strand; PAM type: YTN; PAM sequence: TTA
  source 1..20: mol_type = other DNA
gtccctgcaaatgctgggaa

SEQ ID NO: 60259 - DNA, 20 bp, synthetic construct
  misc_feature 1..20: note = Description of Artificial Sequence: Synthetic oligonucleotide
  misc_feature 1..20: note = Target: SCN10A; (+) strand; PAM type: YTN; PAM sequence: CTG
  source 1..20: mol_type = other DNA
caaatgctgggaaactgggc

SEQ ID NO: 60260 - DNA, 20 bp, synthetic construct
  misc_feature 1..20: note = Description of Artificial Sequence: Synthetic oligonucleotide
  misc_feature 1..20: note = Target: SCN10A; (+) strand; PAM type: YTN; PAM sequence: CTG
  source 1..20: mol_type = other DNA
ggaaactgggctgagatctg

SEQ ID NO: 60261 - DNA, 20 bp, synthetic construct
  misc_feature 1..20: note = Description of Artificial Sequence: Synthetic oligonucleotide
  misc_feature 1..20: note = Target: SCN10A; (+) strand; PAM type: YTN; PAM sequence: CTG
  source 1..20: mol_type = other DNA
ggctgagatctgtggaattt

SEQ ID NO: 60262 - DNA, 20 bp, synthetic construct
  misc_feature 1..20: note = Description of Artificial Sequence: Synthetic oligonucleotide
  misc_feature 1..20: note = Target: SCN10A; (+) strand; PAM type: YTN; PAM sequence: CTG
  source 1..20: mol_type = other DNA
agatctgtggaatttgaaag

SEQ ID NO: 60263 - DNA, 20 bp, synthetic construct
  misc_feature 1..20: note = Description of Artificial Sequence: Synthetic oligonucleotide
  misc_feature 1..20: note = Target: SCN10A; (+) strand; PAM type: YTN; PAM sequence: CTG
  source 1..20: mol_type = other DNA
tggaatttgaaaggagatct

SEQ ID NO: 60264 - DNA, 20 bp, synthetic construct
  misc_feature 1..20: note = Description of Artificial Sequence: Synthetic oligonucleotide
  misc_feature 1..20: note = Target: SCN10A; (+) strand; PAM type: YTN; PAM sequence: TTT
  source 1..20: mol_type = other DNA
gaaaggagatctgagaagat

SEQ ID NO: 60265 - DNA, 20 bp, synthetic construct
  misc_feature 1..20: note = Description of Artificial Sequence: Synthetic oligonucleotide
  misc_feature 1..20: note = Target: SCN10A; (+) strand; PAM type: YTN; PAM sequence: TTG
  source 1..20: mol_type = other DNA
aaaggagatctgagaagatc

SEQ ID NO: 60266 - DNA, 20 bp, synthetic construct
  misc_feature 1..20: note = Description of Artificial Sequence: Synthetic oligonucleotide
  misc_feature 1..20: note = Target: SCN10A; (+) strand; PAM type: YTN; PAM sequence: CTG
  source 1..20: mol_type = other DNA
agaagatctgtggacacaaa

SEQ ID NO: 60267 - DNA, 20 bp, synthetic construct
  misc_feature 1..20: note = Description of Artificial Sequence: Synthetic oligonucleotide
  misc_feature 1..20: note = Target: SCN10A; (+) strand; PAM type: YTN; PAM sequence: CTG
  source 1..20: mol_type = other DNA
tggacacaaagggcttcctg

SEQ ID NO: 60268 - DNA, 20 bp, synthetic construct
  misc_feature 1..20: note = Description of Artificial Sequence: Synthetic oligonucleotide
  misc_feature 1..20: note = Target: SCN10A; (+) strand; PAM type: YTN; PAM sequence: CTT
  source 1..20: mol_type = other DNA
cctgggaggaccatctttat

SEQ ID NO: 60269 - DNA, 20 bp, synthetic construct
  misc_feature 1..20: note = Description of Artificial Sequence: Synthetic oligonucleotide
  misc_feature 1..20: note = Target: SCN10A; (+) strand; PAM type: YTN; PAM sequence: TTC
  source 1..20: mol_type = other DNA
ctgggaggaccatctttatg

SEQ ID NO: 60270 - DNA, 20 bp, synthetic construct
  misc_feature 1..20: note = Description of Artificial Sequence: Synthetic oligonucleotide
  misc_feature 1..20: note = Target: SCN10A; (+) strand; PAM type: YTN; PAM sequence: CTG
  source 1..20: mol_type = other DNA
ggaggaccatctttatgggg

SEQ ID NO: 60271 - DNA, 20 bp, synthetic construct
  misc_feature 1..20: note = Description of Artificial Sequence: Synthetic oligonucleotide
  misc_feature 1..20: note = Target: SCN10A; (+) strand; PAM type: YTN; PAM sequence: CTT
  source 1..20: mol_type = other DNA
tatggggggagagaaggaaa

SEQ ID NO: 60272 - DNA, 20 bp, synthetic construct
  misc_feature 1..20: note = Description of Artificial Sequence: Synthetic oligonucleotide
  misc_feature 1..20: note = Target: SCN10A; (+) strand; PAM type: YTN; PAM sequence: TTT
  source 1..20: mol_type = other DNA
atggggggagagaaggaaag

SEQ ID NO: 60273 - DNA, 20 bp, synthetic construct
  misc_feature 1..20: note = Description of Artificial Sequence: Synthetic oligonucleotide
  misc_feature 1..20: note = Target: SCN10A; (+) strand; PAM type: YTN; PAM sequence: TTA
  source 1..20: mol_type = other DNA
tggggggagagaaggaaagg

SEQ ID NO: 60274 - DNA, 20 bp, synthetic construct
  misc_feature 1..20: note = Description of Artificial Sequence: Synthetic oligonucleotide
  misc_feature 1..20: note = Target: SCN10A; (+) strand; PAM type: YTN; PAM sequence: CTC
  source 1..20: mol_type = other DNA
caggtgaggtcatgctgaga

SEQ ID NO: 60275 - DNA, 20 bp, synthetic construct
  misc_feature 1..20: note = Description of Artificial Sequence: Synthetic oligonucleotide
  misc_feature 1..20: note = Target: SCN10A; (+) strand; PAM type: YTN; PAM sequence: CTG
  source 1..20: mol_type = other DNA
agaactctgaccaaggattc

SEQ ID NO: 60276 - DNA, 20 bp, synthetic construct
  misc_feature 1..20: note = Description of Artificial Sequence: Synthetic oligonucleotide
  misc_feature 1..20: note = Target: SCN10A; (+) strand; PAM type: YTN; PAM sequence: CTC
  source 1..20: mol_type = other DNA
tgaccaaggattcagtagat

SEQ ID NO: 60277 - DNA, 20 bp, synthetic construct
  misc_feature 1..20: note = Description of Artificial Sequence: Synthetic oligonucleotide
  misc_feature 1..20: note = Target: SCN10A; (+) strand; PAM type: YTN; PAM sequence: CTG
  source 1..20: mol_type = other DNA
accaaggattcagtagatgc

SEQ ID NO: 60278 - DNA, 20 bp, synthetic construct
  misc_feature 1..20: note = Description of Artificial Sequence: Synthetic oligonucleotide
  misc_feature 1..20: note = Target: SCN10A; (+) strand; PAM type: YTN; PAM sequence: TTC
  source 1..20: mol_type = other DNA
agtagatgcagtttctcagt

SEQ ID NO: 60279 - DNA, 20 bp, synthetic construct
  misc_feature 1..20: note = Description of Artificial Sequence: Synthetic oligonucleotide
  misc_feature 1..20: note = Target: SCN10A; (+) strand; PAM type: YTN; PAM sequence: TTT
  source 1..20: mol_type = other DNA
ctcagtgaccccagcctggt

SEQ ID NO: 60280 - DNA, 20 bp, synthetic construct
  misc_feature 1..20: note = Description of Artificial Sequence: Synthetic oligonucleotide
  misc_feature 1..20: note = Target: SCN10A; (+) strand; PAM type: YTN; PAM sequence: TTC
  source 1..20: mol_type = other DNA
tcagtgaccccagcctggtc

SEQ ID NO: 60281 - DNA, 20 bp, synthetic construct
  misc_feature 1..20: note = Description of Artificial Sequence: Synthetic oligonucleotide
  misc_feature 1..20: note = Target: SCN10A; (+) strand; PAM type: YTN; PAM sequence: CTC
  source 1..20: mol_type = other DNA
agtgaccccagcctggtcac

SEQ ID NO: 60282 - DNA, 20 bp, synthetic construct
  misc_feature 1..20: note = Description of Artificial Sequence: Synthetic oligonucleotide
  misc_feature 1..20: note = Target: SCN10A; (+) strand; PAM type: YTN; PAM sequence: CTG
  source 1..20: mol_type = other DNA
gtcactagctcatctccttc

SEQ ID NO: 60283 - DNA, 20 bp, synthetic construct
  misc_feature 1..20: note = Description of Artificial Sequence: Synthetic oligonucleotide
  misc_feature 1..20: note = Target: SCN10A; (+) strand; PAM type: YTN; PAM sequence: CTA
  source 1..20: mol_type = other DNA
gctcatctccttccgttacc

SEQ ID NO: 60284 - DNA, 20 bp, synthetic construct
  misc_feature 1..20: note = Description of Artificial Sequence: Synthetic oligonucleotide
  misc_feature 1..20: note = Target: SCN10A; (+) strand; PAM type: YTN; PAM sequence: CTC
  source 1..20: mol_type = other DNA
atctccttccgttacctaat

SEQ ID NO: 60285 - DNA, 20 bp, synthetic construct
  misc_feature 1..20: note = Description of Artificial Sequence: Synthetic oligonucleotide
  misc_feature 1..20: note = Target: SCN10A; (+) strand; PAM type: YTN; PAM sequence: CTC
  source 1..20: mol_type = other DNA
cttccgttacctaatatctc

SEQ ID NO: 60286 - DNA, 20 bp, synthetic construct
  misc_feature 1..20: note = Description of Artificial Sequence: Synthetic oligonucleotide
  misc_feature 1..20: note = Target: SCN10A; (+) strand; PAM type: YTN; PAM sequence: CTT
  source 1..20: mol_type = other DNA
ccgttacctaatatctccct

SEQ ID NO: 60287 - DNA, 20 bp, synthetic construct
  misc_feature 1..20: note = Description of Artificial Sequence: Synthetic oligonucleotide
  misc_feature 1..20: note = Target: SCN10A; (+) strand; PAM type: YTN; PAM sequence: TTC
  source 1..20: mol_type = other DNA
cgttacctaatatctccctc

SEQ ID NO: 60288 - DNA, 20 bp, synthetic construct
  misc_feature 1..20: note = Description of Artificial Sequence: Synthetic oligonucleotide
  misc_feature 1..20: note = Target: SCN10A; (+) strand; PAM type: YTN; PAM sequence: TTA
  source 1..20: mol_type = other DNA
cctaatatctccctctgtaa

SEQ ID NO: 60289 - DNA, 20 bp, synthetic construct
  misc_feature 1..20: note = Description of Artificial Sequence: Synthetic oligonucleotide
  misc_feature 1..20: note = Target: SCN10A; (+) strand; PAM type: YTN; PAM sequence: CTA
  source 1..20: mol_type = other DNA
atatctccctctgtaatctg

SEQ ID NO: 60290 - DNA, 20 bp, synthetic construct
  misc_feature 1..20: note = Description of Artificial Sequence: Synthetic oligonucleotide
  misc_feature 1..20: note = Target: SCN10A; (+) strand; PAM type: YTN; PAM sequence: CTC
  source 1..20: mol_type = other DNA
cctctgtaatctgtttcttg

SEQ ID NO: 60291 - DNA, 20 bp, synthetic construct
  misc_feature 1..20: note = Description of Artificial Sequence: Synthetic oligonucleotide
  misc_feature 1..20: note = Target: SCN10A; (+) strand; PAM type: YTN; PAM sequence: CTC
  source 1..20: mol_type = other DNA
tgtaatctgtttcttgacct

SEQ ID NO: 60292 - DNA, 20 bp, synthetic construct
  misc_feature 1..20: note = Description of Artificial Sequence: Synthetic oligonucleotide
  misc_feature 1..20: note = Target: SCN10A; (+) strand; PAM type: YTN; PAM sequence: CTG
  source 1..20: mol_type = other DNA
taatctgtttcttgacctca

SEQ ID NO: 60293 - DNA, 20 bp, synthetic construct
  misc_feature 1..20: note = Description of Artificial Sequence: Synthetic oligonucleotide
  misc_feature 1..20: note = Target: SCN10A; (+) strand; PAM type: YTN; PAM sequence: CTG
  source 1..20: mol_type = other DNA
tttcttgacctcagttttct

SEQ ID NO: 60294 - DNA, 20 bp, synthetic construct
  misc_feature 1..20: note = Description of Artificial Sequence: Synthetic oligonucleotide
  misc_feature 1..20: note = Target: SCN10A; (+) strand; PAM type: YTN; PAM sequence: TTT
  source 1..20: mol_type = other DNA
cttgacctcagttttctcat

SEQ ID NO: 60295 - DNA, 20 bp, synthetic construct
  misc_feature 1..20: note = Description of Artificial Sequence: Synthetic oligonucleotide
  misc_feature 1..20: note = Target: SCN10A; (+) strand; PAM type: YTN; PAM sequence: TTC
  source 1..20: mol_type = other DNA
ttgacctcagttttctcatc

SEQ ID NO: 60296 - DNA, 20 bp, synthetic construct
  misc_feature 1..20: note = Description of Artificial Sequence: Synthetic oligonucleotide
  misc_feature 1..20: note = Target: SCN10A; (+) strand; PAM type: YTN; PAM sequence: CTT
  source 1..20: mol_type = other DNA
gacctcagttttctcatctg

SEQ ID NO: 60297 - DNA, 20 bp, synthetic construct
  misc_feature 1..20: note = Description of Artificial Sequence: Synthetic oligonucleotide
  misc_feature 1..20: note = Target: SCN10A; (+) strand; PAM type: YTN; PAM sequence: TTG
  source 1..20: mol_type = other DNA
acctcagttttctcatctgt

SEQ ID NO: 60298 - DNA, 20 bp, synthetic construct
  misc_feature 1..20: note = Description of Artificial Sequence: Synthetic oligonucleotide
  misc_feature 1..20: note = Target: SCN10A; (+) strand; PAM type: YTN; PAM sequence: CTC
  source 1..20: mol_type = other DNA
agttttctcatctgtaaaat

SEQ ID NO: 60299 - DNA, 20 bp, synthetic construct
  misc_feature 1..20: note = Description of Artificial Sequence: Synthetic oligonucleotide
  misc_feature 1..20: note = Target: SCN10A; (+) strand; PAM type: YTN; PAM sequence: TTT
  source 1..20: mol_type = other DNA
tctcatctgtaaaatgagag

SEQ ID NO: 60300 - DNA, 20 bp, synthetic construct
  misc_feature 1..20: note = Description of Artificial Sequence: Synthetic oligonucleotide
  misc_feature 1..20: note = Target: SCN10A; (+) strand; PAM type: YTN; PAM sequence: TTT
  source 1..20: mol_type = other DNA
ctcatctgtaaaatgagaga

SEQ ID NO: 60301 - DNA, 20 bp, synthetic construct
  misc_feature 1..20: note = Description of Artificial Sequence: Synthetic oligonucleotide
  misc_feature 1..20: note = Target: SCN10A; (+) strand; PAM type: YTN; PAM sequence: TTC
  source 1..20: mol_type = other DNA
tcatctgtaaaatgagagaa

SEQ ID NO: 60302 - DNA, 20 bp, synthetic construct
  misc_feature 1..20: note = Description of Artificial Sequence: Synthetic oligonucleotide
  misc_feature 1..20: note = Target: SCN10A; (+) strand; PAM type: YTN; PAM sequence: CTC
  source 1..20: mol_type = other DNA
atctgtaaaatgagagaaat

SEQ ID NO: 60303 - DNA, 20 bp, synthetic construct
  misc_feature 1..20: note = Description of Artificial Sequence: Synthetic oligonucleotide
  misc_feature 1..20: note = Target: SCN10A; (+) strand; PAM type: YTN; PAM sequence: CTG
  source 1..20: mol_type = other DNA
taaaatgagagaaatgattg

SEQ ID NO: 60304 - DNA, 20 bp, synthetic construct
  misc_feature 1..20: note = Description of Artificial Sequence: Synthetic oligonucleotide
  misc_feature 1..20: note = Target: SCN10A; (+) strand; PAM type: YTN; PAM sequence: TTG
  source 1..20: mol_type = other DNA
cttcaataatctcaaacctc

SEQ ID NO: 60305 - DNA, 20 bp, synthetic construct
  misc_feature 1..20: note = Description of Artificial Sequence: Synthetic oligonucleotide
  misc_feature 1..20: note = Target: SCN10A; (+) strand; PAM type: YTN; PAM sequence: CTT
  source 1..20: mol_type = other DNA
caataatctcaaacctcccc

SEQ ID NO: 60306 - DNA, 20 bp, synthetic construct
  misc_feature 1..20: note = Description of Artificial Sequence: Synthetic oligonucleotide
  misc_feature 1..20: note = Target: SCN10A; (+) strand; PAM type: YTN; PAM sequence: TTC
  source 1..20: mol_type = other DNA
aataatctcaaacctcccca

SEQ ID NO: 60307 - DNA, 20 bp, synthetic construct
  misc_feature 1..20: note = Description of Artificial Sequence: Synthetic oligonucleotide
  misc_feature 1..20: note = Target: SCN10A; (+) strand; PAM type: YTN; PAM sequence: CTC
  source 1..20: mol_type = other DNA
aaacctccccagggtactaa

SEQ ID NO: 60308 - DNA, 20 bp, synthetic construct
  misc_feature 1..20: note = Description of Artificial Sequence: Synthetic oligonucleotide
  misc_feature 1..20: note = Target: SCN10A; (+) strand; PAM type: YTN; PAM sequence: CTC
  source 1..20: mol_type = other DNA
cccagggtactaaatagcac

SEQ ID NO: 60309 - DNA, 20 bp, synthetic construct
  misc_feature 1..20: note = Description of Artificial Sequence: Synthetic oligonucleotide
  misc_feature 1..20: note = Target: SCN10A; (+) strand; PAM type: YTN; PAM sequence: CTA
  source 1..20: mol_type = other DNA
aatagcactgtcttgtccca

SEQ ID NO: 60310 - DNA, 20 bp, synthetic construct
  misc_feature 1..20: note = Description of Artificial Sequence: Synthetic oligonucleotide
  misc_feature 1..20: note = Target: SCN10A; (+) strand; PAM type: YTN; PAM sequence: CTG
  source 1..20: mol_type = other DNA
tcttgtcccagacctatcct

SEQ ID NO: 60311 - DNA, 20 bp, synthetic construct
  misc_feature 1..20: note = Description of Artificial Sequence: Synthetic oligonucleotide
  misc_feature 1..20: note = Target: SCN10A; (+) strand; PAM type: YTN; PAM sequence: CTT
  source 1..20: mol_type = other DNA
gtcccagacctatcctgtcc

SEQ ID NO: 60312 - DNA, 20 bp, synthetic construct
  misc_feature 1..20: note = Description of Artificial Sequence: Synthetic oligonucleotide
  misc_feature 1..20: note = Target: SCN10A; (+) strand; PAM type: YTN; PAM sequence: TTG
  source 1..20: mol_type = other DNA
tcccagacctatcctgtcct

SEQ ID NO: 60313 - DNA, 20 bp, synthetic construct
  misc_feature 1..20: note = Description of Artificial Sequence: Synthetic oligonucleotide
  misc_feature 1..20: note = Target: SCN10A; (+) strand; PAM type: YTN; PAM sequence: CTA
  source 1..20: mol_type = other DNA
tcctgtcctcttcttatgct

SEQ ID NO: 60314 - DNA, 20 bp, synthetic construct
  misc_feature 1..20: note = Description of Artificial Sequence: Synthetic oligonucleotide
  misc_feature 1..20: note = Target: SCN10A; (+) strand; PAM type: YTN; PAM sequence: CTG
  source 1..20: mol_type = other DNA
tcctcttcttatgctcagaa

SEQ ID NO: 60315 - DNA, 20 bp, synthetic construct
  misc_feature 1..20: note = Description of Artificial Sequence: Synthetic oligonucleotide
  misc_feature 1..20: note = Target: SCN10A; (+) strand; PAM type: YTN; PAM sequence: CTC
  source 1..20: mol_type = other DNA
ttcttatgctcagaaccctg

SEQ ID NO: 60316 - DNA, 20 bp, synthetic construct
  misc_feature 1..20: note = Description of Artificial Sequence: Synthetic oligonucleotide
  misc_feature 1..20: note = Target: SCN10A; (+) strand; PAM type: YTN; PAM sequence: CTT
  source 1..20: mol_type = other DNA
cttatgctcagaaccctggg

SEQ ID NO: 60317 - DNA, 20 bp, synthetic construct
  misc_feature 1..20: note = Description of Artificial Sequence: Synthetic oligonucleotide
  misc_feature 1..20: note = Target: SCN10A; (+) strand; PAM type: YTN; PAM sequence: TTC
  source 1..20: mol_type = other DNA
ttatgctcagaaccctgggc

SEQ ID NO: 60318 - DNA, 20 bp, synthetic construct
  misc_feature 1..20: note = Description of Artificial Sequence: Synthetic oligonucleotide
  misc_feature 1..20: note = Target: SCN10A; (+) strand; PAM type: YTN; PAM sequence: CTT
  source 1..20: mol_type = other DNA
atgctcagaaccctgggcaa

SEQ ID NO: 60319 - DNA, 20 bp, synthetic construct
  misc_feature 1..20: note = Description of Artificial Sequence: Synthetic oligonucleotide
  misc_feature 1..20: note = Target: SCN10A; (+) strand; PAM type: YTN; PAM sequence: TTA
  source 1..20: mol_type = other DNA
tgctcagaaccctgggcaag

SEQ ID NO: 60320 - DNA, 20 bp, synthetic construct
  misc_feature 1..20: note = Description of Artificial Sequence: Synthetic oligonucleotide
  misc_feature 1..20: note = Target: SCN10A; (+) strand; PAM type: YTN; PAM sequence: CTC
  source 1..20: mol_type = other DNA
agaaccctgggcaaggattt

SEQ ID NO: 60321 - DNA, 20 bp, synthetic construct
  misc_feature 1..20: note = Description of Artificial Sequence: Synthetic oligonucleotide
  misc_feature 1..20: note = Target: SCN10A; (+) strand; PAM type: YTN; PAM sequence: CTG
  source 1..20: mol_type = other DNA
ggcaaggatttcctgtaagt

SEQ ID NO: 60322 - DNA, 20 bp, synthetic construct
  misc_feature 1..20: note = Description of Artificial Sequence: Synthetic oligonucleotide
  misc_feature 1..20: note = Target: SCN10A; (+) strand; PAM type: YTN; PAM sequence: TTT
  source 1..20: mol_type = other DNA
cctgtaagtggaatgcctgc

SEQ ID NO: 60323 - DNA, 20 bp, synthetic construct
  misc_feature 1..20: note = Description of Artificial Sequence: Synthetic oligonucleotide
  misc_feature 1..20: note = Target: SCN10A; (+) strand; PAM type: YTN; PAM sequence: TTC
  source 1..20: mol_type = other DNA
ctgtaagtggaatgcctgcc

SEQ ID NO: 60324 - DNA, 20 bp, synthetic construct
  misc_feature 1..20: note = Description of Artificial Sequence: Synthetic oligonucleotide
  misc_feature 1..20: note = Target: SCN10A; (+) strand; PAM type: YTN; PAM sequence: CTG
  source 1..20: mol_type = other DNA
taagtggaatgcctgcccta

SEQ ID NO: 60325 - DNA, 20 bp, synthetic construct
  misc_feature 1..20: note = Description of Artificial Sequence: Synthetic oligonucleotide
  misc_feature 1..20: note = Target: SCN10A; (+) strand; PAM type: YTN; PAM sequence: CTG
  source 1..20: mol_type = other DNA
ccctagtaggtatatatttt

SEQ ID NO: 60326 - DNA, 20 bp, synthetic construct
  misc_feature 1..20: note = Description of Artificial Sequence: Synthetic oligonucleotide
  misc_feature 1..20: note = Target: SCN10A; (+) strand; PAM type: YTN; PAM sequence: CTA
  source 1..20: mol_type = other DNA
gtaggtatatattttaaatt

SEQ ID NO: 60327 - DNA, 20 bp, synthetic construct
  misc_feature 1..20: note = Description of Artificial Sequence: Synthetic oligonucleotide
  misc_feature 1..20: note = Target: SCN10A; (+) strand; PAM type: YTN; PAM sequence: TTT
  source 1..20: mol_type = other DNA
taaattgttaatagcaacag

SEQ ID NO: 60328 - DNA, 20 bp, synthetic construct
  misc_feature 1..20: note = Description of Artificial Sequence: Synthetic oligonucleotide
  misc_feature 1..20: note = Target: SCN10A; (+) strand; PAM type: YTN; PAM sequence: TTT
  source 1..20: mol_type = other DNA
aaattgttaatagcaacagc

SEQ ID NO: 60329 - DNA, 20 bp, synthetic construct
  misc_feature 1..20: note = Description of Artificial Sequence: Synthetic oligonucleotide
  misc_feature 1..20: note = Target: SCN10A; (+) strand; PAM type: YTN; PAM sequence: TTA
  source 1..20: mol_type = other DNA
aattgttaatagcaacagca

SEQ ID NO: 60330 - DNA, 20 bp, synthetic construct
  misc_feature 1..20: note = Description of Artificial Sequence: Synthetic oligonucleotide
  misc_feature 1..20: note = Target: SCN10A; (+) strand; PAM type: YTN; PAM sequence: TTG
  source 1..20: mol_type = other DNA
ttaatagcaacagcatctgg

SEQ ID NO: 60331 - DNA, 20 bp, synthetic construct
  misc_feature 1..20: note = Description of Artificial Sequence: Synthetic oligonucleotide
  misc_feature 1..20: note = Target: SCN10A; (+) strand; PAM type: YTN; PAM sequence: TTA
  source 1..20: mol_type = other DNA
atagcaacagcatctggtgc

SEQ ID NO: 60332 - DNA, 20 bp, synthetic construct
  misc_feature 1..20: note = Description of Artificial Sequence: Synthetic oligonucleotide
  misc_feature 1..20: note = Target: SCN10A; (+) strand; PAM type: YTN; PAM sequence: CTG
  source 1..20: mol_type = other DNA
gtgctcttgaggcgctgcca

SEQ ID NO: 60333 - DNA, 20 bp, synthetic construct
  misc_feature 1..20: note = Description of Artificial Sequence: Synthetic oligonucleotide
  misc_feature 1..20: note = Target: SCN10A; (+) strand; PAM type: YTN; PAM sequence: CTC
  source 1..20: mol_type = other DNA
ttgaggcgctgccagtcaca

SEQ ID NO: 60334 - DNA, 20 bp, synthetic construct
  misc_feature 1..20: note = Description of Artificial Sequence: Synthetic oligonucleotide
  misc_feature 1..20: note = Target: SCN10A; (+) strand; PAM type: YTN; PAM sequence: CTT
  source 1..20: mol_type = other DNA
gaggcgctgccagtcacact

SEQ ID NO: 60335 - DNA, 20 bp, synthetic construct
  misc_feature 1..20: note = Description of Artificial Sequence: Synthetic oligonucleotide
  misc_feature 1..20: note = Target: SCN10A; (+) strand; PAM type: YTN; PAM sequence: TTG
  source 1..20: mol_type = other DNA
aggcgctgccagtcacactc

SEQ ID NO: 60336 - DNA, 20 bp, synthetic construct
  misc_feature 1..20: note = Description of Artificial Sequence: Synthetic oligonucleotide
  misc_feature 1..20: note = Target: SCN10A; (+) strand; PAM type: YTN; PAM sequence: CTG
  source 1..20: mol_type = other DNA
ccagtcacactcccctctgc

SEQ ID NO: 60337 - DNA, 20 bp, synthetic construct
  misc_feature 1..20: note = Description of Artificial Sequence: Synthetic oligonucleotide
  misc_feature 1..20: note = Target: SCN10A; (+) strand; PAM type: YTN; PAM sequence: CTC
  source 1..20: mol_type = other DNA
ccctctgctgttacagtgcc

SEQ ID NO: 60338 - DNA, 20 bp, synthetic construct
  misc_feature 1..20: note = Description of Artificial Sequence: Synthetic oligonucleotide
  misc_feature 1..20: note = Target: SCN10A; (+) strand; PAM type: YTN; PAM sequence: CTC
  source 1..20: mol_type = other DNA
tgctgttacagtgccagaaa

SEQ ID NO: 60339 - DNA, 20 bp, synthetic construct
  misc_feature 1..20: note = Description of Artificial Sequence: Synthetic oligonucleotide
  misc_feature 1..20: note = Target: SCN10A; (+) strand; PAM type: YTN; PAM sequence: CTG
  source 1..20: mol_type = other DNA
ctgttacagtgccagaaact

SEQ ID NO: 60340 - DNA, 20 bp, synthetic construct
  misc_feature 1..20: note = Description of Artificial Sequence: Synthetic oligonucleotide
  misc_feature 1..20: note = Target: SCN10A; (+) strand; PAM type: YTN; PAM sequence: CTG
  source 1..20: mol_type = other DNA
ttacagtgccagaaactgca

SEQ ID NO: 60341 - DNA, 20 bp, synthetic construct
  misc_feature 1..20: note = Description of Artificial Sequence: Synthetic oligonucleotide
  misc_feature 1..20: note = Target: SCN10A; (+) strand; PAM type: YTN; PAM sequence: TTA
  source 1..20: mol_type = other DNA
cagtgccagaaactgcacca

SEQ ID NO: 60342 - DNA, 20 bp, synthetic construct
  misc_feature 1..20: note = Description of Artificial Sequence: Synthetic oligonucleotide
  misc_feature 1..20: note = Target: SCN10A; (+) strand; PAM type: YTN; PAM sequence: CTG
  source 1..20: mol_type = other DNA
caccaccaaagttgtcttat

SEQ ID NO: 60343 - DNA, 20 bp, synthetic construct
  misc_feature 1..20: note = Description of Artificial Sequence: Synthetic oligonucleotide
  misc_feature 1..20: note = Target: SCN10A; (+) strand; PAM type: YTN; PAM sequence: TTG
  source 1..20: mol_type = other DNA
tcttatgctcagtgatcttt

SEQ ID NO: 60344 - DNA, 20 bp, synthetic construct
  misc_feature 1..20: note = Description of Artificial Sequence: Synthetic oligonucleotide
  misc_feature 1..20: note = Target: SCN10A; (+) strand; PAM type: YTN; PAM sequence: CTT
  source 1..20: mol_type = other DNA
atgctcagtgatctttgttc

SEQ ID NO: 60345 - DNA, 20 bp, synthetic construct
  misc_feature 1..20: note = Description of Artificial Sequence: Synthetic oligonucleotide
  misc_feature 1..20: note = Target: SCN10A; (+) strand; PAM type: YTN; PAM sequence: TTA
  source 1..20: mol_type = other DNA
tgctcagtgatctttgttca

SEQ ID NO: 60346 - DNA, 20 bp, synthetic construct
  misc_feature 1..20: note = Description of Artificial Sequence: Synthetic oligonucleotide
  misc_feature 1..20: note = Target: SCN10A; (+) strand; PAM type: YTN; PAM sequence: CTC
  source 1..20: mol_type = other DNA
agtgatctttgttcaggatt

SEQ ID NO: 60347 - DNA, 20 bp, synthetic construct
  misc_feature 1..20: note = Description of Artificial Sequence: Synthetic oligonucleotide
  misc_feature 1..20: note = Target: SCN10A; (+) strand; PAM type: YTN; PAM sequence: CTT
  source 1..20: mol_type = other DNA
tgttcaggattttgtttacc

SEQ ID NO: 60348 - DNA, 20 bp, synthetic construct
  misc_feature 1..20: note = Description of Artificial Sequence: Synthetic oligonucleotide
  misc_feature 1..20: note = Target: SCN10A; (+) strand; PAM type: YTN; PAM sequence: TTT
  source 1..20: mol_type = other DNA
gttcaggattttgtttaccc

SEQ ID NO: 60349 - DNA, 20 bp, synthetic construct
  misc_feature 1..20: note = Description of Artificial Sequence: Synthetic oligonucleotide
  misc_feature 1..20: note = Target: SCN10A; (+) strand; PAM type: YTN; PAM sequence: TTG
  source 1..20: mol_type = other DNA
ttcaggattttgtttacccc

SEQ ID NO: 60350 - DNA, 20 bp, synthetic construct
  misc_feature 1..20: note = Description of Artificial Sequence: Synthetic oligonucleotide
  misc_feature 1..20: note = Target: SCN10A; (+) strand; PAM type: YTN; PAM sequence: TTC
  source 1..20: mol_type = other DNA
aggattttgtttacccctca

SEQ ID NO: 60351 - DNA, 20 bp, synthetic construct
  misc_feature 1..20: note = Description of Artificial Sequence: Synthetic oligonucleotide
  misc_feature 1..20: note = Target: SCN10A; (+) strand; PAM type: YTN; PAM sequence: TTT
  source 1..20: mol_type = other DNA
tgtttacccctcaccacaat

SEQ ID NO: 60352 - DNA, 20 bp, synthetic construct
  misc_feature 1..20: note = Description of Artificial Sequence: Synthetic oligonucleotide
  misc_feature 1..20: note = Target: SCN10A; (+) strand; PAM type: YTN; PAM sequence: TTT
  source 1..20: mol_type = other DNA
gtttacccctcaccacaatc

SEQ ID NO: 60353 - DNA, 20 bp, synthetic construct
  misc_feature 1..20: note = Description of Artificial Sequence: Synthetic oligonucleotide
  misc_feature 1..20: note = Target: SCN10A; (+) strand; PAM type: YTN; PAM sequence: TTG
  source 1..20: mol_type = other DNA
tttacccctcaccacaatcc

SEQ ID NO: 60354 - DNA, 20 bp, synthetic construct
  misc_feature 1..20: note = Description of Artificial Sequence: Synthetic oligonucleotide
  misc_feature 1..20: note = Target: SCN10A; (+) strand; PAM type: YTN; PAM sequence: TTT
  source 1..20: mol_type = other DNA
acccctcaccacaatccaga

SEQ ID NO: 60355 - DNA, 20 bp, synthetic construct
  misc_feature 1..20: note = Description of Artificial Sequence: Synthetic oligonucleotide
  misc_feature 1..20: note = Target: SCN10A; (+) strand; PAM type: YTN; PAM sequence: TTA
  source 1..20: mol_type = other DNA
cccctcaccacaatccagag

SEQ ID NO: 60356 - DNA, 20 bp, synthetic construct
  misc_feature 1..20: note = Description of Artificial Sequence: Synthetic oligonucleotide
  misc_feature 1..20: note = Target: SCN10A; (+) strand; PAM type: YTN; PAM sequence: CTC
  source 1..20: mol_type = other DNA
accacaatccagagagtagg

SEQ ID NO: 60357 - DNA, 20 bp, synthetic construct
  misc_feature 1..20: note = Description of Artificial Sequence: Synthetic oligonucleotide
  misc_feature 1..20: note = Target: SCN10A; (+) strand; PAM type: YTN; PAM sequence: TTA
  source 1..20: mol_type = other DNA
ttagccccattgaatgaatg

SEQ ID NO: 60358 - DNA, 20 bp, synthetic construct
  misc_feature 1..20: note = Description of Artificial Sequence: Synthetic oligonucleotide
  misc_feature 1..20: note = Target: SCN10A; (+) strand; PAM type: YTN; PAM sequence: TTA
  source 1..20: mol_type = other DNA
gccccattgaatgaatgaga

SEQ ID NO: 60359 - DNA, 20 bp, synthetic construct
  misc_feature 1..20: note = Description of Artificial Sequence: Synthetic oligonucleotide
  misc_feature 1..20: note = Target: SCN10A; (+) strand; PAM type: YTN; PAM sequence: TTG
  source 1..20: mol_type = other DNA
aatgaatgagaaaactgaga

SEQ ID NO: 60360 - DNA, 20 bp, synthetic construct
  misc_feature 1..20: note = Description of Artificial Sequence: Synthetic oligonucleotide
  misc_feature 1..20: note = Target: SCN10A; (+) strand; PAM type: YTN; PAM sequence: CTG
  source 1..20: mol_type = other DNA
agactcagaggggtttaaaa

SEQ ID NO: 60361 - DNA, 20 bp, synthetic construct
  misc_feature 1..20: note = Description of Artificial Sequence: Synthetic oligonucleotide
  misc_feature 1..20: note = Target: SCN10A; (+) strand; PAM type: YTN; PAM sequence: CTC
  source 1..20: mol_type = other DNA
agaggggtttaaaatattgc

SEQ ID NO: 60362 - DNA, 20 bp, synthetic construct
  misc_feature 1..20: note = Description of Artificial Sequence: Synthetic oligonucleotide
  misc_feature 1..20: note = Target: SCN10A; (+) strand; PAM type: YTN; PAM sequence: TTT
  source 1..20: mol_type = other DNA
aaaatattgccagcatgagc

SEQ ID NO: 60363 - DNA, 20 bp, synthetic construct
  misc_feature 1..20: note = Description of Artificial Sequence: Synthetic oligonucleotide
  misc_feature 1..20: note = Target: SCN10A; (+) strand; PAM type: YTN; PAM sequence: TTA
  source 1..20: mol_type = other DNA
aaatattgccagcatgagcc

SEQ ID NO: 60364 - DNA, 20 bp, synthetic construct
  misc_feature 1..20: note = Description of Artificial Sequence: Synthetic oligonucleotide
  misc_feature 1..20: note = Target: SCN10A; (+) strand; PAM type: YTN; PAM sequence: TTG
  source 1..20: mol_type = other DNA
ccagcatgagccatccacaa

SEQ ID NO: 60365 - DNA, 20 bp, synthetic construct
  misc_feature 1..20: note = Description of Artificial Sequence: Synthetic oligonucleotide
  misc_feature 1..20: note = Target: SCN10A; (+) strand; PAM type: YTN; PAM sequence: TTG
  source 1..20: mol_type = other DNA
agtcaggaatgcaaacccag

SEQ ID NO: 60366 - DNA, 20 bp, synthetic construct
  misc_feature 1..20: note = Description of Artificial Sequence: Synthetic oligonucleotide
  misc_feature 1..20: note = Target: SCN10A; (+) strand; PAM type: YTN; PAM sequence: TTT
  source 1..20: mol_type = other DNA
gcatgtactctgtgacttat

SEQ ID NO: 60367 - DNA, 20 bp, synthetic construct
  misc_feature 1..20: note = Description of Artificial Sequence: Synthetic oligonucleotide
  misc_feature 1..20: note = Target: SCN10A; (+) strand; PAM type: YTN; PAM sequence: TTG
  source 1..20: mol_type = other DNA
catgtactctgtgacttatc

SEQ ID NO: 60368 - DNA, 20 bp, synthetic construct
  misc_feature 1..20: note = Description of Artificial Sequence: Synthetic oligonucleotide
  misc_feature 1..20: note = Target: SCN10A; (+) strand; PAM type: YTN; PAM sequence: CTC
  source 1..20: mol_type = other DNA
tgtgacttatccatgtagcc

SEQ ID NO: 60369 - DNA, 20 bp, synthetic construct
  misc_feature 1..20: note = Description of Artificial Sequence: Synthetic oligonucleotide
  misc_feature 1..20: note = Target: SCN10A; (+) strand; PAM type: YTN; PAM sequence: CTG
  source 1..20: mol_type = other DNA
tgacttatccatgtagcccc

SEQ ID NO: 60370 - DNA, 20 bp, synthetic construct
  misc_feature 1..20: note = Description of Artificial Sequence: Synthetic oligonucleotide
  misc_feature 1..20: note = Target: SCN10A; (+) strand; PAM type: YTN; PAM sequence: CTT
  source 1..20: mol_type = other DNA
atccatgtagccccttttct

SEQ ID NO: 60371 - DNA, 20 bp, synthetic construct
  misc_feature 1..20: note = Description of Artificial Sequence: Synthetic oligonucleotide
  misc_feature 1..20: note = Target: SCN10A; (+) strand; PAM type: YTN; PAM sequence: TTA
  source 1..20: mol_type = other DNA
tccatgtagccccttttctc

SEQ ID NO: 60372 - DNA, 20 bp, synthetic construct
  misc_feature 1..20: note = Description of Artificial Sequence: Synthetic oligonucleotide
  misc_feature 1..20: note = Target: SCN10A; (+) strand; PAM type: YTN; PAM sequence: CTT
  source 1..20: mol_type = other DNA
ttctctcgggatctcagtta

SEQ ID NO: 60373 - DNA, 20 bp, synthetic construct
  misc_feature 1..20: note = Description of Artificial Sequence: Synthetic oligonucleotide
  misc_feature 1..20: note = Target: SCN10A; (+) strand; PAM type: YTN; PAM sequence: TTT
  source 1..20: mol_type = other DNA
tctctcgggatctcagttac

SEQ ID NO: 60374 - DNA, 20 bp, synthetic construct
  misc_feature 1..20: note = Description of Artificial Sequence: Synthetic oligonucleotide
  misc_feature 1..20: note = Target: SCN10A; (+) strand; PAM type: YTN; PAM sequence: TTT
  source 1..20: mol_type = other DNA
ctctcgggatctcagttacg

SEQ ID NO: 60375 - DNA, 20 bp, synthetic construct
  misc_feature 1..20: note = Description of Artificial Sequence: Synthetic oligonucleotide
  misc_feature 1..20: note = Target: SCN10A; (+) strand; PAM type: YTN; PAM sequence: TTC
  source 1..20: mol_type = other DNA
tctcgggatctcagttacgc

SEQ ID NO: 60376 - DNA, 20 bp, synthetic construct
  misc_feature 1..20: note = Description of Artificial Sequence: Synthetic oligonucleotide
  misc_feature 1..20: note = Target: SCN10A; (+) strand; PAM type: YTN; PAM sequence: CTC
  source 1..20: mol_type = other DNA
tcgggatctcagttacgcaa

SEQ ID NO: 60377 - DNA, 20 bp, synthetic construct
  misc_feature 1..20: note = Description of Artificial Sequence: Synthetic oligonucleotide
  misc_feature 1..20: note = Target: SCN10A; (+) strand; PAM type: YTN; PAM sequence: CTC
  source 1..20: mol_type = other DNA
gggatctcagttacgcaaat

SEQ ID NO: 60378 - DNA, 20 bp, synthetic construct
  misc_feature 1..20: note = Description of Artificial Sequence: Synthetic oligonucleotide
  misc_feature 1..20: note = Target: SCN10A; (+) strand; PAM type: YTN; PAM sequence: CTC
  source 1..20: mol_type = other DNA
agttacgcaaatctagaaca

SEQ ID NO: 60379 - DNA, 20 bp, synthetic construct
  misc_feature 1..20: note = Description of Artificial Sequence: Synthetic oligonucleotide
  misc_feature 1..20: note = Target: SCN10A; (+) strand; PAM type: YTN; PAM sequence: TTA
  source 1..20: mol_type = other DNA
cgcaaatctagaacagcgcc

SEQ ID NO: 60380 - DNA, 20 bp, synthetic construct
  misc_feature 1..20: note = Description of Artificial Sequence: Synthetic oligonucleotide
  misc_feature 1..20: note = Target: SCN10A; (+) strand; PAM type: YTN; PAM sequence: CTA
  source 1..20: mol_type = other DNA
gaacagcgcctatctacctc

SEQ ID NO: 60381 - DNA, 20 bp, synthetic construct
  misc_feature 1..20: note = Description of Artificial Sequence: Synthetic oligonucleotide
  misc_feature 1..20: note = Target: SCN10A; (+) strand; PAM type: YTN; PAM sequence: CTA
  source 1..20: mol_type = other DNA
tctacctcaggggtatggaa

SEQ ID NO: 60382 - DNA, 20 bp, synthetic construct
  misc_feature 1..20: note = Description of Artificial Sequence: Synthetic oligonucleotide
  misc_feature 1..20: note = Target: SCN10A; (+) strand; PAM type: YTN; PAM sequence: CTA
  source 1..20: mol_type = other DNA
cctcaggggtatggaaggca

SEQ ID NO: 60383 - DNA, 20 bp, synthetic construct
  misc_feature 1..20: note = Description of Artificial Sequence: Synthetic oligonucleotide
  misc_feature 1..20: note = Target: SCN10A; (+) strand; PAM type: YTN; PAM sequence: CTC
  source 1..20: mol_type = other DNA
aggggtatggaaggcattaa

SEQ ID NO: 60384 - DNA, 20 bp, synthetic construct
  misc_feature 1..20: note = Description of Artificial Sequence: Synthetic oligonucleotide
  misc_feature 1..20: note = Target: SCN10A; (+) strand; PAM type: YTN; PAM sequence: TTA
  source 1..20: mol_type = other DNA
aatgaaaggataataggaaa

SEQ ID NO: 60385 - DNA, 20 bp, synthetic construct
  misc_feature 1..20: note = Description of Artificial Sequence: Synthetic oligonucleotide
  misc_feature 1..20: note = Target: SCN10A; (+) strand; PAM type: YTN; PAM sequence: CTT
  source 1..20: mol_type = other DNA
tatacctttattgccctgac

SEQ ID NO: 60386 - DNA, 20 bp, synthetic construct
  misc_feature 1..20: note = Description of Artificial Sequence: Synthetic oligonucleotide
  misc_feature 1..20: note = Target: SCN10A; (+) strand; PAM type: YTN; PAM sequence: TTT
  source 1..20: mol_type = other DNA
atacctttattgccctgaca

SEQ ID NO: 60387 - DNA, 20 bp, synthetic construct
  misc_feature 1..20: note = Description of Artificial Sequence: Synthetic oligonucleotide
  misc_feature 1..20: note = Target: SCN10A; (+) strand; PAM type: YTN; PAM sequence: TTA
  source 1..20: mol_type = other DNA
tacctttattgccctgacat

SEQ ID NO: 60388 - DNA, 20 bp, synthetic construct
  misc_feature 1..20: note = Description of Artificial Sequence: Synthetic oligonucleotide
  misc_feature 1..20: note = Target: SCN10A; (+) strand; PAM type: YTN; PAM sequence: CTT
  source 1..20: mol_type = other DNA
tattgccctgacattttctt

SEQ ID NO: 60389 - DNA, 20 bp, synthetic construct
  misc_feature 1..20: note = Description of Artificial Sequence: Synthetic oligonucleotide
  misc_feature 1..20: note = Target: SCN10A; (+) strand; PAM type: YTN; PAM sequence: TTT
  source 1..20: mol_type = other DNA
attgccctgacattttctta

SEQ ID NO: 60390 - DNA, 20 bp, synthetic construct
  misc_feature 1..20: note = Description of Artificial Sequence: Synthetic oligonucleotide
  misc_feature 1..20: note = Target: SCN10A; (+) strand; PAM type: YTN; PAM sequence: TTA
  source 1..20: mol_type = other DNA
ttgccctgacattttcttat

SEQ ID NO: 60391 - DNA, 20 bp, synthetic construct
  misc_feature 1..20: note = Description of Artificial Sequence: Synthetic oligonucleotide
  misc_feature 1..20: note = Target: SCN10A; (+) strand; PAM type: YTN; PAM sequence: TTG
  source 1..20: mol_type = other DNA
ccctgacattttcttataaa

SEQ ID NO: 60392 - DNA, 20 bp, synthetic construct
  misc_feature 1..20: note = Description of Artificial Sequence: Synthetic oligonucleotide
  misc_feature 1..20: note = Target: SCN10A; (+) strand; PAM type: YTN; PAM sequence: CTG
  source 1..20: mol_type = other DNA
acattttcttataaacatga

SEQ ID NO: 60393 - DNA, 20 bp, synthetic construct
  misc_feature 1..20: note = Description of Artificial Sequence: Synthetic oligonucleotide
  misc_feature 1..20: note = Target: SCN10A; (+) strand; PAM type: YTN; PAM sequence: TTT
  source 1..20: mol_type = other DNA
tcttataaacatgagaggtt

SEQ ID NO: 60394 - DNA, 20 bp, synthetic construct
  misc_feature 1..20: note = Description of Artificial Sequence: Synthetic oligonucleotide
  misc_feature 1..20: note = Target: SCN10A; (+) strand; PAM type: YTN; PAM sequence: TTT
  source 1..20: mol_type = other DNA
cttataaacatgagaggtta

SEQ ID NO: 60395 - DNA, 20 bp, synthetic construct
  misc_feature 1..20: note = Description of Artificial Sequence: Synthetic oligonucleotide
  misc_feature 1..20: note = Target: SCN10A; (+) strand; PAM type: YTN; PAM sequence: TTC
  source 1..20: mol_type = other DNA
ttataaacatgagaggttat

SEQ ID NO: 60396 - DNA, 20 bp, synthetic construct
  misc_feature 1..20: note = Description of Artificial Sequence: Synthetic oligonucleotide
  misc_feature 1..20: note = Target: SCN10A; (+) strand; PAM type: YTN; PAM sequence: CTT
  source 1..20: mol_type = other DNA
ataaacatgagaggttatct

SEQ ID NO: 60397 - DNA, 20 bp, synthetic construct
  misc_feature 1..20: note = Description of Artificial Sequence: Synthetic oligonucleotide
  misc_feature 1..20: note = Target: SCN10A; (+) strand; PAM type: YTN; PAM sequence: TTA
  source 1..20: mol_type = other DNA
taaacatgagaggttatctg

SEQ ID NO: 60398 - DNA, 20 bp, synthetic construct
  misc_feature 1..20: note = Description of Artificial Sequence: Synthetic oligonucleotide
  misc_feature 1..20: note = Target: SCN10A; (+) strand; PAM type: YTN; PAM sequence: TTA
  source 1..20: mol_type = other DNA
tctgggattcgattcctatt

SEQ ID NO: 60399 - DNA, 20 bp, synthetic construct
  misc_feature 1..20: note = Description of Artificial Sequence: Synthetic oligonucleotide
  misc_feature 1..20: note = Target: SCN10A; (+) strand; PAM type: YTN; PAM sequence: CTG
  source 1..20: mol_type = other DNA
ggattcgattcctattaatc

SEQ ID NO: 60400 - DNA, 20 bp, synthetic construct
  misc_feature 1..20: note = Description of Artificial Sequence: Synthetic oligonucleotide
  misc_feature 1..20: note = Target: SCN10A; (+) strand; PAM type: YTN; PAM sequence: TTC
  source 1..20: mol_type = other DNA
gattcctattaatcagagtc

SEQ ID NO: 60401 - DNA, 20 bp, synthetic construct
  misc_feature 1..20: note = Description of Artificial Sequence: Synthetic oligonucleotide
  misc_feature 1..20: note = Target: SCN10A; (+) strand; PAM type: YTN; PAM sequence: TTC
  source 1..20: mol_type = other DNA
ctattaatcagagtcggcac

SEQ ID NO: 60402 - DNA, 20 bp, synthetic construct
  misc_feature 1..20: note = Description of Artificial Sequence: Synthetic oligonucleotide
  misc_feature 1..20: note = Target: SCN10A; (+) strand; PAM type: YTN; PAM sequence: CTA
  source 1..20: mol_type = other DNA
ttaatcagagtcggcaccct

SEQ ID NO: 60403 - DNA, 20 bp, synthetic construct
  misc_feature 1..20: note = Description of Artificial Sequence: Synthetic oligonucleotide
  misc_feature 1..20: note = Target: SCN10A; (+) strand; PAM type: YTN; PAM sequence: TTA
  source 1..20: mol_type = other DNA
atcagagtcggcacccttgg

SEQ ID NO: 60404 - DNA, 20 bp, synthetic construct
  misc_feature 1..20: note = Description of Artificial Sequence: Synthetic oligonucleotide
  misc_feature 1..20: note = Target: SCN10A; (+) strand; PAM type: YTN; PAM sequence: CTT
  source 1..20: mol_type = other DNA
ggaggcacaagccttcctcc

SEQ ID NO: 60405 - DNA, 20 bp, synthetic construct
  misc_feature 1..20: note = Description of Artificial Sequence: Synthetic oligonucleotide
  misc_feature 1..20: note = Target: SCN10A; (+) strand; PAM type: YTN; PAM sequence: TTG
  source 1..20: mol_type = other DNA
gaggcacaagccttcctccc

SEQ ID NO: 60406 - DNA, 20 bp, synthetic construct
  misc_feature 1..20: note = Description of Artificial Sequence: Synthetic oligonucleotide
  misc_feature 1..20: note = Target: SCN10A; (+) strand; PAM type: YTN; PAM sequence: CTT
  source 1..20: mol_type = other DNA
cctccccatcccaaggaggg

SEQ ID NO: 60407 - DNA, 20 bp, synthetic construct
  misc_feature 1..20: note = Description of Artificial Sequence: Synthetic oligonucleotide
  misc_feature 1..20: note = Target: SCN10A; (+) strand; PAM type: YTN; PAM sequence: TTC
  source 1..20: mol_type = other DNA
ctccccatcccaaggagggt

SEQ ID NO: 60408 - DNA, 20 bp, synthetic construct
  misc_feature 1..20: note = Description of Artificial Sequence: Synthetic oligonucleotide
  misc_feature 1..20: note = Target: SCN10A; (+) strand; PAM type: YTN; PAM sequence: CTC
  source 1..20: mol_type = other DNA
cccatcccaaggagggttgg

SEQ ID NO: 60409 - DNA, 20 bp, synthetic construct
  misc_feature 1..20: note = Description of Artificial Sequence: Synthetic oligonucleotide
  misc_feature 1..20: note = Target: SCN10A; (+) strand; PAM type: YTN; PAM sequence: TTG
  source 1..20: mol_type = other DNA
ggattctgccagtgctgggc

SEQ ID NO: 60410 - DNA, 20 bp, synthetic construct
  misc_feature 1..20: note = Description of Artificial Sequence: Synthetic oligonucleotide
  misc_feature 1..20: note = Target: SCN10A; (+) strand; PAM type: YTN; PAM sequence: TTC
  source 1..20: mol_type = other DNA
tgccagtgctgggccatggc

SEQ ID NO: 60411 - DNA, 20 bp, synthetic construct
  misc_feature 1..20: note = Description of Artificial Sequence: Synthetic oligonucleotide
  misc_feature 1..20: note = Target: SCN10A; (+) strand; PAM type: YTN; PAM sequence: CTG
  source 1..20: mol_type = other DNA
ccagtgctgggccatggcct

SEQ ID NO: 60412 - DNA, 20 bp, synthetic construct
  misc_feature 1..20: note = Description of Artificial Sequence: Synthetic oligonucleotide
  misc_feature 1..20: note = Target: SCN10A; (+) strand; PAM type: YTN; PAM sequence: CTG
  source 1..20: mol_type = other DNA
ggccatggcctttcctgagg

SEQ ID NO: 60413 - DNA, 20 bp, synthetic construct
  misc_feature 1..20: note = Description of Artificial Sequence: Synthetic oligonucleotide
  misc_feature 1..20: note = Target: SCN10A; (+) strand; PAM type: YTN; PAM sequence: CTT
  source 1..20: mol_type = other DNA
tcctgaggtgccctgactca

SEQ ID NO: 60414 - DNA, 20 bp, synthetic construct
  misc_feature 1..20: note = Description of Artificial Sequence: Synthetic oligonucleotide
  misc_feature 1..20: note = Target: SCN10A; (+) strand; PAM type: YTN; PAM sequence: TTT
  source 1..20: mol_type = other DNA
cctgaggtgccctgactcag

SEQ ID NO: 60415 - DNA, 20 bp, synthetic construct
  misc_feature 1..20: note = Description of Artificial Sequence: Synthetic oligonucleotide
  misc_feature 1..20: note = Target: SCN10A; (+) strand; PAM type: YTN; PAM sequence: TTC
  source 1..20: mol_type = other DNA
ctgaggtgccctgactcagt

SEQ ID NO: 60416 - DNA, 20 bp, synthetic construct
  misc_feature 1..20: note = Description of Artificial Sequence: Synthetic oligonucleotide
  misc_feature 1..20: note = Target: SCN10A; (+) strand; PAM type: YTN; PAM sequence: CTG
  source 1..20: mol_type = other DNA
aggtgccctgactcagtcct

SEQ ID NO: 60417 - DNA, 20 bp, synthetic construct
  misc_feature 1..20: note = Description of Artificial Sequence: Synthetic oligonucleotide
  misc_feature 1..20: note = Target: SCN10A; (+) strand; PAM type: YTN; PAM sequence: CTG
  source 1..20: mol_type = other DNA
actcagtcctttgtggggat

SEQ ID NO: 60418 - DNA, 20 bp, synthetic construct
  misc_feature 1..20: note = Description of Artificial Sequence: Synthetic oligonucleotide
  misc_feature 1..20: note = Target: SCN10A; (+) strand; PAM type: YTN; PAM sequence: CTC
  source 1..20: mol_type = other DNA
agtcctttgtggggatcata

SEQ ID NO: 60419 - DNA, 20 bp, synthetic construct
  misc_feature 1..20: note = Description of Artificial Sequence: Synthetic oligonucleotide
  misc_feature 1..20: note = Target: SCN10A; (+) strand; PAM type: YTN; PAM sequence: CTT
  source 1..20: mol_type = other DNA
tgtggggatcatatccccca

SEQ ID NO: 60420 - DNA, 20 bp, synthetic construct
  misc_feature 1..20: note = Description of Artificial Sequence: Synthetic oligonucleotide
  misc_feature 1..20: note = Target: SCN10A; (+) strand; PAM type: YTN; PAM sequence: TTT
  source 1..20: mol_type = other DNA
gtggggatcatatcccccaa

SEQ ID NO: 60421 - DNA, 20 bp, synthetic construct
  misc_feature 1..20: note = Description of Artificial Sequence: Synthetic oligonucleotide
  misc_feature 1..20: note = Target: SCN10A; (+) strand; PAM type: YTN; PAM sequence: TTG
  source 1..20: mol_type = other DNA
tggggatcatatcccccaac

SEQ ID NO: 60422 - DNA, 20 bp, synthetic construct
  misc_feature 1..20: note = Description of Artificial Sequence: Synthetic oligonucleotide
  misc_feature 1..20: note = Target: SCN10A; (+) strand; PAM type: YTN; PAM sequence: TTC
  source 1..20: mol_type = other DNA
tagatccctttctttccctg

SEQ ID NO: 60423 - DNA, 20 bp, synthetic construct
  misc_feature 1..20: note = Description of Artificial Sequence: Synthetic oligonucleotide
  misc_feature 1..20: note = Target: SCN10A; (+) strand; PAM type: YTN; PAM sequence: CTA
  source 1..20: mol_type = other DNA
gatccctttctttccctgct

SEQ ID NO: 60424 - DNA, 20 bp, synthetic construct
  misc_feature 1..20: note = Description of Artificial Sequence: Synthetic oligonucleotide
  misc_feature 1..20: note = Target: SCN10A; (+) strand; PAM type: YTN; PAM sequence: CTT
  source 1..20: mol_type = other DNA
tctttccctgcttgtattct

SEQ ID NO: 60425 - DNA, 20 bp, synthetic construct
  misc_feature 1..20: note = Description of Artificial Sequence: Synthetic oligonucleotide
  misc_feature 1..20: note = Target: SCN10A; (+) strand; PAM type: YTN; PAM sequence: TTT
  source 1..20: mol_type = other DNA
ctttccctgcttgtattctc

SEQ ID NO: 60426 - DNA, 20 bp, synthetic construct
  misc_feature 1..20: note = Description of Artificial Sequence: Synthetic oligonucleotide
  misc_feature 1..20: note = Target: SCN10A; (+) strand; PAM type: YTN; PAM sequence: TTC
  source 1..20: mol_type = other DNA
tttccctgcttgtattctcc

SEQ ID NO: 60427 - DNA, 20 bp, synthetic construct
  misc_feature 1..20: note = Description of Artificial Sequence: Synthetic oligonucleotide
  misc_feature 1..20: note = Target: SCN10A; (+) strand; PAM type: YTN; PAM sequence: CTT
  source 1..20: mol_type = other DNA
tccctgcttgtattctccca

SEQ ID NO: 60428 - DNA, 20 bp, synthetic construct
  misc_feature 1..20: note = Description of Artificial Sequence: Synthetic oligonucleotide
  misc_feature 1..20: note = Target: SCN10A; (+) strand; PAM type: YTN; PAM sequence: TTT
  source 1..20: mol_type = other DNA
ccctgcttgtattctcccag

SEQ ID NO: 60429 - DNA, 20 bp, synthetic construct
  misc_feature 1..20: note = Description of Artificial Sequence: Synthetic oligonucleotide
  misc_feature 1..20: note = Target: SCN10A; (+) strand; PAM type: YTN; PAM sequence: TTC
  source 1..20: mol_type = other DNA
cctgcttgtattctcccagg

SEQ ID NO: 60430 - DNA, 20 bp, synthetic construct
  misc_feature 1..20: note = Description of Artificial Sequence: Synthetic oligonucleotide
  misc_feature 1..20: note = Target: SCN10A; (+) strand; PAM type: YTN; PAM sequence: CTG
  source 1..20: mol_type = other DNA
cttgtattctcccagggctc

SEQ ID NO: 60431 - DNA, 20 bp, synthetic construct
  misc_feature 1..20: note = Description of Artificial Sequence: Synthetic oligonucleotide
  misc_feature 1..20: note = Target: SCN10A; (+) strand; PAM type: YTN; PAM sequence: CTT
  source 1..20: mol_type = other DNA
gtattctcccagggctcact

SEQ ID NO: 60432 - DNA, 20 bp, synthetic construct
  misc_feature 1..20: note = Description of Artificial Sequence: Synthetic oligonucleotide
  misc_feature 1..20: note = Target: SCN10A; (+) strand; PAM type: YTN; PAM sequence: TTG
  source 1..20: mol_type = other DNA
tattctcccagggctcactt

SEQ ID NO: 60433 - DNA, 20 bp, synthetic construct
  misc_feature 1..20: note = Description of Artificial Sequence: Synthetic oligonucleotide
  misc_feature 1..20: note = Target: SCN10A; (+) strand; PAM type: YTN; PAM sequence: TTC
  source 1..20: mol_type = other DNA
tcccagggctcacttggaac

SEQ ID NO: 60434 - DNA, 20 bp, synthetic construct
  misc_feature 1..20: note = Description of Artificial Sequence: Synthetic oligonucleotide
  misc_feature 1..20: note = Target: SCN10A; (+) strand; PAM type: YTN; PAM sequence: CTC
  source 1..20: mol_type = other DNA
ccagggctcacttggaacac

SEQ ID NO: 60435 - DNA, 20 bp, synthetic construct
  misc_feature 1..20: note = Description of Artificial Sequence: Synthetic oligonucleotide
  misc_feature 1..20: note = Target: SCN10A; (+) strand; PAM type: YTN; PAM sequence: CTC
  source 1..20: mol_type = other DNA
acttggaacacatctaacac

SEQ ID NO: 60436 - DNA, 20 bp, synthetic construct
  misc_feature 1..20: note = Description of Artificial Sequence: Synthetic oligonucleotide
  misc_feature 1..20: note = Target: SCN10A; (+) strand; PAM type: YTN; PAM sequence: CTT
  source 1..20: mol_type = other DNA
ggaacacatctaacacacct

SEQ ID NO: 60437 - DNA, 20 bp, synthetic construct
  misc_feature 1..20: note = Description of Artificial Sequence: Synthetic oligonucleotide
  misc_feature 1..20: note = Target: SCN10A; (+) strand; PAM type: YTN; PAM sequence: TTG
  source 1..20: mol_type = other DNA
gaacacatctaacacacctg

SEQ ID NO: 60438 - DNA, 20 bp, synthetic construct
  misc_feature 1..20: note = Description of Artificial Sequence: Synthetic oligonucleotide
  misc_feature 1..20: note = Target: SCN10A; (+) strand; PAM type: YTN; PAM sequence: CTA
  source 1..20: mol_type = other DNA
acacacctggttccagttgg

SEQ ID NO: 60439 - DNA, 20 bp, synthetic construct
  misc_feature 1..20: note = Description of Artificial Sequence: Synthetic oligonucleotide
  misc_feature 1..20: note = Target: SCN10A; (+) strand; PAM type: YTN; PAM sequence: CTG
  source 1..20: mol_type = other DNA
gttccagttgggaagaccaa

SEQ ID NO: 60440 - DNA, 20 bp, synthetic construct
  misc_feature 1..20: note = Description of Artificial Sequence: Synthetic oligonucleotide
  misc_feature 1..20: note = Target: SCN10A; (+) strand; PAM type: YTN; PAM sequence: TTC
  source 1..20: mol_type = other DNA
cagttgggaagaccaagatc

SEQ ID NO: 60441 - DNA, 20 bp, synthetic construct
  misc_feature 1..20: note = Description of Artificial Sequence: Synthetic oligonucleotide
  misc_feature 1..20: note = Target: SCN10A; (+) strand; PAM type: YTN; PAM sequence: TTG
  source 1..20: mol_type = other DNA
ggaagaccaagatccctttg

SEQ ID NO: 60442 - DNA, 20 bp, synthetic construct
  misc_feature 1..20: note = Description of Artificial Sequence: Synthetic oligonucleotide
  misc_feature 1..20: note = Target: SCN10A; (+) strand; PAM type: YTN; PAM sequence: CTT
  source 1..20: mol_type = other DNA
tgagatgtgaatcctgagtg

SEQ ID NO: 60443 - DNA, 20 bp, synthetic construct
  misc_feature 1..20: note = Description of Artificial Sequence: Synthetic oligonucleotide
  misc_feature 1..20: note = Target: SCN10A; (+) strand; PAM type: YTN; PAM sequence: TTT
  source 1..20: mol_type = other DNA
gagatgtgaatcctgagtga

SEQ ID NO: 60444 - DNA, 20 bp, synthetic construct
  misc_feature 1..20: note = Description of Artificial Sequence: Synthetic oligonucleotide
  misc_feature 1..20: note = Target: SCN10A; (+) strand; PAM type: YTN; PAM sequence: TTG
  source 1..20: mol_type = other DNA
agatgtgaatcctgagtgag

SEQ ID NO: 60445 - DNA, 20 bp, synthetic construct
  misc_feature 1..20: note = Description of Artificial Sequence: Synthetic oligonucleotide
  misc_feature 1..20: note = Target: SCN10A; (+) strand; PAM type: YTN; PAM sequence: CTG
  source 1..20: mol_type = other DNA
agtgaggatgttagtggggc

SEQ ID NO: 60446 - DNA, 20 bp, synthetic construct
  misc_feature 1..20: note = Description of Artificial Sequence: Synthetic oligonucleotide
  misc_feature 1..20: note = Target: SCN10A; (+) strand; PAM type: YTN; PAM sequence: TTA
  source 1..20: mol_type = other DNA
gtggggcattgctgacagag

SEQ ID NO: 60447 - DNA, 20 bp, synthetic construct
  misc_feature 1..20: note = Description of Artificial Sequence: Synthetic oligonucleotide
  misc_feature 1..20: note = Target: SCN10A; (+) strand; PAM type: YTN; PAM sequence: TTG
  source 1..20: mol_type = other DNA
ctgacagagagaaatgcaac

SEQ ID NO: 60448 - DNA, 20 bp, synthetic construct
  misc_feature 1..20: note = Description of Artificial Sequence: Synthetic oligonucleotide
  misc_feature 1..20: note = Target: SCN10A; (+) strand; PAM type: YTN; PAM sequence: CTG
  source 1..20: mol_type = other DNA
acagagagaaatgcaactct

SEQ ID NO: 60449 - DNA, 20 bp, synthetic construct
  misc_feature 1..20: note = Description of Artificial Sequence: Synthetic oligonucleotide
  misc_feature 1..20: note = Target: SCN10A; (+) strand; PAM type: YTN; PAM sequence: CTC
  source 1..20: mol_type = other DNA
ttcctgcaacagcaatcaca

SEQ ID NO: 60450 - DNA, 20 bp, synthetic construct
  misc_feature 1..20: note = Description of Artificial Sequence: Synthetic oligonucleotide
  misc_feature 1..20: note = Target: SCN10A; (+) strand; PAM type: YTN; PAM sequence: CTT
  source 1..20: mol_type = other DNA
cctgcaacagcaatcacagg

SEQ ID NO: 60451 - DNA, 20 bp, synthetic construct
  misc_feature 1..20: note = Description of Artificial Sequence: Synthetic oligonucleotide
  misc_feature 1..20: note = Target: SCN10A; (+) strand; PAM type: YTN; PAM sequence: TTC
  source 1..20: mol_type = other DNA
ctgcaacagcaatcacaggg

SEQ ID NO: 60452 - DNA, 20 bp, synthetic construct
  misc_feature 1..20: note = Description of Artificial Sequence: Synthetic oligonucleotide
  misc_feature 1..20: note = Target: SCN10A; (+) strand; PAM type: YTN; PAM sequence: CTG
  source 1..20: mol_type = other DNA
caacagcaatcacagggcaa

SEQ ID NO: 60453 - DNA, 20 bp, synthetic construct
  misc_feature 1..20: note = Description of Artificial Sequence: Synthetic oligonucleotide
  misc_feature 1..20: note = Target: SCN10A; (+) strand; PAM type: YTN; PAM sequence: TTA
  source 1..20: mol_type = other DNA
gcactgatattaaagtgatg

SEQ ID NO: 60454 - DNA, 20 bp, synthetic construct
  misc_feature 1..20: note = Description of Artificial Sequence: Synthetic oligonucleotide
  misc_feature 1..20: note = Target: SCN10A; (+) strand; PAM type: YTN; PAM sequence: CTG
  source 1..20: mol_type = other DNA
atattaaagtgatgggctgt

SEQ ID NO: 60455 - DNA, 20 bp, synthetic construct
  misc_feature 1..20: note = Description of Artificial Sequence: Synthetic oligonucleotide
  misc_feature 1..20: note = Target: SCN10A; (+) strand; PAM type: YTN; PAM sequence: TTA
  source 1..20: mol_type = other DNA
aagtgatgggctgtgagtag

SEQ ID NO: 60456 - DNA, 20 bp, synthetic construct
  misc_feature 1..20: note = Description of Artificial Sequence: Synthetic oligonucleotide
  misc_feature 1..20: note = Target: SCN10A; (+) strand; PAM type: YTN; PAM sequence: CTG
  source 1..20: mol_type = other DNA
tgagtagtgttggcttttgt

SEQ ID NO: 60457 - DNA, 20 bp, synthetic construct
  misc_feature 1..20: note = Description of Artificial Sequence: Synthetic oligonucleotide
  misc_feature 1..20: note = Target: SCN10A; (+) strand; PAM type: YTN; PAM sequence: TTG
  source 1..20: mol_type = other DNA
gcttttgtcaggaggccaga

SEQ ID NO: 60458 - DNA, 20 bp, synthetic construct
  misc_feature 1..20: note = Description of Artificial Sequence: Synthetic oligonucleotide
  misc_feature 1..20: note = Target: SCN10A; (+) strand; PAM type: YTN; PAM sequence: CTT
  source 1..20: mol_type = other DNA
ttgtcaggaggccagagctg

SEQ ID NO: 60459 - DNA, 20 bp, synthetic construct
  misc_feature 1..20: note = Description of Artificial Sequence: Synthetic oligonucleotide
  misc_feature 1..20: note = Target: SCN10A; (+) strand; PAM type: YTN; PAM sequence: TTT
  source 1..20: mol_type = other DNA
tgtcaggaggccagagctgg

SEQ ID NO: 60460 - DNA, 20 bp, synthetic construct
  misc_feature 1..20: note = Description of Artificial Sequence: Synthetic oligonucleotide
  misc_feature 1..20: note = Target: SCN10A; (+) strand; PAM type: YTN; PAM sequence: TTT
  source 1..20: mol_type = other DNA
gtcaggaggccagagctggg

SEQ ID NO: 60461 - DNA, 20 bp, synthetic construct
  misc_feature 1..20: note = Description of Artificial Sequence: Synthetic oligonucleotide
  misc_feature 1..20: note = Target: SCN10A; (+) strand; PAM type: YTN; PAM sequence: TTG
  source 1..20: mol_type = other DNA
tcaggaggccagagctgggc

SEQ ID NO: 60462 - DNA, 20 bp, synthetic construct
  misc_feature 1..20: note = Description of Artificial Sequence: Synthetic oligonucleotide
  misc_feature 1..20: note = Target: SCN10A; (+) strand; PAM type: YTN; PAM sequence: CTG
  source 1..20: mol_type = other DNA
ggcagggaacaggaaatata

SEQ ID NO: 60463 - DNA, 20 bp, synthetic construct
  misc_feature 1..20: note = Description of Artificial Sequence: Synthetic oligonucleotide
  misc_feature 1..20: note = Target: SCN10A; (+) strand; PAM type: YTN; PAM sequence: CTT
  source 1..20: mol_type = other DNA
accactacagcagaaaccag

SEQ ID NO: 60464 - DNA, 20 bp, synthetic construct
  misc_feature 1..20: note = Description of Artificial Sequence: Synthetic oligonucleotide
  misc_feature 1..20: note = Target: SCN10A; (+) strand; PAM type: YTN; PAM sequence: TTA
  source 1..20: mol_type = other DNA
ccactacagcagaaaccaga

SEQ ID NO: 60465 - DNA, 20 bp, synthetic construct
  misc_feature 1..20: note = Description of Artificial Sequence: Synthetic oligonucleotide
  misc_feature 1..20: note = Target: SCN10A; (+) strand; PAM type: YTN; PAM sequence: CTA
  source 1..20: mol_type = other DNA
cagcagaaaccagaaactcc

SEQ ID NO: 60466 - DNA, 20 bp, synthetic construct
  misc_feature 1..20: note = Description of Artificial Sequence: Synthetic oligonucleotide
  misc_feature 1..20: note = Target: SCN10A; (+) strand; PAM type: YTN; PAM sequence: CTC
  source 1..20: mol_type = other DNA
ctgagcaccacttatctttt

SEQ ID NO: 60467 - DNA, 20 bp, synthetic construct
  misc_feature 1..20: note = Description of Artificial Sequence: Synthetic oligonucleotide
  misc_feature 1..20: note = Target: SCN10A; (+) strand; PAM type: YTN; PAM sequence: CTG
  source 1..20: mol_type = other DNA
agcaccacttatcttttttt

SEQ ID NO: 60468 - DNA, 20 bp, synthetic construct
  misc_feature 1..20: note = Description of Artificial Sequence: Synthetic oligonucleotide
  misc_feature 1..20: note = Target: SCN10A; (+) strand; PAM type: YTN; PAM sequence: CTT
  source 1..20: mol_type = other DNA
atcttttttttctgttgatt

SEQ ID NO: 60469 - DNA, 20 bp, synthetic construct
  misc_feature 1..20: note = Description of Artificial Sequence: Synthetic oligonucleotide
  misc_feature 1..20: note = Target: SCN10A; (+) strand; PAM type: YTN; PAM sequence: TTA
  source 1..20: mol_type = other DNA
tcttttttttctgttgattg

SEQ ID NO: 60470 - DNA, 20 bp, synthetic construct
  misc_feature 1..20: note = Description of Artificial Sequence: Synthetic oligonucleotide
  misc_feature 1..20: note = Target: SCN10A; (+) strand; PAM type: YTN; PAM sequence: CTT
  source 1..20: mol_type = other DNA
ttttttctgttgattgaagt

SEQ ID NO: 60471 - DNA, 20 bp, synthetic construct
  misc_feature 1..20: note = Description of Artificial Sequence: Synthetic oligonucleotide
  misc_feature 1..20: note = Target: SCN10A; (+) strand; PAM type: YTN; PAM sequence: TTT
  source 1..20: mol_type = other DNA
tttttctgttgattgaagtt

SEQ ID NO: 60472 - DNA, 20 bp, synthetic construct
  misc_feature 1..20: note = Description of Artificial Sequence: Synthetic oligonucleotide
  misc_feature 1..20: note = Target: SCN10A; (+) strand; PAM type: YTN; PAM sequence: TTT
  source 1..20: mol_type = other DNA
ttttctgttgattgaagttg

SEQ ID NO: 60473 - DNA, 20 bp, synthetic construct
  misc_feature 1..20: note = Description of Artificial Sequence: Synthetic oligonucleotide
  misc_feature 1..20: note = Target: SCN10A; (+) strand; PAM type: YTN; PAM sequence: TTT
  source 1..20: mol_type = other DNA
tttctgttgattgaagttgt

SEQ ID NO: 60474 - DNA, 20 bp, synthetic construct
  misc_feature 1..20: note = Description of Artificial Sequence: Synthetic oligonucleotide
  misc_feature 1..20: note = Target: SCN10A; (+) strand; PAM type: YTN; PAM sequence: TTT
  source 1..20: mol_type = other DNA
ttctgttgattgaagttgtc

SEQ ID NO: 60475 - DNA, 20 bp, synthetic construct
  misc_feature 1..20: note = Description of Artificial Sequence: Synthetic oligonucleotide
  misc_feature 1..20: note = Target: SCN10A; (+) strand; PAM type: YTN; PAM sequence: TTT
  source 1..20: mol_type = other DNA
tctgttgattgaagttgtca

SEQ ID NO: 60476 - DNA, 20 bp, synthetic construct
  misc_feature 1..20: note = Description of Artificial Sequence: Synthetic oligonucleotide
  misc_feature 1..20: note = Target: SCN10A; (+) strand; PAM type: YTN; PAM sequence: TTT
  source 1..20: mol_type = other DNA
ctgttgattgaagttgtcaa

SEQ ID NO: 60477 - DNA, 20 bp, synthetic construct
  misc_feature 1..20: note = Description of Artificial Sequence: Synthetic oligonucleotide
  misc_feature 1..20: note = Target: SCN10A; (+) strand; PAM type: YTN; PAM sequence: TTC
  source 1..20: mol_type = other DNA
tgttgattgaagttgtcaat

SEQ ID NO: 60478 - DNA, 20 bp, synthetic construct
  misc_feature 1..20: note = Description of Artificial Sequence: Synthetic oligonucleotide
  misc_feature 1..20: note = Target: SCN10A; (+) strand; PAM type: YTN; PAM sequence: CTG
  source 1..20: mol_type = other DNA
ttgattgaagttgtcaatta

SEQ ID NO: 60479 - DNA, 20 bp, synthetic construct
  misc_feature 1..20: note = Description of Artificial Sequence: Synthetic oligonucleotide
  misc_feature 1..20: note = Target: SCN10A; (+) strand; PAM type: YTN; PAM sequence: TTG
  source 1..20: mol_type = other DNA
attgaagttgtcaattatga

SEQ ID NO: 60480 - DNA, 20 bp, synthetic construct
  misc_feature 1..20: note = Description of Artificial Sequence: Synthetic oligonucleotide
  misc_feature 1..20: note = Target: SCN10A; (+) strand; PAM type: YTN; PAM sequence: TTG
  source 1..20: mol_type = other DNA
aagttgtcaattatgacccc

SEQ ID NO: 60481 - DNA, 20 bp, synthetic construct
  misc_feature 1..20: note = Description of Artificial Sequence: Synthetic oligonucleotide
  misc_feature 1..20: note = Target: SCN10A; (+) strand; PAM type: YTN; PAM sequence: TTG
  source 1..20: mol_type = other DNA
tcaattatgaccccaacaaa

SEQ ID NO: 60482 - DNA, 20 bp, synthetic construct
  misc_feature 1..20: note = Description of Artificial Sequence: Synthetic oligonucleotide
  misc_feature 1..20: note = Target: SCN10A; (+) strand; PAM type: YTN; PAM sequence: TTA
  source 1..20: mol_type = other DNA
tgaccccaacaaagagattc

SEQ ID NO: 60483 - DNA, 20 bp, synthetic construct
  misc_feature 1..20: note = Description of Artificial Sequence: Synthetic oligonucleotide
  misc_feature 1..20: note = Target: SCN10A; (+) strand; PAM type: YTN; PAM sequence: TTC
  source 1..20: mol_type = other DNA
agtgtgaagaagcctccaaa

SEQ ID NO: 60484 - DNA, 20 bp, synthetic construct
  misc_feature 1..20: note = Description of Artificial Sequence: Synthetic oligonucleotide
  misc_feature 1..20: note = Target: SCN10A; (+) strand; PAM type: YTN; PAM sequence: CTC
  source 1..20: mol_type = other DNA
caaaaatgatgaagatgaca

SEQ ID NO: 60485 - DNA, 20 bp, synthetic construct
  misc_feature 1..20: note = Description of Artificial Sequence: Synthetic oligonucleotide
  misc_feature 1..20: note = Target: SCN10A; (+) strand; PAM type: YTN; PAM sequence: TTG
  source 1..20: mol_type = other DNA
tcctcccacttgggttgcat

SEQ ID NO: 60486 - DNA, 20 bp, synthetic construct
  misc_feature 1..20: note = Description of Artificial Sequence: Synthetic oligonucleotide
  misc_feature 1..20: note = Target: SCN10A; (+) strand; PAM type: YTN; PAM sequence: CTC
  source 1..20: mol_type = other DNA
ccacttgggttgcatgttga

SEQ ID NO: 60487 - DNA, 20 bp, synthetic construct
  misc_feature 1..20: note = Description of Artificial Sequence: Synthetic oligonucleotide
  misc_feature 1..20: note = Target: SCN10A; (+) strand; PAM type: YTN; PAM sequence: CTT
  source 1..20: mol_type = other DNA
gggttgcatgttgacctgtg

SEQ ID NO: 60488 - DNA, 20 bp, synthetic construct
  misc_feature 1..20: note = Description of Artificial Sequence: Synthetic oligonucleotide
  misc_feature 1..20: note = Target: SCN10A; (+) strand; PAM type: YTN; PAM sequence: TTG
  source 1..20: mol_type = other DNA
ggttgcatgttgacctgtga

SEQ ID NO: 60489 - DNA, 20 bp, synthetic construct
  misc_feature 1..20: note = Description of Artificial Sequence: Synthetic oligonucleotide
  misc_feature 1..20: note = Target: SCN10A; (+) strand; PAM type: YTN; PAM sequence: TTG
  source 1..20: mol_type = other DNA
catgttgacctgtgaccaga

SEQ ID NO: 60490 - DNA, 20 bp, synthetic construct
  misc_feature 1..20: note = Description of Artificial Sequence: Synthetic oligonucleotide
  misc_feature 1..20: note = Target: SCN10A; (+) strand; PAM type: YTN; PAM sequence: TTG
  source 1..20: mol_type = other DNA
acctgtgaccagacaaggga

SEQ ID NO: 60491 - DNA, 20 bp, synthetic construct
  misc_feature 1..20: note = Description of Artificial Sequence: Synthetic oligonucleotide
  misc_feature 1..20: note = Target: SCN10A; (+) strand; PAM type: YTN; PAM sequence: CTG
  source 1..20: mol_type = other DNA
tgaccagacaagggagagtg

SEQ ID NO: 60492 - DNA, 20 bp, synthetic construct
  misc_feature 1..20: note = Description of Artificial Sequence: Synthetic oligonucleotide
  misc_feature 1..20: note = Target: SCN10A; (+) strand; PAM type: YTN; PAM sequence: CTT
  source 1..20: mol_type = other DNA
agttcaggttcactctgaaa

SEQ ID NO: 60493 - DNA, 20 bp, synthetic construct
  misc_feature 1..20: note = Description of Artificial Sequence: Synthetic oligonucleotide
  misc_feature 1..20: note = Target: SCN10A; (+) strand; PAM type: YTN; PAM sequence: TTA
  source 1..20: mol_type = other DNA
gttcaggttcactctgaaag

SEQ ID NO: 60494 - DNA, 20 bp, synthetic construct
  misc_feature 1..20: note = Description of Artificial Sequence: Synthetic oligonucleotide
  misc_feature 1..20: note = Target: SCN10A; (+) strand; PAM type: YTN; PAM sequence: TTC
  source 1..20: mol_type = other DNA
aggttcactctgaaagccaa

SEQ ID NO: 60495 - DNA, 20 bp, synthetic construct
  misc_feature 1..20: note = Description of Artificial Sequence: Synthetic oligonucleotide
  misc_feature 1..20: note = Target: SCN10A; (+) strand; PAM type: YTN; PAM sequence: TTC
  source 1..20: mol_type = other DNA
actctgaaagccaagcctaa

SEQ ID NO: 60496 - DNA, 20 bp, synthetic construct
  misc_feature 1..20: note = Description of Artificial Sequence: Synthetic oligonucleotide
  misc_feature 1..20: note = Target: SCN10A; (+) strand; PAM type: YTN; PAM sequence: CTC
  source 1..20: mol_type = other DNA
tgaaagccaagcctaagaca

SEQ ID NO: 60497 - DNA, 20 bp, synthetic construct
  misc_feature 1..20: note = Description of Artificial Sequence: Synthetic oligonucleotide
  misc_feature 1..20: note = Target: SCN10A; (+) strand; PAM type: YTN; PAM sequence: CTG
  source 1..20: mol_type = other DNA
aaagccaagcctaagacatg

SEQ ID NO: 60498 - DNA, 20 bp, synthetic construct
  misc_feature 1..20: note = Description of Artificial Sequence: Synthetic oligonucleotide
  misc_feature 1..20: note = Target: SCN10A; (+) strand; PAM type: YTN; PAM sequence: CTA
  source 1..20: mol_type = other DNA
agacatggacctgggtgcag

SEQ ID NO: 60499 - DNA, 20 bp, synthetic construct
  misc_feature 1..20: note = Description of Artificial Sequence: Synthetic oligonucleotide
  misc_feature 1..20: note = Target: SCN10A; (+) strand; PAM type: YTN; PAM sequence: CTG
  source 1..20: mol_type = other DNA
ggtgcaggtgatttatctgg

SEQ ID NO: 60500 - DNA, 20 bp, synthetic construct
  misc_feature 1..20: note = Description of Artificial Sequence: Synthetic oligonucleotide
  misc_feature 1..20: note = Target: SCN10A; (+) strand; PAM type: YTN; PAM sequence: TTT
  source 1..20: mol_type = other DNA
atctgggaggtgatccaagg

SEQ ID NO: 60501 - DNA, 20 bp, synthetic construct
  misc_feature 1..20: note = Description of Artificial Sequence: Synthetic oligonucleotide
  misc_feature 1..20: note = Target: SCN10A; (+) strand; PAM type: YTN; PAM sequence: TTA
  source 1..20: mol_type = other DNA
tctgggaggtgatccaagga

SEQ ID NO: 60502 - DNA, 20 bp, synthetic construct
  misc_feature 1..20: note = Description of Artificial Sequence: Synthetic oligonucleotide
  misc_feature 1..20: note = Target: SCN10A; (+) strand; PAM type: YTN; PAM sequence: CTG
  source 1..20: mol_type = other DNA
ggaggtgatccaaggaagca

SEQ ID NO: 60503 - DNA, 20 bp, synthetic construct
  misc_feature 1..20: note = Description of Artificial Sequence: Synthetic oligonucleotide
  misc_feature 1..20: note = Target: SCN10A; (+) strand; PAM type: YTN; PAM sequence: CTG
  source 1..20: mol_type = other DNA
tgaagaggatgttgttaagc

SEQ ID NO: 60504 - DNA, 20 bp, synthetic construct
  misc_feature 1..20: note = Description of Artificial Sequence: Synthetic oligonucleotide
  misc_feature 1..20: note = Target: SCN10A; (+) strand; PAM type: YTN; PAM sequence: TTG
  source 1..20: mol_type = other DNA
ttaagcagggcatcattgtg

SEQ ID NO: 60505 - DNA, 20 bp, synthetic construct
  misc_feature 1..20: note = Description of Artificial Sequence: Synthetic oligonucleotide
  misc_feature 1..20: note = Target: SCN10A; (+) strand; PAM type: YTN; PAM sequence: TTA
  source 1..20: mol_type = other DNA
agcagggcatcattgtgggc

SEQ ID NO: 60506 - DNA, 20 bp, synthetic construct
  misc_feature 1..20: note = Description of Artificial Sequence: Synthetic oligonucleotide
  misc_feature 1..20: note = Target: SCN10A; (+) strand; PAM type: YTN; PAM sequence: TTG
  source 1..20: mol_type = other DNA
tgggcaactgaagcgcaatc

SEQ ID NO: 60507 - DNA, 20 bp, synthetic construct
  misc_feature 1..20: note = Description of Artificial Sequence: Synthetic oligonucleotide
  misc_feature 1..20: note = Target: SCN10A; (+) strand; PAM type: YTN; PAM sequence: CTG
  source 1..20: mol_type = other DNA
aagcgcaatcctactggggt

SEQ ID NO: 60508 - DNA, 20 bp, synthetic construct
  misc_feature 1..20: note = Description of Artificial Sequence: Synthetic oligonucleotide
  misc_feature 1..20: note = Target: SCN10A; (+) strand; PAM type: YTN; PAM sequence: CTA
  source 1..20: mol_type = other DNA
ctggggtcctctgagtaact

SEQ ID NO: 60509 - DNA, 20 bp, synthetic construct
  misc_feature 1..20: note = Description of Artificial Sequence: Synthetic oligonucleotide
  misc_feature 1..20: note = Target: SCN10A; (+) strand; PAM type: YTN; PAM sequence: CTG
  source 1..20: mol_type = other DNA
gggtcctctgagtaactgtg

SEQ ID NO: 60510 - DNA, 20 bp, synthetic construct
  misc_feature 1..20: note = Description of Artificial Sequence: Synthetic oligonucleotide
  misc_feature 1..20: note = Target: SCN10A; (+) strand; PAM type: YTN; PAM sequence: CTC
  source 1..20: mol_type = other DNA
tgagtaactgtgtagagcac

SEQ ID NO: 60511 - DNA, 20 bp, synthetic construct
  misc_feature 1..20: note = Description of Artificial Sequence: Synthetic oligonucleotide
  misc_feature 1..20: note = Target: SCN10A; (+) strand; PAM type: YTN; PAM sequence: CTG
  source 1..20: mol_type = other DNA
agtaactgtgtagagcacat

SEQ ID NO: 60512 - DNA, 20 bp, synthetic construct
  misc_feature 1..20: note = Description of Artificial Sequence: Synthetic oligonucleotide
  misc_feature 1..20: note = Target: SCN10A; (+) strand; PAM type: YTN; PAM sequence: CTG
  source 1..20: mol_type = other DNA
tgtagagcacatgcaggatt

SEQ ID NO: 60513 - DNA, 20 bp, synthetic construct
  misc_feature 1..20: note = Description of Artificial Sequence: Synthetic oligonucleotide
  misc_feature 1..20: note = Target: SCN10A; (+) strand; PAM type: YTN; PAM sequence: TTA
  source 1..20: mol_type = other DNA
tatcaccaagggacagggaa

SEQ ID NO: 60514 - DNA, 20 bp, synthetic construct
  misc_feature 1..20: note = Description of Artificial Sequence: Synthetic oligonucleotide
  misc_feature 1..20: note = Target: SCN10A; (+) strand; PAM type: YTN; PAM sequence: CTG
  source 1..20: mol_type = other DNA
gagtatttatcctcagactc

SEQ ID NO: 60515 - DNA, 20 bp, synthetic construct
  misc_feature 1..20: note = Description of Artificial Sequence: Synthetic oligonucleotide
  misc_feature 1..20: note = Target: SCN10A; (+) strand; PAM type: YTN; PAM sequence: TTT
  source 1..20: mol_type = other DNA
atcctcagactcccaaaact

SEQ ID NO: 60516 - DNA, 20 bp, synthetic construct
  misc_feature 1..20: note = Description of Artificial Sequence: Synthetic oligonucleotide
  misc_feature 1..20: note = Target: SCN10A; (+) strand; PAM type: YTN; PAM sequence: TTA
  source 1..20: mol_type = other DNA
tcctcagactcccaaaactt

SEQ ID NO: 60517 - DNA, 20 bp, synthetic construct
  misc_feature 1..20: note = Description of Artificial Sequence: Synthetic oligonucleotide
  misc_feature 1..20: note = Target: SCN10A; (+) strand; PAM type: YTN; PAM sequence: CTC
  source 1..20: mol_type = other DNA
agactcccaaaacttattgg

SEQ ID NO: 60518 - DNA, 20 bp, synthetic construct
  misc_feature 1..20: note = Description of Artificial Sequence: Synthetic oligonucleotide
  misc_feature 1..20: note = Target: SCN10A; (+) strand; PAM type: YTN; PAM sequence: CTC
  source 1..20: mol_type = other DNA
ccaaaacttattggtaaggg

SEQ ID NO: 60519 - DNA, 20 bp, synthetic construct
  misc_feature 1..20: note = Description of Artificial Sequence: Synthetic oligonucleotide
  misc_feature 1..20: note = Target: SCN10A; (+) strand; PAM type: YTN; PAM sequence: CTT
  source 1..20: mol_type = other DNA
attggtaagggttgccccta

SEQ ID NO: 60520 - DNA, 20 bp, synthetic construct
  misc_feature 1..20: note = Description of Artificial Sequence: Synthetic oligonucleotide
  misc_feature 1..20: note = Target: SCN10A; (+) strand; PAM type: YTN; PAM sequence: TTA
  source 1..20: mol_type = other DNA
ttggtaagggttgcccctag

SEQ ID NO: 60521 - DNA, 20 bp, synthetic construct
  misc_feature 1..20: note = Description of Artificial Sequence: Synthetic oligonucleotide
  misc_feature 1..20: note = Target: SCN10A; (+) strand; PAM type: YTN; PAM sequence: TTG
  source 1..20: mol_type = other DNA
gtaagggttgcccctaggga

SEQ ID NO: 60522 - DNA, 20 bp, synthetic construct
  misc_feature 1..20: note = Description of Artificial Sequence: Synthetic oligonucleotide
  misc_feature 1..20: note = Target: SCN10A; (+) strand; PAM type: YTN; PAM sequence: TTG
  source 1..20: mol_type = other DNA
cccctagggacattaaatcc

SEQ ID NO: 60523 - DNA, 20 bp, synthetic construct
  misc_feature 1..20: note = Description of Artificial Sequence: Synthetic oligonucleotide
  misc_feature 1..20: note = Target: SCN10A; (+) strand; PAM type: YTN; PAM sequence: CTA
  source 1..20: mol_type = other DNA
gggacattaaatccctggta

SEQ ID NO: 60524 - DNA, 20 bp, synthetic construct
  misc_feature 1..20: note = Description of Artificial Sequence: Synthetic oligonucleotide
  misc_feature 1..20: note = Target: SCN10A; (+) strand; PAM type: YTN; PAM sequence: TTA
  source 1..20: mol_type = other DNA
aatccctggtacttggggga

SEQ ID NO: 60525 - DNA, 20 bp, synthetic construct
  misc_feature 1..20: note = Description of Artificial Sequence: Synthetic oligonucleotide
  misc_feature 1..20: note = Target: SCN10A; (+) strand; PAM type: YTN; PAM sequence: CTG
  source 1..20: mol_type = other DNA
gtacttgggggagaagttgc

SEQ ID NO: 60526 - DNA, 20 bp, synthetic construct
  misc_feature 1..20: note = Description of Artificial Sequence: Synthetic oligonucleotide
  misc_feature 1..20: note = Target: SCN10A; (+) strand; PAM type: YTN; PAM sequence: CTT
  source 1..20: mol_type = other DNA
gggggagaagttgctgcaca

SEQ ID NO: 60527 - DNA, 20 bp, synthetic construct
  misc_feature 1..20: note = Description of Artificial Sequence: Synthetic oligonucleotide
  misc_feature 1..20: note = Target: SCN10A; (+) strand; PAM type: YTN; PAM sequence: TTG
  source 1..20: mol_type = other DNA
ggggagaagttgctgcacaa

SEQ ID NO: 60528 - DNA, 20 bp, synthetic construct
  misc_feature 1..20: note = Description of Artificial Sequence: Synthetic oligonucleotide
  misc_feature 1..20: note = Target: SCN10A; (+) strand; PAM type: YTN; PAM sequence: TTG
  source 1..20: mol_type = other DNA
ctgcacaagctcctaagccc

SEQ ID NO: 60529 - DNA, 20 bp, synthetic construct
  misc_feature 1..20: note = Description of Artificial Sequence: Synthetic oligonucleotide
  misc_feature 1..20: note = Target: SCN10A; (+) strand; PAM type: YTN; PAM sequence: CTG
  source 1..20: mol_type = other DNA
cacaagctcctaagccctgg

SEQ ID NO: 60530 - DNA, 20 bp, synthetic construct
  misc_feature 1..20: note = Description of Artificial Sequence: Synthetic oligonucleotide
  misc_feature 1..20: note = Target: SCN10A; (+) strand; PAM type: YTN; PAM sequence: CTC
  source 1..20: mol_type = other DNA
ctaagccctggagtctttat

SEQ ID NO: 60531 - DNA, 20 bp, synthetic construct
  misc_feature 1..20: note = Description of Artificial Sequence: Synthetic oligonucleotide
  misc_feature 1..20: note = Target: SCN10A; (+) strand; PAM type: YTN; PAM sequence: CTA
  source 1..20: mol_type = other DNA
agccctggagtctttataca

SEQ ID NO: 60532 - DNA, 20 bp, synthetic construct
  misc_feature 1..20: note = Description of Artificial Sequence: Synthetic oligonucleotide
  misc_feature 1..20: note = Target: SCN10A; (+) strand; PAM type: YTN; PAM sequence: CTG
  source 1..20: mol_type = other DNA
gagtctttatacagagaatc

SEQ ID NO: 60533 - DNA, 20 bp, synthetic construct
  misc_feature 1..20: note = Description of Artificial Sequence: Synthetic oligonucleotide
  misc_feature 1..20: note = Target: SCN10A; (+) strand; PAM type: YTN; PAM sequence: CTT
  source 1..20: mol_type = other DNA
tatacagagaatcagaagtg

SEQ ID NO: 60534 - DNA, 20 bp, synthetic construct
  misc_feature 1..20: note = Description of Artificial Sequence: Synthetic oligonucleotide
  misc_feature 1..20: note = Target: SCN10A; (+) strand; PAM type: YTN; PAM sequence: TTT
  source 1..20: mol_type = other DNA
atacagagaatcagaagtgc

SEQ ID NO: 60535 - DNA, 20 bp, synthetic construct
  misc_feature 1..20: note = Description of Artificial Sequence: Synthetic oligonucleotide
  misc_feature 1..20: note = Target: SCN10A; (+) strand; PAM type: YTN; PAM sequence: TTA
  source 1..20: mol_type = other DNA
tacagagaatcagaagtgca

SEQ ID NO: 60536 - DNA, 20 bp, synthetic construct
  misc_feature 1..20: note = Description of Artificial Sequence: Synthetic oligonucleotide
  misc_feature 1..20: note = Target: SCN10A; (+) strand; PAM type: YTN; PAM sequence: CTG
  source 1..20: mol_type = other DNA
caggtgaaatcagaagtggg

SEQ ID NO: 60537 - DNA, 20 bp, synthetic construct
  misc_feature 1..20: note = Description of Artificial Sequence: Synthetic oligonucleotide
  misc_feature 1..20: note = Target: SCN10A; (+) strand; PAM type: YTN; PAM sequence: CTA
  source 1..20: mol_type = other DNA
agggaagaggtggcagggaa

SEQ ID NO: 60538 - DNA, 20 bp, synthetic construct
  misc_feature 1..20: note = Description of Artificial Sequence: Synthetic oligonucleotide
  misc_feature 1..20: note = Target: SCN10A; (+) strand; PAM type: YTN; PAM sequence: TTG
  source 1..20: mol_type = other DNA
acagtgcctgccacagcagg

SEQ ID NO: 60539 - DNA, 20 bp, synthetic construct
  misc_feature 1..20: note = Description of Artificial Sequence: Synthetic oligonucleotide
  misc_feature 1..20: note = Target: SCN10A; (+) strand; PAM type: YTN; PAM sequence: CTG
  source 1..20: mol_type = other DNA
ccacagcaggaagtggtcat

SEQ ID NO: 60540 - DNA, 20 bp, synthetic construct
  misc_feature 1..20: note = Description of Artificial Sequence: Synthetic oligonucleotide
  misc_feature 1..20: note = Target: SCN10A; (+) strand; PAM type: YTN; PAM sequence: TTC
  source 1..20: mol_type = other DNA
cccaatagtgtctccccagc

SEQ ID NO: 60541 - DNA, 20 bp, synthetic construct
  misc_feature 1..20: note = Description of Artificial Sequence: Synthetic oligonucleotide
  misc_feature 1..20: note = Target: SCN10A; (+) strand; PAM type: YTN; PAM sequence: CTC
  source 1..20: mol_type = other DNA
cccagcctggctttttcttt

SEQ ID NO: 60542 - DNA, 20 bp, synthetic construct
  misc_feature 1..20: note = Description of Artificial Sequence: Synthetic oligonucleotide
  misc_feature 1..20: note = Target: SCN10A; (+) strand; PAM type: YTN; PAM sequence: CTG
  source 1..20: mol_type = other DNA
gctttttcttttcttttctt

SEQ ID NO: 60543 - DNA, 20 bp, synthetic construct
  misc_feature 1..20: note = Description of Artificial Sequence: Synthetic oligonucleotide
  misc_feature 1..20: note = Target: SCN10A; (+) strand; PAM type: YTN; PAM sequence: CTT
  source 1..20: mol_type = other DNA
tttcttttcttttctttttt

SEQ ID NO: 60544 - DNA, 20 bp, synthetic construct
  misc_feature 1..20: note = Description of Artificial Sequence: Synthetic oligonucleotide
  misc_feature 1..20: note = Target: SCN10A; (+) strand; PAM type: YTN; PAM sequence: TTT
  source 1..20: mol_type = other DNA
ttcttttcttttcttttttt

SEQ ID NO: 60545 - DNA, 20 bp, synthetic construct
  misc_feature 1..20: note = Description of Artificial Sequence: Synthetic oligonucleotide
  misc_feature 1..20: note = Target: SCN10A; (+) strand; PAM type: YTN; PAM sequence: TTT
  source 1..20: mol_type = other DNA
tcttttcttttctttttttt

SEQ ID NO: 60546 - DNA, 20 bp, synthetic construct
  misc_feature 1..20: note = Description of Artificial Sequence: Synthetic oligonucleotide
  misc_feature 1..20: note = Target: SCN10A; (+) strand; PAM type: YTN; PAM sequence: TTT
  source 1..20: mol_type = other DNA
cttttcttttcttttttttt

SEQ ID NO: 60547 - DNA, 20 bp, synthetic construct
  misc_feature 1..20: note = Description of Artificial Sequence: Synthetic oligonucleotide
  misc_feature 1..20: note = Target: SCN10A; (+) strand; PAM type: YTN; PAM sequence: TTC
  source 1..20: mol_type = other DNA
ttttcttttctttttttttg

SEQ ID NO: 60548 - DNA, 20 bp, synthetic construct
  misc_feature 1..20: note = Description of Artificial Sequence: Synthetic oligonucleotide
  misc_feature 1..20: note = Target: SCN10A; (+) strand; PAM type: YTN; PAM sequence: CTT
  source 1..20: mol_type = other DNA
ttcttttctttttttttgag

SEQ ID NO: 60549 - DNA, 20 bp, synthetic construct
  misc_feature 1..20: note = Description of Artificial Sequence: Synthetic oligonucleotide
  misc_feature 1..20: note = Target: SCN10A; (+) strand; PAM type: YTN; PAM sequence: TTT
  source 1..20: mol_type = other DNA
tcttttctttttttttgaga

SEQ ID NO: 60550 - DNA, 20 bp, synthetic construct
  misc_feature 1..20: note = Description of Artificial Sequence: Synthetic oligonucleotide
  misc_feature 1..20: note = Target: SCN10A; (+) strand; PAM type: YTN; PAM sequence: TTT
  source 1..20: mol_type = other DNA
cttttctttttttttgagat

SEQ ID NO: 60551 - DNA, 20 bp, synthetic construct
  misc_feature 1..20: note = Description of Artificial Sequence: Synthetic oligonucleotide
  misc_feature 1..20: note = Target: SCN10A; (+) strand; PAM type: YTN; PAM sequence: TTC
  source 1..20: mol_type = other DNA
ttttctttttttttgagatt

SEQ ID NO: 60552 - DNA, 20 bp, synthetic construct
  misc_feature 1..20: note = Description of Artificial Sequence: Synthetic oligonucleotide
  misc_feature 1..20: note = Target: SCN10A; (+) strand; PAM type: YTN; PAM sequence: CTT
  source 1..20: mol_type = other DNA
ttctttttttttgagattga

SEQ ID NO: 60553 - DNA, 20 bp, synthetic construct
  misc_feature 1..20: note = Description of Artificial Sequence: Synthetic oligonucleotide
  misc_feature 1..20: note = Target: SCN10A; (+) strand; PAM type: YTN; PAM sequence: TTT
  source 1..20: mol_type = other DNA
tctttttttttgagattgag

SEQ ID NO: 60554 - DNA, 20 bp, synthetic construct
  misc_feature 1..20: note = Description of Artificial Sequence: Synthetic oligonucleotide
  misc_feature 1..20: note = Target: SCN10A; (+) strand; PAM type: YTN; PAM sequence: TTT
  source 1..20: mol_type = other DNA
ctttttttttgagattgagt

SEQ ID NO: 60555 - DNA, 20 bp, synthetic construct
  misc_feature 1..20: note = Description of Artificial Sequence: Synthetic oligonucleotide
  misc_feature 1..20: note = Target: SCN10A; (+) strand; PAM type: YTN; PAM sequence: TTC
  source 1..20: mol_type = other DNA
tttttttttgagattgagtc

SEQ ID NO: 60556 - DNA, 20 bp, synthetic construct
  misc_feature 1..20: note = Description of Artificial Sequence: Synthetic oligonucleotide
  misc_feature 1..20: note = Target: SCN10A; (+) strand; PAM type: YTN; PAM sequence: CTT
  source 1..20: mol_type = other DNA
tttttttgagattgagtctc

SEQ ID NO: 60557 - DNA, 20 bp, synthetic construct
  misc_feature 1..20: note = Description of Artificial Sequence: Synthetic oligonucleotide
  misc_feature 1..20: note = Target: SCN10A; (+) strand; PAM type: YTN; PAM sequence: TTT
  source 1..20: mol_type = other DNA
ttttttgagattgagtctcg

SEQ ID NO: 60558 - DNA, 20 bp, synthetic construct
  misc_feature 1..20: note = Description of Artificial Sequence: Synthetic oligonucleotide
  misc_feature 1..20: note = Target: SCN10A; (+) strand; PAM type: YTN; PAM sequence: TTT
  source 1..20: mol_type = other DNA
tttttgagattgagtctcgc

SEQ ID NO: 60559 - DNA, 20 bp, synthetic construct
  misc_feature 1..20: note = Description of Artificial Sequence: Synthetic oligonucleotide
  misc_feature 1..20: note = Target: SCN10A; (+) strand; PAM type: YTN; PAM sequence: TTT
  source 1..20: mol_type = other DNA
ttttgagattgagtctcgct

SEQ ID NO: 60560 - DNA, 20 bp, synthetic construct
  misc_feature 1..20: note = Description of Artificial Sequence: Synthetic oligonucleotide
  misc_feature 1..20: note = Target: SCN10A; (+) strand; PAM type: YTN; PAM sequence: TTT
  source 1..20: mol_type = other DNA
tttgagattgagtctcgctg

SEQ ID NO: 60561 - DNA, 20 bp, synthetic construct
  misc_feature 1..20: note = Description of Artificial Sequence: Synthetic oligonucleotide
  misc_feature 1..20: note = Target: SCN10A; (+) strand; PAM type: YTN; PAM sequence: TTT
  source 1..20: mol_type = other DNA
ttgagattgagtctcgctgt

SEQ ID NO: 60562 - DNA, 20 bp, synthetic construct
  misc_feature 1..20: note = Description of Artificial Sequence: Synthetic oligonucleotide
  misc_feature 1..20: note = Target: SCN10A; (+) strand; PAM type: YTN; PAM sequence: TTT
  source 1..20: mol_type = other DNA
tgagattgagtctcgctgtc

SEQ ID NO: 60563 - DNA, 20 bp, synthetic construct
  misc_feature 1..20: note = Description of Artificial Sequence: Synthetic oligonucleotide
  misc_feature 1..20: note = Target: SCN10A; (+) strand; PAM type: YTN; PAM sequence: TTT
  source 1..20: mol_type = other DNA
gagattgagtctcgctgtct

SEQ ID NO: 60564 - DNA, 20 bp, synthetic construct
  misc_feature 1..20: note = Description of Artificial Sequence: Synthetic oligonucleotide
  misc_feature 1..20: note = Target: SCN10A; (+) strand; PAM type: YTN; PAM sequence: TTG
  source 1..20: mol_type = other DNA
agattgagtctcgctgtctc

SEQ ID NO: 60565 - DNA, 20 bp, synthetic construct
  misc_feature 1..20: note = Description of Artificial Sequence: Synthetic oligonucleotide
  misc_feature 1..20: note = Target: SCN10A; (+) strand; PAM type: YTN; PAM sequence: TTG
  source 1..20: mol_type = other DNA
agtctcgctgtctcgcccaa

SEQ ID NO: 60566 - DNA, 20 bp, synthetic construct
  misc_feature 1..20: note = Description of Artificial Sequence: Synthetic oligonucleotide
  misc_feature 1..20: note = Target: SCN10A; (+) strand; PAM type: YTN; PAM sequence: CTC
  source 1..20: mol_type = other DNA
gctgtctcgcccaagctgga

SEQ ID NO: 60567 - DNA, 20 bp, synthetic construct
  misc_feature 1..20: note = Description of Artificial Sequence: Synthetic oligonucleotide
  misc_feature 1..20: note = Target: SCN10A; (+) strand; PAM type: YTN; PAM sequence: CTG
  source 1..20: mol_type = other DNA
tctcgcccaagctggagtgc

SEQ ID NO: 60568 - DNA, 20 bp, synthetic construct
  misc_feature 1..20: note = Description of Artificial Sequence: Synthetic oligonucleotide
  misc_feature 1..20: note = Target: SCN10A; (+) strand; PAM type: YTN; PAM sequence: CTC
  source 1..20: mol_type = other DNA
gcccaagctggagtgcagtg

SEQ ID NO: 60569 - DNA, 20 bp, synthetic construct
  misc_feature 1..20: note = Description of Artificial Sequence: Synthetic oligonucleotide
  misc_feature 1..20: note = Target: SCN10A; (+) strand; PAM type: YTN; PAM sequence: CTG
  source 1..20: mol_type = other DNA
gagtgcagtgacgcaatctc

SEQ ID NO: 60570 - DNA, 20 bp, synthetic construct
  misc_feature 1..20: note = Description of Artificial Sequence: Synthetic oligonucleotide
  misc_feature 1..20: note = Target: SCN10A; (+) strand; PAM type: YTN; PAM sequence: CTC
  source 1..20: mol_type = other DNA
agctcactgcaacttctgcc

SEQ ID NO: 60571 - DNA, 20 bp, synthetic construct
  misc_feature 1..20: note = Description of Artificial Sequence: Synthetic oligonucleotide
  misc_feature 1..20: note = Target: SCN10A; (+) strand; PAM type: YTN; PAM sequence: CTC
  source 1..20: mol_type = other DNA
actgcaacttctgcctcccg

SEQ ID NO: 60572 - DNA, 20 bp, synthetic construct
  misc_feature 1..20: note = Description of Artificial Sequence: Synthetic oligonucleotide
  misc_feature 1..20: note = Target: SCN10A; (+) strand; PAM type: YTN; PAM sequence: CTG
  source 1..20: mol_type = other DNA
caacttctgcctcccgggtt

SEQ ID NO: 60573 - DNA, 20 bp, synthetic construct
  misc_feature 1..20: note = Description of Artificial Sequence: Synthetic oligonucleotide
  misc_feature 1..20: note = Target: SCN10A; (+) strand; PAM type: YTN; PAM sequence: CTT
  source 1..20: mol_type = other DNA
ctgcctcccgggttcaagag

SEQ ID NO: 60574 - DNA, 20 bp, synthetic construct
  misc_feature 1..20: note = Description of Artificial Sequence: Synthetic oligonucleotide
  misc_feature 1..20: note = Target: SCN10A; (+) strand; PAM type: YTN; PAM sequence: TTC
  source 1..20: mol_type = other DNA
tgcctcccgggttcaagaga

SEQ ID NO: 60575 - DNA, 20 bp, synthetic construct
  misc_feature 1..20: note = Description of Artificial Sequence: Synthetic oligonucleotide
  misc_feature 1..20: note = Target: SCN10A; (+) strand; PAM type: YTN; PAM sequence: CTG
  source 1..20: mol_type = other DNA
cctcccgggttcaagagatt

SEQ ID NO: 60576 - DNA, 20 bp, synthetic construct
  misc_feature 1..20: note = Description of Artificial Sequence: Synthetic oligonucleotide
  misc_feature 1..20: note = Target: SCN10A; (+) strand; PAM type: YTN; PAM sequence: CTC
  source 1..20: mol_type = other DNA
ccgggttcaagagattctcc

SEQ ID NO: 60577 - DNA, 20 bp, synthetic construct
  misc_feature 1..20: note = Description of Artificial Sequence: Synthetic oligonucleotide
  misc_feature 1..20: note = Target: SCN10A; (+) strand; PAM type: YTN; PAM sequence: TTC
  source 1..20: mol_type = other DNA
aagagattctcctgtctcag

SEQ ID NO: 60578 - DNA, 20 bp, synthetic construct
  misc_feature 1..20: note = Description of Artificial Sequence: Synthetic oligonucleotide
  misc_feature 1..20: note = Target: SCN10A; (+) strand; PAM type: YTN; PAM sequence: TTC
  source 1..20: mol_type = other DNA
tcctgtctcagtctcccgag

SEQ ID NO: 60579 - DNA, 20 bp, synthetic construct
  misc_feature 1..20: note = Description of Artificial Sequence: Synthetic oligonucleotide
  misc_feature 1..20: note = Target: SCN10A; (+) strand; PAM type: YTN; PAM sequence: CTC
  source 1..20: mol_type = other DNA
ctgtctcagtctcccgagca

SEQ ID NO: 60580 - DNA, 20 bp, synthetic construct
  misc_feature 1..20: note = Description of Artificial Sequence: Synthetic oligonucleotide
  misc_feature 1..20: note = Target: SCN10A; (+) strand; PAM type: YTN; PAM sequence: CTG
  source 1..20: mol_type = other DNA
tctcagtctcccgagcagct

SEQ ID NO: 60581 - DNA, 20 bp, synthetic construct
  misc_feature 1..20: note = Description of Artificial Sequence: Synthetic oligonucleotide
  misc_feature 1..20: note = Target: SCN10A; (+) strand; PAM type: YTN; PAM sequence: CTC
  source 1..20: mol_type = other DNA
agtctcccgagcagctggga

SEQ ID NO: 60582 - DNA, 20 bp, synthetic construct
  misc_feature 1..20: note = Description of Artificial Sequence: Synthetic oligonucleotide
  misc_feature 1..20: note = Target: SCN10A; (+) strand; PAM type: YTN; PAM sequence: CTC
  source 1..20: mol_type = other DNA
ccgagcagctgggactacag

SEQ ID NO: 60583 - DNA, 20 bp, synthetic construct
  misc_feature 1..20: note = Description of Artificial Sequence: Synthetic oligonucleotide
  misc_feature 1..20: note = Target: SCN10A; (+) strand; PAM type: YTN; PAM sequence: CTG
  source 1..20: mol_type = other DNA
ggactacaggcacaagccgc

SEQ ID NO: 60584 - DNA, 20 bp, synthetic construct
  misc_feature 1..20: note = Description of Artificial Sequence: Synthetic oligonucleotide
  misc_feature 1..20: note = Target: SCN10A; (+) strand; PAM type: YTN; PAM sequence: CTA
  source 1..20: mol_type = other DNA
caggcacaagccgccatgcc

SEQ ID NO: 60585 - DNA, 20 bp, synthetic construct
  misc_feature 1..20: note = Description of Artificial Sequence: Synthetic oligonucleotide
  misc_feature 1..20: note = Target: SCN10A; (+) strand; PAM type: YTN; PAM sequence: CTG
  source 1..20: mol_type = other DNA
ctaatttctttcatatttta

SEQ ID NO: 60586 - DNA, 20 bp, synthetic construct
  misc_feature 1..20: note = Description of Artificial Sequence: Synthetic oligonucleotide
  misc_feature 1..20: note = Target: SCN10A; (+) strand; PAM type: YTN; PAM sequence: CTA
  source 1..20: mol_type = other DNA
atttctttcatattttagta

SEQ ID NO: 60587 - DNA, 20 bp, synthetic construct
  misc_feature 1..20: note = Description of Artificial Sequence: Synthetic oligonucleotide
  misc_feature 1..20: note = Target: SCN10A; (+) strand; PAM type: YTN; PAM sequence: TTT
  source 1..20: mol_type = other DNA
ctttcatattttagtagaga

SEQ ID NO: 60588 - DNA, 20 bp, synthetic construct
  misc_feature 1..20: note = Description of Artificial Sequence: Synthetic oligonucleotide
  misc_feature 1..20: note = Target: SCN10A; (+) strand; PAM type: YTN; PAM sequence: TTC
  source 1..20: mol_type = other DNA
tttcatattttagtagagat

SEQ ID NO: 60589 - DNA, 20 bp, synthetic construct
  misc_feature 1..20: note = Description of Artificial Sequence: Synthetic oligonucleotide
  misc_feature 1..20: note = Target: SCN10A; (+) strand; PAM type: YTN; PAM sequence: CTT
  source 1..20: mol_type = other DNA
tcatattttagtagagatgg

SEQ ID NO: 60590 - DNA, 20 bp, synthetic construct
  misc_feature 1..20: note = Description of Artificial Sequence: Synthetic oligonucleotide
  misc_feature 1..20: note = Target: SCN10A; (+) strand; PAM type: YTN; PAM sequence: TTT
  source 1..20: mol_type = other DNA
catattttagtagagatggg

SEQ ID NO: 60591 - DNA, 20 bp, synthetic construct
  misc_feature 1..20: note = Description of Artificial Sequence: Synthetic oligonucleotide
  misc_feature 1..20: note = Target: SCN10A; (+) strand; PAM type: YTN; PAM sequence: TTC
  source 1..20: mol_type = other DNA
atattttagtagagatgggg

SEQ ID NO: 60592 - DNA, 20 bp, synthetic construct
  misc_feature 1..20: note = Description of Artificial Sequence: Synthetic oligonucleotide
  misc_feature 1..20: note = Target: SCN10A; (+) strand; PAM type: YTN; PAM sequence: TTT
  source 1..20: mol_type = other DNA
tagtagagatggggtttcac

SEQ ID NO: 60593 - DNA, 20 bp, synthetic construct
  misc_feature 1..20: note = Description of Artificial Sequence: Synthetic oligonucleotide
  misc_feature 1..20: note = Target: SCN10A; (+) strand; PAM type: YTN; PAM sequence: TTT
  source 1..20: mol_type = other DNA
agtagagatggggtttcacc

SEQ ID NO: 60594 - DNA, 20 bp, synthetic construct
  misc_feature 1..20: note = Description of Artificial Sequence: Synthetic oligonucleotide
  misc_feature 1..20: note = Target: SCN10A; (+) strand; PAM type: YTN; PAM sequence: TTA
  source 1..20: mol_type = other DNA
gtagagatggggtttcaccg

SEQ ID NO: 60595 - DNA, 20 bp, synthetic construct
  misc_feature 1..20: note = Description of Artificial Sequence: Synthetic oligonucleotide
  misc_feature 1..20: note = Target: SCN10A; (+) strand; PAM type: YTN; PAM sequence: TTT
  source 1..20: mol_type = other DNA
caccgtattgcccaggctgg

SEQ ID NO: 60596 - DNA, 20 bp, synthetic construct
  misc_feature 1..20: note = Description of Artificial Sequence: Synthetic oligonucleotide
  misc_feature 1..20: note = Target: SCN10A; (+) strand; PAM type: YTN; PAM sequence: TTC
  source 1..20: mol_type = other DNA
accgtattgcccaggctggt

SEQ ID NO: 60597 - DNA, 20 bp, synthetic construct
  misc_feature 1..20: note = Description of Artificial Sequence: Synthetic oligonucleotide
  misc_feature 1..20: note = Target: SCN10A; (+) strand; PAM type: YTN; PAM sequence: TTG
  source 1..20: mol_type = other DNA
cccaggctggtctcctgagc

SEQ ID NO: 60598 - DNA, 20 bp, synthetic construct
  misc_feature 1..20: note = Description of Artificial Sequence: Synthetic oligonucleotide
  misc_feature 1..20: note = Target: SCN10A; (+) strand; PAM type: YTN; PAM sequence: CTG
  source 1..20: mol_type = other DNA
gtctcctgagctcaggcaat

SEQ ID NO: 60599 - DNA, 20 bp, synthetic construct
  misc_feature 1..20: note = Description of Artificial Sequence: Synthetic oligonucleotide
  misc_feature 1..20: note = Target: SCN10A; (+) strand; PAM type: YTN; PAM sequence: CTC
  source 1..20: mol_type = other DNA
ctgagctcaggcaatctgcc

SEQ ID NO: 60600 - DNA, 20 bp, synthetic construct
  misc_feature 1..20: note = Description of Artificial Sequence: Synthetic oligonucleotide
  misc_feature 1..20: note = Target: SCN10A; (+) strand; PAM type: YTN; PAM sequence: CTG
  source 1..20: mol_type = other DNA
agctcaggcaatctgcccac

SEQ ID NO: 60601 - DNA, 20 bp, synthetic construct
  misc_feature 1..20: note = Description of Artificial Sequence: Synthetic oligonucleotide
  misc_feature 1..20: note = Target: SCN10A; (+) strand; PAM type: YTN; PAM sequence: CTC
  source 1..20: mol_type = other DNA
aggcaatctgcccacctcgg

SEQ ID NO: 60602 - DNA, 20 bp, synthetic construct
  misc_feature 1..20: note = Description of Artificial Sequence: Synthetic oligonucleotide
  misc_feature 1..20: note = Target: SCN10A; (+) strand; PAM type: YTN; PAM sequence: CTG
  source 1..20: mol_type = other DNA
cccacctcggcctcccaaag

SEQ ID NO: 60603 - DNA, 20 bp, synthetic construct
  misc_feature 1..20: note = Description of Artificial Sequence: Synthetic oligonucleotide
  misc_feature 1..20: note = Target: SCN10A; (+) strand; PAM type: YTN; PAM sequence: CTC
  source 1..20: mol_type = other DNA
ggcctcccaaagtgctagga

SEQ ID NO: 60604 - DNA, 20 bp, synthetic construct
  misc_feature 1..20: note = Description of Artificial Sequence: Synthetic oligonucleotide
  misc_feature 1..20: note = Target: SCN10A; (+) strand; PAM type: YTN; PAM sequence: CTC
  source 1..20: mol_type = other DNA
ccaaagtgctaggattacag

SEQ ID NO: 60605 - DNA, 20 bp, synthetic construct
  misc_feature 1..20: note = Description of Artificial Sequence: Synthetic oligonucleotide
  misc_feature 1..20: note = Target: SCN10A; (+) strand; PAM type: YTN; PAM sequence: CTA
  source 1..20: mol_type = other DNA
ggattacaggcatgaaccac

SEQ ID NO: 60606 - DNA, 20 bp, synthetic construct
  misc_feature 1..20: note = Description of Artificial Sequence: Synthetic oligonucleotide
  misc_feature 1..20: note = Target: SCN10A; (+) strand; PAM type: YTN; PAM sequence: TTA
  source 1..20: mol_type = other DNA
caggcatgaaccactgcgcc

SEQ ID NO: 60607 - DNA, 20 bp, synthetic construct
  misc_feature 1..20: note = Description of Artificial Sequence: Synthetic oligonucleotide
  misc_feature 1..20: note = Target: SCN10A; (+) strand; PAM type: YTN; PAM sequence: CTG
  source 1..20: mol_type = other DNA
cgcctggcccatcctgggtt

SEQ ID NO: 60608 - DNA, 20 bp, synthetic construct
  misc_feature 1..20: note = Description of Artificial Sequence: Synthetic oligonucleotide
  misc_feature 1..20: note = Target: SCN10A; (+) strand; PAM type: YTN; PAM sequence: CTG
  source 1..20: mol_type = other DNA
gcccatcctgggttttatga

SEQ ID NO: 60609 - DNA, 20 bp, synthetic construct
  misc_feature 1..20: note = Description of Artificial Sequence: Synthetic oligonucleotide
  misc_feature 1..20: note = Target: SCN10A; (+) strand; PAM type: YTN; PAM sequence: CTG
  source 1..20: mol_type = other DNA
ggttttatgatagttcctga

SEQ ID NO: 60610 - DNA, 20 bp, synthetic construct
  misc_feature 1..20: note = Description of Artificial Sequence: Synthetic oligonucleotide
  misc_feature 1..20: note = Target: SCN10A; (+) strand; PAM type: YTN; PAM sequence: TTT
  source 1..20: mol_type = other DNA
tatgatagttcctgagattc

SEQ ID NO: 60611 - DNA, 20 bp, synthetic construct
  misc_feature 1..20: note = Description of Artificial Sequence: Synthetic oligonucleotide
  misc_feature 1..20: note = Target: SCN10A; (+) strand; PAM type: YTN; PAM sequence: TTT
  source 1..20: mol_type = other DNA
atgatagttcctgagattct

SEQ ID NO: 60612 - DNA, 20 bp, synthetic construct
  misc_feature 1..20: note = Description of Artificial Sequence: Synthetic oligonucleotide
  misc_feature 1..20: note = Target: SCN10A; (+) strand; PAM type: YTN; PAM sequence: TTA
  source 1..20: mol_type = other DNA
tgatagttcctgagattcta

SEQ ID NO: 60613 - DNA, 20 bp, synthetic construct
  misc_feature 1..20: note = Description of Artificial Sequence: Synthetic oligonucleotide
  misc_feature 1..20: note = Target: SCN10A; (+) strand; PAM type: YTN; PAM sequence: TTC
  source 1..20: mol_type = other DNA
ctgagattctacctcattcc

SEQ ID NO: 60614 - DNA, 20 bp, synthetic construct
  misc_feature 1..20: note = Description of Artificial Sequence: Synthetic oligonucleotide
  misc_feature 1..20: note = Target: SCN10A; (+) strand; PAM type: YTN; PAM sequence: CTG
  source 1..20: mol_type = other DNA
agattctacctcattcctcc

SEQ ID NO: 60615 - DNA, 20 bp, synthetic construct
  misc_feature 1..20: note = Description of Artificial Sequence: Synthetic oligonucleotide
  misc_feature 1..20: note = Target: SCN10A; (+) strand; PAM type: YTN; PAM sequence: TTC
  source 1..20: mol_type = other DNA
tacctcattcctccctatgc

SEQ ID NO: 60616 - DNA, 20 bp, synthetic construct
  misc_feature 1..20: note = Description of Artificial Sequence: Synthetic oligonucleotide
  misc_feature 1..20: note = Target: SCN10A; (+) strand; PAM type: YTN; PAM sequence: CTA
  source 1..20: mol_type = other DNA
cctcattcctccctatgcac

SEQ ID NO: 60617 - DNA, 20 bp, synthetic construct
  misc_feature 1..20: note = Description of Artificial Sequence: Synthetic oligonucleotide
  misc_feature 1..20: note = Target: SCN10A; (+) strand; PAM type: YTN; PAM sequence: CTC
  source 1..20: mol_type = other DNA
attcctccctatgcaccttg

SEQ ID NO: 60618 - DNA, 20 bp, synthetic construct
  misc_feature 1..20: note = Description of Artificial Sequence: Synthetic oligonucleotide
  misc_feature 1..20: note = Target: SCN10A; (+) strand; PAM type: YTN; PAM sequence: TTC
  source 1..20: mol_type = other DNA
ctccctatgcaccttgattt

SEQ ID NO: 60619 - DNA, 20 bp, synthetic construct
  misc_feature 1..20: note = Description of Artificial Sequence: Synthetic oligonucleotide
  misc_feature 1..20: note = Target: SCN10A; (+) strand; PAM type: YTN; PAM sequence: CTC
  source 1..20: mol_type = other DNA
cctatgcaccttgatttagc

SEQ ID NO: 60620 - DNA, 20 bp, synthetic construct
  misc_feature 1..20: note = Description of Artificial Sequence: Synthetic oligonucleotide
  misc_feature 1..20: note = Target: SCN10A; (+) strand; PAM type: YTN; PAM sequence: CTA
  source 1..20: mol_type = other DNA
tgcaccttgatttagctact

SEQ ID NO: 60621 - DNA, 20 bp, synthetic construct
  misc_feature 1..20: note = Description of Artificial Sequence: Synthetic oligonucleotide
  misc_feature 1..20: note = Target: SCN10A; (+) strand; PAM type: YTN; PAM sequence: CTT
  source 1..20: mol_type = other DNA
gatttagctactacccttgc

SEQ ID NO: 60622 - DNA, 20 bp, synthetic construct
  misc_feature 1..20: note = Description of Artificial Sequence: Synthetic oligonucleotide
  misc_feature 1..20: note = Target: SCN10A; (+) strand; PAM type: YTN; PAM sequence: TTG
  source 1..20: mol_type = other DNA
atttagctactacccttgct

SEQ ID NO: 60623 - DNA, 20 bp, synthetic construct
  misc_feature 1..20: note = Description of Artificial Sequence: Synthetic oligonucleotide
  misc_feature 1..20: note = Target: SCN10A; (+) strand; PAM type: YTN; PAM sequence: TTT
  source 1..20: mol_type = other DNA
agctactacccttgctttgc

SEQ ID NO: 60624 - DNA, 20 bp, synthetic construct
  misc_feature 1..20: note = Description of Artificial Sequence: Synthetic oligonucleotide
  misc_feature 1..20: note = Target: SCN10A; (+) strand; PAM type: YTN; PAM sequence: TTA
  source 1..20: mol_type = other DNA
gctactacccttgctttgct

SEQ ID NO: 60625 - DNA, 20 bp, synthetic construct
  misc_feature 1..20: note = Description of Artificial Sequence: Synthetic oligonucleotide
  misc_feature 1..20: note = Target: SCN10A; (+) strand; PAM type: YTN; PAM sequence: CTA
  source 1..20: mol_type = other DNA
ctacccttgctttgctccca

SEQ ID NO: 60626 - DNA, 20 bp, synthetic construct
  misc_feature 1..20: note = Description of Artificial Sequence: Synthetic oligonucleotide
  misc_feature 1..20: note = Target: SCN10A; (+) strand; PAM type: YTN; PAM sequence: CTA
  source 1..20: mol_type = other DNA
cccttgctttgctcccaccc

SEQ ID NO: 60627 - DNA, 20 bp, synthetic construct
  misc_feature 1..20: note = Description of Artificial Sequence: Synthetic oligonucleotide
  misc_feature 1..20: note = Target: SCN10A; (+) strand; PAM type: YTN; PAM sequence: CTT
  source 1..20: mol_type = other DNA
gctttgctcccacccttgtc

SEQ ID NO: 60628 - DNA, 20 bp, synthetic construct
  misc_feature 1..20: note = Description of Artificial Sequence: Synthetic oligonucleotide
  misc_feature 1..20: note = Target: SCN10A; (+) strand; PAM type: YTN; PAM sequence: TTG
  source 1..20: mol_type = other DNA
ctttgctcccacccttgtcc

SEQ ID NO: 60629 - DNA, 20 bp, synthetic construct
  misc_feature 1..20: note = Description of Artificial Sequence: Synthetic oligonucleotide
  misc_feature 1..20: note = Target: SCN10A; (+) strand; PAM type: YTN; PAM sequence: CTT
  source 1..20: mol_type = other DNA
tgctcccacccttgtccagg

SEQ ID NO: 60630 - DNA, 20 bp, synthetic construct
  misc_feature 1..20: note = Description of Artificial Sequence: Synthetic oligonucleotide
  misc_feature 1..20: note = Target: SCN10A; (+) strand; PAM type: YTN; PAM sequence: TTT
  source 1..20: mol_type = other DNA
gctcccacccttgtccaggg

SEQ ID NO: 60631 - DNA, 20 bp, synthetic construct
  misc_feature 1..20: note = Description of Artificial Sequence: Synthetic oligonucleotide
  misc_feature 1..20: note = Target: SCN10A; (+) strand; PAM type: YTN; PAM sequence: TTG
  source 1..20: mol_type = other DNA
ctcccacccttgtccaggga

SEQ ID NO: 60632 - DNA, 20 bp, synthetic construct
  misc_feature 1..20: note = Description of Artificial Sequence: Synthetic oligonucleotide
  misc_feature 1..20: note = Target: SCN10A; (+) strand; PAM type: YTN; PAM sequence: CTC
  source 1..20: mol_type = other DNA
ccacccttgtccagggagtg

SEQ ID NO: 60633 - DNA, 20 bp, synthetic construct
  misc_feature 1..20: note = Description of Artificial Sequence: Synthetic oligonucleotide
  misc_feature 1..20: note = Target: SCN10A; (+) strand; PAM type: YTN; PAM sequence: CTT
  source 1..20: mol_type = other DNA
gtccagggagtggctcacat

SEQ ID NO: 60634 - DNA, 20 bp, synthetic construct
  misc_feature 1..20: note = Description of Artificial Sequence: Synthetic oligonucleotide
  misc_feature 1..20: note = Target: SCN10A; (+) strand; PAM type: YTN; PAM sequence: TTG
  source 1..20: mol_type = other DNA
tccagggagtggctcacatg

SEQ ID NO: 60635 - DNA, 20 bp, synthetic construct
  misc_feature 1..20: note = Description of Artificial Sequence: Synthetic oligonucleotide
  misc_feature 1..20: note = Target: SCN10A; (+) strand; PAM type: YTN; PAM sequence: CTC
  source 1..20: mol_type = other DNA
acatgaactgtctcttagag

SEQ ID NO: 60636 - DNA, 20 bp, synthetic construct
  misc_feature 1..20: note = Description of Artificial Sequence: Synthetic oligonucleotide
  misc_feature 1..20: note = Target: SCN10A; (+) strand; PAM type: YTN; PAM sequence: CTG
  source 1..20: mol_type = other DNA
tctcttagaggttatctgat

SEQ ID NO: 60637 - DNA, 20 bp, synthetic construct
  misc_feature 1..20: note = Description of Artificial Sequence: Synthetic oligonucleotide
  misc_feature 1..20: note = Target: SCN10A; (+) strand; PAM type: YTN; PAM sequence: CTC
  source 1..20: mol_type = other DNA
ttagaggttatctgatgctt

SEQ ID NO: 60638 - DNA, 20 bp, synthetic construct
  misc_feature 1..20: note = Description of Artificial Sequence: Synthetic oligonucleotide
  misc_feature 1..20: note = Target: SCN10A; (+) strand; PAM type: YTN; PAM sequence: CTT
  source 1..20: mol_type = other DNA
agaggttatctgatgctttc

SEQ ID NO: 60639 - DNA, 20 bp, synthetic construct
  misc_feature 1..20: note = Description of Artificial Sequence: Synthetic oligonucleotide
  misc_feature 1..20: note = Target: SCN10A; (+) strand; PAM type: YTN; PAM sequence: TTA
  source 1..20: mol_type = other DNA
gaggttatctgatgctttcc

SEQ ID NO: 60640 - DNA, 20 bp, synthetic construct
  misc_feature 1..20: note = Description of Artificial Sequence: Synthetic oligonucleotide
  misc_feature 1..20: note = Target: SCN10A; (+) strand; PAM type: YTN; PAM sequence: TTA
  source 1..20: mol_type = other DNA
tctgatgctttcctcaacag

SEQ ID NO: 60641 - DNA, 20 bp, synthetic construct
  misc_feature 1..20: note = Description of Artificial Sequence: Synthetic oligonucleotide
  misc_feature 1..20: note = Target: SCN10A; (+) strand; PAM type: YTN; PAM sequence: CTG
  source 1..20: mol_type = other DNA
atgctttcctcaacagtgaa

SEQ ID NO: 60642 - DNA, 20 bp, synthetic construct
  misc_feature 1..20: note = Description of Artificial Sequence: Synthetic oligonucleotide
  misc_feature 1..20: note = Target: SCN10A; (+) strand; PAM type: YTN; PAM sequence: CTT
  source 1..20: mol_type = other DNA
tcctcaacagtgaacagagg

SEQ ID NO: 60643 - DNA, 20 bp, synthetic construct
  misc_feature 1..20: note = Description of Artificial Sequence: Synthetic oligonucleotide
  misc_feature 1..20: note = Target: SCN10A; (+) strand; PAM type: YTN; PAM sequence: TTT
  source 1..20: mol_type = other DNA
cctcaacagtgaacagagga

SEQ ID NO: 60644 - DNA, 20 bp, synthetic construct
  misc_feature 1..20: note = Description of Artificial Sequence: Synthetic oligonucleotide
  misc_feature 1..20: note = Target: SCN10A; (+) strand; PAM type: YTN; PAM sequence: TTC
  source 1..20: mol_type = other DNA
ctcaacagtgaacagaggaa

SEQ ID NO: 60645 - DNA, 20 bp, synthetic construct
  misc_feature 1..20: note = Description of Artificial Sequence: Synthetic oligonucleotide
  misc_feature 1..20: note = Target: SCN10A; (+) strand; PAM type: YTN; PAM sequence: CTC
  source 1..20: mol_type = other DNA
aacagtgaacagaggaaaac

SEQ ID NO: 60646 - DNA, 20 bp, synthetic construct
  misc_feature 1..20: note = Description of Artificial Sequence: Synthetic oligonucleotide
  misc_feature 1..20: note = Target: SCN10A; (+) strand; PAM type: YTN; PAM sequence: CTC
  source 1..20: mol_type = other DNA
gagaagcctggggagtgtag

SEQ ID NO: 60647 - DNA, 20 bp, synthetic construct
  misc_feature 1..20: note = Description of Artificial Sequence: Synthetic oligonucleotide
  misc_feature 1..20: note = Target: SCN10A; (+) strand; PAM type: YTN; PAM sequence: CTG
  source 1..20: mol_type = other DNA
gggagtgtagatgaaagggg

SEQ ID NO: 60648 - DNA, 20 bp, synthetic construct
  misc_feature 1..20: note = Description of Artificial Sequence: Synthetic oligonucleotide
  misc_feature 1..20: note = Target: SCN10A; (+) strand; PAM type: YTN; PAM sequence: CTC
  source 1..20: mol_type = other DNA
ggtggctgaaacactcaaca

SEQ ID NO: 60649 - DNA, 20 bp, synthetic construct
  misc_feature 1..20: note = Description of Artificial Sequence: Synthetic oligonucleotide
  misc_feature 1..20: note = Target: SCN10A; (+) strand; PAM type: YTN; PAM sequence: CTG
  source 1..20: mol_type = other DNA
aaacactcaacagagagcca

SEQ ID NO: 60650 - DNA, 20 bp, synthetic construct
  misc_feature 1..20: note = Description of Artificial Sequence: Synthetic oligonucleotide
  misc_feature 1..20: note = Target: SCN10A; (+) strand; PAM type: YTN; PAM sequence: CTC
  source 1..20: mol_type = other DNA
aacagagagccagctggaca

SEQ ID NO: 60651 - DNA, 20 bp, synthetic construct
  misc_feature 1..20: note = Description of Artificial Sequence: Synthetic oligonucleotide
  misc_feature 1..20: note = Target: SCN10A; (+) strand; PAM type: YTN; PAM sequence: CTG
  source 1..20: mol_type = other DNA
gacactgctgcaaggaggga

SEQ ID NO: 60652 - DNA, 20 bp, synthetic construct
  misc_feature 1..20: note = Description of Artificial Sequence: Synthetic oligonucleotide
  misc_feature 1..20: note = Target: SCN10A; (+) strand; PAM type: YTN; PAM sequence: CTG
  source 1..20: mol_type = other DNA
ctgcaaggagggacagtgtg

SEQ ID NO: 60653 - DNA, 20 bp, synthetic construct
  misc_feature 1..20: note = Description of Artificial Sequence: Synthetic oligonucleotide
  misc_feature 1..20: note = Target: SCN10A; (+) strand; PAM type: YTN; PAM sequence: CTG
  source 1..20: mol_type = other DNA
caaggagggacagtgtgagg

SEQ ID NO: 60654 - DNA, 20 bp, synthetic construct
  misc_feature 1..20: note = Description of Artificial Sequence: Synthetic oligonucleotide
  misc_feature 1..20: note = Target: SCN10A; (+) strand; PAM type: YTN; PAM sequence: TTG
  source 1..20: mol_type = other DNA
ctgggtgatcgcctcttcca

SEQ ID NO: 60655 - DNA, 20 bp, synthetic construct
  misc_feature 1..20: note = Description of Artificial Sequence: Synthetic oligonucleotide
  misc_feature 1..20: note = Target: SCN10A; (+) strand; PAM type: YTN; PAM sequence: CTG
  source 1..20: mol_type = other DNA
ggtgatcgcctcttccagta

SEQ ID NO: 60656 - DNA, 20 bp, synthetic construct
  misc_feature 1..20: note = Description of Artificial Sequence: Synthetic oligonucleotide
  misc_feature 1..20: note = Target: SCN10A; (+) strand; PAM type: YTN; PAM sequence: CTC
  source 1..20: mol_type = other DNA
ttccagtaccagggtcatcg

SEQ ID NO: 60657 - DNA, 20 bp, synthetic construct
  misc_feature 1..20: note = Description of Artificial Sequence: Synthetic oligonucleotide
  misc_feature 1..20: note = Target: SCN10A; (+) strand; PAM type: YTN; PAM sequence: CTT
  source 1..20: mol_type = other DNA
ccagtaccagggtcatcgtc

SEQ ID NO: 60658 - DNA, 20 bp, synthetic construct
  misc_feature 1..20: note = Description of Artificial Sequence: Synthetic oligonucleotide
  misc_feature 1..20: note = Target: SCN10A; (+) strand; PAM type: YTN; PAM sequence: TTC
  source 1..20: mol_type = other DNA
cagtaccagggtcatcgtca

SEQ ID NO: 60659 - DNA, 20 bp, synthetic construct
  misc_feature 1..20: note = Description of Artificial Sequence: Synthetic oligonucleotide
  misc_feature 1..20: note = Target: SCN10A; (+) strand; PAM type: YTN; PAM sequence: CTT
  source 1..20: mol_type = other DNA
catttcaaatgcagactgat

SEQ ID NO: 60660 - DNA, 20 bp, synthetic construct
  misc_feature 1..20: note = Description of Artificial Sequence: Synthetic oligonucleotide
  misc_feature 1..20: note = Target: SCN10A; (+) strand; PAM type: YTN; PAM sequence: TTC
  source 1..20: mol_type = other DNA
atttcaaatgcagactgata

SEQ ID NO: 60661 - DNA, 20 bp, synthetic construct
  misc_feature 1..20: note = Description of Artificial Sequence: Synthetic oligonucleotide
  misc_feature 1..20: note = Target: SCN10A; (+) strand; PAM type: YTN; PAM sequence: TTT
  source 1..20: mol_type = other DNA
caaatgcagactgatatggg

SEQ ID NO: 60662 - DNA, 20 bp, synthetic construct
  misc_feature 1..20: note = Description of Artificial Sequence: Synthetic oligonucleotide
  misc_feature 1..20: note = Target: SCN10A; (+) strand; PAM type: YTN; PAM sequence: TTC
  source 1..20: mol_type = other DNA
aaatgcagactgatatgggt

SEQ ID NO: 60663 - DNA, 20 bp, synthetic construct
  misc_feature 1..20: note = Description of Artificial Sequence: Synthetic oligonucleotide
  misc_feature 1..20: note = Target: SCN10A; (+) strand; PAM type: YTN; PAM sequence: CTG
  source 1..20: mol_type = other DNA
atatgggtagaatgcacaga

SEQ ID NO: 60664 - DNA, 20 bp, synthetic construct
  misc_feature 1..20: note = Description of Artificial Sequence: Synthetic oligonucleotide
  misc_feature 1..20: note = Target: SCN10A; (+) strand; PAM type: YTN; PAM sequence: CTG
  source 1..20: mol_type = other DNA
tagggacagtgggctgagac

SEQ ID NO: 60665 - DNA, 20 bp, synthetic construct
  misc_feature 1..20: note = Description of Artificial Sequence: Synthetic oligonucleotide
  misc_feature 1..20: note = Target: SCN10A; (+) strand; PAM type: YTN; PAM sequence: CTG
  source 1..20: mol_type = other DNA
agactcacctcccgggaatc

SEQ ID NO: 60666 - DNA, 20 bp, synthetic construct
  misc_feature 1..20: note = Description of Artificial Sequence: Synthetic oligonucleotide
  misc_feature 1..20: note = Target: SCN10A; (+) strand; PAM type: YTN; PAM sequence: CTC
  source 1..20: mol_type = other DNA
acctcccgggaatcaacagc

SEQ ID NO: 60667 - DNA, 20 bp, synthetic construct
  misc_feature 1..20: note = Description of Artificial Sequence: Synthetic oligonucleotide
  misc_feature 1..20: note = Target: SCN10A; (+) strand; PAM type: YTN; PAM sequence: CTC
  source 1..20: mol_type = other DNA
ccgggaatcaacagctgcat

SEQ ID NO: 60668 - DNA, 20 bp, synthetic construct
  misc_feature 1..20: note = Description of Artificial Sequence: Synthetic oligonucleotide
  misc_feature 1..20: note = Target: SCN10A; (+) strand; PAM type: YTN; PAM sequence: CTG
  source 1..20: mol_type = other DNA
catacataatgtccatccag

SEQ ID NO: 60669 - DNA, 20 bp, synthetic construct
  misc_feature 1..20: note = Description of Artificial Sequence: Synthetic oligonucleotide
  misc_feature 1..20: note = Target: SCN10A; (+) strand; PAM type: YTN; PAM sequence: CTT
  source 1..20: mol_type = other DNA
taaaggttgcctggagacaa

SEQ ID NO: 60670 - DNA, 20 bp, synthetic construct
  misc_feature 1..20: note = Description of Artificial Sequence: Synthetic oligonucleotide
  misc_feature 1..20: note = Target: SCN10A; (+) strand; PAM type: YTN; PAM sequence: TTT
  source 1..20: mol_type = other DNA
aaaggttgcctggagacaag

SEQ ID NO: 60671 - DNA, 20 bp, synthetic construct
  misc_feature 1..20: note = Description of Artificial Sequence: Synthetic oligonucleotide
  misc_feature 1..20: note = Target: SCN10A; (+) strand; PAM type: YTN; PAM sequence: TTA
  source 1..20: mol_type = other DNA
aaggttgcctggagacaagg

SEQ ID NO: 60672 - DNA, 20 bp, synthetic construct
  misc_feature 1..20: note = Description of Artificial Sequence: Synthetic oligonucleotide
  misc_feature 1..20: note = Target: SCN10A; (+) strand; PAM type: YTN; PAM sequence: TTG
  source 1..20: mol_type = other DNA
cctggagacaaggagcagag

SEQ ID NO: 60673 - DNA, 20 bp, synthetic construct
  misc_feature 1..20: note = Description of Artificial Sequence: Synthetic oligonucleotide
  misc_feature 1..20: note = Target: SCN10A; (+) strand; PAM type: YTN; PAM sequence: CTG
  source 1..20: mol_type = other DNA
gagacaaggagcagaggcca

SEQ ID NO: 60674 - DNA, 20 bp, synthetic construct
  misc_feature 1..20: note = Description of Artificial Sequence: Synthetic oligonucleotide
  misc_feature 1..20: note = Target: SCN10A; (+) strand; PAM type: YTN; PAM sequence: CTC
  source 1..20: mol_type = other DNA
agtgtctgcccatccatcta

SEQ ID NO: 60675 - DNA, 20 bp, synthetic construct
  misc_feature 1..20: note = Description of Artificial Sequence: Synthetic oligonucleotide
  misc_feature 1..20: note = Target: SCN10A; (+) strand; PAM type: YTN; PAM sequence: CTG
  source 1..20: mol_type = other DNA
cccatccatctatactggac

SEQ ID NO: 60676 - DNA, 20 bp, synthetic construct
  misc_feature 1..20: note = Description of Artificial Sequence: Synthetic oligonucleotide
  misc_feature 1..20: note = Target: SCN10A; (+) strand; PAM type: YTN; PAM sequence: CTA
  source 1..20: mol_type = other DNA
tactggacccttcccaagcc

SEQ ID NO: 60677 - DNA, 20 bp, synthetic construct
  misc_feature 1..20: note = Description of Artificial Sequence: Synthetic oligonucleotide
  misc_feature 1..20: note = Target: SCN10A; (+) strand; PAM type: YTN; PAM sequence: CTG
  source 1..20: mol_type = other DNA
gacccttcccaagccatggt

SEQ ID NO: 60678 - DNA, 20 bp, synthetic construct
  misc_feature 1..20: note = Description of Artificial Sequence: Synthetic oligonucleotide
  misc_feature 1..20: note = Target: SCN10A; (+) strand; PAM type: YTN; PAM sequence: CTT
  source 1..20: mol_type = other DNA
cccaagccatggtggcccag

SEQ ID NO: 60679 - DNA, 20 bp, synthetic construct
  misc_feature 1..20: note = Description of Artificial Sequence: Synthetic oligonucleotide
  misc_feature 1..20: note = Target: SCN10A; (+) strand; PAM type: YTN; PAM sequence: TTC
  source 1..20: mol_type = other DNA
ccaagccatggtggcccagt

SEQ ID NO: 60680 - DNA, 20 bp, synthetic construct
  misc_feature 1..20: note = Description of Artificial Sequence: Synthetic oligonucleotide
  misc_feature 1..20: note = Target: SCN10A; (+) strand; PAM type: YTN; PAM sequence: CTG
  source 1..20: mol_type = other DNA
tgttggaaagggcttgtgca

SEQ ID NO: 60681 - DNA, 20 bp, synthetic construct
  misc_feature 1..20: note = Description of Artificial Sequence: Synthetic oligonucleotide
  misc_feature 1..20: note = Target: SCN10A; (+) strand; PAM type: YTN; PAM sequence: TTG
  source 1..20: mol_type = other DNA
gaaagggcttgtgcagaaag

SEQ ID NO: 60682 - DNA, 20 bp, synthetic construct
  misc_feature 1..20: note = Description of Artificial Sequence: Synthetic oligonucleotide
  misc_feature 1..20: note = Target: SCN10A; (+) strand; PAM type: YTN; PAM sequence: CTT
  source 1..20: mol_type = other DNA
gtgcagaaagaatgaaagga

SEQ ID NO: 60683 - DNA, 20 bp, synthetic construct
  misc_feature 1..20: note = Description of Artificial Sequence: Synthetic oligonucleotide
  misc_feature 1..20: note = Target: SCN10A; (+) strand; PAM type: YTN; PAM sequence: TTG
  source 1..20: mol_type = other DNA
tgcagaaagaatgaaaggaa

SEQ ID NO: 60684 - DNA, 20 bp, synthetic construct
  misc_feature 1..20: note = Description of Artificial Sequence: Synthetic oligonucleotide
  misc_feature 1..20: note = Target: SCN10A; (+) strand; PAM type: YTN; PAM sequence: TTC
  source 1..20: mol_type = other DNA
ccttgggttacttgactaat

SEQ ID NO: 60685 - DNA, 20 bp, synthetic construct
  misc_feature 1..20: note = Description of Artificial Sequence: Synthetic oligonucleotide
  misc_feature 1..20: note = Target: SCN10A; (+) strand; PAM type: YTN; PAM sequence: CTT
  source 1..20: mol_type = other DNA
gggttacttgactaatctca

SEQ ID NO: 60686 - DNA, 20 bp, synthetic construct
  misc_feature 1..20: note = Description of Artificial Sequence: Synthetic oligonucleotide
  misc_feature 1..20: note = Target: SCN10A; (+) strand; PAM type: YTN; PAM sequence: TTG
  source 1..20: mol_type = other DNA
ggttacttgactaatctcat

SEQ ID NO: 60687 - DNA, 20 bp, synthetic construct
  misc_feature 1..20: note = Description of Artificial Sequence: Synthetic oligonucleotide
  misc_feature 1..20: note = Target: SCN10A; (+) strand; PAM type: YTN; PAM sequence: TTA
  source 1..20: mol_type = other DNA
cttgactaatctcatatgat

SEQ ID NO: 60688 - DNA, 20 bp, synthetic construct
  misc_feature 1..20: note = Description of Artificial Sequence: Synthetic oligonucleotide
  misc_feature 1..20: note = Target: SCN10A; (+) strand; PAM type: YTN; PAM sequence: CTT
  source 1..20: mol_type = other DNA
gactaatctcatatgatgat

SEQ ID NO: 60689 - DNA, 20 bp, synthetic construct
  misc_feature 1..20: note = Description of Artificial Sequence: Synthetic oligonucleotide
  misc_feature 1..20: note = Target: SCN10A; (+) strand; PAM type: YTN; PAM sequence: TTG
  source 1..20: mol_type = other DNA
actaatctcatatgatgatt

SEQ ID NO: 60690 - DNA, 20 bp, synthetic construct
  misc_feature 1..20: note = Description of Artificial Sequence: Synthetic oligonucleotide
  misc_feature 1..20: note = Target: SCN10A; (+) strand; PAM type: YTN; PAM sequence: CTA
  source 1..20: mol_type = other DNA
atctcatatgatgatttaaa

SEQ ID NO: 60691 - DNA, 20 bp, synthetic construct
  misc_feature 1..20: note = Description of Artificial Sequence: Synthetic oligonucleotide
  misc_feature 1..20: note = Target: SCN10A; (+) strand; PAM type: YTN; PAM sequence: CTC
  source 1..20: mol_type = other DNA
atatgatgatttaaagtaat

SEQ ID NO: 60692 - DNA, 20 bp, synthetic construct
  misc_feature 1..20: note = Description of Artificial Sequence: Synthetic oligonucleotide
  misc_feature 1..20: note = Target: SCN10A; (+) strand; PAM type: YTN; PAM sequence: TTT
  source 1..20: mol_type = other DNA
aaagtaatcccacatgtggc

SEQ ID NO: 60693 - DNA, 20 bp, synthetic construct
  misc_feature 1..20: note = Description of Artificial Sequence: Synthetic oligonucleotide
  misc_feature 1..20: note = Target: SCN10A; (+) strand; PAM type: YTN; PAM sequence: TTA
  source 1..20: mol_type = other DNA
aagtaatcccacatgtggct

SEQ ID NO: 60694 - DNA, 20 bp, synthetic construct
  misc_feature 1..20: note = Description of Artificial Sequence: Synthetic oligonucleotide
  misc_feature 1..20: note = Target: SCN10A; (+) strand; PAM type: YTN; PAM sequence: CTG
  source 1..20: mol_type = other DNA
tttaagaatagagtagcatt

SEQ ID NO: 60695 - DNA, 20 bp, synthetic construct
  misc_feature 1..20: note = Description of Artificial Sequence: Synthetic oligonucleotide
  misc_feature 1..20: note = Target: SCN10A; (+) strand; PAM type: YTN; PAM sequence: TTT
  source 1..20: mol_type = other DNA
aagaatagagtagcattaaa

SEQ ID NO: 60696 - DNA, 20 bp, synthetic construct
  misc_feature 1..20: note = Description of Artificial Sequence: Synthetic oligonucleotide
  misc_feature 1..20: note = Target: SCN10A; (+) strand; PAM type: YTN; PAM sequence: TTA
  source 1..20: mol_type = other DNA
agaatagagtagcattaaag

SEQ ID NO: 60697 - DNA, 20 bp, synthetic construct
  misc_feature 1..20: note = Description of Artificial Sequence: Synthetic oligonucleotide
  misc_feature 1..20: note = Target: SCN10A; (+) strand; PAM type: YTN; PAM sequence: TTA
  source 1..20: mol_type = other DNA
aagacacagagcctttcaga

SEQ ID NO: 60698 - DNA, 20 bp, synthetic construct
  misc_feature 1..20: note = Description of Artificial Sequence: Synthetic oligonucleotide
  misc_feature 1..20: note = Target: SCN10A; (+) strand; PAM type: YTN; PAM sequence: CTT
  source 1..20: mol_type = other DNA
tcagaatgtagtatggactg

SEQ ID NO: 60699 - DNA, 20 bp, synthetic construct
  misc_feature 1..20: note = Description of Artificial Sequence: Synthetic oligonucleotide
  misc_feature 1..20: note = Target: SCN10A; (+) strand; PAM type: YTN; PAM sequence: TTT
  source 1..20: mol_type = other DNA
cagaatgtagtatggactga

SEQ ID NO: 60700 - DNA, 20 bp, synthetic construct
  misc_feature 1..20: note = Description of Artificial Sequence: Synthetic oligonucleotide
  misc_feature 1..20: note = Target: SCN10A; (+) strand; PAM type: YTN; PAM sequence: TTC
  source 1..20: mol_type = other DNA
agaatgtagtatggactgag

SEQ ID NO: 60701 - DNA, 20 bp, synthetic construct
  misc_feature 1..20: note = Description of Artificial Sequence: Synthetic oligonucleotide
  misc_feature 1..20: note = Target: SCN10A; (+) strand; PAM type: YTN; PAM sequence: CTG
  source 1..20: mol_type = other DNA
aggactgagtgtctaggtgt

SEQ ID NO: 60702 - DNA, 20 bp, synthetic construct
  misc_feature 1..20: note = Description of Artificial Sequence: Synthetic oligonucleotide
  misc_feature 1..20: note = Target: SCN10A; (+) strand; PAM type: YTN; PAM sequence: CTG
  source 1..20: mol_type = other DNA
agtgtctaggtgtctggttc

SEQ ID NO: 60703 - DNA, 20 bp, synthetic construct
  misc_feature 1..20: note = Description of Artificial Sequence: Synthetic oligonucleotide
  misc_feature 1..20: note = Target: SCN10A; (+) strand; PAM type: YTN; PAM sequence: CTA
  source 1..20: mol_type = other DNA
ggtgtctggttctagtgcca

SEQ ID NO: 60704 - DNA, 20 bp, synthetic construct
  misc_feature 1..20: note = Description of Artificial Sequence: Synthetic oligonucleotide
  misc_feature 1..20: note = Target: SCN10A; (+) strand; PAM type: YTN; PAM sequence: CTG
  source 1..20: mol_type = other DNA
gttctagtgccaattgctac

SEQ ID NO: 60705 - DNA, 20 bp, synthetic construct
  misc_feature 1..20: note = Description of Artificial Sequence: Synthetic oligonucleotide
  misc_feature 1..20: note = Target: SCN10A; (+) strand; PAM type: YTN; PAM sequence: TTC
  source 1..20: mol_type = other DNA
tagtgccaattgctacaagt

SEQ ID NO: 60706 - DNA, 20 bp, synthetic construct
  misc_feature 1..20: note = Description of Artificial Sequence: Synthetic oligonucleotide
  misc_feature 1..20: note = Target: SCN10A; (+) strand; PAM type: YTN; PAM sequence: CTA
  source 1..20: mol_type = other DNA
gtgccaattgctacaagtct

SEQ ID NO: 60707 - DNA, 20 bp, synthetic construct
  misc_feature 1..20: note = Description of Artificial Sequence: Synthetic oligonucleotide
  misc_feature 1..20: note = Target: SCN10A; (+) strand; PAM type: YTN; PAM sequence: TTG
  source 1..20: mol_type = other DNA
ctacaagtctgctctgtgca

SEQ ID NO: 60708 - DNA, 20 bp, synthetic construct
  misc_feature 1..20: note = Description of Artificial Sequence: Synthetic oligonucleotide
  misc_feature 1..20: note = Target: SCN10A; (+) strand; PAM type: YTN; PAM sequence: CTA
  source 1..20: mol_type = other DNA
caagtctgctctgtgcactt

SEQ ID NO: 60709 - DNA, 20 bp, synthetic construct
  misc_feature 1..20: note = Description of Artificial Sequence: Synthetic oligonucleotide
  misc_feature 1..20: note = Target: SCN10A; (+) strand; PAM type: YTN; PAM sequence: CTG
  source 1..20: mol_type = other DNA
ctctgtgcacttgcctaagg

SEQ ID NO: 60710 - DNA, 20 bp, synthetic construct
  misc_feature 1..20: note = Description of Artificial Sequence: Synthetic oligonucleotide
  misc_feature 1..20: note = Target: SCN10A; (+) strand; PAM type: YTN; PAM sequence: CTC
  source 1..20: mol_type = other DNA
tgtgcacttgcctaaggttt

SEQ ID NO: 60711 - DNA, 20 bp, synthetic construct
  misc_feature 1..20: note = Description of Artificial Sequence: Synthetic oligonucleotide
  misc_feature 1..20: note = Target: SCN10A; (+) strand; PAM type: YTN; PAM sequence: CTG
  source 1..20: mol_type = other DNA
tgcacttgcctaaggtttcc

SEQ ID NO: 60712 - DNA, 20 bp, synthetic construct
  misc_feature 1..20: note = Description of Artificial Sequence: Synthetic oligonucleotide
  misc_feature 1..20: note = Target: SCN10A; (+) strand; PAM type: YTN; PAM sequence: CTT
  source 1..20: mol_type = other DNA
gcctaaggtttcccctctca

SEQ ID NO: 60713 - DNA, 20 bp, synthetic construct
  misc_feature 1..20: note = Description of Artificial Sequence: Synthetic oligonucleotide
  misc_feature 1..20: note = Target: SCN10A; (+) strand; PAM type: YTN; PAM sequence: TTG
  source 1..20: mol_type = other DNA
cctaaggtttcccctctcag

SEQ ID NO: 60714 - DNA, 20 bp, synthetic construct
  misc_feature 1..20: note = Description of Artificial Sequence: Synthetic oligonucleotide
  misc_feature 1..20: note = Target: SCN10A; (+) strand; PAM type: YTN; PAM sequence: CTA
  source 1..20: mol_type = other DNA
aggtttcccctctcagggct

SEQ ID NO: 60715 - DNA, 20 bp, synthetic construct
  misc_feature 1..20: note = Description of Artificial Sequence: Synthetic oligonucleotide
  misc_feature 1..20: note = Target: SCN10A; (+) strand; PAM type: YTN; PAM sequence: TTT
  source 1..20: mol_type = other DNA
cccctctcagggctgccatt

SEQ ID NO: 60716 - DNA, 20 bp, synthetic construct
  misc_feature 1..20: note = Description of Artificial Sequence: Synthetic oligonucleotide
  misc_feature 1..20: note = Target: SCN10A; (+) strand; PAM type: YTN; PAM sequence: TTC
  source 1..20: mol_type = other DNA
ccctctcagggctgccattt

SEQ ID NO: 60717 - DNA, 20 bp, synthetic construct
  misc_feature 1..20: note = Description of Artificial Sequence: Synthetic oligonucleotide
  misc_feature 1..20: note = Target: SCN10A; (+) strand; PAM type: YTN; PAM sequence: CTC
  source 1..20: mol_type = other DNA
tcagggctgccattttctca

SEQ ID NO: 60718 - DNA, 20 bp, synthetic construct
  misc_feature 1..20: note = Description of Artificial Sequence: Synthetic oligonucleotide
  misc_feature 1..20: note = Target: SCN10A; (+) strand; PAM type: YTN; PAM sequence: CTC
  source 1..20: mol_type = other DNA
agggctgccattttctcagc

SEQ ID NO: 60719 - DNA, 20 bp, synthetic construct
  misc_feature 1..20: note = Description of Artificial Sequence: Synthetic oligonucleotide
  misc_feature 1..20: note = Target: SCN10A; (+) strand; PAM type: YTN; PAM sequence: CTG
  source 1..20: mol_type = other DNA
ccattttctcagccactttc

SEQ ID NO: 60720 - DNA, 20 bp, synthetic construct
  misc_feature 1..20: note = Description of Artificial Sequence: Synthetic oligonucleotide
  misc_feature 1..20: note = Target: SCN10A; (+) strand; PAM type: YTN; PAM sequence: TTT
  source 1..20: mol_type = other DNA
tctcagccactttcccacct

SEQ ID NO: 60721 - DNA, 20 bp, synthetic construct
  misc_feature 1..20: note = Description of Artificial Sequence: Synthetic oligonucleotide
  misc_feature 1..20: note = Target: SCN10A; (+) strand; PAM type: YTN; PAM sequence: TTT
  source 1..20: mol_type = other DNA
ctcagccactttcccacctt

SEQ ID NO: 60722 - DNA, 20 bp, synthetic construct
  misc_feature 1..20: note = Description of Artificial Sequence: Synthetic oligonucleotide
  misc_feature 1..20: note = Target: SCN10A; (+) strand; PAM type: YTN; PAM sequence: TTC
  source 1..20: mol_type = other DNA
tcagccactttcccacctta

SEQ ID NO: 60723 - DNA, 20 bp, synthetic construct
  misc_feature 1..20: note = Description of Artificial Sequence: Synthetic oligonucleotide
  misc_feature 1..20: note = Target: SCN10A; (+) strand; PAM type: YTN; PAM sequence: CTC
  source 1..20: mol_type = other DNA
agccactttcccaccttatg

SEQ ID NO: 60724 - DNA, 20 bp, synthetic construct
  misc_feature 1..20: note = Description of Artificial Sequence: Synthetic oligonucleotide
  misc_feature 1..20: note = Target: SCN10A; (+) strand; PAM type: YTN; PAM sequence: CTT
  source 1..20: mol_type = other DNA
tcccaccttatgcacatgat

SEQ ID NO: 60725 - DNA, 20 bp, synthetic construct
  misc_feature 1..20: note = Description of Artificial Sequence: Synthetic oligonucleotide
  misc_feature 1..20: note = Target: SCN10A; (+) strand; PAM type: YTN; PAM sequence: TTT
  source 1..20: mol_type = other DNA
cccaccttatgcacatgatg

SEQ ID NO: 60726 - DNA, 20 bp, synthetic construct
  misc_feature 1..20: note = Description of Artificial Sequence: Synthetic oligonucleotide
  misc_feature 1..20: note = Target: SCN10A; (+) strand; PAM type: YTN; PAM sequence: TTC
  source 1..20: mol_type = other DNA
ccaccttatgcacatgatgt

SEQ ID NO: 60727 - DNA, 20 bp, synthetic construct
  misc_feature 1..20: note = Description of Artificial Sequence: Synthetic oligonucleotide
  misc_feature 1..20: note = Target: SCN10A; (+) strand; PAM type: YTN; PAM sequence: CTT
  source 1..20: mol_type = other DNA
atgcacatgatgtaagaatg

SEQ ID NO: 60728 - DNA, 20 bp, synthetic construct
  misc_feature 1..20: note = Description of Artificial Sequence: Synthetic oligonucleotide
  misc_feature 1..20: note = Target: SCN10A; (+) strand; PAM type: YTN; PAM sequence: TTA
  source 1..20: mol_type = other DNA
tgcacatgatgtaagaatgg

SEQ ID NO: 60729 - DNA, 20 bp, synthetic construct
  misc_feature 1..20: note = Description of Artificial Sequence: Synthetic oligonucleotide
  misc_feature 1..20: note = Target: SCN10A; (+) strand; PAM type: YTN; PAM sequence: CTT
  source 1..20: mol_type = other DNA
ccagatggagaagttgagaa

SEQ ID NO: 60730 - DNA, 20 bp, synthetic construct
  misc_feature 1..20: note = Description of Artificial Sequence: Synthetic oligonucleotide
  misc_feature 1..20: note = Target: SCN10A; (+) strand; PAM type: YTN; PAM sequence: TTC
  source 1..20: mol_type = other DNA
cagatggagaagttgagaat

SEQ ID NO: 60731 - DNA, 20 bp, synthetic construct
  misc_feature 1..20: note = Description of Artificial Sequence: Synthetic oligonucleotide
  misc_feature 1..20: note = Target: SCN10A; (+) strand; PAM type: YTN; PAM sequence: TTG
  source 1..20: mol_type = other DNA
agaatagaagacctccatgt

SEQ ID NO: 60732 - DNA, 20 bp, synthetic construct
  misc_feature 1..20: note = Description of Artificial Sequence: Synthetic oligonucleotide
  misc_feature 1..20: note = Target: SCN10A; (+) strand; PAM type: YTN; PAM sequence: CTC
  source 1..20: mol_type = other DNA
catgttcctgccttcagctt

SEQ ID NO: 60733 - DNA, 20 bp, synthetic construct
  misc_feature 1..20: note = Description of Artificial Sequence: Synthetic oligonucleotide
  misc_feature 1..20: note = Target: SCN10A; (+) strand; PAM type: YTN; PAM sequence: TTC
  source 1..20: mol_type = other DNA
ctgccttcagctttagcatt

SEQ ID NO: 60734 - DNA, 20 bp, synthetic construct
  misc_feature 1..20: note = Description of Artificial Sequence: Synthetic oligonucleotide
  misc_feature 1..20: note = Target: SCN10A; (+) strand; PAM type: YTN; PAM sequence: CTG
  source 1..20: mol_type = other DNA
ccttcagctttagcattctt

SEQ ID NO: 60735 - DNA, 20 bp, synthetic construct
  misc_feature 1..20: note = Description of Artificial Sequence: Synthetic oligonucleotide
  misc_feature 1..20: note = Target: SCN10A; (+) strand; PAM type: YTN; PAM sequence: CTT
  source 1..20: mol_type = other DNA
cagctttagcattcttgagg

SEQ ID NO: 60736 - DNA, 20 bp, synthetic construct
  misc_feature 1..20: note = Description of Artificial Sequence: Synthetic oligonucleotide
  misc_feature 1..20: note = Target: SCN10A; (+) strand; PAM type: YTN; PAM sequence: TTC
  source 1..20: mol_type = other DNA
agctttagcattcttgaggt

SEQ ID NO: 60737 - DNA, 20 bp, synthetic construct
  misc_feature 1..20: note = Description of Artificial Sequence: Synthetic oligonucleotide
  misc_feature 1..20: note = Target: SCN10A; (+) strand; PAM type: YTN; PAM sequence: CTT
  source 1..20: mol_type = other DNA
tagcattcttgaggtctaga

SEQ ID NO: 60738 - DNA, 20 bp, synthetic construct
  misc_feature 1..20: note = Description of Artificial Sequence: Synthetic oligonucleotide
  misc_feature 1..20: note = Target: SCN10A; (+) strand; PAM type: YTN; PAM sequence: TTT
  source 1..20: mol_type = other DNA
agcattcttgaggtctagaa

SEQ ID NO: 60739 - DNA, 20 bp, synthetic construct
  misc_feature 1..20: note = Description of Artificial Sequence: Synthetic oligonucleotide
  misc_feature 1..20: note = Target: SCN10A; (+) strand; PAM type: YTN; PAM sequence: TTA
  source 1..20: mol_type = other DNA
gcattcttgaggtctagaaa

SEQ ID NO: 60740 - DNA, 20 bp, synthetic construct
  misc_feature 1..20: note = Description of Artificial Sequence: Synthetic oligonucleotide
  misc_feature 1..20: note = Target: SCN10A; (+) strand; PAM type: YTN; PAM sequence: TTC
  source 1..20: mol_type = other DNA
ttgaggtctagaaactgggt

SEQ ID NO: 60741 - DNA, 20 bp, synthetic construct
  misc_feature 1..20: note = Description of Artificial Sequence: Synthetic oligonucleotide
  misc_feature 1..20: note = Target: SCN10A; (+) strand; PAM type: YTN; PAM sequence: CTT
  source 1..20: mol_type = other DNA
gaggtctagaaactgggtgt

SEQ ID NO: 60742 - DNA, 20 bp, synthetic construct
  misc_feature 1..20: note = Description of Artificial Sequence: Synthetic oligonucleotide
  misc_feature 1..20: note = Target: SCN10A; (+) strand; PAM type: YTN; PAM sequence: TTG
  source 1..20: mol_type = other DNA
aggtctagaaactgggtgtg

SEQ ID NO: 60743 - DNA, 20 bp, synthetic construct
  misc_feature 1..20: note = Description of Artificial Sequence: Synthetic oligonucleotide
  misc_feature 1..20: note = Target: SCN10A; (+) strand; PAM type: YTN; PAM sequence: CTA
  source 1..20: mol_type = other DNA
gaaactgggtgtgccttcca

SEQ ID NO: 60744 - DNA, 20 bp, synthetic construct
  misc_feature 1..20: note = Description of Artificial Sequence: Synthetic oligonucleotide
  misc_feature 1..20: note = Target: SCN10A; (+) strand; PAM type: YTN; PAM sequence: CTG
  source 1..20: mol_type = other DNA
ggtgtgccttccagcatgtt

SEQ ID NO: 60745 - DNA, 20 bp, synthetic construct
  misc_feature 1..20: note = Description of Artificial Sequence: Synthetic oligonucleotide
  misc_feature 1..20: note = Target: SCN10A; (+) strand; PAM type: YTN; PAM sequence: CTT
  source 1..20: mol_type = other DNA
ccagcatgttcagagcatgc

SEQ ID NO: 60746 - DNA, 20 bp, synthetic construct
  misc_feature 1..20: note = Description of Artificial Sequence: Synthetic oligonucleotide
  misc_feature 1..20: note = Target: SCN10A; (+) strand; PAM type: YTN; PAM sequence: TTC
  source 1..20: mol_type = other DNA
cagcatgttcagagcatgca

SEQ ID NO: 60747 - DNA, 20 bp, synthetic construct
  misc_feature 1..20: note = Description of Artificial Sequence: Synthetic oligonucleotide
  misc_feature 1..20: note = Target: SCN10A; (+) strand; PAM type: YTN; PAM sequence: TTC
  source 1..20: mol_type = other DNA
agagcatgcaagacatctta

SEQ ID NO: 60748 - DNA, 20 bp, synthetic construct
  misc_feature 1..20: note = Description of Artificial Sequence: Synthetic oligonucleotide
  misc_feature 1..20: note = Target: SCN10A; (+) strand; PAM type: YTN; PAM sequence: CTT
  source 1..20: mol_type = other DNA
agttcttacactcctaggcc

SEQ ID NO: 60749 - DNA, 20 bp, synthetic construct
  misc_feature 1..20: note = Description of Artificial Sequence: Synthetic oligonucleotide
  misc_feature 1..20: note = Target: SCN10A; (+) strand; PAM type: YTN; PAM sequence: TTA
  source 1..20: mol_type = other DNA
gttcttacactcctaggcct

SEQ ID NO: 60750 - DNA, 20 bp, synthetic construct
  misc_feature 1..20: note = Description of Artificial Sequence: Synthetic oligonucleotide
  misc_feature 1..20: note = Target: SCN10A; (+) strand; PAM type: YTN; PAM sequence: TTC
  source 1..20: mol_type = other DNA
ttacactcctaggcctgtta

SEQ ID NO: 60751 - DNA, 20 bp, synthetic construct
  misc_feature 1..20: note = Description of Artificial Sequence: Synthetic oligonucleotide
  misc_feature 1..20: note = Target: SCN10A; (+) strand; PAM type: YTN; PAM sequence: CTT
  source 1..20: mol_type = other DNA
acactcctaggcctgttaca

SEQ ID NO: 60752 - DNA, 20 bp, synthetic construct
  misc_feature 1..20: note = Description of Artificial Sequence: Synthetic oligonucleotide
  misc_feature 1..20: note = Target: SCN10A; (+) strand; PAM type: YTN; PAM sequence: TTA
  source 1..20: mol_type = other DNA
cactcctaggcctgttacag

SEQ ID NO: 60753 - DNA, 20 bp, synthetic construct
  misc_feature 1..20: note = Description of Artificial Sequence: Synthetic oligonucleotide
  misc_feature 1..20: note = Target: SCN10A; (+) strand; PAM type: YTN; PAM sequence: CTC
  source 1..20: mol_type = other DNA
ctaggcctgttacagcactt

SEQ ID NO: 60754 - DNA, 20 bp, synthetic construct
  misc_feature 1..20: note = Description of Artificial Sequence: Synthetic oligonucleotide
  misc_feature 1..20: note = Target: SCN10A; (+) strand; PAM type: YTN; PAM sequence: CTA
  source 1..20: mol_type = other DNA
ggcctgttacagcacttaat

SEQ ID NO: 60755 - DNA, 20 bp, synthetic construct
  misc_feature 1..20: note = Description of Artificial Sequence: Synthetic oligonucleotide
  misc_feature 1..20: note = Target: SCN10A; (+) strand; PAM type: YTN; PAM sequence: CTG
  source 1..20: mol_type = other DNA
ttacagcacttaatgagctg

SEQ ID NO: 60756 - DNA, 20 bp, synthetic construct
  misc_feature 1..20: note = Description of Artificial Sequence: Synthetic oligonucleotide
  misc_feature 1..20: note = Target: SCN10A; (+) strand; PAM type: YTN; PAM sequence: TTA
  source 1..20: mol_type = other DNA
cagcacttaatgagctgttt

SEQ ID NO: 60757 - DNA, 20 bp, synthetic construct
  misc_feature 1..20: note = Description of Artificial Sequence: Synthetic oligonucleotide
  misc_feature 1..20: note = Target: SCN10A; (+) strand; PAM type: YTN; PAM sequence: CTT
  source 1..20: mol_type = other DNA
aatgagctgttttaattcac

SEQ ID NO: 60758 - DNA, 20 bp, synthetic construct
  misc_feature 1..20: note = Description of Artificial Sequence: Synthetic oligonucleotide
  misc_feature 1..20: note = Target: SCN10A; (+) strand; PAM type: YTN; PAM sequence: TTA
  source 1..20: mol_type = other DNA
atgagctgttttaattcacc

SEQ ID NO: 60759 - DNA, 20 bp, synthetic construct
  misc_feature 1..20: note = Description of Artificial Sequence: Synthetic oligonucleotide
  misc_feature 1..20: note = Target: SCN10A; (+) strand; PAM type: YTN; PAM sequence: CTG
  source 1..20: mol_type = other DNA
ttttaattcacctattagtc

SEQ ID NO: 60760 - DNA, 20 bp, synthetic construct
  misc_feature 1..20: note = Description of Artificial Sequence: Synthetic oligonucleotide
  misc_feature 1..20: note = Target: SCN10A; (+) strand; PAM type: YTN; PAM sequence: TTT
  source 1..20: mol_type = other DNA
taattcacctattagtctgt

SEQ ID NO: 60761 - DNA, 20 bp, synthetic construct
  misc_feature 1..20: note = Description of Artificial Sequence: Synthetic oligonucleotide
  misc_feature 1..20: note = Target: SCN10A; (+) strand; PAM type: YTN; PAM sequence: TTT
  source 1..20: mol_type = other DNA
aattcacctattagtctgtt

SEQ ID NO: 60762 - DNA, 20 bp, synthetic construct
  misc_feature 1..20: note = Description of Artificial Sequence: Synthetic oligonucleotide
  misc_feature 1..20: note = Target: SCN10A; (+) strand; PAM type: YTN; PAM sequence: TTA
  source 1..20: mol_type = other DNA
attcacctattagtctgttt

SEQ ID NO: 60763 - DNA, 20 bp, synthetic construct
  misc_feature 1..20: note = Description of Artificial Sequence: Synthetic oligonucleotide
  misc_feature 1..20: note = Target: SCN10A; (+) strand; PAM type: YTN; PAM sequence: TTC
  source 1..20: mol_type = other DNA
acctattagtctgtttctca

SEQ ID NO: 60764 - DNA, 20 bp, synthetic construct
  misc_feature 1..20: note = Description of Artificial Sequence: Synthetic oligonucleotide
  misc_feature 1..20: note = Target: SCN10A; (+) strand; PAM type: YTN; PAM sequence: CTA
  source 1..20: mol_type = other DNA
ttagtctgtttctcatacag

SEQ ID NO: 60765 - DNA, 20 bp, synthetic construct
  misc_feature 1..20: note = Description of Artificial Sequence: Synthetic oligonucleotide
  misc_feature 1..20: note = Target: SCN10A; (+) strand; PAM type: YTN; PAM sequence: TTA
  source 1..20: mol_type = other DNA
gtctgtttctcatacagcat

SEQ ID NO: 60766 - DNA, 20 bp, synthetic construct
  misc_feature 1..20: note = Description of Artificial Sequence: Synthetic oligonucleotide
  misc_feature 1..20: note = Target: SCN10A; (+) strand; PAM type: YTN; PAM sequence: CTG
  source 1..20: mol_type = other DNA
tttctcatacagcatcagtg

SEQ ID NO: 60767 - DNA, 20 bp, synthetic construct
  misc_feature 1..20: note = Description of Artificial Sequence: Synthetic oligonucleotide
  misc_feature 1..20: note = Target: SCN10A; (+) strand; PAM type: YTN; PAM sequence: TTT
  source 1..20: mol_type = other DNA
ctcatacagcatcagtgtcc

SEQ ID NO: 60768 - DNA, 20 bp, synthetic construct
  misc_feature 1..20: note = Description of Artificial Sequence: Synthetic oligonucleotide
  misc_feature 1..20: note = Target: SCN10A; (+) strand; PAM type: YTN; PAM sequence: TTC
  source 1..20: mol_type = other DNA
tcatacagcatcagtgtcca

SEQ ID NO: 60769 - DNA, 20 bp, synthetic construct
  misc_feature 1..20: note = Description of Artificial Sequence: Synthetic oligonucleotide
  misc_feature 1..20: note = Target: SCN10A; (+) strand; PAM type: YTN; PAM sequence: CTC
  source 1..20: mol_type = other DNA
atacagcatcagtgtccaag

SEQ ID NO: 60770 - DNA, 20 bp, synthetic construct
  misc_feature 1..20: note = Description of Artificial Sequence: Synthetic oligonucleotide
  misc_feature 1..20: note = Target: SCN10A; (+) strand; PAM type: YTN; PAM sequence: TTC
  source 1..20: mol_type = other DNA
tgactgtatctcccagggct

SEQ ID NO: 60771 - DNA, 20 bp, synthetic construct
  misc_feature 1..20: note = Description of Artificial Sequence: Synthetic oligonucleotide
  misc_feature 1..20: note = Target: SCN10A; (+) strand; PAM type: YTN; PAM sequence: CTG
  source 1..20: mol_type = other DNA
actgtatctcccagggctga

SEQ ID NO: 60772 - DNA, 20 bp, synthetic construct
  misc_feature 1..20: note = Description of Artificial Sequence: Synthetic oligonucleotide
  misc_feature 1..20: note = Target: SCN10A; (+) strand; PAM type: YTN; PAM sequence: CTG
  source 1..20: mol_type = other DNA
tatctcccagggctgagtag

SEQ ID NO: 60773 - DNA, 20 bp, synthetic construct
  misc_feature 1..20: note = Description of Artificial Sequence: Synthetic oligonucleotide
  misc_feature 1..20: note = Target: SCN10A; (+) strand; PAM type: YTN; PAM sequence: CTC
  source 1..20: mol_type = other DNA
ccagggctgagtagtaccat

SEQ ID NO: 60774 - DNA, 20 bp, synthetic construct
  misc_feature 1..20: note = Description of Artificial Sequence: Synthetic oligonucleotide
  misc_feature 1..20: note = Target: SCN10A; (+) strand; PAM type: YTN; PAM sequence: CTG
  source 1..20: mol_type = other DNA
agtagtaccatgcctggcat

SEQ ID NO: 60775 - DNA, 20 bp, synthetic construct
  misc_feature 1..20: note = Description of Artificial Sequence: Synthetic oligonucleotide
  misc_feature 1..20: note = Target: SCN10A; (+) strand; PAM type: YTN; PAM sequence: CTG
  source 1..20: mol_type = other DNA
gcataccagagctactcaga

SEQ ID NO: 60776 - DNA, 20 bp, synthetic construct
  misc_feature 1..20: note = Description of Artificial Sequence: Synthetic oligonucleotide
  misc_feature 1..20: note = Target: SCN10A; (+) strand; PAM type: YTN; PAM sequence: CTA
  source 1..20: mol_type = other DNA
ctcagagattatttgttgaa

SEQ ID NO: 60777 - DNA, 20 bp, synthetic construct
  misc_feature 1..20: note = Description of Artificial Sequence: Synthetic oligonucleotide
  misc_feature 1..20: note = Target: SCN10A; (+) strand; PAM type: YTN; PAM sequence: CTC
  source 1..20: mol_type = other DNA
agagattatttgttgaataa

SEQ ID NO: 60778 - DNA, 20 bp, synthetic construct
  misc_feature 1..20: note = Description of Artificial Sequence: Synthetic oligonucleotide
  misc_feature 1..20: note = Target: SCN10A; (+) strand; PAM type: YTN; PAM sequence: TTA
  source 1..20: mol_type = other DNA
tttgttgaataaatgcaaga

SEQ ID NO: 60779 - DNA, 20 bp, synthetic construct
  misc_feature 1..20: note = Description of Artificial Sequence: Synthetic oligonucleotide
  misc_feature 1..20: note = Target: SCN10A; (+) strand; PAM type: YTN; PAM sequence: TTT
  source 1..20: mol_type = other DNA
gttgaataaatgcaagaacc

SEQ ID NO: 60780 - DNA, 20 bp, synthetic construct
  misc_feature 1..20: note = Description of Artificial Sequence: Synthetic oligonucleotide
  misc_feature 1..20: note = Target: SCN10A; (+) strand; PAM type: YTN; PAM sequence: TTG
  source 1..20: mol_type = other DNA
ttgaataaatgcaagaacca

SEQ ID NO: 60781 - DNA, 20 bp, synthetic construct
  misc_feature 1..20: note = Description of Artificial Sequence: Synthetic oligonucleotide
  misc_feature 1..20: note = Target: SCN10A; (+) strand; PAM type: YTN; PAM sequence: TTG
  source 1..20: mol_type = other DNA
aataaatgcaagaaccaatg

SEQ ID NO: 60782 - DNA, 20 bp, synthetic construct
  misc_feature 1..20: note = Description of Artificial Sequence: Synthetic oligonucleotide
  misc_feature 1..20: note = Target: SCN10A; (+) strand; PAM type: YTN; PAM sequence: CTC
  source 1..20: mol_type = other DNA
aagagtaactgcatgacaaa

SEQ ID NO: 60783 - DNA, 20 bp, synthetic construct
  misc_feature 1..20: note = Description of Artificial Sequence: Synthetic oligonucleotide
  misc_feature 1..20: note = Target: SCN10A; (+) strand; PAM type: YTN; PAM sequence: CTG
  source 1..20: mol_type = other DNA
catgacaaatgtataagtaa

SEQ ID NO: 60784 - DNA, 20 bp, synthetic construct
  misc_feature 1..20: note = Description of Artificial Sequence: Synthetic oligonucleotide
  misc_feature 1..20: note = Target: SCN10A; (+) strand; PAM type: YTN; PAM sequence: TTG
  source 1..20: mol_type = other DNA
tattaacacttgaatgaaca

SEQ ID NO: 60785 - DNA, 20 bp, synthetic construct
  misc_feature 1..20: note = Description of Artificial Sequence: Synthetic oligonucleotide
  misc_feature 1..20: note = Target: SCN10A; (+) strand; PAM type: YTN; PAM sequence: TTA
  source 1..20: mol_type = other DNA
acacttgaatgaacagagga

SEQ ID NO: 60786 - DNA, 20 bp, synthetic construct
  misc_feature 1..20: note = Description of Artificial Sequence: Synthetic oligonucleotide
  misc_feature 1..20: note = Target: SCN10A; (+) strand; PAM type: YTN; PAM sequence: CTT
  source 1..20: mol_type = other DNA
gaatgaacagaggactgaat

SEQ ID NO: 60787 - DNA, 20 bp, synthetic construct
  misc_feature 1..20: note = Description of Artificial Sequence: Synthetic oligonucleotide
  misc_feature 1..20: note = Target: SCN10A; (+) strand; PAM type: YTN; PAM sequence: TTG
  source 1..20: mol_type = other DNA
aatgaacagaggactgaatg

SEQ ID NO: 60788 - DNA, 20 bp, synthetic construct
  misc_feature 1..20: note = Description of Artificial Sequence: Synthetic oligonucleotide
  misc_feature 1..20: note = Target: SCN10A; (+) strand; PAM type: YTN; PAM sequence: CTG
  source 1..20: mol_type = other DNA
aatgaacaggtagatgaagg

SEQ ID NO: 60789 - DNA, 20 bp, synthetic construct
  misc_feature 1..20: note = Description of Artificial Sequence: Synthetic oligonucleotide
  misc_feature 1..20: note = Target: SCN10A; (+) strand; PAM type: YTN; PAM sequence: TTG
  source 1..20: mol_type = other DNA
actggatgatgaaagaaaga

SEQ ID NO: 60790 - DNA, 20 bp, synthetic construct
  misc_feature 1..20: note = Description of Artificial Sequence: Synthetic oligonucleotide
  misc_feature 1..20: note = Target: SCN10A; (+) strand; PAM type: YTN; PAM sequence: CTG
  source 1..20: mol_type = other DNA
gatgatgaaagaaagaaaga

SEQ ID NO: 60791 - DNA, 20 bp, synthetic construct
  misc_feature 1..20: note = Description of Artificial Sequence: Synthetic oligonucleotide
  misc_feature 1..20: note = Target: SCN10A; (+) strand; PAM type: YTN; PAM sequence: TTT
  source 1..20: mol_type = other DNA
gactgtcattatcaccaaca

SEQ ID NO: 60792 - DNA, 20 bp, synthetic construct
  misc_feature 1..20: note = Description of Artificial Sequence: Synthetic oligonucleotide
  misc_feature 1..20: note = Target: SCN10A; (+) strand; PAM type: YTN; PAM sequence: TTG
  source 1..20: mol_type = other DNA
actgtcattatcaccaacat

SEQ ID NO: 60793 - DNA, 20 bp, synthetic construct
  misc_feature 1..20: note = Description of Artificial Sequence: Synthetic oligonucleotide
  misc_feature 1..20: note = Target: SCN10A; (+) strand; PAM type: YTN; PAM sequence: CTG
  source 1..20: mol_type = other DNA
tcattatcaccaacattata

SEQ ID NO: 60794 - DNA, 20 bp, synthetic construct
  misc_feature 1..20: note = Description of Artificial Sequence: Synthetic oligonucleotide
  misc_feature 1..20: note = Target: SCN10A; (+) strand; PAM type: YTN; PAM sequence: TTA
  source 1..20: mol_type = other DNA
tcaccaacattatatatcat

SEQ ID NO: 60795 - DNA, 20 bp, synthetic construct
  misc_feature 1..20: note = Description of Artificial Sequence: Synthetic oligonucleotide
  misc_feature 1..20: note = Target: SCN10A; (+) strand; PAM type: YTN; PAM sequence: TTA
  source 1..20: mol_type = other DNA
tatatcattacaatagacct

SEQ ID NO: 60796 - DNA, 20 bp, synthetic construct
  misc_feature 1..20: note = Description of Artificial Sequence: Synthetic oligonucleotide
  misc_feature 1..20: note = Target: SCN10A; (+) strand; PAM type: YTN; PAM sequence: TTA
  source 1..20: mol_type = other DNA
caatagacctaatgagacat

SEQ ID NO: 60797 - DNA, 20 bp, synthetic construct
  misc_feature 1..20: note = Description of Artificial Sequence: Synthetic oligonucleotide
  misc_feature 1..20: note = Target: SCN10A; (+) strand; PAM type: YTN; PAM sequence: CTA
  source 1..20: mol_type = other DNA
atgagacataatttattacc

SEQ ID NO: 60798 - DNA, 20 bp, synthetic construct
  misc_feature 1..20: note = Description of Artificial Sequence: Synthetic oligonucleotide
  misc_feature 1..20: note = Target: SCN10A; (+) strand; PAM type: YTN; PAM sequence: TTT
  source 1..20: mol_type = other DNA
attaccatttaggaaatgat

SEQ ID NO: 60799 - DNA, 20 bp, synthetic construct
  misc_feature 1..20: note = Description of Artificial Sequence: Synthetic oligonucleotide
  misc_feature 1..20: note = Target: SCN10A; (+) strand; PAM type: YTN; PAM sequence: TTA
  source 1..20: mol_type = other DNA
ttaccatttaggaaatgatg

SEQ ID NO: 60800 - DNA, 20 bp, synthetic construct
  misc_feature 1..20: note = Description of Artificial Sequence: Synthetic oligonucleotide
  misc_feature 1..20: note = Target: SCN10A; (+) strand; PAM type: YTN; PAM sequence: TTA
  source 1..20: mol_type = other DNA
ccatttaggaaatgatgtga

SEQ ID NO: 60801 - DNA, 20 bp, synthetic construct
  misc_feature 1..20: note = Description of Artificial Sequence: Synthetic oligonucleotide
  misc_feature 1..20: note = Target: SCN10A; (+) strand; PAM type: YTN; PAM sequence: TTT
  source 1..20: mol_type = other DNA
aggaaatgatgtgaagttga

SEQ ID NO: 60802 - DNA, 20 bp, synthetic construct
  misc_feature 1..20: note = Description of Artificial Sequence: Synthetic oligonucleotide
  misc_feature 1..20: note = Target: SCN10A; (+) strand; PAM type: YTN; PAM sequence: TTA
  source 1..20: mol_type = other DNA
ggaaatgatgtgaagttgaa

SEQ ID NO: 60803 - DNA, 20 bp, synthetic construct
  misc_feature 1..20: note = Description of Artificial Sequence: Synthetic oligonucleotide
  misc_feature 1..20: note = Target: SCN10A; (+) strand; PAM type: YTN; PAM sequence: TTG
  source 1..20: mol_type = other DNA
aagactgaacatgtggctat

SEQ ID NO: 60804 - DNA, 20 bp, synthetic construct
  misc_feature 1..20: note = Description of Artificial Sequence: Synthetic oligonucleotide
  misc_feature 1..20: note = Target: SCN10A; (+) strand; PAM type: YTN; PAM sequence: CTG
  source 1..20: mol_type = other DNA
aacatgtggctatgccgtgt

SEQ ID NO: 60805 - DNA, 20 bp, synthetic construct
  misc_feature 1..20: note = Description of Artificial Sequence: Synthetic oligonucleotide
  misc_feature 1..20: note = Target: SCN10A; (+) strand; PAM type: YTN; PAM sequence: CTA
  source 1..20: mol_type = other DNA
tgccgtgtctattttgtaca

SEQ ID NO: 60806 - DNA, 20 bp, synthetic construct
  misc_feature 1..20: note = Description of Artificial Sequence: Synthetic oligonucleotide
  misc_feature 1..20: note = Target: SCN10A; (+) strand; PAM type: YTN; PAM sequence: CTA
  source 1..20: mol_type = other DNA
ttttgtacaggttctgtgtt

SEQ ID NO: 60807 - DNA, 20 bp, synthetic construct
  misc_feature 1..20: note = Description of Artificial Sequence: Synthetic oligonucleotide
  misc_feature 1..20: note = Target: SCN10A; (+) strand; PAM type: YTN; PAM sequence: TTT
  source 1..20: mol_type = other DNA
tgtacaggttctgtgtttta

SEQ ID NO: 60808 - DNA, 20 bp, synthetic construct
  misc_feature 1..20: note = Description of Artificial Sequence: Synthetic oligonucleotide
  misc_feature 1..20: note = Target: SCN10A; (+) strand; PAM type: YTN; PAM sequence: TTT
  source 1..20: mol_type = other DNA
gtacaggttctgtgttttaa

SEQ ID NO: 60809 - DNA, 20 bp, synthetic construct
  misc_feature 1..20: note = Description of Artificial Sequence: Synthetic oligonucleotide
  misc_feature 1..20: note = Target: SCN10A; (+) strand; PAM type: YTN; PAM sequence: TTG
  source 1..20: mol_type = other DNA
tacaggttctgtgttttaac

SEQ ID NO: 60810 - DNA, 20 bp, synthetic construct
  misc_feature 1..20: note = Description of Artificial Sequence: Synthetic oligonucleotide
  misc_feature 1..20: note = Target: SCN10A; (+) strand; PAM type: YTN; PAM sequence: TTC
  source 1..20: mol_type = other DNA
tgtgttttaactcaccacct

SEQ ID NO: 60811 - DNA, 20 bp, synthetic construct
  misc_feature 1..20: note = Description of Artificial Sequence: Synthetic oligonucleotide
  misc_feature 1..20: note = Target: SCN10A; (+) strand; PAM type: YTN; PAM sequence: CTG
  source 1..20: mol_type = other DNA
tgttttaactcaccacctga

SEQ ID NO: 60812 - DNA, 20 bp, synthetic construct
  misc_feature 1..20: note = Description of Artificial Sequence: Synthetic oligonucleotide
  misc_feature 1..20: note = Target: SCN10A; (+) strand; PAM type: YTN; PAM sequence: TTT
  source 1..20: mol_type = other DNA
taactcaccacctgataatc

SEQ ID NO: 60813 - DNA, 20 bp, synthetic construct
  misc_feature 1..20: note = Description of Artificial Sequence: Synthetic oligonucleotide
  misc_feature 1..20: note = Target: SCN10A; (+) strand; PAM type: YTN; PAM sequence: TTT
  source 1..20: mol_type = other DNA
aactcaccacctgataatcc

SEQ ID NO: 60814 - DNA, 20 bp, synthetic construct
  misc_feature 1..20: note = Description of Artificial Sequence: Synthetic oligonucleotide
  misc_feature 1..20: note = Target: SCN10A; (+) strand; PAM type: YTN; PAM sequence: TTA
  source 1..20: mol_type = other DNA
actcaccacctgataatccc

SEQ ID NO: 60815 - DNA, 20 bp, synthetic construct
  misc_feature 1..20: note = Description of Artificial Sequence: Synthetic oligonucleotide
  misc_feature 1..20: note = Target: SCN10A; (+) strand; PAM type: YTN; PAM sequence: CTC
  source 1..20: mol_type = other DNA
accacctgataatcccatgg

SEQ ID NO: 60816 - DNA, 20 bp, synthetic construct
  misc_feature 1..20: note = Description of Artificial Sequence: Synthetic oligonucleotide
  misc_feature 1..20: note = Target: SCN10A; (+) strand; PAM type: YTN; PAM sequence: CTG
  source 1..20: mol_type = other DNA
ataatcccatggcaggccca

SEQ ID NO: 60817 - DNA, 20 bp, synthetic construct
  misc_feature 1..20: note = Description of Artificial Sequence: Synthetic oligonucleotide
  misc_feature 1..20: note = Target: SCN10A; (+) strand; PAM type: YTN; PAM sequence: CTT
  source 1..20: mol_type = other DNA
tatgctattctactagccca

SEQ ID NO: 60818 - DNA, 20 bp, synthetic construct
  misc_feature 1..20: note = Description of Artificial Sequence: Synthetic oligonucleotide
  misc_feature 1..20: note = Target: SCN10A; (+) strand; PAM type: YTN; PAM sequence: TTT
  source 1..20: mol_type = other DNA
atgctattctactagcccac

SEQ ID NO: 60819 - DNA, 20 bp, synthetic construct
  misc_feature 1..20: note = Description of Artificial Sequence: Synthetic oligonucleotide
  misc_feature 1..20: note = Target: SCN10A; (+) strand; PAM type: YTN; PAM sequence: TTA
  source 1..20: mol_type = other DNA
tgctattctactagcccaca

SEQ ID NO: 60820 - DNA, 20 bp, synthetic construct
  misc_feature 1..20: note = Description of Artificial Sequence: Synthetic oligonucleotide
  misc_feature 1..20: note = Target: SCN10A; (+) strand; PAM type: YTN; PAM sequence: CTA
  source 1..20: mol_type = other DNA
ttctactagcccacacttgt

SEQ ID NO: 60821 - DNA, 20 bp, synthetic construct
  misc_feature 1..20: note = Description of Artificial Sequence: Synthetic oligonucleotide
  misc_feature 1..20: note = Target: SCN10A; (+) strand; PAM type: YTN; PAM sequence: TTC
  source 1..20: mol_type = other DNA
tactagcccacacttgtgta

SEQ ID NO: 60822 - DNA, 20 bp, synthetic construct
  misc_feature 1..20: note = Description of Artificial Sequence: Synthetic oligonucleotide
  misc_feature 1..20: note = Target: SCN10A; (+) strand; PAM type: YTN; PAM sequence: CTA
  source 1..20: mol_type = other DNA
ctagcccacacttgtgtaat

SEQ ID NO: 60823 - DNA, 20 bp, synthetic construct
  misc_feature 1..20: note = Description of Artificial Sequence: Synthetic oligonucleotide
  misc_feature 1..20: note = Target: SCN10A; (+) strand; PAM type: YTN; PAM sequence: CTA
  source 1..20: mol_type = other DNA
gcccacacttgtgtaattgc

SEQ ID NO: 60824 - DNA, 20 bp, synthetic construct
  misc_feature 1..20: note = Description of Artificial Sequence: Synthetic oligonucleotide
  misc_feature 1..20: note = Target: SCN10A; (+) strand; PAM type: YTN; PAM sequence: CTT
  source 1..20: mol_type = other DNA
gtgtaattgcaccactgtga

SEQ ID NO: 60825 - DNA, 20 bp, synthetic construct
  misc_feature 1..20: note = Description of Artificial Sequence: Synthetic oligonucleotide
  misc_feature 1..20: note = Target: SCN10A; (+) strand; PAM type: YTN; PAM sequence: TTG
  source 1..20: mol_type = other DNA
tgtaattgcaccactgtgat

SEQ ID NO: 60826 - DNA, 20 bp, synthetic construct
  misc_feature 1..20: note = Description of Artificial Sequence: Synthetic oligonucleotide
  misc_feature 1..20: note = Target: SCN10A; (+) strand; PAM type: YTN; PAM sequence: TTG
  source 1..20: mol_type = other DNA
caccactgtgatatcatatt

SEQ ID NO: 60827 - DNA, 20 bp, synthetic construct
  misc_feature 1..20: note = Description of Artificial Sequence: Synthetic oligonucleotide
  misc_feature 1..20: note = Target: SCN10A; (+) strand; PAM type: YTN; PAM sequence: CTG
  source 1..20: mol_type = other DNA
tgatatcatattcactagga

SEQ ID NO: 60828 - DNA, 20 bp, synthetic construct
  misc_feature 1..20: note = Description of Artificial Sequence: Synthetic oligonucleotide
  misc_feature 1..20: note = Target: SCN10A; (+) strand; PAM type: YTN; PAM sequence: TTC
  source 1..20: mol_type = other DNA
actaggaaggccctctagcc

SEQ ID NO: 60829 - DNA, 20 bp, synthetic construct
  misc_feature 1..20: note = Description of Artificial Sequence: Synthetic oligonucleotide
  misc_feature 1..20: note = Target: SCN10A; (+) strand; PAM type: YTN; PAM sequence: CTA
  source 1..20: mol_type = other DNA
ggaaggccctctagcctcat

SEQ ID NO: 60830 - DNA, 20 bp, synthetic construct
  misc_feature 1..20: note = Description of Artificial Sequence: Synthetic oligonucleotide
  misc_feature 1..20: note = Target: SCN10A; (+) strand; PAM type: YTN; PAM sequence: CTC
  source 1..20: mol_type = other DNA
tagcctcatggtgtagtctg

SEQ ID NO: 60831 - DNA, 20 bp, synthetic construct
  misc_feature 1..20: note = Description of Artificial Sequence: Synthetic oligonucleotide
  misc_feature 1..20: note = Target: SCN10A; (+) strand; PAM type: YTN; PAM sequence: CTA
  source 1..20: mol_type = other DNA
gcctcatggtgtagtctgta

SEQ ID NO: 60832 - DNA, 20 bp, synthetic construct
  misc_feature 1..20: note = Description of Artificial Sequence: Synthetic oligonucleotide
  misc_feature 1..20: note = Target: SCN10A; (+) strand; PAM type: YTN; PAM sequence: CTC
  source 1..20: mol_type = other DNA
atggtgtagtctgtaggaat

SEQ ID NO: 60833 - DNA, 20 bp, synthetic construct
  misc_feature 1..20: note = Description of Artificial Sequence: Synthetic oligonucleotide
  misc_feature 1..20: note = Target: SCN10A; (+) strand; PAM type: YTN; PAM sequence: CTG
  source 1..20: mol_type = other DNA
taggaatagagaatgacctc

SEQ ID NO: 60834 - DNA, 20 bp, synthetic construct
  misc_feature 1..20: note = Description of Artificial Sequence: Synthetic oligonucleotide
  misc_feature 1..20: note = Target: SCN10A; (+) strand; PAM type: YTN; PAM sequence: CTC
  source 1..20: mol_type = other DNA
agttcacactgagtgctact

SEQ ID NO: 60835 - DNA, 20 bp, synthetic construct
  misc_feature 1..20: note = Description of Artificial Sequence: Synthetic oligonucleotide
  misc_feature 1..20: note = Target: SCN10A; (+) strand; PAM type: YTN; PAM sequence: TTC
  source 1..20: mol_type = other DNA
acactgagtgctactccttg

SEQ ID NO: 60836 - DNA, 20 bp, synthetic construct
  misc_feature 1..20: note = Description of Artificial Sequence: Synthetic oligonucleotide
  misc_feature 1..20: note = Target: SCN10A; (+) strand; PAM type: YTN; PAM sequence: CTG
  source 1..20: mol_type = other DNA
agtgctactccttgcaaagt

SEQ ID NO: 60837 - DNA, 20 bp, synthetic construct
  misc_feature 1..20: note = Description of Artificial Sequence: Synthetic oligonucleotide
  misc_feature 1..20: note = Target: SCN10A; (+) strand; PAM type: YTN; PAM sequence: CTA
  source 1..20: mol_type = other DNA
ctccttgcaaagtccccaca

SEQ ID NO: 60838 - DNA, 20 bp, synthetic construct
  misc_feature 1..20: note = Description of Artificial Sequence: Synthetic oligonucleotide
  misc_feature 1..20: note = Target: SCN10A; (+) strand; PAM type: YTN; PAM sequence: CTC
  source 1..20: mol_type = other DNA
cttgcaaagtccccacatag

SEQ ID NO: 60839 - DNA, 20 bp, synthetic construct
  misc_feature 1..20: note = Description of Artificial Sequence: Synthetic oligonucleotide
  misc_feature 1..20: note = Target: SCN10A; (+) strand; PAM type: YTN; PAM sequence: CTT
  source 1..20: mol_type = other DNA
gcaaagtccccacatagcat

SEQ ID NO: 60840 - DNA, 20 bp, synthetic construct
  misc_feature 1..20: note = Description of Artificial Sequence: Synthetic oligonucleotide
  misc_feature 1..20: note = Target: SCN10A; (+) strand; PAM type: YTN; PAM sequence: TTG
  source 1..20: mol_type = other DNA
caaagtccccacatagcatc

SEQ ID NO: 60841 - DNA, 20 bp, synthetic construct
  misc_feature 1..20: note = Description of Artificial Sequence: Synthetic oligonucleotide
  misc_feature 1..20: note = Target: SCN10A; (+) strand; PAM type: YTN; PAM sequence: CTT
  source 1..20: mol_type = other DNA
ctgggaacctagactctcca

SEQ ID NO: 60842 - DNA, 20 bp, synthetic construct
  misc_feature 1..20: note = Description of Artificial Sequence: Synthetic oligonucleotide
  misc_feature 1..20: note = Target: SCN10A; (+) strand; PAM type: YTN; PAM sequence: TTC
  source 1..20: mol_type = other DNA
tgggaacctagactctccat

SEQ ID NO: 60843 - DNA, 20 bp, synthetic construct
  misc_feature 1..20: note = Description of Artificial Sequence: Synthetic oligonucleotide
  misc_feature 1..20: note = Target: SCN10A; (+) strand; PAM type: YTN; PAM sequence: CTG
  source 1..20: mol_type = other DNA
ggaacctagactctccattt

SEQ ID NO: 60844 - DNA, 20 bp, synthetic construct
  misc_feature 1..20: note = Description of Artificial Sequence: Synthetic oligonucleotide
  misc_feature 1..20: note = Target: SCN10A; (+) strand; PAM type: YTN; PAM sequence: CTA
  source 1..20: mol_type = other DNA
gactctccattttattgagc

SEQ ID NO: 60845 - DNA, 20 bp, synthetic construct
  misc_feature 1..20: note = Description of Artificial Sequence: Synthetic oligonucleotide
  misc_feature 1..20: note = Target: SCN10A; (+) strand; PAM type: YTN; PAM sequence: CTC
  source 1..20: mol_type = other DNA
tccattttattgagcggcca

SEQ ID NO: 60846 - DNA, 20 bp, synthetic construct
  misc_feature 1..20: note = Description of Artificial Sequence: Synthetic oligonucleotide
  misc_feature 1..20: note = Target: SCN10A; (+) strand; PAM type: YTN; PAM sequence: CTC
  source 1..20: mol_type = other DNA
cattttattgagcggccaaa

SEQ ID NO: 60847 - DNA, 20 bp, synthetic construct
  misc_feature 1..20: note = Description of Artificial Sequence: Synthetic oligonucleotide
  misc_feature 1..20: note = Target: SCN10A; (+) strand; PAM type: YTN; PAM sequence: TTT
  source 1..20: mol_type = other DNA
tattgagcggccaaagcaag

SEQ ID NO: 60848 - DNA, 20 bp, synthetic construct
  misc_feature 1..20: note = Description of Artificial Sequence: Synthetic oligonucleotide
  misc_feature 1..20: note = Target: SCN10A; (+) strand; PAM type: YTN; PAM sequence: TTT
  source 1..20: mol_type = other DNA
attgagcggccaaagcaaga

SEQ ID NO: 60849 - DNA, 20 bp, synthetic construct
  misc_feature 1..20: note = Description of Artificial Sequence: Synthetic oligonucleotide
  misc_feature 1..20: note = Target: SCN10A; (+) strand; PAM type: YTN; PAM sequence: TTA
  source 1..20: mol_type = other DNA
ttgagcggccaaagcaagag

SEQ ID NO: 60850 - DNA, 20 bp, synthetic construct
  misc_feature 1..20: note = Description of Artificial Sequence: Synthetic oligonucleotide
  misc_feature 1..20: note = Target: SCN10A; (+) strand; PAM type: YTN; PAM sequence: TTG
  source 1..20: mol_type = other DNA
agcggccaaagcaagagata

SEQ ID NO: 60851 - DNA, 20 bp, synthetic construct
  misc_feature 1..20: note = Description of Artificial Sequence: Synthetic oligonucleotide
  misc_feature 1..20: note = Target: SCN10A; (+) strand; PAM type: YTN; PAM sequence: TTG
  source 1..20: mol_type = other DNA
atctcatggttgactcacca

SEQ ID NO: 60852 - DNA, 20 bp, synthetic construct
  misc_feature 1..20: note = Description of Artificial Sequence: Synthetic oligonucleotide
  misc_feature 1..20: note = Target: SCN10A; (+) strand; PAM type: YTN; PAM sequence: CTC
  source 1..20: mol_type = other DNA
atggttgactcaccacctgc

SEQ ID NO: 60853 - DNA, 20 bp, synthetic construct
  misc_feature 1..20: note = Description of Artificial Sequence: Synthetic oligonucleotide
  misc_feature 1..20: note = Target: SCN10A; (+) strand; PAM type: YTN; PAM sequence: TTG
  source 1..20: mol_type = other DNA
actcaccacctgcagaagtg

SEQ ID NO: 60854 - DNA, 20 bp, synthetic construct
  misc_feature 1..20: note = Description of Artificial Sequence: Synthetic oligonucleotide
  misc_feature 1..20: note = Target: SCN10A; (+) strand; PAM type: YTN; PAM sequence: CTC
  source 1..20: mol_type = other DNA
accacctgcagaagtgcaag

SEQ ID NO: 60855 - DNA, 20 bp, synthetic construct
  misc_feature 1..20: note = Description of Artificial Sequence: Synthetic oligonucleotide
  misc_feature 1..20: note = Target: SCN10A; (+) strand; PAM type: YTN; PAM sequence: CTG
  source 1..20: mol_type = other DNA
cagaagtgcaaggtaaccca

SEQ ID NO: 60856 - DNA, 20 bp, synthetic construct
  misc_feature 1..20: note = Description of Artificial Sequence: Synthetic oligonucleotide
  misc_feature 1..20: note = Target: SCN10A; (+) strand; PAM type: YTN; PAM sequence: TTG
  source 1..20: mol_type = other DNA
caacattatcaaagttgact

SEQ ID NO: 60857 - DNA, 20 bp, synthetic construct
  misc_feature 1..20: note = Description of Artificial Sequence: Synthetic oligonucleotide
  misc_feature 1..20: note = Target: SCN10A; (+) strand; PAM type: YTN; PAM sequence: TTA
  source 1..20: mol_type = other DNA
tcaaagttgactttcacatt

SEQ ID NO: 60858 - DNA, 20 bp, synthetic construct
  misc_feature 1..20: note = Description of Artificial Sequence: Synthetic oligonucleotide
  misc_feature 1..20: note = Target: SCN10A; (+) strand; PAM type: YTN; PAM sequence: TTG
  source 1..20: mol_type = other DNA
actttcacattgacccagaa

SEQ ID NO: 60859 - DNA, 20 bp, synthetic construct
  misc_feature 1..20: note = Description of Artificial Sequence: Synthetic oligonucleotide
  misc_feature 1..20: note = Target: SCN10A; (+) strand; PAM type: YTN; PAM sequence: CTT
  source 1..20: mol_type = other DNA
tcacattgacccagaagaag

SEQ ID NO: 60860 - DNA, 20 bp, synthetic construct
  misc_feature 1..20: note = Description of Artificial Sequence: Synthetic oligonucleotide
  misc_feature 1..20: note = Target: SCN10A; (+) strand; PAM type: YTN; PAM sequence: TTT
  source 1..20: mol_type = other DNA
cacattgacccagaagaagc

SEQ ID NO: 60861 - DNA, 20 bp, synthetic construct
  misc_feature 1..20: note = Description of Artificial Sequence: Synthetic oligonucleotide
  misc_feature 1..20: note = Target: SCN10A; (+) strand; PAM type: YTN; PAM sequence: TTC
  source 1..20: mol_type = other DNA
acattgacccagaagaagct

SEQ ID NO: 60862 - DNA, 20 bp, synthetic construct
  misc_feature 1..20: note = Description of Artificial Sequence: Synthetic oligonucleotide
  misc_feature 1..20: note = Target: SCN10A; (+) strand; PAM type: YTN; PAM sequence: TTG
  source 1..20: mol_type = other DNA
acccagaagaagctgccagt

SEQ ID NO: 60863 - DNA, 20 bp, synthetic construct
  misc_feature 1..20: note = Description of Artificial Sequence: Synthetic oligonucleotide
  misc_feature 1..20: note = Target: SCN10A; (+) strand; PAM type: YTN; PAM sequence: CTG
  source 1..20: mol_type = other DNA
ccagtggagttttgaatctt

SEQ ID NO: 60864 - DNA, 20 bp, synthetic construct
  misc_feature 1..20: note = Description of Artificial Sequence: Synthetic oligonucleotide
  misc_feature 1..20: note = Target: SCN10A; (+) strand; PAM type: YTN; PAM sequence: TTT
  source 1..20: mol_type = other DNA
tgaatcttgcagtcagactt

SEQ ID NO: 60865 - DNA, 20 bp, synthetic construct
  misc_feature 1..20: note = Description of Artificial Sequence: Synthetic oligonucleotide
  misc_feature 1..20: note = Target: SCN10A; (+) strand; PAM type: YTN; PAM sequence: TTT
  source 1..20: mol_type = other DNA
gaatcttgcagtcagacttg

SEQ ID NO: 60866 - DNA, 20 bp, synthetic construct
  misc_feature 1..20: note = Description of Artificial Sequence: Synthetic oligonucleotide
  misc_feature 1..20: note = Target: SCN10A; (+) strand; PAM type: YTN; PAM sequence: TTG
  source 1..20: mol_type = other DNA
aatcttgcagtcagacttgt

SEQ ID NO: 60867 - DNA, 20 bp, synthetic construct
  misc_feature 1..20: note = Description of Artificial Sequence: Synthetic oligonucleotide
  misc_feature 1..20: note = Target: SCN10A; (+) strand; PAM type: YTN; PAM sequence: CTT
  source 1..20: mol_type = other DNA
gcagtcagacttgttattca

SEQ ID NO: 60868 - DNA, 20 bp, synthetic construct
  misc_feature 1..20: note = Description of Artificial Sequence: Synthetic oligonucleotide
  misc_feature 1..20: note = Target: SCN10A; (+) strand; PAM type: YTN; PAM sequence: TTG
  source 1..20: mol_type = other DNA
cagtcagacttgttattcac

SEQ ID NO: 60869 - DNA, 20 bp, synthetic construct
  misc_feature 1..20: note = Description of Artificial Sequence: Synthetic oligonucleotide
  misc_feature 1..20: note = Target: SCN10A; (+) strand; PAM type: YTN; PAM sequence: CTT
  source 1..20: mol_type = other DNA
gttattcacaatcgacaaag

SEQ ID NO: 60870 - DNA, 20 bp, synthetic construct
  misc_feature 1..20: note = Description of Artificial Sequence: Synthetic oligonucleotide
  misc_feature 1..20: note = Target: SCN10A; (+) strand; PAM type: YTN; PAM sequence: TTG
  source 1..20: mol_type = other DNA
ttattcacaatcgacaaagg

SEQ ID NO: 60871 - DNA, 20 bp, synthetic construct
  misc_feature 1..20: note = Description of Artificial Sequence: Synthetic oligonucleotide
  misc_feature 1..20: note = Target: SCN10A; (+) strand; PAM type: YTN; PAM sequence: TTA
  source 1..20: mol_type = other DNA
ttcacaatcgacaaaggtac

SEQ ID NO: 60872 - DNA, 20 bp, synthetic construct
  misc_feature 1..20: note = Description of Artificial Sequence: Synthetic oligonucleotide
  misc_feature 1..20: note = Target: SCN10A; (+) strand; PAM type: YTN; PAM sequence: TTC
  source 1..20: mol_type = other DNA
acaatcgacaaaggtacaag

SEQ ID NO: 60873 - DNA, 20 bp, synthetic construct
  misc_feature 1..20: note = Description of Artificial Sequence: Synthetic oligonucleotide
  misc_feature 1..20: note = Target: SCN10A; (+) strand; PAM type: YTN; PAM sequence: CTC
  source 1..20: mol_type = other DNA
tccatcggtatagttgatgc

SEQ ID NO: 60874 - DNA, 20 bp, synthetic construct
  misc_feature 1..20: note = Description of Artificial Sequence: Synthetic oligonucleotide
  misc_feature 1..20: note = Target: SCN10A; (+) strand; PAM type: YTN; PAM sequence: CTC
  source 1..20: mol_type = other DNA
catcggtatagttgatgcac

SEQ ID NO: 60875 - DNA, 20 bp, synthetic construct
  misc_feature 1..20: note = Description of Artificial Sequence: Synthetic oligonucleotide
  misc_feature 1..20: note = Target: SCN10A; (+) strand; PAM type: YTN; PAM sequence: TTG
  source 1..20: mol_type = other DNA
atgcacctccaaaacttccc

SEQ ID NO: 60876 - DNA, 20 bp, synthetic construct
  misc_feature 1..20: note = Description of Artificial Sequence: Synthetic oligonucleotide
  misc_feature 1..20: note = Target: SCN10A; (+) strand; PAM type: YTN; PAM sequence: CTC
  source 1..20: mol_type = other DNA
caaaacttccctgcgaagag

SEQ ID NO: 60877 - DNA, 20 bp, synthetic construct
  misc_feature 1..20: note = Description of Artificial Sequence: Synthetic oligonucleotide
  misc_feature 1..20: note = Target: SCN10A; (+) strand; PAM type: YTN; PAM sequence: CTT
  source 1..20: mol_type = other DNA
ccctgcgaagaggttcacac

SEQ ID NO: 60878 - DNA, 20 bp, synthetic construct
  misc_feature 1..20: note = Description of Artificial Sequence: Synthetic oligonucleotide
  misc_feature 1..20: note = Target: SCN10A; (+) strand; PAM type: YTN; PAM sequence: TTC
  source 1..20: mol_type = other DNA
cctgcgaagaggttcacacc

SEQ ID NO: 60879 - DNA, 20 bp, synthetic construct
  misc_feature 1..20: note = Description of Artificial Sequence: Synthetic oligonucleotide
  misc_feature 1..20: note = Target: SCN10A; (+) strand; PAM type: YTN; PAM sequence: CTG
  source 1..20: mol_type = other DNA
cgaagaggttcacacccatg

SEQ ID NO: 60880 - DNA, 20 bp, synthetic construct
  misc_feature 1..20: note = Description of Artificial Sequence: Synthetic oligonucleotide
  misc_feature 1..20: note = Target: SCN10A; (+) strand; PAM type: YTN; PAM sequence: TTC
  source 1..20: mol_type = other DNA
acacccatgatgctgaagat

SEQ ID NO: 60881 - DNA, 20 bp, synthetic construct
  misc_feature 1..20: note = Description of Artificial Sequence: Synthetic oligonucleotide
  misc_feature 1..20: note = Target: SCN10A; (+) strand; PAM type: YTN; PAM sequence: CTG
  source 1..20: mol_type = other DNA
aagatgagccagaagatgag

SEQ ID NO: 60882 - DNA, 20 bp, synthetic construct
  misc_feature 1..20: note = Description of Artificial Sequence: Synthetic oligonucleotide
  misc_feature 1..20: note = Target: SCN10A; (+) strand; PAM type: YTN; PAM sequence: TTC
  source 1..20: mol_type = other DNA
atgatggatgggatggcgcc

SEQ ID NO: 60883 - DNA, 20 bp, synthetic construct
  misc_feature 1..20: note = Description of Artificial Sequence: Synthetic oligonucleotide
  misc_feature 1..20: note = Target: SCN10A; (+) strand; PAM type: YTN; PAM sequence: CTG
  source 1..20: mol_type = other DNA
gtgggagatagagaaagacc

SEQ ID NO: 60884 - DNA, 20 bp, synthetic construct
  misc_feature 1..20: note = Description of Artificial Sequence: Synthetic oligonucleotide
  misc_feature 1..20: note = Target: SCN10A; (+) strand; PAM type: YTN; PAM sequence: CTG
  source 1..20: mol_type = other DNA
gaacctcccaatgccccacc

SEQ ID NO: 60885 - DNA, 20 bp, synthetic construct
  misc_feature 1..20: note = Description of Artificial Sequence: Synthetic oligonucleotide
  misc_feature 1..20: note = Target: SCN10A; (+) strand; PAM type: YTN; PAM sequence: CTC
  source 1..20: mol_type = other DNA
ccaatgccccaccccctctg

SEQ ID NO: 60886 - DNA, 20 bp, synthetic construct
  misc_feature 1..20: note = Description of Artificial Sequence: Synthetic oligonucleotide
  misc_feature 1..20: note = Target: SCN10A; (+) strand; PAM type: YTN; PAM sequence: CTC
  source 1..20: mol_type = other DNA
tgctggattctatctctttc

SEQ ID NO: 60887 - DNA, 20 bp, synthetic construct
  misc_feature 1..20: note = Description of Artificial Sequence: Synthetic oligonucleotide
  misc_feature 1..20: note = Target: SCN10A; (+) strand; PAM type: YTN; PAM sequence: CTG
  source 1..20: mol_type = other DNA
ctggattctatctctttcta

SEQ ID NO: 60888 - DNA, 20 bp, synthetic construct
  misc_feature 1..20: note = Description of Artificial Sequence: Synthetic oligonucleotide
  misc_feature 1..20: note = Target: SCN10A; (+) strand; PAM type: YTN; PAM sequence: CTG
  source 1..20: mol_type = other DNA
gattctatctctttctatac

SEQ ID NO: 60889 - DNA, 20 bp, synthetic construct
  misc_feature 1..20: note = Description of Artificial Sequence: Synthetic oligonucleotide
  misc_feature 1..20: note = Target: SCN10A; (+) strand; PAM type: YTN; PAM sequence: TTC
  source 1..20: mol_type = other DNA
tatctctttctatactcatt

SEQ ID NO: 60890 - DNA, 20 bp, synthetic construct
  misc_feature 1..20: note = Description of Artificial Sequence: Synthetic oligonucleotide
  misc_feature 1..20: note = Target: SCN10A; (+) strand; PAM type: YTN; PAM sequence: CTA
  source 1..20: mol_type = other DNA
tctctttctatactcattca

SEQ ID NO: 60891 - DNA, 20 bp, synthetic construct
  misc_feature 1..20: note = Description of Artificial Sequence: Synthetic oligonucleotide
  misc_feature 1..20: note = Target: SCN10A; (+) strand; PAM type: YTN; PAM sequence: CTC
  source 1..20: mol_type = other DNA
tttctatactcattcaggct

SEQ ID NO: 60892 - DNA, 20 bp, synthetic construct
  misc_feature 1..20: note = Description of Artificial Sequence: Synthetic oligonucleotide
  misc_feature 1..20: note = Target: SCN10A; (+) strand; PAM type: YTN; PAM sequence: CTT
  source 1..20: mol_type = other DNA
tctatactcattcaggctgc

SEQ ID NO: 60893 - DNA, 20 bp, synthetic construct
  misc_feature 1..20: note = Description of Artificial Sequence: Synthetic oligonucleotide
  misc_feature 1..20: note = Target: SCN10A; (+) strand; PAM type: YTN; PAM sequence: TTT
  source 1..20: mol_type = other DNA
ctatactcattcaggctgct

SEQ ID NO: 60894 - DNA, 20 bp, synthetic construct
  misc_feature 1..20: note = Description of Artificial Sequence: Synthetic oligonucleotide
  misc_feature 1..20: note = Target: SCN10A; (+) strand; PAM type: YTN; PAM sequence: TTC
  source 1..20: mol_type = other DNA
tatactcattcaggctgctt

SEQ ID NO: 60895 - DNA, 20 bp, synthetic construct
  misc_feature 1..20: note = Description of Artificial Sequence: Synthetic oligonucleotide
  misc_feature 1..20: note = Target: SCN10A; (+) strand; PAM type: YTN; PAM sequence: CTA
  source 1..20: mol_type = other DNA
tactcattcaggctgcttca

SEQ ID NO: 60896 - DNA, 20 bp, synthetic construct
  misc_feature 1..20: note = Description of Artificial Sequence: Synthetic oligonucleotide
  misc_feature 1..20: note = Target: SCN10A; (+) strand; PAM type: YTN; PAM sequence: CTC
  source 1..20: mol_type = other DNA
attcaggctgcttcatgagc

SEQ ID NO: 60897 - DNA, 20 bp, synthetic construct
  misc_feature 1..20: note = Description of Artificial Sequence: Synthetic oligonucleotide
  misc_feature 1..20: note = Target: SCN10A; (+) strand; PAM type: YTN; PAM sequence: TTC
  source 1..20: mol_type = other DNA
aggctgcttcatgagccagt

SEQ ID NO: 60898 - DNA, 20 bp, synthetic construct
  misc_feature 1..20: note = Description of Artificial Sequence: Synthetic oligonucleotide
  misc_feature 1..20: note = Target: SCN10A; (+) strand; PAM type: YTN; PAM sequence: CTG
  source 1..20: mol_type = other DNA
cttcatgagccagtggcctt

SEQ ID NO: 60899 - DNA, 20 bp, synthetic construct
  misc_feature 1..20: note = Description of Artificial Sequence: Synthetic oligonucleotide
  misc_feature 1..20: note = Target: SCN10A; (+) strand; PAM type: YTN; PAM sequence: CTT
  source 1..20: mol_type = other DNA
catgagccagtggcctttgg

SEQ ID NO: 60900 - DNA, 20 bp, synthetic construct
  misc_feature 1..20: note = Description of Artificial Sequence: Synthetic oligonucleotide
  misc_feature 1..20: note = Target: SCN10A; (+) strand; PAM type: YTN; PAM sequence: TTC
  source 1..20: mol_type = other DNA
atgagccagtggcctttgga

SEQ ID NO: 60901 - DNA, 20 bp, synthetic construct
  misc_feature 1..20: note = Description of Artificial Sequence: Synthetic oligonucleotide
  misc_feature 1..20: note = Target: SCN10A; (+) strand; PAM type: YTN; PAM sequence: CTT
  source 1..20: mol_type = other DNA
tggaagaagcaagagaagtg

SEQ ID NO: 60902 - DNA, 20 bp, synthetic construct
  misc_feature 1..20: note = Description of Artificial Sequence: Synthetic oligonucleotide
  misc_feature 1..20: note = Target: SCN10A; (+) strand; PAM type: YTN; PAM sequence: TTT
  source 1..20: mol_type = other DNA
ggaagaagcaagagaagtgg

SEQ ID NO: 60903 - DNA, 20 bp, synthetic construct
  misc_feature 1..20: note = Description of Artificial Sequence: Synthetic oligonucleotide
  misc_feature 1..20: note = Target: SCN10A; (+) strand; PAM type: YTN; PAM sequence: TTG
  source 1..20: mol_type = other DNA
gaagaagcaagagaagtggg

SEQ ID NO: 60904 - DNA, 20 bp, synthetic construct
  misc_feature 1..20: note = Description of Artificial Sequence: Synthetic oligonucleotide
  misc_feature 1..20: note = Target: SCN10A; (+) strand; PAM type: YTN; PAM sequence: TTA
  source 1..20: mol_type = other DNA
attagtgcaataattcagac

SEQ ID NO: 60905 - DNA, 20 bp, synthetic construct
  misc_feature 1..20: note = Description of Artificial Sequence: Synthetic oligonucleotide
  misc_feature 1..20: note = Target: SCN10A; (+) strand; PAM type: YTN; PAM sequence: TTA
  source 1..20: mol_type = other DNA
gtgcaataattcagactcag

SEQ ID NO: 60906 - DNA, 20 bp, synthetic construct
  misc_feature 1..20: note = Description of Artificial Sequence: Synthetic oligonucleotide
  misc_feature 1..20: note = Target: SCN10A; (+) strand; PAM type: YTN; PAM sequence: TTC
  source 1..20: mol_type = other DNA
agactcagaagactgagaga

SEQ ID NO: 60907 - DNA, 20 bp, synthetic construct
  misc_feature 1..20: note = Description of Artificial Sequence: Synthetic oligonucleotide
  misc_feature 1..20: note = Target: SCN10A; (+) strand; PAM type: YTN; PAM sequence: CTC
  source 1..20: mol_type = other DNA
agaagactgagagacattgg

SEQ ID NO: 60908 - DNA, 20 bp, synthetic construct
  misc_feature 1..20: note = Description of Artificial Sequence: Synthetic oligonucleotide
  misc_feature 1..20: note = Target: SCN10A; (+) strand; PAM type: YTN; PAM sequence: CTG
  source 1..20: mol_type = other DNA
agagacattgggcagctgaa

SEQ ID NO: 60909 - DNA, 20 bp, synthetic construct
  misc_feature 1..20: note = Description of Artificial Sequence: Synthetic oligonucleotide
  misc_feature 1..20: note = Target: SCN10A; (+) strand; PAM type: YTN; PAM sequence: TTG
  source 1..20: mol_type = other DNA
ggcagctgaagatggattta

SEQ ID NO: 60910 - DNA, 20 bp, synthetic construct
  misc_feature 1..20: note = Description of Artificial Sequence: Synthetic oligonucleotide
  misc_feature 1..20: note = Target: SCN10A; (+) strand; PAM type: YTN; PAM sequence: CTG
  source 1..20: mol_type = other DNA
aagatggatttagaccttct

SEQ ID NO: 60911 - DNA, 20 bp, synthetic construct
  misc_feature 1..20: note = Description of Artificial Sequence: Synthetic oligonucleotide
  misc_feature 1..20: note = Target: SCN10A; (+) strand; PAM type: YTN; PAM sequence: TTT
  source 1..20: mol_type = other DNA
agaccttcttcccttaacct

SEQ ID NO: 60912 - DNA, 20 bp, synthetic construct
  misc_feature 1..20: note = Description of Artificial Sequence: Synthetic oligonucleotide
  misc_feature 1..20: note = Target: SCN10A; (+) strand; PAM type: YTN; PAM sequence: TTA
  source 1..20: mol_type = other DNA
gaccttcttcccttaacctc

SEQ ID NO: 60913 - DNA, 20 bp, synthetic construct
  misc_feature 1..20: note = Description of Artificial Sequence: Synthetic oligonucleotide
  misc_feature 1..20: note = Target: SCN10A; (+) strand; PAM type: YTN; PAM sequence: CTT
  source 1..20: mol_type = other DNA
cttcccttaacctcattcag

SEQ ID NO: 60914 - DNA, 20 bp, synthetic construct
  misc_feature 1..20: note = Description of Artificial Sequence: Synthetic oligonucleotide
  misc_feature 1..20: note = Target: SCN10A; (+) strand; PAM type: YTN; PAM sequence: TTC
  source 1..20: mol_type = other DNA
ttcccttaacctcattcagg

SEQ ID NO: 60915 - DNA, 20 bp, synthetic construct
  misc_feature 1..20: note = Description of Artificial Sequence: Synthetic oligonucleotide
  misc_feature 1..20: note = Target: SCN10A; (+) strand; PAM type: YTN; PAM sequence: CTT
  source 1..20: mol_type = other DNA
cccttaacctcattcagggt

SEQ ID NO: 60916 - DNA, 20 bp, synthetic construct
  misc_feature 1..20: note = Description of Artificial Sequence: Synthetic oligonucleotide
  misc_feature 1..20: note = Target: SCN10A; (+) strand; PAM type: YTN; PAM sequence: TTC
  source 1..20: mol_type = other DNA
ccttaacctcattcagggtg

SEQ ID NO: 60917 - DNA, 20 bp, synthetic construct
  misc_feature 1..20: note = Description of Artificial Sequence: Synthetic oligonucleotide
  misc_feature 1..20: note = Target: SCN10A; (+) strand; PAM type: YTN; PAM sequence: CTT
  source 1..20: mol_type = other DNA
aacctcattcagggtgggtt

SEQ ID NO: 60918 - DNA, 20 bp, synthetic construct
  misc_feature 1..20: note = Description of Artificial Sequence: Synthetic oligonucleotide
  misc_feature 1..20: note = Target: SCN10A; (+) strand; PAM type: YTN; PAM sequence: TTA
  source 1..20: mol_type = other DNA
acctcattcagggtgggttg

SEQ ID NO: 60919 - DNA, 20 bp, synthetic construct
  misc_feature 1..20: note = Description of Artificial Sequence: Synthetic oligonucleotide
  misc_feature 1..20: note = Target: SCN10A; (+) strand; PAM type: YTN; PAM sequence: CTC
  source 1..20: mol_type = other DNA
attcagggtgggttgcagtg

SEQ ID NO: 60920 - DNA, 20 bp, synthetic construct
  misc_feature 1..20: note = Description of Artificial Sequence: Synthetic oligonucleotide
  misc_feature 1..20: note = Target: SCN10A; (+) strand; PAM type: YTN; PAM sequence: TTC
  source 1..20: mol_type = other DNA
agggtgggttgcagtgagaa

SEQ ID NO: 60921 - DNA, 20 bp, synthetic construct
  misc_feature 1..20: note = Description of Artificial Sequence: Synthetic oligonucleotide
  misc_feature 1..20: note = Target: SCN10A; (+) strand; PAM type: YTN; PAM sequence: TTG
  source 1..20: mol_type = other DNA
cagtgagaagatggatgagt

SEQ ID NO: 60922 - DNA, 20 bp, synthetic construct
  misc_feature 1..20: note = Description of Artificial Sequence: Synthetic oligonucleotide
  misc_feature 1..20: note = Target: SCN10A; (+) strand; PAM type: YTN; PAM sequence: TTT
  source 1..20: mol_type = other DNA
acaagcatactgcactcatt

SEQ ID NO: 60923 - DNA, 20 bp, synthetic construct
  misc_feature 1..20: note = Description of Artificial Sequence: Synthetic oligonucleotide
  misc_feature 1..20: note = Target: SCN10A; (+) strand; PAM type: YTN; PAM sequence: TTA
  source 1..20: mol_type = other DNA
caagcatactgcactcattt

SEQ ID NO: 60924 - DNA, 20 bp, synthetic construct
  misc_feature 1..20: note = Description of Artificial Sequence: Synthetic oligonucleotide
  misc_feature 1..20: note = Target: SCN10A; (+) strand; PAM type: YTN; PAM sequence: CTG
  source 1..20: mol_type = other DNA
cactcatttagaagtgtgag

SEQ ID NO: 60925 - DNA, 20 bp, synthetic construct
  misc_feature 1..20: note = Description of Artificial Sequence: Synthetic oligonucleotide
  misc_feature 1..20: note = Target: SCN10A; (+) strand; PAM type: YTN; PAM sequence: CTC
  source 1..20: mol_type = other DNA
atttagaagtgtgagtgtgt

SEQ ID NO: 60926 - DNA, 20 bp, synthetic construct
  misc_feature 1..20: note = Description of Artificial Sequence: Synthetic oligonucleotide
  misc_feature 1..20: note = Target: SCN10A; (+) strand; PAM type: YTN; PAM sequence: TTT
  source 1..20: mol_type = other DNA
agaagtgtgagtgtgtgtat

SEQ ID NO: 60927 - DNA, 20 bp, synthetic construct
  misc_feature 1..20: note = Description of Artificial Sequence: Synthetic oligonucleotide
  misc_feature 1..20: note = Target: SCN10A; (+) strand; PAM type: YTN; PAM sequence: TTA
  source 1..20: mol_type = other DNA
gaagtgtgagtgtgtgtatt

SEQ ID NO: 60928 - DNA, 20 bp, synthetic construct
  misc_feature 1..20: note = Description of Artificial Sequence: Synthetic oligonucleotide
  misc_feature 1..20: note = Target: SCN10A; (+) strand; PAM type: YTN; PAM sequence: TTA
  source 1..20: mol_type = other DNA
tacttgcacatacagacttc

SEQ ID NO: 60929 - DNA, 20 bp, synthetic construct
  misc_feature 1..20: note = Description of Artificial Sequence: Synthetic oligonucleotide
  misc_feature 1..20: note = Target: SCN10A; (+) strand; PAM type: YTN; PAM sequence: CTT
  source 1..20: mol_type = other DNA
gcacatacagacttctagaa

SEQ ID NO: 60930 - DNA, 20 bp, synthetic construct
  misc_feature 1..20: note = Description of Artificial Sequence: Synthetic oligonucleotide
  misc_feature 1..20: note = Target: SCN10A; (+) strand; PAM type: YTN; PAM sequence: TTG
  source 1..20: mol_type = other DNA
cacatacagacttctagaac

SEQ ID NO: 60931 - DNA, 20 bp, synthetic construct
  misc_feature 1..20: note = Description of Artificial Sequence: Synthetic oligonucleotide
  misc_feature 1..20: note = Target: SCN10A; (+) strand; PAM type: YTN; PAM sequence: CTT
  source 1..20: mol_type = other DNA
ctagaaccttgacttattct

SEQ ID NO: 60932 - DNA, 20 bp, synthetic construct
  misc_feature 1..20: note = Description of Artificial Sequence: Synthetic oligonucleotide
  misc_feature 1..20: note = Target: SCN10A; (+) strand; PAM type: YTN; PAM sequence: TTC
  source 1..20: mol_type = other DNA
tagaaccttgacttattctc

SEQ ID NO: 60933 - DNA, 20 bp, synthetic construct
  misc_feature 1..20: note = Description of Artificial Sequence: Synthetic oligonucleotide
  misc_feature 1..20: note = Target: SCN10A; (+) strand; PAM type: YTN; PAM sequence: CTA
  source 1..20: mol_type = other DNA
gaaccttgacttattctcct

SEQ ID NO: 60934 - DNA, 20 bp, synthetic construct
  misc_feature 1..20: note = Description of Artificial Sequence: Synthetic oligonucleotide
  misc_feature 1..20: note = Target: SCN10A; (+) strand; PAM type: YTN; PAM sequence: CTT
  source 1..20: mol_type = other DNA
gacttattctccttaaatac

SEQ ID NO: 60935 - DNA, 20 bp, synthetic construct
  misc_feature 1..20: note = Description of Artificial Sequence: Synthetic oligonucleotide
  misc_feature 1..20: note = Target: SCN10A; (+) strand; PAM type: YTN; PAM sequence: TTG
  source 1..20: mol_type = other DNA
acttattctccttaaatacc

SEQ ID NO: 60936 - DNA, 20 bp, synthetic construct
  misc_feature 1..20: note = Description of Artificial Sequence: Synthetic oligonucleotide
  misc_feature 1..20: note = Target: SCN10A; (+) strand; PAM type: YTN; PAM sequence: CTT
  source 1..20: mol_type = other DNA
attctccttaaataccatac

SEQ ID NO: 60937 - DNA, 20 bp, synthetic construct
  misc_feature 1..20: note = Description of Artificial Sequence: Synthetic oligonucleotide
  misc_feature 1..20: note = Target: SCN10A; (+) strand; PAM type: YTN; PAM sequence: TTA
  source 1..20: mol_type = other DNA
ttctccttaaataccataca

SEQ ID NO: 60938 - DNA, 20 bp, synthetic construct
  misc_feature 1..20: note = Description of Artificial Sequence: Synthetic oligonucleotide
  misc_feature 1..20: note = Target: SCN10A; (+) strand; PAM type: YTN; PAM sequence: TTC
  source 1..20: mol_type = other DNA
tccttaaataccatacataa

SEQ ID NO: 60939 - DNA, 20 bp, synthetic construct
  misc_feature 1..20: note = Description of Artificial Sequence: Synthetic oligonucleotide
  misc_feature 1..20: note = Target: SCN10A; (+) strand; PAM type: YTN; PAM sequence: CTC
  source 1..20: mol_type = other DNA
cttaaataccatacataaaa

SEQ ID NO: 60940 - DNA, 20 bp, synthetic construct
  misc_feature 1..20: note = Description of Artificial Sequence: Synthetic oligonucleotide
  misc_feature 1..20: note = Target: SCN10A; (+) strand; PAM type: YTN; PAM sequence: CTT
  source 1..20: mol_type = other DNA
aaataccatacataaaacac

SEQ ID NO: 60941 - DNA, 20 bp, synthetic construct
  misc_feature 1..20: note = Description of Artificial Sequence: Synthetic oligonucleotide
  misc_feature 1..20: note = Target: SCN10A; (+) strand; PAM type: YTN; PAM sequence: TTA
  source 1..20: mol_type = other DNA
aataccatacataaaacaca

SEQ ID NO: 60942 - DNA, 20 bp, synthetic construct
  misc_feature 1..20: note = Description of Artificial Sequence: Synthetic oligonucleotide
  misc_feature 1..20: note = Target: SCN10A; (+) strand; PAM type: YTN; PAM sequence: TTT
  source 1..20: mol_type = other DNA
aaatacaatttaaagtatgc

SEQ ID NO: 60943 - DNA, 20 bp, synthetic construct
  misc_feature 1..20: note = Description of Artificial Sequence: Synthetic oligonucleotide
  misc_feature 1..20: note = Target: SCN10A; (+) strand; PAM type: YTN; PAM sequence: TTA
  source 1..20: mol_type = other DNA
aatacaatttaaagtatgcc

SEQ ID NO: 60944 - DNA, 20 bp, synthetic construct
  misc_feature 1..20: note = Description of Artificial Sequence: Synthetic oligonucleotide
  misc_feature 1..20: note = Target: SCN10A; (+) strand; PAM type: YTN; PAM sequence: TTT
  source 1..20: mol_type = other DNA
aaagtatgccgtggtcaaga

SEQ ID NO: 60945 - DNA, 20 bp, synthetic construct
  misc_feature 1..20: note = Description of Artificial Sequence: Synthetic oligonucleotide
  misc_feature 1..20: note = Target: SCN10A; (+) strand; PAM type: YTN; PAM sequence: TTA
  source 1..20: mol_type = other DNA
aagtatgccgtggtcaagaa

SEQ ID NO: 60946 - DNA, 20 bp, synthetic construct
  misc_feature 1..20: note = Description of Artificial Sequence: Synthetic oligonucleotide
  misc_feature 1..20: note = Target: SCN10A; (+) strand; PAM type: YTN; PAM sequence: CTA
  source 1..20: mol_type = other DNA
aatccatattcacaaaatag

SEQ ID NO: 60947 - DNA, 20 bp, synthetic construct
  misc_feature 1..20: note = Description of Artificial Sequence: Synthetic oligonucleotide
  misc_feature 1..20: note = Target: SCN10A; (+) strand; PAM type: YTN; PAM sequence: TTC
  source 1..20: mol_type = other DNA
acaaaatagcttatttgtaa

SEQ ID NO: 60948 - DNA, 20 bp, synthetic construct
  misc_feature 1..20: note = Description of Artificial Sequence: Synthetic oligonucleotide
  misc_feature 1..20: note = Target: SCN10A; (+) strand; PAM type: YTN; PAM sequence: CTT
  source 1..20: mol_type = other DNA
atttgtaaataagcaaatga

SEQ ID NO: 60949 - DNA, 20 bp, synthetic construct
  misc_feature 1..20: note = Description of Artificial Sequence: Synthetic oligonucleotide
  misc_feature 1..20: note = Target: SCN10A; (+) strand; PAM type: YTN; PAM sequence: TTA
  source 1..20: mol_type = other DNA
tttgtaaataagcaaatgag

SEQ ID NO: 60950 - DNA, 20 bp, synthetic construct
  misc_feature 1..20: note = Description of Artificial Sequence: Synthetic oligonucleotide
  misc_feature 1..20: note = Target: SCN10A; (+) strand; PAM type: YTN; PAM sequence: TTT
  source 1..20: mol_type = other DNA
gtaaataagcaaatgagaat

SEQ ID NO: 60951 - DNA, 20 bp, synthetic construct
  misc_feature 1..20: note = Description of Artificial Sequence: Synthetic oligonucleotide
  misc_feature 1..20: note = Target: SCN10A; (+) strand; PAM type: YTN; PAM sequence: TTG
  source 1..20: mol_type = other DNA
taaataagcaaatgagaatc

SEQ ID NO: 60952 - DNA, 20 bp, synthetic construct
  misc_feature 1..20: note = Description of Artificial Sequence: Synthetic oligonucleotide
  misc_feature 1..20: note = Target: SCN10A; (+) strand; PAM type: YTN; PAM sequence: CTA
  source 1..20: mol_type = other DNA
ttagatacaaaatagaataa

SEQ ID NO: 60953 - DNA, 20 bp, synthetic construct
  misc_feature 1..20: note = Description of Artificial Sequence: Synthetic oligonucleotide
  misc_feature 1..20: note = Target: SCN10A; (+) strand; PAM type: YTN; PAM sequence: TTA
  source 1..20: mol_type = other DNA
gatacaaaatagaataaatt

SEQ ID NO: 60954 - DNA, 20 bp, synthetic construct
  misc_feature 1..20: note = Description of Artificial Sequence: Synthetic oligonucleotide
  misc_feature 1..20: note = Target: SCN10A; (+) strand; PAM type: YTN; PAM sequence: TTT
  source 1..20: mol_type = other DNA
caaactatttcaatcttcgg

SEQ ID NO: 60955 - DNA, 20 bp, synthetic construct
  misc_feature 1..20: note = Description of Artificial Sequence: Synthetic oligonucleotide
  misc_feature 1..20: note = Target: SCN10A; (+) strand; PAM type: YTN; PAM sequence: TTC
  source 1..20: mol_type = other DNA
aaactatttcaatcttcggg

SEQ ID NO: 60956 - DNA, 20 bp, synthetic construct
  misc_feature 1..20: note = Description of Artificial Sequence: Synthetic oligonucleotide
  misc_feature 1..20: note = Target: SCN10A; (+) strand; PAM type: YTN; PAM sequence: CTA
  source 1..20: mol_type = other DNA
tttcaatcttcgggtcctag

SEQ ID NO: 60957 - DNA, 20 bp, synthetic construct
  misc_feature 1..20: note = Description of Artificial Sequence: Synthetic oligonucleotide
  misc_feature 1..20: note = Target: SCN10A; (+) strand; PAM type: YTN; PAM sequence: TTT
  source 1..20: mol_type = other DNA
caatcttcgggtcctagtgt

SEQ ID NO: 60958 - DNA, 20 bp, synthetic construct
  misc_feature 1..20: note = Description of Artificial Sequence: Synthetic oligonucleotide
  misc_feature 1..20: note = Target: SCN10A; (+) strand; PAM type: YTN; PAM sequence: TTC
  source 1..20: mol_type = other DNA
aatcttcgggtcctagtgtt

SEQ ID NO: 60959 - DNA, 20 bp, synthetic construct
  misc_feature 1..20: note = Description of Artificial Sequence: Synthetic oligonucleotide
  misc_feature 1..20: note = Target: SCN10A; (+) strand; PAM type: YTN; PAM sequence: CTT
  source 1..20: mol_type = other DNA
cgggtcctagtgtttgtaaa

SEQ ID NO: 60960 - DNA, 20 bp, synthetic construct
  misc_feature 1..20: note = Description of Artificial Sequence: Synthetic oligonucleotide
  misc_feature 1..20: note = Target: SCN10A; (+) strand; PAM type: YTN; PAM sequence: TTC
  source 1..20: mol_type = other DNA
gggtcctagtgtttgtaaag

SEQ ID NO: 60961 - DNA, 20 bp, synthetic construct
  misc_feature 1..20: note = Description of Artificial Sequence: Synthetic oligonucleotide
  misc_feature 1..20: note = Target: SCN10A; (+) strand; PAM type: YTN; PAM sequence: CTA
  source 1..20: mol_type = other DNA
gtgtttgtaaaggtacaagt

SEQ ID NO: 60962 - DNA, 20 bp, synthetic construct
  misc_feature 1..20: note = Description of Artificial Sequence: Synthetic oligonucleotide
  misc_feature 1..20: note = Target: SCN10A; (+) strand; PAM type: YTN; PAM sequence: TTT
  source 1..20: mol_type = other DNA
gtaaaggtacaagttaattt

SEQ ID NO: 60963 - DNA, 20 bp, synthetic construct
  misc_feature 1..20: note = Description of Artificial Sequence: Synthetic oligonucleotide
  misc_feature 1..20: note = Target: SCN10A; (+) strand; PAM type: YTN; PAM sequence: TTG
  source 1..20: mol_type = other DNA
taaaggtacaagttaatttc

SEQ ID NO: 60964 - DNA, 20 bp, synthetic construct
  misc_feature 1..20: note = Description of Artificial Sequence: Synthetic oligonucleotide
  misc_feature 1..20: note = Target: SCN10A; (+) strand; PAM type: YTN; PAM sequence: TTA
  source 1..20: mol_type = other DNA
atttcaaaagcccacttttg

SEQ ID NO: 60965 - DNA, 20 bp, synthetic construct
  misc_feature 1..20: note = Description of Artificial Sequence: Synthetic oligonucleotide
  misc_feature 1..20: note = Target: SCN10A; (+) strand; PAM type: YTN; PAM sequence: TTT
  source 1..20: mol_type = other DNA
caaaagcccacttttgtttt

SEQ ID NO: 60966 - DNA, 20 bp, synthetic construct
  misc_feature 1..20: note = Description of Artificial Sequence: Synthetic oligonucleotide
  misc_feature 1..20: note = Target: SCN10A; (+) strand; PAM type: YTN; PAM sequence: TTC
  source 1..20: mol_type = other DNA
aaaagcccacttttgttttt

SEQ ID NO: 60967 - DNA, 20 bp, synthetic construct
  misc_feature 1..20: note = Description of Artificial Sequence: Synthetic oligonucleotide
  misc_feature 1..20: note = Target: SCN10A; (+) strand; PAM type: YTN; PAM sequence: CTT
  source 1..20: mol_type = other DNA
ttgtttttgaagctatgatg

SEQ ID NO: 60968 - DNA, 20 bp, synthetic construct
  misc_feature 1..20: note = Description of Artificial Sequence: Synthetic oligonucleotide
  misc_feature 1..20: note = Target: SCN10A; (+) strand; PAM type: YTN; PAM sequence: TTT
  source 1..20: mol_type = other DNA
tgtttttgaagctatgatga

SEQ ID NO: 60969 - DNA, 20 bp, synthetic construct
  misc_feature 1..20: note = Description of Artificial Sequence: Synthetic oligonucleotide
  misc_feature 1..20: note = Target: SCN10A; (+) strand; PAM type: YTN; PAM sequence: TTT
  source 1..20: mol_type = other DNA
gtttttgaagctatgatgac

SEQ ID NO: 60970 - DNA, 20 bp, synthetic construct
  misc_feature 1..20: note = Description of Artificial Sequence: Synthetic oligonucleotide
  misc_feature 1..20: note = Target: SCN10A; (+) strand; PAM type: YTN; PAM sequence: TTG
  source 1..20: mol_type = other DNA
tttttgaagctatgatgact

SEQ ID NO: 60971 - DNA, 20 bp, synthetic construct
  misc_feature 1..20: note = Description of Artificial Sequence: Synthetic oligonucleotide
  misc_feature 1..20: note = Target: SCN10A; (+) strand; PAM type: YTN; PAM sequence: TTT
  source 1..20: mol_type = other DNA
ttgaagctatgatgactact

SEQ ID NO: 60972 - DNA, 20 bp, synthetic construct
  misc_feature 1..20: note = Description of Artificial Sequence: Synthetic oligonucleotide
  misc_feature 1..20: note = Target: SCN10A; (+) strand; PAM type: YTN; PAM sequence: TTT
  source 1..20: mol_type = other DNA
tgaagctatgatgactactt

SEQ ID NO: 60973 - DNA, 20 bp, synthetic construct
  misc_feature 1..20: note = Description of Artificial Sequence: Synthetic oligonucleotide
  misc_feature 1..20: note = Target: SCN10A; (+) strand; PAM type: YTN; PAM sequence: TTT
  source 1..20: mol_type = other DNA
gaagctatgatgactacttc

SEQ ID NO: 60974 - DNA, 20 bp, synthetic construct
  misc_feature 1..20: note = Description of Artificial Sequence: Synthetic oligonucleotide
  misc_feature 1..20: note = Target: SCN10A; (+) strand; PAM type: YTN; PAM sequence: TTG
  source 1..20: mol_type = other DNA
aagctatgatgactacttcc

SEQ ID NO: 60975 - DNA, 20 bp, synthetic construct
  misc_feature 1..20: note = Description of Artificial Sequence: Synthetic oligonucleotide
  misc_feature 1..20: note = Target: SCN10A; (+) strand; PAM type: YTN; PAM sequence: CTA
  source 1..20: mol_type = other DNA
tgatgactacttccagccaa

SEQ ID NO: 60976 - DNA, 20 bp, synthetic construct
  misc_feature 1..20: note = Description of Artificial Sequence: Synthetic oligonucleotide
  misc_feature 1..20: note = Target: SCN10A; (+) strand; PAM type: YTN; PAM sequence: CTA
  source 1..20: mol_type = other DNA
cttccagccaatgatagtgg

SEQ ID NO: 60977 - DNA, 20 bp, synthetic construct
  misc_feature 1..20: note = Description of Artificial Sequence: Synthetic oligonucleotide
  misc_feature 1..20: note = Target: SCN10A; (+) strand; PAM type: YTN; PAM sequence: CTT
  source 1..20: mol_type = other DNA
ccagccaatgatagtggagc

SEQ ID NO: 60978 - DNA, 20 bp, synthetic construct
  misc_feature 1..20: note = Description of Artificial Sequence: Synthetic oligonucleotide
  misc_feature 1..20: note = Target: SCN10A; (+) strand; PAM type: YTN; PAM sequence: TTC
  source 1..20: mol_type = other DNA
cagccaatgatagtggagca

SEQ ID NO: 60979 - DNA, 20 bp, synthetic construct
  misc_feature 1..20: note = Description of Artificial Sequence: Synthetic oligonucleotide
  misc_feature 1..20: note = Target: SCN10A; (+) strand; PAM type: YTN; PAM sequence: CTT
  source 1..20: mol_type = other DNA
actttctgctggggagccat

SEQ ID NO: 60980 - DNA, 20 bp, synthetic construct
  misc_feature 1..20: note = Description of Artificial Sequence: Synthetic oligonucleotide
  misc_feature 1..20: note = Target: SCN10A; (+) strand; PAM type: YTN; PAM sequence: TTA
  source 1..20: mol_type = other DNA
ctttctgctggggagccatt

SEQ ID NO: 60981 - DNA, 20 bp, synthetic construct
  misc_feature 1..20: note = Description of Artificial Sequence: Synthetic oligonucleotide
  misc_feature 1..20: note = Target: SCN10A; (+) strand; PAM type: YTN; PAM sequence: CTT
  source 1..20: mol_type = other DNA
tctgctggggagccatttgt

SEQ ID NO: 60982 - DNA, 20 bp, synthetic construct
  misc_feature 1..20: note = Description of Artificial Sequence: Synthetic oligonucleotide
  misc_feature 1..20: note = Target: SCN10A; (+) strand; PAM type: YTN; PAM sequence: TTT
  source 1..20: mol_type = other DNA
ctgctggggagccatttgta

SEQ ID NO: 60983 - DNA, 20 bp, synthetic construct
  misc_feature 1..20: note = Description of Artificial Sequence: Synthetic oligonucleotide
  misc_feature 1..20: note = Target: SCN10A; (+) strand; PAM type: YTN; PAM sequence: TTC
  source 1..20: mol_type = other DNA
tgctggggagccatttgtaa

SEQ ID NO: 60984 - DNA, 20 bp, synthetic construct
  misc_feature 1..20: note = Description of Artificial Sequence: Synthetic oligonucleotide
  misc_feature 1..20: note = Target: SCN10A; (+) strand; PAM type: YTN; PAM sequence: CTG
  source 1..20: mol_type = other DNA
ctggggagccatttgtaatt

SEQ ID NO: 60985 - DNA, 20 bp, synthetic construct
  misc_feature 1..20: note = Description of Artificial Sequence: Synthetic oligonucleotide
  misc_feature 1..20: note = Target: SCN10A; (+) strand; PAM type: YTN; PAM sequence: CTG
  source 1..20: mol_type = other DNA
gggagccatttgtaattatg

SEQ ID NO: 60986 - DNA, 20 bp, synthetic construct
  misc_feature 1..20: note = Description of Artificial Sequence: Synthetic oligonucleotide
  misc_feature 1..20: note = Target: SCN10A; (+) strand; PAM type: YTN; PAM sequence: TTT
  source 1..20: mol_type = other DNA
gtaattatgaggaagaggtg

SEQ ID NO: 60987 - DNA, 20 bp, synthetic construct
  misc_feature 1..20: note = Description of Artificial Sequence: Synthetic oligonucleotide
  misc_feature 1..20: note = Target: SCN10A; (+) strand; PAM type: YTN; PAM sequence: TTG
  source 1..20: mol_type = other DNA
taattatgaggaagaggtgg

SEQ ID NO: 60988 - DNA, 20 bp, synthetic construct
  misc_feature 1..20: note = Description of Artificial Sequence: Synthetic oligonucleotide
  misc_feature 1..20: note = Target: SCN10A; (+) strand; PAM type: YTN; PAM sequence: TTA
  source 1..20: mol_type = other DNA
tgaggaagaggtgggtgtca

SEQ ID NO: 60989 - DNA, 20 bp, synthetic construct
  misc_feature 1..20: note = Description of Artificial Sequence: Synthetic oligonucleotide
  misc_feature 1..20: note = Target: SCN10A; (+) strand; PAM type: YTN; PAM sequence: CTC
  source 1..20: mol_type = other DNA
taagacaaggctctggctgt

SEQ ID NO: 60990 - DNA, 20 bp, synthetic construct
  misc_feature 1..20: note = Description of Artificial Sequence: Synthetic oligonucleotide
  misc_feature 1..20: note = Target: SCN10A; (+) strand; PAM type: YTN; PAM sequence: CTA
  source 1..20: mol_type = other DNA
agacaaggctctggctgtga

SEQ ID NO: 60991 - DNA, 20 bp, synthetic construct
  misc_feature 1..20: note = Description of Artificial Sequence: Synthetic oligonucleotide
  misc_feature 1..20: note = Target: SCN10A; (+) strand; PAM type: YTN; PAM sequence: CTC
  source 1..20: mol_type = other DNA
tggctgtgagcattctgtcc

SEQ ID NO: 60992 - DNA, 20 bp, synthetic construct
  misc_feature 1..20: note = Description of Artificial Sequence: Synthetic oligonucleotide
  misc_feature 1..20: note = Target: SCN10A; (+) strand; PAM type: YTN; PAM sequence: CTG
  source 1..20: mol_type = other DNA
gctgtgagcattctgtcctg

SEQ ID NO: 60993 - DNA, 20 bp, synthetic construct
  misc_feature 1..20: note = Description of Artificial Sequence: Synthetic oligonucleotide
  misc_feature 1..20: note = Target: SCN10A; (+) strand; PAM type: YTN; PAM sequence: CTG
  source 1..20: mol_type = other DNA
tgagcattctgtcctgacgg

SEQ ID NO: 60994 - DNA, 20 bp, synthetic construct
  misc_feature 1..20: note = Description of Artificial Sequence: Synthetic oligonucleotide
  misc_feature 1..20: note = Target: SCN10A; (+) strand; PAM type: YTN; PAM sequence: TTC
  source 1..20: mol_type = other DNA
tgtcctgacggaggcagtta

SEQ ID NO: 60995 - DNA, 20 bp, synthetic construct
  misc_feature 1..20: note = Description of Artificial Sequence: Synthetic oligonucleotide
  misc_feature 1..20: note = Target: SCN10A; (+) strand; PAM type: YTN; PAM sequence: CTG
  source 1..20: mol_type = other DNA
tcctgacggaggcagttagg

SEQ ID NO: 60996 - DNA, 20 bp, synthetic construct
  misc_feature 1..20: note = Description of Artificial Sequence: Synthetic oligonucleotide
  misc_feature 1..20: note = Target: SCN10A; (+) strand; PAM type: YTN; PAM sequence: CTG
  source 1..20: mol_type = other DNA
acggaggcagttagggcaag

SEQ ID NO: 60997 - DNA, 20 bp, synthetic construct
  misc_feature 1..20: note = Description of Artificial Sequence: Synthetic oligonucleotide
  misc_feature 1..20: note = Target: SCN10A; (+) strand; PAM type: YTN; PAM sequence: TTA
  source 1..20: mol_type = other DNA
gggcaaggtggaggctgaca

SEQ ID NO: 60998 - DNA, 20 bp, synthetic construct
  misc_feature 1..20: note = Description of Artificial Sequence: Synthetic oligonucleotide
  misc_feature 1..20: note = Target: SCN10A; (+) strand; PAM type: YTN; PAM sequence: CTG
  source 1..20: mol_type = other DNA
acagtggtggataaggaaag

SEQ ID NO: 60999 - DNA, 20 bp, synthetic construct
  misc_feature 1..20: note = Description of Artificial Sequence: Synthetic oligonucleotide
  misc_feature 1..20: note = Target: SCN10A; (+) strand; PAM type: YTN; PAM sequence: TTT
  source 1..20: mol_type = other DNA
acaggacctgatgattgcat

SEQ ID NO: 61000 - DNA, 20 bp, synthetic construct
  misc_feature 1..20: note = Description of Artificial Sequence: Synthetic oligonucleotide
  misc_feature 1..20: note = Target: SCN10A; (+) strand; PAM type: YTN; PAM sequence: TTA
  source 1..20: mol_type = other DNA
caggacctgatgattgcatt

SEQ ID NO: 61001 - DNA, 20 bp, synthetic construct
  misc_feature 1..20: note = Description of Artificial Sequence: Synthetic oligonucleotide
  misc_feature 1..20: note = Target: SCN10A; (+) strand; PAM type: YTN; PAM sequence: CTG
  source 1..20: mol_type = other DNA
atgattgcattaagtaggag

SEQ ID NO: 61002 - DNA, 20 bp, synthetic construct
  misc_feature 1..20: note = Description of Artificial Sequence: Synthetic oligonucleotide
  misc_feature 1..20: note = Target: SCN10A; (+) strand; PAM type: YTN; PAM sequence: TTG
  source 1..20: mol_type = other DNA
cattaagtaggagagaagaa

SEQ ID NO: 61003 - DNA, 20 bp, synthetic construct
  misc_feature 1..20: note = Description of Artificial Sequence: Synthetic oligonucleotide
  misc_feature 1..20: note = Target: SCN10A; (+) strand; PAM type: YTN; PAM sequence: TTA
  source 1..20: mol_type = other DNA
agtaggagagaagaagcatt

SEQ ID NO: 61004 - DNA, 20 bp, synthetic construct
  misc_feature 1..20: note = Description of Artificial Sequence: Synthetic oligonucleotide
  misc_feature 1..20: note = Target: SCN10A; (+) strand; PAM type: YTN; PAM sequence: TTC
  source 1..20: mol_type = other DNA
cagtgggtggcagctgaggt

SEQ ID NO: 61005 - DNA, 20 bp, synthetic construct
  misc_feature 1..20: note = Description of Artificial Sequence: Synthetic oligonucleotide
  misc_feature 1..20: note = Target: SCN10A; (+) strand; PAM type: YTN; PAM sequence: CTG
  source 1..20: mol_type = other DNA
aggtaatgagctgatgatgt

SEQ ID NO: 61006 - DNA, 20 bp, synthetic construct
  misc_feature 1..20: note = Description of Artificial Sequence: Synthetic oligonucleotide
  misc_feature 1..20: note = Target: SCN10A; (+) strand; PAM type: YTN; PAM sequence: CTG
  source 1..20: mol_type = other DNA
atgatgtcactcatggagta

SEQ ID NO: 61007 - DNA, 20 bp, synthetic construct
  misc_feature 1..20: note = Description of Artificial Sequence: Synthetic oligonucleotide
  misc_feature 1..20: note = Target: SCN10A; (+) strand; PAM type: YTN; PAM sequence: CTC
  source 1..20: mol_type = other DNA
atggagtattagaggaaaga

SEQ ID NO: 61008 - DNA, 20 bp, synthetic construct
  misc_feature 1..20: note = Description of Artificial Sequence: Synthetic oligonucleotide
  misc_feature 1..20: note = Target: SCN10A; (+) strand; PAM type: YTN; PAM sequence: TTA
  source 1..20: mol_type = other DNA
gaggaaagactcatttgtca

SEQ ID NO: 61009 - DNA, 20 bp, synthetic construct
  misc_feature 1..20: note = Description of Artificial Sequence: Synthetic oligonucleotide
  misc_feature 1..20: note = Target: SCN10A; (+) strand; PAM type: YTN; PAM sequence: CTC
  source 1..20: mol_type = other DNA
atttgtcatggaaagacaga

SEQ ID NO: 61010 - DNA, 20 bp, synthetic construct
  misc_feature 1..20: note = Description of Artificial Sequence: Synthetic oligonucleotide
  misc_feature 1..20: note = Target: SCN10A; (+) strand; PAM type: YTN; PAM sequence: TTT
  source 1..20: mol_type = other DNA
gtcatggaaagacagagaac

SEQ ID NO: 61011 - DNA, 20 bp, synthetic construct
  misc_feature 1..20: note = Description of Artificial Sequence: Synthetic oligonucleotide
  misc_feature 1..20: note = Target: SCN10A; (+) strand; PAM type: YTN; PAM sequence: TTG
  source 1..20: mol_type = other DNA
tcatggaaagacagagaact

SEQ ID NO: 61012 - DNA, 20 bp, synthetic construct
  misc_feature 1..20: note = Description of Artificial Sequence: Synthetic oligonucleotide
  misc_feature 1..20: note = Target: SCN10A; (+) strand; PAM type: YTN; PAM sequence: CTT
  source 1..20: mol_type = other DNA
gggatgttctggagatgttg

SEQ ID NO: 61013 - DNA, 20 bp, synthetic construct
  misc_feature 1..20: note = Description of Artificial Sequence: Synthetic oligonucleotide
  misc_feature 1..20: note = Target: SCN10A; (+) strand; PAM type: YTN; PAM sequence: TTG
  source 1..20: mol_type = other DNA
ggatgttctggagatgttgg

SEQ ID NO: 61014 - DNA, 20 bp, synthetic construct
  misc_feature 1..20: note = Description of Artificial Sequence: Synthetic oligonucleotide
  misc_feature 1..20: note = Target: SCN10A; (+) strand; PAM type: YTN; PAM sequence: TTC
  source 1..20: mol_type = other DNA
tggagatgttggcaataaga

SEQ ID NO: 61015 - DNA, 20 bp, synthetic construct
  misc_feature 1..20: note = Description of Artificial Sequence: Synthetic oligonucleotide
  misc_feature 1..20: note = Target: SCN10A; (+) strand; PAM type: YTN; PAM sequence: CTG
  source 1..20: mol_type = other DNA
gagatgttggcaataagagg

SEQ ID NO: 61016 - DNA, 20 bp, synthetic construct
  misc_feature 1..20: note = Description of Artificial Sequence: Synthetic oligonucleotide
  misc_feature 1..20: note = Target: SCN10A; (+) strand; PAM type: YTN; PAM sequence: TTG
  source 1..20: mol_type = other DNA
gcaataagaggcagagttgg

SEQ ID NO: 61017 - DNA, 20 bp, synthetic construct
  misc_feature 1..20: note = Description of Artificial Sequence: Synthetic oligonucleotide
  misc_feature 1..20: note = Target: SCN10A; (+) strand; PAM type: YTN; PAM sequence: TTG
  source 1..20: mol_type = other DNA
ggtgattgagataatagatg

SEQ ID NO: 61018 - DNA, 20 bp, synthetic construct
  misc_feature 1..20: note = Description of Artificial Sequence: Synthetic oligonucleotide
  misc_feature 1..20: note = Target: SCN10A; (+) strand; PAM type: YTN; PAM sequence: TTG
  source 1..20: mol_type = other DNA
agataatagatgcttgtgga

SEQ ID NO: 61019 - DNA, 20 bp, synthetic construct
  misc_feature 1..20: note = Description of Artificial Sequence: Synthetic oligonucleotide
  misc_feature 1..20: note = Target: SCN10A; (+) strand; PAM type: YTN; PAM sequence: CTT
  source 1..20: mol_type = other DNA
gtggagcgatgattcaggat

SEQ ID NO: 61020 - DNA, 20 bp, synthetic construct
  misc_feature 1..20: note = Description of Artificial Sequence: Synthetic oligonucleotide
  misc_feature 1..20: note = Target: SCN10A; (+) strand; PAM type: YTN; PAM sequence: TTG
  source 1..20: mol_type = other DNA
tggagcgatgattcaggatt

SEQ ID NO: 61021 - DNA, 20 bp, synthetic construct
  misc_feature 1..20: note = Description of Artificial Sequence: Synthetic oligonucleotide
  misc_feature 1..20: note = Target: SCN10A; (+) strand; PAM type: YTN; PAM sequence: TTC
  source 1..20: mol_type = other DNA
aggattacttcactaagagc

SEQ ID NO: 61022 - DNA, 20 bp, synthetic construct
  misc_feature 1..20: note = Description of Artificial Sequence: Synthetic oligonucleotide
  misc_feature 1..20: note = Target: SCN10A; (+) strand; PAM type: YTN; PAM sequence: TTA
  source 1..20: mol_type = other DNA
cttcactaagagcaaagggg

SEQ ID NO: 61023 - DNA, 20 bp, synthetic construct
  misc_feature 1..20: note = Description of Artificial Sequence: Synthetic oligonucleotide
  misc_feature 1..20: note = Target: SCN10A; (+) strand; PAM type: YTN; PAM sequence: CTT
  source 1..20: mol_type = other DNA
cactaagagcaaagggggtg

SEQ ID NO: 61024 - DNA, 20 bp, synthetic construct
  misc_feature 1..20: note = Description of Artificial Sequence: Synthetic oligonucleotide
  misc_feature 1..20: note = Target: SCN10A; (+) strand; PAM type: YTN; PAM sequence: TTC
  source 1..20: mol_type = other DNA
actaagagcaaagggggtga

SEQ ID NO: 61025 - DNA, 20 bp, synthetic construct
  misc_feature 1..20: note = Description of Artificial Sequence: Synthetic oligonucleotide
  misc_feature 1..20: note = Target: SCN10A; (+) strand; PAM type: YTN; PAM sequence: CTA
  source 1..20: mol_type = other DNA
agagcaaagggggtgaggtc

SEQ ID NO: 61026 - DNA, 20 bp, synthetic construct
  misc_feature 1..20: note = Description of Artificial Sequence: Synthetic oligonucleotide
  misc_feature 1..20: note = Target: SCN10A; (+) strand; PAM type: YTN; PAM sequence: CTG
  source 1..20: mol_type = other DNA
ggtcctggtggctgtaatat

SEQ ID NO: 61027 - DNA, 20 bp, synthetic construct
  misc_feature 1..20: note = Description of Artificial Sequence: Synthetic oligonucleotide
  misc_feature 1..20: note = Target: SCN10A; (+) strand; PAM type: YTN; PAM sequence: CTG
  source 1..20: mol_type = other DNA
gtggctgtaatatttatggg

SEQ ID NO: 61028 - DNA, 20 bp, synthetic construct
  misc_feature 1..20: note = Description of Artificial Sequence: Synthetic oligonucleotide
  misc_feature 1..20: note = Target: SCN10A; (+) strand; PAM type: YTN; PAM sequence: CTG
  source 1..20: mol_type = other DNA
taatatttatgggtgacaag

SEQ ID NO: 61029 - DNA, 20 bp, synthetic construct
  misc_feature 1..20: note = Description of Artificial Sequence: Synthetic oligonucleotide
  misc_feature 1..20: note = Target: SCN10A; (+) strand; PAM type: YTN; PAM sequence: TTT
  source 1..20: mol_type = other DNA
atgggtgacaagggaagatg

SEQ ID NO: 61030 - DNA, 20 bp, synthetic construct
  misc_feature 1..20: note = Description of Artificial Sequence: Synthetic oligonucleotide
  misc_feature 1..20: note = Target: SCN10A; (+) strand; PAM type: YTN; PAM sequence: TTA
  source 1..20: mol_type = other DNA
tgggtgacaagggaagatgg

SEQ ID NO: 61031 - DNA, 20 bp, synthetic construct
  misc_feature 1..20: note = Description of Artificial Sequence: Synthetic oligonucleotide
  misc_feature 1..20: note = Target: SCN10A; (+) strand; PAM type: YTN; PAM sequence: CTT
  source 1..20: mol_type = other DNA
gaaagagaactaagagagtt

SEQ ID NO: 61032 - DNA, 20 bp, synthetic construct
  misc_feature 1..20: note = Description of Artificial Sequence: Synthetic oligonucleotide
  misc_feature 1..20: note = Target: SCN10A; (+) strand; PAM type: YTN; PAM sequence: TTG
  source 1..20: mol_type = other DNA
aaagagaactaagagagtta

SEQ ID NO: 61033 - DNA, 20 bp, synthetic construct
  misc_feature 1..20: note = Description of Artificial Sequence: Synthetic oligonucleotide
  misc_feature 1..20: note = Target: SCN10A; (+) strand; PAM type: YTN; PAM sequence: CTA
  source 1..20: mol_type = other DNA
agagagttaggacatgcagc

SEQ ID NO: 61034 - DNA, 20 bp, synthetic construct
  misc_feature 1..20: note = Description of Artificial Sequence: Synthetic oligonucleotide
  misc_feature 1..20: note = Target: SCN10A; (+) strand; PAM type: YTN; PAM sequence: TTA
  source 1..20: mol_type = other DNA
ggacatgcagcaccaccaaa

SEQ ID NO: 61035 - DNA, 20 bp, synthetic construct
  misc_feature 1..20: note = Description of Artificial Sequence: Synthetic oligonucleotide
  misc_feature 1..20: note = Target: SCN10A; (+) strand; PAM type: YTN; PAM sequence: CTC
  source 1..20: mol_type = other DNA
agagcctacctttggaggtg

SEQ ID NO: 61036 - DNA, 20 bp, synthetic construct
  misc_feature 1..20: note = Description of Artificial Sequence: Synthetic oligonucleotide
  misc_feature 1..20: note = Target: SCN10A; (+) strand; PAM type: YTN; PAM sequence: CTA
  source 1..20: mol_type = other DNA
cctttggaggtggggccccg

SEQ ID NO: 61037 - DNA, 20 bp, synthetic construct
  misc_feature 1..20: note = Description of Artificial Sequence: Synthetic oligonucleotide
  misc_feature 1..20: note = Target: SCN10A; (+) strand; PAM type: YTN; PAM sequence: CTT
  source 1..20: mol_type = other DNA
tggaggtggggccccggagc

SEQ ID NO: 61038 - DNA, 20 bp, synthetic construct
  misc_feature 1..20: note = Description of Artificial Sequence: Synthetic oligonucleotide
  misc_feature 1..20: note = Target: SCN10A; (+) strand; PAM type: YTN; PAM sequence: TTT
  source 1..20: mol_type = other DNA
ggaggtggggccccggagct

SEQ ID NO: 61039 - DNA, 20 bp, synthetic construct
  misc_feature 1..20: note = Description of Artificial Sequence: Synthetic oligonucleotide
  misc_feature 1..20: note = Target: SCN10A; (+) strand; PAM type: YTN; PAM sequence: TTG
  source 1..20: mol_type = other DNA
gaggtggggccccggagctc

SEQ ID NO: 61040 - DNA, 20 bp, synthetic construct
  misc_feature 1..20: note = Description of Artificial Sequence: Synthetic oligonucleotide
  misc_feature 1..20: note = Target: SCN10A; (+) strand; PAM type: YTN; PAM sequence: CTC
  source 1..20: mol_type = other DNA
agggttggtgggatggaggg

SEQ ID NO: 61041 - DNA, 20 bp, synthetic construct
  misc_feature 1..20: note = Description of Artificial Sequence: Synthetic oligonucleotide
  misc_feature 1..20: note = Target: SCN10A; (+) strand; PAM type: YTN; PAM sequence: TTG
  source 1..20: mol_type = other DNA
gtgggatggagggcataaag

SEQ ID NO: 61042 - DNA, 20 bp, synthetic construct
  misc_feature 1..20: note = Description of Artificial Sequence: Synthetic oligonucleotide
  misc_feature 1..20: note = Target: SCN10A; (+) strand; PAM type: YTN; PAM sequence: TTA
  source 1..20: mol_type = other DNA
ccaaaacctgcagaccagag

SEQ ID NO: 61043 - DNA, 20 bp, synthetic construct
  misc_feature 1..20: note = Description of Artificial Sequence: Synthetic oligonucleotide
  misc_feature 1..20: note = Target: SCN10A; (+) strand; PAM type: YTN; PAM sequence: CTG
  source 1..20: mol_type = other DNA
cagaccagagaagttttttg

SEQ ID NO: 61044 - DNA, 20 bp, synthetic construct
  misc_feature 1..20: note = Description of Artificial Sequence: Synthetic oligonucleotide
  misc_feature 1..20: note = Target: SCN10A; (+) strand; PAM type: YTN; PAM sequence: TTT
  source 1..20: mol_type = other DNA
tttgtttgttttttgaggcg

SEQ ID NO: 61045 - DNA, 20 bp, synthetic construct
  misc_feature 1..20: note = Description of Artificial Sequence: Synthetic oligonucleotide
  misc_feature 1..20: note = Target: SCN10A; (+) strand; PAM type: YTN; PAM sequence: TTT
  source 1..20: mol_type = other DNA
ttgtttgttttttgaggcgg

SEQ ID NO: 61046 - DNA, 20 bp, synthetic construct
  misc_feature 1..20: note = Description of Artificial Sequence: Synthetic oligonucleotide
  misc_feature 1..20: note = Target: SCN10A; (+) strand; PAM type: YTN; PAM sequence: TTT
  source 1..20: mol_type = other DNA
tgtttgttttttgaggcgga

SEQ ID NO: 61047 - DNA, 20 bp, synthetic construct
  misc_feature 1..20: note = Description of Artificial Sequence: Synthetic oligonucleotide
  misc_feature 1..20: note = Target: SCN10A; (+) strand; PAM type: YTN; PAM sequence: TTT
  source 1..20: mol_type = other DNA
gtttgttttttgaggcggag

SEQ ID NO: 61048 - DNA, 20 bp, synthetic construct
  misc_feature 1..20: note = Description of Artificial Sequence: Synthetic oligonucleotide
  misc_feature 1..20: note = Target: SCN10A; (+) strand; PAM type: YTN; PAM sequence: TTG
  source 1..20: mol_type = other DNA
tttgttttttgaggcggagt

SEQ ID NO: 61049 - DNA, 20 bp, synthetic construct
  misc_feature 1..20: note = Description of Artificial Sequence: Synthetic oligonucleotide
  misc_feature 1..20: note = Target: SCN10A; (+) strand; PAM type: YTN; PAM sequence: TTT
  source 1..20: mol_type = other DNA
gttttttgaggcggagtctc

SEQ ID NO: 61050 - DNA, 20 bp, synthetic construct
  misc_feature 1..20: note = Description of Artificial Sequence: Synthetic oligonucleotide
  misc_feature 1..20: note = Target: SCN10A; (+) strand; PAM type: YTN; PAM sequence: TTG
  source 1..20: mol_type = other DNA
ttttttgaggcggagtctcg

SEQ ID NO: 61051 - DNA, 20 bp, synthetic construct
  misc_feature 1..20: note = Description of Artificial Sequence: Synthetic oligonucleotide
  misc_feature 1..20: note = Target: SCN10A; (+) strand; PAM type: YTN; PAM sequence: TTT
  source 1..20: mol_type = other DNA
tttgaggcggagtctcgctc

SEQ ID NO: 61052 - DNA, 20 bp, synthetic construct
  misc_feature 1..20: note = Description of Artificial Sequence: Synthetic oligonucleotide
  misc_feature 1..20: note = Target: SCN10A; (+) strand; PAM type: YTN; PAM sequence: TTT
  source 1..20: mol_type = other DNA
ttgaggcggagtctcgctct

SEQ ID NO: 61053 - DNA, 20 bp, synthetic construct
  misc_feature 1..20: note = Description of Artificial Sequence: Synthetic oligonucleotide
  misc_feature 1..20: note = Target: SCN10A; (+) strand; PAM type: YTN; PAM sequence: TTT
  source 1..20: mol_type = other DNA
tgaggcggagtctcgctctg

SEQ ID NO: 61054 - DNA, 20 bp, synthetic construct
  misc_feature 1..20: note = Description of Artificial Sequence: Synthetic oligonucleotide
  misc_feature 1..20: note = Target: SCN10A; (+) strand; PAM type: YTN; PAM sequence: TTT
  source 1..20: mol_type = other DNA
gaggcggagtctcgctctgt

SEQ ID NO: 61055 - DNA, 20 bp, synthetic construct
  misc_feature 1..20: note = Description of Artificial Sequence: Synthetic oligonucleotide
  misc_feature 1..20: note = Target: SCN10A; (+) strand; PAM type: YTN; PAM sequence: TTG
  source 1..20: mol_type = other DNA
aggcggagtctcgctctgtc

SEQ ID NO: 61056 - DNA, 20 bp, synthetic construct
  misc_feature 1..20: note = Description of Artificial Sequence: Synthetic oligonucleotide
  misc_feature 1..20: note = Target: SCN10A; (+) strand; PAM type: YTN; PAM sequence: CTC
  source 1..20: mol_type = other DNA
gctctgtcacccaggctgga

SEQ ID NO: 61057 - DNA, 20 bp, synthetic construct
  misc_feature 1..20: note = Description of Artificial Sequence: Synthetic oligonucleotide
  misc_feature 1..20: note = Target: SCN10A; (+) strand; PAM type: YTN; PAM sequence: CTC
  source 1..20: mol_type = other DNA
tgtcacccaggctggagtat

SEQ ID NO: 61058 - DNA, 20 bp, synthetic construct
  misc_feature 1..20: note = Description of Artificial Sequence: Synthetic oligonucleotide
  misc_feature 1..20: note = Target: SCN10A; (+) strand; PAM type: YTN; PAM sequence: CTG
  source 1..20: mol_type = other DNA
tcacccaggctggagtataa

SEQ ID NO: 61059 - DNA, 20 bp, synthetic construct
  misc_feature 1..20: note = Description of Artificial Sequence: Synthetic oligonucleotide
  misc_feature 1..20: note = Target: SCN10A; (+) strand; PAM type: YTN; PAM sequence: CTG
  source 1..20: mol_type = other DNA
gagtataatggcacaatctc

SEQ ID NO: 61060 - DNA, 20 bp, synthetic construct
  misc_feature 1..20: note = Description of Artificial Sequence: Synthetic oligonucleotide
  misc_feature 1..20: note = Target: SCN10A; (+) strand; PAM type: YTN; PAM sequence: CTC
  source 1..20: mol_type = other DNA
ggctcactaccaccacacct

SEQ ID NO: 61061 - DNA, 20 bp, synthetic construct
  misc_feature 1..20: note = Description of Artificial Sequence: Synthetic oligonucleotide
  misc_feature 1..20: note = Target: SCN10A; (+) strand; PAM type: YTN; PAM sequence: CTC
  source 1..20: mol_type = other DNA
actaccaccacacctcgtgg

SEQ ID NO: 61062 - DNA, 20 bp, synthetic construct
  misc_feature 1..20: note = Description of Artificial Sequence: Synthetic oligonucleotide
  misc_feature 1..20: note = Target: SCN10A; (+) strand; PAM type: YTN; PAM sequence: CTA
  source 1..20: mol_type = other DNA
ccaccacacctcgtggtggt

SEQ ID NO: 61063 - DNA, 20 bp, synthetic construct
  misc_feature 1..20: note = Description of Artificial Sequence: Synthetic oligonucleotide
  misc_feature 1..20: note = Target: SCN10A; (+) strand; PAM type: YTN; PAM sequence: CTC
  source 1..20: mol_type = other DNA
gtggtggtagtgatttttgt

SEQ ID NO: 61064 - DNA, 20 bp, synthetic construct
  misc_feature 1..20: note = Description of Artificial Sequence: Synthetic oligonucleotide
  misc_feature 1..20: note = Target: SCN10A; (+) strand; PAM type: YTN; PAM sequence: TTT
  source 1..20: mol_type = other DNA
ttgtacttttagcagagaca

SEQ ID NO: 61065 - DNA, 20 bp, synthetic construct
  misc_feature 1..20: note = Description of Artificial Sequence: Synthetic oligonucleotide
  misc_feature 1..20: note = Target: SCN10A; (+) strand; PAM type: YTN; PAM sequence: TTT
  source 1..20: mol_type = other DNA
tgtacttttagcagagacag

SEQ ID NO: 61066 - DNA, 20 bp, synthetic construct
  misc_feature 1..20: note = Description of Artificial Sequence: Synthetic oligonucleotide
  misc_feature 1..20: note = Target: SCN10A; (+) strand; PAM type: YTN; PAM sequence: TTT
  source 1..20: mol_type = other DNA
gtacttttagcagagacagg

SEQ ID NO: 61067 - DNA, 20 bp, synthetic construct
  misc_feature 1..20: note = Description of Artificial Sequence: Synthetic oligonucleotide
  misc_feature 1..20: note = Target: SCN10A; (+) strand; PAM type: YTN; PAM sequence: TTG
  source 1..20: mol_type = other DNA
tacttttagcagagacaggg

SEQ ID NO: 61068 - DNA, 20 bp, synthetic construct
  misc_feature 1..20: note = Description of Artificial Sequence: Synthetic oligonucleotide
  misc_feature 1..20: note = Target: SCN10A; (+) strand; PAM type: YTN; PAM sequence: CTT
  source 1..20: mol_type = other DNA
ttagcagagacagggtttcg

SEQ ID NO: 61069 - DNA, 20 bp, synthetic construct
  misc_feature 1..20: note = Description of Artificial Sequence: Synthetic oligonucleotide
  misc_feature 1..20: note = Target: SCN10A; (+) strand; PAM type: YTN; PAM sequence: TTT
  source 1..20: mol_type = other DNA
tagcagagacagggtttcgg

SEQ ID NO: 61070 - DNA, 20 bp, synthetic construct
  misc_feature 1..20: note = Description of Artificial Sequence: Synthetic oligonucleotide
  misc_feature 1..20: note = Target: SCN10A; (+) strand; PAM type: YTN; PAM sequence: TTT
  source 1..20: mol_type = other DNA
agcagagacagggtttcggc

SEQ ID NO: 61071 - DNA, 20 bp, synthetic construct
  misc_feature 1..20: note = Description of Artificial Sequence: Synthetic oligonucleotide
  misc_feature 1..20: note = Target: SCN10A; (+) strand; PAM type: YTN; PAM sequence: TTA
  source 1..20: mol_type = other DNA
gcagagacagggtttcggca

SEQ ID NO: 61072 - DNA, 20 bp, synthetic construct
  misc_feature 1..20: note = Description of Artificial Sequence: Synthetic oligonucleotide
  misc_feature 1..20: note = Target: SCN10A; (+) strand; PAM type: YTN; PAM sequence: TTT
  source 1..20: mol_type = other DNA
cggcatgttggccagggtgg

SEQ ID NO: 61073 - DNA, 20 bp, synthetic construct
  misc_feature 1..20: note = Description of Artificial Sequence: Synthetic oligonucleotide
  misc_feature 1..20: note = Target: SCN10A; (+) strand; PAM type: YTN; PAM sequence: TTC
  source 1..20: mol_type = other DNA
ggcatgttggccagggtggt

SEQ ID NO: 61074 - DNA, 20 bp, synthetic construct
  misc_feature 1..20: note = Description of Artificial Sequence: Synthetic oligonucleotide
  misc_feature 1..20: note = Target: SCN10A; (+) strand; PAM type: YTN; PAM sequence: TTG
  source 1..20: mol_type = other DNA
gccagggtggttttgaactc

SEQ ID NO: 61075 - DNA, 20 bp, synthetic construct
  misc_feature 1..20: note = Description of Artificial Sequence: Synthetic oligonucleotide
  misc_feature 1..20: note = Target: SCN10A; (+) strand; PAM type: YTN; PAM sequence: TTT
  source 1..20: mol_type = other DNA
tgaactcctaacctcaggtg

SEQ ID NO: 61076 - DNA, 20 bp, synthetic construct
  misc_feature 1..20: note = Description of Artificial Sequence: Synthetic oligonucleotide
  misc_feature 1..20: note = Target: SCN10A; (+) strand; PAM type: YTN; PAM sequence: TTT
  source 1..20: mol_type = other DNA
gaactcctaacctcaggtga

SEQ ID NO: 61077 - DNA, 20 bp, synthetic construct
  misc_feature 1..20: note = Description of Artificial Sequence: Synthetic oligonucleotide
  misc_feature 1..20: note = Target: SCN10A; (+) strand; PAM type: YTN; PAM sequence: TTG
  source 1..20: mol_type = other DNA
aactcctaacctcaggtgat

SEQ ID NO: 61078 - DNA, 20 bp, synthetic construct
  misc_feature 1..20: note = Description of Artificial Sequence: Synthetic oligonucleotide
  misc_feature 1..20: note = Target: SCN10A; (+) strand; PAM type: YTN; PAM sequence: CTC
  source 1..20: mol_type = other DNA
ctaacctcaggtgatccgcc

SEQ ID NO: 61079 - DNA, 20 bp, synthetic construct
  misc_feature 1..20: note = Description of Artificial Sequence: Synthetic oligonucleotide
  misc_feature 1..20: note = Target: SCN10A; (+) strand; PAM type: YTN; PAM sequence: CTA
  source 1..20: mol_type = other DNA
acctcaggtgatccgcccgc

SEQ ID NO: 61080 - DNA, 20 bp, synthetic construct
  misc_feature 1..20: note = Description of Artificial Sequence: Synthetic oligonucleotide
  misc_feature 1..20: note = Target: SCN10A; (+) strand; PAM type: YTN; PAM sequence: CTC
  source 1..20: mol_type = other DNA
aggtgatccgcccgcctcag

SEQ ID NO: 61081 - DNA, 20 bp, synthetic construct
  misc_feature 1..20: note = Description of Artificial Sequence: Synthetic oligonucleotide
  misc_feature 1..20: note = Target: SCN10A; (+) strand; PAM type: YTN; PAM sequence: CTC
  source 1..20: mol_type = other DNA
agcctcccaaagtgctggga

SEQ ID NO: 61082 - DNA, 20 bp, synthetic construct
  misc_feature 1..20: note = Description of Artificial Sequence: Synthetic oligonucleotide
  misc_feature 1..20: note = Target: SCN10A; (+) strand; PAM type: YTN; PAM sequence: CTC
  source 1..20: mol_type = other DNA
ccaaagtgctgggattacag

SEQ ID NO: 61083 - DNA, 20 bp, synthetic construct
  misc_feature 1..20: note = Description of Artificial Sequence: Synthetic oligonucleotide
  misc_feature 1..20: note = Target: SCN10A; (+) strand; PAM type: YTN; PAM sequence: CTG
  source 1..20: mol_type = other DNA
ggattacaggcatgaaccac

SEQ ID NO: 61084 - DNA, 20 bp, synthetic construct
  misc_feature 1..20: note = Description of Artificial Sequence: Synthetic oligonucleotide
  misc_feature 1..20: note = Target: SCN10A; (+) strand; PAM type: YTN; PAM sequence: TTA
  source 1..20: mol_type = other DNA
caggcatgaaccaccgtgcc

SEQ ID NO: 61085 - DNA, 20 bp, synthetic construct
  misc_feature 1..20: note = Description of Artificial Sequence: Synthetic oligonucleotide
  misc_feature 1..20: note = Target: SCN10A; (+) strand; PAM type: YTN; PAM sequence: CTG
  source 1..20: mol_type = other DNA
gccagatgagagaagttttg

SEQ ID NO: 61086 - DNA, 20 bp, synthetic construct
  misc_feature 1..20: note = Description of Artificial Sequence: Synthetic oligonucleotide
  misc_feature 1..20: note = Target: SCN10A; (+) strand; PAM type: YTN; PAM sequence: TTT
  source 1..20: mol_type = other DNA
tgagatcagacttacccgca

SEQ ID NO: 61087 - DNA, 20 bp, synthetic construct
  misc_feature 1..20: note = Description of Artificial Sequence: Synthetic oligonucleotide
  misc_feature 1..20: note = Target: SCN10A; (+) strand; PAM type: YTN; PAM sequence: TTT
  source 1..20: mol_type = other DNA
gagatcagacttacccgcat

SEQ ID NO: 61088 - DNA, 20 bp, synthetic construct
  misc_feature 1..20: note = Description of Artificial Sequence: Synthetic oligonucleotide
  misc_feature 1..20: note = Target: SCN10A; (+) strand; PAM type: YTN; PAM sequence: TTG
  source 1..20: mol_type = other DNA
agatcagacttacccgcatg

SEQ ID NO: 61089 - DNA, 20 bp, synthetic construct
  misc_feature 1..20: note = Description of Artificial Sequence: Synthetic oligonucleotide
  misc_feature 1..20: note = Target: SCN10A; (+) strand; PAM type: YTN; PAM sequence: CTT
  source 1..20: mol_type = other DNA
acccgcatgccttcaaatcg

SEQ ID NO: 61090 - DNA, 20 bp, synthetic construct
  misc_feature 1..20: note = Description of Artificial Sequence: Synthetic oligonucleotide
  misc_feature 1..20: note = Target: SCN10A; (+) strand; PAM type: YTN; PAM sequence: TTA
  source 1..20: mol_type = other DNA
cccgcatgccttcaaatcga

SEQ ID NO: 61091 - DNA, 20 bp, synthetic construct
  misc_feature 1..20: note = Description of Artificial Sequence: Synthetic oligonucleotide
  misc_feature 1..20: note = Target: SCN10A; (+) strand; PAM type: YTN; PAM sequence: CTT
  source 1..20: mol_type = other DNA
caaatcgagaaagagcccgc

SEQ ID NO: 61092 - DNA, 20 bp, synthetic construct
  misc_feature 1..20: note = Description of Artificial Sequence: Synthetic oligonucleotide
  misc_feature 1..20: note = Target: SCN10A; (+) strand; PAM type: YTN; PAM sequence: TTC
  source 1..20: mol_type = other DNA
aaatcgagaaagagcccgca

SEQ ID NO: 61093 - DNA, 20 bp, synthetic construct
  misc_feature 1..20: note = Description of Artificial Sequence: Synthetic oligonucleotide
  misc_feature 1..20: note = Target: SCN10A; (+) strand; PAM type: YTN; PAM sequence: TTC
  source 1..20: mol_type = other DNA
gaagggctttgatgggagcc

SEQ ID NO: 61094 - DNA, 20 bp, synthetic construct
  misc_feature 1..20: note = Description of Artificial Sequence: Synthetic oligonucleotide
  misc_feature 1..20: note = Target: SCN10A; (+) strand; PAM type: YTN; PAM sequence: CTT
  source 1..20: mol_type = other DNA
tgatgggagccacttcagaa

SEQ ID NO: 61095 - DNA, 20 bp, synthetic construct
  misc_feature 1..20: note = Description of Artificial Sequence: Synthetic oligonucleotide
  misc_feature 1..20: note = Target: SCN10A; (+) strand; PAM type: YTN; PAM sequence: TTT
  source 1..20: mol_type = other DNA
gatgggagccacttcagaat

SEQ ID NO: 61096 - DNA, 20 bp, synthetic construct
  misc_feature 1..20: note = Description of Artificial Sequence: Synthetic oligonucleotide
  misc_feature 1..20: note = Target: SCN10A; (+) strand; PAM type: YTN; PAM sequence: TTG
  source 1..20: mol_type = other DNA
atgggagccacttcagaata

SEQ ID NO: 61097 - DNA, 20 bp, synthetic construct
  misc_feature 1..20: note = Description of Artificial Sequence: Synthetic oligonucleotide
  misc_feature 1..20: note = Target: SCN10A; (+) strand; PAM type: YTN; PAM sequence: CTT
  source 1..20: mol_type = other DNA
cagaatattccagaatcttc

SEQ ID NO: 61098 - DNA, 20 bp, synthetic construct
  misc_feature 1..20: note = Description of Artificial Sequence: Synthetic oligonucleotide
  misc_feature 1..20: note = Target: SCN10A; (+) strand; PAM type: YTN; PAM sequence: TTC
  source 1..20: mol_type = other DNA
agaatattccagaatcttcg

SEQ ID NO: 61099 - DNA, 20 bp, synthetic construct
  misc_feature 1..20: note = Description of Artificial Sequence: Synthetic oligonucleotide
  misc_feature 1..20: note = Target: SCN10A; (+) strand; PAM type: YTN; PAM sequence: TTC
  source 1..20: mol_type = other DNA
cagaatcttcgctgtgagac

SEQ ID NO: 61100 - DNA, 20 bp, synthetic construct
  misc_feature 1..20: note = Description of Artificial Sequence: Synthetic oligonucleotide
  misc_feature 1..20: note = Target: SCN10A; (+) strand; PAM type: YTN; PAM sequence: CTT
  source 1..20: mol_type = other DNA
cgctgtgagacttatcagtg

SEQ ID NO: 61101 - DNA, 20 bp, synthetic construct
  misc_feature 1..20: note = Description of Artificial Sequence: Synthetic oligonucleotide
  misc_feature 1..20: note = Target: SCN10A; (+) strand; PAM type: YTN; PAM sequence: TTC
  source 1..20: mol_type = other DNA
gctgtgagacttatcagtga

SEQ ID NO: 61102 - DNA, 20 bp, synthetic construct
  misc_feature 1..20: note = Description of Artificial Sequence: Synthetic oligonucleotide
  misc_feature 1..20: note = Target: SCN10A; (+) strand; PAM type: YTN; PAM sequence: CTG
  source 1..20: mol_type = other DNA
tgagacttatcagtgagatc

SEQ ID NO: 61103 - DNA, 20 bp, synthetic construct
  misc_feature 1..20: note = Description of Artificial Sequence: Synthetic oligonucleotide
  misc_feature 1..20: note = Target: SCN10A; (+) strand; PAM type: YTN; PAM sequence: CTT
  source 1..20: mol_type = other DNA
atcagtgagatctgagtgca

SEQ ID NO: 61104 - DNA, 20 bp, synthetic construct
  misc_feature 1..20: note = Description of Artificial Sequence: Synthetic oligonucleotide
  misc_feature 1..20: note = Target: SCN10A; (+) strand; PAM type: YTN; PAM sequence: TTA
  source 1..20: mol_type = other DNA
tcagtgagatctgagtgcag

SEQ ID NO: 61105 - DNA, 20 bp, synthetic construct
  misc_feature 1..20: note = Description of Artificial Sequence: Synthetic oligonucleotide
  misc_feature 1..20: note = Target: SCN10A; (+) strand; PAM type: YTN; PAM sequence: CTG
  source 1..20: mol_type = other DNA
agtgcaggagagggcagaaa

SEQ ID NO: 61106 - DNA, 20 bp, synthetic construct
  misc_feature 1..20: note = Description of Artificial Sequence: Synthetic oligonucleotide
  misc_feature 1..20: note = Target: SCN10A; (+) strand; PAM type: YTN; PAM sequence: CTC
  source 1..20: mol_type = other DNA
taggtttccagaaaggcagt

SEQ ID NO: 61107 - DNA, 20 bp, synthetic construct
  misc_feature 1..20: note = Description of Artificial Sequence: Synthetic oligonucleotide
  misc_feature 1..20: note = Target: SCN10A; (+) strand; PAM type: YTN; PAM sequence: CTA
  source 1..20: mol_type = other DNA
ggtttccagaaaggcagtcc

SEQ ID NO: 61108 - DNA, 20 bp, synthetic construct
  misc_feature 1..20: note = Description of Artificial Sequence: Synthetic oligonucleotide
  misc_feature 1..20: note = Target: SCN10A; (+) strand; PAM type: YTN; PAM sequence: TTT
  source 1..20: mol_type = other DNA
ccagaaaggcagtcctcgtg

SEQ ID NO: 61109 - DNA, 20 bp, synthetic construct
  misc_feature 1..20: note = Description of Artificial Sequence: Synthetic oligonucleotide
  misc_feature 1..20: note = Target: SCN10A; (+) strand; PAM type: YTN; PAM sequence: TTC
  source 1..20: mol_type = other DNA
cagaaaggcagtcctcgtgg

SEQ ID NO: 61110 - DNA, 20 bp, synthetic construct
  misc_feature 1..20: note = Description of Artificial Sequence: Synthetic oligonucleotide
  misc_feature 1..20: note = Target: SCN10A; (+) strand; PAM type: YTN; PAM sequence: CTC
  source 1..20: mol_type = other DNA
gtggaaggagacaggaactc

SEQ ID NO: 61111 - DNA, 20 bp, synthetic construct
  misc_feature 1..20: note = Description of Artificial Sequence: Synthetic oligonucleotide
  misc_feature 1..20: note = Target: SCN10A; (+) strand; PAM type: YTN; PAM sequence: CTC
  source 1..20: mol_type = other DNA
cctgcccagcctcccattcc

SEQ ID NO: 61112 - DNA, 20 bp, synthetic construct
  misc_feature 1..20: note = Description of Artificial Sequence: Synthetic oligonucleotide
  misc_feature 1..20: note = Target: SCN10A; (+) strand; PAM type: YTN; PAM sequence: CTG
  source 1..20: mol_type = other DNA
cccagcctcccattcctaca

SEQ ID NO: 61113 - DNA, 20 bp, synthetic construct
  misc_feature 1..20: note = Description of Artificial Sequence: Synthetic oligonucleotide
  misc_feature 1..20: note = Target: SCN10A; (+) strand; PAM type: YTN; PAM sequence: CTC
  source 1..20: mol_type = other DNA
ccattcctacacgtctaagc

SEQ ID NO: 61114 - DNA, 20 bp, synthetic construct
  misc_feature 1..20: note = Description of Artificial Sequence: Synthetic oligonucleotide
  misc_feature 1..20: note = Target: SCN10A; (+) strand; PAM type: YTN; PAM sequence: TTC
  source 1..20: mol_type = other DNA
ctacacgtctaagccatcat

SEQ ID NO: 61115 - DNA, 20 bp, synthetic construct
  misc_feature 1..20: note = Description of Artificial Sequence: Synthetic oligonucleotide
  misc_feature 1..20: note = Target: SCN10A; (+) strand; PAM type: YTN; PAM sequence: CTA
  source 1..20: mol_type = other DNA
cacgtctaagccatcatcct

SEQ ID NO: 61116 - DNA, 20 bp, synthetic construct
  misc_feature 1..20: note = Description of Artificial Sequence: Synthetic oligonucleotide
  misc_feature 1..20: note = Target: SCN10A; (+) strand; PAM type: YTN; PAM sequence: CTA
  source 1..20: mol_type = other DNA
agccatcatcctagctccca

SEQ ID NO: 61117 - DNA, 20 bp, synthetic construct
  misc_feature 1..20: note = Description of Artificial Sequence: Synthetic oligonucleotide
  misc_feature 1..20: note = Target: SCN10A; (+) strand; PAM type: YTN; PAM sequence: CTA
  source 1..20: mol_type = other DNA
gctcccaccttattcggaac

SEQ ID NO: 61118 - DNA, 20 bp, synthetic construct
  misc_feature 1..20: note = Description of Artificial Sequence: Synthetic oligonucleotide
  misc_feature 1..20: note = Target: SCN10A; (+) strand; PAM type: YTN; PAM sequence: CTC
  source 1..20: mol_type = other DNA
ccaccttattcggaactcca

SEQ ID NO: 61119 - DNA, 20 bp, synthetic construct
  misc_feature 1..20: note = Description of Artificial Sequence: Synthetic oligonucleotide
  misc_feature 1..20: note = Target: SCN10A; (+) strand; PAM type: YTN; PAM sequence: CTT
  source 1..20: mol_type = other DNA
attcggaactccaatgagag

SEQ ID NO: 61120 - DNA, 20 bp, synthetic construct
  misc_feature 1..20: note = Description of Artificial Sequence: Synthetic oligonucleotide
  misc_feature 1..20: note = Target: SCN10A; (+) strand; PAM type: YTN; PAM sequence: TTA
  source 1..20: mol_type = other DNA
ttcggaactccaatgagagg

SEQ ID NO: 61121 - DNA, 20 bp, synthetic construct
  misc_feature 1..20: note = Description of Artificial Sequence: Synthetic oligonucleotide
  misc_feature 1..20: note = Target: SCN10A; (+) strand; PAM type: YTN; PAM sequence: TTC
  source 1..20: mol_type = other DNA
ggaactccaatgagaggtct

SEQ ID NO: 61122 - DNA, 20 bp, synthetic construct
  misc_feature 1..20: note = Description of Artificial Sequence: Synthetic oligonucleotide
  misc_feature 1..20: note = Target: SCN10A; (+) strand; PAM type: YTN; PAM sequence: CTC
  source 1..20: mol_type = other DNA
caatgagaggtctagaaaga

SEQ ID NO: 61123 - DNA, 20 bp, synthetic construct
  misc_feature 1..20: note = Description of Artificial Sequence: Synthetic oligonucleotide
  misc_feature 1..20: note = Target: SCN10A; (+) strand; PAM type: YTN; PAM sequence: CTA
  source 1..20: mol_type = other DNA
gaaagagttttgtctcttcc

SEQ ID NO: 61124 - DNA, 20 bp, synthetic construct
  misc_feature 1..20: note = Description of Artificial Sequence: Synthetic oligonucleotide
  misc_feature 1..20: note = Target: SCN10A; (+) strand; PAM type: YTN; PAM sequence: TTT
  source 1..20: mol_type = other DNA
tgtctcttcccttttattaa

SEQ ID NO: 61125 - DNA, 20 bp, synthetic construct
  misc_feature 1..20: note = Description of Artificial Sequence: Synthetic oligonucleotide
  misc_feature 1..20: note = Target: SCN10A; (+) strand; PAM type: YTN; PAM sequence: TTT
  source 1..20: mol_type = other DNA
gtctcttcccttttattaaa

SEQ ID NO: 61126 - DNA, 20 bp, synthetic construct
  misc_feature 1..20: note = Description of Artificial Sequence: Synthetic oligonucleotide
  misc_feature 1..20: note = Target: SCN10A; (+) strand; PAM type: YTN; PAM sequence: TTG
  source 1..20: mol_type = other DNA
tctcttcccttttattaaaa

SEQ ID NO: 61127 - DNA, 20 bp, synthetic construct
  misc_feature 1..20: note = Description of Artificial Sequence: Synthetic oligonucleotide
  misc_feature 1..20: note = Target: SCN10A; (+) strand; PAM type: YTN; PAM sequence: CTC
  source 1..20: mol_type = other DNA
ttcccttttattaaaaattt

SEQ ID NO: 61128 - DNA, 20 bp, synthetic construct
  misc_feature 1..20: note = Description of Artificial Sequence: Synthetic oligonucleotide
  misc_feature 1..20: note = Target: SCN10A; (+) strand; PAM type: YTN; PAM sequence: CTT
  source 1..20: mol_type = other DNA
cccttttattaaaaatttta

SEQ ID NO: 61129 - DNA, 20 bp, synthetic construct
  misc_feature 1..20: note = Description of Artificial Sequence: Synthetic oligonucleotide
  misc_feature 1..20: note = Target: SCN10A; (+) strand; PAM type: YTN; PAM sequence: TTC
  source 1..20: mol_type = other DNA
ccttttattaaaaattttat

SEQ ID NO: 61130 - DNA, 20 bp, synthetic construct
  misc_feature 1..20: note = Description of Artificial Sequence: Synthetic oligonucleotide
  misc_feature 1..20: note = Target: SCN10A; (+) strand; PAM type: YTN; PAM sequence: CTT
  source 1..20: mol_type = other DNA
ttattaaaaattttattcac

SEQ ID NO: 61131 - DNA, 20 bp, synthetic construct
  misc_feature 1..20: note = Description of Artificial Sequence: Synthetic oligonucleotide
  misc_feature 1..20: note = Target: SCN10A; (+) strand; PAM type: YTN; PAM sequence: TTT
  source 1..20: mol_type = other DNA
tattaaaaattttattcacc

SEQ ID NO: 61132 - DNA, 20 bp, synthetic construct
  misc_feature 1..20: note = Description of Artificial Sequence: Synthetic oligonucleotide
  misc_feature 1..20: note = Target: SCN10A; (+) strand; PAM type: YTN; PAM sequence: TTT
  source 1..20: mol_type = other DNA
attaaaaattttattcacca

SEQ ID NO: 61133 - DNA, 20 bp, synthetic construct
  misc_feature 1..20: note = Description of Artificial Sequence: Synthetic oligonucleotide
  misc_feature 1..20: note = Target: SCN10A; (+) strand; PAM type: YTN; PAM sequence: TTA
  source 1..20: mol_type = other DNA
ttaaaaattttattcaccac

SEQ ID NO: 61134 - DNA, 20 bp, synthetic construct
  misc_feature 1..20: note = Description of Artificial Sequence: Synthetic oligonucleotide
  misc_feature 1..20: note = Target: SCN10A; (+) strand; PAM type: YTN; PAM sequence: TTA
  source 1..20: mol_type = other DNA
aaaattttattcaccactct

SEQ ID NO: 61135 - DNA, 20 bp, synthetic construct
  misc_feature 1..20: note = Description of Artificial Sequence: Synthetic oligonucleotide
  misc_feature 1..20: note = Target: SCN10A; (+) strand; PAM type: YTN; PAM sequence: TTT
  source 1..20: mol_type = other DNA
tattcaccactctcttaaac

SEQ ID NO: 61136 - DNA, 20 bp, synthetic construct
  misc_feature 1..20: note = Description of Artificial Sequence: Synthetic oligonucleotide
  misc_feature 1..20: note = Target: SCN10A; (+) strand; PAM type: YTN; PAM sequence: TTT
  source 1..20: mol_type = other DNA
attcaccactctcttaaaca

SEQ ID NO: 61137 - DNA, 20 bp, synthetic construct
  misc_feature 1..20: note = Description of Artificial Sequence: Synthetic oligonucleotide
  misc_feature 1..20: note = Target: SCN10A; (+) strand; PAM type: YTN; PAM sequence: TTA
  source 1..20: mol_type = other DNA
ttcaccactctcttaaacaa

SEQ ID NO: 61138 - DNA, 20 bp, synthetic construct
  misc_feature 1..20: note = Description of Artificial Sequence: Synthetic oligonucleotide
  misc_feature 1..20: note = Target: SCN10A; (+) strand; PAM type: YTN; PAM sequence: TTC
  source 1..20: mol_type = other DNA
accactctcttaaacaatct

SEQ ID NO: 61139 - DNA, 20 bp, synthetic construct
  misc_feature 1..20: note = Description of Artificial Sequence: Synthetic oligonucleotide
  misc_feature 1..20: note = Target: SCN10A; (+) strand; PAM type: YTN; PAM sequence: CTC
  source 1..20: mol_type = other DNA
tcttaaacaatctgggcaag

SEQ ID NO: 61140 - DNA, 20 bp, synthetic construct
  misc_feature 1..20: note = Description of Artificial Sequence: Synthetic oligonucleotide
  misc_feature 1..20: note = Target: SCN10A; (+) strand; PAM type: YTN; PAM sequence: CTC
  source 1..20: mol_type = other DNA
ttaaacaatctgggcaagaa

SEQ ID NO: 61141 - DNA, 20 bp, synthetic construct
  misc_feature 1..20: note = Description of Artificial Sequence: Synthetic oligonucleotide
  misc_feature 1..20: note = Target: SCN10A; (+) strand; PAM type: YTN; PAM sequence: CTT
  source 1..20: mol_type = other DNA
aaacaatctgggcaagaaaa

SEQ ID NO: 61142 - DNA, 20 bp, synthetic construct
  misc_feature 1..20: note = Description of Artificial Sequence: Synthetic oligonucleotide
  misc_feature 1..20: note = Target: SCN10A; (+) strand; PAM type: YTN; PAM sequence: TTA
  source 1..20: mol_type = other DNA
aacaatctgggcaagaaaaa

SEQ ID NO: 61143 - DNA, 20 bp, synthetic construct
  misc_feature 1..20: note = Description of Artificial Sequence: Synthetic oligonucleotide
  misc_feature 1..20: note = Target: SCN10A; (+) strand; PAM type: YTN; PAM sequence: CTG
  source 1..20: mol_type = other DNA
ggcaagaaaaactcagtctc

SEQ ID NO: 61144 - DNA, 20 bp, synthetic construct
  misc_feature 1..20: note = Description of Artificial Sequence: Synthetic oligonucleotide
  misc_feature 1..20: note = Target: SCN10A; (+) strand; PAM type: YTN; PAM sequence: CTC
  source 1..20: mol_type = other DNA
agtctctaacatcaccaacc

SEQ ID NO: 61145 - DNA, 20 bp, synthetic construct
  misc_feature 1..20: note = Description of Artificial Sequence: Synthetic oligonucleotide
  misc_feature 1..20: note = Target: SCN10A; (+) strand; PAM type: YTN; PAM sequence: CTC
  source 1..20: mol_type = other DNA
taacatcaccaacctctggt

SEQ ID NO: 61146 - DNA, 20 bp, synthetic construct
  misc_feature 1..20: note = Description of Artificial Sequence: Synthetic oligonucleotide
  misc_feature 1..20: note = Target: SCN10A; (+) strand; PAM type: YTN; PAM sequence: CTA
  source 1..20: mol_type = other DNA
acatcaccaacctctggtac

SEQ ID NO: 61147 - DNA, 20 bp, synthetic construct
  misc_feature 1..20: note = Description of Artificial Sequence: Synthetic oligonucleotide
  misc_feature 1..20: note = Target: SCN10A; (+) strand; PAM type: YTN; PAM sequence: CTC
  source 1..20: mol_type = other DNA
tggtacgtaggtggccaagc

SEQ ID NO: 61148 - DNA, 20 bp, synthetic construct
  misc_feature 1..20: note = Description of Artificial Sequence: Synthetic oligonucleotide
  misc_feature 1..20: note = Target: SCN10A; (+) strand; PAM type: YTN; PAM sequence: CTG
  source 1..20: mol_type = other DNA
gtacgtaggtggccaagctt

SEQ ID NO: 61149 - DNA, 20 bp, synthetic construct
  misc_feature 1..20: note = Description of Artificial Sequence: Synthetic oligonucleotide
  misc_feature 1..20: note = Target: SCN10A; (+) strand; PAM type: YTN; PAM sequence: CTT
  source 1..20: mol_type = other DNA
ccagtgtattaaatcaactc

SEQ ID NO: 61150 - DNA, 20 bp, synthetic construct
  misc_feature 1..20: note = Description of Artificial Sequence: Synthetic oligonucleotide
  misc_feature 1..20: note = Target: SCN10A; (+) strand; PAM type: YTN; PAM sequence: TTC
  source 1..20: mol_type = other DNA
cagtgtattaaatcaactct

SEQ ID NO: 61151 - DNA, 20 bp, synthetic construct
  misc_feature 1..20: note = Description of Artificial Sequence: Synthetic oligonucleotide
  misc_feature 1..20: note = Target: SCN10A; (+) strand; PAM type: YTN; PAM sequence: TTA
  source 1..20: mol_type = other DNA
aatcaactcttccttttcct

SEQ ID NO: 61152 - DNA, 20 bp, synthetic construct
  misc_feature 1..20: note = Description of Artificial Sequence: Synthetic oligonucleotide
  misc_feature 1..20: note = Target: SCN10A; (+) strand; PAM type: YTN; PAM sequence: CTC
  source 1..20: mol_type = other DNA
ttccttttccttctaggggc

SEQ ID NO: 61153 - DNA, 20 bp, synthetic construct
  misc_feature 1..20: note = Description of Artificial Sequence: Synthetic oligonucleotide
  misc_feature 1..20: note = Target: SCN10A; (+) strand; PAM type: YTN; PAM sequence: CTT
  source 1..20: mol_type = other DNA
ccttttccttctaggggcag

SEQ ID NO: 61154 - DNA, 20 bp, synthetic construct
  misc_feature 1..20: note = Description of Artificial Sequence: Synthetic oligonucleotide
  misc_feature 1..20: note = Target: SCN10A; (+) strand; PAM type: YTN; PAM sequence: TTC
  source 1..20: mol_type = other DNA
cttttccttctaggggcagc

SEQ ID NO: 61155 - DNA, 20 bp, synthetic construct
  misc_feature 1..20: note = Description of Artificial Sequence: Synthetic oligonucleotide
  misc_feature 1..20: note = Target: SCN10A; (+) strand; PAM type: YTN; PAM sequence: CTT
  source 1..20: mol_type = other DNA
ttccttctaggggcagcagt

SEQ ID NO: 61156 - DNA, 20 bp, synthetic construct
  misc_feature 1..20: note = Description of Artificial Sequence: Synthetic oligonucleotide
  misc_feature 1..20: note = Target: SCN10A; (+) strand; PAM type: YTN; PAM sequence: TTT
  source 1..20: mol_type = other DNA
tccttctaggggcagcagtc

SEQ ID NO: 61157 - DNA, 20 bp, synthetic construct
  misc_feature 1..20: note = Description of Artificial Sequence: Synthetic oligonucleotide
  misc_feature 1..20: note = Target: SCN10A; (+) strand; PAM type: YTN; PAM sequence: TTT
  source 1..20: mol_type = other DNA
ccttctaggggcagcagtca

SEQ ID NO: 61158 - DNA, 20 bp, synthetic construct
  misc_feature 1..20: note = Description of Artificial Sequence: Synthetic oligonucleotide
  misc_feature 1..20: note = Target: SCN10A; (+) strand; PAM type: YTN; PAM sequence: TTC
  source 1..20: mol_type = other DNA
cttctaggggcagcagtcag

SEQ ID NO: 61159 - DNA, 20 bp, synthetic construct
  misc_feature 1..20: note = Description of Artificial Sequence: Synthetic oligonucleotide
  misc_feature 1..20: note = Target: SCN10A; (+) strand; PAM type: YTN; PAM sequence: CTT
  source 1..20: mol_type = other DNA
ctaggggcagcagtcaggcc

SEQ ID NO: 61160 - DNA, 20 bp, synthetic construct
  misc_feature 1..20: note = Description of Artificial Sequence: Synthetic oligonucleotide
  misc_feature 1..20: note = Target: SCN10A; (+) strand; PAM type: YTN; PAM sequence: TTC
  source 1..20: mol_type = other DNA
taggggcagcagtcaggcct

SEQ ID NO: 61161 - DNA, 20 bp, synthetic construct
  misc_feature 1..20: note = Description of Artificial Sequence: Synthetic oligonucleotide
  misc_feature 1..20: note = Target: SCN10A; (+) strand; PAM type: YTN; PAM sequence: CTA
  source 1..20: mol_type = other DNA
ggggcagcagtcaggcctca

SEQ ID NO: 61162 - DNA, 20 bp, synthetic construct
  misc_feature 1..20: note = Description of Artificial Sequence: Synthetic oligonucleotide
  misc_feature 1..20: note = Target: SCN10A; (+) strand; PAM type: YTN; PAM sequence: CTC
  source 1..20: mol_type = other DNA
aacaaccttgaaactgattt

SEQ ID NO: 61163 - DNA, 20 bp, synthetic construct
  misc_feature 1..20: note = Description of Artificial Sequence: Synthetic oligonucleotide
  misc_feature 1..20: note = Target: SCN10A; (+) strand; PAM type: YTN; PAM sequence: CTT
  source 1..20: mol_type = other DNA
gaaactgattttcagagact

SEQ ID NO: 61164 - DNA, 20 bp, synthetic construct
  misc_feature 1..20: note = Description of Artificial Sequence: Synthetic oligonucleotide
  misc_feature 1..20: note = Target: SCN10A; (+) strand; PAM type: YTN; PAM sequence: TTG
  source 1..20: mol_type = other DNA
aaactgattttcagagactt

SEQ ID NO: 61165 - DNA, 20 bp, synthetic construct
  misc_feature 1..20: note = Description of Artificial Sequence: Synthetic oligonucleotide
  misc_feature 1..20: note = Target: SCN10A; (+) strand; PAM type: YTN; PAM sequence: CTG
  source 1..20: mol_type = other DNA
attttcagagacttggagac

SEQ ID NO: 61166 - DNA, 20 bp, synthetic construct
  misc_feature 1..20: note = Description of Artificial Sequence: Synthetic oligonucleotide
  misc_feature 1..20: note = Target: SCN10A; (+) strand; PAM type: YTN; PAM sequence: TTT
  source 1..20: mol_type = other DNA
tcagagacttggagacatga

SEQ ID NO: 61167 - DNA, 20 bp, synthetic construct
  misc_feature 1..20: note = Description of Artificial Sequence: Synthetic oligonucleotide
  misc_feature 1..20: note = Target: SCN10A; (+) strand; PAM type: YTN; PAM sequence: TTT
  source 1..20: mol_type = other DNA
cagagacttggagacatgat

SEQ ID NO: 61168 - DNA, 20 bp, synthetic construct
  misc_feature 1..20: note = Description of Artificial Sequence: Synthetic oligonucleotide
  misc_feature 1..20: note = Target: SCN10A; (+) strand; PAM type: YTN; PAM sequence: TTC
  source 1..20: mol_type = other DNA
agagacttggagacatgatg

SEQ ID NO: 61169 - DNA, 20 bp, synthetic construct
  misc_feature 1..20: note = Description of Artificial Sequence: Synthetic oligonucleotide
  misc_feature 1..20: note = Target: SCN10A; (+) strand; PAM type: YTN; PAM sequence: CTT
  source 1..20: mol_type = other DNA
ggagacatgatgttccctcc

SEQ ID NO: 61170 - DNA, 20 bp, synthetic construct
  misc_feature 1..20: note = Description of Artificial Sequence: Synthetic oligonucleotide
  misc_feature 1..20: note = Target: SCN10A; (+) strand; PAM type: YTN; PAM sequence: TTG
  source 1..20: mol_type = other DNA
gagacatgatgttccctcct

SEQ ID NO: 61171 - DNA, 20 bp, synthetic construct
  misc_feature 1..20: note = Description of Artificial Sequence: Synthetic oligonucleotide
  misc_feature 1..20: note = Target: SCN10A; (+) strand; PAM type: YTN; PAM sequence: TTC
  source 1..20: mol_type = other DNA
cctcctaggggctatgctga

SEQ ID NO: 61172 - DNA, 20 bp, synthetic construct
  misc_feature 1..20: note = Description of Artificial Sequence: Synthetic oligonucleotide
  misc_feature 1..20: note = Target: SCN10A; (+) strand; PAM type: YTN; PAM sequence: CTC
  source 1..20: mol_type = other DNA
ctaggggctatgctgagagt

SEQ ID NO: 61173 - DNA, 20 bp, synthetic construct
  misc_feature 1..20: note = Description of Artificial Sequence: Synthetic oligonucleotide
  misc_feature 1..20: note = Target: SCN10A; (+) strand; PAM type: YTN; PAM sequence: CTA
  source 1..20: mol_type = other DNA
ggggctatgctgagagtcta

SEQ ID NO: 61174 - DNA, 20 bp, synthetic construct
  misc_feature 1..20: note = Description of Artificial Sequence: Synthetic oligonucleotide
  misc_feature 1..20: note = Target: SCN10A; (+) strand; PAM type: YTN; PAM sequence: CTA
  source 1..20: mol_type = other DNA
tgctgagagtctattctgag

SEQ ID NO: 61175 - DNA, 20 bp, synthetic construct
  misc_feature 1..20: note = Description of Artificial Sequence: Synthetic oligonucleotide
  misc_feature 1..20: note = Target: SCN10A; (+) strand; PAM type: YTN; PAM sequence: CTG
  source 1..20: mol_type = other DNA
agagtctattctgaggaata

SEQ ID NO: 61176 - DNA, 20 bp, synthetic construct
  misc_feature 1..20: note = Description of Artificial Sequence: Synthetic oligonucleotide
  misc_feature 1..20: note = Target: SCN10A; (+) strand; PAM type: YTN; PAM sequence: CTA
  source 1..20: mol_type = other DNA
ttctgaggaatatagtaatc

SEQ ID NO: 61177 - DNA, 20 bp, synthetic construct
  misc_feature 1..20: note = Description of Artificial Sequence: Synthetic oligonucleotide
  misc_feature 1..20: note = Target: SCN10A; (+) strand; PAM type: YTN; PAM sequence: TTC
  source 1..20: mol_type = other DNA
tgaggaatatagtaatctga

SEQ ID NO: 61178 - DNA, 20 bp, synthetic construct
  misc_feature 1..20: note = Description of Artificial Sequence: Synthetic oligonucleotide
  misc_feature 1..20: note = Target: SCN10A; (+) strand; PAM type: YTN; PAM sequence: CTG
  source 1..20: mol_type = other DNA
aggaatatagtaatctgaat

SEQ ID NO: 61179 - DNA, 20 bp, synthetic construct
  misc_feature 1..20: note = Description of Artificial Sequence: Synthetic oligonucleotide
  misc_feature 1..20: note = Target: SCN10A; (+) strand; PAM type: YTN; PAM sequence: CTG
  source 1..20: mol_type = other DNA
aattatatttgctcagagaa

SEQ ID NO: 61180 - DNA, 20 bp, synthetic construct
  misc_feature 1..20: note = Description of Artificial Sequence: Synthetic oligonucleotide
  misc_feature 1..20: note = Target: SCN10A; (+) strand; PAM type: YTN; PAM sequence: TTA
  source 1..20: mol_type = other DNA
tatttgctcagagaagtggg

SEQ ID NO: 61181 - DNA, 20 bp, synthetic construct
  misc_feature 1..20: note = Description of Artificial Sequence: Synthetic oligonucleotide
  misc_feature 1..20: note = Target: SCN10A; (+) strand; PAM type: YTN; PAM sequence: TTT
  source 1..20: mol_type = other DNA
gctcagagaagtggggtgga

SEQ ID NO: 61182 - DNA, 20 bp, synthetic construct
  misc_feature 1..20: note = Description of Artificial Sequence: Synthetic oligonucleotide
  misc_feature 1..20: note = Target: SCN10A; (+) strand; PAM type: YTN; PAM sequence: TTG
  source 1..20: mol_type = other DNA
ctcagagaagtggggtggaa

SEQ ID NO: 61183 - DNA, 20 bp, synthetic construct
  misc_feature 1..20: note = Description of Artificial Sequence: Synthetic oligonucleotide
  misc_feature 1..20: note = Target: SCN10A; (+) strand; PAM type: YTN; PAM sequence: CTC
  source 1..20: mol_type = other DNA
agagaagtggggtggaaaga

SEQ ID NO: 61184 - DNA, 20 bp, synthetic construct
  misc_feature 1..20: note = Description of Artificial Sequence: Synthetic oligonucleotide
  misc_feature 1..20: note = Target: SCN10A; (+) strand; PAM type: YTN; PAM sequence: TTT
  source 1..20: mol_type = other DNA
gggtggggtctaattcccat

SEQ ID NO: 61185 - DNA, 20 bp, synthetic construct
  misc_feature 1..20: note = Description of Artificial Sequence: Synthetic oligonucleotide
  misc_feature 1..20: note = Target: SCN10A; (+) strand; PAM type: YTN; PAM sequence: TTG
  source 1..20: mol_type = other DNA
ggtggggtctaattcccatt

SEQ ID NO: 61186 - DNA, 20 bp, synthetic construct
  misc_feature 1..20: note = Description of Artificial Sequence: Synthetic oligonucleotide
  misc_feature 1..20: note = Target: SCN10A; (+) strand; PAM type: YTN; PAM sequence: CTA
  source 1..20: mol_type = other DNA
attcccatttgaaccctgat

SEQ ID NO: 61187 - DNA, 20 bp, synthetic construct
  misc_feature 1..20: note = Description of Artificial Sequence: Synthetic oligonucleotide
  misc_feature 1..20: note = Target: SCN10A; (+) strand; PAM type: YTN; PAM sequence: TTC
  source 1..20: mol_type = other DNA
ccatttgaaccctgattttt

SEQ ID NO: 61188 - DNA, 20 bp, synthetic construct
  misc_feature 1..20: note = Description of Artificial Sequence: Synthetic oligonucleotide
  misc_feature 1..20: note = Target: SCN10A; (+) strand; PAM type: YTN; PAM sequence: TTT
  source 1..20: mol_type = other DNA
gaaccctgattttttgtgag

SEQ ID NO: 61189 - DNA, 20 bp, synthetic construct
  misc_feature 1..20: note = Description of Artificial Sequence: Synthetic oligonucleotide
  misc_feature 1..20: note = Target: SCN10A; (+) strand; PAM type: YTN; PAM sequence: TTG
  source 1..20: mol_type = other DNA
aaccctgattttttgtgagc

SEQ ID NO: 61190 - DNA, 20 bp, synthetic construct
  misc_feature 1..20: note = Description of Artificial Sequence: Synthetic oligonucleotide
  misc_feature 1..20: note = Target: SCN10A; (+) strand; PAM type: YTN; PAM sequence: CTG
  source 1..20: mol_type = other DNA
attttttgtgagcttgggtt

SEQ ID NO: 61191 - DNA, 20 bp, synthetic construct
  misc_feature 1..20: note = Description of Artificial Sequence: Synthetic oligonucleotide
  misc_feature 1..20: note = Target: SCN10A; (+) strand; PAM type: YTN; PAM sequence: TTT
  source 1..20: mol_type = other DNA
tttgtgagcttgggttagtg

SEQ ID NO: 61192 - DNA, 20 bp, synthetic construct
  misc_feature 1..20: note = Description of Artificial Sequence: Synthetic oligonucleotide
  misc_feature 1..20: note = Target: SCN10A; (+) strand; PAM type: YTN; PAM sequence: TTT
  source 1..20: mol_type = other DNA
ttgtgagcttgggttagtgc

SEQ ID NO: 61193 - DNA, 20 bp, synthetic construct
  misc_feature 1..20: note = Description of Artificial Sequence: Synthetic oligonucleotide
  misc_feature 1..20: note = Target: SCN10A; (+) strand; PAM type: YTN; PAM sequence: TTT
  source 1..20: mol_type = other DNA
tgtgagcttgggttagtgcc

SEQ ID NO: 61194 - DNA, 20 bp, synthetic construct
  misc_feature 1..20: note = Description of Artificial Sequence: Synthetic oligonucleotide
  misc_feature 1..20: note = Target: SCN10A; (+) strand; PAM type: YTN; PAM sequence: TTT
  source 1..20: mol_type = other DNA
gtgagcttgggttagtgcct

SEQ ID NO: 61195 - DNA, 20 bp, synthetic construct
  misc_feature 1..20: note = Description of Artificial Sequence: Synthetic oligonucleotide
  misc_feature 1..20: note = Target: SCN10A; (+) strand; PAM type: YTN; PAM sequence: TTG
  source 1..20: mol_type = other DNA
tgagcttgggttagtgcctg

SEQ ID NO: 61196 - DNA, 20 bp, synthetic construct
  misc_feature 1..20: note = Description of Artificial Sequence: Synthetic oligonucleotide
  misc_feature 1..20: note = Target: SCN10A; (+) strand; PAM type: YTN; PAM sequence: CTT
  source 1..20: mol_type = other DNA
gggttagtgcctggctagtc

SEQ ID NO: 61197 - DNA, 20 bp, synthetic construct
  misc_feature 1..20: note = Description of Artificial Sequence: Synthetic oligonucleotide
  misc_feature 1..20: note = Target: SCN10A; (+) strand; PAM type: YTN; PAM sequence: TTG
  source 1..20: mol_type = other DNA
ggttagtgcctggctagtcc

SEQ ID NO: 61198 - DNA, 20 bp, synthetic construct
  misc_feature 1..20: note = Description of Artificial Sequence: Synthetic oligonucleotide
  misc_feature 1..20: note = Target: SCN10A; (+) strand; PAM type: YTN; PAM sequence: TTA
  source 1..20: mol_type = other DNA
gtgcctggctagtccagggt

SEQ ID NO: 61199 - DNA, 20 bp, synthetic construct
  misc_feature 1..20: note = Description of Artificial Sequence: Synthetic oligonucleotide
  misc_feature 1..20: note = Target: SCN10A; (+) strand; PAM type: YTN; PAM sequence: CTG
  source 1..20: mol_type = other DNA
gctagtccagggtactttca

SEQ ID NO: 61200 - DNA, 20 bp, synthetic construct
  misc_feature 1..20: note = Description of Artificial Sequence: Synthetic oligonucleotide
  misc_feature 1..20: note = Target: SCN10A; (+) strand; PAM type: YTN; PAM sequence: CTA
  source 1..20: mol_type = other DNA
gtccagggtactttcaccct

SEQ ID NO: 61201 - DNA, 20 bp, synthetic construct
  misc_feature 1..20: note = Description of Artificial Sequence: Synthetic oligonucleotide
  misc_feature 1..20: note = Target: SCN10A; (+) strand; PAM type: YTN; PAM sequence: CTT
  source 1..20: mol_type = other DNA
tcaccctttgtaaaatgaaa

SEQ ID NO: 61202 - DNA, 20 bp, synthetic construct
  misc_feature 1..20: note = Description of Artificial Sequence: Synthetic oligonucleotide
  misc_feature 1..20: note = Target: SCN10A; (+) strand; PAM type: YTN; PAM sequence: TTT
  source 1..20: mol_type = other DNA
caccctttgtaaaatgaaaa

SEQ ID NO: 61203 - DNA, 20 bp, synthetic construct
  misc_feature 1..20: note = Description of Artificial Sequence: Synthetic oligonucleotide
  misc_feature 1..20: note = Target: SCN10A; (+) strand; PAM type: YTN; PAM sequence: TTC
  source 1..20: mol_type = other DNA
accctttgtaaaatgaaaaa

SEQ ID NO: 61204 - DNA, 20 bp, synthetic construct
  misc_feature 1..20: note = Description of Artificial Sequence: Synthetic oligonucleotide
  misc_feature 1..20: note = Target: SCN10A; (+) strand; PAM type: YTN; PAM sequence: CTT
  source 1..20: mol_type = other DNA
tgtaaaatgaaaaagtcaga

SEQ ID NO: 61205 - DNA, 20 bp, synthetic construct
  misc_feature 1..20: note = Description of Artificial Sequence: Synthetic oligonucleotide
  misc_feature 1..20: note = Target: SCN10A; (+) strand; PAM type: YTN; PAM sequence: TTT
  source 1..20: mol_type = other DNA
gtaaaatgaaaaagtcagac

SEQ ID NO: 61206 - DNA, 20 bp, synthetic construct
  misc_feature 1..20: note = Description of Artificial Sequence: Synthetic oligonucleotide
  misc_feature 1..20: note = Target: SCN10A; (+) strand; PAM type: YTN; PAM sequence: TTG
  source 1..20: mol_type = other DNA
taaaatgaaaaagtcagact

SEQ ID NO: 61207 - DNA, 20 bp, synthetic construct
  misc_feature 1..20: note = Description of Artificial Sequence: Synthetic oligonucleotide
  misc_feature 1..20: note = Target: SCN10A; (+) strand; PAM type: YTN; PAM sequence: CTA
  source 1..20: mol_type = other DNA
agagaattccaaagttctga

SEQ ID NO: 61208 - DNA, 20 bp, synthetic construct
  misc_feature 1..20: note = Description of Artificial Sequence: Synthetic oligonucleotide
  misc_feature 1..20: note = Target: SCN10A; (+) strand; PAM type: YTN; PAM sequence: TTC
  source 1..20: mol_type = other DNA
caaagttctgatagctctgc

SEQ ID NO: 61209 - DNA, 20 bp, synthetic construct
  misc_feature 1..20: note = Description of Artificial Sequence: Synthetic oligonucleotide
  misc_feature 1..20: note = Target: SCN10A; (+) strand; PAM type: YTN; PAM sequence: TTC
  source 1..20: mol_type = other DNA
tgatagctctgcagttcttc

SEQ ID NO: 61210 - DNA, 20 bp, synthetic construct
  misc_feature 1..20: note = Description of Artificial Sequence: Synthetic oligonucleotide
  misc_feature 1..20: note = Target: SCN10A; (+) strand; PAM type: YTN; PAM sequence: CTG
  source 1..20: mol_type = other DNA
atagctctgcagttcttcaa

SEQ ID NO: 61211 - DNA, 20 bp, synthetic construct
  misc_feature 1..20: note = Description of Artificial Sequence: Synthetic oligonucleotide
  misc_feature 1..20: note = Target: SCN10A; (+) strand; PAM type: YTN; PAM sequence: CTC
  source 1..20: mol_type = other DNA
tgcagttcttcaaaaagttt

SEQ ID NO: 61212 - DNA, 20 bp, synthetic construct
  misc_feature 1..20: note = Description of Artificial Sequence: Synthetic oligonucleotide
  misc_feature 1..20: note = Target: SCN10A; (+) strand; PAM type: YTN; PAM sequence: CTG
  source 1..20: mol_type = other DNA
cagttcttcaaaaagtttct

SEQ ID NO: 61213 - DNA, 20 bp, synthetic construct
  misc_feature 1..20: note = Description of Artificial Sequence: Synthetic oligonucleotide
  misc_feature 1..20: note = Target: SCN10A; (+) strand; PAM type: YTN; PAM sequence: TTC
  source 1..20: mol_type = other DNA
ttcaaaaagtttctggtatg

SEQ ID NO: 61214 - DNA, 20 bp, synthetic construct
  misc_feature 1..20: note = Description of Artificial Sequence: Synthetic oligonucleotide
  misc_feature 1..20: note = Target: SCN10A; (+) strand; PAM type: YTN; PAM sequence: CTT
  source 1..20: mol_type = other DNA
caaaaagtttctggtatggg

SEQ ID NO: 61215 - DNA, 20 bp, synthetic construct
  misc_feature 1..20: note = Description of Artificial Sequence: Synthetic oligonucleotide
  misc_feature 1..20: note = Target: SCN10A; (+) strand; PAM type: YTN; PAM sequence: TTC
  source 1..20: mol_type = other DNA
aaaaagtttctggtatgggt

SEQ ID NO: 61216 - DNA, 20 bp, synthetic construct
  misc_feature 1..20: note = Description of Artificial Sequence: Synthetic oligonucleotide
  misc_feature 1..20: note = Target: SCN10A; (+) strand; PAM type: YTN; PAM sequence: TTT
  source 1..20: mol_type = other DNA
ctggtatgggtccatgagat

SEQ ID NO: 61217 - DNA, 20 bp, synthetic construct
  misc_feature 1..20: note = Description of Artificial Sequence: Synthetic oligonucleotide
  misc_feature 1..20: note = Target: SCN10A; (+) strand; PAM type: YTN; PAM sequence: TTC
  source 1..20: mol_type = other DNA
tggtatgggtccatgagatc

SEQ ID NO: 61218 - DNA, 20 bp, synthetic construct
  misc_feature 1..20: note = Description of Artificial Sequence: Synthetic oligonucleotide
  misc_feature 1..20: note = Target: SCN10A; (+) strand; PAM type: YTN; PAM sequence: CTG
  source 1..20: mol_type = other DNA
gtatgggtccatgagatcta

SEQ ID NO: 61219 - DNA, 20 bp, synthetic construct
  misc_feature 1..20: note = Description of Artificial Sequence: Synthetic oligonucleotide
  misc_feature 1..20: note = Target: SCN10A; (+) strand; PAM type: YTN; PAM sequence: CTA
  source 1..20: mol_type = other DNA
gcttcaatagatatctgaga

SEQ ID NO: 61220 - DNA, 20 bp, synthetic construct
  misc_feature 1..20: note = Description of Artificial Sequence: Synthetic oligonucleotide
  misc_feature 1..20: note = Target: SCN10A; (+) strand; PAM type: YTN; PAM sequence: CTT
  source 1..20: mol_type = other DNA
caatagatatctgagatata

SEQ ID NO: 61221 - DNA, 20 bp, synthetic construct
  misc_feature 1..20: note = Description of Artificial Sequence: Synthetic oligonucleotide
  misc_feature 1..20: note = Target: SCN10A; (+) strand; PAM type: YTN; PAM sequence: TTC
  source 1..20: mol_type = other DNA
aatagatatctgagatataa

SEQ ID NO: 61222 - DNA, 20 bp, synthetic construct
  misc_feature 1..20: note = Description of Artificial Sequence: Synthetic oligonucleotide
  misc_feature 1..20: note = Target: SCN10A; (+) strand; PAM type: YTN; PAM sequence: CTG
  source 1..20: mol_type = other DNA
agatataatgactgacttgt

SEQ ID NO: 61223 - DNA, 20 bp, synthetic construct
  misc_feature 1..20: note = Description of Artificial Sequence: Synthetic oligonucleotide
  misc_feature 1..20: note = Target: SCN10A; (+) strand; PAM type: YTN; PAM sequence: CTG
  source 1..20: mol_type = other DNA
acttgtgagccccttttggt

SEQ ID NO: 61224 - DNA, 20 bp, synthetic construct
  misc_feature 1..20: note = Description of Artificial Sequence: Synthetic oligonucleotide
  misc_feature 1..20: note = Target: SCN10A; (+) strand; PAM type: YTN; PAM sequence: CTT
  source 1..20: mol_type = other DNA
gtgagccccttttggtctgt

SEQ ID NO: 61225 - DNA, 20 bp, synthetic construct
  misc_feature 1..20: note = Description of Artificial Sequence: Synthetic oligonucleotide
  misc_feature 1..20: note = Target: SCN10A; (+) strand; PAM type: YTN; PAM sequence: TTG
  source 1..20: mol_type = other DNA
tgagccccttttggtctgtc

SEQ ID NO: 61226 - DNA, 20 bp, synthetic construct
  misc_feature 1..20: note = Description of Artificial Sequence: Synthetic oligonucleotide
  misc_feature 1..20: note = Target: SCN10A; (+) strand; PAM type: YTN; PAM sequence: CTT
  source 1..20: mol_type = other DNA
ttggtctgtcagttttcttt

SEQ ID NO: 61227 - DNA, 20 bp, synthetic construct
  misc_feature 1..20: note = Description of Artificial Sequence: Synthetic oligonucleotide
  misc_feature 1..20: note = Target: SCN10A; (+) strand; PAM type: YTN; PAM sequence: TTT
  source 1..20: mol_type = other DNA
tggtctgtcagttttcttta

SEQ ID NO: 61228 - DNA, 20 bp, synthetic construct
  misc_feature 1..20: note = Description of Artificial Sequence: Synthetic oligonucleotide
  misc_feature 1..20: note = Target: SCN10A; (+) strand; PAM type: YTN; PAM sequence: TTT
  source 1..20: mol_type = other DNA
ggtctgtcagttttctttaa

SEQ ID NO: 61229 - DNA, 20 bp, synthetic construct
  misc_feature 1..20: note = Description of Artificial Sequence: Synthetic oligonucleotide
  misc_feature 1..20: note = Target: SCN10A; (+) strand; PAM type: YTN; PAM sequence: TTG
  source 1..20: mol_type = other DNA
gtctgtcagttttctttaag

SEQ ID NO: 61230 - DNA, 20 bp, synthetic construct
  misc_feature 1..20: note = Description of Artificial Sequence: Synthetic oligonucleotide
  misc_feature 1..20: note = Target: SCN10A; (+) strand; PAM type: YTN; PAM sequence: CTG
  source 1..20: mol_type = other DNA
tcagttttctttaagtggtg

SEQ ID NO: 61231 - DNA, 20 bp, synthetic construct
  misc_feature 1..20: note = Description of Artificial Sequence: Synthetic oligonucleotide
  misc_feature 1..20: note = Target: SCN10A; (+) strand; PAM type: YTN; PAM sequence: TTT
  source 1..20: mol_type = other DNA
tctttaagtggtggtccaaa

SEQ ID NO: 61232 - DNA, 20 bp, synthetic construct
  misc_feature 1..20: note = Description of Artificial Sequence: Synthetic oligonucleotide
  misc_feature 1..20: note = Target: SCN10A; (+) strand; PAM type: YTN; PAM sequence: TTT
  source 1..20: mol_type = other DNA
ctttaagtggtggtccaaag

SEQ ID NO: 61233 - DNA, 20 bp, synthetic construct
  misc_feature 1..20: note = Description of Artificial Sequence: Synthetic oligonucleotide
  misc_feature 1..20: note = Target: SCN10A; (+) strand; PAM type: YTN; PAM sequence: TTC
  source 1..20: mol_type = other DNA
tttaagtggtggtccaaaga

SEQ ID NO: 61234 - DNA, 20 bp, synthetic construct
  misc_feature 1..20: note = Description of Artificial Sequence: Synthetic oligonucleotide
  misc_feature 1..20: note = Target: SCN10A; (+) strand; PAM type: YTN; PAM sequence: CTT
  source 1..20: mol_type = other DNA
taagtggtggtccaaagact

SEQ ID NO: 61235 - DNA, 20 bp, synthetic construct
  misc_feature 1..20: note = Description of Artificial Sequence: Synthetic oligonucleotide
  misc_feature 1..20: note = Target: SCN10A; (+) strand; PAM type: YTN; PAM sequence: TTT
  source 1..20: mol_type = other DNA
aagtggtggtccaaagactg

SEQ ID NO: 61236 - DNA, 20 bp, synthetic construct
  misc_feature 1..20: note = Description of Artificial Sequence: Synthetic oligonucleotide
  misc_feature 1..20: note = Target: SCN10A; (+) strand; PAM type: YTN; PAM sequence: TTA
  source 1..20: mol_type = other DNA
agtggtggtccaaagactgc

SEQ ID NO: 61237 - DNA, 20 bp, synthetic construct
  misc_feature 1..20: note = Description of Artificial Sequence: Synthetic oligonucleotide
  misc_feature 1..20: note = Target: SCN10A; (+) strand; PAM type: YTN; PAM sequence: CTG
  source 1..20: mol_type = other DNA
caaaggacagaaacttacat

SEQ ID NO: 61238 - DNA, 20 bp, synthetic construct
  misc_feature 1..20: note = Description of Artificial Sequence: Synthetic oligonucleotide
  misc_feature 1..20: note = Target: SCN10A; (+) strand; PAM type: YTN; PAM sequence: CTT
  source 1..20: mol_type = other DNA
acatgaaaaaagttcccctg

SEQ ID NO: 61239 - DNA, 20 bp, synthetic construct
  misc_feature 1..20: note = Description of Artificial Sequence: Synthetic oligonucleotide
  misc_feature 1..20: note = Target: SCN10A; (+) strand; PAM type: YTN; PAM sequence: TTA
  source 1..20: mol_type = other DNA
catgaaaaaagttcccctgc

SEQ ID NO: 61240 - DNA, 20 bp, synthetic construct
  misc_feature 1..20: note = Description of Artificial Sequence: Synthetic oligonucleotide
  misc_feature 1..20: note = Target: SCN10A; (+) strand; PAM type: YTN; PAM sequence: TTC
  source 1..20: mol_type = other DNA
ccctgctaggaactttgaag

SEQ ID NO: 61241 - DNA, 20 bp, synthetic construct
  misc_feature 1..20: note = Description of Artificial Sequence: Synthetic oligonucleotide
  misc_feature 1..20: note = Target: SCN10A; (+) strand; PAM type: YTN; PAM sequence: CTG
  source 1..20: mol_type = other DNA
ctaggaactttgaaggtgcc

SEQ ID NO: 61242 - DNA, 20 bp, synthetic construct
  misc_feature 1..20: note = Description of Artificial Sequence: Synthetic oligonucleotide
  misc_feature 1..20: note = Target: SCN10A; (+) strand; PAM type: YTN; PAM sequence: CTA
  source 1..20: mol_type = other DNA
ggaactttgaaggtgccagg

SEQ ID NO: 61243 - DNA, 20 bp, synthetic construct
  misc_feature 1..20: note = Description of Artificial Sequence: Synthetic oligonucleotide
  misc_feature 1..20: note = Target: SCN10A; (+) strand; PAM type: YTN; PAM sequence: CTT
  source 1..20: mol_type = other DNA
tgaaggtgccagggagatgt

SEQ ID NO: 61244 - DNA, 20 bp, synthetic construct
  misc_feature 1..20: note = Description of Artificial Sequence: Synthetic oligonucleotide
  misc_feature 1..20: note = Target: SCN10A; (+) strand; PAM type: YTN; PAM sequence: TTT
  source 1..20: mol_type = other DNA
gaaggtgccagggagatgtc

SEQ ID NO: 61245 - DNA, 20 bp, synthetic construct
  misc_feature 1..20: note = Description of Artificial Sequence: Synthetic oligonucleotide
  misc_feature 1..20: note = Target: SCN10A; (+) strand; PAM type: YTN; PAM sequence: TTG
  source 1..20: mol_type = other DNA
aaggtgccagggagatgtca

SEQ ID NO: 61246 - DNA, 20 bp, synthetic construct
  misc_feature 1..20: note = Description of Artificial Sequence: Synthetic oligonucleotide
  misc_feature 1..20: note = Target: SCN10A; (+) strand; PAM type: YTN; PAM sequence: CTA
  source 1..20: mol_type = other DNA
tgaccctgtcctgtgagatc

SEQ ID NO: 61247 - DNA, 20 bp, synthetic construct
  misc_feature 1..20: note = Description of Artificial Sequence: Synthetic oligonucleotide
  misc_feature 1..20: note = Target: SCN10A; (+) strand; PAM type: YTN; PAM sequence: CTG
  source 1..20: mol_type = other DNA
tcctgtgagatcttagccac

SEQ ID NO: 61248 - DNA, 20 bp, synthetic construct
  misc_feature 1..20: note = Description of Artificial Sequence: Synthetic oligonucleotide
  misc_feature 1..20: note = Target: SCN10A; (+) strand; PAM type: YTN; PAM sequence: CTG
  source 1..20: mol_type = other DNA
tgagatcttagccacaccac

SEQ ID NO: 61249 - DNA, 20 bp, synthetic construct
  misc_feature 1..20: note = Description of Artificial Sequence: Synthetic oligonucleotide
  misc_feature 1..20: note = Target: SCN10A; (+) strand; PAM type: YTN; PAM sequence: CTT
  source 1..20: mol_type = other DNA
agccacaccacagatggtgg

SEQ ID NO: 61250 - DNA, 20 bp, synthetic construct
  misc_feature 1..20: note = Description of Artificial Sequence: Synthetic oligonucleotide
  misc_feature 1..20: note = Target: SCN10A; (+) strand; PAM type: YTN; PAM sequence: TTA
  source 1..20: mol_type = other DNA
gccacaccacagatggtggg

SEQ ID NO: 61251 - DNA, 20 bp, synthetic construct
  misc_feature 1..20: note = Description of Artificial Sequence: Synthetic oligonucleotide
  misc_feature 1..20: note = Target: SCN10A; (+) strand; PAM type: YTN; PAM sequence: CTG
  source 1..20: mol_type = other DNA
aattcaggctcagcttatcc

SEQ ID NO: 61252 - DNA, 20 bp, synthetic construct
  misc_feature 1..20: note = Description of Artificial Sequence: Synthetic oligonucleotide
  misc_feature 1..20: note = Target: SCN10A; (+) strand; PAM type: YTN; PAM sequence: TTC
  source 1..20: mol_type = other DNA
aggctcagcttatcctggca

SEQ ID NO: 61253 - DNA, 20 bp, synthetic construct
  misc_feature 1..20: note = Description of Artificial Sequence: Synthetic oligonucleotide
  misc_feature 1..20: note = Target: SCN10A; (+) strand; PAM type: YTN; PAM sequence: CTC
  source 1..20: mol_type = other DNA
agcttatcctggcagttagg

SEQ ID NO: 61254 - DNA, 20 bp, synthetic construct
  misc_feature 1..20: note = Description of Artificial Sequence: Synthetic oligonucleotide
  misc_feature 1..20: note = Target: SCN10A; (+) strand; PAM type: YTN; PAM sequence: CTT
  source 1..20: mol_type = other DNA
atcctggcagttaggtggga

SEQ ID NO: 61255 - DNA, 20 bp, synthetic construct
  misc_feature 1..20: note = Description of Artificial Sequence: Synthetic oligonucleotide
  misc_feature 1..20: note = Target: SCN10A; (+) strand; PAM type: YTN; PAM sequence: TTA
  source 1..20: mol_type = other DNA
tcctggcagttaggtgggat

SEQ ID NO: 61256 - DNA, 20 bp, synthetic construct
  misc_feature 1..20: note = Description of Artificial Sequence: Synthetic oligonucleotide
  misc_feature 1..20: note = Target: SCN10A; (+) strand; PAM type: YTN; PAM sequence: CTG
  source 1..20: mol_type = other DNA
gcagttaggtgggatgcaca

SEQ ID NO: 61257 - DNA, 20 bp, synthetic construct
  misc_feature 1..20: note = Description of Artificial Sequence: Synthetic oligonucleotide
  misc_feature 1..20: note = Target: SCN10A; (+) strand; PAM type: YTN; PAM sequence: TTA
  source 1..20: mol_type = other DNA
ggtgggatgcacacaggagc

SEQ ID NO: 61258 - DNA, 20 bp, synthetic construct
  misc_feature 1..20: note = Description of Artificial Sequence: Synthetic oligonucleotide
  misc_feature 1..20: note = Target: SCN10A; (+) strand; PAM type: YTN; PAM sequence: CTT
  source 1..20: mol_type = other DNA
cagaaaagaagggctttata

SEQ ID NO: 61259 - DNA, 20 bp, synthetic construct
  misc_feature 1..20: note = Description of Artificial Sequence: Synthetic oligonucleotide
  misc_feature 1..20: note = Target: SCN10A; (+) strand; PAM type: YTN; PAM sequence: TTC
  source 1..20: mol_type = other DNA
agaaaagaagggctttatac

SEQ ID NO: 61260 - DNA, 20 bp, synthetic construct
  misc_feature 1..20: note = Description of Artificial Sequence: Synthetic oligonucleotide
  misc_feature 1..20: note = Target: SCN10A; (+) strand; PAM type: YTN; PAM sequence: CTT
  source 1..20: mol_type = other DNA
tatacttgagtggcagagcc

SEQ ID NO: 61261 - DNA, 20 bp, synthetic construct
  misc_feature 1..20: note = Description of Artificial Sequence: Synthetic oligonucleotide
  misc_feature 1..20: note = Target: SCN10A; (+) strand; PAM type: YTN; PAM sequence: TTT
  source 1..20: mol_type = other DNA
atacttgagtggcagagccc

SEQ ID NO: 61262 - DNA, 20 bp, synthetic construct
  misc_feature 1..20: note = Description of Artificial Sequence: Synthetic oligonucleotide
  misc_feature 1..20: note = Target: SCN10A; (+) strand; PAM type: YTN; PAM sequence: TTA
  source 1..20: mol_type = other DNA
tacttgagtggcagagcccc

SEQ ID NO: 61263 - DNA, 20 bp, synthetic construct
  misc_feature 1..20: note = Description of Artificial Sequence: Synthetic oligonucleotide
  misc_feature 1..20: note = Target: SCN10A; (+) strand; PAM type: YTN; PAM sequence: CTT
  source 1..20: mol_type = other DNA
gagtggcagagccccaagca

SEQ ID NO: 61264 - DNA, 20 bp, synthetic construct
  misc_feature 1..20: note = Description of Artificial Sequence: Synthetic oligonucleotide
  misc_feature 1..20: note = Target: SCN10A; (+) strand; PAM type: YTN; PAM sequence: TTG
  source 1..20: mol_type = other DNA
agtggcagagccccaagcaa

SEQ ID NO: 61265 - DNA, 20 bp, synthetic construct
  misc_feature 1..20: note = Description of Artificial Sequence: Synthetic oligonucleotide
  misc_feature 1..20: note = Target: SCN10A; (+) strand; PAM type: YTN; PAM sequence: TTC
  source 1..20: mol_type = other DNA
tttggatgagtggcttattg

SEQ ID NO: 61266 - DNA, 20 bp, synthetic construct
  misc_feature 1..20: note = Description of Artificial Sequence: Synthetic oligonucleotide
  misc_feature 1..20: note = Target: SCN10A; (+) strand; PAM type: YTN; PAM sequence: CTT
  source 1..20: mol_type = other DNA
tggatgagtggcttattgca

SEQ ID NO: 61267 - DNA, 20 bp, synthetic construct
  misc_feature 1..20: note = Description of Artificial Sequence: Synthetic oligonucleotide
  misc_feature 1..20: note = Target: SCN10A; (+) strand; PAM type: YTN; PAM sequence: TTT
  source 1..20: mol_type = other DNA
ggatgagtggcttattgcac

SEQ ID NO: 61268 - DNA, 20 bp, synthetic construct
  misc_feature 1..20: note = Description of Artificial Sequence: Synthetic oligonucleotide
  misc_feature 1..20: note = Target: SCN10A; (+) strand; PAM type: YTN; PAM sequence: TTG
  source 1..20: mol_type = other DNA
gatgagtggcttattgcacc

SEQ ID NO: 61269 - DNA, 20 bp, synthetic construct
  misc_feature 1..20: note = Description of Artificial Sequence: Synthetic oligonucleotide
  misc_feature 1..20: note = Target: SCN10A; (+) strand; PAM type: YTN; PAM sequence: CTT
  source 1..20: mol_type = other DNA
attgcaccaggacaaagaac

SEQ ID NO: 61270 - DNA, 20 bp, synthetic construct
  misc_feature 1..20: note = Description of Artificial Sequence: Synthetic oligonucleotide
  misc_feature 1..20: note = Target: SCN10A; (+) strand; PAM type: YTN; PAM sequence: TTA
  source 1..20: mol_type = other DNA
ttgcaccaggacaaagaacc

SEQ ID NO: 61271 - DNA, 20 bp, synthetic construct
  misc_feature 1..20: note = Description of Artificial Sequence: Synthetic oligonucleotide
  misc_feature 1..20: note = Target: SCN10A; (+) strand; PAM type: YTN; PAM sequence: TTG
  source 1..20: mol_type = other DNA
caccaggacaaagaaccgga

SEQ ID NO: 61272 - DNA, 20 bp, synthetic construct
  misc_feature 1..20: note = Description of Artificial Sequence: Synthetic oligonucleotide
  misc_feature 1..20: note = Target: SCN10A; (+) strand; PAM type: YTN; PAM sequence: CTC
  source 1..20: mol_type = other DNA
ttccttcattcatgcaaggc

SEQ ID NO: 61273 - DNA, 20 bp, synthetic construct
  misc_feature 1..20: note = Description of Artificial Sequence: Synthetic oligonucleotide
  misc_feature 1..20: note = Target: SCN10A; (+) strand; PAM type: YTN; PAM sequence: CTT
  source 1..20: mol_type = other DNA
ccttcattcatgcaaggctc

SEQ ID NO: 61274 - DNA, 20 bp, synthetic construct
  misc_feature 1..20: note = Description of Artificial Sequence: Synthetic oligonucleotide
  misc_feature 1..20: note = Target: SCN10A; (+) strand; PAM type: YTN; PAM sequence: TTC
  source 1..20: mol_type = other DNA
cttcattcatgcaaggctcc

SEQ ID NO: 61275 - DNA, 20 bp, synthetic construct
  misc_feature 1..20: note = Description of Artificial Sequence: Synthetic oligonucleotide
  misc_feature 1..20: note = Target: SCN10A; (+) strand; PAM type: YTN; PAM sequence: CTT
  source 1..20: mol_type = other DNA
cattcatgcaaggctccaga

SEQ ID NO: 61276 - DNA, 20 bp, synthetic construct
  misc_feature 1..20: note = Description of Artificial Sequence: Synthetic oligonucleotide
  misc_feature 1..20: note = Target: SCN10A; (+) strand; PAM type: YTN; PAM sequence: TTC
  source 1..20: mol_type = other DNA
attcatgcaaggctccagac

SEQ ID NO: 61277 - DNA, 20 bp, synthetic construct
  misc_feature 1..20: note = Description of Artificial Sequence: Synthetic oligonucleotide
  misc_feature 1..20: note = Target: SCN10A; (+) strand; PAM type: YTN; PAM sequence: TTC
  source 1..20: mol_type = other DNA
atgcaaggctccagacatca

SEQ ID NO: 61278 - DNA, 20 bp, synthetic construct
  misc_feature 1..20: note = Description of Artificial Sequence: Synthetic oligonucleotide
  misc_feature 1..20: note = Target: SCN10A; (+) strand; PAM type: YTN; PAM sequence: CTC
  source 1..20: mol_type = other DNA
cagacatcagcaggtgagac

SEQ ID NO: 61279 - DNA, 20 bp, synthetic construct
  misc_feature 1..20: note = Description of Artificial Sequence: Synthetic oligonucleotide
  misc_feature 1..20: note = Target: SCN10A; (+) strand; PAM type: YTN; PAM sequence: CTG
  source 1..20: mol_type = other DNA
cctgggtgcatgagggtagg

SEQ ID NO: 61280 - DNA, 20 bp, synthetic construct
  misc_feature 1..20: note = Description of Artificial Sequence: Synthetic oligonucleotide
  misc_feature 1..20: note = Target: SCN10A; (+) strand; PAM type: YTN; PAM sequence: CTG
  source 1..20: mol_type = other DNA
ggtgcatgagggtagggagg

SEQ ID NO: 61281 - DNA, 20 bp, synthetic construct
  misc_feature 1..20: note = Description of Artificial Sequence: Synthetic oligonucleotide
  misc_feature 1..20: note = Target: SCN10A; (+) strand; PAM type: YTN; PAM sequence: TTT
  source 1..20: mol_type = other DNA
ggggccagttccatgctgaa

SEQ ID NO: 61282 - DNA, 20 bp, synthetic construct
  misc_feature 1..20: note = Description of Artificial Sequence: Synthetic oligonucleotide
  misc_feature 1..20: note = Target: SCN10A; (+) strand; PAM type: YTN; PAM sequence: TTG
  source 1..20: mol_type = other DNA
gggccagttccatgctgaac

SEQ ID NO: 61283 - DNA, 20 bp, synthetic construct
  misc_feature 1..20: note = Description of Artificial Sequence: Synthetic oligonucleotide
  misc_feature 1..20: note = Target: SCN10A; (+) strand; PAM type: YTN; PAM sequence: TTC
  source 1..20: mol_type = other DNA
catgctgaaccctattcagt

SEQ ID NO: 61284 - DNA, 20 bp, synthetic construct
  misc_feature 1..20: note = Description of Artificial Sequence: Synthetic oligonucleotide
  misc_feature 1..20: note = Target: SCN10A; (+) strand; PAM type: YTN; PAM sequence: CTG
  source 1..20: mol_type = other DNA
aaccctattcagtcttttgc

SEQ ID NO: 61285 - DNA, 20 bp, synthetic construct
  misc_feature 1..20: note = Description of Artificial Sequence: Synthetic oligonucleotide
  misc_feature 1..20: note = Target: SCN10A; (+) strand; PAM type: YTN; PAM sequence: CTA
  source 1..20: mol_type = other DNA
ttcagtcttttgctcagccc

SEQ ID NO: 61286 - DNA, 20 bp, synthetic construct
  misc_feature 1..20: note = Description of Artificial Sequence: Synthetic oligonucleotide
  misc_feature 1..20: note = Target: SCN10A; (+) strand; PAM type: YTN; PAM sequence: TTC
  source 1..20: mol_type = other DNA
agtcttttgctcagccccct

SEQ ID NO: 61287 - DNA, 20 bp, synthetic construct
  misc_feature 1..20: note = Description of Artificial Sequence: Synthetic oligonucleotide
  misc_feature 1..20: note = Target: SCN10A; (+) strand; PAM type: YTN; PAM sequence: CTT
  source 1..20: mol_type = other DNA
ttgctcagccccctgggaag

SEQ ID NO: 61288 - DNA, 20 bp, synthetic construct
  misc_feature 1..20: note = Description of Artificial Sequence: Synthetic oligonucleotide
  misc_feature 1..20: note = Target: SCN10A; (+) strand; PAM type: YTN; PAM sequence: TTT
  source 1..20: mol_type = other DNA
tgctcagccccctgggaagt

SEQ ID NO: 61289 - DNA, 20 bp, synthetic construct
  misc_feature 1..20: note = Description of Artificial Sequence: Synthetic oligonucleotide
  misc_feature 1..20: note = Target: SCN10A; (+) strand; PAM type: YTN; PAM sequence: TTT
  source 1..20: mol_type = other DNA
gctcagccccctgggaagtc

SEQ ID NO: 61290 - DNA, 20 bp, synthetic construct
  misc_feature 1..20: note = Description of Artificial Sequence: Synthetic oligonucleotide
  misc_feature 1..20: note = Target: SCN10A; (+) strand; PAM type: YTN; PAM sequence: TTG
  source 1..20: mol_type = other DNA
ctcagccccctgggaagtct

SEQ ID NO: 61291 - DNA, 20 bp, synthetic construct
  misc_feature 1..20: note = Description of Artificial Sequence: Synthetic oligonucleotide
  misc_feature 1..20: note = Target: SCN10A; (+) strand; PAM type: YTN; PAM sequence: CTC
  source 1..20: mol_type = other DNA
agccccctgggaagtctgcc

SEQ ID NO: 61292 - DNA, 20 bp, synthetic construct
  misc_feature 1..20: note = Description of Artificial Sequence: Synthetic oligonucleotide
  misc_feature 1..20: note = Target: SCN10A; (+) strand; PAM type: YTN; PAM sequence: CTG
  source 1..20: mol_type = other DNA
ggaagtctgcctcacatgga

SEQ ID NO: 61293 - DNA, 20 bp, synthetic construct
  misc_feature 1..20: note = Description of Artificial Sequence: Synthetic oligonucleotide
  misc_feature 1..20: note = Target: SCN10A; (+) strand; PAM type: YTN; PAM sequence: CTG
  source 1..20: mol_type = other DNA
cctcacatggataatctgca

SEQ ID NO: 61294 - DNA, 20 bp, synthetic construct
  misc_feature 1..20: note = Description of Artificial Sequence: Synthetic oligonucleotide
  misc_feature 1..20: note = Target: SCN10A; (+) strand; PAM type: YTN; PAM sequence: CTC
  source 1..20: mol_type = other DNA
acatggataatctgcagctg

SEQ ID NO: 61295 - DNA, 20 bp, synthetic construct
  misc_feature 1..20: note = Description of Artificial Sequence: Synthetic oligonucleotide
  misc_feature 1..20: note = Target: SCN10A; (+) strand; PAM type: YTN; PAM sequence: CTG
  source 1..20: mol_type = other DNA
cagctggggcagacaggtgc

SEQ ID NO: 61296 - DNA, 20 bp, synthetic construct
  misc_feature 1..20: note = Description of Artificial Sequence: Synthetic oligonucleotide
  misc_feature 1..20: note = Target: SCN10A; (+) strand; PAM type: YTN; PAM sequence: CTG
  source 1..20: mol_type = other DNA
gggcagacaggtgctgtgcc

SEQ ID NO: 61297 - DNA, 20 bp, synthetic construct
  misc_feature 1..20: note = Description of Artificial Sequence: Synthetic oligonucleotide
  misc_feature 1..20: note = Target: SCN10A; (+) strand; PAM type: YTN; PAM sequence: CTG
  source 1..20: mol_type = other DNA
tgcctctccagcaaagtctg

SEQ ID NO: 61298 - DNA, 20 bp, synthetic construct
  misc_feature 1..20: note = Description of Artificial Sequence: Synthetic oligonucleotide
  misc_feature 1..20: note = Target: SCN10A; (+) strand; PAM type: YTN; PAM sequence: CTC
  source 1..20: mol_type = other DNA
tccagcaaagtctgtccacc

SEQ ID NO: 61299 - DNA, 20 bp, synthetic construct
  misc_feature 1..20: note = Description of Artificial Sequence: Synthetic oligonucleotide
  misc_feature 1..20: note = Target: SCN10A; (+) strand; PAM type: YTN; PAM sequence: CTC
  source 1..20: mol_type = other DNA
cagcaaagtctgtccaccca

SEQ ID NO: 61300 - DNA, 20 bp, synthetic construct
  misc_feature 1..20: note = Description of Artificial Sequence: Synthetic oligonucleotide
  misc_feature 1..20: note = Target: SCN10A; (+) strand; PAM type: YTN; PAM sequence: CTG
  source 1..20: mol_type = other DNA
tccacccaagcccacctcca

SEQ ID NO: 61301 - DNA, 20 bp, synthetic construct
  misc_feature 1..20: note = Description of Artificial Sequence: Synthetic oligonucleotide
  misc_feature 1..20: note = Target: SCN10A; (+) strand; PAM type: YTN; PAM sequence: CTC
  source 1..20: mol_type = other DNA
cattcccactgctcagccca

SEQ ID NO: 61302 - DNA, 20 bp, synthetic construct
  misc_feature 1..20: note = Description of Artificial Sequence: Synthetic oligonucleotide
  misc_feature 1..20: note = Target: SCN10A; (+) strand; PAM type: YTN; PAM sequence: TTC
  source 1..20: mol_type = other DNA
ccactgctcagcccactagc

SEQ ID NO: 61303 - DNA, 20 bp, synthetic construct
  misc_feature 1..20: note = Description of Artificial Sequence: Synthetic oligonucleotide
  misc_feature 1..20: note = Target: SCN10A; (+) strand; PAM type: YTN; PAM sequence: CTG
  source 1..20: mol_type = other DNA
ctcagcccactagcctccca

SEQ ID NO: 61304 - DNA, 20 bp, synthetic construct
  misc_feature 1..20: note = Description of Artificial Sequence: Synthetic oligonucleotide
  misc_feature 1..20: note = Target: SCN10A; (+) strand; PAM type: YTN; PAM sequence: CTC
  source 1..20: mol_type = other DNA
agcccactagcctcccaagt

SEQ ID NO: 61305 - DNA, 20 bp, synthetic construct
  misc_feature 1..20: note = Description of Artificial Sequence: Synthetic oligonucleotide
  misc_feature 1..20: note = Target: SCN10A; (+) strand; PAM type: YTN; PAM sequence: CTA
  source 1..20: mol_type = other DNA
gcctcccaagtagtctccag

SEQ ID NO: 61306 - DNA, 20 bp, synthetic construct
  misc_feature 1..20: note = Description of Artificial Sequence: Synthetic oligonucleotide
  misc_feature 1..20: note = Target: SCN10A; (+) strand; PAM type: YTN; PAM sequence: CTC
  source 1..20: mol_type = other DNA
ccaagtagtctccaggccct

SEQ ID NO: 61307 - DNA, 20 bp, synthetic construct
  misc_feature 1..20: note = Description of Artificial Sequence: Synthetic oligonucleotide
  misc_feature 1..20: note = Target: SCN10A; (+) strand; PAM type: YTN; PAM sequence: CTC
  source 1..20: mol_type = other DNA
caggccctagtactgcacca

SEQ ID NO: 61308 - DNA, 20 bp, synthetic construct
  misc_feature 1..20: note = Description of Artificial Sequence: Synthetic oligonucleotide
  misc_feature 1..20: note = Target: SCN10A; (+) strand; PAM type: YTN; PAM sequence: CTA
  source 1..20: mol_type = other DNA
gtactgcaccatgcatctat

SEQ ID NO: 61309 - DNA, 20 bp, synthetic construct
  misc_feature 1..20: note = Description of Artificial Sequence: Synthetic oligonucleotide
  misc_feature 1..20: note = Target: SCN10A; (+) strand; PAM type: YTN; PAM sequence: CTG
  source 1..20: mol_type = other DNA
caccatgcatctattctcca

SEQ ID NO: 61310 - DNA, 20 bp, synthetic construct
  misc_feature 1..20: note = Description of Artificial Sequence: Synthetic oligonucleotide
  misc_feature 1..20: note = Target: SCN10A; (+) strand; PAM type: YTN; PAM sequence: CTA
  source 1..20: mol_type = other DNA
ttctccactgcaaatctgat

SEQ ID NO: 61311 - DNA, 20 bp, synthetic construct
  misc_feature 1..20: note = Description of Artificial Sequence: Synthetic oligonucleotide
  misc_feature 1..20: note = Target: SCN10A; (+) strand; PAM type: YTN; PAM sequence: TTC
  source 1..20: mol_type = other DNA
tccactgcaaatctgattat

SEQ ID NO: 61312 - DNA, 20 bp, synthetic construct
  misc_feature 1..20: note = Description of Artificial Sequence: Synthetic oligonucleotide
  misc_feature 1..20: note = Target: SCN10A; (+) strand; PAM type: YTN; PAM sequence: CTC
  source 1..20: mol_type = other DNA
cactgcaaatctgattatga

SEQ ID NO: 61313 - DNA, 20 bp, synthetic construct
  misc_feature 1..20: note = Description of Artificial Sequence: Synthetic oligonucleotide
  misc_feature 1..20: note = Target: SCN10A; (+) strand; PAM type: YTN; PAM sequence: CTG
  source 1..20: mol_type = other DNA
caaatctgattatgatcatg

SEQ ID NO: 61314 - DNA, 20 bp, synthetic construct
  misc_feature 1..20: note = Description of Artificial Sequence: Synthetic oligonucleotide
  misc_feature 1..20: note = Target: SCN10A; (+) strand; PAM type: YTN; PAM sequence: CTG
  source 1..20: mol_type = other DNA
attatgatcatgtctttctc

SEQ ID NO: 61315 - DNA, 20 bp, synthetic construct
  misc_feature 1..20: note = Description of Artificial Sequence: Synthetic oligonucleotide
  misc_feature 1..20: note = Target: SCN10A; (+) strand; PAM type: YTN; PAM sequence: TTA
  source 1..20: mol_type = other DNA
tgatcatgtctttctcttac

SEQ ID NO: 61316 - DNA, 20 bp, synthetic construct
  misc_feature 1..20: note = Description of Artificial Sequence: Synthetic oligonucleotide
  misc_feature 1..20: note = Target: SCN10A; (+) strand; PAM type: YTN; PAM sequence: CTT
  source 1..20: mol_type = other DNA
tctcttactcccaaacatca

SEQ ID NO: 61317 - DNA, 20 bp, synthetic construct
  misc_feature 1..20: note = Description of Artificial Sequence: Synthetic oligonucleotide
  misc_feature 1..20: note = Target: SCN10A; (+) strand; PAM type: YTN; PAM sequence: TTT
  source 1..20: mol_type = other DNA
ctcttactcccaaacatcac

SEQ ID NO: 61318 - DNA, 20 bp, synthetic construct
  misc_feature 1..20: note = Description of Artificial Sequence: Synthetic oligonucleotide
  misc_feature 1..20: note = Target: SCN10A; (+) strand; PAM type: YTN; PAM sequence: TTC
  source 1..20: mol_type = other DNA
tcttactcccaaacatcact

SEQ ID NO: 61319 - DNA, 20 bp, synthetic construct
  misc_feature 1..20: note = Description of Artificial Sequence: Synthetic oligonucleotide
  misc_feature 1..20: note = Target: SCN10A; (+) strand; PAM type: YTN; PAM sequence: CTC
  source 1..20: mol_type = other DNA
ttactcccaaacatcactgg

SEQ ID NO: 61320 - DNA, 20 bp, synthetic construct
  misc_feature 1..20: note = Description of Artificial Sequence: Synthetic oligonucleotide
  misc_feature 1..20: note = Target: SCN10A; (+) strand; PAM type: YTN; PAM sequence: CTT
  source 1..20: mol_type = other DNA
actcccaaacatcactggta

SEQ ID NO: 61321 - DNA, 20 bp, synthetic construct
  misc_feature 1..20: note = Description of Artificial Sequence: Synthetic oligonucleotide
  misc_feature 1..20: note = Target: SCN10A; (+) strand; PAM type: YTN; PAM sequence: TTA
  source 1..20: mol_type = other DNA
ctcccaaacatcactggtac

SEQ ID NO: 61322 - DNA, 20 bp, synthetic construct
  misc_feature 1..20: note = Description of Artificial Sequence: Synthetic oligonucleotide
  misc_feature 1..20: note = Target: SCN10A; (+) strand; PAM type: YTN; PAM sequence: CTC
  source 1..20: mol_type = other DNA
ccaaacatcactggtacttt

SEQ ID NO: 61323 - DNA, 20 bp, synthetic construct
  misc_feature 1..20: note = Description of Artificial Sequence: Synthetic oligonucleotide
  misc_feature 1..20: note = Target: SCN10A; (+) strand; PAM type: YTN; PAM sequence: CTG
  source 1..20: mol_type = other DNA
gtactttatcaccctcagga

SEQ ID NO: 61324 - DNA, 20 bp, synthetic construct
  misc_feature 1..20: note = Description of Artificial Sequence: Synthetic oligonucleotide
  misc_feature 1..20: note = Target: SCN10A; (+) strand; PAM type: YTN; PAM sequence: CTT
  source 1..20: mol_type = other DNA
tatcaccctcaggataaact

SEQ ID NO: 61325 - DNA, 20 bp, synthetic construct
  misc_feature 1..20: note = Description of Artificial Sequence: Synthetic oligonucleotide
  misc_feature 1..20: note = Target: SCN10A; (+) strand; PAM type: YTN; PAM sequence: TTT
  source 1..20: mol_type = other DNA
atcaccctcaggataaactc

SEQ ID NO: 61326 - DNA, 20 bp, synthetic construct
  misc_feature 1..20: note = Description of Artificial Sequence: Synthetic oligonucleotide
  misc_feature 1..20: note = Target: SCN10A; (+) strand; PAM type: YTN; PAM sequence: TTA
  source 1..20: mol_type = other DNA
tcaccctcaggataaactcc

SEQ ID NO: 61327 - DNA, 20 bp, synthetic construct
  misc_feature 1..20: note = Description of Artificial Sequence: Synthetic oligonucleotide
  misc_feature 1..20: note = Target: SCN10A; (+) strand; PAM type: YTN; PAM sequence: CTC
  source 1..20: mol_type = other DNA
aggataaactccatactctg

SEQ ID NO: 61328 - DNA, 20 bp, synthetic construct
  misc_feature 1..20: note = Description of Artificial Sequence: Synthetic oligonucleotide
  misc_feature 1..20: note = Target: SCN10A; (+) strand; PAM type: YTN; PAM sequence: CTC
  source 1..20: mol_type = other DNA
catactctgtagcctgtgtc

SEQ ID NO: 61329 - DNA, 20 bp, synthetic construct
  misc_feature 1..20: note = Description of Artificial Sequence: Synthetic oligonucleotide
  misc_feature 1..20: note = Target: SCN10A; (+) strand; PAM type: YTN; PAM sequence: CTC
  source 1..20: mol_type = other DNA
tgtagcctgtgtcatatggt

SEQ ID NO: 61330 - DNA, 20 bp, synthetic construct
  misc_feature 1..20: note = Description of Artificial Sequence: Synthetic oligonucleotide
  misc_feature 1..20: note = Target: SCN10A; (+) strand; PAM type: YTN; PAM sequence: CTG
  source 1..20: mol_type = other DNA
tagcctgtgtcatatggtca

SEQ ID NO: 61331 - DNA, 20 bp, synthetic construct
  misc_feature 1..20: note = Description of Artificial Sequence: Synthetic oligonucleotide
  misc_feature 1..20: note = Target: SCN10A; (+) strand; PAM type: YTN; PAM sequence: CTG
  source 1..20: mol_type = other DNA
tgtcatatggtcacaaccta

SEQ ID NO: 61332 - DNA, 20 bp, synthetic construct
  misc_feature 1..20: note = Description of Artificial Sequence: Synthetic oligonucleotide
  misc_feature 1..20: note = Target: SCN10A; (+) strand; PAM type: YTN; PAM sequence: CTA
  source 1..20: mol_type = other DNA
cttttccagtcatatttcac

SEQ ID NO: 61333 - DNA, 20 bp, synthetic construct
  misc_feature 1..20: note = Description of Artificial Sequence: Synthetic oligonucleotide
  misc_feature 1..20: note = Target: SCN10A; (+) strand; PAM type: YTN; PAM sequence: CTT
  source 1..20: mol_type = other DNA
ttccagtcatatttcaccca

SEQ ID NO: 61334 - DNA, 20 bp, synthetic construct
  misc_feature 1..20: note = Description of Artificial Sequence: Synthetic oligonucleotide
  misc_feature 1..20: note = Target: SCN10A; (+) strand; PAM type: YTN; PAM sequence: TTT
  source 1..20: mol_type = other DNA
tccagtcatatttcacccac

SEQ ID NO: 61335 - DNA, 20 bp, synthetic construct
  misc_feature 1..20: note = Description of Artificial Sequence: Synthetic oligonucleotide
  misc_feature 1..20: note = Target: SCN10A; (+) strand; PAM type: YTN; PAM sequence: TTT
  source 1..20: mol_type = other DNA
ccagtcatatttcacccaca

SEQ ID NO: 61336 - DNA, 20 bp, synthetic construct
  misc_feature 1..20: note = Description of Artificial Sequence: Synthetic oligonucleotide
  misc_feature 1..20: note = Target: SCN10A; (+) strand; PAM type: YTN; PAM sequence: TTC
  source 1..20: mol_type = other DNA
cagtcatatttcacccacac

SEQ ID NO: 61337 - DNA, 20 bp, synthetic construct
  misc_feature 1..20: note = Description of Artificial Sequence: Synthetic oligonucleotide
  misc_feature 1..20: note = Target: SCN10A; (+) strand; PAM type: YTN; PAM sequence: TTT
  source 1..20: mol_type = other DNA
cacccacacattctacccaa

SEQ ID NO: 61338 - DNA, 20 bp, synthetic construct
  misc_feature 1..20: note = Description of Artificial Sequence: Synthetic oligonucleotide
  misc_feature 1..20: note = Target: SCN10A; (+) strand; PAM type: YTN; PAM sequence: TTC
  source 1..20: mol_type = other DNA
acccacacattctacccaaa

SEQ ID NO: 61339 - DNA, 20 bp, synthetic construct
  misc_feature 1..20: note = Description of Artificial Sequence: Synthetic oligonucleotide
  misc_feature 1..20: note = Target: SCN10A; (+) strand; PAM type: YTN; PAM sequence: TTC
  source 1..20: mol_type = other DNA
tacccaaatcaaattgttcc

SEQ ID NO: 61340 - DNA, 20 bp, synthetic construct
  misc_feature 1..20: note = Description of Artificial Sequence: Synthetic oligonucleotide
  misc_feature 1..20: note = Target: SCN10A; (+) strand; PAM type: YTN; PAM sequence: CTA
  source 1..20: mol_type = other DNA
cccaaatcaaattgttccct

SEQ ID NO: 61341 - DNA, 20 bp, synthetic construct
  misc_feature 1..20: note = Description of Artificial Sequence: Synthetic oligonucleotide
  misc_feature 1..20: note = Target: SCN10A; (+) strand; PAM type: YTN; PAM sequence: TTG
  source 1..20: mol_type = other DNA
ttccctgagcatacttgtgt

SEQ ID NO: 61342 - DNA, 20 bp, synthetic construct
  misc_feature 1..20: note = Description of Artificial Sequence: Synthetic oligonucleotide
  misc_feature 1..20: note = Target: SCN10A; (+) strand; PAM type: YTN; PAM sequence: TTC
  source 1..20: mol_type = other DNA
cctgagcatacttgtgtctg

SEQ ID NO: 61343 - DNA, 20 bp, synthetic construct
  misc_feature 1..20: note = Description of Artificial Sequence: Synthetic oligonucleotide
  misc_feature 1..20: note = Target: SCN10A; (+) strand; PAM type: YTN; PAM sequence: CTG
  source 1..20: mol_type = other DNA
agcatacttgtgtctgtgcc

SEQ ID NO: 61344 - DNA, 20 bp, synthetic construct
  misc_feature 1..20: note = Description of Artificial Sequence: Synthetic oligonucleotide
  misc_feature 1..20: note = Target: SCN10A; (+) strand; PAM type: YTN; PAM sequence: CTT
  source 1..20: mol_type = other DNA
gtgtctgtgcctttgttcaa

SEQ ID NO: 61345 - DNA, 20 bp, synthetic construct
  misc_feature 1..20: note = Description of Artificial Sequence: Synthetic oligonucleotide
  misc_feature 1..20: note = Target: SCN10A; (+) strand; PAM type: YTN; PAM sequence: TTG
  source 1..20: mol_type = other DNA
tgtctgtgcctttgttcaag

SEQ ID NO: 61346 - DNA, 20 bp, synthetic construct
  misc_feature 1..20: note = Description of Artificial Sequence: Synthetic oligonucleotide
  misc_feature 1..20: note = Target: SCN10A; (+) strand; PAM type: YTN; PAM sequence: CTG
  source 1..20: mol_type = other DNA
tgcctttgttcaaggtcagc

SEQ ID NO: 61347 - DNA, 20 bp, synthetic construct
  misc_feature 1..20: note = Description of Artificial Sequence: Synthetic oligonucleotide
  misc_feature 1..20: note = Target: SCN10A; (+) strand; PAM type: YTN; PAM sequence: CTT
  source 1..20: mol_type = other DNA
tgttcaaggtcagcctttag

SEQ ID NO: 61348 - DNA, 20 bp, synthetic construct
  misc_feature 1..20: note = Description of Artificial Sequence: Synthetic oligonucleotide
  misc_feature 1..20: note = Target: SCN10A; (+) strand; PAM type: YTN; PAM sequence: TTT
  source 1..20: mol_type = other DNA
gttcaaggtcagcctttagc

SEQ ID NO: 61349 - DNA, 20 bp, synthetic construct
  misc_feature 1..20: note = Description of Artificial Sequence: Synthetic oligonucleotide
  misc_feature 1..20: note = Target: SCN10A; (+) strand; PAM type: YTN; PAM sequence: TTG
  source 1..20: mol_type = other DNA
ttcaaggtcagcctttagct

SEQ ID NO: 61350 - DNA, 20 bp, synthetic construct
  misc_feature 1..20: note = Description of Artificial Sequence: Synthetic oligonucleotide
  misc_feature 1..20: note = Target: SCN10A; (+) strand; PAM type: YTN; PAM sequence: TTC
  source 1..20: mol_type = other DNA
aaggtcagcctttagctaag

SEQ ID NO: 61351 - DNA, 20 bp, synthetic construct
  misc_feature 1..20: note = Description of Artificial Sequence: Synthetic oligonucleotide
  misc_feature 1..20: note = Target: SCN10A; (+) strand; PAM type: YTN; PAM sequence: CTT
  source 1..20: mol_type = other DNA
tagctaagacgggccttccc

SEQ ID NO: 61352 - DNA, 20 bp, synthetic construct
  misc_feature 1..20: note = Description of Artificial Sequence: Synthetic oligonucleotide
  misc_feature 1..20: note = Target: SCN10A; (+) strand; PAM type: YTN; PAM sequence: TTT
  source 1..20: mol_type = other DNA
agctaagacgggccttcccc

SEQ ID NO: 61353 - DNA, 20 bp, synthetic construct
  misc_feature 1..20: note = Description of Artificial Sequence: Synthetic oligonucleotide
  misc_feature 1..20: note = Target: SCN10A; (+) strand; PAM type: YTN; PAM sequence: TTA
  source 1..20: mol_type = other DNA
gctaagacgggccttcccca

SEQ ID NO: 61354 - DNA, 20 bp, synthetic construct
  misc_feature 1..20: note = Description of Artificial Sequence: Synthetic oligonucleotide
  misc_feature 1..20: note = Target: SCN10A; (+) strand; PAM type: YTN; PAM sequence: CTA
  source 1..20: mol_type = other DNA
agacgggccttccccagtcc

SEQ ID NO: 61355 - DNA, 20 bp, synthetic construct
  misc_feature 1..20: note = Description of Artificial Sequence: Synthetic oligonucleotide
  misc_feature 1..20: note = Target: SCN10A; (+) strand; PAM type: YTN; PAM sequence: CTT
  source 1..20: mol_type = other DNA
ccccagtcctctcgcagctc

SEQ ID NO: 61356 - DNA, 20 bp, synthetic construct
  misc_feature 1..20: note = Description of Artificial Sequence: Synthetic oligonucleotide
  misc_feature 1..20: note = Target: SCN10A; (+) strand; PAM type: YTN; PAM sequence: TTC
  source 1..20: mol_type = other DNA
cccagtcctctcgcagctcc

SEQ ID NO: 61357 - DNA, 20 bp, synthetic construct
  misc_feature 1..20: note = Description of Artificial Sequence: Synthetic oligonucleotide
  misc_feature 1..20: note = Target: SCN10A; (+) strand; PAM type: YTN; PAM sequence: CTC
  source 1..20: mol_type = other DNA
tcgcagctccttggtcctgc

SEQ ID NO: 61358 - DNA, 20 bp, synthetic construct
  misc_feature 1..20: note = Description of Artificial Sequence: Synthetic oligonucleotide
  misc_feature 1..20: note = Target: SCN10A; (+) strand; PAM type: YTN; PAM sequence: CTC
  source 1..20: mol_type = other DNA
gcagctccttggtcctgctc

SEQ ID NO: 61359 - DNA, 20 bp, synthetic construct
  misc_feature 1..20: note = Description of Artificial Sequence: Synthetic oligonucleotide
  misc_feature 1..20: note = Target: SCN10A; (+) strand; PAM type: YTN; PAM sequence: CTC
  source 1..20: mol_type = other DNA
cttggtcctgctcatttcta

SEQ ID NO: 61360 - DNA, 20 bp, synthetic construct
  misc_feature 1..20: note = Description of Artificial Sequence: Synthetic oligonucleotide
  misc_feature 1..20: note = Target: SCN10A; (+) strand; PAM type: YTN; PAM sequence: CTT
  source 1..20: mol_type = other DNA
ggtcctgctcatttctatgc

SEQ ID NO: 61361 - DNA, 20 bp, synthetic construct
  misc_feature 1..20: note = Description of Artificial Sequence: Synthetic oligonucleotide
  misc_feature 1..20: note = Target: SCN10A; (+) strand; PAM type: YTN; PAM sequence: TTG
  source 1..20: mol_type = other DNA
gtcctgctcatttctatgcc

SEQ ID NO: 61362 - DNA, 20 bp, synthetic construct
  misc_feature 1..20: note = Description of Artificial Sequence: Synthetic oligonucleotide
  misc_feature 1..20: note = Target: SCN10A; (+) strand; PAM type: YTN; PAM sequence: CTG
  source 1..20: mol_type = other DNA
ctcatttctatgccccacat

SEQ ID NO: 61363 - DNA, 20 bp, synthetic construct
  misc_feature 1..20: note = Description of Artificial Sequence: Synthetic oligonucleotide
  misc_feature 1..20: note = Target: SCN10A; (+) strand; PAM type: YTN; PAM sequence: CTC
  source 1..20: mol_type = other DNA
atttctatgccccacatcta

SEQ ID NO: 61364 - DNA, 20 bp, synthetic construct
  misc_feature 1..20: note = Description of Artificial Sequence: Synthetic oligonucleotide
  misc_feature 1..20: note = Target: SCN10A; (+) strand; PAM type: YTN; PAM sequence: TTT
  source 1..20: mol_type = other DNA
ctatgccccacatctaatgc

SEQ ID NO: 61365 - DNA, 20 bp, synthetic construct
  misc_feature 1..20: note = Description of Artificial Sequence: Synthetic oligonucleotide
  misc_feature 1..20: note = Target: SCN10A; (+) strand; PAM type: YTN; PAM sequence: TTC
  source 1..20: mol_type = other DNA
tatgccccacatctaatgcc

SEQ ID NO: 61366 - DNA, 20 bp, synthetic construct
  misc_feature 1..20: note = Description of Artificial Sequence: Synthetic oligonucleotide
  misc_feature 1..20: note = Target: SCN10A; (+) strand; PAM type: YTN; PAM sequence: CTA
  source 1..20: mol_type = other DNA
tgccccacatctaatgccac

SEQ ID NO: 61367 - DNA, 20 bp, synthetic construct
  misc_feature 1..20: note = Description of Artificial Sequence: Synthetic oligonucleotide
  misc_feature 1..20: note = Target: SCN10A; (+) strand; PAM type: YTN; PAM sequence: CTA
  source 1..20: mol_type = other DNA
atgccacctcccataggaag

SEQ ID NO: 61368 - DNA, 20 bp, synthetic construct
  misc_feature 1..20: note = Description of Artificial Sequence: Synthetic oligonucleotide
  misc_feature 1..20: note = Target: SCN10A; (+) strand; PAM type: YTN; PAM sequence: CTC
  source 1..20: mol_type = other DNA
ccataggaagaattctcaac

SEQ ID NO: 61369 - DNA, 20 bp, synthetic construct
  misc_feature 1..20: note = Description of Artificial Sequence: Synthetic oligonucleotide
  misc_feature 1..20: note = Target: SCN10A; (+) strand; PAM type: YTN; PAM sequence: TTC
  source 1..20: mol_type = other DNA
tcaaccaccccaccccaaga

SEQ ID NO: 61370 - DNA, 20 bp, synthetic construct
  misc_feature 1..20: note = Description of Artificial Sequence: Synthetic oligonucleotide
  misc_feature 1..20: note = Target: SCN10A; (+) strand; PAM type: YTN; PAM sequence: CTC
  source 1..20: mol_type = other DNA
aaccaccccaccccaagagt

SEQ ID NO: 61371 - DNA, 20 bp, synthetic construct
  misc_feature 1..20: note = Description of Artificial Sequence: Synthetic oligonucleotide
  misc_feature 1..20: note = Target: SCN10A; (+) strand; PAM type: YTN; PAM sequence: CTC
  source 1..20: mol_type = other DNA
atgtctctgtgtctccaaga

SEQ ID NO: 61372 - DNA, 20 bp, synthetic construct
  misc_feature 1..20: note = Description of Artificial Sequence: Synthetic oligonucleotide
  misc_feature 1..20: note = Target: SCN10A; (+) strand; PAM type: YTN; PAM sequence: CTC
  source 1..20: mol_type = other DNA
tgtgtctccaagatactaat

SEQ ID NO: 61373 - DNA, 20 bp, synthetic construct
  misc_feature 1..20: note = Description of Artificial Sequence: Synthetic oligonucleotide
  misc_feature 1..20: note = Target: SCN10A; (+) strand; PAM type: YTN; PAM sequence: CTG
  source 1..20: mol_type = other DNA
tgtctccaagatactaattg

SEQ ID NO: 61374 - DNA, 20 bp, synthetic construct
  misc_feature 1..20: note = Description of Artificial Sequence: Synthetic oligonucleotide
  misc_feature 1..20: note = Target: SCN10A; (+) strand; PAM type: YTN; PAM sequence: CTC
  source 1..20: mol_type = other DNA
caagatactaattgccccca

SEQ ID NO: 61375 - DNA, 20 bp, synthetic construct
  misc_feature 1..20: note = Description of Artificial Sequence: Synthetic oligonucleotide
  misc_feature 1..20: note = Target: SCN10A; (+) strand; PAM type: YTN; PAM sequence: CTA
  source 1..20: mol_type = other DNA
attgcccccagcagtgctca

SEQ ID NO: 61376 - DNA, 20 bp, synthetic construct
  misc_feature 1..20: note = Description of Artificial Sequence: Synthetic oligonucleotide
  misc_feature 1..20: note = Target: SCN10A; (+) strand; PAM type: YTN; PAM sequence: TTG
  source 1..20: mol_type = other DNA
cccccagcagtgctcaacac

SEQ ID NO: 61377 - DNA, 20 bp, synthetic construct
  misc_feature 1..20: note = Description of Artificial Sequence: Synthetic oligonucleotide
  misc_feature 1..20: note = Target: SCN10A; (+) strand; PAM type: YTN; PAM sequence: CTC
  source 1..20: mol_type = other DNA
aacacattcacccttataat

SEQ ID NO: 61378 - DNA, 20 bp, synthetic construct
  misc_feature 1..20: note = Description of Artificial Sequence: Synthetic oligonucleotide
  misc_feature 1..20: note = Target: SCN10A; (+) strand; PAM type: YTN; PAM sequence: TTC
  source 1..20: mol_type = other DNA
acccttataatacatttatt

SEQ ID NO: 61379 - DNA, 20 bp, synthetic construct
  misc_feature 1..20: note = Description of Artificial Sequence: Synthetic oligonucleotide
  misc_feature 1..20: note = Target: SCN10A; (+) strand; PAM type: YTN; PAM sequence: CTT
  source 1..20: mol_type = other DNA
ataatacatttatttccatg

SEQ ID NO: 61380 - DNA, 20 bp, synthetic construct
  misc_feature 1..20: note = Description of Artificial Sequence: Synthetic oligonucleotide
  misc_feature 1..20: note = Target: SCN10A; (+) strand; PAM type: YTN; PAM sequence: TTA
  source 1..20: mol_type = other DNA
taatacatttatttccatgt

SEQ ID NO: 61381 - DNA, 20 bp, synthetic construct
  misc_feature 1..20: note = Description of Artificial Sequence: Synthetic oligonucleotide
  misc_feature 1..20: note = Target: SCN10A; (+) strand; PAM type: YTN; PAM sequence: TTT
  source 1..20: mol_type = other DNA
atttccatgtgtgtcttgtc

SEQ ID NO: 61382 - DNA, 20 bp, synthetic construct
  misc_feature 1..20: note = Description of Artificial Sequence: Synthetic oligonucleotide
  misc_feature 1..20: note = Target: SCN10A; (+) strand; PAM type: YTN; PAM sequence: TTA
  source 1..20: mol_type = other DNA
tttccatgtgtgtcttgtct

SEQ ID NO: 61383 - DNA, 20 bp, synthetic construct
  misc_feature 1..20: note = Description of Artificial Sequence: Synthetic oligonucleotide
  misc_feature 1..20: note = Target: SCN10A; (+) strand; PAM type: YTN; PAM sequence: TTT
  source 1..20: mol_type = other DNA
ccatgtgtgtcttgtctgct

SEQ ID NO: 61384 - DNA, 20 bp, synthetic construct
  misc_feature 1..20: note = Description of Artificial Sequence: Synthetic oligonucleotide
  misc_feature 1..20: note = Target: SCN10A; (+) strand; PAM type: YTN; PAM sequence: TTC
  source 1..20: mol_type = other DNA
catgtgtgtcttgtctgctg

SEQ ID NO: 61385 - DNA, 20 bp, synthetic construct
  misc_feature 1..20: note = Description of Artificial Sequence: Synthetic oligonucleotide
  misc_feature 1..20: note = Target: SCN10A; (+) strand; PAM type: YTN; PAM sequence: CTT
  source 1..20: mol_type = other DNA
gtctgctgaaagactaaagt

SEQ ID NO: 61386 - DNA, 20 bp, synthetic construct
  misc_feature 1..20: note = Description of Artificial Sequence: Synthetic oligonucleotide
  misc_feature 1..20: note = Target: SCN10A; (+) strand; PAM type: YTN; PAM sequence: TTG
  source 1..20: mol_type = other DNA
tctgctgaaagactaaagtg

SEQ ID NO: 61387 - DNA, 20 bp, synthetic construct
  misc_feature 1..20: note = Description of Artificial Sequence: Synthetic oligonucleotide
  misc_feature 1..20: note = Target: SCN10A; (+) strand; PAM type: YTN; PAM sequence: CTG
  source 1..20: mol_type = other DNA
ctgaaagactaaagtgtaag

SEQ ID NO: 61388 - DNA, 20 bp, synthetic construct
  misc_feature 1..20: note = Description of Artificial Sequence: Synthetic oligonucleotide
  misc_feature 1..20: note = Target: SCN10A; (+) strand; PAM type: YTN; PAM sequence: CTG
  source 1..20: mol_type = other DNA
aaagactaaagtgtaagatc

SEQ ID NO: 61389 - DNA, 20 bp, synthetic construct
  misc_feature 1..20: note = Description of Artificial Sequence: Synthetic oligonucleotide
  misc_feature 1..20: note = Target: SCN10A; (+) strand; PAM type: YTN; PAM sequence: CTA
  source 1..20: mol_type = other DNA
aagtgtaagatcctggagat

SEQ ID NO: 61390 - DNA, 20 bp, synthetic construct
  misc_feature 1..20: note = Description of Artificial Sequence: Synthetic oligonucleotide
  misc_feature 1..20: note = Target: SCN10A; (+) strand; PAM type: YTN; PAM sequence: CTG
  source 1..20: mol_type = other DNA
gagatagtgagtatttattc

SEQ ID NO: 61391 - DNA, 20 bp, synthetic construct
  misc_feature 1..20: note = Description of Artificial Sequence: Synthetic oligonucleotide
  misc_feature 1..20: note = Target: SCN10A; (+) strand; PAM type: YTN; PAM sequence: TTT
  source 1..20: mol_type = other DNA
attctgtgcttctgtttctt

SEQ ID NO: 61392 - DNA, 20 bp, synthetic construct
  misc_feature 1..20: note = Description of Artificial Sequence: Synthetic oligonucleotide
  misc_feature 1..20: note = Target: SCN10A; (+) strand; PAM type: YTN; PAM sequence: TTA
  source 1..20: mol_type = other DNA
ttctgtgcttctgtttctta

SEQ ID NO: 61393 - DNA, 20 bp, synthetic construct
  misc_feature 1..20: note = Description of Artificial Sequence: Synthetic oligonucleotide
  misc_feature 1..20: note = Target: SCN10A; (+) strand; PAM type: YTN; PAM sequence: TTC
  source 1..20: mol_type = other DNA
tgtgcttctgtttcttacaa

SEQ ID NO: 61394 - DNA, 20 bp, synthetic construct
  misc_feature 1..20: note = Description of Artificial Sequence: Synthetic oligonucleotide
  misc_feature 1..20: note = Target: SCN10A; (+) strand; PAM type: YTN; PAM sequence: CTG
  source 1..20: mol_type = other DNA
tgcttctgtttcttacaaag

SEQ ID NO: 61395 - DNA, 20 bp, synthetic construct
  misc_feature 1..20: note = Description of Artificial Sequence: Synthetic oligonucleotide
  misc_feature 1..20: note = Target: SCN10A; (+) strand; PAM type: YTN; PAM sequence: CTT
  source 1..20: mol_type = other DNA
ctgtttcttacaaagcactt

SEQ ID NO: 61396 - DNA, 20 bp, synthetic construct
  misc_feature 1..20: note = Description of Artificial Sequence: Synthetic oligonucleotide
  misc_feature 1..20: note = Target: SCN10A; (+) strand; PAM type: YTN; PAM sequence: TTC
  source 1..20: mol_type = other DNA
tgtttcttacaaagcacttc

SEQ ID NO: 61397 - DNA, 20 bp, synthetic construct
  misc_feature 1..20: note = Description of Artificial Sequence: Synthetic oligonucleotide
  misc_feature 1..20: note = Target: SCN10A; (+) strand; PAM type: YTN; PAM sequence: CTG
  source 1..20: mol_type = other DNA
tttcttacaaagcacttcat

SEQ ID NO: 61398 - DNA, 20 bp, synthetic construct
  misc_feature 1..20: note = Description of Artificial Sequence: Synthetic oligonucleotide
  misc_feature 1..20: note = Target: SCN10A; (+) strand; PAM type: YTN; PAM sequence: TTT
  source 1..20: mol_type = other DNA
cttacaaagcacttcataag

SEQ ID NO: 61399 - DNA, 20 bp, synthetic construct
  misc_feature 1..20: note = Description of Artificial Sequence: Synthetic oligonucleotide
  misc_feature 1..20: note = Target: SCN10A; (+) strand; PAM type: YTN; PAM sequence: TTC
  source 1..20: mol_type = other DNA
ttacaaagcacttcataaga

SEQ ID NO: 61400 - DNA, 20 bp, synthetic construct
  misc_feature 1..20: note = Description of Artificial Sequence: Synthetic oligonucleotide
  misc_feature 1..20: note = Target: SCN10A; (+) strand; PAM type: YTN; PAM sequence: CTT
  source 1..20: mol_type = other DNA
acaaagcacttcataagaca

SEQ ID NO: 61401 - DNA, 20 bp, synthetic construct
  misc_feature 1..20: note = Description of Artificial Sequence: Synthetic oligonucleotide
  misc_feature 1..20: note = Target: SCN10A; (+) strand; PAM type: YTN; PAM sequence: TTA
  source 1..20: mol_type = other DNA
caaagcacttcataagacaa

SEQ ID NO: 61402 - DNA, 20 bp, synthetic construct
  misc_feature 1..20: note = Description of Artificial Sequence: Synthetic oligonucleotide
  misc_feature 1..20: note = Target: SCN10A; (+) strand; PAM type: YTN; PAM sequence: CTT
  source 1..20: mol_type = other DNA
cataagacaatcctgtattc

SEQ ID NO: 61403 - DNA, 20 bp, synthetic construct
  misc_feature 1..20: note = Description of Artificial Sequence: Synthetic oligonucleotide
  misc_feature 1..20: note = Target: SCN10A; (+) strand; PAM type: YTN; PAM sequence: TTC
  source 1..20: mol_type = other DNA
ataagacaatcctgtattca

SEQ ID NO: 61404 - DNA, 20 bp, synthetic construct
  misc_feature 1..20: note = Description of Artificial Sequence: Synthetic oligonucleotide
  misc_feature 1..20: note = Target: SCN10A; (+) strand; PAM type: YTN; PAM sequence: CTG
  source 1..20: mol_type = other DNA
tattcaatagttagatgtat

SEQ ID NO: 61405 - DNA, 20 bp, synthetic construct
  misc_feature 1..20: note = Description of Artificial Sequence: Synthetic oligonucleotide
  misc_feature 1..20: note = Target: SCN10A; (+) strand; PAM type: YTN; PAM sequence: TTC
  source 1..20: mol_type = other DNA
aatagttagatgtatagcaa

SEQ ID NO: 61406 - DNA, 20 bp, synthetic construct
  misc_feature 1..20: note = Description of Artificial Sequence: Synthetic oligonucleotide
  misc_feature 1..20: note = Target: SCN10A; (+) strand; PAM type: YTN; PAM sequence: TTA
  source 1..20: mol_type = other DNA
gatgtatagcaaatggaaga

SEQ ID NO: 61407 - DNA, 20 bp, synthetic construct
  misc_feature 1..20: note = Description of Artificial Sequence: Synthetic oligonucleotide
  misc_feature 1..20: note = Target: SCN10A; (+) strand; PAM type: YTN; PAM sequence: TTG
  source 1..20: mol_type = other DNA
ggatggctagaaggaaagaa

SEQ ID NO: 61408 - DNA, 20 bp, synthetic construct
  misc_feature 1..20: note = Description of Artificial Sequence: Synthetic oligonucleotide
  misc_feature 1..20: note = Target: SCN10A; (+) strand; PAM type: YTN; PAM sequence: CTA
  source 1..20: mol_type = other DNA
gaaggaaagaaagaaagaag

SEQ ID NO: 61409 - DNA, 20 bp, synthetic construct
  misc_feature 1..20: note = Description of Artificial Sequence: Synthetic oligonucleotide
  misc_feature 1..20: note = Target: SCN10A; (+) strand; PAM type: YTN; PAM sequence: CTG
  source 1..20: mol_type = other DNA
gatgaaaagttgaagggtga

SEQ ID NO: 61410 - DNA, 20 bp, synthetic construct
  misc_feature 1..20: note = Description of Artificial Sequence: Synthetic oligonucleotide
  misc_feature 1..20: note = Target: SCN10A; (+) strand; PAM type: YTN; PAM sequence: TTG
  source 1..20: mol_type = other DNA
aagggtgattgcatagaggg

SEQ ID NO: 61411 - DNA, 20 bp, synthetic construct
  misc_feature 1..20: note = Description of Artificial Sequence: Synthetic oligonucleotide
  misc_feature 1..20: note = Target: SCN10A; (+) strand; PAM type: YTN; PAM sequence: TTG
  source 1..20: mol_type = other DNA
catagagggatgaattaaag

SEQ ID NO: 61412 - DNA, 20 bp, synthetic construct
  misc_feature 1..20: note = Description of Artificial Sequence: Synthetic oligonucleotide
  misc_feature 1..20: note = Target: SCN10A; (+) strand; PAM type: YTN; PAM sequence: TTA
  source 1..20: mol_type = other DNA
aaggatacaatgataaatag

SEQ ID NO: 61413 - DNA, 20 bp, synthetic construct
  misc_feature 1..20: note = Description of Artificial Sequence: Synthetic oligonucleotide
  misc_feature 1..20: note = Target: SCN10A; (+) strand; PAM type: YTN; PAM sequence: TTT
  source 1..20: mol_type = other DNA
aatgtataacatgaatacta

SEQ ID NO: 61414 - DNA, 20 bp, synthetic construct
  misc_feature 1..20: note = Description of Artificial Sequence: Synthetic oligonucleotide
  misc_feature 1..20: note = Target: SCN10A; (+) strand; PAM type: YTN; PAM sequence: TTA
  source 1..20: mol_type = other DNA
atgtataacatgaatactat

SEQ ID NO: 61415 - DNA, 20 bp, synthetic construct
  misc_feature 1..20: note = Description of Artificial Sequence: Synthetic oligonucleotide
  misc_feature 1..20: note = Target: SCN10A; (+) strand; PAM type: YTN; PAM sequence: CTA
  source 1..20: mol_type = other DNA
tagttaataatagcatattg

SEQ ID NO: 61416 - DNA, 20 bp, synthetic construct
  misc_feature 1..20: note = Description of Artificial Sequence: Synthetic oligonucleotide
  misc_feature 1..20: note = Target: SCN10A; (+) strand; PAM type: YTN; PAM sequence: TTA
  source 1..20: mol_type = other DNA
ataatagcatattgttttca

SEQ ID NO: 61417 - DNA, 20 bp, synthetic construct
  misc_feature 1..20: note = Description of Artificial Sequence: Synthetic oligonucleotide
  misc_feature 1..20: note = Target: SCN10A; (+) strand; PAM type: YTN; PAM sequence: TTG
  source 1..20: mol_type = other DNA
ttttcagtatttttgctcgc

SEQ ID NO: 61418 - DNA, 20 bp, synthetic construct
  misc_feature 1..20: note = Description of Artificial Sequence: Synthetic oligonucleotide
  misc_feature 1..20: note = Target: SCN10A; (+) strand; PAM type: YTN; PAM sequence: TTT
  source 1..20: mol_type = other DNA
tcagtatttttgctcgctga

SEQ ID NO: 61419 - DNA, 20 bp, synthetic construct
  misc_feature 1..20: note = Description of Artificial Sequence: Synthetic oligonucleotide
  misc_feature 1..20: note = Target: SCN10A; (+) strand; PAM type: YTN; PAM sequence: TTT
  source 1..20: mol_type = other DNA
cagtatttttgctcgctgag

SEQ ID NO: 61420 - DNA, 20 bp, synthetic construct
  misc_feature 1..20: note = Description of Artificial Sequence: Synthetic oligonucleotide
  misc_feature 1..20: note = Target: SCN10A; (+) strand; PAM type: YTN; PAM sequence: TTC
  source 1..20: mol_type = other DNA
agtatttttgctcgctgagt

SEQ ID NO: 61421 - DNA, 20 bp, synthetic construct
  misc_feature 1..20: note = Description of Artificial Sequence: Synthetic oligonucleotide
  misc_feature 1..20: note = Target: SCN10A; (+) strand; PAM type: YTN; PAM sequence: TTT
  source 1..20: mol_type = other DNA
ttgctcgctgagtaattata

SEQ ID NO: 61422 - DNA, 20 bp, synthetic construct
  misc_feature 1..20: note = Description of Artificial Sequence: Synthetic oligonucleotide
  misc_feature 1..20: note = Target: SCN10A; (+) strand; PAM type: YTN; PAM sequence: TTT
  source 1..20: mol_type = other DNA
tgctcgctgagtaattatag

SEQ ID NO: 61423 - DNA, 20 bp, synthetic construct
  misc_feature 1..20: note = Description of Artificial Sequence: Synthetic oligonucleotide
  misc_feature 1..20: note = Target: SCN10A; (+) strand; PAM type: YTN; PAM sequence: TTT
  source 1..20: mol_type = other DNA
gctcgctgagtaattatagc

SEQ ID NO: 61424 - DNA, 20 bp, synthetic construct
  misc_feature 1..20: note = Description of Artificial Sequence: Synthetic oligonucleotide
  misc_feature 1..20: note = Target: SCN10A; (+) strand; PAM type: YTN; PAM sequence: TTG
  source 1..20: mol_type = other DNA
ctcgctgagtaattatagct

SEQ ID NO: 61425 - DNA, 20 bp, synthetic construct
  misc_feature 1..20: note = Description of Artificial Sequence: Synthetic oligonucleotide
  misc_feature 1..20: note = Target: SCN10A; (+) strand; PAM type: YTN; PAM sequence: CTC
  source 1..20: mol_type = other DNA
gctgagtaattatagctgct

SEQ ID NO: 61426 - DNA, 20 bp, synthetic construct
  misc_feature 1..20: note = Description of Artificial Sequence: Synthetic oligonucleotide
  misc_feature 1..20: note = Target: SCN10A; (+) strand; PAM type: YTN; PAM sequence: CTG
  source 1..20: mol_type = other DNA
agtaattatagctgctcttg

SEQ ID NO: 61427 - DNA, 20 bp, synthetic construct
  misc_feature 1..20: note = Description of Artificial Sequence: Synthetic oligonucleotide
  misc_feature 1..20: note = Target: SCN10A; (+) strand; PAM type: YTN; PAM sequence: TTA
  source 1..20: mol_type = other DNA
tagctgctcttgccacaggg

SEQ ID NO: 61428 - DNA, 20 bp, synthetic construct
  misc_feature 1..20: note = Description of Artificial Sequence: Synthetic oligonucleotide
  misc_feature 1..20: note = Target: SCN10A; (+) strand; PAM type: YTN; PAM sequence: CTG
  source 1..20: mol_type = other DNA
ctcttgccacagggggagaa

SEQ ID NO: 61429 - DNA, 20 bp, synthetic construct
  misc_feature 1..20: note = Description of Artificial Sequence: Synthetic oligonucleotide
  misc_feature 1..20: note = Target: SCN10A; (+) strand; PAM type: YTN; PAM sequence: CTC
  source 1..20: mol_type = other DNA
ttgccacagggggagaaatg

SEQ ID NO: 61430 - DNA, 20 bp, synthetic construct
  misc_feature 1..20: note = Description of Artificial Sequence: Synthetic oligonucleotide
  misc_feature 1..20: note = Target: SCN10A; (+) strand; PAM type: YTN; PAM sequence: CTT
  source 1..20: mol_type = other DNA
gccacagggggagaaatggg

SEQ ID NO: 61431 - DNA, 20 bp, synthetic construct
  misc_feature 1..20: note = Description of Artificial Sequence: Synthetic oligonucleotide
  misc_feature 1..20: note = Target: SCN10A; (+) strand; PAM type: YTN; PAM sequence: TTG
  source 1..20: mol_type = other DNA
ccacagggggagaaatgggt

SEQ ID NO: 61432 - DNA, 20 bp, synthetic construct
  misc_feature 1..20: note = Description of Artificial Sequence: Synthetic oligonucleotide
  misc_feature 1..20: note = Target: SCN10A; (+) strand; PAM type: YTN; PAM sequence: CTA
  source 1..20: mol_type = other DNA
tgtgagatgatggatatgtt

SEQ ID NO: 61433 - DNA, 20 bp, synthetic construct
  misc_feature 1..20: note = Description of Artificial Sequence: Synthetic oligonucleotide
  misc_feature 1..20: note = Target: SCN10A; (+) strand; PAM type: YTN; PAM sequence: TTA
  source 1..20: mol_type = other DNA
atatgttccactatagtaat

SEQ ID NO: 61434 - DNA, 20 bp, synthetic construct
  misc_feature 1..20: note = Description of Artificial Sequence: Synthetic oligonucleotide
  misc_feature 1..20: note = Target: SCN10A; (+) strand; PAM type: YTN; PAM sequence: TTC
  source 1..20: mol_type = other DNA
cactatagtaatcatttata

SEQ ID NO: 61435 - DNA, 20 bp, synthetic construct
  misc_feature 1..20: note = Description of Artificial Sequence: Synthetic oligonucleotide
  misc_feature 1..20: note = Target: SCN10A; (+) strand; PAM type: YTN; PAM sequence: CTA
  source 1..20: mol_type = other DNA
tagtaatcatttatatatat

SEQ ID NO: 61436 - DNA, 20 bp, synthetic construct
  misc_feature 1..20: note = Description of Artificial Sequence: Synthetic oligonucleotide
  misc_feature 1..20: note = Target: SCN10A; (+) strand; PAM type: YTN; PAM sequence: TTT
  source 1..20: mol_type = other DNA
atatatatatatatcttata

SEQ ID NO: 61437 - DNA, 20 bp, synthetic construct
  misc_feature 1..20: note = Description of Artificial Sequence: Synthetic oligonucleotide
  misc_feature 1..20: note = Target: SCN10A; (+) strand; PAM type: YTN; PAM sequence: TTA
  source 1..20: mol_type = other DNA
tatatatatatatcttataa

SEQ ID NO: 61438 - DNA, 20 bp, synthetic construct
  misc_feature 1..20: note = Description of Artificial Sequence: Synthetic oligonucleotide
  misc_feature 1..20: note = Target: SCN10A; (+) strand; PAM type: YTN; PAM sequence: CTT
  source 1..20: mol_type = other DNA
ataacatcattttgtatccc

SEQ ID NO: 61439 - DNA, 20 bp, synthetic construct
  misc_feature 1..20: note = Description of Artificial Sequence: Synthetic oligonucleotide
  misc_feature 1..20: note = Target: SCN10A; (+) strand; PAM type: YTN; PAM sequence: TTA
  source 1..20: mol_type = other DNA
taacatcattttgtatccct

SEQ ID NO: 61440 - DNA, 20 bp, synthetic construct
  misc_feature 1..20: note = Description of Artificial Sequence: Synthetic oligonucleotide
  misc_feature 1..20: note = Target: SCN10A; (+) strand; PAM type: YTN; PAM sequence: TTT
  source 1..20: mol_type = other DNA
tgtatcccttaaaaattgat

SEQ ID NO: 61441 - DNA, 20 bp, synthetic construct
  misc_feature 1..20: note = Description of Artificial Sequence: Synthetic oligonucleotide
  misc_feature 1..20: note = Target: SCN10A; (+) strand; PAM type: YTN; PAM sequence: TTT
  source 1..20: mol_type = other DNA
gtatcccttaaaaattgata

SEQ ID NO: 61442 - DNA, 20 bp, synthetic construct
  misc_feature 1..20: note = Description of Artificial Sequence: Synthetic oligonucleotide
  misc_feature 1..20: note = Target: SCN10A; (+) strand; PAM type: YTN; PAM sequence: TTG
  source 1..20: mol_type = other DNA
tatcccttaaaaattgatat

SEQ ID NO: 61443 - DNA, 20 bp, synthetic construct
  misc_feature 1..20: note = Description of Artificial Sequence: Synthetic oligonucleotide
  misc_feature 1..20: note = Target: SCN10A; (+) strand; PAM type: YTN; PAM sequence: CTT
  source 1..20: mol_type = other DNA
aaaaattgatatggtttggc

SEQ ID NO: 61444 - DNA, 20 bp, synthetic construct
  misc_feature 1..20: note = Description of Artificial Sequence: Synthetic oligonucleotide
  misc_feature 1..20: note = Target: SCN10A; (+) strand; PAM type: YTN; PAM sequence: TTA
  source 1..20: mol_type = other DNA
aaaattgatatggtttggct

SEQ ID NO: 61445 - DNA, 20 bp, synthetic construct
  misc_feature 1..20: note = Description of Artificial Sequence: Synthetic oligonucleotide
  misc_feature 1..20: note = Target: SCN10A; (+) strand; PAM type: YTN; PAM sequence: TTG
  source 1..20: mol_type = other DNA
atatggtttggctgtgtccc

SEQ ID NO: 61446 - DNA, 20 bp, synthetic construct
  misc_feature 1..20: note = Description of Artificial Sequence: Synthetic oligonucleotide
  misc_feature 1..20: note = Target: SCN10A; (+) strand; PAM type: YTN; PAM sequence: TTT
  source 1..20: mol_type = other DNA
ggctgtgtccccacccaaat

SEQ ID NO: 61447 - DNA, 20 bp, synthetic construct
  misc_feature 1..20: note = Description of Artificial Sequence: Synthetic oligonucleotide
  misc_feature 1..20: note = Target: SCN10A; (+) strand; PAM type: YTN; PAM sequence: TTG
  source 1..20: mol_type = other DNA
gctgtgtccccacccaaatc

SEQ ID NO: 61448 - DNA, 20 bp, synthetic construct
  misc_feature 1..20: note = Description of Artificial Sequence: Synthetic oligonucleotide
  misc_feature 1..20: note = Target: SCN10A; (+) strand; PAM type: YTN; PAM sequence: CTG
  source 1..20: mol_type = other DNA
tgtccccacccaaatcttat

SEQ ID NO: 61449 - DNA, 20 bp, synthetic construct
  misc_feature 1..20: note = Description of Artificial Sequence: Synthetic oligonucleotide
  misc_feature 1..20: note = Target: SCN10A; (+) strand; PAM type: YTN; PAM sequence: CTT
  source 1..20: mol_type = other DNA
atcttgaattcccatgtgtt

SEQ ID NO: 61450 - DNA, 20 bp, synthetic construct
  misc_feature 1..20: note = Description of Artificial Sequence: Synthetic oligonucleotide
  misc_feature 1..20: note = Target: SCN10A; (+) strand; PAM type: YTN; PAM sequence: TTA
  source 1..20: mol_type = other DNA
tcttgaattcccatgtgttg

SEQ ID NO: 61451 - DNA, 20 bp, synthetic construct
  misc_feature 1..20: note = Description of Artificial Sequence: Synthetic oligonucleotide
  misc_feature 1..20: note = Target: SCN10A; (+) strand; PAM type: YTN; PAM sequence: CTT
  source 1..20: mol_type = other DNA
gaattcccatgtgttgtggg

SEQ ID NO: 61452 - DNA, 20 bp, synthetic construct
  misc_feature 1..20: note = Description of Artificial Sequence: Synthetic oligonucleotide
  misc_feature 1..20: note = Target: SCN10A; (+) strand; PAM type: YTN; PAM sequence: TTG
  source 1..20: mol_type = other DNA
aattcccatgtgttgtggga

SEQ ID NO: 61453 - DNA, 20 bp, synthetic construct
  misc_feature 1..20: note = Description of Artificial Sequence: Synthetic oligonucleotide
  misc_feature 1..20: note = Target: SCN10A; (+) strand; PAM type: YTN; PAM sequence: TTC
  source 1..20: mol_type = other DNA
ccatgtgttgtgggagggga

SEQ ID NO: 61454 - DNA, 20 bp, synthetic construct
  misc_feature 1..20: note = Description of Artificial Sequence: Synthetic oligonucleotide
  misc_feature 1..20: note = Target: SCN10A; (+) strand; PAM type: YTN; PAM sequence: TTG
  source 1..20: mol_type = other DNA
tgggaggggagggaccctgt

SEQ ID NO: 61455 - DNA, 20 bp, synthetic construct
  misc_feature 1..20: note = Description of Artificial Sequence: Synthetic oligonucleotide
  misc_feature 1..20: note = Target: SCN10A; (+) strand; PAM type: YTN; PAM sequence: CTG
  source 1..20: mol_type = other DNA
tgggaggtaagtgaatcatg

SEQ ID NO: 61456 - DNA, 20 bp, synthetic construct
  misc_feature 1..20: note = Description of Artificial Sequence: Synthetic oligonucleotide
  misc_feature 1..20: note = Target: SCN10A; (+) strand; PAM type: YTN; PAM sequence: CTT
  source 1..20: mol_type = other DNA
tcccatgctgttctcatgat

SEQ ID NO: 61457 - DNA, 20 bp, synthetic construct
  misc_feature 1..20: note = Description of Artificial Sequence: Synthetic oligonucleotide
  misc_feature 1..20: note = Target: SCN10A; (+) strand; PAM type: YTN; PAM sequence: TTT
  source 1..20: mol_type = other DNA
cccatgctgttctcatgata

SEQ ID NO: 61458 - DNA, 20 bp, synthetic construct
  misc_feature 1..20: note = Description of Artificial Sequence: Synthetic oligonucleotide
  misc_feature 1..20: note = Target: SCN10A; (+) strand; PAM type: YTN; PAM sequence: TTC
  source 1..20: mol_type = other DNA
ccatgctgttctcatgatag

SEQ ID NO: 61459 - DNA, 20 bp, synthetic construct
  misc_feature 1..20: note = Description of Artificial Sequence: Synthetic oligonucleotide
  misc_feature 1..20: note = Target: SCN10A; (+) strand; PAM type: YTN; PAM sequence: CTG
  source 1..20: mol_type = other DNA
ttctcatgatagtgaataag

SEQ ID NO: 61460 - DNA, 20 bp, synthetic construct
  misc_feature 1..20: note = Description of Artificial Sequence: Synthetic oligonucleotide
  misc_feature 1..20: note = Target: SCN10A; (+) strand; PAM type: YTN; PAM sequence: TTC
  source 1..20: mol_type = other DNA
tcatgatagtgaataagttt

SEQ ID NO: 61461 - DNA, 20 bp, synthetic construct
  misc_feature 1..20: note = Description of Artificial Sequence: Synthetic oligonucleotide
  misc_feature 1..20: note = Target: SCN10A; (+) strand; PAM type: YTN; PAM sequence: CTC
  source 1..20: mol_type = other DNA
atgatagtgaataagtttca

SEQ ID NO: 61462 - DNA, 20 bp, synthetic construct
  misc_feature 1..20: note = Description of Artificial Sequence: Synthetic oligonucleotide
  misc_feature 1..20: note = Target: SCN10A; (+) strand; PAM type: YTN; PAM sequence: TTT
  source 1..20: mol_type = other DNA
catgagatgtgacggtatta

SEQ ID NO: 61463 - DNA, 20 bp, synthetic construct
  misc_feature 1..20: note = Description of Artificial Sequence: Synthetic oligonucleotide
  misc_feature 1..20: note = Target: SCN10A; (+) strand; PAM type: YTN; PAM sequence: TTC
  source 1..20: mol_type = other DNA
atgagatgtgacggtattat

SEQ ID NO: 61464 - DNA, 20 bp, synthetic construct
  misc_feature 1..20: note = Description of Artificial Sequence: Synthetic oligonucleotide
  misc_feature 1..20: note = Target: SCN10A; (+) strand; PAM type: YTN; PAM sequence: TTA
  source 1..20: mol_type = other DNA
taagggggagtttccctgcc

SEQ ID NO: 61465 - DNA, 20 bp, synthetic construct
  misc_feature 1..20: note = Description of Artificial Sequence: Synthetic oligonucleotide
  misc_feature 1..20: note = Target: SCN10A; (+) strand; PAM type: YTN; PAM sequence: TTT
  source 1..20: mol_type = other DNA
ccctgcccaacctctctctt

SEQ ID NO: 61466 - DNA, 20 bp, synthetic construct
  misc_feature 1..20: note = Description of Artificial Sequence: Synthetic oligonucleotide
  misc_feature 1..20: note = Target: SCN10A; (+) strand; PAM type: YTN; PAM sequence: TTC
  source 1..20: mol_type = other DNA
cctgcccaacctctctcttt

SEQ ID NO: 61467 - DNA, 20 bp, synthetic construct
  misc_feature 1..20: note = Description of Artificial Sequence: Synthetic oligonucleotide
  misc_feature 1..20: note = Target: SCN10A; (+) strand; PAM type: YTN; PAM sequence: CTG
  source 1..20: mol_type = other DNA
cccaacctctctctttgcct

SEQ ID NO: 61468 - DNA, 20 bp, synthetic construct
  misc_feature 1..20: note = Description of Artificial Sequence: Synthetic oligonucleotide
  misc_feature 1..20: note = Target: SCN10A; (+) strand; PAM type: YTN; PAM sequence: CTC
  source 1..20: mol_type = other DNA
tctctttgcctgctgccatc

SEQ ID NO: 61469 - DNA, 20 bp, synthetic construct
  misc_feature 1..20: note = Description of Artificial Sequence: Synthetic oligonucleotide
  misc_feature 1..20: note = Target: SCN10A; (+) strand; PAM type: YTN; PAM sequence: CTC
  source 1..20: mol_type = other DNA
tctttgcctgctgccatcca

SEQ ID NO: 61470 - DNA, 20 bp, synthetic construct
  misc_feature 1..20: note = Description of Artificial Sequence: Synthetic oligonucleotide
  misc_feature 1..20: note = Target: SCN10A; (+) strand; PAM type: YTN; PAM sequence: CTC
  source 1..20: mol_type = other DNA
tttgcctgctgccatccaca

SEQ ID NO: 61471 - DNA, 20 bp, synthetic construct
  misc_feature 1..20: note = Description of Artificial Sequence: Synthetic oligonucleotide
  misc_feature 1..20: note = Target: SCN10A; (+) strand; PAM type: YTN; PAM sequence: CTT
  source 1..20: mol_type = other DNA
tgcctgctgccatccacata

SEQ ID NO: 61472 - DNA, 20 bp, synthetic construct
  misc_feature 1..20: note = Description of Artificial Sequence: Synthetic oligonucleotide
  misc_feature 1..20: note = Target: SCN10A; (+) strand; PAM type: YTN; PAM sequence: TTT
  source 1..20: mol_type = other DNA
gcctgctgccatccacataa

SEQ ID NO: 61473 - DNA, 20 bp, synthetic construct
  misc_feature 1..20: note = Description of Artificial Sequence: Synthetic oligonucleotide
  misc_feature 1..20: note = Target: SCN10A; (+) strand; PAM type: YTN; PAM sequence: TTG
  source 1..20: mol_type = other DNA
cctgctgccatccacataag

SEQ ID NO: 61474 - DNA, 20 bp, synthetic construct
  misc_feature 1..20: note = Description of Artificial Sequence: Synthetic oligonucleotide
  misc_feature 1..20: note = Target: SCN10A; (+) strand; PAM type: YTN; PAM sequence: CTG
  source 1..20: mol_type = other DNA
ctgccatccacataagacgt

SEQ ID NO: 61475 - DNA, 20 bp, synthetic construct
  misc_feature 1..20: note = Description of Artificial Sequence: Synthetic oligonucleotide
  misc_feature 1..20: note = Target: SCN10A; (+) strand; PAM type: YTN; PAM sequence: CTG
  source 1..20: mol_type = other DNA
ccatccacataagacgtgac

SEQ ID NO: 61476 - DNA, 20 bp, synthetic construct
  misc_feature 1..20: note = Description of Artificial Sequence: Synthetic oligonucleotide
  misc_feature 1..20: note = Target: SCN10A; (+) strand; PAM type: YTN; PAM sequence: CTC
  source 1..20: mol_type = other DNA
gcacctcctttccttttgcc

SEQ ID NO: 61477 - DNA, 20 bp, synthetic construct
  misc_feature 1..20: note = Description of Artificial Sequence: Synthetic oligonucleotide
  misc_feature 1..20: note = Target: SCN10A; (+) strand; PAM type: YTN; PAM sequence: CTC
  source 1..20: mol_type = other DNA
ctttccttttgccatgattg

SEQ ID NO: 61478 - DNA, 20 bp, synthetic construct
  misc_feature 1..20: note = Description of Artificial Sequence: Synthetic oligonucleotide
  misc_feature 1..20: note = Target: SCN10A; (+) strand; PAM type: YTN; PAM sequence: CTT
  source 1..20: mol_type = other DNA
tccttttgccatgattgtaa

SEQ ID NO: 61479 - DNA, 20 bp, synthetic construct
  misc_feature 1..20: note = Description of Artificial Sequence: Synthetic oligonucleotide
  misc_feature 1..20: note = Target: SCN10A; (+) strand; PAM type: YTN; PAM sequence: TTT
  source 1..20: mol_type = other DNA
ccttttgccatgattgtaag

SEQ ID NO: 61480 - DNA, 20 bp, synthetic construct
  misc_feature 1..20: note = Description of Artificial Sequence: Synthetic oligonucleotide
  misc_feature 1..20: note = Target: SCN10A; (+) strand; PAM type: YTN; PAM sequence: TTC
  source 1..20: mol_type = other DNA
cttttgccatgattgtaagg

SEQ ID NO: 61481 - DNA, 20 bp, synthetic construct
  misc_feature 1..20: note = Description of Artificial Sequence: Synthetic oligonucleotide
  misc_feature 1..20: note = Target: SCN10A; (+) strand; PAM type: YTN; PAM sequence: CTT
  source 1..20: mol_type = other DNA
ttgccatgattgtaaggctt

SEQ ID NO: 61482 - DNA, 20 bp, synthetic construct
  misc_feature 1..20: note = Description of Artificial Sequence: Synthetic oligonucleotide
  misc_feature 1..20: note = Target: SCN10A; (+) strand; PAM type: YTN; PAM sequence: TTT
  source 1..20: mol_type = other DNA
tgccatgattgtaaggcttc

SEQ ID NO: 61483 - DNA, 20 bp, synthetic construct
  misc_feature 1..20: note = Description of Artificial Sequence: Synthetic oligonucleotide
  misc_feature 1..20: note = Target: SCN10A; (+) strand; PAM type: YTN; PAM sequence: TTT
  source 1..20: mol_type = other DNA
gccatgattgtaaggcttcc

SEQ ID NO: 61484 - DNA, 20 bp, synthetic construct
  misc_feature 1..20: note = Description of Artificial Sequence: Synthetic oligonucleotide
  misc_feature 1..20: note = Target: SCN10A; (+) strand; PAM type: YTN; PAM sequence: TTG
  source 1..20: mol_type = other DNA
ccatgattgtaaggcttccc

SEQ ID NO: 61485 - DNA, 20 bp, synthetic construct
  misc_feature 1..20: note = Description of Artificial Sequence: Synthetic oligonucleotide
  misc_feature 1..20: note = Target: SCN10A; (+) strand; PAM type: YTN; PAM sequence: TTG
  source 1..20: mol_type = other DNA
taaggcttccccagccatgt

SEQ ID NO: 61486 - DNA, 20 bp, synthetic construct
  misc_feature 1..20: note = Description of Artificial Sequence: Synthetic oligonucleotide
  misc_feature 1..20: note = Target: SCN10A; (+) strand; PAM type: YTN; PAM sequence: CTT
  source 1..20: mol_type = other DNA
ccccagccatgtgaagctgt

SEQ ID NO: 61487 - DNA, 20 bp, synthetic construct
  misc_feature 1..20: note = Description of Artificial Sequence: Synthetic oligonucleotide
  misc_feature 1..20: note = Target: SCN10A; (+) strand; PAM type: YTN; PAM sequence: TTC
  source 1..20: mol_type = other DNA
cccagccatgtgaagctgta

SEQ ID NO: 61488 - DNA, 20 bp, synthetic construct
  misc_feature 1..20: note = Description of Artificial Sequence: Synthetic oligonucleotide
  misc_feature 1..20: note = Target: SCN10A; (+) strand; PAM type: YTN; PAM sequence: CTG
  source 1..20: mol_type = other DNA
taagtccaattaaacctctt

SEQ ID NO: 61489 - DNA, 20 bp, synthetic construct
  misc_feature 1..20: note = Description of Artificial Sequence: Synthetic oligonucleotide
  misc_feature 1..20: note = Target: SCN10A; (+) strand; PAM type: YTN; PAM sequence: TTA
  source 1..20: mol_type = other DNA
aacctctttcttttataaat

SEQ ID NO: 61490 - DNA, 20 bp, synthetic construct
  misc_feature 1..20: note = Description of Artificial Sequence: Synthetic oligonucleotide
  misc_feature 1..20: note = Target: SCN10A; (+) strand; PAM type: YTN; PAM sequence: CTC
  source 1..20: mol_type = other DNA
tttcttttataaattgccca

SEQ ID NO: 61491 - DNA, 20 bp, synthetic construct
  misc_feature 1..20: note = Description of Artificial Sequence: Synthetic oligonucleotide
  misc_feature 1..20: note = Target: SCN10A; (+) strand; PAM type: YTN; PAM sequence: CTT
  source 1..20: mol_type = other DNA
tcttttataaattgcccagt

SEQ ID NO: 61492 - DNA, 20 bp, synthetic construct
  misc_feature 1..20: note = Description of Artificial Sequence: Synthetic oligonucleotide
  misc_feature 1..20: note = Target: SCN10A; (+) strand; PAM type: YTN; PAM sequence: TTT
  source 1..20: mol_type = other DNA
cttttataaattgcccagtc

SEQ ID NO: 61493 - DNA, 20 bp, synthetic construct
  misc_feature 1..20: note = Description of Artificial Sequence: Synthetic oligonucleotide
  misc_feature 1..20: note = Target: SCN10A; (+) strand; PAM type: YTN; PAM sequence: TTC
  source 1..20: mol_type = other DNA
ttttataaattgcccagtct

SEQ ID NO: 61494 - DNA, 20 bp, synthetic construct
  misc_feature 1..20: note = Description of Artificial Sequence: Synthetic oligonucleotide
  misc_feature 1..20: note = Target: SCN10A; (+) strand; PAM type: YTN; PAM sequence: CTT
  source 1..20: mol_type = other DNA
ttataaattgcccagtctta

SEQ ID NO: 61495 - DNA, 20 bp, synthetic construct
  misc_feature 1..20: note = Description of Artificial Sequence: Synthetic oligonucleotide
  misc_feature 1..20: note = Target: SCN10A; (+) strand; PAM type: YTN; PAM sequence: TTT
  source 1..20: mol_type = other DNA
tataaattgcccagtcttag

SEQ ID NO: 61496 - DNA, 20 bp, synthetic construct
  misc_feature 1..20: note = Description of Artificial Sequence: Synthetic oligonucleotide
  misc_feature 1..20: note = Target: SCN10A; (+) strand; PAM type: YTN; PAM sequence: TTT
  source 1..20: mol_type = other DNA
ataaattgcccagtcttagg

SEQ ID NO: 61497 - DNA, 20 bp, synthetic construct
  misc_feature 1..20: note = Description of Artificial Sequence: Synthetic oligonucleotide
  misc_feature 1..20: note = Target: SCN10A; (+) strand; PAM type: YTN; PAM sequence: TTA
  source 1..20: mol_type = other DNA
taaattgcccagtcttaggt

SEQ ID NO: 61498 - DNA, 20 bp, synthetic construct
  misc_feature 1..20: note = Description of Artificial Sequence: Synthetic oligonucleotide
  misc_feature 1..20: note = Target: SCN10A; (+) strand; PAM type: YTN; PAM sequence: TTG
  source 1..20: mol_type = other DNA
cccagtcttaggtatgtctt

SEQ ID NO: 61499 - DNA, 20 bp, synthetic construct
  misc_feature 1..20: note = Description of Artificial Sequence: Synthetic oligonucleotide
  misc_feature 1..20: note = Target: SCN10A; (+) strand; PAM type: YTN; PAM sequence: CTT
  source 1..20: mol_type = other DNA
aggtatgtctttatcagcag

SEQ ID NO: 61500 - DNA, 20 bp, synthetic construct
  misc_feature 1..20: note = Description of Artificial Sequence: Synthetic oligonucleotide
  misc_feature 1..20: note = Target: SCN10A; (+) strand; PAM type: YTN; PAM sequence: TTA
  source 1..20: mol_type = other DNA
ggtatgtctttatcagcagc

SEQ ID NO: 61501 - DNA, 20 bp, synthetic construct
  misc_feature 1..20: note = Description of Artificial Sequence: Synthetic oligonucleotide
  misc_feature 1..20: note = Target: SCN10A; (+) strand; PAM type: YTN; PAM sequence: CTT
  source 1..20: mol_type = other DNA
tatcagcagcatgaaaatag

SEQ ID NO: 61502 - DNA, 20 bp, synthetic construct
  misc_feature 1..20: note = Description of Artificial Sequence: Synthetic oligonucleotide
  misc_feature 1..20: note = Target: SCN10A; (+) strand; PAM type: YTN; PAM sequence: TTT
  source 1..20: mol_type = other DNA
atcagcagcatgaaaataga

SEQ ID NO: 61503 - DNA, 20 bp, synthetic construct
  misc_feature 1..20: note = Description of Artificial Sequence: Synthetic oligonucleotide
  misc_feature 1..20: note = Target: SCN10A; (+) strand; PAM type: YTN; PAM sequence: TTA
  source 1..20: mol_type = other DNA
tcagcagcatgaaaatagac

SEQ ID NO: 61504 - DNA, 20 bp, synthetic construct
  misc_feature 1..20: note = Description of Artificial Sequence: Synthetic oligonucleotide
  misc_feature 1..20: note = Target: SCN10A; (+) strand; PAM type: YTN; PAM sequence: CTA
  source 1..20: mol_type = other DNA
atacaaatatatacaataaa

SEQ ID NO: 61505 - DNA, 20 bp, synthetic construct
  misc_feature 1..20: note = Description of Artificial Sequence: Synthetic oligonucleotide
  misc_feature 1..20: note = Target: SCN10A; (+) strand; PAM type: YTN; PAM sequence: TTT
  source 1..20: mol_type = other DNA
tttaaaattttaaaagataa

SEQ ID NO: 61506 - DNA, 20 bp, synthetic construct
  misc_feature 1..20: note = Description of Artificial Sequence: Synthetic oligonucleotide
  misc_feature 1..20: note = Target: SCN10A; (+) strand; PAM type: YTN; PAM sequence: TTT
  source 1..20: mol_type = other DNA
ttaaaattttaaaagataac

SEQ ID NO: 61507 - DNA, 20 bp, synthetic construct
  misc_feature 1..20: note = Description of Artificial Sequence: Synthetic oligonucleotide
  misc_feature 1..20: note = Target: SCN10A; (+) strand; PAM type: YTN; PAM sequence: TTT
  source 1..20: mol_type = other DNA
taaaattttaaaagataaca

SEQ ID NO: 61508 - DNA, 20 bp, synthetic construct
  misc_feature 1..20: note = Description of Artificial Sequence: Synthetic oligonucleotide
  misc_feature 1..20: note = Target: SCN10A; (+) strand; PAM type: YTN; PAM sequence: TTT
  source 1..20: mol_type = other DNA
aaaattttaaaagataacag

SEQ ID NO: 61509 - DNA, 20 bp, synthetic construct
  misc_feature 1..20: note = Description of Artificial Sequence: Synthetic oligonucleotide
  misc_feature 1..20: note = Target: SCN10A; (+) strand; PAM type: YTN; PAM sequence: TTA
  source 1..20: mol_type = other DNA
aaattttaaaagataacaga

SEQ ID NO: 61510 - DNA, 20 bp, synthetic construct
  misc_feature 1..20: note = Description of Artificial Sequence: Synthetic oligonucleotide
  misc_feature 1..20: note = Target: SCN10A; (+) strand; PAM type: YTN; PAM sequence: TTT
  source 1..20: mol_type = other DNA
taaaagataacagacacaaa

SEQ ID NO: 61511 - DNA, 20 bp, synthetic construct
  misc_feature 1..20: note = Description of Artificial Sequence: Synthetic oligonucleotide
  misc_feature 1..20: note = Target: SCN10A; (+) strand; PAM type: YTN; PAM sequence: TTT
  source 1..20: mol_type = other DNA
aaaagataacagacacaaaa

SEQ ID NO: 61512 - DNA, 20 bp, synthetic construct
  misc_feature 1..20: note = Description of Artificial Sequence: Synthetic oligonucleotide
  misc_feature 1..20: note = Target: SCN10A; (+) strand; PAM type: YTN; PAM sequence: TTA
  source 1..20: mol_type = other DNA
aaagataacagacacaaaaa

SEQ ID NO: 61513 - DNA, 20 bp, synthetic construct
  misc_feature 1..20: note = Description of Artificial Sequence: Synthetic oligonucleotide
  misc_feature 1..20: note = Target: SCN10A; (+) strand; PAM type: YTN; PAM sequence: TTG
  source 1..20: mol_type = other DNA
aatggaaggatgggagaaac

SEQ ID NO: 61514 - DNA, 20 bp, synthetic construct
  misc_feature 1..20: note = Description of Artificial Sequence: Synthetic oligonucleotide
  misc_feature 1..20: note = Target: SCN10A; (+) strand; PAM type: YTN; PAM sequence: CTG
  source 1..20: mol_type = other DNA
ggtaaaatgactaatgcatg

SEQ ID NO: 61515 - DNA, 20 bp, synthetic construct
  misc_feature 1..20: note = Description of Artificial Sequence: Synthetic oligonucleotide
  misc_feature 1..20: note = Target: SCN10A; (+) strand; PAM type: YTN; PAM sequence: CTA
  source 1..20: mol_type = other DNA
atgcatgaatggaaagatgg

SEQ ID NO: 61516 - DNA, 20 bp, synthetic construct
  misc_feature 1..20: note = Description of Artificial Sequence: Synthetic oligonucleotide
  misc_feature 1..20: note = Target: SCN10A; (+) strand; PAM type: YTN; PAM sequence: CTG
  source 1..20: mol_type = other DNA
gacagaatagatgaatggaa

SEQ ID NO: 61517 - DNA, 20 bp, synthetic construct
  misc_feature 1..20: note = Description of Artificial Sequence: Synthetic oligonucleotide
  misc_feature 1..20: note = Target: SCN10A; (+) strand; PAM type: YTN; PAM sequence: TTA
  source 1..20: mol_type = other DNA
gtgaatgactggaaggttga

SEQ ID NO: 61518 - DNA, 20 bp, synthetic construct
  misc_feature 1..20: note = Description of Artificial Sequence: Synthetic oligonucleotide
  misc_feature 1..20: note = Target: SCN10A; (+) strand; PAM type: YTN; PAM sequence: CTG
  source 1..20: mol_type = other DNA
gaaggttgataggatggatg

SEQ ID NO: 61519 - DNA, 20 bp, synthetic construct
  misc_feature 1..20: note = Description of Artificial Sequence: Synthetic oligonucleotide
  misc_feature 1..20: note = Target: SCN10A; (+) strand; PAM type: YTN; PAM sequence: TTG
  source 1..20: mol_type = other DNA
ataggatggatgaatggatg

SEQ ID NO: 61520 - DNA, 20 bp, synthetic construct
  misc_feature 1..20: note = Description of Artificial Sequence: Synthetic oligonucleotide
  misc_feature 1..20: note = Target: SCN10A; (+) strand; PAM type: YTN; PAM sequence: TTG
  source 1..20: mol_type = other DNA
aaacaagaatggaaagatag

SEQ ID NO: 61521 - DNA, 20 bp, synthetic construct
  misc_feature 1..20: note = Description of Artificial Sequence: Synthetic oligonucleotide
  misc_feature 1..20: note = Target: SCN10A; (+) strand; PAM type: YTN; PAM sequence: CTT
  source 1..20: mol_type = other DNA
ggatggaagatgcgtgaatg

SEQ ID NO: 61522 - DNA, 20 bp, synthetic construct
  misc_feature 1..20: note = Description of Artificial Sequence: Synthetic oligonucleotide
  misc_feature 1..20: note = Target: SCN10A; (+) strand; PAM type: YTN; PAM sequence: TTG
  source 1..20: mol_type = other DNA
gatggaagatgcgtgaatga

SEQ ID NO: 61523 - DNA, 20 bp, synthetic construct
  misc_feature 1..20: note = Description of Artificial Sequence: Synthetic oligonucleotide
  misc_feature 1..20: note = Target: SCN10A; (+) strand; PAM type: YTN; PAM sequence: TTA
  source 1..20: mol_type = other DNA
gatgattggacagttggata

SEQ ID NO: 61524 - DNA, 20 bp, synthetic construct
  misc_feature 1..20: note = Description of Artificial Sequence: Synthetic oligonucleotide
  misc_feature 1..20: note = Target: SCN10A; (+) strand; PAM type: YTN; PAM sequence: TTG
  source 1..20: mol_type = other DNA
gacagttggatagaagaatg

SEQ ID NO: 61525 - DNA, 20 bp, synthetic construct
  misc_feature 1..20: note = Description of Artificial Sequence: Synthetic oligonucleotide
  misc_feature 1..20: note = Target: SCN10A; (+) strand; PAM type: YTN; PAM sequence: TTG
  source 1..20: mol_type = other DNA
gatagaagaatgaatcaaaa

SEQ ID NO: 61526 - DNA, 20 bp, synthetic construct
  misc_feature 1..20: note = Description of Artificial Sequence: Synthetic oligonucleotide
  misc_feature 1..20: note = Target: SCN10A; (+) strand; PAM type: YTN; PAM sequence: TTA
  source 1..20: mol_type = other DNA
aggatgatgaatagatggaa

SEQ ID NO: 61527 - DNA, 20 bp, synthetic construct
  misc_feature 1..20: note = Description of Artificial Sequence: Synthetic oligonucleotide
  misc_feature 1..20: note = Target: SCN10A; (+) strand; PAM type: YTN; PAM sequence: TTT
  source 1..20: mol_type = other DNA
agaataaaagattgggcaga

SEQ ID NO: 61528 - DNA, 20 bp, synthetic construct
  misc_feature 1..20: note = Description of Artificial Sequence: Synthetic oligonucleotide
  misc_feature 1..20: note = Target: SCN10A; (+) strand; PAM type: YTN; PAM sequence: TTA
  source 1..20: mol_type = other DNA
gaataaaagattgggcagaa

SEQ ID NO: 61529 - DNA, 20 bp, synthetic construct
  misc_feature 1..20: note = Description of Artificial Sequence: Synthetic oligonucleotide
  misc_feature 1..20: note = Target: SCN10A; (+) strand; PAM type: YTN; PAM sequence: TTG
  source 1..20: mol_type = other DNA
ggcagaagagaagagggaaa

SEQ ID NO: 61530 - DNA, 20 bp, synthetic construct
  misc_feature 1..20: note = Description of Artificial Sequence: Synthetic oligonucleotide
  misc_feature 1..20: note = Target: SCN10A; (+) strand; PAM type: YTN; PAM sequence: CTG
  source 1..20: mol_type = other DNA
atgaagatgtacagctggaa

SEQ ID NO: 61531 - DNA, 20 bp, synthetic construct
  misc_feature 1..20: note = Description of Artificial Sequence: Synthetic oligonucleotide
  misc_feature 1..20: note = Target: SCN10A; (+) strand; PAM type: YTN; PAM sequence: CTG
  source 1..20: mol_type = other DNA
gaagaaataaagatggatgg

SEQ ID NO: 61532 - DNA, 20 bp, synthetic construct
  misc_feature 1..20: note = Description of Artificial Sequence: Synthetic oligonucleotide
  misc_feature 1..20: note = Target: SCN10A; (+) strand; PAM type: YTN; PAM sequence: TTT
  source 1..20: mol_type = other DNA
gggaggaaggaaaaaggaag

SEQ ID NO: 61533 - DNA, 20 bp, synthetic construct
  misc_feature 1..20: note = Description of Artificial Sequence: Synthetic oligonucleotide
  misc_feature 1..20: note = Target: SCN10A; (+) strand; PAM type: YTN; PAM sequence: TTG
  source 1..20: mol_type = other DNA
ggaggaaggaaaaaggaaga

SEQ ID NO: 61534 - DNA, 20 bp, synthetic construct
  misc_feature 1..20: note = Description of Artificial Sequence: Synthetic oligonucleotide
  misc_feature 1..20: note = Target: SCN10A; (+) strand; PAM type: YTN; PAM sequence: CTG
  source 1..20: mol_type = other DNA
aatggttggatacaaaaggt

SEQ ID NO: 61535 - DNA, 20 bp, synthetic construct
  misc_feature 1..20: note = Description of Artificial Sequence: Synthetic oligonucleotide
  misc_feature 1..20: note = Target: SCN10A; (+) strand; PAM type: YTN; PAM sequence: TTG
  source 1..20: mol_type = other DNA
gatacaaaaggtgaaatgta

SEQ ID NO: 61536 - DNA, 20 bp, synthetic construct
  misc_feature 1..20: note = Description of Artificial Sequence: Synthetic oligonucleotide
  misc_feature 1..20: note = Target: SCN10A; (+) strand; PAM type: YTN; PAM sequence: TTG
  source 1..20: mol_type = other DNA
gaaggaagaatcagtaggaa

SEQ ID NO: 61537 - DNA, 20 bp, synthetic construct
  misc_feature 1..20: note = Description of Artificial Sequence: Synthetic oligonucleotide
  misc_feature 1..20: note = Target: SCN10A; (+) strand; PAM type: YTN; PAM sequence: TTT
  source 1..20: mol_type = other DNA
aaggtgattaggactgagac

SEQ ID NO: 61538 - DNA, 20 bp, synthetic construct
  misc_feature 1..20: note = Description of Artificial Sequence: Synthetic oligonucleotide
  misc_feature 1..20: note = Target: SCN10A; (+) strand; PAM type: YTN; PAM sequence: TTA
  source 1..20: mol_type = other DNA
aggtgattaggactgagact

SEQ ID NO: 61539 - DNA, 20 bp, synthetic construct
  misc_feature 1..20: note = Description of Artificial Sequence: Synthetic oligonucleotide
  misc_feature 1..20: note = Target: SCN10A; (+) strand; PAM type: YTN; PAM sequence: TTA
  source 1..20: mol_type = other DNA
ggactgagactggtgagatc

SEQ ID NO: 61540 - DNA, 20 bp, synthetic construct
  misc_feature 1..20: note = Description of Artificial Sequence: Synthetic oligonucleotide
  misc_feature 1..20: note = Target: SCN10A; (+) strand; PAM type: YTN; PAM sequence: CTG
  source 1..20: mol_type = other DNA
agactggtgagatcaacata

SEQ ID NO: 61541 - DNA, 20 bp, synthetic construct
  misc_feature 1..20: note = Description of Artificial Sequence: Synthetic oligonucleotide
  misc_feature 1..20: note = Target: SCN10A; (+) strand; PAM type: YTN; PAM sequence: CTG
  source 1..20: mol_type = other DNA
gtgagatcaacataagcagg

SEQ ID NO: 61542 - DNA, 20 bp, synthetic construct
  misc_feature 1..20: note = Description of Artificial Sequence: Synthetic oligonucleotide
  misc_feature 1..20: note = Target: SCN10A; (+) strand; PAM type: YTN; PAM sequence: CTG
  source 1..20: mol_type = other DNA
tgcccccaaaggggtgggac

SEQ ID NO: 61543 - DNA, 20 bp, synthetic construct
  misc_feature 1..20: note = Description of Artificial Sequence: Synthetic oligonucleotide
  misc_feature 1..20: note = Target: SCN10A; (+) strand; PAM type: YTN; PAM sequence: TTT
  source 1..20: mol_type = other DNA
tcctttcatttatgaataat

SEQ ID NO: 61544 - DNA, 20 bp, synthetic construct
  misc_feature 1..20: note = Description of Artificial Sequence: Synthetic oligonucleotide
  misc_feature 1..20: note = Target: SCN10A; (+) strand; PAM type: YTN; PAM sequence: TTT
  source 1..20: mol_type = other DNA
cctttcatttatgaataatt

SEQ ID NO: 61545 - DNA, 20 bp, synthetic construct
  misc_feature 1..20: note = Description of Artificial Sequence: Synthetic oligonucleotide
  misc_feature 1..20: note = Target: SCN10A; (+) strand; PAM type: YTN; PAM sequence: TTC
  source 1..20: mol_type = other DNA
ctttcatttatgaataatta

SEQ ID NO: 61546 - DNA, 20 bp, synthetic construct
  misc_feature 1..20: note = Description of Artificial Sequence: Synthetic oligonucleotide
  misc_feature 1..20: note = Target: SCN10A; (+) strand; PAM type: YTN; PAM sequence: CTT
  source 1..20: mol_type = other DNA
tcatttatgaataattattt

SEQ ID NO: 61547 - DNA, 20 bp, synthetic construct
  misc_feature 1..20: note = Description of Artificial Sequence: Synthetic oligonucleotide
  misc_feature 1..20: note = Target: SCN10A; (+) strand; PAM type: YTN; PAM sequence: TTT
  source 1..20: mol_type = other DNA
catttatgaataattatttc

SEQ ID NO: 61548 - DNA, 20 bp, synthetic construct
  misc_feature 1..20: note = Description of Artificial Sequence: Synthetic oligonucleotide
  misc_feature 1..20: note = Target: SCN10A; (+) strand; PAM type: YTN; PAM sequence: TTC
  source 1..20: mol_type = other DNA
atttatgaataattatttca

SEQ ID NO: 61549 - DNA, 20 bp, synthetic construct
  misc_feature 1..20: note = Description of Artificial Sequence: Synthetic oligonucleotide
  misc_feature 1..20: note = Target: SCN10A; (+) strand; PAM type: YTN; PAM sequence: TTT
  source 1..20: mol_type = other DNA
atgaataattatttcatatg

SEQ ID NO: 61550 - DNA, 20 bp, synthetic construct
  misc_feature 1..20: note = Description of Artificial Sequence: Synthetic oligonucleotide
  misc_feature 1..20: note = Target: SCN10A; (+) strand; PAM type: YTN; PAM sequence: TTA
  source 1..20: mol_type = other DNA
tgaataattatttcatatgc

SEQ ID NO: 61551 - DNA, 20 bp, synthetic construct
  misc_feature 1..20: note = Description of Artificial Sequence: Synthetic oligonucleotide
  misc_feature 1..20: note = Target: SCN10A; (+) strand; PAM type: YTN; PAM sequence: TTA
  source 1..20: mol_type = other DNA
tttcatatgcacagaattat

SEQ ID NO: 61552 - DNA, 20 bp, synthetic construct
  misc_feature 1..20: note = Description of Artificial Sequence: Synthetic oligonucleotide
  misc_feature 1..20: note = Target: SCN10A; (+) strand; PAM type: YTN; PAM sequence: TTT
  source 1..20: mol_type = other DNA
catatgcacagaattatcac

SEQ ID NO: 61553 - DNA, 20 bp, synthetic construct
  misc_feature 1..20: note = Description of Artificial Sequence: Synthetic oligonucleotide
  misc_feature 1..20: note = Target: SCN10A; (+) strand; PAM type: YTN; PAM sequence: TTC
  source 1..20: mol_type = other DNA
atatgcacagaattatcacc

SEQ ID NO: 61554 - DNA, 20 bp, synthetic construct
  misc_feature 1..20: note = Description of Artificial Sequence: Synthetic oligonucleotide
  misc_feature 1..20: note = Target: SCN10A; (+) strand; PAM type: YTN; PAM sequence: TTA
  source 1..20: mol_type = other DNA
tcacccatgactcagatttc

SEQ ID NO: 61555 - DNA, 20 bp, synthetic construct
  misc_feature 1..20: note = Description of Artificial Sequence: Synthetic oligonucleotide
  misc_feature 1..20: note = Target: SCN10A; (+) strand; PAM type: YTN; PAM sequence: CTC
  source 1..20: mol_type = other DNA
agatttcaggcctcacagct

SEQ ID NO: 61556 - DNA, 20 bp, synthetic construct
  misc_feature 1..20: note = Description of Artificial Sequence: Synthetic oligonucleotide
  misc_feature 1..20: note = Target: SCN10A; (+) strand; PAM type: YTN; PAM sequence: TTT
  source 1..20: mol_type = other DNA
caggcctcacagctaatcct

SEQ ID NO: 61557 - DNA, 20 bp, synthetic construct
  misc_feature 1..20: note = Description of Artificial Sequence: Synthetic oligonucleotide
  misc_feature 1..20: note = Target: SCN10A; (+) strand; PAM type: YTN; PAM sequence: TTC
  source 1..20: mol_type = other DNA
aggcctcacagctaatcctt

SEQ ID NO: 61558 - DNA, 20 bp, synthetic construct
  misc_feature 1..20: note = Description of Artificial Sequence: Synthetic oligonucleotide
  misc_feature 1..20: note = Target: SCN10A; (+) strand; PAM type: YTN; PAM sequence: CTC
  source 1..20: mol_type = other DNA
acagctaatccttgtggtac

SEQ ID NO: 61559 - DNA, 20 bp, synthetic construct
  misc_feature 1..20: note = Description of Artificial Sequence: Synthetic oligonucleotide
  misc_feature 1..20: note = Target: SCN10A; (+) strand; PAM type: YTN; PAM sequence: CTA
  source 1..20: mol_type = other DNA
atccttgtggtacagtggcc

SEQ ID NO: 61560 - DNA, 20 bp, synthetic construct
  misc_feature 1..20: note = Description of Artificial Sequence: Synthetic oligonucleotide
  misc_feature 1..20: note = Target: SCN10A; (+) strand; PAM type: YTN; PAM sequence: CTT
  source 1..20: mol_type = other DNA
gtggtacagtggcctgaagc

SEQ ID NO: 61561 - DNA, 20 bp, synthetic construct
  misc_feature 1..20: note = Description of Artificial Sequence: Synthetic oligonucleotide
  misc_feature 1..20: note = Target: SCN10A; (+) strand; PAM type: YTN; PAM sequence: TTG
  source 1..20: mol_type = other DNA
tggtacagtggcctgaagct

SEQ ID NO: 61562 - DNA, 20 bp, synthetic construct
  misc_feature 1..20: note = Description of Artificial Sequence: Synthetic oligonucleotide
  misc_feature 1..20: note = Target: SCN10A; (+) strand; PAM type: YTN; PAM sequence: CTG
  source 1..20: mol_type = other DNA
aagctgctagtgcattggca

SEQ ID NO: 61563 - DNA, 20 bp, synthetic construct
  misc_feature 1..20: note = Description of Artificial Sequence: Synthetic oligonucleotide
  misc_feature 1..20: note = Target: SCN10A; (+) strand; PAM type: YTN; PAM sequence: CTG
  source 1..20: mol_type = other DNA
ctagtgcattggcatcaggg

SEQ ID NO: 61564 - DNA, 20 bp, synthetic construct
  misc_feature 1..20: note = Description of Artificial Sequence: Synthetic oligonucleotide
  misc_feature 1..20: note = Target: SCN10A; (+) strand; PAM type: YTN; PAM sequence: CTA
  source 1..20: mol_type = other DNA
gtgcattggcatcagggaag

SEQ ID NO: 61565 - DNA, 20 bp, synthetic construct
  misc_feature 1..20: note = Description of Artificial Sequence: Synthetic oligonucleotide
  misc_feature 1..20: note = Target: SCN10A; (+) strand; PAM type: YTN; PAM sequence: TTG
  source 1..20: mol_type = other DNA
gcatcagggaagaagagaat

SEQ ID NO: 61566 - DNA, 20 bp, synthetic construct
  misc_feature 1..20: note = Description of Artificial Sequence: Synthetic oligonucleotide
  misc_feature 1..20: note = Target: SCN10A; (+) strand; PAM type: YTN; PAM sequence: TTG
  source 1..20: mol_type = other DNA
aatgcacaggcctgctatgg

SEQ ID NO: 61567 - DNA, 20 bp, synthetic construct
  misc_feature 1..20: note = Description of Artificial Sequence: Synthetic oligonucleotide
  misc_feature 1..20: note = Target: SCN10A; (+) strand; PAM type: YTN; PAM sequence: CTG
  source 1..20: mol_type = other DNA
ctatggaggacctgccagca

SEQ ID NO: 61568 - DNA, 20 bp, synthetic construct
  misc_feature 1..20: note = Description of Artificial Sequence: Synthetic oligonucleotide
  misc_feature 1..20: note = Target: SCN10A; (+) strand; PAM type: YTN; PAM sequence: CTA
  source 1..20: mol_type = other DNA
tggaggacctgccagcacag

SEQ ID NO: 61569 - DNA, 20 bp, synthetic construct
  misc_feature 1..20: note = Description of Artificial Sequence: Synthetic oligonucleotide
  misc_feature 1..20: note = Target: SCN10A; (+) strand; PAM type: YTN; PAM sequence: CTG
  source 1..20: mol_type = other DNA
ccagcacaggaggctggaca

SEQ ID NO: 61570 - DNA, 20 bp, synthetic construct
  misc_feature 1..20: note = Description of Artificial Sequence: Synthetic oligonucleotide
  misc_feature 1..20: note = Target: SCN10A; (+) strand; PAM type: YTN; PAM sequence: CTG
  source 1..20: mol_type = other DNA
gacagaatgttctgtgctga

SEQ ID NO: 61571 - DNA, 20 bp, synthetic construct
  misc_feature 1..20: note = Description of Artificial Sequence: Synthetic oligonucleotide
  misc_feature 1..20: note = Target: SCN10A; (+) strand; PAM type: YTN; PAM sequence: TTC
  source 1..20: mol_type = other DNA
tgtgctgaacctcatccagc

SEQ ID NO: 61572 - DNA, 20 bp, synthetic construct
  misc_feature 1..20: note = Description of Artificial Sequence: Synthetic oligonucleotide
  misc_feature 1..20: note = Target: SCN10A; (+) strand; PAM type: YTN; PAM sequence: CTG
  source 1..20: mol_type = other DNA
tgctgaacctcatccagctt

SEQ ID NO: 61573 - DNA, 20 bp, synthetic construct
  misc_feature 1..20: note = Description of Artificial Sequence: Synthetic oligonucleotide
  misc_feature 1..20: note = Target: SCN10A; (+) strand; PAM type: YTN; PAM sequence: CTG
  source 1..20: mol_type = other DNA
aacctcatccagcttcagga

SEQ ID NO: 61574 - DNA, 20 bp, synthetic construct
  misc_feature 1..20: note = Description of Artificial Sequence: Synthetic oligonucleotide
  misc_feature 1..20: note = Target: SCN10A; (+) strand; PAM type: YTN; PAM sequence: CTC
  source 1..20: mol_type = other DNA
atccagcttcaggaggcaag

SEQ ID NO: 61575 - DNA, 20 bp, synthetic construct
  misc_feature 1..20: note = Description of Artificial Sequence: Synthetic oligonucleotide
  misc_feature 1..20: note = Target: SCN10A; (+) strand; PAM type: YTN; PAM sequence: CTT
  source 1..20: mol_type = other DNA
caggaggcaagcaccaaata

SEQ ID NO: 61576 - DNA, 20 bp, synthetic construct
  misc_feature 1..20: note = Description of Artificial Sequence: Synthetic oligonucleotide
  misc_feature 1..20: note = Target: SCN10A; (+) strand; PAM type: YTN; PAM sequence: TTC
  source 1..20: mol_type = other DNA
aggaggcaagcaccaaatac

SEQ ID NO: 61577 - DNA, 20 bp, synthetic construct
  misc_feature 1..20: note = Description of Artificial Sequence: Synthetic oligonucleotide
  misc_feature 1..20: note = Target: SCN10A; (+) strand; PAM type: YTN; PAM sequence: TTT
  source 1..20: mol_type = other DNA
cctgacacctctgctgggca

SEQ ID NO: 61578 - DNA, 20 bp, synthetic construct
  misc_feature 1..20: note = Description of Artificial Sequence: Synthetic oligonucleotide
  misc_feature 1..20: note = Target: SCN10A; (+) strand; PAM type: YTN; PAM sequence: TTC
  source 1..20: mol_type = other DNA
ctgacacctctgctgggcag

SEQ ID NO: 61579 - DNA, 20 bp, synthetic construct
  misc_feature 1..20: note = Description of Artificial Sequence: Synthetic oligonucleotide
  misc_feature 1..20: note = Target: SCN10A; (+) strand; PAM type: YTN; PAM sequence: CTG
  source 1..20: mol_type = other DNA
acacctctgctgggcagacc

SEQ ID NO: 61580 - DNA, 20 bp, synthetic construct
  misc_feature 1..20: note = Description of Artificial Sequence: Synthetic oligonucleotide
  misc_feature 1..20: note = Target: SCN10A; (+) strand; PAM type: YTN; PAM sequence: CTC
  source 1..20: mol_type = other DNA
tgctgggcagaccttgctgc

SEQ ID NO: 61581 - DNA, 20 bp, synthetic construct
  misc_feature 1..20: note = Description of Artificial Sequence: Synthetic oligonucleotide
  misc_feature 1..20: note = Target: SCN10A; (+) strand; PAM type: YTN; PAM sequence: CTG
  source 1..20: mol_type = other DNA
ctgggcagaccttgctgctg

SEQ ID NO: 61582 - DNA, 20 bp, synthetic construct
  misc_feature 1..20: note = Description of Artificial Sequence: Synthetic oligonucleotide
  misc_feature 1..20: note = Target: SCN10A; (+) strand; PAM type: YTN; PAM sequence: CTG
  source 1..20: mol_type = other DNA
ggcagaccttgctgctggca

SEQ ID NO: 61583 - DNA, 20 bp, synthetic construct
  misc_feature 1..20: note = Description of Artificial Sequence: Synthetic oligonucleotide
  misc_feature 1..20: note = Target: SCN10A; (+) strand; PAM type: YTN; PAM sequence: CTT
  source 1..20: mol_type = other DNA
gctgctggcagctgcttgag

SEQ ID NO: 61584 - DNA, 20 bp, synthetic construct
  misc_feature 1..20: note = Description of Artificial Sequence: Synthetic oligonucleotide
  misc_feature 1..20: note = Target: SCN10A; (+) strand; PAM type: YTN; PAM sequence: TTG
  source 1..20: mol_type = other DNA
ctgctggcagctgcttgagt

SEQ ID NO: 61585 - DNA, 20 bp, synthetic construct
  misc_feature 1..20: note = Description of Artificial Sequence: Synthetic oligonucleotide
  misc_feature 1..20: note = Target: SCN10A; (+) strand; PAM type: YTN; PAM sequence: CTG
  source 1..20: mol_type = other DNA
ctggcagctgcttgagtggg

SEQ ID NO: 61586 - DNA, 20 bp, synthetic construct
  misc_feature 1..20: note = Description of Artificial Sequence: Synthetic oligonucleotide
  misc_feature 1..20: note = Target: SCN10A; (+) strand; PAM type: YTN; PAM sequence: CTG
  source 1..20: mol_type = other DNA
gcagctgcttgagtggggca

SEQ ID NO: 61587 - DNA, 20 bp, synthetic construct
  misc_feature 1..20: note = Description of Artificial Sequence: Synthetic oligonucleotide
  misc_feature 1..20: note = Target: SCN10A; (+) strand; PAM type: YTN; PAM sequence: CTG
  source 1..20: mol_type = other DNA
cttgagtggggcaggcagag

SEQ ID NO: 61588 - DNA, 20 bp, synthetic construct
  misc_feature 1..20: note = Description of Artificial Sequence: Synthetic oligonucleotide
  misc_feature 1..20: note = Target: SCN10A; (+) strand; PAM type: YTN; PAM sequence: CTT
  source 1..20: mol_type = other DNA
gagtggggcaggcagagacc

SEQ ID NO: 61589 - DNA, 20 bp, synthetic construct
  misc_feature 1..20: note = Description of Artificial Sequence: Synthetic oligonucleotide
  misc_feature 1..20: note = Target: SCN10A; (+) strand; PAM type: YTN; PAM sequence: TTG
  source 1..20: mol_type = other DNA
agtggggcaggcagagacca

SEQ ID NO: 61590 - DNA, 20 bp, synthetic construct
  misc_feature 1..20: note = Description of Artificial Sequence: Synthetic oligonucleotide
  misc_feature 1..20: note = Target: SCN10A; (+) strand; PAM type: YTN; PAM sequence: CTC
  source 1..20: mol_type = other DNA
accctgcttgcagaaaccct

SEQ ID NO: 61591 - DNA, 20 bp, synthetic construct
  misc_feature 1..20: note = Description of Artificial Sequence: Synthetic oligonucleotide
  misc_feature 1..20: note = Target: SCN10A; (+) strand; PAM type: YTN; PAM sequence: CTG
  source 1..20: mol_type = other DNA
cttgcagaaaccctcagcta

SEQ ID NO: 61592 - DNA, 20 bp, synthetic construct
  misc_feature 1..20: note = Description of Artificial Sequence: Synthetic oligonucleotide
  misc_feature 1..20: note = Target: SCN10A; (+) strand; PAM type: YTN; PAM sequence: CTT
  source 1..20: mol_type = other DNA
gcagaaaccctcagctatgc

SEQ ID NO: 61593 - DNA, 20 bp, synthetic construct
  misc_feature 1..20: note = Description of Artificial Sequence: Synthetic oligonucleotide
  misc_feature 1..20: note = Target: SCN10A; (+) strand; PAM type: YTN; PAM sequence: TTG
  source 1..20: mol_type = other DNA
cagaaaccctcagctatgcg

SEQ ID NO: 61594 - DNA, 20 bp, synthetic construct
  misc_feature 1..20: note = Description of Artificial Sequence: Synthetic oligonucleotide
  misc_feature 1..20: note = Target: SCN10A; (+) strand; PAM type: YTN; PAM sequence: CTC
  source 1..20: mol_type = other DNA
agctatgcggcagtgaacag

SEQ ID NO: 61595 - DNA, 20 bp, synthetic construct
  misc_feature 1..20: note = Description of Artificial Sequence: Synthetic oligonucleotide
  misc_feature 1..20: note = Target: SCN10A; (+) strand; PAM type: YTN; PAM sequence: CTA
  source 1..20: mol_type = other DNA
tgcggcagtgaacagataac

SEQ ID NO: 61596 - DNA, 20 bp, synthetic construct
  misc_feature 1..20: note = Description of Artificial Sequence: Synthetic oligonucleotide
  misc_feature 1..20: note = Target: SCN10A; (+) strand; PAM type: YTN; PAM sequence: CTC
  source 1..20: mol_type = other DNA
agttaaccatgctgcaaagc

SEQ ID NO: 61597 - DNA, 20 bp, synthetic construct
  misc_feature 1..20: note = Description of Artificial Sequence: Synthetic oligonucleotide
  misc_feature 1..20: note = Target: SCN10A; (+) strand; PAM type: YTN; PAM sequence: TTA
  source 1..20: mol_type = other DNA
accatgctgcaaagcaaaga

SEQ ID NO: 61598 - DNA, 20 bp, synthetic construct
  misc_feature 1..20: note = Description of Artificial Sequence: Synthetic oligonucleotide
  misc_feature 1..20: note = Target: SCN10A; (+) strand; PAM type: YTN; PAM sequence: CTG
  source 1..20: mol_type = other DNA
caaagcaaagaaggtagtgg

SEQ ID NO: 61599 - DNA, 20 bp, synthetic construct
  misc_feature 1..20: note = Description of Artificial Sequence: Synthetic oligonucleotide
  misc_feature 1..20: note = Target: SCN10A; (+) strand; PAM type: YTN; PAM sequence: CTA
  source 1..20: mol_type = other DNA
gacagtgatagtgcaatgtg

SEQ ID NO: 61600 - DNA, 20 bp, synthetic construct
  misc_feature 1..20: note = Description of Artificial Sequence: Synthetic oligonucleotide
  misc_feature 1..20: note = Target: SCN10A; (+) strand; PAM type: YTN; PAM sequence: TTA
  source 1..20: mol_type = other DNA
agatgaggaagagatgactg

SEQ ID NO: 61601 - DNA, 20 bp, synthetic construct
  misc_feature 1..20: note = Description of Artificial Sequence: Synthetic oligonucleotide
  misc_feature 1..20: note = Target: SCN10A; (+) strand; PAM type: YTN; PAM sequence: CTG
  source 1..20: mol_type = other DNA
aggaatcacatgtctgatgt

SEQ ID NO: 61602 - DNA, 20 bp, synthetic construct
  misc_feature 1..20: note = Description of Artificial Sequence: Synthetic oligonucleotide
  misc_feature 1..20: note = Target: SCN10A; (+) strand; PAM type: YTN; PAM sequence: CTG
  source 1..20: mol_type = other DNA
atgtgtgagaagcacacagt

SEQ ID NO: 61603 - DNA, 20 bp, synthetic construct
  misc_feature 1..20: note = Description of Artificial Sequence: Synthetic oligonucleotide
  misc_feature 1..20: note = Target: SCN10A; (+) strand; PAM type: YTN; PAM sequence: TTC
  source 1..20: mol_type = other DNA
tctaatgcagggattactgg

SEQ ID NO: 61604 - DNA, 20 bp, synthetic construct
  misc_feature 1..20: note = Description of Artificial Sequence: Synthetic oligonucleotide
  misc_feature 1..20: note = Target: SCN10A; (+) strand; PAM type: YTN; PAM sequence: CTC
  source 1..20: mol_type = other DNA
taatgcagggattactggcc

SEQ ID NO: 61605 - DNA, 20 bp, synthetic construct
  misc_feature 1..20: note = Description of Artificial Sequence: Synthetic oligonucleotide
  misc_feature 1..20: note = Target: SCN10A; (+) strand; PAM type: YTN; PAM sequence: CTA
  source 1..20: mol_type = other DNA
atgcagggattactggccac

SEQ ID NO: 61606 - DNA, 20 bp, synthetic construct
  misc_feature 1..20: note = Description of Artificial Sequence: Synthetic oligonucleotide
  misc_feature 1..20: note = Target: SCN10A; (+) strand; PAM type: YTN; PAM sequence: TTA
  source 1..20: mol_type = other DNA
ctggccacaggttaccatga

SEQ ID NO: 61607 - DNA, 20 bp, synthetic construct
  misc_feature 1..20: note = Description of Artificial Sequence: Synthetic oligonucleotide
  misc_feature 1..20: note = Target: SCN10A; (+) strand; PAM type: YTN; PAM sequence: CTG
  source 1..20: mol_type = other DNA
gccacaggttaccatgagtg

SEQ ID NO: 61608 - DNA, 20 bp, synthetic construct
  misc_feature 1..20: note = Description of Artificial Sequence: Synthetic oligonucleotide
  misc_feature 1..20: note = Target: SCN10A; (+) strand; PAM type: YTN; PAM sequence: TTA
  source 1..20: mol_type = other DNA
ccatgagtgtgaacacatga

SEQ ID NO: 61609 - DNA, 20 bp, synthetic construct
  misc_feature 1..20: note = Description of Artificial Sequence: Synthetic oligonucleotide
  misc_feature 1..20: note = Target: SCN10A; (+) strand; PAM type: YTN; PAM sequence: CTC
  source 1..20: mol_type = other DNA
cagctcattacctctccaaa

SEQ ID NO: 61610 - DNA, 20 bp, synthetic construct
  misc_feature 1..20: note = Description of Artificial Sequence: Synthetic oligonucleotide
  misc_feature 1..20: note = Target: SCN10A; (+) strand; PAM type: YTN; PAM sequence: CTC
  source 1..20: mol_type = other DNA
attacctctccaaatgcgcc

SEQ ID NO: 61611 - DNA, 20 bp, synthetic construct
  misc_feature 1..20: note = Description of Artificial Sequence: Synthetic oligonucleotide
  misc_feature 1..20: note = Target: SCN10A; (+) strand; PAM type: YTN; PAM sequence: TTA
  source 1..20: mol_type = other DNA
cctctccaaatgcgccctct

SEQ ID NO: 61612 - DNA, 20 bp, synthetic construct
  misc_feature 1..20: note = Description of Artificial Sequence: Synthetic oligonucleotide
  misc_feature 1..20: note = Target: SCN10A; (+) strand; PAM type: YTN; PAM sequence: CTC
  source 1..20: mol_type = other DNA
tccaaatgcgccctctgttc

SEQ ID NO: 61613 - DNA, 20 bp, synthetic construct
  misc_feature 1..20: note = Description of Artificial Sequence: Synthetic oligonucleotide
  misc_feature 1..20: note = Target: SCN10A; (+) strand; PAM type: YTN; PAM sequence: CTC
  source 1..20: mol_type = other DNA
caaatgcgccctctgttctt

SEQ ID NO: 61614 - DNA, 20 bp, synthetic construct
  misc_feature 1..20: note = Description of Artificial Sequence: Synthetic oligonucleotide
  misc_feature 1..20: note = Target: SCN10A; (+) strand; PAM type: YTN; PAM sequence: CTC
  source 1..20: mol_type = other DNA
tgttcttttcaatgccactg

SEQ ID NO: 61615 - DNA, 20 bp, synthetic construct
  misc_feature 1..20: note = Description of Artificial Sequence: Synthetic oligonucleotide
  misc_feature 1..20: note = Target: SCN10A; (+) strand; PAM type: YTN; PAM sequence: CTG
  source 1..20: mol_type = other DNA
ttcttttcaatgccactggg

SEQ ID NO: 61616 - DNA, 20 bp, synthetic construct
  misc_feature 1..20: note = Description of Artificial Sequence: Synthetic oligonucleotide
  misc_feature 1..20: note = Target: SCN10A; (+) strand; PAM type: YTN; PAM sequence: TTC
  source 1..20: mol_type = other DNA
ttttcaatgccactggggag

SEQ ID NO: 61617 - DNA, 20 bp, synthetic construct
  misc_feature 1..20: note = Description of Artificial Sequence: Synthetic oligonucleotide
  misc_feature 1..20: note = Target: SCN10A; (+) strand; PAM type: YTN; PAM sequence: CTT
  source 1..20: mol_type = other DNA
ttcaatgccactggggagga

SEQ ID NO: 61618 - DNA, 20 bp, synthetic construct
  misc_feature 1..20: note = Description of Artificial Sequence: Synthetic oligonucleotide
  misc_feature 1..20: note = Target: SCN10A; (+) strand; PAM type: YTN; PAM sequence: TTT
  source 1..20: mol_type = other DNA
tcaatgccactggggaggag

SEQ ID NO: 61619 - DNA, 20 bp, synthetic construct
  misc_feature 1..20: note = Description of Artificial Sequence: Synthetic oligonucleotide
  misc_feature 1..20: note = Target: SCN10A; (+) strand; PAM type: YTN; PAM sequence: TTT
  source 1..20: mol_type = other DNA
caatgccactggggaggagg

SEQ ID NO: 61620 - DNA, 20 bp, synthetic construct
  misc_feature 1..20: note = Description of Artificial Sequence: Synthetic oligonucleotide
  misc_feature 1..20: note = Target: SCN10A; (+) strand; PAM type: YTN; PAM sequence: TTC
  source 1..20: mol_type = other DNA
aatgccactggggaggaggc

SEQ ID NO: 61621 - DNA, 20 bp, synthetic construct
  misc_feature 1..20: note = Description of Artificial Sequence: Synthetic oligonucleotide
  misc_feature 1..20: note = Target: SCN10A; (+) strand; PAM type: YTN; PAM sequence: CTG
  source 1..20: mol_type = other DNA
gggaggaggcagcagtataa

SEQ ID NO: 61622 - DNA, 20 bp, synthetic construct
  misc_feature 1..20: note = Description of Artificial Sequence: Synthetic oligonucleotide
  misc_feature 1..20: note = Target: SCN10A; (+) strand; PAM type: YTN; PAM sequence: CTC
  source 1..20: mol_type = other DNA
agtggttctaagccatggct

SEQ ID NO: 61623 - DNA, 20 bp, synthetic construct
  misc_feature 1..20: note = Description of Artificial Sequence: Synthetic oligonucleotide
  misc_feature 1..20: note = Target: SCN10A; (+) strand; PAM type: YTN; PAM sequence: TTC
  source 1..20: mol_type = other DNA
taagccatggctgcaccttg

SEQ ID NO: 61624 - DNA, 20 bp, synthetic construct
  misc_feature 1..20: note = Description of Artificial Sequence: Synthetic oligonucleotide
  misc_feature 1..20: note = Target: SCN10A; (+) strand; PAM type: YTN; PAM sequence: CTA
  source 1..20: mol_type = other DNA
agccatggctgcaccttgga

SEQ ID NO: 61625 - DNA, 20 bp, synthetic construct
  misc_feature 1..20: note = Description of Artificial Sequence: Synthetic oligonucleotide
  misc_feature 1..20: note = Target: SCN10A; (+) strand; PAM type: YTN; PAM sequence: CTG
  source 1..20: mol_type = other DNA
caccttggaaatgcctggga

SEQ ID NO: 61626 - DNA, 20 bp, synthetic construct
  misc_feature 1..20: note = Description of Artificial Sequence: Synthetic oligonucleotide
  misc_feature 1..20: note = Target: SCN10A; (+) strand; PAM type: YTN; PAM sequence: CTT
  source 1..20: mol_type = other DNA
ggaaatgcctgggagcattt

SEQ ID NO: 61627 - DNA, 20 bp, synthetic construct
  misc_feature 1..20: note = Description of Artificial Sequence: Synthetic oligonucleotide
  misc_feature 1..20: note = Target: SCN10A; (+) strand; PAM type: YTN; PAM sequence: TTG
  source 1..20: mol_type = other DNA
gaaatgcctgggagcattta

SEQ ID NO: 61628 - DNA, 20 bp, synthetic construct
  misc_feature 1..20: note = Description of Artificial Sequence: Synthetic oligonucleotide
  misc_feature 1..20: note = Target: SCN10A; (+) strand; PAM type: YTN; PAM sequence: CTG
  source 1..20: mol_type = other DNA
ggagcatttataaaatacag

SEQ ID NO: 61629 - DNA, 20 bp, synthetic construct
  misc_feature 1..20: note = Description of Artificial Sequence: Synthetic oligonucleotide
  misc_feature 1..20: note = Target: SCN10A; (+) strand; PAM type: YTN; PAM sequence: TTT
  source 1..20: mol_type = other DNA
ataaaatacaggtgcctggg

SEQ ID NO: 61630 - DNA, 20 bp, synthetic construct
  misc_feature 1..20: note = Description of Artificial Sequence: Synthetic oligonucleotide
  misc_feature 1..20: note = Target: SCN10A; (+) strand; PAM type: YTN; PAM sequence: TTA
  source 1..20: mol_type = other DNA
taaaatacaggtgcctgggc

SEQ ID NO: 61631 - DNA, 20 bp, synthetic construct
  misc_feature 1..20: note = Description of Artificial Sequence: Synthetic oligonucleotide
  misc_feature 1..20: note = Target: SCN10A; (+) strand; PAM type: YTN; PAM sequence: CTG
  source 1..20: mol_type = other DNA
ggcaccacccaagaccaata

SEQ ID NO: 61632 - DNA, 20 bp, synthetic construct
  misc_feature 1..20: note = Description of Artificial Sequence: Synthetic oligonucleotide
  misc_feature 1..20: note = Target: SCN10A; (+) strand; PAM type: YTN; PAM sequence: CTC
  source 1..20: mol_type = other DNA
tggggtagtggtggtcggtc

SEQ ID NO: 61633 - DNA, 20 bp, synthetic construct
  misc_feature 1..20: note = Description of Artificial Sequence: Synthetic oligonucleotide
  misc_feature 1..20: note = Target: SCN10A; (+) strand; PAM type: YTN; PAM sequence: CTG
  source 1..20: mol_type = other DNA
gggtagtggtggtcggtcac

SEQ ID NO: 61634 - DNA, 20 bp, synthetic construct
  misc_feature 1..20: note = Description of Artificial Sequence: Synthetic oligonucleotide
  misc_feature 1..20: note = Target: SCN10A; (+) strand; PAM type: YTN; PAM sequence: CTG
  source 1..20: mol_type = other DNA
catatttcatagctccccag

SEQ ID NO: 61635 - DNA, 20 bp, synthetic construct
  misc_feature 1..20: note = Description of Artificial Sequence: Synthetic oligonucleotide
  misc_feature 1..20: note = Target: SCN10A; (+) strand; PAM type: YTN; PAM sequence: TTT
  source 1..20: mol_type = other DNA
catagctccccaggtgattc

SEQ ID NO: 61636 - DNA, 20 bp, synthetic construct
  misc_feature 1..20: note = Description of Artificial Sequence: Synthetic oligonucleotide
  misc_feature 1..20: note = Target: SCN10A; (+) strand; PAM type: YTN; PAM sequence: TTC
  source 1..20: mol_type = other DNA
atagctccccaggtgattct

SEQ ID NO: 61637 - DNA, 20 bp, synthetic construct
  misc_feature 1..20: note = Description of Artificial Sequence: Synthetic oligonucleotide
  misc_feature 1..20: note = Target: SCN10A; (+) strand; PAM type: YTN; PAM sequence: CTC
  source 1..20: mol_type = other DNA
cccaggtgattctcaagtgc

SEQ ID NO: 61638 - DNA, 20 bp, synthetic construct
  misc_feature 1..20: note = Description of Artificial Sequence: Synthetic oligonucleotide
  misc_feature 1..20: note = Target: SCN10A; (+) strand; PAM type: YTN; PAM sequence: TTC
  source 1..20: mol_type = other DNA
tcaagtgcagccaggtgtga

SEQ ID NO: 61639 - DNA, 20 bp, synthetic construct
  misc_feature 1..20: note = Description of Artificial Sequence: Synthetic oligonucleotide
  misc_feature 1..20: note = Target: SCN10A; (+) strand; PAM type: YTN; PAM sequence: CTC
  source 1..20: mol_type = other DNA
aagtgcagccaggtgtgagg

SEQ ID NO: 61640 - DNA, 20 bp, synthetic construct
  misc_feature 1..20: note = Description of Artificial Sequence: Synthetic oligonucleotide
  misc_feature 1..20: note = Target: SCN10A; (+) strand; PAM type: YTN; PAM sequence: TTC
  source 1..20: mol_type = other DNA
tctgtgctcacagttcatgg

SEQ ID NO: 61641 - DNA, 20 bp, synthetic construct
  misc_feature 1..20: note = Description of Artificial Sequence: Synthetic oligonucleotide
  misc_feature 1..20: note = Target: SCN10A; (+) strand; PAM type: YTN; PAM sequence: CTC
  source 1..20: mol_type = other DNA
tgtgctcacagttcatggct

SEQ ID NO: 61642 - DNA, 20 bp, synthetic construct
  misc_feature 1..20: note = Description of Artificial Sequence: Synthetic oligonucleotide
  misc_feature 1..20: note = Target: SCN10A; (+) strand; PAM type: YTN; PAM sequence: CTG
  source 1..20: mol_type = other DNA
tgctcacagttcatggctcc

SEQ ID NO: 61643 - DNA, 20 bp, synthetic construct
  misc_feature 1..20: note = Description of Artificial Sequence: Synthetic oligonucleotide
  misc_feature 1..20: note = Target: SCN10A; (+) strand; PAM type: YTN; PAM sequence: CTC
  source 1..20: mol_type = other DNA
acagttcatggctccccaag

SEQ ID NO: 61644 - DNA, 20 bp, synthetic construct
  misc_feature 1..20: note = Description of Artificial Sequence: Synthetic oligonucleotide
  misc_feature 1..20: note = Target: SCN10A; (+) strand; PAM type: YTN; PAM sequence: TTC
  source 1..20: mol_type = other DNA
atggctccccaaggtccaga

SEQ ID NO: 61645 - DNA, 20 bp, synthetic construct
  misc_feature 1..20: note = Description of Artificial Sequence: Synthetic oligonucleotide
  misc_feature 1..20: note = Target: SCN10A; (+) strand; PAM type: YTN; PAM sequence: CTC
  source 1..20: mol_type = other DNA
cccaaggtccagaagaccca

SEQ ID NO: 61646 - DNA, 20 bp, synthetic construct
  misc_feature 1..20: note = Description of Artificial Sequence: Synthetic oligonucleotide
  misc_feature 1..20: note = Target: SCN10A; (+) strand; PAM type: YTN; PAM sequence: CTA
  source 1..20: mol_type = other DNA
tggatgcagggccataagac

SEQ ID NO: 61647 - DNA, 20 bp, synthetic construct
  misc_feature 1..20: note = Description of Artificial Sequence: Synthetic oligonucleotide
  misc_feature 1..20: note = Target: SCN10A; (+) strand; PAM type: YTN; PAM sequence: CTC
  source 1..20: mol_type = other DNA
tgagagctgcatgtgtcatc

SEQ ID NO: 61648 - DNA, 20 bp, synthetic construct
  misc_feature 1..20: note = Description of Artificial Sequence: Synthetic oligonucleotide
  misc_feature 1..20: note = Target: SCN10A; (+) strand; PAM type: YTN; PAM sequence: CTG
  source 1..20: mol_type = other DNA
agagctgcatgtgtcatctc

SEQ ID NO: 61649 - DNA, 20 bp, synthetic construct
  misc_feature 1..20: note = Description of Artificial Sequence: Synthetic oligonucleotide
  misc_feature 1..20: note = Target: SCN10A; (+) strand; PAM type: YTN; PAM sequence: CTG
  source 1..20: mol_type = other DNA
catgtgtcatctcactttgg

SEQ ID NO: 61650 - DNA, 20 bp, synthetic construct
  misc_feature 1..20: note = Description of Artificial Sequence: Synthetic oligonucleotide
  misc_feature 1..20: note = Target: SCN10A; (+) strand; PAM type: YTN; PAM sequence: CTC
  source 1..20: mol_type = other DNA
actttggatgtaaaaatgca

SEQ ID NO: 61651 - DNA, 20 bp, synthetic construct
  misc_feature 1..20: note = Description of Artificial Sequence: Synthetic oligonucleotide
  misc_feature 1..20: note = Target: SCN10A; (+) strand; PAM type: YTN; PAM sequence: CTT
  source 1..20: mol_type = other DNA
tggatgtaaaaatgcagagg

SEQ ID NO: 61652 - DNA, 20 bp, synthetic construct
  misc_feature 1..20: note = Description of Artificial Sequence: Synthetic oligonucleotide
  misc_feature 1..20: note = Target: SCN10A; (+) strand; PAM type: YTN; PAM sequence: TTT
  source 1..20: mol_type = other DNA
ggatgtaaaaatgcagagga

SEQ ID NO: 61653 - DNA, 20 bp, synthetic construct
  misc_feature 1..20: note = Description of Artificial Sequence: Synthetic oligonucleotide
  misc_feature 1..20: note = Target: SCN10A; (+) strand; PAM type: YTN; PAM sequence: TTG
  source 1..20: mol_type = other DNA
gatgtaaaaatgcagaggat

SEQ ID NO: 61654 - DNA, 20 bp, synthetic construct
  misc_feature 1..20: note = Description of Artificial Sequence: Synthetic oligonucleotide
  misc_feature 1..20: note = Target: SCN10A; (+) strand; PAM type: YTN; PAM sequence: TTG
  source 1..20: mol_type = other DNA
cagggatctttctgaatgga

SEQ ID NO: 61655 - DNA, 20 bp, synthetic construct
  misc_feature 1..20: note = Description of Artificial Sequence: Synthetic oligonucleotide
  misc_feature 1..20: note = Target: SCN10A; (+) strand; PAM type: YTN; PAM sequence: CTT
  source 1..20: mol_type = other DNA
tctgaatggagacctaataa

SEQ ID NO: 61656 - DNA, 20 bp, synthetic construct
  misc_feature 1..20: note = Description of Artificial Sequence: Synthetic oligonucleotide
  misc_feature 1..20: note = Target: SCN10A; (+) strand; PAM type: YTN; PAM sequence: TTT
  source 1..20: mol_type = other DNA
ctgaatggagacctaataac

SEQ ID NO: 61657 - DNA, 20 bp, synthetic construct
  misc_feature 1..20: note = Description of Artificial Sequence: Synthetic oligonucleotide
  misc_feature 1..20: note = Target: SCN10A; (+) strand; PAM type: YTN; PAM sequence: TTC
  source 1..20: mol_type = other DNA
tgaatggagacctaataact

SEQ ID NO: 61658 - DNA, 20 bp, synthetic construct
  misc_feature 1..20: note = Description of Artificial Sequence: Synthetic oligonucleotide
  misc_feature 1..20: note = Target: SCN10A; (+) strand; PAM type: YTN; PAM sequence: CTG
  source 1..20: mol_type = other DNA
aatggagacctaataactca

SEQ ID NO: 61659 - DNA, 20 bp, synthetic construct
  misc_feature 1..20: note = Description of Artificial Sequence: Synthetic oligonucleotide
  misc_feature 1..20: note = Target: SCN10A; (+) strand; PAM type: YTN; PAM sequence: CTA
  source 1..20: mol_type = other DNA
ataactcacctaacagtcac

SEQ ID NO: 61660 - DNA, 20 bp, synthetic construct
  misc_feature 1..20: note = Description of Artificial Sequence: Synthetic oligonucleotide
  misc_feature 1..20: note = Target: SCN10A; (+) strand; PAM type: YTN; PAM sequence: CTC
  source 1..20: mol_type = other DNA
acctaacagtcactattgtg

SEQ ID NO: 61661 - DNA, 20 bp, synthetic construct
  misc_feature 1..20: note = Description of Artificial Sequence: Synthetic oligonucleotide
  misc_feature 1..20: note = Target: SCN10A; (+) strand; PAM type: YTN; PAM sequence: CTA
  source 1..20: mol_type = other DNA
acagtcactattgtgtcaca

SEQ ID NO: 61662 - DNA, 20 bp, synthetic construct
  misc_feature 1..20: note = Description of Artificial Sequence: Synthetic oligonucleotide
  misc_feature 1..20: note = Target: SCN10A; (+) strand; PAM type: YTN; PAM sequence: CTA
  source 1..20: mol_type = other DNA
ttgtgtcacagtcacatact

SEQ ID NO: 61663 - DNA, 20 bp, synthetic construct
  misc_feature 1..20: note = Description of Artificial Sequence: Synthetic oligonucleotide
  misc_feature 1..20: note = Target: SCN10A; (+) strand; PAM type: YTN; PAM sequence: TTG
  source 1..20: mol_type = other DNA
tgtcacagtcacatactgcc

SEQ ID NO: 61664 - DNA, 20 bp, synthetic construct
  misc_feature 1..20: note = Description of Artificial Sequence: Synthetic oligonucleotide
  misc_feature 1..20: note = Target: SCN10A; (+) strand; PAM type: YTN; PAM sequence: CTG
  source 1..20: mol_type = other DNA
cctggactttaccactcatg

SEQ ID NO: 61665 - DNA, 20 bp, synthetic construct
  misc_feature 1..20: note = Description of Artificial Sequence: Synthetic oligonucleotide
  misc_feature 1..20: note = Target: SCN10A; (+) strand; PAM type: YTN; PAM sequence: CTG
  source 1..20: mol_type = other DNA
gactttaccactcatgggtg

SEQ ID NO: 61666 - DNA, 20 bp, synthetic construct
  misc_feature 1..20: note = Description of Artificial Sequence: Synthetic oligonucleotide
  misc_feature 1..20: note = Target: SCN10A; (+) strand; PAM type: YTN; PAM sequence: CTT
  source 1..20: mol_type = other DNA
taccactcatgggtgtcagg

SEQ ID NO: 61667 - DNA, 20 bp, synthetic construct
  misc_feature 1..20: note = Description of Artificial Sequence: Synthetic oligonucleotide
  misc_feature 1..20: note = Target: SCN10A; (+) strand; PAM type: YTN; PAM sequence: TTT
  source 1..20: mol_type = other DNA
accactcatgggtgtcaggg

SEQ ID NO: 61668 - DNA, 20 bp, synthetic construct
  misc_feature 1..20: note = Description of Artificial Sequence: Synthetic oligonucleotide
  misc_feature 1..20: note = Target: SCN10A; (+) strand; PAM type: YTN; PAM sequence: TTA
  source 1..20: mol_type = other DNA
ccactcatgggtgtcagggc

SEQ ID NO: 61669 - DNA, 20 bp, synthetic construct
  misc_feature 1..20: note = Description of Artificial Sequence: Synthetic oligonucleotide
  misc_feature 1..20: note = Target: SCN10A; (+) strand; PAM type: YTN; PAM sequence: CTC
  source 1..20: mol_type = other DNA
atgggtgtcagggctattct

SEQ ID NO: 61670 - DNA, 20 bp, synthetic construct
  misc_feature 1..20: note = Description of Artificial Sequence: Synthetic oligonucleotide
  misc_feature 1..20: note = Target: SCN10A; (+) strand; PAM type: YTN; PAM sequence: CTA
  source 1..20: mol_type = other DNA
ttctcagactcctcactaaa

SEQ ID NO: 61671 - DNA, 20 bp, synthetic construct
  misc_feature 1..20: note = Description of Artificial Sequence: Synthetic oligonucleotide
  misc_feature 1..20: note = Target: SCN10A; (+) strand; PAM type: YTN; PAM sequence: TTC
  source 1..20: mol_type = other DNA
tcagactcctcactaaatgc

SEQ ID NO: 61672 - DNA, 20 bp, synthetic construct
  misc_feature 1..20: note = Description of Artificial Sequence: Synthetic oligonucleotide
  misc_feature 1..20: note = Target: SCN10A; (+) strand; PAM type: YTN; PAM sequence: CTC
  source 1..20: mol_type = other DNA
agactcctcactaaatgctc

SEQ ID NO: 61673 - DNA, 20 bp, synthetic construct
  misc_feature 1..20: note = Description of Artificial Sequence: Synthetic oligonucleotide
  misc_feature 1..20: note = Target: SCN10A; (+) strand; PAM type: YTN; PAM sequence: CTC
  source 1..20: mol_type = other DNA
ctcactaaatgctcaaaact

SEQ ID NO: 61674 - DNA, 20 bp, synthetic construct
  misc_feature 1..20: note = Description of Artificial Sequence: Synthetic oligonucleotide
  misc_feature 1..20: note = Target: SCN10A; (+) strand; PAM type: YTN; PAM sequence: CTC
  source 1..20: mol_type = other DNA
actaaatgctcaaaactttt

SEQ ID NO: 61675 - DNA, 20 bp, synthetic construct
  misc_feature 1..20: note = Description of Artificial Sequence: Synthetic oligonucleotide
  misc_feature 1..20: note = Target: SCN10A; (+) strand; PAM type: YTN; PAM sequence: CTA
  source 1..20: mol_type = other DNA
aatgctcaaaacttttcttt

SEQ ID NO: 61676 - DNA, 20 bp, synthetic construct
  misc_feature 1..20: note = Description of Artificial Sequence: Synthetic oligonucleotide
  misc_feature 1..20: note = Target: SCN10A; (+) strand; PAM type: YTN; PAM sequence: CTC
  source 1..20: mol_type = other DNA
aaaacttttctttggagtag

SEQ ID NO: 61677 - DNA, 20 bp, synthetic construct
  misc_feature 1..20: note = Description of Artificial Sequence: Synthetic oligonucleotide
  misc_feature 1..20: note = Target: SCN10A; (+) strand; PAM type: YTN; PAM sequence: CTT
  source 1..20: mol_type = other DNA
ttctttggagtagcccttga

SEQ ID NO: 61678 - DNA, 20 bp, synthetic construct
  misc_feature 1..20: note = Description of Artificial Sequence: Synthetic oligonucleotide
  misc_feature 1..20: note = Target: SCN10A; (+) strand; PAM type: YTN; PAM sequence: TTT
  source 1..20: mol_type = other DNA
tctttggagtagcccttgag

SEQ ID NO: 61679 - DNA, 20 bp, synthetic construct
  misc_feature 1..20: note = Description of Artificial Sequence: Synthetic oligonucleotide
  misc_feature 1..20: note = Target: SCN10A; (+) strand; PAM type: YTN; PAM sequence: TTT
  source 1..20: mol_type = other DNA
ctttggagtagcccttgagg

SEQ ID NO: 61680 - DNA, 20 bp, synthetic construct
  misc_feature 1..20: note = Description of Artificial Sequence: Synthetic oligonucleotide
  misc_feature 1..20: note = Target: SCN10A; (+) strand; PAM type: YTN; PAM sequence: TTC
  source 1..20: mol_type = other DNA
tttggagtagcccttgaggg

SEQ ID NO: 61681 - DNA, 20 bp, synthetic construct
  misc_feature 1..20: note = Description of Artificial Sequence: Synthetic oligonucleotide
  misc_feature 1..20: note = Target: SCN10A; (+) strand; PAM type: YTN; PAM sequence: CTT
  source 1..20: mol_type = other DNA
tggagtagcccttgagggcc

SEQ ID NO: 61682 - DNA, 20 bp, synthetic construct
  misc_feature 1..20: note = Description of Artificial Sequence: Synthetic oligonucleotide
  misc_feature 1..20: note = Target: SCN10A; (+) strand; PAM type: YTN; PAM sequence: TTT
  source 1..20: mol_type = other DNA
ggagtagcccttgagggcca

SEQ ID NO: 61683 - DNA, 20 bp, synthetic construct
  misc_feature 1..20: note = Description of Artificial Sequence: Synthetic oligonucleotide
  misc_feature 1..20: note = Target: SCN10A; (+) strand; PAM type: YTN; PAM sequence: TTG
  source 1..20: mol_type = other DNA
gagtagcccttgagggccag

SEQ ID NO: 61684 - DNA, 20 bp, synthetic construct
  misc_feature 1..20: note = Description of Artificial Sequence: Synthetic oligonucleotide
  misc_feature 1..20: note = Target: SCN10A; (+) strand; PAM type: YTN; PAM sequence: CTT
  source 1..20: mol_type = other DNA
gagggccaggtctctgagct

SEQ ID NO: 61685 - DNA, 20 bp, synthetic construct
  misc_feature 1..20: note = Description of Artificial Sequence: Synthetic oligonucleotide
  misc_feature 1..20: note = Target: SCN10A; (+) strand; PAM type: YTN; PAM sequence: TTG
  source 1..20: mol_type = other DNA
agggccaggtctctgagctt

SEQ ID NO: 61686 - DNA, 20 bp, synthetic construct
  misc_feature 1..20: note = Description of Artificial Sequence: Synthetic oligonucleotide
  misc_feature 1..20: note = Target: SCN10A; (+) strand; PAM type: YTN; PAM sequence: CTC
  source 1..20: mol_type = other DNA
tgagcttcctttgccctagc

SEQ ID NO: 61687 - DNA, 20 bp, synthetic construct
  misc_feature 1..20: note = Description of Artificial Sequence: Synthetic oligonucleotide
  misc_feature 1..20: note = Target: SCN10A; (+) strand; PAM type: YTN; PAM sequence: CTG
  source 1..20: mol_type = other DNA
agcttcctttgccctagctg

SEQ ID NO: 61688 - DNA, 20 bp, synthetic construct
  misc_feature 1..20: note = Description of Artificial Sequence: Synthetic oligonucleotide
  misc_feature 1..20: note = Target: SCN10A; (+) strand; PAM type: YTN; PAM sequence: CTT
  source 1..20: mol_type = other DNA
cctttgccctagctgtagcc

SEQ ID NO: 61689 - DNA, 20 bp, synthetic construct
  misc_feature 1..20: note = Description of Artificial Sequence: Synthetic oligonucleotide
  misc_feature 1..20: note = Target: SCN10A; (+) strand; PAM type: YTN; PAM sequence: TTC
  source 1..20: mol_type = other DNA
ctttgccctagctgtagcca

SEQ ID NO: 61690 - DNA, 20 bp, synthetic construct
  misc_feature 1..20: note = Description of Artificial Sequence: Synthetic oligonucleotide
  misc_feature 1..20: note = Target: SCN10A; (+) strand; PAM type: YTN; PAM sequence: CTT
  source 1..20: mol_type = other DNA
tgccctagctgtagccagga

SEQ ID NO: 61691 - DNA, 20 bp, synthetic construct
  misc_feature 1..20: note = Description of Artificial Sequence: Synthetic oligonucleotide
  misc_feature 1..20: note = Target: SCN10A; (+) strand; PAM type: YTN; PAM sequence: TTT
  source 1..20: mol_type = other DNA
gccctagctgtagccaggag

SEQ ID NO: 61692 - DNA, 20 bp, synthetic construct
  misc_feature 1..20: note = Description of Artificial Sequence: Synthetic oligonucleotide
  misc_feature 1..20: note = Target: SCN10A; (+) strand; PAM type: YTN; PAM sequence: TTG
  source 1..20: mol_type = other DNA
ccctagctgtagccaggagt

SEQ ID NO: 61693 - DNA, 20 bp, synthetic construct
  misc_feature 1..20: note = Description of Artificial Sequence: Synthetic oligonucleotide
  misc_feature 1..20: note = Target: SCN10A; (+) strand; PAM type: YTN; PAM sequence: CTA
  source 1..20: mol_type = other DNA
gctgtagccaggagtcagag

SEQ ID NO: 61694 - DNA, 20 bp, synthetic construct
  misc_feature 1..20: note = Description of Artificial Sequence: Synthetic oligonucleotide
  misc_feature 1..20: note = Target: SCN10A; (+) strand; PAM type: YTN; PAM sequence: CTG
  source 1..20: mol_type = other DNA
tagccaggagtcagagggga

SEQ ID NO: 61695 - DNA, 20 bp, synthetic construct
  misc_feature 1..20: note = Description of Artificial Sequence: Synthetic oligonucleotide
  misc_feature 1..20: note = Target: SCN10A; (+) strand; PAM type: YTN; PAM sequence: TTC
  source 1..20: mol_type = other DNA
ccactgagccactcacattc

SEQ ID NO: 61696 - DNA, 20 bp, synthetic construct
  misc_feature 1..20: note = Description of Artificial Sequence: Synthetic oligonucleotide
  misc_feature 1..20: note = Target: SCN10A; (+) strand; PAM type: YTN; PAM sequence: CTG
  source 1..20: mol_type = other DNA
agccactcacattcacaatg

SEQ ID NO: 61697 - DNA, 20 bp, synthetic construct
  misc_feature 1..20: note = Description of Artificial Sequence: Synthetic oligonucleotide
  misc_feature 1..20: note = Target: SCN10A; (+) strand; PAM type: YTN; PAM sequence: CTC
  source 1..20: mol_type = other DNA
acattcacaatgaggaagtc

SEQ ID NO: 61698 - DNA, 20 bp, synthetic construct
  misc_feature 1..20: note = Description of Artificial Sequence: Synthetic oligonucleotide
  misc_feature 1..20: note = Target: SCN10A; (+) strand; PAM type: YTN; PAM sequence: TTC
  source 1..20: mol_type = other DNA
acaatgaggaagtccagcca

SEQ ID NO: 61699 - DNA, 20 bp, synthetic construct
  misc_feature 1..20: note = Description of Artificial Sequence: Synthetic oligonucleotide
  misc_feature 1..20: note = Target: SCN10A; (+) strand; PAM type: YTN; PAM sequence: TTG
  source 1..20: mol_type = other DNA
gtgaagtactttttgaagcc

SEQ ID NO: 61700 - DNA, 20 bp, synthetic construct
  misc_feature 1..20: note = Description of Artificial Sequence: Synthetic oligonucleotide
  misc_feature 1..20: note = Target: SCN10A; (+) strand; PAM type: YTN; PAM sequence: CTT
  source 1..20: mol_type = other DNA
tttgaagccataggccaccc

SEQ ID NO: 61701 - DNA, 20 bp, synthetic construct
  misc_feature 1..20: note = Description of Artificial Sequence: Synthetic oligonucleotide
  misc_feature 1..20: note = Target: SCN10A; (+) strand; PAM type: YTN; PAM sequence: TTT
  source 1..20: mol_type = other DNA
ttgaagccataggccaccca

SEQ ID NO: 61702 - DNA, 20 bp, synthetic construct
  misc_feature 1..20: note = Description of Artificial Sequence: Synthetic oligonucleotide
  misc_feature 1..20: note = Target: SCN10A; (+) strand; PAM type: YTN; PAM sequence: TTT
  source 1..20: mol_type = other DNA
tgaagccataggccacccac

SEQ ID NO: 61703 - DNA, 20 bp, synthetic construct
  misc_feature 1..20: note = Description of Artificial Sequence: Synthetic oligonucleotide
  misc_feature 1..20: note = Target: SCN10A; (+) strand; PAM type: YTN; PAM sequence: TTT
  source 1..20: mol_type = other DNA
gaagccataggccacccact

SEQ ID NO: 61704 - DNA, 20 bp, synthetic construct
  misc_feature 1..20: note = Description of Artificial Sequence: Synthetic oligonucleotide
  misc_feature 1..20: note = Target: SCN10A; (+) strand; PAM type: YTN; PAM sequence: TTG
  source 1..20: mol_type = other DNA
aagccataggccacccactt

SEQ ID NO: 61705 - DNA, 20 bp, synthetic construct
  misc_feature 1..20: note = Description of Artificial Sequence: Synthetic oligonucleotide
  misc_feature 1..20: note = Target: SCN10A; (+) strand; PAM type: YTN; PAM sequence: CTT
  source 1..20: mol_type = other DNA
aagcagcatctcgaacacaa

SEQ ID NO: 61706 - DNA, 20 bp, synthetic construct
  misc_feature 1..20: note = Description of Artificial Sequence: Synthetic oligonucleotide
  misc_feature 1..20: note = Target: SCN10A; (+) strand; PAM type: YTN; PAM sequence: TTA
  source 1..20: mol_type = other DNA
agcagcatctcgaacacaaa

SEQ ID NO: 61707 - DNA, 20 bp, synthetic construct
  misc_feature 1..20: note = Description of Artificial Sequence: Synthetic oligonucleotide
  misc_feature 1..20: note = Target: SCN10A; (+) strand; PAM type: YTN; PAM sequence: CTC
  source 1..20: mol_type = other DNA
gaacacaaagataaaggtga

SEQ ID NO: 61708 - DNA, 20 bp, synthetic construct
  misc_feature 1..20: note = Description of Artificial Sequence: Synthetic oligonucleotide
  misc_feature 1..20: note = Target: SCN10A; (+) strand; PAM type: YTN; PAM sequence: CTG
  source 1..20: mol_type = other DNA
tcagtgtactccagcaaagc

SEQ ID NO: 61709 - DNA, 20 bp, synthetic construct
  misc_feature 1..20: note = Description of Artificial Sequence: Synthetic oligonucleotide
  misc_feature 1..20: note = Target: SCN10A; (+) strand; PAM type: YTN; PAM sequence: CTC
  source 1..20: mol_type = other DNA
cagcaaagctttcaccgtgg

SEQ ID NO: 61710 - DNA, 20 bp, synthetic construct
  misc_feature 1..20: note = Description of Artificial Sequence: Synthetic oligonucleotide
  misc_feature 1..20: note = Target: SCN10A; (+) strand; PAM type: YTN; PAM sequence: CTT
  source 1..20: mol_type = other DNA
tcaccgtgggcttctggtcc

SEQ ID NO: 61711 - DNA, 20 bp, synthetic construct
  misc_feature 1..20: note = Description of Artificial Sequence: Synthetic oligonucleotide
  misc_feature 1..20: note = Target: SCN10A; (+) strand; PAM type: YTN; PAM sequence: TTT
  source 1..20: mol_type = other DNA
caccgtgggcttctggtcca

SEQ ID NO: 61712 - DNA, 20 bp, synthetic construct
  misc_feature 1..20: note = Description of Artificial Sequence: Synthetic oligonucleotide
  misc_feature 1..20: note = Target: SCN10A; (+) strand; PAM type: YTN; PAM sequence: TTC
  source 1..20: mol_type = other DNA
accgtgggcttctggtccag

SEQ ID NO: 61713 - DNA, 20 bp, synthetic construct
  misc_feature 1..20: note = Description of Artificial Sequence: Synthetic oligonucleotide
  misc_feature 1..20: note = Target: SCN10A; (+) strand; PAM type: YTN; PAM sequence: CTT
  source 1..20: mol_type = other DNA
ctggtccaggtaatagtctt

SEQ ID NO: 61714 - DNA, 20 bp, synthetic construct
  misc_feature 1..20: note = Description of Artificial Sequence: Synthetic oligonucleotide
  misc_feature 1..20: note = Target: SCN10A; (+) strand; PAM type: YTN; PAM sequence: TTC
  source 1..20: mol_type = other DNA
tggtccaggtaatagtcttc

SEQ ID NO: 61715 - DNA, 20 bp, synthetic construct
  misc_feature 1..20: note = Description of Artificial Sequence: Synthetic oligonucleotide
  misc_feature 1..20: note = Target: SCN10A; (+) strand; PAM type: YTN; PAM sequence: CTG
  source 1..20: mol_type = other DNA
gtccaggtaatagtcttcaa

SEQ ID NO: 61716 - DNA, 20 bp, synthetic construct
  misc_feature 1..20: note = Description of Artificial Sequence: Synthetic oligonucleotide
  misc_feature 1..20: note = Target: SCN10A; (+) strand; PAM type: YTN; PAM sequence: CTT
  source 1..20: mol_type = other DNA
caaaggcctggaaggaagaa

SEQ ID NO: 61717 - DNA, 20 bp, synthetic construct
  misc_feature 1..20: note = Description of Artificial Sequence: Synthetic oligonucleotide
  misc_feature 1..20: note = Target: SCN10A; (+) strand; PAM type: YTN; PAM sequence: TTC
  source 1..20: mol_type = other DNA
aaaggcctggaaggaagaaa

SEQ ID NO: 61718 - DNA, 20 bp, synthetic construct
  misc_feature 1..20: note = Description of Artificial Sequence: Synthetic oligonucleotide
  misc_feature 1..20: note = Target: SCN10A; (+) strand; PAM type: YTN; PAM sequence: CTG
  source 1..20: mol_type = other DNA
gaaggaagaaaggatgcaga

SEQ ID NO: 61719 - DNA, 20 bp, synthetic construct
  misc_feature 1..20: note = Description of Artificial Sequence: Synthetic oligonucleotide
  misc_feature 1..20: note = Target: SCN10A; (+) strand; PAM type: YTN; PAM sequence: CTG
  source 1..20: mol_type = other DNA
cctggacccacagcactggg

SEQ ID NO: 61720 - DNA, 20 bp, synthetic construct
  misc_feature 1..20: note = Description of Artificial Sequence: Synthetic oligonucleotide
  misc_feature 1..20: note = Target: SCN10A; (+) strand; PAM type: YTN; PAM sequence: CTG
  source 1..20: mol_type = other DNA
gacccacagcactggggccc

SEQ ID NO: 61721 - DNA, 20 bp, synthetic construct
  misc_feature 1..20: note = Description of Artificial Sequence: Synthetic oligonucleotide
  misc_feature 1..20: note = Target: SCN10A; (+) strand; PAM type: YTN; PAM sequence: CTG
  source 1..20: mol_type = other DNA
gggcccagactgatagggaa

SEQ ID NO: 61722 - DNA, 20 bp, synthetic construct
  misc_feature 1..20: note = Description of Artificial Sequence: Synthetic oligonucleotide
  misc_feature 1..20: note = Target: SCN10A; (+) strand; PAM type: YTN; PAM sequence: CTG
  source 1..20: mol_type = other DNA
atagggaaggacccagccag

SEQ ID NO: 61723 - DNA, 20 bp, synthetic construct
  misc_feature 1..20: note = Description of Artificial Sequence: Synthetic oligonucleotide
  misc_feature 1..20: note = Target: SCN10A; (+) strand; PAM type: YTN; PAM sequence: CTG
  source 1..20: mol_type = other DNA
accacagtccctggaagggg

SEQ ID NO: 61724 - DNA, 20 bp, synthetic construct
  misc_feature 1..20: note = Description of Artificial Sequence: Synthetic oligonucleotide
  misc_feature 1..20: note = Target: SCN10A; (+) strand; PAM type: YTN; PAM sequence: CTG
  source 1..20: mol_type = other DNA
gaaggggatttggtagtcag

SEQ ID NO: 61725 - DNA, 20 bp, synthetic construct
  misc_feature 1..20: note = Description of Artificial Sequence: Synthetic oligonucleotide
  misc_feature 1..20: note = Target: SCN10A; (+) strand; PAM type: YTN; PAM sequence: TTT
  source 1..20: mol_type = other DNA
ggtagtcagcttgccagtag

SEQ ID NO: 61726 - DNA, 20 bp, synthetic construct
  misc_feature 1..20: note = Description of Artificial Sequence: Synthetic oligonucleotide
  misc_feature 1..20: note = Target: SCN10A; (+) strand; PAM type: YTN; PAM sequence: TTG
  source 1..20: mol_type = other DNA
gtagtcagcttgccagtagc

SEQ ID NO: 61727 - DNA, 20 bp, synthetic construct
  misc_feature 1..20: note = Description of Artificial Sequence: Synthetic oligonucleotide
  misc_feature 1..20: note = Target: SCN10A; (+) strand; PAM type: YTN; PAM sequence: CTT
  source 1..20: mol_type = other DNA
gccagtagcattttgtttgc

SEQ ID NO: 61728 - DNA, 20 bp, synthetic construct
  misc_feature 1..20: note = Description of Artificial Sequence: Synthetic oligonucleotide
  misc_feature 1..20: note = Target: SCN10A; (+) strand; PAM type: YTN; PAM sequence: TTG
  source 1..20: mol_type = other DNA
ccagtagcattttgtttgct

SEQ ID NO: 61729 - DNA, 20 bp, synthetic construct
  misc_feature 1..20: note = Description of Artificial Sequence: Synthetic oligonucleotide
  misc_feature 1..20: note = Target: SCN10A; (+) strand; PAM type: YTN; PAM sequence: TTT
  source 1..20: mol_type = other DNA
tgtttgctgtggggaggtaa

SEQ ID NO: 61730 - DNA, 20 bp, synthetic construct
  misc_feature 1..20: note = Description of Artificial Sequence: Synthetic oligonucleotide
  misc_feature 1..20: note = Target: SCN10A; (+) strand; PAM type: YTN; PAM sequence: TTT
  source 1..20: mol_type = other DNA
gtttgctgtggggaggtaaa

SEQ ID NO: 61731 - DNA, 20 bp, synthetic construct
  misc_feature 1..20: note = Description of Artificial Sequence: Synthetic oligonucleotide
  misc_feature 1..20: note = Target: SCN10A; (+) strand; PAM type: YTN; PAM sequence: TTG
  source 1..20: mol_type = other DNA
tttgctgtggggaggtaaag

SEQ ID NO: 61732 - DNA, 20 bp, synthetic construct
  misc_feature 1..20: note = Description of Artificial Sequence: Synthetic oligonucleotide
  misc_feature 1..20: note = Target: SCN10A; (+) strand; PAM type: YTN; PAM sequence: TTT
  source 1..20: mol_type = other DNA
gctgtggggaggtaaagtgg

SEQ ID NO: 61733 - DNA, 20 bp, synthetic construct
  misc_feature 1..20: note = Description of Artificial Sequence: Synthetic oligonucleotide
  misc_feature 1..20: note = Target: SCN10A; (+) strand; PAM type: YTN; PAM sequence: TTG
  source 1..20: mol_type = other DNA
ctgtggggaggtaaagtggg

SEQ ID NO: 61734 - DNA, 20 bp, synthetic construct
  misc_feature 1..20: note = Description of Artificial Sequence: Synthetic oligonucleotide
  misc_feature 1..20: note = Target: SCN10A; (+) strand; PAM type: YTN; PAM sequence: CTG
  source 1..20: mol_type = other DNA
tggggaggtaaagtgggata

SEQ ID NO: 61735 - DNA, 20 bp, synthetic construct
  misc_feature 1..20: note = Description of Artificial Sequence: Synthetic oligonucleotide
  misc_feature 1..20: note = Target: SCN10A; (+) strand; PAM type: YTN; PAM sequence: CTG
  source 1..20: mol_type = other DNA
tgagatccaaagcatgactt

SEQ ID NO: 61736 - DNA, 20 bp, synthetic construct
  misc_feature 1..20: note = Description of Artificial Sequence: Synthetic oligonucleotide
  misc_feature 1..20: note = Target: SCN10A; (+) strand; PAM type: YTN; PAM sequence: CTT
  source 1..20: mol_type = other DNA
cttcagggccaatggggaca

SEQ ID NO: 61737 - DNA, 20 bp, synthetic construct
  misc_feature 1..20: note = Description of Artificial Sequence: Synthetic oligonucleotide
  misc_feature 1..20: note = Target: SCN10A; (+) strand; PAM type: YTN; PAM sequence: TTC
  source 1..20: mol_type = other DNA
ttcagggccaatggggacaa

SEQ ID NO: 61738 - DNA, 20 bp, synthetic construct
  misc_feature 1..20: note = Description of Artificial Sequence: Synthetic oligonucleotide
  misc_feature 1..20: note = Target: SCN10A; (+) strand; PAM type: YTN; PAM sequence: CTT
  source 1..20: mol_type = other DNA
cagggccaatggggacaaac

SEQ ID NO: 61739 - DNA, 20 bp, synthetic construct
  misc_feature 1..20: note = Description of Artificial Sequence: Synthetic oligonucleotide
  misc_feature 1..20: note = Target: SCN10A; (+) strand; PAM type: YTN; PAM sequence: TTC
  source 1..20: mol_type = other DNA
agggccaatggggacaaaca

SEQ ID NO: 61740 - DNA, 20 bp, synthetic construct
  misc_feature 1..20: note = Description of Artificial Sequence: Synthetic oligonucleotide
  misc_feature 1..20: note = Target: SCN10A; (+) strand; PAM type: YTN; PAM sequence: CTG
  source 1..20: mol_type = other DNA
ctgatacttgcagggatgct

SEQ ID NO: 61741 - DNA, 20 bp, synthetic construct
  misc_feature 1..20: note = Description of Artificial Sequence: Synthetic oligonucleotide
  misc_feature 1..20: note = Target: SCN10A; (+) strand; PAM type: YTN; PAM sequence: CTG
  source 1..20: mol_type = other DNA
atacttgcagggatgctgaa

SEQ ID NO: 61742 - DNA, 20 bp, synthetic construct
  misc_feature 1..20: note = Description of Artificial Sequence: Synthetic oligonucleotide
  misc_feature 1..20: note = Target: SCN10A; (+) strand; PAM type: YTN; PAM sequence: CTT
  source 1..20: mol_type = other DNA
gcagggatgctgaatgcaag

SEQ ID NO: 61743 - DNA, 20 bp, synthetic construct
  misc_feature 1..20: note = Description of Artificial Sequence: Synthetic oligonucleotide
  misc_feature 1..20: note = Target: SCN10A; (+) strand; PAM type: YTN; PAM sequence: TTG
  source 1..20: mol_type = other DNA
cagggatgctgaatgcaagg

SEQ ID NO: 61744 - DNA, 20 bp, synthetic construct
  misc_feature 1..20: note = Description of Artificial Sequence: Synthetic oligonucleotide
  misc_feature 1..20: note = Target: SCN10A; (+) strand; PAM type: YTN; PAM sequence: CTG
  source 1..20: mol_type = other DNA
aatgcaagggagaaagaaaa

SEQ ID NO: 61745 - DNA, 20 bp, synthetic construct
  misc_feature 1..20: note = Description of Artificial Sequence: Synthetic oligonucleotide
  misc_feature 1..20: note = Target: SCN10A; (+) strand; PAM type: YTN; PAM sequence: CTT
  source 1..20: mol_type = other DNA
ctcaaattggattttggaag

SEQ ID NO: 61746 - DNA, 20 bp, synthetic construct
  misc_feature 1..20: note = Description of Artificial Sequence: Synthetic oligonucleotide
  misc_feature 1..20: note = Target: SCN10A; (+) strand; PAM type: YTN; PAM sequence: TTC
  source 1..20: mol_type = other DNA
tcaaattggattttggaagt

SEQ ID NO: 61747 - DNA, 20 bp, synthetic construct
  misc_feature 1..20: note = Description of Artificial Sequence: Synthetic oligonucleotide
  misc_feature 1..20: note = Target: SCN10A; (+) strand; PAM type: YTN; PAM sequence: CTC
  source 1..20: mol_type = other DNA
aaattggattttggaagtga

SEQ ID NO: 61748 - DNA, 20 bp, synthetic construct
  misc_feature 1..20: note = Description of Artificial Sequence: Synthetic oligonucleotide
  misc_feature 1..20: note = Target: SCN10A; (+) strand; PAM type: YTN; PAM sequence: TTG
  source 1..20: mol_type = other DNA
gattttggaagtgaaccaaa

SEQ ID NO: 61749 - DNA, 20 bp, synthetic construct
  misc_feature 1..20: note = Description of Artificial Sequence: Synthetic oligonucleotide
  misc_feature 1..20: note = Target: SCN10A; (+) strand; PAM type: YTN; PAM sequence: TTT
  source 1..20: mol_type = other DNA
tggaagtgaaccaaagggat

SEQ ID NO: 61750 - DNA, 20 bp, synthetic construct
  misc_feature 1..20: note = Description of Artificial Sequence: Synthetic oligonucleotide
  misc_feature 1..20: note = Target: SCN10A; (+) strand; PAM type: YTN; PAM sequence: TTT
  source 1..20: mol_type = other DNA
ggaagtgaaccaaagggatg

SEQ ID NO: 61751 - DNA, 20 bp, synthetic construct
  misc_feature 1..20: note = Description of Artificial Sequence: Synthetic oligonucleotide
  misc_feature 1..20: note = Target: SCN10A; (+) strand; PAM type: YTN; PAM sequence: TTG
  source 1..20: mol_type = other DNA
gaagtgaaccaaagggatgc

SEQ ID NO: 61752 - DNA, 20 bp, synthetic construct
  misc_feature 1..20: note = Description of Artificial Sequence: Synthetic oligonucleotide
  misc_feature 1..20: note = Target: SCN10A; (+) strand; PAM type: YTN; PAM sequence: CTA
  source 1..20: mol_type = other DNA
acagtgactttgtttaaaaa

SEQ ID NO: 61753 - DNA, 20 bp, synthetic construct
  misc_feature 1..20: note = Description of Artificial Sequence: Synthetic oligonucleotide
  misc_feature 1..20: note = Target: SCN10A; (+) strand; PAM type: YTN; PAM sequence: CTT
  source 1..20: mol_type = other DNA
tgtttaaaaataaaagcatc

SEQ ID NO: 61754 - DNA, 20 bp, synthetic construct
  misc_feature 1..20: note = Description of Artificial Sequence: Synthetic oligonucleotide
  misc_feature 1..20: note = Target: SCN10A; (+) strand; PAM type: YTN; PAM sequence: TTT
  source 1..20: mol_type = other DNA
gtttaaaaataaaagcatca

SEQ ID NO: 61755 - DNA, 20 bp, synthetic construct
  misc_feature 1..20: note = Description of Artificial Sequence: Synthetic oligonucleotide
  misc_feature 1..20: note = Target: SCN10A; (+) strand; PAM type: YTN; PAM sequence: TTG
  source 1..20: mol_type = other DNA
tttaaaaataaaagcatcaa

SEQ ID NO: 61756 - DNA, 20 bp, synthetic construct
  misc_feature 1..20: note = Description of Artificial Sequence: Synthetic oligonucleotide
  misc_feature 1..20: note = Target: SCN10A; (+) strand; PAM type: YTN; PAM sequence: TTT
  source 1..20: mol_type = other DNA
aaaaataaaagcatcaacgg

SEQ ID NO: 61757 - DNA, 20 bp, synthetic construct
  misc_feature 1..20: note = Description of Artificial Sequence: Synthetic oligonucleotide
  misc_feature 1..20: note = Target: SCN10A; (+) strand; PAM type: YTN; PAM sequence: TTA
  source 1..20: mol_type = other DNA
aaaataaaagcatcaacgga

SEQ ID NO: 61758 - DNA, 20 bp, synthetic construct
  misc_feature 1..20: note = Description of Artificial Sequence: Synthetic oligonucleotide
  misc_feature 1..20: note = Target: SCN10A; (+) strand; PAM type: YTN; PAM sequence: TTC
  source 1..20: mol_type = other DNA
acaggcagtttacaaaaatg

SEQ ID NO: 61759 - DNA, 20 bp, synthetic construct
  misc_feature 1..20: note = Description of Artificial Sequence: Synthetic oligonucleotide
  misc_feature 1..20: note = Target: SCN10A; (+) strand; PAM type: YTN; PAM sequence: TTT
  source 1..20: mol_type = other DNA
acaaaaatgaaagtaagaat

SEQ ID NO: 61760 - DNA, 20 bp, synthetic construct
  misc_feature 1..20: note = Description of Artificial Sequence: Synthetic oligonucleotide
  misc_feature 1..20: note = Target: SCN10A; (+) strand; PAM type: YTN; PAM sequence: TTA
  source 1..20: mol_type = other DNA
caaaaatgaaagtaagaatc

SEQ ID NO: 61761 - DNA, 20 bp, synthetic construct
  misc_feature 1..20: note = Description of Artificial Sequence: Synthetic oligonucleotide
  misc_feature 1..20: note = Target: SCN10A; (+) strand; PAM type: YTN; PAM sequence: CTC
  source 1..20: mol_type = other DNA
tgaaaaagaatgttctatct

SEQ ID NO: 61762 - DNA, 20 bp, synthetic construct
  misc_feature 1..20: note = Description of Artificial Sequence: Synthetic oligonucleotide
  misc_feature 1..20: note = Target: SCN10A; (+) strand; PAM type: YTN; PAM sequence: CTG
  source 1..20: mol_type = other DNA
aaaaagaatgttctatctca

SEQ ID NO: 61763 - DNA, 20 bp, synthetic construct
  misc_feature 1..20: note = Description of Artificial Sequence: Synthetic oligonucleotide
  misc_feature 1..20: note = Target: SCN10A; (+) strand; PAM type: YTN; PAM sequence: TTC
  source 1..20: mol_type = other DNA
tatctcactggtaatcaagg

SEQ ID NO: 61764 - DNA, 20 bp, synthetic construct
  misc_feature 1..20: note = Description of Artificial Sequence: Synthetic oligonucleotide
  misc_feature 1..20: note = Target: SCN10A; (+) strand; PAM type: YTN; PAM sequence: CTA
  source 1..20: mol_type = other DNA
tctcactggtaatcaaggaa

SEQ ID NO: 61765 - DNA, 20 bp, synthetic construct
  misc_feature 1..20: note = Description of Artificial Sequence: Synthetic oligonucleotide
  misc_feature 1..20: note = Target: SCN10A; (+) strand; PAM type: YTN; PAM sequence: CTC
  source 1..20: mol_type = other DNA
actggtaatcaaggaaattc

SEQ ID NO: 61766 - DNA, 20 bp, synthetic construct
  misc_feature 1..20: note = Description of Artificial Sequence: Synthetic oligonucleotide
  misc_feature 1..20: note = Target: SCN10A; (+) strand; PAM type: YTN; PAM sequence: CTG
  source 1..20: mol_type = other DNA
gtaatcaaggaaattcaaat

SEQ ID NO: 61767 - DNA, 20 bp, synthetic construct
  misc_feature 1..20: note = Description of Artificial Sequence: Synthetic oligonucleotide
  misc_feature 1..20: note = Target: SCN10A; (+) strand; PAM type: YTN; PAM sequence: TTC
  source 1..20: mol_type = other DNA
aaattaaaagaagatgctgt

SEQ ID NO: 61768 - DNA, 20 bp, synthetic construct
  misc_feature 1..20: note = Description of Artificial Sequence: Synthetic oligonucleotide
  misc_feature 1..20: note = Target: SCN10A; (+) strand; PAM type: YTN; PAM sequence: TTA
  source 1..20: mol_type = other DNA
aaagaagatgctgtttttct

SEQ ID NO: 61769 - DNA, 20 bp, synthetic construct
  misc_feature 1..20: note = Description of Artificial Sequence: Synthetic oligonucleotide
  misc_feature 1..20: note = Target: SCN10A; (+) strand; PAM type: YTN; PAM sequence: CTG
  source 1..20: mol_type = other DNA
tttttcttttatcagactgg

SEQ ID NO: 61770 - DNA, 20 bp, synthetic construct
  misc_feature 1..20: note = Description of Artificial Sequence: Synthetic oligonucleotide
  misc_feature 1..20: note = Target: SCN10A; (+) strand; PAM type: YTN; PAM sequence: TTT
  source 1..20: mol_type = other DNA
ttcttttatcagactggtgg

SEQ ID NO: 61771 - DNA, 20 bp, synthetic construct
  misc_feature 1..20: note = Description of Artificial Sequence: Synthetic oligonucleotide
  misc_feature 1..20: note = Target: SCN10A; (+) strand; PAM type: YTN; PAM sequence: TTT
  source 1..20: mol_type = other DNA
tcttttatcagactggtgga

SEQ ID NO: 61772 - DNA, 20 bp, synthetic construct
  misc_feature 1..20: note = Description of Artificial Sequence: Synthetic oligonucleotide
  misc_feature 1..20: note = Target: SCN10A; (+) strand; PAM type: YTN; PAM sequence: TTT
  source 1..20: mol_type = other DNA
cttttatcagactggtggag

SEQ ID NO: 61773 - DNA, 20 bp, synthetic construct
  misc_feature 1..20: note = Description of Artificial Sequence: Synthetic oligonucleotide
  misc_feature 1..20: note = Target: SCN10A; (+) strand; PAM type: YTN; PAM sequence: TTC
  source 1..20: mol_type = other DNA
ttttatcagactggtggaga

SEQ ID NO: 61774 - DNA, 20 bp, synthetic construct
  misc_feature 1..20: note = Description of Artificial Sequence: Synthetic oligonucleotide
  misc_feature 1..20: note = Target: SCN10A; (+) strand; PAM type: YTN; PAM sequence: CTT
  source 1..20: mol_type = other DNA
ttatcagactggtggagatg

SEQ ID NO: 61775 - DNA, 20 bp, synthetic construct
  misc_feature 1..20: note = Description of Artificial Sequence: Synthetic oligonucleotide
  misc_feature 1..20: note = Target: SCN10A; (+) strand; PAM type: YTN; PAM sequence: TTT
  source 1..20: mol_type = other DNA
tatcagactggtggagatgg

SEQ ID NO: 61776 - DNA, 20 bp, synthetic construct
  misc_feature 1..20: note = Description of Artificial Sequence: Synthetic oligonucleotide
  misc_feature 1..20: note = Target: SCN10A; (+) strand; PAM type: YTN; PAM sequence: TTT
  source 1..20: mol_type = other DNA
atcagactggtggagatgga

SEQ ID NO: 61777 - DNA, 20 bp, synthetic construct
  misc_feature 1..20: note = Description of Artificial Sequence: Synthetic oligonucleotide
  misc_feature 1..20: note = Target: SCN10A; (+) strand; PAM type: YTN; PAM sequence: TTA
  source 1..20: mol_type = other DNA
tcagactggtggagatggaa

SEQ ID NO: 61778 - DNA, 20 bp, synthetic construct
  misc_feature 1..20: note = Description of Artificial Sequence: Synthetic oligonucleotide
  misc_feature 1..20: note = Target: SCN10A; (+) strand; PAM type: YTN; PAM sequence: CTG
  source 1..20: mol_type = other DNA
gtggagatggaaaagaatag

SEQ ID NO: 61779 - DNA, 20 bp, synthetic construct
  misc_feature 1..20: note = Description of Artificial Sequence: Synthetic oligonucleotide
  misc_feature 1..20: note = Target: SCN10A; (+) strand; PAM type: YTN; PAM sequence: CTA
  source 1..20: mol_type = other DNA
ggatgctgtggctgtggggg

SEQ ID NO: 61780 - DNA, 20 bp, synthetic construct
  misc_feature 1..20: note = Description of Artificial Sequence: Synthetic oligonucleotide
  misc_feature 1..20: note = Target: SCN10A; (+) strand; PAM type: YTN; PAM sequence: CTG
  source 1..20: mol_type = other DNA
tggctgtggggggctgccac

SEQ ID NO: 61781 - DNA, 20 bp, synthetic construct
  misc_feature 1..20: note = Description of Artificial Sequence: Synthetic oligonucleotide
  misc_feature 1..20: note = Target: SCN10A; (+) strand; PAM type: YTN; PAM sequence: CTG
  source 1..20: mol_type = other DNA
tggggggctgccactctttt

SEQ ID NO: 61782 - DNA, 20 bp, synthetic construct
  misc_feature 1..20: note = Description of Artificial Sequence: Synthetic oligonucleotide
  misc_feature 1..20: note = Target: SCN10A; (+) strand; PAM type: YTN; PAM sequence: CTG
  source 1..20: mol_type = other DNA
ccactctttttttttttttt

SEQ ID NO: 61783 - DNA, 20 bp, synthetic construct
  misc_feature 1..20: note = Description of Artificial Sequence: Synthetic oligonucleotide
  misc_feature 1..20: note = Target: SCN10A; (+) strand; PAM type: YTN; PAM sequence: CTC
  source 1..20: mol_type = other DNA
tttttttttttttttttttt

SEQ ID NO: 61784 - DNA, 20 bp, synthetic construct
  misc_feature 1..20: note = Description of Artificial Sequence: Synthetic oligonucleotide
  misc_feature 1..20: note = Target: SCN10A; (+) strand; PAM type: YTN; PAM sequence: CTT
  source 1..20: mol_type = other DNA
tttttttttttttttttttt

SEQ ID NO: 61785 - DNA, 20 bp, synthetic construct
  misc_feature 1..20: note = Description of Artificial Sequence: Synthetic oligonucleotide
  misc_feature 1..20: note = Target: SCN10A; (+) strand; PAM type: YTN; PAM sequence: TTT
  source 1..20: mol_type = other DNA
tttttttttttttttttttt

SEQ ID NO: 61786 - DNA, 20 bp, synthetic construct
  misc_feature 1..20: note = Description of Artificial Sequence: Synthetic oligonucleotide
  misc_feature 1..20: note = Target: SCN10A; (+) strand; PAM type: YTN; PAM sequence: TTT
  source 1..20: mol_type = other DNA
tttttttttttttttttttt

SEQ ID NO: 61787 - DNA, 20 bp, synthetic construct
  misc_feature 1..20: note = Description of Artificial Sequence: Synthetic oligonucleotide
  misc_feature 1..20: note = Target: SCN10A; (+) strand; PAM type: YTN; PAM sequence: TTT
  source 1..20: mol_type = other DNA
tttttttttttttttttttt

SEQ ID NO: 61788 - DNA, 20 bp, synthetic construct
  misc_feature 1..20: note = Description of Artificial Sequence: Synthetic oligonucleotide
  misc_feature 1..20: note = Target: SCN10A; (+) strand; PAM type: YTN; PAM sequence: TTT
  source 1..20: mol_type = other DNA
tttttttttttttttttttt

SEQ ID NO: 61789 - DNA, 20 bp, synthetic construct
  misc_feature 1..20: note = Description of Artificial Sequence: Synthetic oligonucleotide
  misc_feature 1..20: note = Target: SCN10A; (+) strand; PAM type: YTN; PAM sequence: TTT
  source 1..20: mol_type = other DNA
tttttttttttttttttttt

SEQ ID NO: 61790 - DNA, 20 bp, synthetic construct
  misc_feature 1..20: note = Description of Artificial Sequence: Synthetic oligonucleotide
  misc_feature 1..20: note = Target: SCN10A; (+) strand; PAM type: YTN; PAM sequence: TTT
  source 1..20: mol_type = other DNA
tttttttttttttttttttt

SEQ ID NO: 61791 - DNA, 20 bp, synthetic construct
  misc_feature 1..20: note = Description of Artificial Sequence: Synthetic oligonucleotide
  misc_feature 1..20: note = Target: SCN10A; (+) strand; PAM type: YTN; PAM sequence: TTT
  source 1..20: mol_type = other DNA
tttttttttttttttttttt

SEQ ID NO: 61792 - DNA, 20 bp, synthetic construct
  misc_feature 1..20: note = Description of Artificial Sequence: Synthetic oligonucleotide
  misc_feature 1..20: note = Target: SCN10A; (+) strand; PAM type: YTN; PAM sequence: TTT
  source 1..20: mol_type = other DNA
tttttttttttttttttttt

SEQ ID NO: 61793 - DNA, 20 bp, synthetic construct
  misc_feature 1..20: note = Description of Artificial Sequence: Synthetic oligonucleotide
  misc_feature 1..20: note = Target: SCN10A; (+) strand; PAM type: YTN; PAM sequence: TTT
  source 1..20: mol_type = other DNA
tttttttttttttttttttt

SEQ ID NO: 61794 - DNA, 20 bp, synthetic construct
  misc_feature 1..20: note = Description of Artificial Sequence: Synthetic oligonucleotide
  misc_feature 1..20: note = Target: SCN10A; (+) strand; PAM type: YTN; PAM sequence: TTT
  source 1..20: mol_type = other DNA
tttttttttttttttttttt

SEQ ID NO: 61795 - DNA, 20 bp, synthetic construct
  misc_feature 1..20: note = Description of Artificial Sequence: Synthetic oligonucleotide
  misc_feature 1..20: note = Target: SCN10A; (+) strand; PAM type: YTN; PAM sequence: TTT
  source 1..20: mol_type = other DNA
tttttttttttttttttttt

SEQ ID NO: 61796 - DNA, 20 bp, synthetic construct
  misc_feature 1..20: note = Description of Artificial Sequence: Synthetic oligonucleotide
  misc_feature 1..20: note = Target: SCN10A; (+) strand; PAM type: YTN; PAM sequence: TTT
  source 1..20: mol_type = other DNA
tttttttttttttttttttt

SEQ ID NO: 61797 - DNA, 20 bp, synthetic construct
  misc_feature 1..20: note = Description of Artificial Sequence: Synthetic oligonucleotide
  misc_feature 1..20: note = Target: SCN10A; (+) strand; PAM type: YTN; PAM sequence: TTT
  source 1..20: mol_type = other DNA
tttttttttttttttttttt

SEQ ID NO: 61798 - DNA, 20 bp, synthetic construct
  misc_feature 1..20: note = Description of Artificial Sequence: Synthetic oligonucleotide
  misc_feature 1..20: note = Target: SCN10A; (+) strand; PAM type: YTN; PAM sequence: TTT
  source 1..20: mol_type = other DNA
tttttttttttttttttttt

SEQ ID NO: 61799 - DNA, 20 bp, synthetic construct
  misc_feature 1..20: note = Description of Artificial Sequence: Synthetic oligonucleotide
  misc_feature 1..20: note = Target: SCN10A; (+) strand; PAM type: YTN; PAM sequence: TTT
  source 1..20: mol_type = other DNA
tttttttttttttttttttt

SEQ ID NO: 61800 - DNA, 20 bp, synthetic construct
  misc_feature 1..20: note = Description of Artificial Sequence: Synthetic oligonucleotide
  misc_feature 1..20: note = Target: SCN10A; (+) strand; PAM type: YTN; PAM sequence: TTT
  source 1..20: mol_type = other DNA
tttttttttttttttttttt

SEQ ID NO: 61801 - DNA, 20 bp, synthetic construct
  misc_feature 1..20: note = Description of Artificial Sequence: Synthetic oligonucleotide
  misc_feature 1..20: note = Target: SCN10A; (+) strand; PAM type: YTN; PAM sequence: TTT
  source 1..20: mol_type = other DNA
tttttttttttttttttttt

SEQ ID NO: 61802 - DNA, 20 bp, synthetic construct
  misc_feature 1..20: note = Description of Artificial Sequence: Synthetic oligonucleotide
  misc_feature 1..20: note = Target: SCN10A; (+) strand; PAM type: YTN; PAM sequence: TTT
  source 1..20: mol_type = other DNA
tttttttttttttttttttt

SEQ ID NO: 61803 - DNA, 20 bp, synthetic construct
  misc_feature 1..20: note = Description of Artificial Sequence: Synthetic oligonucleotide
  misc_feature 1..20: note = Target: SCN10A; (+) strand; PAM type: YTN; PAM sequence: TTT
  source 1..20: mol_type = other DNA
tttttttttttttttttttt

SEQ ID NO: 61804 - DNA, 20 bp, synthetic construct
  misc_feature 1..20: note = Description of Artificial Sequence: Synthetic oligonucleotide
  misc_feature 1..20: note = Target: SCN10A; (+) strand; PAM type: YTN; PAM sequence: TTT
  source 1..20: mol_type = other DNA
tttttttttttttttttttt

SEQ ID NO: 61805 - DNA, 20 bp, synthetic construct
  misc_feature 1..20: note = Description of Artificial Sequence: Synthetic oligonucleotide
  misc_feature 1..20: note = Target: SCN10A; (+) strand; PAM type: YTN; PAM sequence: TTT
  source 1..20: mol_type = other DNA
tttttttttttttttttttt

SEQ ID NO: 61806 - DNA, 20 bp, synthetic construct
  misc_feature 1..20: note = Description of Artificial Sequence: Synthetic oligonucleotide
  misc_feature 1..20: note = Target: SCN10A; (+) strand; PAM type: YTN; PAM sequence: TTT
  source 1..20: mol_type = other DNA
tttttttttttttttttttt

SEQ ID NO: 61807 - DNA, 20 bp, synthetic construct
  misc_feature 1..20: note = Description of Artificial Sequence: Synthetic oligonucleotide
  misc_feature 1..20: note = Target: SCN10A; (+) strand; PAM type: YTN; PAM sequence: TTT
  source 1..20: mol_type = other DNA
tttttttttttttttttttg

SEQ ID NO: 61808 - DNA, 20 bp, synthetic construct
  misc_feature 1..20: note = Description of Artificial Sequence: Synthetic oligonucleotide
  misc_feature 1..20: note = Target: SCN10A; (+) strand; PAM type: YTN; PAM sequence: TTT
  source 1..20: mol_type = other DNA
ttttttttttttttttttga

SEQ ID NO: 61809 - DNA, 20 bp, synthetic construct
  misc_feature 1..20: note = Description of Artificial Sequence: Synthetic oligonucleotide
  misc_feature 1..20: note = Target: SCN10A; (+) strand; PAM type: YTN; PAM sequence: TTT
  source 1..20: mol_type = other DNA
tttttttttttttttttgag

SEQ ID NO: 61810 - DNA, 20 bp, synthetic construct
  misc_feature 1..20: note = Description of Artificial Sequence: Synthetic oligonucleotide
  misc_feature 1..20: note = Target: SCN10A; (+) strand; PAM type: YTN; PAM sequence: TTT
  source 1..20: mol_type = other DNA
ttttttttttttttttgaga

SEQ ID NO: 61811 - DNA, 20 bp, synthetic construct
  misc_feature 1..20: note = Description of Artificial Sequence: Synthetic oligonucleotide
  misc_feature 1..20: note = Target: SCN10A; (+) strand; PAM type: YTN; PAM sequence: TTT
  source 1..20: mol_type = other DNA
tttttttttttttttgagac

SEQ ID NO: 61812 - DNA, 20 bp, synthetic construct
  misc_feature 1..20: note = Description of Artificial Sequence: Synthetic oligonucleotide
  misc_feature 1..20: note = Target: SCN10A; (+) strand; PAM type: YTN; PAM sequence: TTT
  source 1..20: mol_type = other DNA
ttttttttttttttgagacg

SEQ ID NO: 61813 - DNA, 20 bp, synthetic construct
  misc_feature 1..20: note = Description of Artificial Sequence: Synthetic oligonucleotide
  misc_feature 1..20: note = Target: SCN10A; (+) strand; PAM type: YTN; PAM sequence: TTT
  source 1..20: mol_type = other DNA
tttttttttttttgagacgg

SEQ ID NO: 61814 - DNA, 20 bp, synthetic construct
  misc_feature 1..20: note = Description of Artificial Sequence: Synthetic oligonucleotide
  misc_feature 1..20: note = Target: SCN10A; (+) strand; PAM type: YTN; PAM sequence: TTT
  source 1..20: mol_type = other DNA
ttttttttttttgagacgga

SEQ ID NO: 61815 - DNA, 20 bp, synthetic construct
  misc_feature 1..20: note = Description of Artificial Sequence: Synthetic oligonucleotide
  misc_feature 1..20: note = Target: SCN10A; (+) strand; PAM type: YTN; PAM sequence: TTT
  source 1..20: mol_type = other DNA
tttttttttttgagacggag

SEQ ID NO: 61816 - DNA, 20 bp, synthetic construct
  misc_feature 1..20: note = Description of Artificial Sequence: Synthetic oligonucleotide
  misc_feature 1..20: note = Target: SCN10A; (+) strand; PAM type: YTN; PAM sequence: TTT
  source 1..20: mol_type = other DNA
ttttttttttgagacggagt

SEQ ID NO: 61817 - DNA, 20 bp, synthetic construct
  misc_feature 1..20: note = Description of Artificial Sequence: Synthetic oligonucleotide
  misc_feature 1..20: note = Target: SCN10A; (+) strand; PAM type: YTN; PAM sequence: TTT
  source 1..20: mol_type = other DNA
tttttttttgagacggagtc

SEQ ID NO: 61818 - DNA, 20 bp, synthetic construct
  misc_feature 1..20: note = Description of Artificial Sequence: Synthetic oligonucleotide
  misc_feature 1..20: note = Target: SCN10A; (+) strand; PAM type: YTN; PAM sequence: TTT
  source 1..20: mol_type = other DNA
ttttttttgagacggagtct

SEQ ID NO: 61819 - DNA, 20 bp, synthetic construct
  misc_feature 1..20: note = Description of Artificial Sequence: Synthetic oligonucleotide
  misc_feature 1..20: note = Target: SCN10A; (+) strand; PAM type: YTN; PAM sequence: TTT
  source 1..20: mol_type = other DNA
tttttttgagacggagtctc

SEQ ID NO: 61820 - DNA, 20 bp, synthetic construct
  misc_feature 1..20: note = Description of Artificial Sequence: Synthetic oligonucleotide
  misc_feature 1..20: note = Target: SCN10A; (+) strand; PAM type: YTN; PAM sequence: TTT
  source 1..20: mol_type = other DNA
ttttttgagacggagtctcg

SEQ ID NO: 61821 - DNA, 20 bp, synthetic construct
  misc_feature 1..20: note = Description of Artificial Sequence: Synthetic oligonucleotide
  misc_feature 1..20: note = Target: SCN10A; (+) strand; PAM type: YTN; PAM sequence: TTT
  source 1..20: mol_type = other DNA
tttttgagacggagtctcgc

SEQ ID NO: 61822 - DNA, 20 bp, synthetic construct
  misc_feature 1..20: note = Description of Artificial Sequence: Synthetic oligonucleotide
  misc_feature 1..20: note = Target: SCN10A; (+) strand; PAM type: YTN; PAM sequence: TTT
  source 1..20: mol_type = other DNA
ttttgagacggagtctcgct

SEQ ID NO: 61823 - DNA, 20 bp, synthetic construct
  misc_feature 1..20: note = Description of Artificial Sequence: Synthetic oligonucleotide
  misc_feature 1..20: note = Target: SCN10A; (+) strand; PAM type: YTN; PAM sequence: TTT
  source 1..20: mol_type = other DNA
tttgagacggagtctcgctc

SEQ ID NO: 61824 - DNA, 20 bp, synthetic construct
  misc_feature 1..20: note = Description of Artificial Sequence: Synthetic oligonucleotide
  misc_feature 1..20: note = Target: SCN10A; (+) strand; PAM type: YTN; PAM sequence: TTT
  source 1..20: mol_type = other DNA
ttgagacggagtctcgctct

SEQ ID NO: 61825 - DNA, 20 bp, synthetic construct
  misc_feature 1..20: note = Description of Artificial Sequence: Synthetic oligonucleotide
  misc_feature 1..20: note = Target: SCN10A; (+) strand; PAM type: YTN; PAM sequence: TTT
  source 1..20: mol_type = other DNA
tgagacggagtctcgctctg

SEQ ID NO: 61826 - DNA, 20 bp, synthetic construct
  misc_feature 1..20: note = Description of Artificial Sequence: Synthetic oligonucleotide
  misc_feature 1..20: note = Target: SCN10A; (+) strand; PAM type: YTN; PAM sequence: TTT
  source 1..20: mol_type = other DNA
gagacggagtctcgctctgt

SEQ ID NO: 61827 - DNA, 20 bp, synthetic construct
  misc_feature 1..20: note = Description of Artificial Sequence: Synthetic oligonucleotide
  misc_feature 1..20: note = Target: SCN10A; (+) strand; PAM type: YTN; PAM sequence: TTG
  source 1..20: mol_type = other DNA
agacggagtctcgctctgtc

SEQ ID NO: 61828 - DNA, 20 bp, synthetic construct
  misc_feature 1..20: note = Description of Artificial Sequence: Synthetic oligonucleotide
  misc_feature 1..20: note = Target: SCN10A; (+) strand; PAM type: YTN; PAM sequence: CTC
  source 1..20: mol_type = other DNA
gctctgtcgcccaggctgga

SEQ ID NO: 61829 - DNA, 20 bp, synthetic construct
  misc_feature 1..20: note = Description of Artificial Sequence: Synthetic oligonucleotide
  misc_feature 1..20: note = Target: SCN10A; (+) strand; PAM type: YTN; PAM sequence: CTC
  source 1..20: mol_type = other DNA
tgtcgcccaggctggagtgc

SEQ ID NO: 61830 - DNA, 20 bp, synthetic construct
  misc_feature 1..20: note = Description of Artificial Sequence: Synthetic oligonucleotide
  misc_feature 1..20: note = Target: SCN10A; (+) strand; PAM type: YTN; PAM sequence: CTG
  source 1..20: mol_type = other DNA
tcgcccaggctggagtgcag

SEQ ID NO: 61831 - DNA, 20 bp, synthetic construct
  misc_feature 1..20: note = Description of Artificial Sequence: Synthetic oligonucleotide
  misc_feature 1..20: note = Target: SCN10A; (+) strand; PAM type: YTN; PAM sequence: CTG
  source 1..20: mol_type = other DNA
gagtgcagtagcgggatctc

SEQ ID NO: 61832 - DNA, 20 bp, synthetic construct
  misc_feature 1..20: note = Description of Artificial Sequence: Synthetic oligonucleotide
  misc_feature 1..20: note = Target: SCN10A; (+) strand; PAM type: YTN; PAM sequence: CTC
  source 1..20: mol_type = other DNA
ggctcactgcaagctctgcc

SEQ ID NO: 61833 - DNA, 20 bp, synthetic construct
  misc_feature 1..20: note = Description of Artificial Sequence: Synthetic oligonucleotide
  misc_feature 1..20: note = Target: SCN10A; (+) strand; PAM type: YTN; PAM sequence: CTC
  source 1..20: mol_type = other DNA
actgcaagctctgcctccca

SEQ ID NO: 61834 - DNA, 20 bp, synthetic construct
  misc_feature 1..20: note = Description of Artificial Sequence: Synthetic oligonucleotide
  misc_feature 1..20: note = Target: SCN10A; (+) strand; PAM type: YTN; PAM sequence: CTG
  source 1..20: mol_type = other DNA
caagctctgcctcccaggtt

SEQ ID NO: 61835 - DNA, 20 bp, synthetic construct
  misc_feature 1..20: note = Description of Artificial Sequence: Synthetic oligonucleotide
  misc_feature 1..20: note = Target: SCN10A; (+) strand; PAM type: YTN; PAM sequence: CTC
  source 1..20: mol_type = other DNA
tgcctcccaggttcacgcca

SEQ ID NO: 61836 - DNA, 20 bp, synthetic construct
  misc_feature 1..20: note = Description of Artificial Sequence: Synthetic oligonucleotide
  misc_feature 1..20: note = Target: SCN10A; (+) strand; PAM type: YTN; PAM sequence: CTG
  source 1..20: mol_type = other DNA
cctcccaggttcacgccatt

SEQ ID NO: 61837 - DNA, 20 bp, synthetic construct
  misc_feature 1..20: note = Description of Artificial Sequence: Synthetic oligonucleotide
  misc_feature 1..20: note = Target: SCN10A; (+) strand; PAM type: YTN; PAM sequence: CTC
  source 1..20: mol_type = other DNA
ccaggttcacgccattctcc

SEQ ID NO: 61838 - DNA, 20 bp, synthetic construct
  misc_feature 1..20: note = Description of Artificial Sequence: Synthetic oligonucleotide
  misc_feature 1..20: note = Target: SCN10A; (+) strand; PAM type: YTN; PAM sequence: TTC
  source 1..20: mol_type = other DNA
acgccattctcctgcctcag

SEQ ID NO: 61839 - DNA, 20 bp, synthetic construct
  misc_feature 1..20: note = Description of Artificial Sequence: Synthetic oligonucleotide
  misc_feature 1..20: note = Target: SCN10A; (+) strand; PAM type: YTN; PAM sequence: TTC
  source 1..20: mol_type = other DNA
tcctgcctcagcctcccaag

SEQ ID NO: 61840 - DNA, 20 bp, synthetic construct
  misc_feature 1..20: note = Description of Artificial Sequence: Synthetic oligonucleotide
  misc_feature 1..20: note = Target: SCN10A; (+) strand; PAM type: YTN; PAM sequence: CTC
  source 1..20: mol_type = other DNA
ctgcctcagcctcccaagta

SEQ ID NO: 61841 - DNA, 20 bp, synthetic construct
  misc_feature 1..20: note = Description of Artificial Sequence: Synthetic oligonucleotide
  misc_feature 1..20: note = Target: SCN10A; (+) strand; PAM type: YTN; PAM sequence: CTG
  source 1..20: mol_type = other DNA
cctcagcctcccaagtagct

SEQ ID NO: 61842 - DNA, 20 bp, synthetic construct
  misc_feature 1..20: note = Description of Artificial Sequence: Synthetic oligonucleotide
  misc_feature 1..20: note = Target: SCN10A; (+) strand; PAM type: YTN; PAM sequence: CTC
  source 1..20: mol_type = other DNA
agcctcccaagtagctggga

SEQ ID NO: 61843 - DNA, 20 bp, synthetic construct
  misc_feature 1..20: note = Description of Artificial Sequence: Synthetic oligonucleotide
  misc_feature 1..20: note = Target: SCN10A; (+) strand; PAM type: YTN; PAM sequence: CTC
  source 1..20: mol_type = other DNA
ccaagtagctgggactacag

SEQ ID NO: 61844 - DNA, 20 bp, synthetic construct
  misc_feature 1..20: note = Description of Artificial Sequence: Synthetic oligonucleotide
  misc_feature 1..20: note = Target: SCN10A; (+) strand; PAM type: YTN; PAM sequence: CTG
  source 1..20: mol_type = other DNA
ggactacaggcgcccgccac

SEQ ID NO: 61845 - DNA, 20 bp, synthetic construct
  misc_feature 1..20: note = Description of Artificial Sequence: Synthetic oligonucleotide
  misc_feature 1..20: note = Target: SCN10A; (+) strand; PAM type: YTN; PAM sequence: CTA
  source 1..20: mol_type = other DNA
caggcgcccgccactacgcc

SEQ ID NO: 61846 - DNA, 20 bp, synthetic construct
  misc_feature 1..20: note = Description of Artificial Sequence: Synthetic oligonucleotide
  misc_feature 1..20: note = Target: SCN10A; (+) strand; PAM type: YTN; PAM sequence: CTA
  source 1..20: mol_type = other DNA
cgcccggctaattttttgta

SEQ ID NO: 61847 - DNA, 20 bp, synthetic construct
  misc_feature 1..20: note = Description of Artificial Sequence: Synthetic oligonucleotide
  misc_feature 1..20: note = Target: SCN10A; (+) strand; PAM type: YTN; PAM sequence: CTA
  source 1..20: mol_type = other DNA
attttttgtatttttagtag

SEQ ID NO: 61848 - DNA, 20 bp, synthetic construct
  misc_feature 1..20: note = Description of Artificial Sequence: Synthetic oligonucleotide
  misc_feature 1..20: note = Target: SCN10A; (+) strand; PAM type: YTN; PAM sequence: TTT
  source 1..20: mol_type = other DNA
tttgtatttttagtagagac

SEQ ID NO: 61849 - DNA, 20 bp, synthetic construct
  misc_feature 1..20: note = Description of Artificial Sequence: Synthetic oligonucleotide
  misc_feature 1..20: note = Target: SCN10A; (+) strand; PAM type: YTN; PAM sequence: TTT
  source 1..20: mol_type = other DNA
ttgtatttttagtagagacg

SEQ ID NO: 61850 - DNA, 20 bp, synthetic construct
  misc_feature 1..20: note = Description of Artificial Sequence: Synthetic oligonucleotide
  misc_feature 1..20: note = Target: SCN10A; (+) strand; PAM type: YTN; PAM sequence: TTT
  source 1..20: mol_type = other DNA
tgtatttttagtagagacgg

SEQ ID NO: 61851 - DNA, 20 bp, synthetic construct
  misc_feature 1..20: note = Description of Artificial Sequence: Synthetic oligonucleotide
  misc_feature 1..20: note = Target: SCN10A; (+) strand; PAM type: YTN; PAM sequence: TTT
  source 1..20: mol_type = other DNA
gtatttttagtagagacggg

SEQ ID NO: 61852 - DNA, 20 bp, synthetic construct
  misc_feature 1..20: note = Description of Artificial Sequence: Synthetic oligonucleotide
  misc_feature 1..20: note = Target: SCN10A; (+) strand; PAM type: YTN; PAM sequence: TTG
  source 1..20: mol_type = other DNA
tatttttagtagagacgggg

SEQ ID NO: 61853 - DNA, 20 bp, synthetic construct
  misc_feature 1..20: note = Description of Artificial Sequence: Synthetic oligonucleotide
  misc_feature 1..20: note = Target: SCN10A; (+) strand; PAM type: YTN; PAM sequence: TTT
  source 1..20: mol_type = other DNA
ttagtagagacggggtttca

SEQ ID NO: 61854 - DNA, 20 bp, synthetic construct
  misc_feature 1..20: note = Description of Artificial Sequence: Synthetic oligonucleotide
  misc_feature 1..20: note = Target: SCN10A; (+) strand; PAM type: YTN; PAM sequence: TTT
  source 1..20: mol_type = other DNA
tagtagagacggggtttcac

SEQ ID NO: 61855 - DNA, 20 bp, synthetic construct
  misc_feature 1..20: note = Description of Artificial Sequence: Synthetic oligonucleotide
  misc_feature 1..20: note = Target: SCN10A; (+) strand; PAM type: YTN; PAM sequence: TTT
  source 1..20: mol_type = other DNA
agtagagacggggtttcacc

SEQ ID NO: 61856 - DNA, 20 bp, synthetic construct
  misc_feature 1..20: note = Description of Artificial Sequence: Synthetic oligonucleotide
  misc_feature 1..20: note = Target: SCN10A; (+) strand; PAM type: YTN; PAM sequence: TTA
  source 1..20: mol_type = other DNA
gtagagacggggtttcaccg

SEQ ID NO: 61857 - DNA, 20 bp, synthetic construct
  misc_feature 1..20: note = Description of Artificial Sequence: Synthetic oligonucleotide
  misc_feature 1..20: note = Target: SCN10A; (+) strand; PAM type: YTN; PAM sequence: TTT
  source 1..20: mol_type = other DNA
caccgttttagccgggatgg

SEQ ID NO: 61858 - DNA, 20 bp, synthetic construct
  misc_feature 1..20: note = Description of Artificial Sequence: Synthetic oligonucleotide
  misc_feature 1..20: note = Target: SCN10A; (+) strand; PAM type: YTN; PAM sequence: TTC
  source 1..20: mol_type = other DNA
accgttttagccgggatggt

SEQ ID NO: 61859 - DNA, 20 bp, synthetic construct
  misc_feature 1..20: note = Description of Artificial Sequence: Synthetic oligonucleotide
  misc_feature 1..20: note = Target: SCN10A; (+) strand; PAM type: YTN; PAM sequence: TTT
  source 1..20: mol_type = other DNA
tagccgggatggtctcgatc

SEQ ID NO: 61860 - DNA, 20 bp, synthetic construct
  misc_feature 1..20: note = Description of Artificial Sequence: Synthetic oligonucleotide
  misc_feature 1..20: note = Target: SCN10A; (+) strand; PAM type: YTN; PAM sequence: TTT
  source 1..20: mol_type = other DNA
agccgggatggtctcgatct

SEQ ID NO: 61861 - DNA, 20 bp, synthetic construct
  misc_feature 1..20: note = Description of Artificial Sequence: Synthetic oligonucleotide
  misc_feature 1..20: note = Target: SCN10A; (+) strand; PAM type: YTN; PAM sequence: TTA
  source 1..20: mol_type = other DNA
gccgggatggtctcgatctc

SEQ ID NO: 61862 - DNA, 20 bp, synthetic construct
  misc_feature 1..20: note = Description of Artificial Sequence: Synthetic oligonucleotide
  misc_feature 1..20: note = Target: SCN10A; (+) strand; PAM type: YTN; PAM sequence: CTC
  source 1..20: mol_type = other DNA
gatctcctgacctcatgatc

SEQ ID NO: 61863 - DNA, 20 bp, synthetic construct
  misc_feature 1..20: note = Description of Artificial Sequence: Synthetic oligonucleotide
  misc_feature 1..20: note = Target: SCN10A; (+) strand; PAM type: YTN; PAM sequence: CTC
  source 1..20: mol_type = other DNA
ctgacctcatgatccgcccg

SEQ ID NO: 61864 - DNA, 20 bp, synthetic construct
  misc_feature 1..20: note = Description of Artificial Sequence: Synthetic oligonucleotide
  misc_feature 1..20: note = Target: SCN10A; (+) strand; PAM type: YTN; PAM sequence: CTG
  source 1..20: mol_type = other DNA
acctcatgatccgcccgcct

SEQ ID NO: 61865 - DNA, 20 bp, synthetic construct
  misc_feature 1..20: note = Description of Artificial Sequence: Synthetic oligonucleotide
  misc_feature 1..20: note = Target: SCN10A; (+) strand; PAM type: YTN; PAM sequence: CTC
  source 1..20: mol_type = other DNA
atgatccgcccgcctcagcc

SEQ ID NO: 61866 - DNA, 20 bp, synthetic construct
  misc_feature 1..20: note = Description of Artificial Sequence: Synthetic oligonucleotide
  misc_feature 1..20: note = Target: SCN10A; (+) strand; PAM type: YTN; PAM sequence: CTC
  source 1..20: mol_type = other DNA
agcctcccaaagtgctggga

SEQ ID NO: 61867 - DNA, 20 bp, synthetic construct
  misc_feature 1..20: note = Description of Artificial Sequence: Synthetic oligonucleotide
  misc_feature 1..20: note = Target: SCN10A; (+) strand; PAM type: YTN; PAM sequence: CTC
  source 1..20: mol_type = other DNA
ccaaagtgctgggattacag

SEQ ID NO: 61868 - DNA, 20 bp, synthetic construct
  misc_feature 1..20: note = Description of Artificial Sequence: Synthetic oligonucleotide
  misc_feature 1..20: note = Target: SCN10A; (+) strand; PAM type: YTN; PAM sequence: CTG
  source 1..20: mol_type = other DNA
ggattacaggcgtgagccac

SEQ ID NO: 61869 - DNA, 20 bp, synthetic construct
  misc_feature 1..20: note = Description of Artificial Sequence: Synthetic oligonucleotide
  misc_feature 1..20: note = Target: SCN10A; (+) strand; PAM type: YTN; PAM sequence: TTA
  source 1..20: mol_type = other DNA
caggcgtgagccaccgcgcc

SEQ ID NO: 61870 - DNA, 20 bp, synthetic construct
  misc_feature 1..20: note = Description of Artificial Sequence: Synthetic oligonucleotide
  misc_feature 1..20: note = Target: SCN10A; (+) strand; PAM type: YTN; PAM sequence: CTC
  source 1..20: mol_type = other DNA
ttacaagtgactggcaggag

SEQ ID NO: 61871 - DNA, 20 bp, synthetic construct
  misc_feature 1..20: note = Description of Artificial Sequence: Synthetic oligonucleotide
  misc_feature 1..20: note = Target: SCN10A; (+) strand; PAM type: YTN; PAM sequence: CTT
  source 1..20: mol_type = other DNA
acaagtgactggcaggagtg

SEQ ID NO: 61872 - DNA, 20 bp, synthetic construct
  misc_feature 1..20: note = Description of Artificial Sequence: Synthetic oligonucleotide
  misc_feature 1..20: note = Target: SCN10A; (+) strand; PAM type: YTN; PAM sequence: TTA
  source 1..20: mol_type = other DNA
caagtgactggcaggagtga

SEQ ID NO: 61873 - DNA, 20 bp, synthetic construct
  misc_feature 1..20: note = Description of Artificial Sequence: Synthetic oligonucleotide
  misc_feature 1..20: note = Target: SCN10A; (+) strand; PAM type: YTN; PAM sequence: CTG
  source 1..20: mol_type = other DNA
gcaggagtgaaaacctggcc

SEQ ID NO: 61874 - DNA, 20 bp, synthetic construct
  misc_feature 1..20: note = Description of Artificial Sequence: Synthetic oligonucleotide
  misc_feature 1..20: note = Target: SCN10A; (+) strand; PAM type: YTN; PAM sequence: CTG
  source 1..20: mol_type = other DNA
gccagtcctgtgtgaagcca

SEQ ID NO: 61875 - DNA, 20 bp, synthetic construct
  misc_feature 1..20: note = Description of Artificial Sequence: Synthetic oligonucleotide
  misc_feature 1..20: note = Target: SCN10A; (+) strand; PAM type: YTN; PAM sequence: CTG
  source 1..20: mol_type = other DNA
tgtgaagccaaattggcaat

SEQ ID NO: 61876 - DNA, 20 bp, synthetic construct
  misc_feature 1..20: note = Description of Artificial Sequence: Synthetic oligonucleotide
  misc_feature 1..20: note = Target: SCN10A; (+) strand; PAM type: YTN; PAM sequence: TTG
  source 1..20: mol_type = other DNA
gcaatgtgactcagaggttt

SEQ ID NO: 61877 - DNA, 20 bp, synthetic construct
  misc_feature 1..20: note = Description of Artificial Sequence: Synthetic oligonucleotide
  misc_feature 1..20: note = Target: SCN10A; (+) strand; PAM type: YTN; PAM sequence: CTC
  source 1..20: mol_type = other DNA
agaggtttcaggaacctagc

SEQ ID NO: 61878 - DNA, 20 bp, synthetic construct
  misc_feature 1..20: note = Description of Artificial Sequence: Synthetic oligonucleotide
  misc_feature 1..20: note = Target: SCN10A; (+) strand; PAM type: YTN; PAM sequence: TTT
  source 1..20: mol_type = other DNA
caggaacctagcaattcctc

SEQ ID NO: 61879 - DNA, 20 bp, synthetic construct
  misc_feature 1..20: note = Description of Artificial Sequence: Synthetic oligonucleotide
  misc_feature 1..20: note = Target: SCN10A; (+) strand; PAM type: YTN; PAM sequence: TTC
  source 1..20: mol_type = other DNA
aggaacctagcaattcctcc

SEQ ID NO: 61880 - DNA, 20 bp, synthetic construct
  misc_feature 1..20: note = Description of Artificial Sequence: Synthetic oligonucleotide
  misc_feature 1..20: note = Target: SCN10A; (+) strand; PAM type: YTN; PAM sequence: CTA
  source 1..20: mol_type = other DNA
gcaattcctccttcaagcac

SEQ ID NO: 61881 - DNA, 20 bp, synthetic construct
  misc_feature 1..20: note = Description of Artificial Sequence: Synthetic oligonucleotide
  misc_feature 1..20: note = Target: SCN10A; (+) strand; PAM type: YTN; PAM sequence: TTC
  source 1..20: mol_type = other DNA
ctccttcaagcactaatcct

SEQ ID NO: 61882 - DNA, 20 bp, synthetic construct
  misc_feature 1..20: note = Description of Artificial Sequence: Synthetic oligonucleotide
  misc_feature 1..20: note = Target: SCN10A; (+) strand; PAM type: YTN; PAM sequence: CTC
  source 1..20: mol_type = other DNA
cttcaagcactaatcctaag

SEQ ID NO: 61883 - DNA, 20 bp, synthetic construct
  misc_feature 1..20: note = Description of Artificial Sequence: Synthetic oligonucleotide
  misc_feature 1..20: note = Target: SCN10A; (+) strand; PAM type: YTN; PAM sequence: CTT
  source 1..20: mol_type = other DNA
caagcactaatcctaaggac

SEQ ID NO: 61884 - DNA, 20 bp, synthetic construct
  misc_feature 1..20: note = Description of Artificial Sequence: Synthetic oligonucleotide
  misc_feature 1..20: note = Target: SCN10A; (+) strand; PAM type: YTN; PAM sequence: TTC
  source 1..20: mol_type = other DNA
aagcactaatcctaaggaca

SEQ ID NO: 61885 - DNA, 20 bp, synthetic construct
  misc_feature 1..20: note = Description of Artificial Sequence: Synthetic oligonucleotide
  misc_feature 1..20: note = Target: SCN10A; (+) strand; PAM type: YTN; PAM sequence: CTA
  source 1..20: mol_type = other DNA
atcctaaggacactggaggc

SEQ ID NO: 61886 - DNA, 20 bp, synthetic construct
  misc_feature 1..20: note = Description of Artificial Sequence: Synthetic oligonucleotide
  misc_feature 1..20: note = Target: SCN10A; (+) strand; PAM type: YTN; PAM sequence: CTA
  source 1..20: mol_type = other DNA
aggacactggaggctgttgg

SEQ ID NO: 61887 - DNA, 20 bp, synthetic construct
  misc_feature 1..20: note = Description of Artificial Sequence: Synthetic oligonucleotide
  misc_feature 1..20: note = Target: SCN10A; (+) strand; PAM type: YTN; PAM sequence: CTG
  source 1..20: mol_type = other DNA
gaggctgttggtgcccactc

SEQ ID NO: 61888 - DNA, 20 bp, synthetic construct
  misc_feature 1..20: note = Description of Artificial Sequence: Synthetic oligonucleotide
  misc_feature 1..20: note = Target: SCN10A; (+) strand; PAM type: YTN; PAM sequence: CTG
  source 1..20: mol_type = other DNA
ttggtgcccactcaggtcct

SEQ ID NO: 61889 - DNA, 20 bp, synthetic construct
  misc_feature 1..20: note = Description of Artificial Sequence: Synthetic oligonucleotide
  misc_feature 1..20: note = Target: SCN10A; (+) strand; PAM type: YTN; PAM sequence: TTG
  source 1..20: mol_type = other DNA
gtgcccactcaggtcctctt

SEQ ID NO: 61890 - DNA, 20 bp, synthetic construct
  misc_feature 1..20: note = Description of Artificial Sequence: Synthetic oligonucleotide
  misc_feature 1..20: note = Target: SCN10A; (+) strand; PAM type: YTN; PAM sequence: CTC
  source 1..20: mol_type = other DNA
aggtcctctttaaggggcca

SEQ ID NO: 61891 - DNA, 20 bp, synthetic construct
  misc_feature 1..20: note = Description of Artificial Sequence: Synthetic oligonucleotide
  misc_feature 1..20: note = Target: SCN10A; (+) strand; PAM type: YTN; PAM sequence: CTC
  source 1..20: mol_type = other DNA
tttaaggggccagtgcccct

SEQ ID NO: 61892 - DNA, 20 bp, synthetic construct
  misc_feature 1..20: note = Description of Artificial Sequence: Synthetic oligonucleotide
  misc_feature 1..20: note = Target: SCN10A; (+) strand; PAM type: YTN; PAM sequence: CTT
  source 1..20: mol_type = other DNA
taaggggccagtgcccctat

SEQ ID NO: 61893 - DNA, 20 bp, synthetic construct
  misc_feature 1..20: note = Description of Artificial Sequence: Synthetic oligonucleotide
  misc_feature 1..20: note = Target: SCN10A; (+) strand; PAM type: YTN; PAM sequence: TTT
  source 1..20: mol_type = other DNA
aaggggccagtgcccctatc

SEQ ID NO: 61894 - DNA, 20 bp, synthetic construct
  misc_feature 1..20: note = Description of Artificial Sequence: Synthetic oligonucleotide
  misc_feature 1..20: note = Target: SCN10A; (+) strand; PAM type: YTN; PAM sequence: TTA
  source 1..20: mol_type = other DNA
aggggccagtgcccctatcc

SEQ ID NO: 61895 - DNA, 20 bp, synthetic construct
  misc_feature 1..20: note = Description of Artificial Sequence: Synthetic oligonucleotide
  misc_feature 1..20: note = Target: SCN10A; (+) strand; PAM type: YTN; PAM sequence: CTA
  source 1..20: mol_type = other DNA
tccttcatctgctgggagtg

SEQ ID NO: 61896 - DNA, 20 bp, synthetic construct
  misc_feature 1..20: note = Description of Artificial Sequence: Synthetic oligonucleotide
  misc_feature 1..20: note = Target: SCN10A; (+) strand; PAM type: YTN; PAM sequence: CTT
  source 1..20: mol_type = other DNA
catctgctgggagtgtcggc

SEQ ID NO: 61897 - DNA, 20 bp, synthetic construct
  misc_feature 1..20: note = Description of Artificial Sequence: Synthetic oligonucleotide
  misc_feature 1..20: note = Target: SCN10A; (+) strand; PAM type: YTN; PAM sequence: TTC
  source 1..20: mol_type = other DNA
atctgctgggagtgtcggct

SEQ ID NO: 61898 - DNA, 20 bp, synthetic construct
  misc_feature 1..20: note = Description of Artificial Sequence: Synthetic oligonucleotide
  misc_feature 1..20: note = Target: SCN10A; (+) strand; PAM type: YTN; PAM sequence: CTG
  source 1..20: mol_type = other DNA
ctgggagtgtcggctgctaa

SEQ ID NO: 61899 - DNA, 20 bp, synthetic construct
  misc_feature 1..20: note = Description of Artificial Sequence: Synthetic oligonucleotide
  misc_feature 1..20: note = Target: SCN10A; (+) strand; PAM type: YTN; PAM sequence: CTG
  source 1..20: mol_type = other DNA
ggagtgtcggctgctaatag

SEQ ID NO: 61900 - DNA, 20 bp, synthetic construct
  misc_feature 1..20: note = Description of Artificial Sequence: Synthetic oligonucleotide
  misc_feature 1..20: note = Target: SCN10A; (+) strand; PAM type: YTN; PAM sequence: CTG
  source 1..20: mol_type = other DNA
ctaatagttcatggatgcag

SEQ ID NO: 61901 - DNA, 20 bp, synthetic construct
  misc_feature 1..20: note = Description of Artificial Sequence: Synthetic oligonucleotide
  misc_feature 1..20: note = Target: SCN10A; (+) strand; PAM type: YTN; PAM sequence: CTA
  source 1..20: mol_type = other DNA
atagttcatggatgcagaca

SEQ ID NO: 61902 - DNA, 20 bp, synthetic construct
  misc_feature 1..20: note = Description of Artificial Sequence: Synthetic oligonucleotide
  misc_feature 1..20: note = Target: SCN10A; (+) strand; PAM type: YTN; PAM sequence: TTC
  source 1..20: mol_type = other DNA
atggatgcagacaccccctt

SEQ ID NO: 61903 - DNA, 20 bp, synthetic construct
  misc_feature 1..20: note = Description of Artificial Sequence: Synthetic oligonucleotide
  misc_feature 1..20: note = Target: SCN10A; (+) strand; PAM type: YTN; PAM sequence: CTT
  source 1..20: mol_type = other DNA
cctgatggcttcgctgggct

SEQ ID NO: 61904 - DNA, 20 bp, synthetic construct
  misc_feature 1..20: note = Description of Artificial Sequence: Synthetic oligonucleotide
  misc_feature 1..20: note = Target: SCN10A; (+) strand; PAM type: YTN; PAM sequence: TTC
  source 1..20: mol_type = other DNA
ctgatggcttcgctgggctg

SEQ ID NO: 61905 - DNA, 20 bp, synthetic construct
  misc_feature 1..20: note = Description of Artificial Sequence: Synthetic oligonucleotide
  misc_feature 1..20: note = Target: SCN10A; (+) strand; PAM type: YTN; PAM sequence: CTG
  source 1..20: mol_type = other DNA
atggcttcgctgggctggag

SEQ ID NO: 61906 - DNA, 20 bp, synthetic construct
  misc_feature 1..20: note = Description of Artificial Sequence: Synthetic oligonucleotide
  misc_feature 1..20: note = Target: SCN10A; (+) strand; PAM type: YTN; PAM sequence: CTT
  source 1..20: mol_type = other DNA
cgctgggctggaggaaactg

SEQ ID NO: 61907 - DNA, 20 bp, synthetic construct
  misc_feature 1..20: note = Description of Artificial Sequence: Synthetic oligonucleotide
  misc_feature 1..20: note = Target: SCN10A; (+) strand; PAM type: YTN; PAM sequence: TTC
  source 1..20: mol_type = other DNA
gctgggctggaggaaactgt

SEQ ID NO: 61908 - DNA, 20 bp, synthetic construct
  misc_feature 1..20: note = Description of Artificial Sequence: Synthetic oligonucleotide
  misc_feature 1..20: note = Target: SCN10A; (+) strand; PAM type: YTN; PAM sequence: CTG
  source 1..20: mol_type = other DNA
ggctggaggaaactgtgtcc

SEQ ID NO: 61909 - DNA, 20 bp, synthetic construct
  misc_feature 1..20: note = Description of Artificial Sequence: Synthetic oligonucleotide
  misc_feature 1..20: note = Target: SCN10A; (+) strand; PAM type: YTN; PAM sequence: CTG
  source 1..20: mol_type = other DNA
gaggaaactgtgtccacctt

SEQ ID NO: 61910 - DNA, 20 bp, synthetic construct
  misc_feature 1..20: note = Description of Artificial Sequence: Synthetic oligonucleotide
  misc_feature 1..20: note = Target: SCN10A; (+) strand; PAM type: YTN; PAM sequence: CTG
  source 1..20: mol_type = other DNA
tgtccaccttgggaaatgct

SEQ ID NO: 61911 - DNA, 20 bp, synthetic construct
  misc_feature 1..20: note = Description of Artificial Sequence: Synthetic oligonucleotide
  misc_feature 1..20: note = Target: SCN10A; (+) strand; PAM type: YTN; PAM sequence: CTT
  source 1..20: mol_type = other DNA
gggaaatgcttatcctcccc

SEQ ID NO: 61912 - DNA, 20 bp, synthetic construct
  misc_feature 1..20: note = Description of Artificial Sequence: Synthetic oligonucleotide
  misc_feature 1..20: note = Target: SCN10A; (+) strand; PAM type: YTN; PAM sequence: TTG
  source 1..20: mol_type = other DNA
ggaaatgcttatcctccccg

SEQ ID NO: 61913 - DNA, 20 bp, synthetic construct
  misc_feature 1..20: note = Description of Artificial Sequence: Synthetic oligonucleotide
  misc_feature 1..20: note = Target: SCN10A; (+) strand; PAM type: YTN; PAM sequence: CTT
  source 1..20: mol_type = other DNA
atcctccccgctggggcagc

SEQ ID NO: 61914 - DNA, 20 bp, synthetic construct
  misc_feature 1..20: note = Description of Artificial Sequence: Synthetic oligonucleotide
  misc_feature 1..20: note = Target: SCN10A; (+) strand; PAM type: YTN; PAM sequence: TTA
  source 1..20: mol_type = other DNA
tcctccccgctggggcagcc

SEQ ID NO: 61915 - DNA, 20 bp, synthetic construct
  misc_feature 1..20: note = Description of Artificial Sequence: Synthetic oligonucleotide
  misc_feature 1..20: note = Target: SCN10A; (+) strand; PAM type: YTN; PAM sequence: CTC
  source 1..20: mol_type = other DNA
cccgctggggcagccctcag

SEQ ID NO: 61916 - DNA, 20 bp, synthetic construct
  misc_feature 1..20: note = Description of Artificial Sequence: Synthetic oligonucleotide
  misc_feature 1..20: note = Target: SCN10A; (+) strand; PAM type: YTN; PAM sequence: CTG
  source 1..20: mol_type = other DNA
gggcagccctcagccaggga

SEQ ID NO: 61917 - DNA, 20 bp, synthetic construct
  misc_feature 1..20: note = Description of Artificial Sequence: Synthetic oligonucleotide
  misc_feature 1..20: note = Target: SCN10A; (+) strand; PAM type: YTN; PAM sequence: CTC
  source 1..20: mol_type = other DNA
agccagggacagtgacaggg

SEQ ID NO: 61918 - DNA, 20 bp, synthetic construct
  misc_feature 1..20: note = Description of Artificial Sequence: Synthetic oligonucleotide
  misc_feature 1..20: note = Target: SCN10A; (+) strand; PAM type: YTN; PAM sequence: TTT
  source 1..20: mol_type = other DNA
acaaggctgtcttctttgcc

SEQ ID NO: 61919 - DNA, 20 bp, synthetic construct
  misc_feature 1..20: note = Description of Artificial Sequence: Synthetic oligonucleotide
  misc_feature 1..20: note = Target: SCN10A; (+) strand; PAM type: YTN; PAM sequence: TTA
  source 1..20: mol_type = other DNA
caaggctgtcttctttgcct

SEQ ID NO: 61920 - DNA, 20 bp, synthetic construct
  misc_feature 1..20: note = Description of Artificial Sequence: Synthetic oligonucleotide
  misc_feature 1..20: note = Target: SCN10A; (+) strand; PAM type: YTN; PAM sequence: CTG
  source 1..20: mol_type = other DNA
tcttctttgcctcaaggtgg

SEQ ID NO: 61921 - DNA, 20 bp, synthetic construct
  misc_feature 1..20: note = Description of Artificial Sequence: Synthetic oligonucleotide
  misc_feature 1..20: note = Target: SCN10A; (+) strand; PAM type: YTN; PAM sequence: CTT
  source 1..20: mol_type = other DNA
ctttgcctcaaggtgggaca

SEQ ID NO: 61922 - DNA, 20 bp, synthetic construct
  misc_feature 1..20: note = Description of Artificial Sequence: Synthetic oligonucleotide
  misc_feature 1..20: note = Target: SCN10A; (+) strand; PAM type: YTN; PAM sequence: TTC
  source 1..20: mol_type = other DNA
tttgcctcaaggtgggacag

SEQ ID NO: 61923 - DNA, 20 bp, synthetic construct
  misc_feature 1..20: note = Description of Artificial Sequence: Synthetic oligonucleotide
  misc_feature 1..20: note = Target: SCN10A; (+) strand; PAM type: YTN; PAM sequence: CTT
  source 1..20: mol_type = other DNA
tgcctcaaggtgggacagct

SEQ ID NO: 61924 - DNA, 20 bp, synthetic construct
  misc_feature 1..20: note = Description of Artificial Sequence: Synthetic oligonucleotide
  misc_feature 1..20: note = Target: SCN10A; (+) strand; PAM type: YTN; PAM sequence: TTT
  source 1..20: mol_type = other DNA
gcctcaaggtgggacagctc

SEQ ID NO: 61925 - DNA, 20 bp, synthetic construct
  misc_feature 1..20: note = Description of Artificial Sequence: Synthetic oligonucleotide
  misc_feature 1..20: note = Target: SCN10A; (+) strand; PAM type: YTN; PAM sequence: TTG
  source 1..20: mol_type = other DNA
cctcaaggtgggacagctct

SEQ ID NO: 61926 - DNA, 20 bp, synthetic construct
  misc_feature 1..20: note = Description of Artificial Sequence: Synthetic oligonucleotide
  misc_feature 1..20: note = Target: SCN10A; (+) strand; PAM type: YTN; PAM sequence: CTC
  source 1..20: mol_type = other DNA
aaggtgggacagctctttgg

SEQ ID NO: 61927 - DNA, 20 bp, synthetic construct
  misc_feature 1..20: note = Description of Artificial Sequence: Synthetic oligonucleotide
  misc_feature 1..20: note = Target: SCN10A; (+) strand; PAM type: YTN; PAM sequence: CTC
  source 1..20: mol_type = other DNA
tttggtgtcctttgtgcttc

SEQ ID NO: 61928 - DNA, 20 bp, synthetic construct
  misc_feature 1..20: note = Description of Artificial Sequence: Synthetic oligonucleotide
  misc_feature 1..20: note = Target: SCN10A; (+) strand; PAM type: YTN; PAM sequence: CTT
  source 1..20: mol_type = other DNA
tggtgtcctttgtgcttcag

SEQ ID NO: 61929 - DNA, 20 bp, synthetic construct
  misc_feature 1..20: note = Description of Artificial Sequence: Synthetic oligonucleotide
  misc_feature 1..20: note = Target: SCN10A; (+) strand; PAM type: YTN; PAM sequence: TTT
  source 1..20: mol_type = other DNA
ggtgtcctttgtgcttcagg

SEQ ID NO: 61930 - DNA, 20 bp, synthetic construct
  misc_feature 1..20: note = Description of Artificial Sequence: Synthetic oligonucleotide
  misc_feature 1..20: note = Target: SCN10A; (+) strand; PAM type: YTN; PAM sequence: TTG
  source 1..20: mol_type = other DNA
gtgtcctttgtgcttcaggg

SEQ ID NO: 61931 - DNA, 20 bp, synthetic construct
  misc_feature 1..20: note = Description of Artificial Sequence: Synthetic oligonucleotide
  misc_feature 1..20: note = Target: SCN10A; (+) strand; PAM type: YTN; PAM sequence: CTT
  source 1..20: mol_type = other DNA
tgtgcttcagggctttccat

SEQ ID NO: 61932 - DNA, 20 bp, synthetic construct
  misc_feature 1..20: note = Description of Artificial Sequence: Synthetic oligonucleotide
  misc_feature 1..20: note = Target: SCN10A; (+) strand; PAM type: YTN; PAM sequence: TTT
  source 1..20: mol_type = other DNA
gtgcttcagggctttccatg

SEQ ID NO: 61933 - DNA, 20 bp, synthetic construct
  misc_feature 1..20: note = Description of Artificial Sequence: Synthetic oligonucleotide
  misc_feature 1..20: note = Target: SCN10A; (+) strand; PAM type: YTN; PAM sequence: TTG
  source 1..20: mol_type = other DNA
tgcttcagggctttccatgg

SEQ ID NO: 61934 - DNA, 20 bp, synthetic construct
  misc_feature 1..20: note = Description of Artificial Sequence: Synthetic oligonucleotide
  misc_feature 1..20: note = Target: SCN10A; (+) strand; PAM type: YTN; PAM sequence: CTT
  source 1..20: mol_type = other DNA
cagggctttccatgggatca

SEQ ID NO: 61935 - DNA, 20 bp, synthetic construct
  misc_feature 1..20: note = Description of Artificial Sequence: Synthetic oligonucleotide
  misc_feature 1..20: note = Target: SCN10A; (+) strand; PAM type: YTN; PAM sequence: TTC
  source 1..20: mol_type = other DNA
agggctttccatgggatcag

SEQ ID NO: 61936 - DNA, 20 bp, synthetic construct
  misc_feature 1..20: note = Description of Artificial Sequence: Synthetic oligonucleotide
  misc_feature 1..20: note = Target: SCN10A; (+) strand; PAM type: YTN; PAM sequence: CTT
  source 1..20: mol_type = other DNA
tccatgggatcagctgaagc

SEQ ID NO: 61937 - DNA, 20 bp, synthetic construct
  misc_feature 1..20: note = Description of Artificial Sequence: Synthetic oligonucleotide
  misc_feature 1..20: note = Target: SCN10A; (+) strand; PAM type: YTN; PAM sequence: TTT
  source 1..20: mol_type = other DNA
ccatgggatcagctgaagcc

SEQ ID NO: 61938 - DNA, 20 bp, synthetic construct
  misc_feature 1..20: note = Description of Artificial Sequence: Synthetic oligonucleotide
  misc_feature 1..20: note = Target: SCN10A; (+) strand; PAM type: YTN; PAM sequence: TTC
  source 1..20: mol_type = other DNA
catgggatcagctgaagccg

SEQ ID NO: 61939 - DNA, 20 bp, synthetic construct
  misc_feature 1..20: note = Description of Artificial Sequence: Synthetic oligonucleotide
  misc_feature 1..20: note = Target: SCN10A; (+) strand; PAM type: YTN; PAM sequence: CTG
  source 1..20: mol_type = other DNA
aagccggatttcaactgaac

SEQ ID NO: 61940 - DNA, 20 bp, synthetic construct
  misc_feature 1..20: note = Description of Artificial Sequence: Synthetic oligonucleotide
  misc_feature 1..20: note = Target: SCN10A; (+) strand; PAM type: YTN; PAM sequence: TTT
  source 1..20: mol_type = other DNA
caactgaacccacatctttt

SEQ ID NO: 61941 - DNA, 20 bp, synthetic construct
  misc_feature 1..20: note = Description of Artificial Sequence: Synthetic oligonucleotide
  misc_feature 1..20: note = Target: SCN10A; (+) strand; PAM type: YTN; PAM sequence: TTC
  source 1..20: mol_type = other DNA
aactgaacccacatcttttc

SEQ ID NO: 61942 - DNA, 20 bp, synthetic construct
  misc_feature 1..20: note = Description of Artificial Sequence: Synthetic oligonucleotide
  misc_feature 1..20: note = Target: SCN10A; (+) strand; PAM type: YTN; PAM sequence: CTG
  source 1..20: mol_type = other DNA
aacccacatcttttctcagc

SEQ ID NO: 61943 - DNA, 20 bp, synthetic construct
  misc_feature 1..20: note = Description of Artificial Sequence: Synthetic oligonucleotide
  misc_feature 1..20: note = Target: SCN10A; (+) strand; PAM type: YTN; PAM sequence: CTT
  source 1..20: mol_type = other DNA
ttctcagcttccgattctgt

SEQ ID NO: 61944 - DNA, 20 bp, synthetic construct
  misc_feature 1..20: note = Description of Artificial Sequence: Synthetic oligonucleotide
  misc_feature 1..20: note = Target: SCN10A; (+) strand; PAM type: YTN; PAM sequence: TTT
  source 1..20: mol_type = other DNA
tctcagcttccgattctgtg

SEQ ID NO: 61945 - DNA, 20 bp, synthetic construct
  misc_feature 1..20: note = Description of Artificial Sequence: Synthetic oligonucleotide
  misc_feature 1..20: note = Target: SCN10A; (+) strand; PAM type: YTN; PAM sequence: TTT
  source 1..20: mol_type = other DNA
ctcagcttccgattctgtgt

SEQ ID NO: 61946 - DNA, 20 bp, synthetic construct
  misc_feature 1..20: note = Description of Artificial Sequence: Synthetic oligonucleotide
  misc_feature 1..20: note = Target: SCN10A; (+) strand; PAM type: YTN; PAM sequence: TTC
  source 1..20: mol_type = other DNA
tcagcttccgattctgtgtc

SEQ ID NO: 61947 - DNA, 20 bp, synthetic construct
  misc_feature 1..20: note = Description of Artificial Sequence: Synthetic oligonucleotide
  misc_feature 1..20: note = Target: SCN10A; (+) strand; PAM type: YTN; PAM sequence: CTC
  source 1..20: mol_type = other DNA
agcttccgattctgtgtcta

SEQ ID NO: 61948 - DNA, 20 bp, synthetic construct
  misc_feature 1..20: note = Description of Artificial Sequence: Synthetic oligonucleotide
  misc_feature 1..20: note = Target: SCN10A; (+) strand; PAM type: YTN; PAM sequence: CTT
  source 1..20: mol_type = other DNA
ccgattctgtgtctaggacg

SEQ ID NO: 61949 - DNA, 20 bp, synthetic construct
  misc_feature 1..20: note = Description of Artificial Sequence: Synthetic oligonucleotide
  misc_feature 1..20: note = Target: SCN10A; (+) strand; PAM type: YTN; PAM sequence: TTC
  source 1..20: mol_type = other DNA
cgattctgtgtctaggacga

SEQ ID NO: 61950 - DNA, 20 bp, synthetic construct
  misc_feature 1..20: note = Description of Artificial Sequence: Synthetic oligonucleotide
  misc_feature 1..20: note = Target: SCN10A; (+) strand; PAM type: YTN; PAM sequence: TTC
  source 1..20: mol_type = other DNA
tgtgtctaggacgaggacta

SEQ ID NO: 61951 - DNA, 20 bp, synthetic construct
  misc_feature 1..20: note = Description of Artificial Sequence: Synthetic oligonucleotide
  misc_feature 1..20: note = Target: SCN10A; (+) strand; PAM type: YTN; PAM sequence: CTG
  source 1..20: mol_type = other DNA
tgtctaggacgaggactaag

SEQ ID NO: 61952 - DNA, 20 bp, synthetic construct
  misc_feature 1..20: note = Description of Artificial Sequence: Synthetic oligonucleotide
  misc_feature 1..20: note = Target: SCN10A; (+) strand; PAM type: YTN; PAM sequence: CTA
  source 1..20: mol_type = other DNA
ggacgaggactaagatggga

SEQ ID NO: 61953 - DNA, 20 bp, synthetic construct
  misc_feature 1..20: note = Description of Artificial Sequence: Synthetic oligonucleotide
  misc_feature 1..20: note = Target: SCN10A; (+) strand; PAM type: YTN; PAM sequence: CTA
  source 1..20: mol_type = other DNA
agatgggagattatccaacg

SEQ ID NO: 61954 - DNA, 20 bp, synthetic construct
  misc_feature 1..20: note = Description of Artificial Sequence: Synthetic oligonucleotide
  misc_feature 1..20: note = Target: SCN10A; (+) strand; PAM type: YTN; PAM sequence: TTA
  source 1..20: mol_type = other DNA
tccaacgtctctaagggagt

SEQ ID NO: 61955 - DNA, 20 bp, synthetic construct
  misc_feature 1..20: note = Description of Artificial Sequence: Synthetic oligonucleotide
  misc_feature 1..20: note = Target: SCN10A; (+) strand; PAM type: YTN; PAM sequence: CTC
  source 1..20: mol_type = other DNA
taagggagtacacacaggga

SEQ ID NO: 61956 - DNA, 20 bp, synthetic construct
  misc_feature 1..20: note = Description of Artificial Sequence: Synthetic oligonucleotide
  misc_feature 1..20: note = Target: SCN10A; (+) strand; PAM type: YTN; PAM sequence: CTA
  source 1..20: mol_type = other DNA
agggagtacacacagggaat

SEQ ID NO: 61957 - DNA, 20 bp, synthetic construct
  misc_feature 1..20: note = Description of Artificial Sequence: Synthetic oligonucleotide
  misc_feature 1..20: note = Target: SCN10A; (+) strand; PAM type: YTN; PAM sequence: TTC
  source 1..20: mol_type = other DNA
aatgtgtattagaagtaaac

SEQ ID NO: 61958 - DNA, 20 bp, synthetic construct
  misc_feature 1..20: note = Description of Artificial Sequence: Synthetic oligonucleotide
  misc_feature 1..20: note = Target: SCN10A; (+) strand; PAM type: YTN; PAM sequence: TTA
  source 1..20: mol_type = other DNA
gaagtaaacatagagattgg

SEQ ID NO: 61959 - DNA, 20 bp, synthetic construct
  misc_feature 1..20: note = Description of Artificial Sequence: Synthetic oligonucleotide
  misc_feature 1..20: note = Target: SCN10A; (+) strand; PAM type: YTN; PAM sequence: TTG
  source 1..20: mol_type = other DNA
gttgagtaaattataaagga

SEQ ID NO: 61960 - DNA, 20 bp, synthetic construct
  misc_feature 1..20: note = Description of Artificial Sequence: Synthetic oligonucleotide
  misc_feature 1..20: note = Target: SCN10A; (+) strand; PAM type: YTN; PAM sequence: TTG
  source 1..20: mol_type = other DNA
agtaaattataaaggaatat

SEQ ID NO: 61961 - DNA, 20 bp, synthetic construct
  misc_feature 1..20: note = Description of Artificial Sequence: Synthetic oligonucleotide
  misc_feature 1..20: note = Target: SCN10A; (+) strand; PAM type: YTN; PAM sequence: TTA
  source 1..20: mol_type = other DNA
taaaggaatatgttatagcc

SEQ ID NO: 61962 - DNA, 20 bp, synthetic construct
  misc_feature 1..20: note = Description of Artificial Sequence: Synthetic oligonucleotide
  misc_feature 1..20: note = Target: SCN10A; (+) strand; PAM type: YTN; PAM sequence: TTA
  source 1..20: mol_type = other DNA
tagccattaaatgagataat

SEQ ID NO: 61963 - DNA, 20 bp, synthetic construct
  misc_feature 1..20: note = Description of Artificial Sequence: Synthetic oligonucleotide
  misc_feature 1..20: note = Target: SCN10A; (+) strand; PAM type: YTN; PAM sequence: TTA
  source 1..20: mol_type = other DNA
aatgagataatatgagacta

SEQ ID NO: 61964 - DNA, 20 bp, synthetic construct
  misc_feature 1..20: note = Description of Artificial Sequence: Synthetic oligonucleotide
  misc_feature 1..20: note = Target: SCN10A; (+) strand; PAM type: YTN; PAM sequence: CTA
  source 1..20: mol_type = other DNA
tttactgagaaaaatgtact

SEQ ID NO: 61965 - DNA, 20 bp, synthetic construct
  misc_feature 1..20: note = Description of Artificial Sequence: Synthetic oligonucleotide
  misc_feature 1..20: note = Target: SCN10A; (+) strand; PAM type: YTN; PAM sequence: TTT
  source 1..20: mol_type = other DNA
actgagaaaaatgtactgag

SEQ ID NO: 61966 - DNA, 20 bp, synthetic construct
  misc_feature 1..20: note = Description of Artificial Sequence: Synthetic oligonucleotide
  misc_feature 1..20: note = Target: SCN10A; (+) strand; PAM type: YTN; PAM sequence: TTA
  source 1..20: mol_type = other DNA
ctgagaaaaatgtactgagg

SEQ ID NO: 61967 - DNA, 20 bp, synthetic construct
  misc_feature 1..20: note = Description of Artificial Sequence: Synthetic oligonucleotide
  misc_feature 1..20: note = Target: SCN10A; (+) strand; PAM type: YTN; PAM sequence: CTG
  source 1..20: mol_type = other DNA
agaaaaatgtactgaggtta

SEQ ID NO: 61968 - DNA, 20 bp, synthetic construct
  misc_feature 1..20: note = Description of Artificial Sequence: Synthetic oligonucleotide
  misc_feature 1..20: note = Target: SCN10A; (+) strand; PAM type: YTN; PAM sequence: CTG
  source 1..20: mol_type = other DNA
aggttatagaatgcataaat

SEQ ID NO: 61969 - DNA, 20 bp, synthetic construct
  misc_feature 1..20: note = Description of Artificial Sequence: Synthetic oligonucleotide
  misc_feature 1..20: note = Target: SCN10A; (+) strand; PAM type: YTN; PAM sequence: TTA
  source 1..20: mol_type = other DNA
tagaatgcataaatgtggtt

SEQ ID NO: 61970 - DNA, 20 bp, synthetic construct
  misc_feature 1..20: note = Description of Artificial Sequence: Synthetic oligonucleotide
  misc_feature 1..20: note = Target: SCN10A; (+) strand; PAM type: YTN; PAM sequence: TTT
  source 1..20: mol_type = other DNA
tatttttgtaatatgtgtat

SEQ ID NO: 61971 - DNA, 20 bp, synthetic construct
  misc_feature 1..20: note = Description of Artificial Sequence: Synthetic oligonucleotide
  misc_feature 1..20: note = Target: SCN10A; (+) strand; PAM type: YTN; PAM sequence: TTT
  source 1..20: mol_type = other DNA
atttttgtaatatgtgtata

SEQ ID NO: 61972 - DNA, 20 bp, synthetic construct
  misc_feature 1..20: note = Description of Artificial Sequence: Synthetic oligonucleotide
  misc_feature 1..20: note = Target: SCN10A; (+) strand; PAM type: YTN; PAM sequence: TTA
  source 1..20: mol_type = other DNA
tttttgtaatatgtgtatat

SEQ ID NO: 61973 - DNA, 20 bp, synthetic construct
  misc_feature 1..20: note = Description of Artificial Sequence: Synthetic oligonucleotide
  misc_feature 1..20: note = Target: SCN10A; (+) strand; PAM type: YTN; PAM sequence: TTT
  source 1..20: mol_type = other DNA
ttgtaatatgtgtatatttt

SEQ ID NO: 61974 - DNA, 20 bp, synthetic construct
  misc_feature 1..20: note = Description of Artificial Sequence: Synthetic oligonucleotide
  misc_feature 1..20: note = Target: SCN10A; (+) strand; PAM type: YTN; PAM sequence: TTT
  source 1..20: mol_type = other DNA
tgtaatatgtgtatatttta

SEQ ID NO: 61975 - DNA, 20 bp, synthetic construct
  misc_feature 1..20: note = Description of Artificial Sequence: Synthetic oligonucleotide
  misc_feature 1..20: note = Target: SCN10A; (+) strand; PAM type: YTN; PAM sequence: TTT
  source 1..20: mol_type = other DNA
gtaatatgtgtatattttat

SEQ ID NO: 61976 - DNA, 20 bp, synthetic construct
  misc_feature 1..20: note = Description of Artificial Sequence: Synthetic oligonucleotide
  misc_feature 1..20: note = Target: SCN10A; (+) strand; PAM type: YTN; PAM sequence: TTG
  source 1..20: mol_type = other DNA
taatatgtgtatattttatg

SEQ ID NO: 61977 - DNA, 20 bp, synthetic construct
  misc_feature 1..20: note = Description of Artificial Sequence: Synthetic oligonucleotide
  misc_feature 1..20: note = Target: SCN10A; (+) strand; PAM type: YTN; PAM sequence: TTT
  source 1..20: mol_type = other DNA
tatgcataagcaagatgaga

SEQ ID NO: 61978 - DNA, 20 bp, synthetic construct
  misc_feature 1..20: note = Description of Artificial Sequence: Synthetic oligonucleotide
  misc_feature 1..20: note = Target: SCN10A; (+) strand; PAM type: YTN; PAM sequence: TTT
  source 1..20: mol_type = other DNA
atgcataagcaagatgagaa

SEQ ID NO: 61979 - DNA, 20 bp, synthetic construct
  misc_feature 1..20: note = Description of Artificial Sequence: Synthetic oligonucleotide
  misc_feature 1..20: note = Target: SCN10A; (+) strand; PAM type: YTN; PAM sequence: TTA
  source 1..20: mol_type = other DNA
tgcataagcaagatgagaaa

SEQ ID NO: 61980 - DNA, 20 bp, synthetic construct
  misc_feature 1..20: note = Description of Artificial Sequence: Synthetic oligonucleotide
  misc_feature 1..20: note = Target: SCN10A; (+) strand; PAM type: YTN; PAM sequence: TTT
  source 1..20: mol_type = other DNA
tcaagtgagtttctctttga

SEQ ID NO: 61981 - DNA, 20 bp, synthetic construct
  misc_feature 1..20: note = Description of Artificial Sequence: Synthetic oligonucleotide
  misc_feature 1..20: note = Target: SCN10A; (+) strand; PAM type: YTN; PAM sequence: TTT
  source 1..20: mol_type = other DNA
caagtgagtttctctttgag

SEQ ID NO: 61982 - DNA, 20 bp, synthetic construct
  misc_feature 1..20: note = Description of Artificial Sequence: Synthetic oligonucleotide
  misc_feature 1..20: note = Target: SCN10A; (+) strand; PAM type: YTN; PAM sequence: TTC
  source 1..20: mol_type = other DNA
aagtgagtttctctttgagt

SEQ ID NO: 61983 - DNA, 20 bp, synthetic construct
  misc_feature 1..20: note = Description of Artificial Sequence: Synthetic oligonucleotide
  misc_feature 1..20: note = Target: SCN10A; (+) strand; PAM type: YTN; PAM sequence: TTT
  source 1..20: mol_type = other DNA
ctctttgagtgatagggaaa

SEQ ID NO: 61984 - DNA, 20 bp, synthetic construct
  misc_feature 1..20: note = Description of Artificial Sequence: Synthetic oligonucleotide
  misc_feature 1..20: note = Target: SCN10A; (+) strand; PAM type: YTN; PAM sequence: TTC
  source 1..20: mol_type = other DNA
tctttgagtgatagggaaat

SEQ ID NO: 61985 - DNA, 20 bp, synthetic construct
  misc_feature 1..20: note = Description of Artificial Sequence: Synthetic oligonucleotide
  misc_feature 1..20: note = Target: SCN10A; (+) strand; PAM type: YTN; PAM sequence: CTC
  source 1..20: mol_type = other DNA
tttgagtgatagggaaatgg

SEQ ID NO: 61986 - DNA, 20 bp, synthetic construct
  misc_feature 1..20: note = Description of Artificial Sequence: Synthetic oligonucleotide
  misc_feature 1..20: note = Target: SCN10A; (+) strand; PAM type: YTN; PAM sequence: CTT
  source 1..20: mol_type = other DNA
tgagtgatagggaaatggat

SEQ ID NO: 61987 - DNA, 20 bp, synthetic construct
  misc_feature 1..20: note = Description of Artificial Sequence: Synthetic oligonucleotide
  misc_feature 1..20: note = Target: SCN10A; (+) strand; PAM type: YTN; PAM sequence: TTT
  source 1..20: mol_type = other DNA
gagtgatagggaaatggatg

SEQ ID NO: 61988 - DNA, 20 bp, synthetic construct
  misc_feature 1..20: note = Description of Artificial Sequence: Synthetic oligonucleotide
  misc_feature 1..20: note = Target: SCN10A; (+) strand; PAM type: YTN; PAM sequence: TTG
  source 1..20: mol_type = other DNA
agtgatagggaaatggatga

SEQ ID NO: 61989 - DNA, 20 bp, synthetic construct
  misc_feature 1..20: note = Description of Artificial Sequence: Synthetic oligonucleotide
  misc_feature 1..20: note = Target: SCN10A; (+) strand; PAM type: YTN; PAM sequence: TTT
  source 1..20: mol_type = other DNA
ttttttctttacctttttct

SEQ ID NO: 61990 - DNA, 20 bp, synthetic construct
  misc_feature 1..20: note = Description of Artificial Sequence: Synthetic oligonucleotide
  misc_feature 1..20: note = Target: SCN10A; (+) strand; PAM type: YTN; PAM sequence: TTT
  source 1..20: mol_type = other DNA
tttttctttacctttttcta

SEQ ID NO: 61991 - DNA, 20 bp, synthetic construct
  misc_feature 1..20: note = Description of Artificial Sequence: Synthetic oligonucleotide
  misc_feature 1..20: note = Target: SCN10A; (+) strand; PAM type: YTN; PAM sequence: TTT
  source 1..20: mol_type = other DNA
ttttctttacctttttctat

SEQ ID NO: 61992 - DNA, 20 bp, synthetic construct
  misc_feature 1..20: note = Description of Artificial Sequence: Synthetic oligonucleotide
  misc_feature 1..20: note = Target: SCN10A; (+) strand; PAM type: YTN; PAM sequence: TTT
  source 1..20: mol_type = other DNA
tttctttacctttttctata

SEQ ID NO: 61993 - DNA, 20 bp, synthetic construct
  misc_feature 1..20: note = Description of Artificial Sequence: Synthetic oligonucleotide
  misc_feature 1..20: note = Target: SCN10A; (+) strand; PAM type: YTN; PAM sequence: TTT
  source 1..20: mol_type = other DNA
ttctttacctttttctataa

SEQ ID NO: 61994 - DNA, 20 bp, synthetic construct
  misc_feature 1..20: note = Description of Artificial Sequence: Synthetic oligonucleotide
  misc_feature 1..20: note = Target: SCN10A; (+) strand; PAM type: YTN; PAM sequence: TTT
  source 1..20: mol_type = other DNA
tctttacctttttctataat

SEQ ID NO: 61995 - DNA, 20 bp, synthetic construct
  misc_feature 1..20: note = Description of Artificial Sequence: Synthetic oligonucleotide
  misc_feature 1..20: note = Target: SCN10A; (+) strand; PAM type: YTN; PAM sequence: TTT
  source 1..20: mol_type = other DNA
ctttacctttttctataatt

SEQ ID NO: 61996 - DNA, 20 bp, synthetic construct
  misc_feature 1..20: note = Description of Artificial Sequence: Synthetic oligonucleotide
  misc_feature 1..20: note = Target: SCN10A; (+) strand; PAM type: YTN; PAM sequence: TTC
  source 1..20: mol_type = other DNA
tttacctttttctataattt

SEQ ID NO: 61997 - DNA, 20 bp, synthetic construct
  misc_feature 1..20: note = Description of Artificial Sequence: Synthetic oligonucleotide
  misc_feature 1..20: note = Target: SCN10A; (+) strand; PAM type: YTN; PAM sequence: CTT
  source 1..20: mol_type = other DNA
tacctttttctataatttcc

SEQ ID NO: 61998 - DNA, 20 bp, synthetic construct
  misc_feature 1..20: note = Description of Artificial Sequence: Synthetic oligonucleotide
  misc_feature 1..20: note = Target: SCN10A; (+) strand; PAM type: YTN; PAM sequence: TTT
  source 1..20: mol_type = other DNA
acctttttctataatttcca

SEQ ID NO: 61999 - DNA, 20 bp, synthetic construct
  misc_feature 1..20: note = Description of Artificial Sequence: Synthetic oligonucleotide
  misc_feature 1..20: note = Target: SCN10A; (+) strand; PAM type: YTN; PAM sequence: TTA
  source 1..20: mol_type = other DNA
cctttttctataatttccaa

SEQ ID NO: 62000 - DNA, 20 bp, synthetic construct
  misc_feature 1..20: note = Description of Artificial Sequence: Synthetic oligonucleotide
  misc_feature 1..20: note = Target: SCN10A; (+) strand; PAM type: YTN; PAM sequence: CTT
  source 1..20: mol_type = other DNA
tttctataatttccaagtat

SEQ ID NO: 62001 - DNA, 20 bp, synthetic construct
  misc_feature 1..20: note = Description of Artificial Sequence: Synthetic oligonucleotide
  misc_feature 1..20: note = Target: SCN10A; (+) strand; PAM type: YTN; PAM sequence: TTT
  source 1..20: mol_type = other DNA
ttctataatttccaagtatt

SEQ ID NO: 62002 - DNA, 20 bp, synthetic construct
  misc_feature 1..20: note = Description of Artificial Sequence: Synthetic oligonucleotide
  misc_feature 1..20: note = Target: SCN10A; (+) strand; PAM type: YTN; PAM sequence: TTT
  source 1..20: mol_type = other DNA
tctataatttccaagtattt

SEQ ID NO: 62003 - DNA, 20 bp, synthetic construct
  misc_feature 1..20: note = Description of Artificial Sequence: Synthetic oligonucleotide
  misc_feature 1..20: note = Target: SCN10A; (+) strand; PAM type: YTN; PAM sequence: TTT
  source 1..20: mol_type = other DNA
ctataatttccaagtatttt

SEQ ID NO: 62004 - DNA, 20 bp, synthetic construct
  misc_feature 1..20: note = Description of Artificial Sequence: Synthetic oligonucleotide
  misc_feature 1..20: note = Target: SCN10A; (+) strand; PAM type: YTN; PAM sequence: TTC
  source 1..20: mol_type = other DNA
tataatttccaagtattttt

SEQ ID NO: 62005 - DNA, 20 bp, synthetic construct
  misc_feature 1..20: note = Description of Artificial Sequence: Synthetic oligonucleotide
  misc_feature 1..20: note = Target: SCN10A; (+) strand; PAM type: YTN; PAM sequence: CTA
  source 1..20: mol_type = other DNA
taatttccaagtattttttt

SEQ ID NO: 62006 - DNA, 20 bp, synthetic construct
  misc_feature 1..20: note = Description of Artificial Sequence: Synthetic oligonucleotide
  misc_feature 1..20: note = Target: SCN10A; (+) strand; PAM type: YTN; PAM sequence: TTT
  source 1..20: mol_type = other DNA
ccaagtatttttttggtact

SEQ ID NO: 62007 - DNA, 20 bp, synthetic construct
  misc_feature 1..20: note = Description of Artificial Sequence: Synthetic oligonucleotide
  misc_feature 1..20: note = Target: SCN10A; (+) strand; PAM type: YTN; PAM sequence: TTC
  source 1..20: mol_type = other DNA
caagtatttttttggtactt

SEQ ID NO: 62008 - DNA, 20 bp, synthetic construct
  misc_feature 1..20: note = Description of Artificial Sequence: Synthetic oligonucleotide
  misc_feature 1..20: note = Target: SCN10A; (+) strand; PAM type: YTN; PAM sequence: TTT
  source 1..20: mol_type = other DNA
ttttggtactttactttgtc

SEQ ID NO: 62009 - DNA, 20 bp, synthetic construct
  misc_feature 1..20: note = Description of Artificial Sequence: Synthetic oligonucleotide
  misc_feature 1..20: note = Target: SCN10A; (+) strand; PAM type: YTN; PAM sequence: TTT
  source 1..20: mol_type = other DNA
tttggtactttactttgtca

SEQ ID NO: 62010 - DNA, 20 bp, synthetic construct
  misc_feature 1..20: note = Description of Artificial Sequence: Synthetic oligonucleotide
  misc_feature 1..20: note = Target: SCN10A; (+) strand; PAM type: YTN; PAM sequence: TTT
  source 1..20: mol_type = other DNA
ttggtactttactttgtcag

SEQ ID NO: 62011 - DNA, 20 bp, synthetic construct
  misc_feature 1..20: note = Description of Artificial Sequence: Synthetic oligonucleotide
  misc_feature 1..20: note = Target: SCN10A; (+) strand; PAM type: YTN; PAM sequence: TTT
  source 1..20: mol_type = other DNA
tggtactttactttgtcaga

SEQ ID NO: 62012 - DNA, 20 bp, synthetic construct
  misc_feature 1..20: note = Description of Artificial Sequence: Synthetic oligonucleotide
  misc_feature 1..20: note = Target: SCN10A; (+) strand; PAM type: YTN; PAM sequence: TTT
  source 1..20: mol_type = other DNA
ggtactttactttgtcagat

SEQ ID NO: 62013 - DNA, 20 bp, synthetic construct
  misc_feature 1..20: note = Description of Artificial Sequence: Synthetic oligonucleotide
  misc_feature 1..20: note = Target: SCN10A; (+) strand; PAM type: YTN; PAM sequence: TTG
  source 1..20: mol_type = other DNA
gtactttactttgtcagatg

SEQ ID NO: 62014 - DNA, 20 bp, synthetic construct
  misc_feature 1..20: note = Description of Artificial Sequence: Synthetic oligonucleotide
  misc_feature 1..20: note = Target: SCN10A; (+) strand; PAM type: YTN; PAM sequence: CTT
  source 1..20: mol_type = other DNA
tactttgtcagatgaaaatg

SEQ ID NO: 62015 - DNA, 20 bp, synthetic construct
  misc_feature 1..20: note = Description of Artificial Sequence: Synthetic oligonucleotide
  misc_feature 1..20: note = Target: SCN10A; (+) strand; PAM type: YTN; PAM sequence: TTT
  source 1..20: mol_type = other DNA
actttgtcagatgaaaatgc

SEQ ID NO: 62016 - DNA, 20 bp, synthetic construct
  misc_feature 1..20: note = Description of Artificial Sequence: Synthetic oligonucleotide
  misc_feature 1..20: note = Target: SCN10A; (+) strand; PAM type: YTN; PAM sequence: TTA
  source 1..20: mol_type = other DNA
ctttgtcagatgaaaatgca

SEQ ID NO: 62017 - DNA, 20 bp, synthetic construct
  misc_feature 1..20: note = Description of Artificial Sequence: Synthetic oligonucleotide
  misc_feature 1..20: note = Target: SCN10A; (+) strand; PAM type: YTN; PAM sequence: CTT
  source 1..20: mol_type = other DNA
tgtcagatgaaaatgcatgt

SEQ ID NO: 62018 - DNA, 20 bp, synthetic construct
  misc_feature 1..20: note = Description of Artificial Sequence: Synthetic oligonucleotide
  misc_feature 1..20: note = Target: SCN10A; (+) strand; PAM type: YTN; PAM sequence: TTT
  source 1..20: mol_type = other DNA
gtcagatgaaaatgcatgtt

SEQ ID NO: 62019 - DNA, 20 bp, synthetic construct
  misc_feature 1..20: note = Description of Artificial Sequence: Synthetic oligonucleotide
  misc_feature 1..20: note = Target: SCN10A; (+) strand; PAM type: YTN; PAM sequence: TTG
  source 1..20: mol_type = other DNA
tcagatgaaaatgcatgtta

SEQ ID NO: 62020 - DNA, 20 bp, synthetic construct
  misc_feature 1..20: note = Description of Artificial Sequence: Synthetic oligonucleotide
  misc_feature 1..20: note = Target: SCN10A; (+) strand; PAM type: YTN; PAM sequence: TTA
  source 1..20: mol_type = other DNA
tttttaaaaggtactcaaag

SEQ ID NO: 62021 - DNA, 20 bp, synthetic construct
  misc_feature 1..20: note = Description of Artificial Sequence: Synthetic oligonucleotide
  misc_feature 1..20: note = Target: SCN10A; (+) strand; PAM type: YTN; PAM sequence: TTT
  source 1..20: mol_type = other DNA
ttaaaaggtactcaaagtga

SEQ ID NO: 62022 - DNA, 20 bp, synthetic construct
  misc_feature 1..20: note = Description of Artificial Sequence: Synthetic oligonucleotide
  misc_feature 1..20: note = Target: SCN10A; (+) strand; PAM type: YTN; PAM sequence: TTT
  source 1..20: mol_type = other DNA
taaaaggtactcaaagtgaa

SEQ ID NO: 62023 - DNA, 20 bp, synthetic construct
  misc_feature 1..20: note = Description of Artificial Sequence: Synthetic oligonucleotide
  misc_feature 1..20: note = Target: SCN10A; (+) strand; PAM type: YTN; PAM sequence: TTT
  source 1..20: mol_type = other DNA
aaaaggtactcaaagtgaaa

SEQ ID NO: 62024 - DNA, 20 bp, synthetic construct
  misc_feature 1..20: note = Description of Artificial Sequence: Synthetic oligonucleotide
  misc_feature 1..20: note = Target: SCN10A; (+) strand; PAM type: YTN; PAM sequence: TTA
  source 1..20: mol_type = other DNA
aaaggtactcaaagtgaaag

SEQ ID NO: 62025 - DNA, 20 bp, synthetic construct
  misc_feature 1..20: note = Description of Artificial Sequence: Synthetic oligonucleotide
  misc_feature 1..20: note = Target: SCN10A; (+) strand; PAM type: YTN; PAM sequence: CTC
  source 1..20: mol_type = other DNA
aaagtgaaagcctaaagaag

SEQ ID NO: 62026 - DNA, 20 bp, synthetic construct
  misc_feature 1..20: note = Description of Artificial Sequence: Synthetic oligonucleotide
  misc_feature 1..20: note = Target: SCN10A; (+) strand; PAM type: YTN; PAM sequence: CTA
  source 1..20: mol_type = other DNA
aagaaggctaaatttggtgc

SEQ ID NO: 62027 - DNA, 20 bp, synthetic construct
  misc_feature 1..20: note = Description of Artificial Sequence: Synthetic oligonucleotide
  misc_feature 1..20: note = Target: SCN10A; (+) strand; PAM type: YTN; PAM sequence: CTA
  source 1..20: mol_type = other DNA
aatttggtgccagcctgttc

SEQ ID NO: 62028 - DNA, 20 bp, synthetic construct
  misc_feature 1..20: note = Description of Artificial Sequence: Synthetic oligonucleotide
  misc_feature 1..20: note = Target: SCN10A; (+) strand; PAM type: YTN; PAM sequence: TTT
  source 1..20: mol_type = other DNA
ggtgccagcctgttcagtcc

SEQ ID NO: 62029 - DNA, 20 bp, synthetic construct
  misc_feature 1..20: note = Description of Artificial Sequence: Synthetic oligonucleotide
  misc_feature 1..20: note = Target: SCN10A; (+) strand; PAM type: YTN; PAM sequence: TTG
  source 1..20: mol_type = other DNA
gtgccagcctgttcagtccc

SEQ ID NO: 62030 - DNA, 20 bp, synthetic construct
  misc_feature 1..20: note = Description of Artificial Sequence: Synthetic oligonucleotide
  misc_feature 1..20: note = Target: SCN10A; (+) strand; PAM type: YTN; PAM sequence: CTG
  source 1..20: mol_type = other DNA
ttcagtcccaggggaaggag

SEQ ID NO: 62031 - DNA, 20 bp, synthetic construct
  misc_feature 1..20: note = Description of Artificial Sequence: Synthetic oligonucleotide
  misc_feature 1..20: note = Target: SCN10A; (+) strand; PAM type: YTN; PAM sequence: TTC
  source 1..20: mol_type = other DNA
agtcccaggggaaggagatg

SEQ ID NO: 62032 - DNA, 20 bp, synthetic construct
  misc_feature 1..20: note = Description of Artificial Sequence: Synthetic oligonucleotide
  misc_feature 1..20: note = Target: SCN10A; (+) strand; PAM type: YTN; PAM sequence: CTG
  source 1..20: mol_type = other DNA
cagggggcgggctgggctgg

SEQ ID NO: 62033 - DNA, 20 bp, synthetic construct
  misc_feature 1..20: note = Description of Artificial Sequence: Synthetic oligonucleotide
  misc_feature 1..20: note = Target: SCN10A; (+) strand; PAM type: YTN; PAM sequence: CTG
  source 1..20: mol_type = other DNA
ggctggcgcagtgctgcagg

SEQ ID NO: 62034 - DNA, 20 bp, synthetic construct
  misc_feature 1..20: note = Description of Artificial Sequence: Synthetic oligonucleotide
  misc_feature 1..20: note = Target: SCN10A; (+) strand; PAM type: YTN; PAM sequence: CTG
  source 1..20: mol_type = other DNA
gcgcagtgctgcaggtctga

SEQ ID NO: 62035 - DNA, 20 bp, synthetic construct
  misc_feature 1..20: note = Description of Artificial Sequence: Synthetic oligonucleotide
  misc_feature 1..20: note = Target: SCN10A; (+) strand; PAM type: YTN; PAM sequence: CTG
  source 1..20: mol_type = other DNA
caggtctgagcttcctcctg

SEQ ID NO: 62036 - DNA, 20 bp, synthetic construct
  misc_feature 1..20: note = Description of Artificial Sequence: Synthetic oligonucleotide
  misc_feature 1..20: note = Target: SCN10A; (+) strand; PAM type: YTN; PAM sequence: CTG
  source 1..20: mol_type = other DNA
agcttcctcctgggaatgtg

SEQ ID NO: 62037 - DNA, 20 bp, synthetic construct
  misc_feature 1..20: note = Description of Artificial Sequence: Synthetic oligonucleotide
  misc_feature 1..20: note = Target: SCN10A; (+) strand; PAM type: YTN; PAM sequence: CTT
  source 1..20: mol_type = other DNA
cctcctgggaatgtgggggg

SEQ ID NO: 62038 - DNA, 20 bp, synthetic construct
  misc_feature 1..20: note = Description of Artificial Sequence: Synthetic oligonucleotide
  misc_feature 1..20: note = Target: SCN10A; (+) strand; PAM type: YTN; PAM sequence: TTC
  source 1..20: mol_type = other DNA
ctcctgggaatgtggggggt

SEQ ID NO: 62039 - DNA, 20 bp, synthetic construct
  misc_feature 1..20: note = Description of Artificial Sequence: Synthetic oligonucleotide
  misc_feature 1..20: note = Target: SCN10A; (+) strand; PAM type: YTN; PAM sequence: CTC
  source 1..20: mol_type = other DNA
ctgggaatgtggggggtgga

SEQ ID NO: 62040 - DNA, 20 bp, synthetic construct
  misc_feature 1..20: note = Description of Artificial Sequence: Synthetic oligonucleotide
  misc_feature 1..20: note = Target: SCN10A; (+) strand; PAM type: YTN; PAM sequence: CTG
  source 1..20: mol_type = other DNA
ggaatgtggggggtggaccg

SEQ ID NO: 62041 - DNA, 20 bp, synthetic construct
  misc_feature 1..20: note = Description of Artificial Sequence: Synthetic oligonucleotide
  misc_feature 1..20: note = Target: SCN10A; (+) strand; PAM type: YTN; PAM sequence: CTA
  source 1..20: mol_type = other DNA
gagagagaagggagggagca

SEQ ID NO: 62042 - DNA, 20 bp, synthetic construct
  misc_feature 1..20: note = Description of Artificial Sequence: Synthetic oligonucleotide
  misc_feature 1..20: note = Target: SCN10A; (+) strand; PAM type: YTN; PAM sequence: CTG
  source 1..20: mol_type = other DNA
gccaacagcacatgtggtta

SEQ ID NO: 62043 - DNA, 20 bp, synthetic construct
  misc_feature 1..20: note = Description of Artificial Sequence: Synthetic oligonucleotide
  misc_feature 1..20: note = Target: SCN10A; (+) strand; PAM type: YTN; PAM sequence: TTA
  source 1..20: mol_type = other DNA
ttactttaatccagcaggac

SEQ ID NO: 62044 - DNA, 20 bp, synthetic construct
  misc_feature 1..20: note = Description of Artificial Sequence: Synthetic oligonucleotide
  misc_feature 1..20: note = Target: SCN10A; (+) strand; PAM type: YTN; PAM sequence: TTA
  source 1..20: mol_type = other DNA
ctttaatccagcaggactgg

SEQ ID NO: 62045 - DNA, 20 bp, synthetic construct
  misc_feature 1..20: note = Description of Artificial Sequence: Synthetic oligonucleotide
  misc_feature 1..20: note = Target: SCN10A; (+) strand; PAM type: YTN; PAM sequence: CTT
  source 1..20: mol_type = other DNA
taatccagcaggactggaag

SEQ ID NO: 62046 - DNA, 20 bp, synthetic construct
  misc_feature 1..20: note = Description of Artificial Sequence: Synthetic oligonucleotide
  misc_feature 1..20: note = Target: SCN10A; (+) strand; PAM type: YTN; PAM sequence: TTT
  source 1..20: mol_type = other DNA
aatccagcaggactggaagg

SEQ ID NO: 62047 - DNA, 20 bp, synthetic construct
  misc_feature 1..20: note = Description of Artificial Sequence: Synthetic oligonucleotide
  misc_feature 1..20: note = Target: SCN10A; (+) strand; PAM type: YTN; PAM sequence: TTA
  source 1..20: mol_type = other DNA
atccagcaggactggaagga

SEQ ID NO: 62048 - DNA, 20 bp, synthetic construct
  misc_feature 1..20: note = Description of Artificial Sequence: Synthetic oligonucleotide
  misc_feature 1..20: note = Target: SCN10A; (+) strand; PAM type: YTN; PAM sequence: CTG
  source 1..20: mol_type = other DNA
gaaggagaagagcataggtg

SEQ ID NO: 62049 - DNA, 20 bp, synthetic construct
  misc_feature 1..20: note = Description of Artificial Sequence: Synthetic oligonucleotide
  misc_feature 1..20: note = Target: SCN10A; (+) strand; PAM type: YTN; PAM sequence: CTG
  source 1..20: mol_type = other DNA
cccagccctctcttgcccct

SEQ ID NO: 62050 - DNA, 20 bp, synthetic construct
  misc_feature 1..20: note = Description of Artificial Sequence: Synthetic oligonucleotide
  misc_feature 1..20: note = Target: SCN10A; (+) strand; PAM type: YTN; PAM sequence: CTC
  source 1..20: mol_type = other DNA
tcttgcccctgcaatttggc

SEQ ID NO: 62051 - DNA, 20 bp, synthetic construct
  misc_feature 1..20: note = Description of Artificial Sequence: Synthetic oligonucleotide
  misc_feature 1..20: note = Target: SCN10A; (+) strand; PAM type: YTN; PAM sequence: CTC
  source 1..20: mol_type = other DNA
ttgcccctgcaatttggcct

SEQ ID NO: 62052 - DNA, 20 bp, synthetic construct
  misc_feature 1..20: note = Description of Artificial Sequence: Synthetic oligonucleotide
  misc_feature 1..20: note = Target: SCN10A; (+) strand; PAM type: YTN; PAM sequence: CTT
  source 1..20: mol_type = other DNA
gcccctgcaatttggcctct

SEQ ID NO: 62053 - DNA, 20 bp, synthetic construct
  misc_feature 1..20: note = Description of Artificial Sequence: Synthetic oligonucleotide
  misc_feature 1..20: note = Target: SCN10A; (+) strand; PAM type: YTN; PAM sequence: TTG
  source 1..20: mol_type = other DNA
cccctgcaatttggcctcta

SEQ ID NO: 62054 - DNA, 20 bp, synthetic construct
  misc_feature 1..20: note = Description of Artificial Sequence: Synthetic oligonucleotide
  misc_feature 1..20: note = Target: SCN10A; (+) strand; PAM type: YTN; PAM sequence: CTG
  source 1..20: mol_type = other DNA
caatttggcctctacactgt

SEQ ID NO: 62055 - DNA, 20 bp, synthetic construct
  misc_feature 1..20: note = Description of Artificial Sequence: Synthetic oligonucleotide
  misc_feature 1..20: note = Target: SCN10A; (+) strand; PAM type: YTN; PAM sequence: TTT
  source 1..20: mol_type = other DNA
ggcctctacactgtgctgag

SEQ ID NO: 62056 - DNA, 20 bp, synthetic construct
  misc_feature 1..20: note = Description of Artificial Sequence: Synthetic oligonucleotide
  misc_feature 1..20: note = Target: SCN10A; (+) strand; PAM type: YTN; PAM sequence: TTG
  source 1..20: mol_type = other DNA
gcctctacactgtgctgagg

SEQ ID NO: 62057 - DNA, 20 bp, synthetic construct
  misc_feature 1..20: note = Description of Artificial Sequence: Synthetic oligonucleotide
  misc_feature 1..20: note = Target: SCN10A; (+) strand; PAM type: YTN; PAM sequence: CTC
  source 1..20: mol_type = other DNA
tacactgtgctgaggtccgt

SEQ ID NO: 62058 - DNA, 20 bp, synthetic construct
  misc_feature 1..20: note = Description of Artificial Sequence: Synthetic oligonucleotide
  misc_feature 1..20: note = Target: SCN10A; (+) strand; PAM type: YTN; PAM sequence: CTA
  source 1..20: mol_type = other DNA
cactgtgctgaggtccgtgt

SEQ ID NO: 62059 - DNA, 20 bp, synthetic construct
  misc_feature 1..20: note = Description of Artificial Sequence: Synthetic oligonucleotide
  misc_feature 1..20: note = Target: SCN10A; (+) strand; PAM type: YTN; PAM sequence: CTG
  source 1..20: mol_type = other DNA
tgctgaggtccgtgtggaca

SEQ ID NO: 62060 - DNA, 20 bp, synthetic construct
  misc_feature 1..20: note = Description of Artificial Sequence: Synthetic oligonucleotide
  misc_feature 1..20: note = Target: SCN10A; (+) strand; PAM type: YTN; PAM sequence: CTG
  source 1..20: mol_type = other DNA
aggtccgtgtggacaatcac

SEQ ID NO: 62061 - DNA, 20 bp, synthetic construct
  misc_feature 1..20: note = Description of Artificial Sequence: Synthetic oligonucleotide
  misc_feature 1..20: note = Target: SCN10A; (+) strand; PAM type: YTN; PAM sequence: CTG
  source 1..20: mol_type = other DNA
ccctgtgccagggcactggg

SEQ ID NO: 62062 - DNA, 20 bp, synthetic construct
  misc_feature 1..20: note = Description of Artificial Sequence: Synthetic oligonucleotide
  misc_feature 1..20: note = Target: SCN10A; (+) strand; PAM type: YTN; PAM sequence: CTG
  source 1..20: mol_type = other DNA
tgccagggcactgggcacct

SEQ ID NO: 62063 - DNA, 20 bp, synthetic construct
  misc_feature 1..20: note = Description of Artificial Sequence: Synthetic oligonucleotide
  misc_feature 1..20: note = Target: SCN10A; (+) strand; PAM type: YTN; PAM sequence: CTG
  source 1..20: mol_type = other DNA
ggcacctgcagccgctgtca

SEQ ID NO: 62064 - DNA, 20 bp, synthetic construct
  misc_feature 1..20: note = Description of Artificial Sequence: Synthetic oligonucleotide
  misc_feature 1..20: note = Target: SCN10A; (+) strand; PAM type: YTN; PAM sequence: CTG
  source 1..20: mol_type = other DNA
cagccgctgtcacacagttc

SEQ ID NO: 62065 - DNA, 20 bp, synthetic construct
  misc_feature 1..20: note = Description of Artificial Sequence: Synthetic oligonucleotide
  misc_feature 1..20: note = Target: SCN10A; (+) strand; PAM type: YTN; PAM sequence: CTG
  source 1..20: mol_type = other DNA
tcacacagttccccctccac

SEQ ID NO: 62066 - DNA, 20 bp, synthetic construct
  misc_feature 1..20: note = Description of Artificial Sequence: Synthetic oligonucleotide
  misc_feature 1..20: note = Target: SCN10A; (+) strand; PAM type: YTN; PAM sequence: TTC
  source 1..20: mol_type = other DNA
cccctccacccaggatggca

SEQ ID NO: 62067 - DNA, 20 bp, synthetic construct
  misc_feature 1..20: note = Description of Artificial Sequence: Synthetic oligonucleotide
  misc_feature 1..20: note = Target: SCN10A; (+) strand; PAM type: YTN; PAM sequence: CTC
  source 1..20: mol_type = other DNA
cacccaggatggcagaccag

SEQ ID NO: 62068 - DNA, 20 bp, synthetic construct
  misc_feature 1..20: note = Description of Artificial Sequence: Synthetic oligonucleotide
  misc_feature 1..20: note = Target: SCN10A; (+) strand; PAM type: YTN; PAM sequence: CTG
  source 1..20: mol_type = other DNA
ccccgaaactctcttctccc

SEQ ID NO: 62069 - DNA, 20 bp, synthetic construct
  misc_feature 1..20: note = Description of Artificial Sequence: Synthetic oligonucleotide
  misc_feature 1..20: note = Target: SCN10A; (+) strand; PAM type: YTN; PAM sequence: CTC
  source 1..20: mol_type = other DNA
tcttctcccttggctttgcg

SEQ ID NO: 62070 - DNA, 20 bp, synthetic construct
  misc_feature 1..20: note = Description of Artificial Sequence: Synthetic oligonucleotide
  misc_feature 1..20: note = Target: SCN10A; (+) strand; PAM type: YTN; PAM sequence: CTC
  source 1..20: mol_type = other DNA
ttctcccttggctttgcgtc

SEQ ID NO: 62071 - DNA, 20 bp, synthetic construct
  misc_feature 1..20: note = Description of Artificial Sequence: Synthetic oligonucleotide
  misc_feature 1..20: note = Target: SCN10A; (+) strand; PAM type: YTN; PAM sequence: CTT
  source 1..20: mol_type = other DNA
ctcccttggctttgcgtcat

SEQ ID NO: 62072 - DNA, 20 bp, synthetic construct
  misc_feature 1..20: note = Description of Artificial Sequence: Synthetic oligonucleotide
  misc_feature 1..20: note = Target: SCN10A; (+) strand; PAM type: YTN; PAM sequence: TTC
  source 1..20: mol_type = other DNA
tcccttggctttgcgtcatt

SEQ ID NO: 62073 - DNA, 20 bp, synthetic construct
  misc_feature 1..20: note = Description of Artificial Sequence: Synthetic oligonucleotide
  misc_feature 1..20: note = Target: SCN10A; (+) strand; PAM type: YTN; PAM sequence: CTC
  source 1..20: mol_type = other DNA
ccttggctttgcgtcattgc

SEQ ID NO: 62074 - DNA, 20 bp, synthetic construct
  misc_feature 1..20: note = Description of Artificial Sequence: Synthetic oligonucleotide
  misc_feature 1..20: note = Target: SCN10A; (+) strand; PAM type: YTN; PAM sequence: CTT
  source 1..20: mol_type = other DNA
ggctttgcgtcattgccacc

SEQ ID NO: 62075 - DNA, 20 bp, synthetic construct
  misc_feature 1..20: note = Description of Artificial Sequence: Synthetic oligonucleotide
  misc_feature 1..20: note = Target: SCN10A; (+) strand; PAM type: YTN; PAM sequence: TTG
  source 1..20: mol_type = other DNA
gctttgcgtcattgccaccc

SEQ ID NO: 62076 - DNA, 20 bp, synthetic construct
  misc_feature 1..20: note = Description of Artificial Sequence: Synthetic oligonucleotide
  misc_feature 1..20: note = Target: SCN10A; (+) strand; PAM type: YTN; PAM sequence: CTT
  source 1..20: mol_type = other DNA
tgcgtcattgccaccctagt

SEQ ID NO: 62077 - DNA, 20 bp, synthetic construct
  misc_feature 1..20: note = Description of Artificial Sequence: Synthetic oligonucleotide
  misc_feature 1..20: note = Target: SCN10A; (+) strand; PAM type: YTN; PAM sequence: TTT
  source 1..20: mol_type = other DNA
gcgtcattgccaccctagtt

SEQ ID NO: 62078 - DNA, 20 bp, synthetic construct
  misc_feature 1..20: note = Description of Artificial Sequence: Synthetic oligonucleotide
  misc_feature 1..20: note = Target: SCN10A; (+) strand; PAM type: YTN; PAM sequence: TTG
  source 1..20: mol_type = other DNA
cgtcattgccaccctagttt

SEQ ID NO: 62079 - DNA, 20 bp, synthetic construct
  misc_feature 1..20: note = Description of Artificial Sequence: Synthetic oligonucleotide
  misc_feature 1..20: note = Target: SCN10A; (+) strand; PAM type: YTN; PAM sequence: TTG
  source 1..20: mol_type = other DNA
ccaccctagttttcctccca

SEQ ID NO: 62080 - DNA, 20 bp, synthetic construct
  misc_feature 1..20: note = Description of Artificial Sequence: Synthetic oligonucleotide
  misc_feature 1..20: note = Target: SCN10A; (+) strand; PAM type: YTN; PAM sequence: CTA
  source 1..20: mol_type = other DNA
gttttcctcccacctctcag

SEQ ID NO: 62081 - DNA, 20 bp, synthetic construct
  misc_feature 1..20: note = Description of Artificial Sequence: Synthetic oligonucleotide
  misc_feature 1..20: note = Target: SCN10A; (+) strand; PAM type: YTN; PAM sequence: TTT
  source 1..20: mol_type = other DNA
tcctcccacctctcagatcc

SEQ ID NO: 62082 - DNA, 20 bp, synthetic construct
  misc_feature 1..20: note = Description of Artificial Sequence: Synthetic oligonucleotide
  misc_feature 1..20: note = Target: SCN10A; (+) strand; PAM type: YTN; PAM sequence: TTT
  source 1..20: mol_type = other DNA
cctcccacctctcagatcct

SEQ ID NO: 62083 - DNA, 20 bp, synthetic construct
  misc_feature 1..20: note = Description of Artificial Sequence: Synthetic oligonucleotide
  misc_feature 1..20: note = Target: SCN10A; (+) strand; PAM type: YTN; PAM sequence: TTC
  source 1..20: mol_type = other DNA
ctcccacctctcagatcctg

SEQ ID NO: 62084 - DNA, 20 bp, synthetic construct
  misc_feature 1..20: note = Description of Artificial Sequence: Synthetic oligonucleotide
  misc_feature 1..20: note = Target: SCN10A; (+) strand; PAM type: YTN; PAM sequence: CTC
  source 1..20: mol_type = other DNA
ccacctctcagatcctgcct

SEQ ID NO: 62085 - DNA, 20 bp, synthetic construct
  misc_feature 1..20: note = Description of Artificial Sequence: Synthetic oligonucleotide
  misc_feature 1..20: note = Target: SCN10A; (+) strand; PAM type: YTN; PAM sequence: CTC
  source 1..20: mol_type = other DNA
tcagatcctgcctcgtcccg

SEQ ID NO: 62086 - DNA, 20 bp, synthetic construct
  misc_feature 1..20: note = Description of Artificial Sequence: Synthetic oligonucleotide
  misc_feature 1..20: note = Target: SCN10A; (+) strand; PAM type: YTN; PAM sequence: CTC
  source 1..20: mol_type = other DNA
agatcctgcctcgtcccgca

SEQ ID NO: 62087 - DNA, 20 bp, synthetic construct
  misc_feature 1..20: note = Description of Artificial Sequence: Synthetic oligonucleotide
  misc_feature 1..20: note = Target: SCN10A; (+) strand; PAM type: YTN; PAM sequence: CTG
  source 1..20: mol_type = other DNA
cctcgtcccgcacctgtgct

SEQ ID NO: 62088 - DNA, 20 bp, synthetic construct
  misc_feature 1..20: note = Description of Artificial Sequence: Synthetic oligonucleotide
  misc_feature 1..20: note = Target: SCN10A; (+) strand; PAM type: YTN; PAM sequence: CTC
  source 1..20: mol_type = other DNA
gtcccgcacctgtgctcctc

SEQ ID NO: 62089 - DNA, 20 bp, synthetic construct
  misc_feature 1..20: note = Description of Artificial Sequence: Synthetic oligonucleotide
  misc_feature 1..20: note = Target: SCN10A; (+) strand; PAM type: YTN; PAM sequence: CTG
  source 1..20: mol_type = other DNA
tgctcctccctaaagctgag

SEQ ID NO: 62090 - DNA, 20 bp, synthetic construct
  misc_feature 1..20: note = Description of Artificial Sequence: Synthetic oligonucleotide
  misc_feature 1..20: note = Target: SCN10A; (+) strand; PAM type: YTN; PAM sequence: CTC
  source 1..20: mol_type = other DNA
ctccctaaagctgaggccat

SEQ ID NO: 62091 - DNA, 20 bp, synthetic construct
  misc_feature 1..20: note = Description of Artificial Sequence: Synthetic oligonucleotide
  misc_feature 1..20: note = Target: SCN10A; (+) strand; PAM type: YTN; PAM sequence: CTC
  source 1..20: mol_type = other DNA
cctaaagctgaggccatgca

SEQ ID NO: 62092 - DNA, 20 bp, synthetic construct
  misc_feature 1..20: note = Description of Artificial Sequence: Synthetic oligonucleotide
  misc_feature 1..20: note = Target: SCN10A; (+) strand; PAM type: YTN; PAM sequence: CTA
  source 1..20: mol_type = other DNA
aagctgaggccatgcaccga

SEQ ID NO: 62093 - DNA, 20 bp, synthetic construct
  misc_feature 1..20: note = Description of Artificial Sequence: Synthetic oligonucleotide
  misc_feature 1..20: note = Target: SCN10A; (+) strand; PAM type: YTN; PAM sequence: CTG
  source 1..20: mol_type = other DNA
aggccatgcaccgagcagtt

SEQ ID NO: 62094 - DNA, 20 bp, synthetic construct
  misc_feature 1..20: note = Description of Artificial Sequence: Synthetic oligonucleotide
  misc_feature 1..20: note = Target: SCN10A; (+) strand; PAM type: YTN; PAM sequence: TTT
  source 1..20: mol_type = other DNA
tgtcacccttcctggacaat

SEQ ID NO: 62095 - DNA, 20 bp, synthetic construct
  misc_feature 1..20: note = Description of Artificial Sequence: Synthetic oligonucleotide
  misc_feature 1..20: note = Target: SCN10A; (+) strand; PAM type: YTN; PAM sequence: TTT
  source 1..20: mol_type = other DNA
gtcacccttcctggacaatc

SEQ ID NO: 62096 - DNA, 20 bp, synthetic construct
  misc_feature 1..20: note = Description of Artificial Sequence: Synthetic oligonucleotide
  misc_feature 1..20: note = Target: SCN10A; (+) strand; PAM type: YTN; PAM sequence: TTG
  source 1..20: mol_type = other DNA
tcacccttcctggacaatct

SEQ ID NO: 62097 - DNA, 20 bp, synthetic construct
  misc_feature 1..20: note = Description of Artificial Sequence: Synthetic oligonucleotide
  misc_feature 1..20: note = Target: SCN10A; (+) strand; PAM type: YTN; PAM sequence: CTT
  source 1..20: mol_type = other DNA
cctggacaatctggcattta

SEQ ID NO: 62098 - DNA, 20 bp, synthetic construct
  misc_feature 1..20: note = Description of Artificial Sequence: Synthetic oligonucleotide
  misc_feature 1..20: note = Target: SCN10A; (+) strand; PAM type: YTN; PAM sequence: TTC
  source 1..20: mol_type = other DNA
ctggacaatctggcatttag

SEQ ID NO: 62099 - DNA, 20 bp, synthetic construct
  misc_feature 1..20: note = Description of Artificial Sequence: Synthetic oligonucleotide
  misc_feature 1..20: note = Target: SCN10A; (+) strand; PAM type: YTN; PAM sequence: CTG
  source 1..20: mol_type = other DNA
gacaatctggcatttagatg

SEQ ID NO: 62100 - DNA, 20 bp, synthetic construct
  misc_feature 1..20: note = Description of Artificial Sequence: Synthetic oligonucleotide
  misc_feature 1..20: note = Target: SCN10A; (+) strand; PAM type: YTN; PAM sequence: CTG
  source 1..20: mol_type = other DNA
gcatttagatggaggcctag

SEQ ID NO: 62101 - DNA, 20 bp, synthetic construct
  misc_feature 1..20: note = Description of Artificial Sequence: Synthetic oligonucleotide
  misc_feature 1..20: note = Target: SCN10A; (+) strand; PAM type: YTN; PAM sequence: TTT
  source 1..20: mol_type = other DNA
agatggaggcctagatattt

SEQ ID NO: 62102 - DNA, 20 bp, synthetic construct
  misc_feature 1..20: note = Description of Artificial Sequence: Synthetic oligonucleotide
  misc_feature 1..20: note = Target: SCN10A; (+) strand; PAM type: YTN; PAM sequence: TTA
  source 1..20: mol_type = other DNA
gatggaggcctagatattta

SEQ ID NO: 62103 - DNA, 20 bp, synthetic construct
  misc_feature 1..20: note = Description of Artificial Sequence: Synthetic oligonucleotide
  misc_feature 1..20: note = Target: SCN10A; (+) strand; PAM type: YTN; PAM sequence: CTA
  source 1..20: mol_type = other DNA
gatatttagtaggttgtttt

SEQ ID NO: 62104 - DNA, 20 bp, synthetic construct
  misc_feature 1..20: note = Description of Artificial Sequence: Synthetic oligonucleotide
  misc_feature 1..20: note = Target: SCN10A; (+) strand; PAM type: YTN; PAM sequence: TTT
  source 1..20: mol_type = other DNA
agtaggttgtttttagagag

SEQ ID NO: 62105 - DNA, 20 bp, synthetic construct
  misc_feature 1..20: note = Description of Artificial Sequence: Synthetic oligonucleotide
  misc_feature 1..20: note = Target: SCN10A; (+) strand; PAM type: YTN; PAM sequence: TTA
  source 1..20: mol_type = other DNA
gtaggttgtttttagagagt

SEQ ID NO: 62106 - DNA, 20 bp, synthetic construct
  misc_feature 1..20: note = Description of Artificial Sequence: Synthetic oligonucleotide
  misc_feature 1..20: note = Target: SCN10A; (+) strand; PAM type: YTN; PAM sequence: TTG
  source 1..20: mol_type = other DNA
tttttagagagtaaatgaca

SEQ ID NO: 62107 - DNA, 20 bp, synthetic construct
  misc_feature 1..20: note = Description of Artificial Sequence: Synthetic oligonucleotide
  misc_feature 1..20: note = Target: SCN10A; (+) strand; PAM type: YTN; PAM sequence: TTT
  source 1..20: mol_type = other DNA
ttagagagtaaatgacacat

SEQ ID NO: 62108 - DNA, 20 bp, synthetic construct
  misc_feature 1..20: note = Description of Artificial Sequence: Synthetic oligonucleotide
  misc_feature 1..20: note = Target: SCN10A; (+) strand; PAM type: YTN; PAM sequence: TTT
  source 1..20: mol_type = other DNA
tagagagtaaatgacacatg

SEQ ID NO: 62109 - DNA, 20 bp, synthetic construct
  misc_feature 1..20: note = Description of Artificial Sequence: Synthetic oligonucleotide
  misc_feature 1..20: note = Target: SCN10A; (+) strand; PAM type: YTN; PAM sequence: TTT
  source 1..20: mol_type = other DNA
agagagtaaatgacacatga

SEQ ID NO: 62110 - DNA, 20 bp, synthetic construct
  misc_feature 1..20: note = Description of Artificial Sequence: Synthetic oligonucleotide
  misc_feature 1..20: note = Target: SCN10A; (+) strand; PAM type: YTN; PAM sequence: TTA
  source 1..20: mol_type = other DNA
gagagtaaatgacacatgag

SEQ ID NO: 62111 - DNA, 20 bp, synthetic construct
  misc_feature 1..20: note = Description of Artificial Sequence: Synthetic oligonucleotide
  misc_feature 1..20: note = Target: SCN10A; (+) strand; PAM type: YTN; PAM sequence: CTG
  source 1..20: mol_type = other DNA
cagccgtgaatcggaagagc

SEQ ID NO: 62112 - DNA, 20 bp, synthetic construct
  misc_feature 1..20: note = Description of Artificial Sequence: Synthetic oligonucleotide
  misc_feature 1..20: note = Target: SCN10A; (+) strand; PAM type: YTN; PAM sequence: CTG
  source 1..20: mol_type = other DNA
tagtcctagcccttcaacta

SEQ ID NO: 62113 - DNA, 20 bp, synthetic construct
  misc_feature 1..20: note = Description of Artificial Sequence: Synthetic oligonucleotide
  misc_feature 1..20: note = Target: SCN10A; (+) strand; PAM type: YTN; PAM sequence: CTA
  source 1..20: mol_type = other DNA
gcccttcaactaattagctg

SEQ ID NO: 62114 - DNA, 20 bp, synthetic construct
  misc_feature 1..20: note = Description of Artificial Sequence: Synthetic oligonucleotide
  misc_feature 1..20: note = Target: SCN10A; (+) strand; PAM type: YTN; PAM sequence: CTT
  source 1..20: mol_type = other DNA
caactaattagctgccaccc

SEQ ID NO: 62115 - DNA, 20 bp, synthetic construct
  misc_feature 1..20: note = Description of Artificial Sequence: Synthetic oligonucleotide
  misc_feature 1..20: note = Target: SCN10A; (+) strand; PAM type: YTN; PAM sequence: TTC
  source 1..20: mol_type = other DNA
aactaattagctgccaccct

SEQ ID NO: 62116 - DNA, 20 bp, synthetic construct
  misc_feature 1..20: note = Description of Artificial Sequence: Synthetic oligonucleotide
  misc_feature 1..20: note = Target: SCN10A; (+) strand; PAM type: YTN; PAM sequence: CTA
  source 1..20: mol_type = other DNA
attagctgccaccctgaact

SEQ ID NO: 62117 - DNA, 20 bp, synthetic construct
  misc_feature 1..20: note = Description of Artificial Sequence: Synthetic oligonucleotide
  misc_feature 1..20: note = Target: SCN10A; (+) strand; PAM type: YTN; PAM sequence: TTA
  source 1..20: mol_type = other DNA
gctgccaccctgaactctct

SEQ ID NO: 62118 - DNA, 20 bp, synthetic construct
  misc_feature 1..20: note = Description of Artificial Sequence: Synthetic oligonucleotide
  misc_feature 1..20: note = Target: SCN10A; (+) strand; PAM type: YTN; PAM sequence: CTG
  source 1..20: mol_type = other DNA
ccaccctgaactctctattc

SEQ ID NO: 62119 - DNA, 20 bp, synthetic construct
  misc_feature 1..20: note = Description of Artificial Sequence: Synthetic oligonucleotide
  misc_feature 1..20: note = Target: SCN10A; (+) strand; PAM type: YTN; PAM sequence: CTG
  source 1..20: mol_type = other DNA
aactctctattcccagccct

SEQ ID NO: 62120 - DNA, 20 bp, synthetic construct
  misc_feature 1..20: note = Description of Artificial Sequence: Synthetic oligonucleotide
  misc_feature 1..20: note = Target: SCN10A; (+) strand; PAM type: YTN; PAM sequence: CTC
  source 1..20: mol_type = other DNA
tctattcccagcccttcaac

SEQ ID NO: 62121 - DNA, 20 bp, synthetic construct
  misc_feature 1..20: note = Description of Artificial Sequence: Synthetic oligonucleotide
  misc_feature 1..20: note = Target: SCN10A; (+) strand; PAM type: YTN; PAM sequence: CTC
  source 1..20: mol_type = other DNA
tattcccagcccttcaacta

SEQ ID NO: 62122 - DNA, 20 bp, synthetic construct
  misc_feature 1..20: note = Description of Artificial Sequence: Synthetic oligonucleotide
  misc_feature 1..20: note = Target: SCN10A; (+) strand; PAM type: YTN; PAM sequence: CTA
  source 1..20: mol_type = other DNA
ttcccagcccttcaactaat

SEQ ID NO: 62123 - DNA, 20 bp, synthetic construct
  misc_feature 1..20: note = Description of Artificial Sequence: Synthetic oligonucleotide
  misc_feature 1..20: note = Target: SCN10A; (+) strand; PAM type: YTN; PAM sequence: TTC
  source 1..20: mol_type = other DNA
ccagcccttcaactaattac

SEQ ID NO: 62124 - DNA, 20 bp, synthetic construct
  misc_feature 1..20: note = Description of Artificial Sequence: Synthetic oligonucleotide
  misc_feature 1..20: note = Target: SCN10A; (+) strand; PAM type: YTN; PAM sequence: CTT
  source 1..20: mol_type = other DNA
caactaattacctgaagccc

SEQ ID NO: 62125 - DNA, 20 bp, synthetic construct
  misc_feature 1..20: note = Description of Artificial Sequence: Synthetic oligonucleotide
  misc_feature 1..20: note = Target: SCN10A; (+) strand; PAM type: YTN; PAM sequence: TTC
  source 1..20: mol_type = other DNA
aactaattacctgaagcccc

SEQ ID NO: 62126 - DNA, 20 bp, synthetic construct
  misc_feature 1..20: note = Description of Artificial Sequence: Synthetic oligonucleotide
  misc_feature 1..20: note = Target: SCN10A; (+) strand; PAM type: YTN; PAM sequence: CTA
  source 1..20: mol_type = other DNA
attacctgaagcccctcatg

SEQ ID NO: 62127 - DNA, 20 bp, synthetic construct
  misc_feature 1..20: note = Description of Artificial Sequence: Synthetic oligonucleotide
  misc_feature 1..20: note = Target: SCN10A; (+) strand; PAM type: YTN; PAM sequence: TTA
  source 1..20: mol_type = other DNA
cctgaagcccctcatgcctt

SEQ ID NO: 62128 - DNA, 20 bp, synthetic construct
  misc_feature 1..20: note = Description of Artificial Sequence: Synthetic oligonucleotide
  misc_feature 1..20: note = Target: SCN10A; (+) strand; PAM type: YTN; PAM sequence: CTG
  source 1..20: mol_type = other DNA
aagcccctcatgcctttggg

SEQ ID NO: 62129 - DNA, 20 bp, synthetic construct
  misc_feature 1..20: note = Description of Artificial Sequence: Synthetic oligonucleotide
  misc_feature 1..20: note = Target: SCN10A; (+) strand; PAM type: YTN; PAM sequence: CTC
  source 1..20: mol_type = other DNA
atgcctttgggctttgactt

SEQ ID NO: 62130 - DNA, 20 bp, synthetic construct
  misc_feature 1..20: note = Description of Artificial Sequence: Synthetic oligonucleotide
  misc_feature 1..20: note = Target: SCN10A; (+) strand; PAM type: YTN; PAM sequence: CTT
  source 1..20: mol_type = other DNA
tgggctttgacttcctcatt

SEQ ID NO: 62131 - DNA, 20 bp, synthetic construct
  misc_feature 1..20: note = Description of Artificial Sequence: Synthetic oligonucleotide
  misc_feature 1..20: note = Target: SCN10A; (+) strand; PAM type: YTN; PAM sequence: TTT
  source 1..20: mol_type = other DNA
gggctttgacttcctcattt

SEQ ID NO: 62132 - DNA, 20 bp, synthetic construct
  misc_feature 1..20: note = Description of Artificial Sequence: Synthetic oligonucleotide
  misc_feature 1..20: note = Target: SCN10A; (+) strand; PAM type: YTN; PAM sequence: TTG
  source 1..20: mol_type = other DNA
ggctttgacttcctcattta

SEQ ID NO: 62133 - DNA, 20 bp, synthetic construct
  misc_feature 1..20: note = Description of Artificial Sequence: Synthetic oligonucleotide
  misc_feature 1..20: note = Target: SCN10A; (+) strand; PAM type: YTN; PAM sequence: CTT
  source 1..20: mol_type = other DNA
tgacttcctcatttagaaaa

SEQ ID NO: 62134 - DNA, 20 bp, synthetic construct
  misc_feature 1..20: note = Description of Artificial Sequence: Synthetic oligonucleotide
  misc_feature 1..20: note = Target: SCN10A; (+) strand; PAM type: YTN; PAM sequence: TTT
  source 1..20: mol_type = other DNA
gacttcctcatttagaaaat

SEQ ID NO: 62135 - DNA, 20 bp, synthetic construct
  misc_feature 1..20: note = Description of Artificial Sequence: Synthetic oligonucleotide
  misc_feature 1..20: note = Target: SCN10A; (+) strand; PAM type: YTN; PAM sequence: TTG
  source 1..20: mol_type = other DNA
acttcctcatttagaaaatg

SEQ ID NO: 62136 - DNA, 20 bp, synthetic construct
  misc_feature 1..20: note = Description of Artificial Sequence: Synthetic oligonucleotide
  misc_feature 1..20: note = Target: SCN10A; (+) strand; PAM type: YTN; PAM sequence: CTT
  source 1..20: mol_type = other DNA
cctcatttagaaaatgcaaa

SEQ ID NO: 62137 - DNA, 20 bp, synthetic construct
  misc_feature 1..20: note = Description of Artificial Sequence: Synthetic oligonucleotide
  misc_feature 1..20: note = Target: SCN10A; (+) strand; PAM type: YTN; PAM sequence: TTC
  source 1..20: mol_type = other DNA
ctcatttagaaaatgcaaac

SEQ ID NO: 62138 - DNA, 20 bp, synthetic construct
  misc_feature 1..20: note = Description of Artificial Sequence: Synthetic oligonucleotide
  misc_feature 1..20: note = Target: SCN10A; (+) strand; PAM type: YTN; PAM sequence: CTC
  source 1..20: mol_type = other DNA
atttagaaaatgcaaacaac

SEQ ID NO: 62139 - DNA, 20 bp, synthetic construct
  misc_feature 1..20: note = Description of Artificial Sequence: Synthetic oligonucleotide
  misc_feature 1..20: note = Target: SCN10A; (+) strand; PAM type: YTN; PAM sequence: TTT
  source 1..20: mol_type = other DNA
agaaaatgcaaacaactgag

SEQ ID NO: 62140 - DNA, 20 bp, synthetic construct
  misc_feature 1..20: note = Description of Artificial Sequence: Synthetic oligonucleotide
  misc_feature 1..20: note = Target: SCN10A; (+) strand; PAM type: YTN; PAM sequence: TTA
  source 1..20: mol_type = other DNA
gaaaatgcaaacaactgagg

SEQ ID NO: 62141 - DNA, 20 bp, synthetic construct
  misc_feature 1..20: note = Description of Artificial Sequence: Synthetic oligonucleotide
  misc_feature 1..20: note = Target: SCN10A; (+) strand; PAM type: YTN; PAM sequence: CTG
  source 1..20: mol_type = other DNA
aggatgttaagttccttcct

SEQ ID NO: 62142 - DNA, 20 bp, synthetic construct
  misc_feature 1..20: note = Description of Artificial Sequence: Synthetic oligonucleotide
  misc_feature 1..20: note = Target: SCN10A; (+) strand; PAM type: YTN; PAM sequence: TTA
  source 1..20: mol_type = other DNA
agttccttcctgtgtctatg

SEQ ID NO: 62143 - DNA, 20 bp, synthetic construct
  misc_feature 1..20: note = Description of Artificial Sequence: Synthetic oligonucleotide
  misc_feature 1..20: note = Target: SCN10A; (+) strand; PAM type: YTN; PAM sequence: TTC
  source 1..20: mol_type = other DNA
cttcctgtgtctatgtctac

SEQ ID NO: 62144 - DNA, 20 bp, synthetic construct
  misc_feature 1..20: note = Description of Artificial Sequence: Synthetic oligonucleotide
  misc_feature 1..20: note = Target: SCN10A; (+) strand; PAM type: YTN; PAM sequence: CTT
  source 1..20: mol_type = other DNA
cctgtgtctatgtctacctt

SEQ ID NO: 62145 - DNA, 20 bp, synthetic construct
  misc_feature 1..20: note = Description of Artificial Sequence: Synthetic oligonucleotide
  misc_feature 1..20: note = Target: SCN10A; (+) strand; PAM type: YTN; PAM sequence: TTC
  source 1..20: mol_type = other DNA
ctgtgtctatgtctaccttg

SEQ ID NO: 62146 - DNA, 20 bp, synthetic construct
  misc_feature 1..20: note = Description of Artificial Sequence: Synthetic oligonucleotide
  misc_feature 1..20: note = Target: SCN10A; (+) strand; PAM type: YTN; PAM sequence: CTG
  source 1..20: mol_type = other DNA
tgtctatgtctaccttggtc

SEQ ID NO: 62147 - DNA, 20 bp, synthetic construct
  misc_feature 1..20: note = Description of Artificial Sequence: Synthetic oligonucleotide
  misc_feature 1..20: note = Target: SCN10A; (+) strand; PAM type: YTN; PAM sequence: CTA
  source 1..20: mol_type = other DNA
tgtctaccttggtctattgg

SEQ ID NO: 62148 - DNA, 20 bp, synthetic construct
  misc_feature 1..20: note = Description of Artificial Sequence: Synthetic oligonucleotide
  misc_feature 1..20: note = Target: SCN10A; (+) strand; PAM type: YTN; PAM sequence: CTA
  source 1..20: mol_type = other DNA
ccttggtctattggcggagt

SEQ ID NO: 62149 - DNA, 20 bp, synthetic construct
  misc_feature 1..20: note = Description of Artificial Sequence: Synthetic oligonucleotide
  misc_feature 1..20: note = Target: SCN10A; (+) strand; PAM type: YTN; PAM sequence: CTT
  source 1..20: mol_type = other DNA
ggtctattggcggagtagtt

SEQ ID NO: 62150 - DNA, 20 bp, synthetic construct
  misc_feature 1..20: note = Description of Artificial Sequence: Synthetic oligonucleotide
  misc_feature 1..20: note = Target: SCN10A; (+) strand; PAM type: YTN; PAM sequence: TTG
  source 1..20: mol_type = other DNA
gtctattggcggagtagttg

SEQ ID NO: 62151 - DNA, 20 bp, synthetic construct
  misc_feature 1..20: note = Description of Artificial Sequence: Synthetic oligonucleotide
  misc_feature 1..20: note = Target: SCN10A; (+) strand; PAM type: YTN; PAM sequence: CTA
  source 1..20: mol_type = other DNA
ttggcggagtagttgagatt

SEQ ID NO: 62152 - DNA, 20 bp, synthetic construct
  misc_feature 1..20: note = Description of Artificial Sequence: Synthetic oligonucleotide
  misc_feature 1..20: note = Target: SCN10A; (+) strand; PAM type: YTN; PAM sequence: TTG
  source 1..20: mol_type = other DNA
gcggagtagttgagattgtg

SEQ ID NO: 62153 - DNA, 20 bp, synthetic construct
  misc_feature 1..20: note = Description of Artificial Sequence: Synthetic oligonucleotide
  misc_feature 1..20: note = Target: SCN10A; (+) strand; PAM type: YTN; PAM sequence: TTG
  source 1..20: mol_type = other DNA
agattgtgtaaggagcttaa

SEQ ID NO: 62154 - DNA, 20 bp, synthetic construct
  misc_feature 1..20: note = Description of Artificial Sequence: Synthetic oligonucleotide
  misc_feature 1..20: note = Target: SCN10A; (+) strand; PAM type: YTN; PAM sequence: TTG
  source 1..20: mol_type = other DNA
tgtaaggagcttaagccaca

SEQ ID NO: 62155 - DNA, 20 bp, synthetic construct
  misc_feature 1..20: note = Description of Artificial Sequence: Synthetic oligonucleotide
  misc_feature 1..20: note = Target: SCN10A; (+) strand; PAM type: YTN; PAM sequence: CTT
  source 1..20: mol_type = other DNA
aagccacagtacagagagaa

SEQ ID NO: 62156 - DNA, 20 bp, synthetic construct
  misc_feature 1..20: note = Description of Artificial Sequence: Synthetic oligonucleotide
  misc_feature 1..20: note = Target: SCN10A; (+) strand; PAM type: YTN; PAM sequence: TTA
  source 1..20: mol_type = other DNA
agccacagtacagagagaac

SEQ ID NO: 62157 - DNA, 20 bp, synthetic construct
  misc_feature 1..20: note = Description of Artificial Sequence: Synthetic oligonucleotide
  misc_feature 1..20: note = Target: SCN10A; (+) strand; PAM type: YTN; PAM sequence: CTT
  source 1..20: mol_type = other DNA
ccttctttgctctacaaagc

SEQ ID NO: 62158 - DNA, 20 bp, synthetic construct
  misc_feature 1..20: note = Description of Artificial Sequence: Synthetic oligonucleotide
  misc_feature 1..20: note = Target: SCN10A; (+) strand; PAM type: YTN; PAM sequence: TTC
  source 1..20: mol_type = other DNA
cttctttgctctacaaagcc

SEQ ID NO: 62159 - DNA, 20 bp, synthetic construct
  misc_feature 1..20: note = Description of Artificial Sequence: Synthetic oligonucleotide
  misc_feature 1..20: note = Target: SCN10A; (+) strand; PAM type: YTN; PAM sequence: CTT
  source 1..20: mol_type = other DNA
ctttgctctacaaagcccag

SEQ ID NO: 62160 - DNA, 20 bp, synthetic construct
  misc_feature 1..20: note = Description of Artificial Sequence: Synthetic oligonucleotide
  misc_feature 1..20: note = Target: SCN10A; (+) strand; PAM type: YTN; PAM sequence: TTC
  source 1..20: mol_type = other DNA
tttgctctacaaagcccagt

SEQ ID NO: 62161 - DNA, 20 bp, synthetic construct
  misc_feature 1..20: note = Description of Artificial Sequence: Synthetic oligonucleotide
  misc_feature 1..20: note = Target: SCN10A; (+) strand; PAM type: YTN; PAM sequence: CTT
  source 1..20: mol_type = other DNA
tgctctacaaagcccagtat

SEQ ID NO: 62162 - DNA, 20 bp, synthetic construct
  misc_feature 1..20: note = Description of Artificial Sequence: Synthetic oligonucleotide
  misc_feature 1..20: note = Target: SCN10A; (+) strand; PAM type: YTN; PAM sequence: TTT
  source 1..20: mol_type = other DNA
gctctacaaagcccagtatt

SEQ ID NO: 62163 - DNA, 20 bp, synthetic construct
  misc_feature 1..20: note = Description of Artificial Sequence: Synthetic oligonucleotide
  misc_feature 1..20: note = Target: SCN10A; (+) strand; PAM type: YTN; PAM sequence: TTG
  source 1..20: mol_type = other DNA
ctctacaaagcccagtattc

SEQ ID NO: 62164 - DNA, 20 bp, synthetic construct
  misc_feature 1..20: note = Description of Artificial Sequence: Synthetic oligonucleotide
  misc_feature 1..20: note = Target: SCN10A; (+) strand; PAM type: YTN; PAM sequence: CTC
  source 1..20: mol_type = other DNA
tacaaagcccagtattcagc

SEQ ID NO: 62165 - DNA, 20 bp, synthetic construct
  misc_feature 1..20: note = Description of Artificial Sequence: Synthetic oligonucleotide
  misc_feature 1..20: note = Target: SCN10A; (+) strand; PAM type: YTN; PAM sequence: CTA
  source 1..20: mol_type = other DNA
caaagcccagtattcagcca

SEQ ID NO: 62166 - DNA, 20 bp, synthetic construct
  misc_feature 1..20: note = Description of Artificial Sequence: Synthetic oligonucleotide
  misc_feature 1..20: note = Target: SCN10A; (+) strand; PAM type: YTN; PAM sequence: TTC
  source 1..20: mol_type = other DNA
agccagggccttagagatgt

SEQ ID NO: 62167 - DNA, 20 bp, synthetic construct
  misc_feature 1..20: note = Description of Artificial Sequence: Synthetic oligonucleotide
  misc_feature 1..20: note = Target: SCN10A; (+) strand; PAM type: YTN; PAM sequence: CTT
  source 1..20: mol_type = other DNA
agagatgtctcccaactctg

SEQ ID NO: 62168 - DNA, 20 bp, synthetic construct
  misc_feature 1..20: note = Description of Artificial Sequence: Synthetic oligonucleotide
  misc_feature 1..20: note = Target: SCN10A; (+) strand; PAM type: YTN; PAM sequence: TTA
  source 1..20: mol_type = other DNA
gagatgtctcccaactctga

SEQ ID NO: 62169 - DNA, 20 bp, synthetic construct
  misc_feature 1..20: note = Description of Artificial Sequence: Synthetic oligonucleotide
  misc_feature 1..20: note = Target: SCN10A; (+) strand; PAM type: YTN; PAM sequence: CTC
  source 1..20: mol_type = other DNA
ccaactctgaatctctattc

SEQ ID NO: 62170 - DNA, 20 bp, synthetic construct
  misc_feature 1..20: note = Description of Artificial Sequence: Synthetic oligonucleotide
  misc_feature 1..20: note = Target: SCN10A; (+) strand; PAM type: YTN; PAM sequence: CTC
  source 1..20: mol_type = other DNA
tgaatctctattcccataag

SEQ ID NO: 62171 - DNA, 20 bp, synthetic construct
  misc_feature 1..20: note = Description of Artificial Sequence: Synthetic oligonucleotide
  misc_feature 1..20: note = Target: SCN10A; (+) strand; PAM type: YTN; PAM sequence: CTG
  source 1..20: mol_type = other DNA
aatctctattcccataaggc

SEQ ID NO: 62172 - DNA, 20 bp, synthetic construct
  misc_feature 1..20: note = Description of Artificial Sequence: Synthetic oligonucleotide
  misc_feature 1..20: note = Target: SCN10A; (+) strand; PAM type: YTN; PAM sequence: CTC
  source 1..20: mol_type = other DNA
tattcccataaggccttgtt

SEQ ID NO: 62173 - DNA, 20 bp, synthetic construct
  misc_feature 1..20: note = Description of Artificial Sequence: Synthetic oligonucleotide
  misc_feature 1..20: note = Target: SCN10A; (+) strand; PAM type: YTN; PAM sequence: CTA
  source 1..20: mol_type = other DNA
ttcccataaggccttgttat

SEQ ID NO: 62174 - DNA, 20 bp, synthetic construct
  misc_feature 1..20: note = Description of Artificial Sequence: Synthetic oligonucleotide
  misc_feature 1..20: note = Target: SCN10A; (+) strand; PAM type: YTN; PAM sequence: TTC
  source 1..20: mol_type = other DNA
ccataaggccttgttattca

SEQ ID NO: 62175 - DNA, 20 bp, synthetic construct
  misc_feature 1..20: note = Description of Artificial Sequence: Synthetic oligonucleotide
  misc_feature 1..20: note = Target: SCN10A; (+) strand; PAM type: YTN; PAM sequence: CTT
  source 1..20: mol_type = other DNA
gttattcaaagtgtgggtca

SEQ ID NO: 62176 - DNA, 20 bp, synthetic construct
  misc_feature 1..20: note = Description of Artificial Sequence: Synthetic oligonucleotide
  misc_feature 1..20: note = Target: SCN10A; (+) strand; PAM type: YTN; PAM sequence: TTG
  source 1..20: mol_type = other DNA
ttattcaaagtgtgggtcac

SEQ ID NO: 62177 - DNA, 20 bp, synthetic construct
  misc_feature 1..20: note = Description of Artificial Sequence: Synthetic oligonucleotide
  misc_feature 1..20: note = Target: SCN10A; (+) strand; PAM type: YTN; PAM sequence: TTA
  source 1..20: mol_type = other DNA
ttcaaagtgtgggtcactga

SEQ ID NO: 62178 - DNA, 20 bp, synthetic construct
  misc_feature 1..20: note = Description of Artificial Sequence: Synthetic oligonucleotide
  misc_feature 1..20: note = Target: SCN10A; (+) strand; PAM type: YTN; PAM sequence: TTC
  source 1..20: mol_type = other DNA
aaagtgtgggtcactgaggg

SEQ ID NO: 62179 - DNA, 20 bp, synthetic construct
  misc_feature 1..20: note = Description of Artificial Sequence: Synthetic oligonucleotide
  misc_feature 1..20: note = Target: SCN10A; (+) strand; PAM type: YTN; PAM sequence: CTG
  source 1..20: mol_type = other DNA
agggcagtgcaagcatcacc

SEQ ID NO: 62180 - DNA, 20 bp, synthetic construct
  misc_feature 1..20: note = Description of Artificial Sequence: Synthetic oligonucleotide
  misc_feature 1..20: note = Target: SCN10A; (+) strand; PAM type: YTN; PAM sequence: CTG
  source 1..20: mol_type = other DNA
ggagcttgttagaaatgcaa

SEQ ID NO: 62181 - DNA, 20 bp, synthetic construct
  misc_feature 1..20: note = Description of Artificial Sequence: Synthetic oligonucleotide
  misc_feature 1..20: note = Target: SCN10A; (+) strand; PAM type: YTN; PAM sequence: CTT
  source 1..20: mol_type = other DNA
gttagaaatgcaaattctca

SEQ ID NO: 62182 - DNA, 20 bp, synthetic construct
  misc_feature 1..20: note = Description of Artificial Sequence: Synthetic oligonucleotide
  misc_feature 1..20: note = Target: SCN10A; (+) strand; PAM type: YTN; PAM sequence: TTG
  source 1..20: mol_type = other DNA
ttagaaatgcaaattctcag

SEQ ID NO: 62183 - DNA, 20 bp, synthetic construct
  misc_feature 1..20: note = Description of Artificial Sequence: Synthetic oligonucleotide
  misc_feature 1..20: note = Target: SCN10A; (+) strand; PAM type: YTN; PAM sequence: TTA
  source 1..20: mol_type = other DNA
gaaatgcaaattctcaggcc

SEQ ID NO: 62184 - DNA, 20 bp, synthetic construct
  misc_feature 1..20: note = Description of Artificial Sequence: Synthetic oligonucleotide
  misc_feature 1..20: note = Target: SCN10A; (+) strand; PAM type: YTN; PAM sequence: TTC
  source 1..20: mol_type = other DNA
tcaggccctgccacagattt

SEQ ID NO: 62185 - DNA, 20 bp, synthetic construct
  misc_feature 1..20: note = Description of Artificial Sequence: Synthetic oligonucleotide
  misc_feature 1..20: note = Target: SCN10A; (+) strand; PAM type: YTN; PAM sequence: CTC
  source 1..20: mol_type = other DNA
aggccctgccacagatttat

SEQ ID NO: 62186 - DNA, 20 bp, synthetic construct
  misc_feature 1..20: note = Description of Artificial Sequence: Synthetic oligonucleotide
  misc_feature 1..20: note = Target: SCN10A; (+) strand; PAM type: YTN; PAM sequence: CTG
  source 1..20: mol_type = other DNA
ccacagatttatggaatgag

SEQ ID NO: 62187 - DNA, 20 bp, synthetic construct
  misc_feature 1..20: note = Description of Artificial Sequence: Synthetic oligonucleotide
  misc_feature 1..20: note = Target: SCN10A; (+) strand; PAM type: YTN; PAM sequence: TTT
  source 1..20: mol_type = other DNA
atggaatgagaatctgcatt

SEQ ID NO: 62188 - DNA, 20 bp, synthetic construct
  misc_feature 1..20: note = Description of Artificial Sequence: Synthetic oligonucleotide
  misc_feature 1..20: note = Target: SCN10A; (+) strand; PAM type: YTN; PAM sequence: TTA
  source 1..20: mol_type = other DNA
tggaatgagaatctgcattt

SEQ ID NO: 62189 - DNA, 20 bp, synthetic construct
  misc_feature 1..20: note = Description of Artificial Sequence: Synthetic oligonucleotide
  misc_feature 1..20: note = Target: SCN10A; (+) strand; PAM type: YTN; PAM sequence: CTG
  source 1..20: mol_type = other DNA
catttgaacaagctcctggg

SEQ ID NO: 62190 - DNA, 20 bp, synthetic construct
  misc_feature 1..20: note = Description of Artificial Sequence: Synthetic oligonucleotide
  misc_feature 1..20: note = Target: SCN10A; (+) strand; PAM type: YTN; PAM sequence: TTT
  source 1..20: mol_type = other DNA
gaacaagctcctgggagatt

SEQ ID NO: 62191 - DNA, 20 bp, synthetic construct
  misc_feature 1..20: note = Description of Artificial Sequence: Synthetic oligonucleotide
  misc_feature 1..20: note = Target: SCN10A; (+) strand; PAM type: YTN; PAM sequence: TTG
  source 1..20: mol_type = other DNA
aacaagctcctgggagatta

SEQ ID NO: 62192 - DNA, 20 bp, synthetic construct
  misc_feature 1..20: note = Description of Artificial Sequence: Synthetic oligonucleotide
  misc_feature 1..20: note = Target: SCN10A; (+) strand; PAM type: YTN; PAM sequence: CTC
  source 1..20: mol_type = other DNA
ctgggagattaaattttgag

SEQ ID NO: 62193 - DNA, 20 bp, synthetic construct
  misc_feature 1..20: note = Description of Artificial Sequence: Synthetic oligonucleotide
  misc_feature 1..20: note = Target: SCN10A; (+) strand; PAM type: YTN; PAM sequence: CTG
  source 1..20: mol_type = other DNA
ggagattaaattttgagaag

SEQ ID NO: 62194 - DNA, 20 bp, synthetic construct
  misc_feature 1..20: note = Description of Artificial Sequence: Synthetic oligonucleotide
  misc_feature 1..20: note = Target: SCN10A; (+) strand; PAM type: YTN; PAM sequence: TTA
  source 1..20: mol_type = other DNA
aattttgagaagtgctattg

SEQ ID NO: 62195 - DNA, 20 bp, synthetic construct
  misc_feature 1..20: note = Description of Artificial Sequence: Synthetic oligonucleotide
  misc_feature 1..20: note = Target: SCN10A; (+) strand; PAM type: YTN; PAM sequence: TTT
  source 1..20: mol_type = other DNA
tgagaagtgctattgtaatg

SEQ ID NO: 62196 - DNA, 20 bp, synthetic construct
  misc_feature 1..20: note = Description of Artificial Sequence: Synthetic oligonucleotide
  misc_feature 1..20: note = Target: SCN10A; (+) strand; PAM type: YTN; PAM sequence: TTT
  source 1..20: mol_type = other DNA
gagaagtgctattgtaatga

SEQ ID NO: 62197 - DNA, 20 bp, synthetic construct
  misc_feature 1..20: note = Description of Artificial Sequence: Synthetic oligonucleotide
  misc_feature 1..20: note = Target: SCN10A; (+) strand; PAM type: YTN; PAM sequence: TTG
  source 1..20: mol_type = other DNA
agaagtgctattgtaatgat

SEQ ID NO: 62198 - DNA, 20 bp, synthetic construct
  misc_feature 1..20: note = Description of Artificial Sequence: Synthetic oligonucleotide
  misc_feature 1..20: note = Target: SCN10A; (+) strand; PAM type: YTN; PAM sequence: CTA
  source 1..20: mol_type = other DNA
ttgtaatgattttctgtgag

SEQ ID NO: 62199 - DNA, 20 bp, synthetic construct
  misc_feature 1..20: note = Description of Artificial Sequence: Synthetic oligonucleotide
  misc_feature 1..20: note = Target: SCN10A; (+) strand; PAM type: YTN; PAM sequence: TTG
  source 1..20: mol_type = other DNA
taatgattttctgtgagctt

SEQ ID NO: 62200 - DNA, 20 bp, synthetic construct
  misc_feature 1..20: note = Description of Artificial Sequence: Synthetic oligonucleotide
  misc_feature 1..20: note = Target: SCN10A; (+) strand; PAM type: YTN; PAM sequence: TTT
  source 1..20: mol_type = other DNA
tctgtgagctttaaaggagt

SEQ ID NO: 62201 - DNA, 20 bp, synthetic construct
  misc_feature 1..20: note = Description of Artificial Sequence: Synthetic oligonucleotide
  misc_feature 1..20: note = Target: SCN10A; (+) strand; PAM type: YTN; PAM sequence: TTT
  source 1..20: mol_type = other DNA
ctgtgagctttaaaggagta

SEQ ID NO: 62202 - DNA, 20 bp, synthetic construct
  misc_feature 1..20: note = Description of Artificial Sequence: Synthetic oligonucleotide
  misc_feature 1..20: note = Target: SCN10A; (+) strand; PAM type: YTN; PAM sequence: TTC
  source 1..20: mol_type = other DNA
tgtgagctttaaaggagtaa

SEQ ID NO: 62203 - DNA, 20 bp, synthetic construct
  misc_feature 1..20: note = Description of Artificial Sequence: Synthetic oligonucleotide
  misc_feature 1..20: note = Target: SCN10A; (+) strand; PAM type: YTN; PAM sequence: CTG
  source 1..20: mol_type = other DNA
tgagctttaaaggagtaatt

SEQ ID NO: 62204 - DNA, 20 bp, synthetic construct
  misc_feature 1..20: note = Description of Artificial Sequence: Synthetic oligonucleotide
  misc_feature 1..20: note = Target: SCN10A; (+) strand; PAM type: YTN; PAM sequence: CTT
  source 1..20: mol_type = other DNA
taaaggagtaattagtagca

SEQ ID NO: 62205 - DNA, 20 bp, synthetic construct
  misc_feature 1..20: note = Description of Artificial Sequence: Synthetic oligonucleotide
  misc_feature 1..20: note = Target: SCN10A; (+) strand; PAM type: YTN; PAM sequence: TTT
  source 1..20: mol_type = other DNA
aaaggagtaattagtagcat

SEQ ID NO: 62206 - DNA, 20 bp, synthetic construct
  misc_feature 1..20: note = Description of Artificial Sequence: Synthetic oligonucleotide
  misc_feature 1..20: note = Target: SCN10A; (+) strand; PAM type: YTN; PAM sequence: TTA
  source 1..20: mol_type = other DNA
aaggagtaattagtagcatt

SEQ ID NO: 62207 - DNA, 20 bp, synthetic construct
  misc_feature 1..20: note = Description of Artificial Sequence: Synthetic oligonucleotide
  misc_feature 1..20: note = Target: SCN10A; (+) strand; PAM type: YTN; PAM sequence: TTA
  source 1..20: mol_type = other DNA
gtagcatttggaagtggttt

SEQ ID NO: 62208 - DNA, 20 bp, synthetic construct
  misc_feature 1..20: note = Description of Artificial Sequence: Synthetic oligonucleotide
  misc_feature 1..20: note = Target: SCN10A; (+) strand; PAM type: YTN; PAM sequence: TTT
  source 1..20: mol_type = other DNA
ggaagtggtttgataaggaa

SEQ ID NO: 62209 - DNA, 20 bp, synthetic construct
  misc_feature 1..20: note = Description of Artificial Sequence: Synthetic oligonucleotide
  misc_feature 1..20: note = Target: SCN10A; (+) strand; PAM type: YTN; PAM sequence: TTG
  source 1..20: mol_type = other DNA
gaagtggtttgataaggaaa

SEQ ID NO: 62210 - DNA, 20 bp, synthetic construct
  misc_feature 1..20: note = Description of Artificial Sequence: Synthetic oligonucleotide
  misc_feature 1..20: note = Target: SCN10A; (+) strand; PAM type: YTN; PAM sequence: TTT
  source 1..20: mol_type = other DNA
gataaggaaagatagtcctt

SEQ ID NO: 62211 - DNA, 20 bp, synthetic construct
  misc_feature 1..20: note = Description of Artificial Sequence: Synthetic oligonucleotide
  misc_feature 1..20: note = Target: SCN10A; (+) strand; PAM type: YTN; PAM sequence: TTG
  source 1..20: mol_type = other DNA
ataaggaaagatagtccttt

SEQ ID NO: 62212 - DNA, 20 bp, synthetic construct
  misc_feature 1..20: note = Description of Artificial Sequence: Synthetic oligonucleotide
  misc_feature 1..20: note = Target: SCN10A; (+) strand; PAM type: YTN; PAM sequence: CTT
  source 1..20: mol_type = other DNA
tttgtattgtaggccttcag

SEQ ID NO: 62213 - DNA, 20 bp, synthetic construct
  misc_feature 1..20: note = Description of Artificial Sequence: Synthetic oligonucleotide
  misc_feature 1..20: note = Target: SCN10A; (+) strand; PAM type: YTN; PAM sequence: TTT
  source 1..20: mol_type = other DNA
ttgtattgtaggccttcaga

SEQ ID NO: 62214 - DNA, 20 bp, synthetic construct
  misc_feature 1..20: note = Description of Artificial Sequence: Synthetic oligonucleotide
  misc_feature 1..20: note = Target: SCN10A; (+) strand; PAM type: YTN; PAM sequence: TTT
  source 1..20: mol_type = other DNA
tgtattgtaggccttcagag

SEQ ID NO: 62215 - DNA, 20 bp, synthetic construct
  misc_feature 1..20: note = Description of Artificial Sequence: Synthetic oligonucleotide
  misc_feature 1..20: note = Target: SCN10A; (+) strand; PAM type: YTN; PAM sequence: TTT
  source 1..20: mol_type = other DNA
gtattgtaggccttcagaga

SEQ ID NO: 62216 - DNA, 20 bp, synthetic construct
  misc_feature 1..20: note = Description of Artificial Sequence: Synthetic oligonucleotide
  misc_feature 1..20: note = Target: SCN10A; (+) strand; PAM type: YTN; PAM sequence: TTG
  source 1..20: mol_type = other DNA
tattgtaggccttcagagaa

SEQ ID NO: 62217 - DNA, 20 bp, synthetic construct
  misc_feature 1..20: note = Description of Artificial Sequence: Synthetic oligonucleotide
  misc_feature 1..20: note = Target: SCN10A; (+) strand; PAM type: YTN; PAM sequence: TTG
  source 1..20: mol_type = other DNA
taggccttcagagaaggccg

SEQ ID NO: 62218 - DNA, 20 bp, synthetic construct
  misc_feature 1..20: note = Description of Artificial Sequence: Synthetic oligonucleotide
  misc_feature 1..20: note = Target: SCN10A; (+) strand; PAM type: YTN; PAM sequence: CTT
  source 1..20: mol_type = other DNA
cagagaaggccgtgtgttgg

SEQ ID NO: 62219 - DNA, 20 bp, synthetic construct
  misc_feature 1..20: note = Description of Artificial Sequence: Synthetic oligonucleotide
  misc_feature 1..20: note = Target: SCN10A; (+) strand; PAM type: YTN; PAM sequence: TTC
  source 1..20: mol_type = other DNA
agagaaggccgtgtgttggg

SEQ ID NO: 62220 - DNA, 20 bp, synthetic construct
  misc_feature 1..20: note = Description of Artificial Sequence: Synthetic oligonucleotide
  misc_feature 1..20: note = Target: SCN10A; (+) strand; PAM type: YTN; PAM sequence: TTG
  source 1..20: mol_type = other DNA
gggaggtcagagggtgggaa

SEQ ID NO: 62221 - DNA, 20 bp, synthetic construct
  misc_feature 1..20: note = Description of Artificial Sequence: Synthetic oligonucleotide
  misc_feature 1..20: note = Target: SCN10A; (+) strand; PAM type: YTN; PAM sequence: CTT
  source 1..20: mol_type = other DNA
cgggattaaataagggcaaa

SEQ ID NO: 62222 - DNA, 20 bp, synthetic construct
  misc_feature 1..20: note = Description of Artificial Sequence: Synthetic oligonucleotide
  misc_feature 1..20: note = Target: SCN10A; (+) strand; PAM type: YTN; PAM sequence: TTC
  source 1..20: mol_type = other DNA
gggattaaataagggcaaag

SEQ ID NO: 62223 - DNA, 20 bp, synthetic construct
  misc_feature 1..20: note = Description of Artificial Sequence: Synthetic oligonucleotide
  misc_feature 1..20: note = Target: SCN10A; (+) strand; PAM type: YTN; PAM sequence: TTA
  source 1..20: mol_type = other DNA
aataagggcaaagctgggtt

SEQ ID NO: 62224 - DNA, 20 bp, synthetic construct
  misc_feature 1..20: note = Description of Artificial Sequence: Synthetic oligonucleotide
  misc_feature 1..20: note = Target: SCN10A; (+) strand; PAM type: YTN; PAM sequence: CTG
  source 1..20: mol_type = other DNA
ggttttgctactgacaagtt

SEQ ID NO: 62225 - DNA, 20 bp, synthetic construct
  misc_feature 1..20: note = Description of Artificial Sequence: Synthetic oligonucleotide
  misc_feature 1..20: note = Target: SCN10A; (+) strand; PAM type: YTN; PAM sequence: TTT
  source 1..20: mol_type = other DNA
tgctactgacaagttgggtg

SEQ ID NO: 62226 - DNA, 20 bp, synthetic construct
  misc_feature 1..20: note = Description of Artificial Sequence: Synthetic oligonucleotide
  misc_feature 1..20: note = Target: SCN10A; (+) strand; PAM type: YTN; PAM sequence: TTT
  source 1..20: mol_type = other DNA
gctactgacaagttgggtga

SEQ ID NO: 62227 - DNA, 20 bp, synthetic construct
  misc_feature 1..20: note = Description of Artificial Sequence: Synthetic oligonucleotide
  misc_feature 1..20: note = Target: SCN10A; (+) strand; PAM type: YTN; PAM sequence: TTG
  source 1..20: mol_type = other DNA
ctactgacaagttgggtgac

SEQ ID NO: 62228 - DNA, 20 bp, synthetic construct
  misc_feature 1..20: note = Description of Artificial Sequence: Synthetic oligonucleotide
  misc_feature 1..20: note = Target: SCN10A; (+) strand; PAM type: YTN; PAM sequence: CTA
  source 1..20: mol_type = other DNA
ctgacaagttgggtgacctt

SEQ ID NO: 62229 - DNA, 20 bp, synthetic construct
  misc_feature 1..20: note = Description of Artificial Sequence: Synthetic oligonucleotide
  misc_feature 1..20: note = Target: SCN10A; (+) strand; PAM type: YTN; PAM sequence: CTG
  source 1..20: mol_type = other DNA
acaagttgggtgaccttgga

SEQ ID NO: 62230 - DNA, 20 bp, synthetic construct
  misc_feature 1..20: note = Description of Artificial Sequence: Synthetic oligonucleotide
  misc_feature 1..20: note = Target: SCN10A; (+) strand; PAM type: YTN; PAM sequence: TTG
  source 1..20: mol_type = other DNA
ggtgaccttggacaagcctt

SEQ ID NO: 62231 - DNA, 20 bp, synthetic construct
  misc_feature 1..20: note = Description of Artificial Sequence: Synthetic oligonucleotide
  misc_feature 1..20: note = Target: SCN10A; (+) strand; PAM type: YTN; PAM sequence: CTT
  source 1..20: mol_type = other DNA
ggacaagccttttaaacatt

SEQ ID NO: 62232 - DNA, 20 bp, synthetic construct
  misc_feature 1..20: note = Description of Artificial Sequence: Synthetic oligonucleotide
  misc_feature 1..20: note = Target: SCN10A; (+) strand; PAM type: YTN; PAM sequence: TTG
  source 1..20: mol_type = other DNA
gacaagccttttaaacattt

SEQ ID NO: 62233 - DNA, 20 bp, synthetic construct
  misc_feature 1..20: note = Description of Artificial Sequence: Synthetic oligonucleotide
  misc_feature 1..20: note = Target: SCN10A; (+) strand; PAM type: YTN; PAM sequence: CTT
  source 1..20: mol_type = other DNA
ttaaacattttgagtgtcag

SEQ ID NO: 62234 - DNA, 20 bp, synthetic construct
  misc_feature 1..20: note = Description of Artificial Sequence: Synthetic oligonucleotide
  misc_feature 1..20: note = Target: SCN10A; (+) strand; PAM type: YTN; PAM sequence: TTT
  source 1..20: mol_type = other DNA
taaacattttgagtgtcagt

SEQ ID NO: 62235 - DNA, 20 bp, synthetic construct
  misc_feature 1..20: note = Description of Artificial Sequence: Synthetic oligonucleotide
  misc_feature 1..20: note = Target: SCN10A; (+) strand; PAM type: YTN; PAM sequence: TTT
  source 1..20: mol_type = other DNA
aaacattttgagtgtcagtt

SEQ ID NO: 62236 - DNA, 20 bp, synthetic construct
  misc_feature 1..20: note = Description of Artificial Sequence: Synthetic oligonucleotide
  misc_feature 1..20: note = Target: SCN10A; (+) strand; PAM type: YTN; PAM sequence: TTA
  source 1..20: mol_type = other DNA
aacattttgagtgtcagttt

SEQ ID NO: 62237 - DNA, 20 bp, synthetic construct
  misc_feature 1..20: note = Description of Artificial Sequence: Synthetic oligonucleotide
  misc_feature 1..20: note = Target: SCN10A; (+) strand; PAM type: YTN; PAM sequence: TTT
  source 1..20: mol_type = other DNA
tgagtgtcagtttccccatc

SEQ ID NO: 62238 - DNA, 20 bp, synthetic construct
  misc_feature 1..20: note = Description of Artificial Sequence: Synthetic oligonucleotide
  misc_feature 1..20: note = Target: SCN10A; (+) strand; PAM type: YTN; PAM sequence: TTT
  source 1..20: mol_type = other DNA
gagtgtcagtttccccatct

SEQ ID NO: 62239 - DNA, 20 bp, synthetic construct
  misc_feature 1..20: note = Description of Artificial Sequence: Synthetic oligonucleotide
  misc_feature 1..20: note = Target: SCN10A; (+) strand; PAM type: YTN; PAM sequence: TTG
  source 1..20: mol_type = other DNA
agtgtcagtttccccatcta

SEQ ID NO: 62240 - DNA, 20 bp, synthetic construct
  misc_feature 1..20: note = Description of Artificial Sequence: Synthetic oligonucleotide
  misc_feature 1..20: note = Target: SCN10A; (+) strand; PAM type: YTN; PAM sequence: TTT
  source 1..20: mol_type = other DNA
ccccatctatatagtgggag

SEQ ID NO: 62241 - DNA, 20 bp, synthetic construct
  misc_feature 1..20: note = Description of Artificial Sequence: Synthetic oligonucleotide
  misc_feature 1..20: note = Target: SCN10A; (+) strand; PAM type: YTN; PAM sequence: TTC
  source 1..20: mol_type = other DNA
cccatctatatagtgggagg

SEQ ID NO: 62242 - DNA, 20 bp, synthetic construct
  misc_feature 1..20: note = Description of Artificial Sequence: Synthetic oligonucleotide
  misc_feature 1..20: note = Target: SCN10A; (+) strand; PAM type: YTN; PAM sequence: CTA
  source 1..20: mol_type = other DNA
tatagtgggaggcatacact

SEQ ID NO: 62243 - DNA, 20 bp, synthetic construct
  misc_feature 1..20: note = Description of Artificial Sequence: Synthetic oligonucleotide
  misc_feature 1..20: note = Target: SCN10A; (+) strand; PAM type: YTN; PAM sequence: CTC
  source 1..20: mol_type = other DNA
actcactcaaatgcttgcag

SEQ ID NO: 62244 - DNA, 20 bp, synthetic construct
  misc_feature 1..20: note = Description of Artificial Sequence: Synthetic oligonucleotide
  misc_feature 1..20: note = Target: SCN10A; (+) strand; PAM type: YTN; PAM sequence: CTC
  source 1..20: mol_type = other DNA
actcaaatgcttgcagccag

SEQ ID NO: 62245 - DNA, 20 bp, synthetic construct
  misc_feature 1..20: note = Description of Artificial Sequence: Synthetic oligonucleotide
  misc_feature 1..20: note = Target: SCN10A; (+) strand; PAM type: YTN; PAM sequence: CTC
  source 1..20: mol_type = other DNA
aaatgcttgcagccaggttt

SEQ ID NO: 62246 - DNA, 20 bp, synthetic construct
  misc_feature 1..20: note = Description of Artificial Sequence: Synthetic oligonucleotide
  misc_feature 1..20: note = Target: SCN10A; (+) strand; PAM type: YTN; PAM sequence: CTT
  source 1..20: mol_type = other DNA
gcagccaggtttggcaggcc

SEQ ID NO: 62247 - DNA, 20 bp, synthetic construct
  misc_feature 1..20: note = Description of Artificial Sequence: Synthetic oligonucleotide
  misc_feature 1..20: note = Target: SCN10A; (+) strand; PAM type: YTN; PAM sequence: TTG
  source 1..20: mol_type = other DNA
cagccaggtttggcaggcca

SEQ ID NO: 62248 - DNA, 20 bp, synthetic construct
  misc_feature 1..20: note = Description of Artificial Sequence: Synthetic oligonucleotide
  misc_feature 1..20: note = Target: SCN10A; (+) strand; PAM type: YTN; PAM sequence: TTT
  source 1..20: mol_type = other DNA
ggcaggccatggcacgggca

SEQ ID NO: 62249 - DNA, 20 bp, synthetic construct
  misc_feature 1..20: note = Description of Artificial Sequence: Synthetic oligonucleotide
  misc_feature 1..20: note = Target: SCN10A; (+) strand; PAM type: YTN; PAM sequence: TTG
  source 1..20: mol_type = other DNA
gcaggccatggcacgggcac

SEQ ID NO: 62250 - DNA, 20 bp, synthetic construct
  misc_feature 1..20: note = Description of Artificial Sequence: Synthetic oligonucleotide
  misc_feature 1..20: note = Target: SCN10A; (+) strand; PAM type: YTN; PAM sequence: CTT
  source 1..20: mol_type = other DNA
gaacacctcccatgctctgc

SEQ ID NO: 62251 - DNA, 20 bp, synthetic construct
  misc_feature 1..20: note = Description of Artificial Sequence: Synthetic oligonucleotide
  misc_feature 1..20: note = Target: SCN10A; (+) strand; PAM type: YTN; PAM sequence: TTG
  source 1..20: mol_type = other DNA
aacacctcccatgctctgct

SEQ ID NO: 62252 - DNA, 20 bp, synthetic construct
  misc_feature 1..20: note = Description of Artificial Sequence: Synthetic oligonucleotide
  misc_feature 1..20: note = Target: SCN10A; (+) strand; PAM type: YTN; PAM sequence: CTC
  source 1..20: mol_type = other DNA
ccatgctctgctgctaagag

SEQ ID NO: 62253 - DNA, 20 bp, synthetic construct
  misc_feature 1..20: note = Description of Artificial Sequence: Synthetic oligonucleotide
  misc_feature 1..20: note = Target: SCN10A; (+) strand; PAM type: YTN; PAM sequence: CTC
  source 1..20: mol_type = other DNA
tgctgctaagaggggccctc

SEQ ID NO: 62254 - DNA, 20 bp, synthetic construct
  misc_feature 1..20: note = Description of Artificial Sequence: Synthetic oligonucleotide
  misc_feature 1..20: note = Target: SCN10A; (+) strand; PAM type: YTN; PAM sequence: CTG
  source 1..20: mol_type = other DNA
ctgctaagaggggccctcgc

SEQ ID NO: 62255 - DNA, 20 bp, synthetic construct
  misc_feature 1..20: note = Description of Artificial Sequence: Synthetic oligonucleotide
  misc_feature 1..20: note = Target: SCN10A; (+) strand; PAM type: YTN; PAM sequence: CTG
  source 1..20: mol_type = other DNA
ctaagaggggccctcgccct

SEQ ID NO: 62256 - DNA, 20 bp, synthetic construct
  misc_feature 1..20: note = Description of Artificial Sequence: Synthetic oligonucleotide
  misc_feature 1..20: note = Target: SCN10A; (+) strand; PAM type: YTN; PAM sequence: CTA
  source 1..20: mol_type = other DNA
agaggggccctcgccctggg

SEQ ID NO: 62257 - DNA, 20 bp, synthetic construct
  misc_feature 1..20: note = Description of Artificial Sequence: Synthetic oligonucleotide
  misc_feature 1..20: note = Target: SCN10A; (+) strand; PAM type: YTN; PAM sequence: CTC
  source 1..20: mol_type = other DNA
gccctgggctgcagctctcc

SEQ ID NO: 62258 - DNA, 20 bp, synthetic construct
  misc_feature 1..20: note = Description of Artificial Sequence: Synthetic oligonucleotide
  misc_feature 1..20: note = Target: SCN10A; (+) strand; PAM type: YTN; PAM sequence: CTG
  source 1..20: mol_type = other DNA
ggctgcagctctccttctag

SEQ ID NO: 62259 - DNA, 20 bp, synthetic construct
  misc_feature 1..20: note = Description of Artificial Sequence: Synthetic oligonucleotide
  misc_feature 1..20: note = Target: SCN10A; (+) strand; PAM type: YTN; PAM sequence: CTG
  source 1..20: mol_type = other DNA
cagctctccttctagtgaca

SEQ ID NO: 62260 - DNA, 20 bp, synthetic construct
  misc_feature 1..20: note = Description of Artificial Sequence: Synthetic oligonucleotide
  misc_feature 1..20: note = Target: SCN10A; (+) strand; PAM type: YTN; PAM sequence: CTC
  source 1..20: mol_type = other DNA
tccttctagtgacaaggttg

SEQ ID NO: 62261 - DNA, 20 bp, synthetic construct
  misc_feature 1..20: note = Description of Artificial Sequence: Synthetic oligonucleotide
  misc_feature 1..20: note = Target: SCN10A; (+) strand; PAM type: YTN; PAM sequence: CTC
  source 1..20: mol_type = other DNA
cttctagtgacaaggttggg

SEQ ID NO: 62262 - DNA, 20 bp, synthetic construct
  misc_feature 1..20: note = Description of Artificial Sequence: Synthetic oligonucleotide
  misc_feature 1..20: note = Target: SCN10A; (+) strand; PAM type: YTN; PAM sequence: CTT
  source 1..20: mol_type = other DNA
ctagtgacaaggttggggac

SEQ ID NO: 62263 - DNA, 20 bp, synthetic construct
  misc_feature 1..20: note = Description of Artificial Sequence: Synthetic oligonucleotide
  misc_feature 1..20: note = Target: SCN10A; (+) strand; PAM type: YTN; PAM sequence: TTC
  source 1..20: mol_type = other DNA
tagtgacaaggttggggact

SEQ ID NO: 62264 - DNA, 20 bp, synthetic construct
  misc_feature 1..20: note = Description of Artificial Sequence: Synthetic oligonucleotide
  misc_feature 1..20: note = Target: SCN10A; (+) strand; PAM type: YTN; PAM sequence: CTA
  source 1..20: mol_type = other DNA
gtgacaaggttggggacttt

SEQ ID NO: 62265 - DNA, 20 bp, synthetic construct
  misc_feature 1..20: note = Description of Artificial Sequence: Synthetic oligonucleotide
  misc_feature 1..20: note = Target: SCN10A; (+) strand; PAM type: YTN; PAM sequence: TTG
  source 1..20: mol_type = other DNA
gggactttcagctcagtagt

SEQ ID NO: 62266 - DNA, 20 bp, synthetic construct
  misc_feature 1..20: note = Description of Artificial Sequence: Synthetic oligonucleotide
  misc_feature 1..20: note = Target: SCN10A; (+) strand; PAM type: YTN; PAM sequence: CTT
  source 1..20: mol_type = other DNA
tcagctcagtagtcaggaga

SEQ ID NO: 62267 - DNA, 20 bp, synthetic construct
  misc_feature 1..20: note = Description of Artificial Sequence: Synthetic oligonucleotide
  misc_feature 1..20: note = Target: SCN10A; (+) strand; PAM type: YTN; PAM sequence: TTT
  source 1..20: mol_type = other DNA
cagctcagtagtcaggagaa

SEQ ID NO: 62268 - DNA, 20 bp, synthetic construct
  misc_feature 1..20: note = Description of Artificial Sequence: Synthetic oligonucleotide
  misc_feature 1..20: note = Target: SCN10A; (+) strand; PAM type: YTN; PAM sequence: TTC
  source 1..20: mol_type = other DNA
agctcagtagtcaggagaac

SEQ ID NO: 62269 - DNA, 20 bp, synthetic construct
  misc_feature 1..20: note = Description of Artificial Sequence: Synthetic oligonucleotide
  misc_feature 1..20: note = Target: SCN10A; (+) strand; PAM type: YTN; PAM sequence: CTC
  source 1..20: mol_type = other DNA
agtagtcaggagaacccact

SEQ ID NO: 62270 - DNA, 20 bp, synthetic construct
  misc_feature 1..20: note = Description of Artificial Sequence: Synthetic oligonucleotide
  misc_feature 1..20: note = Target: SCN10A; (+) strand; PAM type: YTN; PAM sequence: CTG
  source 1..20: mol_type = other DNA
atgcagctccagggcctttg

SEQ ID NO: 62271 - DNA, 20 bp, synthetic construct
  misc_feature 1..20: note = Description of Artificial Sequence: Synthetic oligonucleotide
  misc_feature 1..20: note = Target: SCN10A; (+) strand; PAM type: YTN; PAM sequence: CTC
  source 1..20: mol_type = other DNA
cagggcctttggattgtagg

SEQ ID NO: 62272 - DNA, 20 bp, synthetic construct
  misc_feature 1..20: note = Description of Artificial Sequence: Synthetic oligonucleotide
  misc_feature 1..20: note = Target: SCN10A; (+) strand; PAM type: YTN; PAM sequence: CTT
  source 1..20: mol_type = other DNA
tggattgtaggagattccta

SEQ ID NO: 62273 - DNA, 20 bp, synthetic construct
  misc_feature 1..20: note = Description of Artificial Sequence: Synthetic oligonucleotide
  misc_feature 1..20: note = Target: SCN10A; (+) strand; PAM type: YTN; PAM sequence: TTT
  source 1..20: mol_type = other DNA
ggattgtaggagattcctat

SEQ ID NO: 62274 - DNA, 20 bp, synthetic construct
  misc_feature 1..20: note = Description of Artificial Sequence: Synthetic oligonucleotide
  misc_feature 1..20: note = Target: SCN10A; (+) strand; PAM type: YTN; PAM sequence: TTG
  source 1..20: mol_type = other DNA
gattgtaggagattcctatc

SEQ ID NO: 62275 - DNA, 20 bp, synthetic construct
  misc_feature 1..20: note = Description of Artificial Sequence: Synthetic oligonucleotide
  misc_feature 1..20: note = Target: SCN10A; (+) strand; PAM type: YTN; PAM sequence: TTG
  source 1..20: mol_type = other DNA
taggagattcctatctggag

SEQ ID NO: 62276 - DNA, 20 bp, synthetic construct
  misc_feature 1..20: note = Description of Artificial Sequence: Synthetic oligonucleotide
  misc_feature 1..20: note = Target: SCN10A; (+) strand; PAM type: YTN; PAM sequence: TTC
  source 1..20: mol_type = other DNA
ctatctggaggatttggggg

SEQ ID NO: 62277 - DNA, 20 bp, synthetic construct
  misc_feature 1..20: note = Description of Artificial Sequence: Synthetic oligonucleotide
  misc_feature 1..20: note = Target: SCN10A; (+) strand; PAM type: YTN; PAM sequence: CTA
  source 1..20: mol_type = other DNA
tctggaggatttgggggcag

SEQ ID NO: 62278 - DNA, 20 bp, synthetic construct
  misc_feature 1..20: note = Description of Artificial Sequence: Synthetic oligonucleotide
  misc_feature 1..20: note = Target: SCN10A; (+) strand; PAM type: YTN; PAM sequence: CTG
  source 1..20: mol_type = other DNA
gaggatttgggggcagggac

SEQ ID NO: 62279 - DNA, 20 bp, synthetic construct
  misc_feature 1..20: note = Description of Artificial Sequence: Synthetic oligonucleotide
  misc_feature 1..20: note = Target: SCN10A; (+) strand; PAM type: YTN; PAM sequence: TTT
  source 1..20: mol_type = other DNA
gggggcagggactatgcctc

SEQ ID NO: 62280 - DNA, 20 bp, synthetic construct
  misc_feature 1..20: note = Description of Artificial Sequence: Synthetic oligonucleotide
  misc_feature 1..20: note = Target: SCN10A; (+) strand; PAM type: YTN; PAM sequence: TTG
  source 1..20: mol_type = other DNA
ggggcagggactatgcctcc

SEQ ID NO: 62281 - DNA, 20 bp, synthetic construct
  misc_feature 1..20: note = Description of Artificial Sequence: Synthetic oligonucleotide
  misc_feature 1..20: note = Target: SCN10A; (+) strand; PAM type: YTN; PAM sequence: CTA
  source 1..20: mol_type = other DNA
tgcctccccttaccagagat

SEQ ID NO: 62282 - DNA, 20 bp, synthetic construct
  misc_feature 1..20: note = Description of Artificial Sequence: Synthetic oligonucleotide
  misc_feature 1..20: note = Target: SCN10A; (+) strand; PAM type: YTN; PAM sequence: CTC
  source 1..20: mol_type = other DNA
cccttaccagagatccactg

SEQ ID NO: 62283 - DNA, 20 bp, synthetic construct
  misc_feature 1..20: note = Description of Artificial Sequence: Synthetic oligonucleotide
  misc_feature 1..20: note = Target: SCN10A; (+) strand; PAM type: YTN; PAM sequence: CTT
  source 1..20: mol_type = other DNA
accagagatccactgctgag

SEQ ID NO: 62284 - DNA, 20 bp, synthetic construct
  misc_feature 1..20: note = Description of Artificial Sequence: Synthetic oligonucleotide
  misc_feature 1..20: note = Target: SCN10A; (+) strand; PAM type: YTN; PAM sequence: TTA
  source 1..20: mol_type = other DNA
ccagagatccactgctgagc

SEQ ID NO: 62285 - DNA, 20 bp, synthetic construct
  misc_feature 1..20: note = Description of Artificial Sequence: Synthetic oligonucleotide
  misc_feature 1..20: note = Target: SCN10A; (+) strand; PAM type: YTN; PAM sequence: CTG
  source 1..20: mol_type = other DNA
ctgagcaggatcatgaagat

SEQ ID NO: 62286 - DNA, 20 bp, synthetic construct
  misc_feature 1..20: note = Description of Artificial Sequence: Synthetic oligonucleotide
  misc_feature 1..20: note = Target: SCN10A; (+) strand; PAM type: YTN; PAM sequence: CTG
  source 1..20: mol_type = other DNA
agcaggatcatgaagatgat

SEQ ID NO: 62287 - DNA, 20 bp, synthetic construct
  misc_feature 1..20: note = Description of Artificial Sequence: Synthetic oligonucleotide
  misc_feature 1..20: note = Target: SCN10A; (+) strand; PAM type: YTN; PAM sequence: CTC
  source 1..20: mol_type = other DNA
tcaaaccagctgtgctccac

SEQ ID NO: 62288 - DNA, 20 bp, synthetic construct
  misc_feature 1..20: note = Description of Artificial Sequence: Synthetic oligonucleotide
  misc_feature 1..20: note = Target: SCN10A; (+) strand; PAM type: YTN; PAM sequence: CTC
  source 1..20: mol_type = other DNA
aaaccagctgtgctccacga

SEQ ID NO: 62289 - DNA, 20 bp, synthetic construct
  misc_feature 1..20: note = Description of Artificial Sequence: Synthetic oligonucleotide
  misc_feature 1..20: note = Target: SCN10A; (+) strand; PAM type: YTN; PAM sequence: CTG
  source 1..20: mol_type = other DNA
tgctccacgatacggtagca

SEQ ID NO: 62290 - DNA, 20 bp, synthetic construct
  misc_feature 1..20: note = Description of Artificial Sequence: Synthetic oligonucleotide
  misc_feature 1..20: note = Target: SCN10A; (+) strand; PAM type: YTN; PAM sequence: CTC
  source 1..20: mol_type = other DNA
cacgatacggtagcaagtct

SEQ ID NO: 62291 - DNA, 20 bp, synthetic construct
  misc_feature 1..20: note = Description of Artificial Sequence: Synthetic oligonucleotide
  misc_feature 1..20: note = Target: SCN10A; (+) strand; PAM type: YTN; PAM sequence: CTT
  source 1..20: mol_type = other DNA
gcgcacctgccagcccacat

SEQ ID NO: 62292 - DNA, 20 bp, synthetic construct
  misc_feature 1..20: note = Description of Artificial Sequence: Synthetic oligonucleotide
  misc_feature 1..20: note = Target: SCN10A; (+) strand; PAM type: YTN; PAM sequence: TTG
  source 1..20: mol_type = other DNA
cgcacctgccagcccacatc

SEQ ID NO: 62293 - DNA, 20 bp, synthetic construct
  misc_feature 1..20: note = Description of Artificial Sequence: Synthetic oligonucleotide
  misc_feature 1..20: note = Target: SCN10A; (+) strand; PAM type: YTN; PAM sequence: CTG
  source 1..20: mol_type = other DNA
ccagcccacatcccatggac

SEQ ID NO: 62294 - DNA, 20 bp, synthetic construct
  misc_feature 1..20: note = Description of Artificial Sequence: Synthetic oligonucleotide
  misc_feature 1..20: note = Target: SCN10A; (+) strand; PAM type: YTN; PAM sequence: CTC
  source 1..20: mol_type = other DNA
ttggtggtatccagtttgca

SEQ ID NO: 62295 - DNA, 20 bp, synthetic construct
  misc_feature 1..20: note = Description of Artificial Sequence: Synthetic oligonucleotide
  misc_feature 1..20: note = Target: SCN10A; (+) strand; PAM type: YTN; PAM sequence: CTT
  source 1..20: mol_type = other DNA
ggtggtatccagtttgcagc

SEQ ID NO: 62296 - DNA, 20 bp, synthetic construct
  misc_feature 1..20: note = Description of Artificial Sequence: Synthetic oligonucleotide
  misc_feature 1..20: note = Target: SCN10A; (+) strand; PAM type: YTN; PAM sequence: TTG
  source 1..20: mol_type = other DNA
gtggtatccagtttgcagca

SEQ ID NO: 62297 - DNA, 20 bp, synthetic construct
  misc_feature 1..20: note = Description of Artificial Sequence: Synthetic oligonucleotide
  misc_feature 1..20: note = Target: SCN10A; (+) strand; PAM type: YTN; PAM sequence: TTT
  source 1..20: mol_type = other DNA
gcagcagggacagtggcgaa

SEQ ID NO: 62298 - DNA, 20 bp, synthetic construct
  misc_feature 1..20: note = Description of Artificial Sequence: Synthetic oligonucleotide
  misc_feature 1..20: note = Target: SCN10A; (+) strand; PAM type: YTN; PAM sequence: TTG
  source 1..20: mol_type = other DNA
cagcagggacagtggcgaat

SEQ ID NO: 62299 - DNA, 20 bp, synthetic construct
  misc_feature 1..20: note = Description of Artificial Sequence: Synthetic oligonucleotide
  misc_feature 1..20: note = Target: SCN10A; (+) strand; PAM type: YTN; PAM sequence: CTG
  source 1..20: mol_type = other DNA
tggggagaggtgactgatgg

SEQ ID NO: 62300 - DNA, 20 bp, synthetic construct
  misc_feature 1..20: note = Description of Artificial Sequence: Synthetic oligonucleotide
  misc_feature 1..20: note = Target: SCN10A; (+) strand; PAM type: YTN; PAM sequence: CTG
  source 1..20: mol_type = other DNA
atggtgggtgatggccagtg

SEQ ID NO: 62301 - DNA, 20 bp, synthetic construct
  misc_feature 1..20: note = Description of Artificial Sequence: Synthetic oligonucleotide
  misc_feature 1..20: note = Target: SCN10A; (+) strand; PAM type: YTN; PAM sequence: TTT
  source 1..20: mol_type = other DNA
ctgctcctgctgcagagaaa

SEQ ID NO: 62302 - DNA, 20 bp, synthetic construct
  misc_feature 1..20: note = Description of Artificial Sequence: Synthetic oligonucleotide
  misc_feature 1..20: note = Target: SCN10A; (+) strand; PAM type: YTN; PAM sequence: TTC
  source 1..20: mol_type = other DNA
tgctcctgctgcagagaaac

SEQ ID NO: 62303 - DNA, 20 bp, synthetic construct
  misc_feature 1..20: note = Description of Artificial Sequence: Synthetic oligonucleotide
  misc_feature 1..20: note = Target: SCN10A; (+) strand; PAM type: YTN; PAM sequence: CTG
  source 1..20: mol_type = other DNA
ctcctgctgcagagaaacca

SEQ ID NO: 62304 - DNA, 20 bp, synthetic construct
  misc_feature 1..20: note = Description of Artificial Sequence: Synthetic oligonucleotide
  misc_feature 1..20: note = Target: SCN10A; (+) strand; PAM type: YTN; PAM sequence: CTC
  source 1..20: mol_type = other DNA
ctgctgcagagaaaccattc

SEQ ID NO: 62305 - DNA, 20 bp, synthetic construct
  misc_feature 1..20: note = Description of Artificial Sequence: Synthetic oligonucleotide
  misc_feature 1..20: note = Target: SCN10A; (+) strand; PAM type: YTN; PAM sequence: CTG
  source 1..20: mol_type = other DNA
ctgcagagaaaccattctgc

SEQ ID NO: 62306 - DNA, 20 bp, synthetic construct
  misc_feature 1..20: note = Description of Artificial Sequence: Synthetic oligonucleotide
  misc_feature 1..20: note = Target: SCN10A; (+) strand; PAM type: YTN; PAM sequence: CTG
  source 1..20: mol_type = other DNA
cagagaaaccattctgctag

SEQ ID NO: 62307 - DNA, 20 bp, synthetic construct
  misc_feature 1..20: note = Description of Artificial Sequence: Synthetic oligonucleotide
  misc_feature 1..20: note = Target: SCN10A; (+) strand; PAM type: YTN; PAM sequence: TTC
  source 1..20: mol_type = other DNA
tgctaggaaacccacttgtc

SEQ ID NO: 62308 - DNA, 20 bp, synthetic construct
  misc_feature 1..20: note = Description of Artificial Sequence: Synthetic oligonucleotide
  misc_feature 1..20: note = Target: SCN10A; (+) strand; PAM type: YTN; PAM sequence: CTG
  source 1..20: mol_type = other DNA
ctaggaaacccacttgtcat

SEQ ID NO: 62309 - DNA, 20 bp, synthetic construct
  misc_feature 1..20: note = Description of Artificial Sequence: Synthetic oligonucleotide
  misc_feature 1..20: note = Target: SCN10A; (+) strand; PAM type: YTN; PAM sequence: CTA
  source 1..20: mol_type = other DNA
ggaaacccacttgtcatgcc

SEQ ID NO: 62310 - DNA, 20 bp, synthetic construct
  misc_feature 1..20: note = Description of Artificial Sequence: Synthetic oligonucleotide
  misc_feature 1..20: note = Target: SCN10A; (+) strand; PAM type: YTN; PAM sequence: CTT
  source 1..20: mol_type = other DNA
gtcatgcccttggaaaaaaa

SEQ ID NO: 62311 - DNA, 20 bp, synthetic construct
  misc_feature 1..20: note = Description of Artificial Sequence: Synthetic oligonucleotide
  misc_feature 1..20: note = Target: SCN10A; (+) strand; PAM type: YTN; PAM sequence: TTG
  source 1..20: mol_type = other DNA
tcatgcccttggaaaaaaat

SEQ ID NO: 62312 - DNA, 20 bp, synthetic construct
  misc_feature 1..20: note = Description of Artificial Sequence: Synthetic oligonucleotide
  misc_feature 1..20: note = Target: SCN10A; (+) strand; PAM type: YTN; PAM sequence: CTT
  source 1..20: mol_type = other DNA
ggaaaaaaattctttcctgg

SEQ ID NO: 62313 - DNA, 20 bp, synthetic construct
  misc_feature 1..20: note = Description of Artificial Sequence: Synthetic oligonucleotide
  misc_feature 1..20: note = Target: SCN10A; (+) strand; PAM type: YTN; PAM sequence: TTG
  source 1..20: mol_type = other DNA
gaaaaaaattctttcctgga

SEQ ID NO: 62314 - DNA, 20 bp, synthetic construct
  misc_feature 1..20: note = Description of Artificial Sequence: Synthetic oligonucleotide
  misc_feature 1..20: note = Target: SCN10A; (+) strand; PAM type: YTN; PAM sequence: TTC
  source 1..20: mol_type = other DNA
tttcctggaatatgggtgaa

SEQ ID NO: 62315 - DNA, 20 bp, synthetic construct
  misc_feature 1..20: note = Description of Artificial Sequence: Synthetic oligonucleotide
  misc_feature 1..20: note = Target: SCN10A; (+) strand; PAM type: YTN; PAM sequence: CTT
  source 1..20: mol_type = other DNA
tcctggaatatgggtgaaga

SEQ ID NO: 62316 - DNA, 20 bp, synthetic construct
  misc_feature 1..20: note = Description of Artificial Sequence: Synthetic oligonucleotide
  misc_feature 1..20: note = Target: SCN10A; (+) strand; PAM type: YTN; PAM sequence: TTT
  source 1..20: mol_type = other DNA
cctggaatatgggtgaagag

SEQ ID NO: 62317 - DNA, 20 bp, synthetic construct
  misc_feature 1..20: note = Description of Artificial Sequence: Synthetic oligonucleotide
  misc_feature 1..20: note = Target: SCN10A; (+) strand; PAM type: YTN; PAM sequence: TTC
  source 1..20: mol_type = other DNA
ctggaatatgggtgaagagg

SEQ ID NO: 62318 - DNA, 20 bp, synthetic construct
  misc_feature 1..20: note = Description of Artificial Sequence: Synthetic oligonucleotide
  misc_feature 1..20: note = Target: SCN10A; (+) strand; PAM type: YTN; PAM sequence: CTG
  source 1..20: mol_type = other DNA
gaatatgggtgaagaggggt

SEQ ID NO: 62319 - DNA, 20 bp, synthetic construct
  misc_feature 1..20: note = Description of Artificial Sequence: Synthetic oligonucleotide
  misc_feature 1..20: note = Target: SCN10A; (+) strand; PAM type: YTN; PAM sequence: CTT
  source 1..20: mol_type = other DNA
ccagggagtccctcaatcca

SEQ ID NO: 62320 - DNA, 20 bp, synthetic construct
  misc_feature 1..20: note = Description of Artificial Sequence: Synthetic oligonucleotide
  misc_feature 1..20: note = Target: SCN10A; (+) strand; PAM type: YTN; PAM sequence: TTC
  source 1..20: mol_type = other DNA
cagggagtccctcaatccag

SEQ ID NO: 62321 - DNA, 20 bp, synthetic construct
  misc_feature 1..20: note = Description of Artificial Sequence: Synthetic oligonucleotide
  misc_feature 1..20: note = Target: SCN10A; (+) strand; PAM type: YTN; PAM sequence: CTC
  source 1..20: mol_type = other DNA
aatccagaccaacaggtgtt

SEQ ID NO: 62322 - DNA, 20 bp, synthetic construct
  misc_feature 1..20: note = Description of Artificial Sequence: Synthetic oligonucleotide
  misc_feature 1..20: note = Target: SCN10A; (+) strand; PAM type: YTN; PAM sequence: TTC
  source 1..20: mol_type = other DNA
ctctccatcatcagtcttgc

SEQ ID NO: 62323 - DNA, 20 bp, synthetic construct
  misc_feature 1..20: note = Description of Artificial Sequence: Synthetic oligonucleotide
  misc_feature 1..20: note = Target: SCN10A; (+) strand; PAM type: YTN; PAM sequence: CTC
  source 1..20: mol_type = other DNA
tccatcatcagtcttgccca

SEQ ID NO: 62324 - DNA, 20 bp, synthetic construct
  misc_feature 1..20: note = Description of Artificial Sequence: Synthetic oligonucleotide
  misc_feature 1..20: note = Target: SCN10A; (+) strand; PAM type: YTN; PAM sequence: CTC
  source 1..20: mol_type = other DNA
catcatcagtcttgcccact

SEQ ID NO: 62325 - DNA, 20 bp, synthetic construct
  misc_feature 1..20: note = Description of Artificial Sequence: Synthetic oligonucleotide
  misc_feature 1..20: note = Target: SCN10A; (+) strand; PAM type: YTN; PAM sequence: CTT
  source 1..20: mol_type = other DNA
gcccactctgatgtttttcc

SEQ ID NO: 62326 - DNA, 20 bp, synthetic construct
  misc_feature 1..20: note = Description of Artificial Sequence: Synthetic oligonucleotide
  misc_feature 1..20: note = Target: SCN10A; (+) strand; PAM type: YTN; PAM sequence: TTG
  source 1..20: mol_type = other DNA
cccactctgatgtttttcct

SEQ ID NO: 62327 - DNA, 20 bp, synthetic construct
  misc_feature 1..20: note = Description of Artificial Sequence: Synthetic oligonucleotide
  misc_feature 1..20: note = Target: SCN10A; (+) strand; PAM type: YTN; PAM sequence: CTC
  source 1..20: mol_type = other DNA
tgatgtttttcctagccata

SEQ ID NO: 62328 - DNA, 20 bp, synthetic construct
  misc_feature 1..20: note = Description of Artificial Sequence: Synthetic oligonucleotide
  misc_feature 1..20: note = Target: SCN10A; (+) strand; PAM type: YTN; PAM sequence: CTG
  source 1..20: mol_type = other DNA
atgtttttcctagccatatc

SEQ ID NO: 62329 - DNA, 20 bp, synthetic construct
  misc_feature 1..20: note = Description of Artificial Sequence: Synthetic oligonucleotide
  misc_feature 1..20: note = Target: SCN10A; (+) strand; PAM type: YTN; PAM sequence: TTT
  source 1..20: mol_type = other DNA
ttcctagccatatccttctt

SEQ ID NO: 62330 - DNA, 20 bp, synthetic construct
  misc_feature 1..20: note = Description of Artificial Sequence: Synthetic oligonucleotide
  misc_feature 1..20: note = Target: SCN10A; (+) strand; PAM type: YTN; PAM sequence: TTT
  source 1..20: mol_type = other DNA
tcctagccatatccttctta

SEQ ID NO: 62331 - DNA, 20 bp, synthetic construct
  misc_feature 1..20: note = Description of Artificial Sequence: Synthetic oligonucleotide
  misc_feature 1..20: note = Target: SCN10A; (+) strand; PAM type: YTN; PAM sequence: TTT
  source 1..20: mol_type = other DNA
cctagccatatccttcttac

SEQ ID NO: 62332 - DNA, 20 bp, synthetic construct
  misc_feature 1..20: note = Description of Artificial Sequence: Synthetic oligonucleotide
  misc_feature 1..20: note = Target: SCN10A; (+) strand; PAM type: YTN; PAM sequence: TTC
  source 1..20: mol_type = other DNA
ctagccatatccttcttaca

SEQ ID NO: 62333 - DNA, 20 bp, synthetic construct
  misc_feature 1..20: note = Description of Artificial Sequence: Synthetic oligonucleotide
  misc_feature 1..20: note = Target: SCN10A; (+) strand; PAM type: YTN; PAM sequence: CTA
  source 1..20: mol_type = other DNA
gccatatccttcttacagat

SEQ ID NO: 62334 - DNA, 20 bp, synthetic construct
  misc_feature 1..20: note = Description of Artificial Sequence: Synthetic oligonucleotide
  misc_feature 1..20: note = Target: SCN10A; (+) strand; PAM type: YTN; PAM sequence: CTT
  source 1..20: mol_type = other DNA
cttacagatgacaccagtgg

SEQ ID NO: 62335 - DNA, 20 bp, synthetic construct
  misc_feature 1..20: note = Description of Artificial Sequence: Synthetic oligonucleotide
  misc_feature 1..20: note = Target: SCN10A; (+) strand; PAM type: YTN; PAM sequence: TTC
  source 1..20: mol_type = other DNA
ttacagatgacaccagtggt

SEQ ID NO: 62336 - DNA, 20 bp, synthetic construct
  misc_feature 1..20: note = Description of Artificial Sequence: Synthetic oligonucleotide
  misc_feature 1..20: note = Target: SCN10A; (+) strand; PAM type: YTN; PAM sequence: CTT
  source 1..20: mol_type = other DNA
acagatgacaccagtggtcc

SEQ ID NO: 62337 - DNA, 20 bp, synthetic construct
  misc_feature 1..20: note = Description of Artificial Sequence: Synthetic oligonucleotide
  misc_feature 1..20: note = Target: SCN10A; (+) strand; PAM type: YTN; PAM sequence: TTA
  source 1..20: mol_type = other DNA
cagatgacaccagtggtccc

SEQ ID NO: 62338 - DNA, 20 bp, synthetic construct
  misc_feature 1..20: note = Description of Artificial Sequence: Synthetic oligonucleotide
  misc_feature 1..20: note = Target: SCN10A; (+) strand; PAM type: YTN; PAM sequence: CTG
  source 1..20: mol_type = other DNA
tccttctgcccacctatacc

SEQ ID NO: 62339 - DNA, 20 bp, synthetic construct
  misc_feature 1..20: note = Description of Artificial Sequence: Synthetic oligonucleotide
  misc_feature 1..20: note = Target: SCN10A; (+) strand; PAM type: YTN; PAM sequence: CTT
  source 1..20: mol_type = other DNA
ctgcccacctatacctggaa

SEQ ID NO: 62340 - DNA, 20 bp, synthetic construct
  misc_feature 1..20: note = Description of Artificial Sequence: Synthetic oligonucleotide
  misc_feature 1..20: note = Target: SCN10A; (+) strand; PAM type: YTN; PAM sequence: TTC
  source 1..20: mol_type = other DNA
tgcccacctatacctggaaa

SEQ ID NO: 62341 - DNA, 20 bp, synthetic construct
  misc_feature 1..20: note = Description of Artificial Sequence: Synthetic oligonucleotide
  misc_feature 1..20: note = Target: SCN10A; (+) strand; PAM type: YTN; PAM sequence: CTG
  source 1..20: mol_type = other DNA
cccacctatacctggaaaac

SEQ ID NO: 62342 - DNA, 20 bp, synthetic construct
  misc_feature 1..20: note = Description of Artificial Sequence: Synthetic oligonucleotide
  misc_feature 1..20: note = Target: SCN10A; (+) strand; PAM type: YTN; PAM sequence: CTA
  source 1..20: mol_type = other DNA
tacctggaaaacagacaagc

SEQ ID NO: 62343 - DNA, 20 bp, synthetic construct
  misc_feature 1..20: note = Description of Artificial Sequence: Synthetic oligonucleotide
  misc_feature 1..20: note = Target: SCN10A; (+) strand; PAM type: YTN; PAM sequence: CTG
  source 1..20: mol_type = other DNA
gaaaacagacaagctacggc

SEQ ID NO: 62344 - DNA, 20 bp, synthetic construct
  misc_feature 1..20: note = Description of Artificial Sequence: Synthetic oligonucleotide
  misc_feature 1..20: note = Target: SCN10A; (+) strand; PAM type: YTN; PAM sequence: CTA
  source 1..20: mol_type = other DNA
cggcgtatgagcctgggggt

SEQ ID NO: 62345 - DNA, 20 bp, synthetic construct
  misc_feature 1..20: note = Description of Artificial Sequence: Synthetic oligonucleotide
  misc_feature 1..20: note = Target: SCN10A; (+) strand; PAM type: YTN; PAM sequence: CTG
  source 1..20: mol_type = other DNA
ggggtgcctgagggggatat

SEQ ID NO: 62346 - DNA, 20 bp, synthetic construct
  misc_feature 1..20: note = Description of Artificial Sequence: Synthetic oligonucleotide
  misc_feature 1..20: note = Target: SCN10A; (+) strand; PAM type: YTN; PAM sequence: CTG
  source 1..20: mol_type = other DNA
agggggatatgctccaagcc

SEQ ID NO: 62347 - DNA, 20 bp, synthetic construct
  misc_feature 1..20: note = Description of Artificial Sequence: Synthetic oligonucleotide
  misc_feature 1..20: note = Target: SCN10A; (+) strand; PAM type: YTN; PAM sequence: CTC
  source 1..20: mol_type = other DNA
caagcccaagctgaactgag

SEQ ID NO: 62348 - DNA, 20 bp, synthetic construct
  misc_feature 1..20: note = Description of Artificial Sequence: Synthetic oligonucleotide
  misc_feature 1..20: note = Target: SCN10A; (+) strand; PAM type: YTN; PAM sequence: CTG
  source 1..20: mol_type = other DNA
aactgagggccacgacgtgg

SEQ ID NO: 62349 - DNA, 20 bp, synthetic construct
  misc_feature 1..20: note = Description of Artificial Sequence: Synthetic oligonucleotide
  misc_feature 1..20: note = Target: SCN10A; (+) strand; PAM type: YTN; PAM sequence: CTG
  source 1..20: mol_type = other DNA
agggccacgacgtggctggg

SEQ ID NO: 62350 - DNA, 20 bp, synthetic construct
  misc_feature 1..20: note = Description of Artificial Sequence: Synthetic oligonucleotide
  misc_feature 1..20: note = Target: SCN10A; (+) strand; PAM type: YTN; PAM sequence: CTG
  source 1..20: mol_type = other DNA
ggatggggattgggtccagc

SEQ ID NO: 62351 - DNA, 20 bp, synthetic construct
  misc_feature 1..20: note = Description of Artificial Sequence: Synthetic oligonucleotide
  misc_feature 1..20: note = Target: SCN10A; (+) strand; PAM type: YTN; PAM sequence: TTG
  source 1..20: mol_type = other DNA
ggtccagcccagctcagccc

SEQ ID NO: 62352 - DNA, 20 bp, synthetic construct
  misc_feature 1..20: note = Description of Artificial Sequence: Synthetic oligonucleotide
  misc_feature 1..20: note = Target: SCN10A; (+) strand; PAM type: YTN; PAM sequence: CTC
  source 1..20: mol_type = other DNA
agcccagcccagggtcaaat

SEQ ID NO: 62353 - DNA, 20 bp, synthetic construct
  misc_feature 1..20: note = Description of Artificial Sequence: Synthetic oligonucleotide
  misc_feature 1..20: note = Target: SCN10A; (+) strand; PAM type: YTN; PAM sequence: CTA
  source 1..20: mol_type = other DNA
ttaataaaaactcaagtatt

SEQ ID NO: 62354 - DNA, 20 bp, synthetic construct
  misc_feature 1..20: note = Description of Artificial Sequence: Synthetic oligonucleotide
  misc_feature 1..20: note = Target: SCN10A; (+) strand; PAM type: YTN; PAM sequence: TTA
  source 1..20: mol_type = other DNA
ataaaaactcaagtatttaa

SEQ ID NO: 62355 - DNA, 20 bp, synthetic construct
  misc_feature 1..20: note = Description of Artificial Sequence: Synthetic oligonucleotide
  misc_feature 1..20: note = Target: SCN10A; (+) strand; PAM type: YTN; PAM sequence: CTC
  source 1..20: mol_type = other DNA
aagtatttaaaaaatttttc

SEQ ID NO: 62356 - DNA, 20 bp, synthetic construct
  misc_feature 1..20: note = Description of Artificial Sequence: Synthetic oligonucleotide
  misc_feature 1..20: note = Target: SCN10A; (+) strand; PAM type: YTN; PAM sequence: TTT
  source 1..20: mol_type = other DNA
aaaaaatttttctttgtatt

SEQ ID NO: 62357 - DNA, 20 bp, synthetic construct
  misc_feature 1..20: note = Description of Artificial Sequence: Synthetic oligonucleotide
  misc_feature 1..20: note = Target: SCN10A; (+) strand; PAM type: YTN; PAM sequence: TTA
  source 1..20: mol_type = other DNA
aaaaatttttctttgtattt

SEQ ID NO: 62358 - DNA, 20 bp, synthetic construct
  misc_feature 1..20: note = Description of Artificial Sequence: Synthetic oligonucleotide
  misc_feature 1..20: note = Target: SCN10A; (+) strand; PAM type: YTN; PAM sequence: TTT
  source 1..20: mol_type = other DNA
ttctttgtatttttagaaag

SEQ ID NO: 62359 - DNA, 20 bp, synthetic construct
  misc_feature 1..20: note = Description of Artificial Sequence: Synthetic oligonucleotide
  misc_feature 1..20: note = Target: SCN10A; (+) strand; PAM type: YTN; PAM sequence: TTT
  source 1..20: mol_type = other DNA
tctttgtatttttagaaagc

SEQ ID NO: 62360 - DNA, 20 bp, synthetic construct
  misc_feature 1..20: note = Description of Artificial Sequence: Synthetic oligonucleotide
  misc_feature 1..20: note = Target: SCN10A; (+) strand; PAM type: YTN; PAM sequence: TTT
  source 1..20: mol_type = other DNA
ctttgtatttttagaaagca

SEQ ID NO: 62361 - DNA, 20 bp, synthetic construct
  misc_feature 1..20: note = Description of Artificial Sequence: Synthetic oligonucleotide
  misc_feature 1..20: note = Target: SCN10A; (+) strand; PAM type: YTN; PAM sequence: TTC
  source 1..20: mol_type = other DNA
tttgtatttttagaaagcat

SEQ ID NO: 62362 - DNA, 20 bp, synthetic construct
  misc_feature 1..20: note = Description of Artificial Sequence: Synthetic oligonucleotide
  misc_feature 1..20: note = Target: SCN10A; (+) strand; PAM type: YTN; PAM sequence: CTT
  source 1..20: mol_type = other DNA
tgtatttttagaaagcattg

SEQ ID NO: 62363 - DNA, 20 bp, synthetic construct
  misc_feature 1..20: note = Description of Artificial Sequence: Synthetic oligonucleotide
  misc_feature 1..20: note = Target: SCN10A; (+) strand; PAM type: YTN; PAM sequence: TTT
  source 1..20: mol_type = other DNA
gtatttttagaaagcattga

SEQ ID NO: 62364 - DNA, 20 bp, synthetic construct
  misc_feature 1..20: note = Description of Artificial Sequence: Synthetic oligonucleotide
  misc_feature 1..20: note = Target: SCN10A; (+) strand; PAM type: YTN; PAM sequence: TTG
  source 1..20: mol_type = other DNA
tatttttagaaagcattgag

SEQ ID NO: 62365 - DNA, 20 bp, synthetic construct
  misc_feature 1..20: note = Description of Artificial Sequence: Synthetic oligonucleotide
  misc_feature 1..20: note = Target: SCN10A; (+) strand; PAM type: YTN; PAM sequence: TTT
  source 1..20: mol_type = other DNA
ttagaaagcattgaggccac

SEQ ID NO: 62366 - DNA, 20 bp, synthetic construct
  misc_feature 1..20: note = Description of Artificial Sequence: Synthetic oligonucleotide
  misc_feature 1..20: note = Target: SCN10A; (+) strand; PAM type: YTN; PAM sequence: TTT
  source 1..20: mol_type = other DNA
tagaaagcattgaggccaca

SEQ ID NO: 62367 - DNA, 20 bp, synthetic construct
  misc_feature 1..20: note = Description of Artificial Sequence: Synthetic oligonucleotide
  misc_feature 1..20: note = Target: SCN10A; (+) strand; PAM type: YTN; PAM sequence: TTT
  source 1..20: mol_type = other DNA
agaaagcattgaggccacaa

SEQ ID NO: 62368 - DNA, 20 bp, synthetic construct
  misc_feature 1..20: note = Description of Artificial Sequence: Synthetic oligonucleotide
  misc_feature 1..20: note = Target: SCN10A; (+) strand; PAM type: YTN; PAM sequence: TTA
  source 1..20: mol_type = other DNA
gaaagcattgaggccacaat

SEQ ID NO: 62369 - DNA, 20 bp, synthetic construct
  misc_feature 1..20: note = Description of Artificial Sequence: Synthetic oligonucleotide
  misc_feature 1..20: note = Target: SCN10A; (+) strand; PAM type: YTN; PAM sequence: TTG
  source 1..20: mol_type = other DNA
aggccacaattccctttata

SEQ ID NO: 62370 - DNA, 20 bp, synthetic construct
  misc_feature 1..20: note = Description of Artificial Sequence: Synthetic oligonucleotide
  misc_feature 1..20: note = Target: SCN10A; (+) strand; PAM type: YTN; PAM sequence: TTC
  source 1..20: mol_type = other DNA
cctttatagaatggactctt

SEQ ID NO: 62371 - DNA, 20 bp, synthetic construct
  misc_feature 1..20: note = Description of Artificial Sequence: Synthetic oligonucleotide
  misc_feature 1..20: note = Target: SCN10A; (+) strand; PAM type: YTN; PAM sequence: CTT
  source 1..20: mol_type = other DNA
tatagaatggactcttgatt

SEQ ID NO: 62372 - DNA, 20 bp, synthetic construct
  misc_feature 1..20: note = Description of Artificial Sequence: Synthetic oligonucleotide
  misc_feature 1..20: note = Target: SCN10A; (+) strand; PAM type: YTN; PAM sequence: TTT
  source 1..20: mol_type = other DNA
atagaatggactcttgattc

SEQ ID NO: 62373 - DNA, 20 bp, synthetic construct
  misc_feature 1..20: note = Description of Artificial Sequence: Synthetic oligonucleotide
  misc_feature 1..20: note = Target: SCN10A; (+) strand; PAM type: YTN; PAM sequence: TTA
  source 1..20: mol_type = other DNA
tagaatggactcttgattca

SEQ ID NO: 62374 - DNA, 20 bp, synthetic construct
  misc_feature 1..20: note = Description of Artificial Sequence: Synthetic oligonucleotide
  misc_feature 1..20: note = Target: SCN10A; (+) strand; PAM type: YTN; PAM sequence: CTC
  source 1..20: mol_type = other DNA
ttgattcattcattgcacaa

SEQ ID NO: 62375 - DNA, 20 bp, synthetic construct
  misc_feature 1..20: note = Description of Artificial Sequence: Synthetic oligonucleotide
  misc_feature 1..20: note = Target: SCN10A; (+) strand; PAM type: YTN; PAM sequence: CTT
  source 1..20: mol_type = other DNA
gattcattcattgcacaaat

SEQ ID NO: 62376 - DNA, 20 bp, synthetic construct
  misc_feature 1..20: note = Description of Artificial Sequence: Synthetic oligonucleotide
  misc_feature 1..20: note = Target: SCN10A; (+) strand; PAM type: YTN; PAM sequence: TTG
  source 1..20: mol_type = other DNA
attcattcattgcacaaata

SEQ ID NO: 62377 - DNA, 20 bp, synthetic construct
  misc_feature 1..20: note = Description of Artificial Sequence: Synthetic oligonucleotide
  misc_feature 1..20: note = Target: SCN10A; (+) strand; PAM type: YTN; PAM sequence: TTC
  source 1..20: mol_type = other DNA
attcattgcacaaatattta

SEQ ID NO: 62378 - DNA, 20 bp, synthetic construct
  misc_feature 1..20: note = Description of Artificial Sequence: Synthetic oligonucleotide
  misc_feature 1..20: note = Target: SCN10A; (+) strand; PAM type: YTN; PAM sequence: TTC
  source 1..20: mol_type = other DNA
attgcacaaatatttattga

SEQ ID NO: 62379 - DNA, 20 bp, synthetic construct
  misc_feature 1..20: note = Description of Artificial Sequence: Synthetic oligonucleotide
  misc_feature 1..20: note = Target: SCN10A; (+) strand; PAM type: YTN; PAM sequence: TTG
  source 1..20: mol_type = other DNA
cacaaatatttattgagaat

SEQ ID NO: 62380 - DNA, 20 bp, synthetic construct
  misc_feature 1..20: note = Description of Artificial Sequence: Synthetic oligonucleotide
  misc_feature 1..20: note = Target: SCN10A; (+) strand; PAM type: YTN; PAM sequence: TTT
  source 1..20: mol_type = other DNA
attgagaatgtaatgtgcct

SEQ ID NO: 62381 - DNA, 20 bp, synthetic construct
  misc_feature 1..20: note = Description of Artificial Sequence: Synthetic oligonucleotide
  misc_feature 1..20: note = Target: SCN10A; (+) strand; PAM type: YTN; PAM sequence: TTA
  source 1..20: mol_type = other DNA
ttgagaatgtaatgtgcctc

SEQ ID NO: 62382 - DNA, 20 bp, synthetic construct
  misc_feature 1..20: note = Description of Artificial Sequence: Synthetic oligonucleotide
  misc_feature 1..20: note = Target: SCN10A; (+) strand; PAM type: YTN; PAM sequence: TTG
  source 1..20: mol_type = other DNA
agaatgtaatgtgcctcact

SEQ ID NO: 62383 - DNA, 20 bp, synthetic construct
  misc_feature 1..20: note = Description of Artificial Sequence: Synthetic oligonucleotide
  misc_feature 1..20: note = Target: SCN10A; (+) strand; PAM type: YTN; PAM sequence: CTC
  source 1..20: mol_type = other DNA
actgttctaaacactgagag

SEQ ID NO: 62384 - DNA, 20 bp, synthetic construct
  misc_feature 1..20: note = Description of Artificial Sequence: Synthetic oligonucleotide
  misc_feature 1..20: note = Target: SCN10A; (+) strand; PAM type: YTN; PAM sequence: CTG
  source 1..20: mol_type = other DNA
ttctaaacactgagaggaaa

SEQ ID NO: 62385 - DNA, 20 bp, synthetic construct
  misc_feature 1..20: note = Description of Artificial Sequence: Synthetic oligonucleotide
  misc_feature 1..20: note = Target: SCN10A; (+) strand; PAM type: YTN; PAM sequence: TTC
  source 1..20: mol_type = other DNA
taaacactgagaggaaagat

SEQ ID NO: 62386 - DNA, 20 bp, synthetic construct
  misc_feature 1..20: note = Description of Artificial Sequence: Synthetic oligonucleotide
  misc_feature 1..20: note = Target: SCN10A; (+) strand; PAM type: YTN; PAM sequence: CTA
  source 1..20: mol_type = other DNA
aacactgagaggaaagatga

SEQ ID NO: 62387 - DNA, 20 bp, synthetic construct
  misc_feature 1..20: note = Description of Artificial Sequence: Synthetic oligonucleotide
  misc_feature 1..20: note = Target: SCN10A; (+) strand; PAM type: YTN; PAM sequence: CTG
  source 1..20: mol_type = other DNA
agaggaaagatgactaagac

SEQ ID NO: 62388 - DNA, 20 bp, synthetic construct
  misc_feature 1..20: note = Description of Artificial Sequence: Synthetic oligonucleotide
  misc_feature 1..20: note = Target: SCN10A; (+) strand; PAM type: YTN; PAM sequence: CTA
  source 1..20: mol_type = other DNA
agacacaggttctgcttttg

SEQ ID NO: 62389 - DNA, 20 bp, synthetic construct
  misc_feature 1..20: note = Description of Artificial Sequence: Synthetic oligonucleotide
  misc_feature 1..20: note = Target: SCN10A; (+) strand; PAM type: YTN; PAM sequence: TTC
  source 1..20: mol_type = other DNA
tgcttttgagagctaaacaa

SEQ ID NO: 62390 - DNA, 20 bp, synthetic construct
  misc_feature 1..20: note = Description of Artificial Sequence: Synthetic oligonucleotide
  misc_feature 1..20: note = Target: SCN10A; (+) strand; PAM type: YTN; PAM sequence: CTG
  source 1..20: mol_type = other DNA
cttttgagagctaaacaaaa

SEQ ID NO: 62391 - DNA, 20 bp, synthetic construct
  misc_feature 1..20: note = Description of Artificial Sequence: Synthetic oligonucleotide
  misc_feature 1..20: note = Target: SCN10A; (+) strand; PAM type: YTN; PAM sequence: CTT
  source 1..20: mol_type = other DNA
ttgagagctaaacaaaagat

SEQ ID NO: 62392 - DNA, 20 bp, synthetic construct
  misc_feature 1..20: note = Description of Artificial Sequence: Synthetic oligonucleotide
  misc_feature 1..20: note = Target: SCN10A; (+) strand; PAM type: YTN; PAM sequence: TTT
  source 1..20: mol_type = other DNA
tgagagctaaacaaaagatt

SEQ ID NO: 62393 - DNA, 20 bp, synthetic construct
  misc_feature 1..20: note = Description of Artificial Sequence: Synthetic oligonucleotide
  misc_feature 1..20: note = Target: SCN10A; (+) strand; PAM type: YTN; PAM sequence: TTT
  source 1..20: mol_type = other DNA
gagagctaaacaaaagattg

SEQ ID NO: 62394 - DNA, 20 bp, synthetic construct
  misc_feature 1..20: note = Description of Artificial Sequence: Synthetic oligonucleotide
  misc_feature 1..20: note = Target: SCN10A; (+) strand; PAM type: YTN; PAM sequence: TTG
  source 1..20: mol_type = other DNA
agagctaaacaaaagattga

SEQ ID NO: 62395 - DNA, 20 bp, synthetic construct
  misc_feature 1..20: note = Description of Artificial Sequence: Synthetic oligonucleotide
  misc_feature 1..20: note = Target: SCN10A; (+) strand; PAM type: YTN; PAM sequence: CTA
  source 1..20: mol_type = other DNA
aacaaaagattgagggaagc

SEQ ID NO: 62396 - DNA, 20 bp, synthetic construct
  misc_feature 1..20: note = Description of Artificial Sequence: Synthetic oligonucleotide
  misc_feature 1..20: note = Target: SCN10A; (+) strand; PAM type: YTN; PAM sequence: TTG
  source 1..20: mol_type = other DNA
agggaagcagatacatcatg

SEQ ID NO: 62397 - DNA, 20 bp, synthetic construct
  misc_feature 1..20: note = Description of Artificial Sequence: Synthetic oligonucleotide
  misc_feature 1..20: note = Target: SCN10A; (+) strand; PAM type: YTN; PAM sequence: CTT
  source 1..20: mol_type = other DNA
cctctgggtccttcatggtc

SEQ ID NO: 62398 - DNA, 20 bp, synthetic construct
  misc_feature 1..20: note = Description of Artificial Sequence: Synthetic oligonucleotide
  misc_feature 1..20: note = Target: SCN10A; (+) strand; PAM type: YTN; PAM sequence: TTC
  source 1..20: mol_type = other DNA
ctctgggtccttcatggtcc

SEQ ID NO: 62399 - DNA, 20 bp, synthetic construct
  misc_feature 1..20: note = Description of Artificial Sequence: Synthetic oligonucleotide
  misc_feature 1..20: note = Target: SCN10A; (+) strand; PAM type: YTN; PAM sequence: CTC
  source 1..20: mol_type = other DNA
tgggtccttcatggtccaaa

SEQ ID NO: 62400 - DNA, 20 bp, synthetic construct
  misc_feature 1..20: note = Description of Artificial Sequence: Synthetic oligonucleotide
  misc_feature 1..20: note = Target: SCN10A; (+) strand; PAM type: YTN; PAM sequence: CTG
  source 1..20: mol_type = other DNA
ggtccttcatggtccaaatc

SEQ ID NO: 62401 - DNA, 20 bp, synthetic construct
  misc_feature 1..20: note = Description of Artificial Sequence: Synthetic oligonucleotide
  misc_feature 1..20: note = Target: SCN10A; (+) strand; PAM type: YTN; PAM sequence: CTT
  source 1..20: mol_type = other DNA
catggtccaaatcaagagtt

SEQ ID NO: 62402 - DNA, 20 bp, synthetic construct
  misc_feature 1..20: note = Description of Artificial Sequence: Synthetic oligonucleotide
  misc_feature 1..20: note = Target: SCN10A; (+) strand; PAM type: YTN; PAM sequence: TTC
  source 1..20: mol_type = other DNA
atggtccaaatcaagagttt

SEQ ID NO: 62403 - DNA, 20 bp, synthetic construct
  misc_feature 1..20: note = Description of Artificial Sequence: Synthetic oligonucleotide
  misc_feature 1..20: note = Target: SCN10A; (+) strand; PAM type: YTN; PAM sequence: TTT
  source 1..20: mol_type = other DNA
tcagtggtgtttatggtggt

SEQ ID NO: 62404 - DNA, 20 bp, synthetic construct
  misc_feature 1..20: note = Description of Artificial Sequence: Synthetic oligonucleotide
  misc_feature 1..20: note = Target: SCN10A; (+) strand; PAM type: YTN; PAM sequence: TTT
  source 1..20: mol_type = other DNA
cagtggtgtttatggtggtg

SEQ ID NO: 62405 - DNA, 20 bp, synthetic construct
  misc_feature 1..20: note = Description of Artificial Sequence: Synthetic oligonucleotide
  misc_feature 1..20: note = Target: SCN10A; (+) strand; PAM type: YTN; PAM sequence: TTC
  source 1..20: mol_type = other DNA
agtggtgtttatggtggtga

SEQ ID NO: 62406 - DNA, 20 bp, synthetic construct
  misc_feature 1..20: note = Description of Artificial Sequence: Synthetic oligonucleotide
  misc_feature 1..20: note = Target: SCN10A; (+) strand; PAM type: YTN; PAM sequence: TTT
  source 1..20: mol_type = other DNA
atggtggtgactacgtttcc

SEQ ID NO: 62407 - DNA, 20 bp, synthetic construct
  misc_feature 1..20: note = Description of Artificial Sequence: Synthetic oligonucleotide
  misc_feature 1..20: note = Target: SCN10A; (+) strand; PAM type: YTN; PAM sequence: TTA
  source 1..20: mol_type = other DNA
tggtggtgactacgtttccc

SEQ ID NO: 62408 - DNA, 20 bp, synthetic construct
  misc_feature 1..20: note = Description of Artificial Sequence: Synthetic oligonucleotide
  misc_feature 1..20: note = Target: SCN10A; (+) strand; PAM type: YTN; PAM sequence: CTA
  source 1..20: mol_type = other DNA
cgtttccccctttcaactca

SEQ ID NO: 62409 - DNA, 20 bp, synthetic construct
  misc_feature 1..20: note = Description of Artificial Sequence: Synthetic oligonucleotide
  misc_feature 1..20: note = Target: SCN10A; (+) strand; PAM type: YTN; PAM sequence: TTT
  source 1..20: mol_type = other DNA
ccccctttcaactcaagagg

SEQ ID NO: 62410 - DNA, 20 bp, synthetic construct
  misc_feature 1..20: note = Description of Artificial Sequence: Synthetic oligonucleotide
  misc_feature 1..20: note = Target: SCN10A; (+) strand; PAM type: YTN; PAM sequence: TTC
  source 1..20: mol_type = other DNA
cccctttcaactcaagaggg

SEQ ID NO: 62411 - DNA, 20 bp, synthetic construct
  misc_feature 1..20: note = Description of Artificial Sequence: Synthetic oligonucleotide
  misc_feature 1..20: note = Target: SCN10A; (+) strand; PAM type: YTN; PAM sequence: CTT
  source 1..20: mol_type = other DNA
tcaactcaagagggctggtt

SEQ ID NO: 62412 - DNA, 20 bp, synthetic construct
  misc_feature 1..20: note = Description of Artificial Sequence: Synthetic oligonucleotide
  misc_feature 1..20: note = Target: SCN10A; (+) strand; PAM type: YTN; PAM sequence: TTT
  source 1..20: mol_type = other DNA
caactcaagagggctggttt

SEQ ID NO: 62413 - DNA, 20 bp, synthetic construct
  misc_feature 1..20: note = Description of Artificial Sequence: Synthetic oligonucleotide
  misc_feature 1..20: note = Target: SCN10A; (+) strand; PAM type: YTN; PAM sequence: TTC
  source 1..20: mol_type = other DNA
aactcaagagggctggttta

SEQ ID NO: 62414 - DNA, 20 bp, synthetic construct
  misc_feature 1..20: note = Description of Artificial Sequence: Synthetic oligonucleotide
  misc_feature 1..20: note = Target: SCN10A; (+) strand; PAM type: YTN; PAM sequence: CTC
  source 1..20: mol_type = other DNA
aagagggctggtttagaact

SEQ ID NO: 62415 - DNA, 20 bp, synthetic construct
  misc_feature 1..20: note = Description of Artificial Sequence: Synthetic oligonucleotide
  misc_feature 1..20: note = Target: SCN10A; (+) strand; PAM type: YTN; PAM sequence: CTG
  source 1..20: mol_type = other DNA
gtttagaactcacggagggg

SEQ ID NO: 62416 - DNA, 20 bp, synthetic construct
  misc_feature 1..20: note = Description of Artificial Sequence: Synthetic oligonucleotide
  misc_feature 1..20: note = Target: SCN10A; (+) strand; PAM type: YTN; PAM sequence: TTT
  source 1..20: mol_type = other DNA
agaactcacggaggggtttt

SEQ ID NO: 62417 - DNA, 20 bp, synthetic construct
  misc_feature 1..20: note = Description of Artificial Sequence: Synthetic oligonucleotide
  misc_feature 1..20: note = Target: SCN10A; (+) strand; PAM type: YTN; PAM sequence: TTA
  source 1..20: mol_type = other DNA
gaactcacggaggggttttt

SEQ ID NO: 62418 - DNA, 20 bp, synthetic construct
  misc_feature 1..20: note = Description of Artificial Sequence: Synthetic oligonucleotide
  misc_feature 1..20: note = Target: SCN10A; (+) strand; PAM type: YTN; PAM sequence: CTC
  source 1..20: mol_type = other DNA
acggaggggtttttgagggt

SEQ ID NO: 62419 - DNA, 20 bp, synthetic construct
  misc_feature 1..20: note = Description of Artificial Sequence: Synthetic oligonucleotide
  misc_feature 1..20: note = Target: SCN10A; (+) strand; PAM type: YTN; PAM sequence: TTT
  source 1..20: mol_type = other DNA
ttgagggtaaagaggaaggc

SEQ ID NO: 62420 - DNA, 20 bp, synthetic construct
  misc_feature 1..20: note = Description of Artificial Sequence: Synthetic oligonucleotide
  misc_feature 1..20: note = Target: SCN10A; (+) strand; PAM type: YTN; PAM sequence: TTT
  source 1..20: mol_type = other DNA
tgagggtaaagaggaaggcc

SEQ ID NO: 62421 - DNA, 20 bp, synthetic construct
  misc_feature 1..20: note = Description of Artificial Sequence: Synthetic oligonucleotide
  misc_feature 1..20: note = Target: SCN10A; (+) strand; PAM type: YTN; PAM sequence: TTT
  source 1..20: mol_type = other DNA
gagggtaaagaggaaggccc

SEQ ID NO: 62422 - DNA, 20 bp, synthetic construct
  misc_feature 1..20: note = Description of Artificial Sequence: Synthetic oligonucleotide
  misc_feature 1..20: note = Target: SCN10A; (+) strand; PAM type: YTN; PAM sequence: TTG
  source 1..20: mol_type = other DNA
agggtaaagaggaaggccca

SEQ ID NO: 62423 - DNA, 20 bp, synthetic construct
  misc_feature 1..20: note = Description of Artificial Sequence: Synthetic oligonucleotide
  misc_feature 1..20: note = Target: SCN10A; (+) strand; PAM type: YTN; PAM sequence: CTC
  source 1..20: mol_type = other DNA
tccgtagtgtctgatagggc

SEQ ID NO: 62424 - DNA, 20 bp, synthetic construct
  misc_feature 1..20: note = Description of Artificial Sequence: Synthetic oligonucleotide
  misc_feature 1..20: note = Target: SCN10A; (+) strand; PAM type: YTN; PAM sequence: CTC
  source 1..20: mol_type = other DNA
cgtagtgtctgatagggcat

SEQ ID NO: 62425 - DNA, 20 bp, synthetic construct
  misc_feature 1..20: note = Description of Artificial Sequence: Synthetic oligonucleotide
  misc_feature 1..20: note = Target: SCN10A; (+) strand; PAM type: YTN; PAM sequence: CTG
  source 1..20: mol_type = other DNA
atagggcatgagatgcagat

SEQ ID NO: 62426 - DNA, 20 bp, synthetic construct
  misc_feature 1..20: note = Description of Artificial Sequence: Synthetic oligonucleotide
  misc_feature 1..20: note = Target: SCN10A; (+) strand; PAM type: YTN; PAM sequence: CTG
  source 1..20: mol_type = other DNA
ctgccacctggggcatgtgt

SEQ ID NO: 62427 - DNA, 20 bp, synthetic construct
  misc_feature 1..20: note = Description of Artificial Sequence: Synthetic oligonucleotide
  misc_feature 1..20: note = Target: SCN10A; (+) strand; PAM type: YTN; PAM sequence: CTG
  source 1..20: mol_type = other DNA
ccacctggggcatgtgtgtc

SEQ ID NO: 62428 - DNA, 20 bp, synthetic construct
  misc_feature 1..20: note = Description of Artificial Sequence: Synthetic oligonucleotide
  misc_feature 1..20: note = Target: SCN10A; (+) strand; PAM type: YTN; PAM sequence: CTG
  source 1..20: mol_type = other DNA
gggcatgtgtgtctgatgcg

SEQ ID NO: 62429 - DNA, 20 bp, synthetic construct
  misc_feature 1..20: note = Description of Artificial Sequence: Synthetic oligonucleotide
  misc_feature 1..20: note = Target: SCN10A; (+) strand; PAM type: YTN; PAM sequence: CTG
  source 1..20: mol_type = other DNA
atgcgggcgccctcaagcct

SEQ ID NO: 62430 - DNA, 20 bp, synthetic construct
  misc_feature 1..20: note = Description of Artificial Sequence: Synthetic oligonucleotide
  misc_feature 1..20: note = Target: SCN10A; (+) strand; PAM type: YTN; PAM sequence: CTC
  source 1..20: mol_type = other DNA
aagcctgggagtgaggcagc

SEQ ID NO: 62431 - DNA, 20 bp, synthetic construct
  misc_feature 1..20: note = Description of Artificial Sequence: Synthetic oligonucleotide
  misc_feature 1..20: note = Target: SCN10A; (+) strand; PAM type: YTN; PAM sequence: CTG
  source 1..20: mol_type = other DNA
ggagtgaggcagcaagtggg

SEQ ID NO: 62432 - DNA, 20 bp, synthetic construct
  misc_feature 1..20: note = Description of Artificial Sequence: Synthetic oligonucleotide
  misc_feature 1..20: note = Target: SCN10A; (+) strand; PAM type: YTN; PAM sequence: CTT
  source 1..20: mol_type = other DNA
gtttgtcttctgtggatccc

SEQ ID NO: 62433 - DNA, 20 bp, synthetic construct
  misc_feature 1..20: note = Description of Artificial Sequence: Synthetic oligonucleotide
  misc_feature 1..20: note = Target: SCN10A; (+) strand; PAM type: YTN; PAM sequence: TTG
  source 1..20: mol_type = other DNA
tttgtcttctgtggatccca

SEQ ID NO: 62434 - DNA, 20 bp, synthetic construct
  misc_feature 1..20: note = Description of Artificial Sequence: Synthetic oligonucleotide
  misc_feature 1..20: note = Target: SCN10A; (+) strand; PAM type: YTN; PAM sequence: TTT
  source 1..20: mol_type = other DNA
gtcttctgtggatcccaggt

SEQ ID NO: 62435 - DNA, 20 bp, synthetic construct
  misc_feature 1..20: note = Description of Artificial Sequence: Synthetic oligonucleotide
  misc_feature 1..20: note = Target: SCN10A; (+) strand; PAM type: YTN; PAM sequence: TTG
  source 1..20: mol_type = other DNA
tcttctgtggatcccaggtg

SEQ ID NO: 62436 - DNA, 20 bp, synthetic construct
  misc_feature 1..20: note = Description of Artificial Sequence: Synthetic oligonucleotide
  misc_feature 1..20: note = Target: SCN10A; (+) strand; PAM type: YTN; PAM sequence: CTT
  source 1..20: mol_type = other DNA
ctgtggatcccaggtgagtg

SEQ ID NO: 62437 - DNA, 20 bp, synthetic construct
  misc_feature 1..20: note = Description of Artificial Sequence: Synthetic oligonucleotide
  misc_feature 1..20: note = Target: SCN10A; (+) strand; PAM type: YTN; PAM sequence: TTC
  source 1..20: mol_type = other DNA
tgtggatcccaggtgagtgt

SEQ ID NO: 62438 - DNA, 20 bp, synthetic construct
  misc_feature 1..20: note = Description of Artificial Sequence: Synthetic oligonucleotide
  misc_feature 1..20: note = Target: SCN10A; (+) strand; PAM type: YTN; PAM sequence: CTG
  source 1..20: mol_type = other DNA
tggatcccaggtgagtgttc

SEQ ID NO: 62439 - DNA, 20 bp, synthetic construct
  misc_feature 1..20: note = Description of Artificial Sequence: Synthetic oligonucleotide
  misc_feature 1..20: note = Target: SCN10A; (+) strand; PAM type: YTN; PAM sequence: TTC
  source 1..20: mol_type = other DNA
gctcaactggattctggccc

SEQ ID NO: 62440 - DNA, 20 bp, synthetic construct
  misc_feature 1..20: note = Description of Artificial Sequence: Synthetic oligonucleotide
  misc_feature 1..20: note = Target: SCN10A; (+) strand; PAM type: YTN; PAM sequence: CTC
  source 1..20: mol_type = other DNA
aactggattctggccctaat

SEQ ID NO: 62441 - DNA, 20 bp, synthetic construct
  misc_feature 1..20: note = Description of Artificial Sequence: Synthetic oligonucleotide
  misc_feature 1..20: note = Target: SCN10A; (+) strand; PAM type: YTN; PAM sequence: CTG
  source 1..20: mol_type = other DNA
gattctggccctaattaaca

SEQ ID NO: 62442 - DNA, 20 bp, synthetic construct
  misc_feature 1..20: note = Description of Artificial Sequence: Synthetic oligonucleotide
  misc_feature 1..20: note = Target: SCN10A; (+) strand; PAM type: YTN; PAM sequence: TTC
  source 1..20: mol_type = other DNA
tggccctaattaacatcagt

SEQ ID NO: 62443 - DNA, 20 bp, synthetic construct
  misc_feature 1..20: note = Description of Artificial Sequence: Synthetic oligonucleotide
  misc_feature 1..20: note = Target: SCN10A; (+) strand; PAM type: YTN; PAM sequence: CTG
  source 1..20: mol_type = other DNA
gccctaattaacatcagtgt

SEQ ID NO: 62444 - DNA, 20 bp, synthetic construct
  misc_feature 1..20: note = Description of Artificial Sequence: Synthetic oligonucleotide
  misc_feature 1..20: note = Target: SCN10A; (+) strand; PAM type: YTN; PAM sequence: CTA
  source 1..20: mol_type = other DNA
attaacatcagtgtgagggg

SEQ ID NO: 62445 - DNA, 20 bp, synthetic construct
  misc_feature 1..20: note = Description of Artificial Sequence: Synthetic oligonucleotide
  misc_feature 1..20: note = Target: SCN10A; (+) strand; PAM type: YTN; PAM sequence: TTA
  source 1..20: mol_type = other DNA
acatcagtgtgagggggcct

SEQ ID NO: 62446 - DNA, 20 bp, synthetic construct
  misc_feature 1..20: note = Description of Artificial Sequence: Synthetic oligonucleotide
  misc_feature 1..20: note = Target: SCN10A; (+) strand; PAM type: YTN; PAM sequence: CTG
  source 1..20: mol_type = other DNA
tggctgtcccttcaccttct

SEQ ID NO: 62447 - DNA, 20 bp, synthetic construct
  misc_feature 1..20: note = Description of Artificial Sequence: Synthetic oligonucleotide
  misc_feature 1..20: note = Target: SCN10A; (+) strand; PAM type: YTN; PAM sequence: CTG
  source 1..20: mol_type = other DNA
tcccttcaccttctgtgaag

SEQ ID NO: 62448 - DNA, 20 bp, synthetic construct
  misc_feature 1..20: note = Description of Artificial Sequence: Synthetic oligonucleotide
  misc_feature 1..20: note = Target: SCN10A; (+) strand; PAM type: YTN; PAM sequence: CTT
  source 1..20: mol_type = other DNA
caccttctgtgaagcagtca

SEQ ID NO: 62449 - DNA, 20 bp, synthetic construct
  misc_feature 1..20: note = Description of Artificial Sequence: Synthetic oligonucleotide
  misc_feature 1..20: note = Target: SCN10A; (+) strand; PAM type: YTN; PAM sequence: TTC
  source 1..20: mol_type = other DNA
accttctgtgaagcagtcat

SEQ ID NO: 62450 - DNA, 20 bp, synthetic construct
  misc_feature 1..20: note = Description of Artificial Sequence: Synthetic oligonucleotide
  misc_feature 1..20: note = Target: SCN10A; (+) strand; PAM type: YTN; PAM sequence: CTT
  source 1..20: mol_type = other DNA
ctgtgaagcagtcatctggt

SEQ ID NO: 62451 - DNA, 20 bp, synthetic construct
  misc_feature 1..20: note = Description of Artificial Sequence: Synthetic oligonucleotide
  misc_feature 1..20: note = Target: SCN10A; (+) strand; PAM type: YTN; PAM sequence: TTC
  source 1..20: mol_type = other DNA
tgtgaagcagtcatctggtt

SEQ ID NO: 62452 - DNA, 20 bp, synthetic construct
  misc_feature 1..20: note = Description of Artificial Sequence: Synthetic oligonucleotide
  misc_feature 1..20: note = Target: SCN10A; (+) strand; PAM type: YTN; PAM sequence: CTG
  source 1..20: mol_type = other DNA
tgaagcagtcatctggttct

SEQ ID NO: 62453 - DNA, 20 bp, synthetic construct
  misc_feature 1..20: note = Description of Artificial Sequence: Synthetic oligonucleotide
  misc_feature 1..20: note = Target: SCN10A; (+) strand; PAM type: YTN; PAM sequence: CTG
  source 1..20: mol_type = other DNA
gttcttccaggtcatctgcc

SEQ ID NO: 62454 - DNA, 20 bp, synthetic construct
  misc_feature 1..20: note = Description of Artificial Sequence: Synthetic oligonucleotide
  misc_feature 1..20: note = Target: SCN10A; (+) strand; PAM type: YTN; PAM sequence: TTC
  source 1..20: mol_type = other DNA
ttccaggtcatctgccagct

SEQ ID NO: 62455 - DNA, 20 bp, synthetic construct
  misc_feature 1..20: note = Description of Artificial Sequence: Synthetic oligonucleotide
  misc_feature 1..20: note = Target: SCN10A; (+) strand; PAM type: YTN; PAM sequence: CTT
  source 1..20: mol_type = other DNA
ccaggtcatctgccagctca

SEQ ID NO: 62456 - DNA, 20 bp, synthetic construct
  misc_feature 1..20: note = Description of Artificial Sequence: Synthetic oligonucleotide
  misc_feature 1..20: note = Target: SCN10A; (+) strand; PAM type: YTN; PAM sequence: TTC
  source 1..20: mol_type = other DNA
caggtcatctgccagctcag

SEQ ID NO: 62457 - DNA, 20 bp, synthetic construct
  misc_feature 1..20: note = Description of Artificial Sequence: Synthetic oligonucleotide
  misc_feature 1..20: note = Target: SCN10A; (+) strand; PAM type: YTN; PAM sequence: CTG
  source 1..20: mol_type = other DNA
ccagctcagggatcttcctc

SEQ ID NO: 62458 - DNA, 20 bp, synthetic construct
  misc_feature 1..20: note = Description of Artificial Sequence: Synthetic oligonucleotide
  misc_feature 1..20: note = Target: SCN10A; (+) strand; PAM type: YTN; PAM sequence: CTC
  source 1..20: mol_type = other DNA
agggatcttcctcaggattt

SEQ ID NO: 62459 - DNA, 20 bp, synthetic construct
  misc_feature 1..20: note = Description of Artificial Sequence: Synthetic oligonucleotide
  misc_feature 1..20: note = Target: SCN10A; (+) strand; PAM type: YTN; PAM sequence: CTT
  source 1..20: mol_type = other DNA
cctcaggatttcctcaggat

SEQ ID NO: 62460 - DNA, 20 bp, synthetic construct
  misc_feature 1..20: note = Description of Artificial Sequence: Synthetic oligonucleotide
  misc_feature 1..20: note = Target: SCN10A; (+) strand; PAM type: YTN; PAM sequence: TTC
  source 1..20: mol_type = other DNA
ctcaggatttcctcaggatc

SEQ ID NO: 62461 - DNA, 20 bp, synthetic construct
  misc_feature 1..20: note = Description of Artificial Sequence: Synthetic oligonucleotide
  misc_feature 1..20: note = Target: SCN10A; (+) strand; PAM type: YTN; PAM sequence: CTC
  source 1..20: mol_type = other DNA
aggatttcctcaggatctag

SEQ ID NO: 62462 - DNA, 20 bp, synthetic construct
  misc_feature 1..20: note = Description of Artificial Sequence: Synthetic oligonucleotide
  misc_feature 1..20: note = Target: SCN10A; (+) strand; PAM type: YTN; PAM sequence: TTT
  source 1..20: mol_type = other DNA
cctcaggatctaggcagtcc

SEQ ID NO: 62463 - DNA, 20 bp, synthetic construct
  misc_feature 1..20: note = Description of Artificial Sequence: Synthetic oligonucleotide
  misc_feature 1..20: note = Target: SCN10A; (+) strand; PAM type: YTN; PAM sequence: TTC
  source 1..20: mol_type = other DNA
ctcaggatctaggcagtcca

SEQ ID NO: 62464 - DNA, 20 bp, synthetic construct
  misc_feature 1..20: note = Description of Artificial Sequence: Synthetic oligonucleotide
  misc_feature 1..20: note = Target: SCN10A; (+) strand; PAM type: YTN; PAM sequence: CTC
  source 1..20: mol_type = other DNA
aggatctaggcagtccaccg

SEQ ID NO: 62465 - DNA, 20 bp, synthetic construct
  misc_feature 1..20: note = Description of Artificial Sequence: Synthetic oligonucleotide
  misc_feature 1..20: note = Target: SCN10A; (+) strand; PAM type: YTN; PAM sequence: CTA
  source 1..20: mol_type = other DNA
ggcagtccaccgtgctgccc

SEQ ID NO: 62466 - DNA, 20 bp, synthetic construct
  misc_feature 1..20: note = Description of Artificial Sequence: Synthetic oligonucleotide
  misc_feature 1..20: note = Target: SCN10A; (+) strand; PAM type: YTN; PAM sequence: CTG
  source 1..20: mol_type = other DNA
ccctcagaggagcttgtgtc

SEQ ID NO: 62467 - DNA, 20 bp, synthetic construct
  misc_feature 1..20: note = Description of Artificial Sequence: Synthetic oligonucleotide
  misc_feature 1..20: note = Target: SCN10A; (+) strand; PAM type: YTN; PAM sequence: CTC
  source 1..20: mol_type = other DNA
agaggagcttgtgtcgtcca

SEQ ID NO: 62468 - DNA, 20 bp, synthetic construct
  misc_feature 1..20: note = Description of Artificial Sequence: Synthetic oligonucleotide
  misc_feature 1..20: note = Target: SCN10A; (+) strand; PAM type: YTN; PAM sequence: CTT
  source 1..20: mol_type = other DNA
gtgtcgtccactccctgcag

SEQ ID NO: 62469 - DNA, 20 bp, synthetic construct
  misc_feature 1..20: note = Description of Artificial Sequence: Synthetic oligonucleotide
  misc_feature 1..20: note = Target: SCN10A; (+) strand; PAM type: YTN; PAM sequence: TTG
  source 1..20: mol_type = other DNA
tgtcgtccactccctgcagg

SEQ ID NO: 62470 - DNA, 20 bp, synthetic construct
  misc_feature 1..20: note = Description of Artificial Sequence: Synthetic oligonucleotide
  misc_feature 1..20: note = Target: SCN10A; (+) strand; PAM type: YTN; PAM sequence: CTC
  source 1..20: mol_type = other DNA
cctgcaggggagaagcccag

SEQ ID NO: 62471 - DNA, 20 bp, synthetic construct
  misc_feature 1..20: note = Description of Artificial Sequence: Synthetic oligonucleotide
  misc_feature 1..20: note = Target: SCN10A; (+) strand; PAM type: YTN; PAM sequence: CTG
  source 1..20: mol_type = other DNA
caggggagaagcccagggca

SEQ ID NO: 62472 - DNA, 20 bp, synthetic construct
  misc_feature 1..20: note = Description of Artificial Sequence: Synthetic oligonucleotide
  misc_feature 1..20: note = Target: SCN10A; (+) strand; PAM type: YTN; PAM sequence: CTC
  source 1..20: mol_type = other DNA
gtctctccgcggggcccggg

SEQ ID NO: 62473 - DNA, 20 bp, synthetic construct
  misc_feature 1..20: note = Description of Artificial Sequence: Synthetic oligonucleotide
  misc_feature 1..20: note = Target: SCN10A; (+) strand; PAM type: YTN; PAM sequence: CTC
  source 1..20: mol_type = other DNA
tccgcggggcccggggaatt

SEQ ID NO: 62474 - DNA, 20 bp, synthetic construct
  misc_feature 1..20: note = Description of Artificial Sequence: Synthetic oligonucleotide
  misc_feature 1..20: note = Target: SCN10A; (+) strand; PAM type: YTN; PAM sequence: CTC
  source 1..20: mol_type = other DNA
cgcggggcccggggaattgc

SEQ ID NO: 62475 - DNA, 20 bp, synthetic construct
  misc_feature 1..20: note = Description of Artificial Sequence: Synthetic oligonucleotide
  misc_feature 1..20: note = Target: SCN10A; (+) strand; PAM type: YTN; PAM sequence: TTG
  source 1..20: mol_type = other DNA
cacacggtcactgcaggttc

SEQ ID NO: 62476 - DNA, 20 bp, synthetic construct
  misc_feature 1..20: note = Description of Artificial Sequence: Synthetic oligonucleotide
  misc_feature 1..20: note = Target: SCN10A; (+) strand; PAM type: YTN; PAM sequence: CTG
  source 1..20: mol_type = other DNA
caggttcaactgcacccatg

SEQ ID NO: 62477 - DNA, 20 bp, synthetic construct
  misc_feature 1..20: note = Description of Artificial Sequence: Synthetic oligonucleotide
  misc_feature 1..20: note = Target: SCN10A; (+) strand; PAM type: YTN; PAM sequence: TTC
  source 1..20: mol_type = other DNA
aactgcacccatgtttggtg

SEQ ID NO: 62478 - DNA, 20 bp, synthetic construct
  misc_feature 1..20: note = Description of Artificial Sequence: Synthetic oligonucleotide
  misc_feature 1..20: note = Target: SCN10A; (+) strand; PAM type: YTN; PAM sequence: CTG
  source 1..20: mol_type = other DNA
cacccatgtttggtgcctcg

SEQ ID NO: 62479 - DNA, 20 bp, synthetic construct
  misc_feature 1..20: note = Description of Artificial Sequence: Synthetic oligonucleotide
  misc_feature 1..20: note = Target: SCN10A; (+) strand; PAM type: YTN; PAM sequence: TTT
  source 1..20: mol_type = other DNA
ggtgcctcgccagctgaggc

SEQ ID NO: 62480 - DNA, 20 bp, synthetic construct
  misc_feature 1..20: note = Description of Artificial Sequence: Synthetic oligonucleotide
  misc_feature 1..20: note = Target: SCN10A; (+) strand; PAM type: YTN; PAM sequence: TTG
  source 1..20: mol_type = other DNA
gtgcctcgccagctgaggcc

SEQ ID NO: 62481 - DNA, 20 bp, synthetic construct
  misc_feature 1..20: note = Description of Artificial Sequence: Synthetic oligonucleotide
  misc_feature 1..20: note = Target: SCN10A; (+) strand; PAM type: YTN; PAM sequence: CTC
  source 1..20: mol_type = other DNA
gccagctgaggcctggaaca

SEQ ID NO: 62482 - DNA, 20 bp, synthetic construct
  misc_feature 1..20: note = Description of Artificial Sequence: Synthetic oligonucleotide
  misc_feature 1..20: note = Target: SCN10A; (+) strand; PAM type: YTN; PAM sequence: CTG
  source 1..20: mol_type = other DNA
aggcctggaacactgctctt

SEQ ID NO: 62483 - DNA, 20 bp, synthetic construct
  misc_feature 1..20: note = Description of Artificial Sequence: Synthetic oligonucleotide
  misc_feature 1..20: note = Target: SCN10A; (+) strand; PAM type: YTN; PAM sequence: CTG
  source 1..20: mol_type = other DNA
gaacactgctcttctccctg

SEQ ID NO: 62484 - DNA, 20 bp, synthetic construct
  misc_feature 1..20: note = Description of Artificial Sequence: Synthetic oligonucleotide
  misc_feature 1..20: note = Target: SCN10A; (+) strand; PAM type: YTN; PAM sequence: CTG
  source 1..20: mol_type = other DNA
ctcttctccctggagcccca

SEQ ID NO: 62485 - DNA, 20 bp, synthetic construct
  misc_feature 1..20: note = Description of Artificial Sequence: Synthetic oligonucleotide
  misc_feature 1..20: note = Target: SCN10A; (+) strand; PAM type: YTN; PAM sequence: CTC
  source 1..20: mol_type = other DNA
ttctccctggagccccagag

SEQ ID NO: 62486 - DNA, 20 bp, synthetic construct
  misc_feature 1..20: note = Description of Artificial Sequence: Synthetic oligonucleotide
  misc_feature 1..20: note = Target: SCN10A; (+) strand; PAM type: YTN; PAM sequence: CTT
  source 1..20: mol_type = other DNA
ctccctggagccccagaggc

SEQ ID NO: 62487 - DNA, 20 bp, synthetic construct
  misc_feature 1..20: note = Description of Artificial Sequence: Synthetic oligonucleotide
  misc_feature 1..20: note = Target: SCN10A; (+) strand; PAM type: YTN; PAM sequence: TTC
  source 1..20: mol_type = other DNA
tccctggagccccagaggct

SEQ ID NO: 62488 - DNA, 20 bp, synthetic construct
  misc_feature 1..20: note = Description of Artificial Sequence: Synthetic oligonucleotide
  misc_feature 1..20: note = Target: SCN10A; (+) strand; PAM type: YTN; PAM sequence: CTC
  source 1..20: mol_type = other DNA
cctggagccccagaggctta

SEQ ID NO: 62489 - DNA, 20 bp, synthetic construct
  misc_feature 1..20: note = Description of Artificial Sequence: Synthetic oligonucleotide
  misc_feature 1..20: note = Target: SCN10A; (+) strand; PAM type: YTN; PAM sequence: CTG
  source 1..20: mol_type = other DNA
gagccccagaggcttagctg

SEQ ID NO: 62490 - DNA, 20 bp, synthetic construct
  misc_feature 1..20: note = Description of Artificial Sequence: Synthetic oligonucleotide
  misc_feature 1..20: note = Target: SCN10A; (+) strand; PAM type: YTN; PAM sequence: CTT
  source 1..20: mol_type = other DNA
agctgtgtgagactgtaaac

SEQ ID NO: 62491 - DNA, 20 bp, synthetic construct
  misc_feature 1..20: note = Description of Artificial Sequence: Synthetic oligonucleotide
  misc_feature 1..20: note = Target: SCN10A; (+) strand; PAM type: YTN; PAM sequence: TTA
  source 1..20: mol_type = other DNA
gctgtgtgagactgtaaacc

SEQ ID NO: 62492 - DNA, 20 bp, synthetic construct
  misc_feature 1..20: note = Description of Artificial Sequence: Synthetic oligonucleotide
  misc_feature 1..20: note = Target: SCN10A; (+) strand; PAM type: YTN; PAM sequence: CTG
  source 1..20: mol_type = other DNA
tgtgagactgtaaaccttcg

SEQ ID NO: 62493 - DNA, 20 bp, synthetic construct
  misc_feature 1..20: note = Description of Artificial Sequence: Synthetic oligonucleotide
  misc_feature 1..20: note = Target: SCN10A; (+) strand; PAM type: YTN; PAM sequence: CTG
  source 1..20: mol_type = other DNA
taaaccttcggggcccctga

SEQ ID NO: 62494 - DNA, 20 bp, synthetic construct
  misc_feature 1..20: note = Description of Artificial Sequence: Synthetic oligonucleotide
  misc_feature 1..20: note = Target: SCN10A; (+) strand; PAM type: YTN; PAM sequence: CTT
  source 1..20: mol_type = other DNA
cggggcccctgatggagtgc

SEQ ID NO: 62495 - DNA, 20 bp, synthetic construct
  misc_feature 1..20: note = Description of Artificial Sequence: Synthetic oligonucleotide
  misc_feature 1..20: note = Target: SCN10A; (+) strand; PAM type: YTN; PAM sequence: TTC
  source 1..20: mol_type = other DNA
ggggcccctgatggagtgct

SEQ ID NO: 62496 - DNA, 20 bp, synthetic construct
  misc_feature 1..20: note = Description of Artificial Sequence: Synthetic oligonucleotide
  misc_feature 1..20: note = Target: SCN10A; (+) strand; PAM type: YTN; PAM sequence: CTG
  source 1..20: mol_type = other DNA
atggagtgctggcaatggcc

SEQ ID NO: 62497 - DNA, 20 bp, synthetic construct
  misc_feature 1..20: note = Description of Artificial Sequence: Synthetic oligonucleotide
  misc_feature 1..20: note = Target: SCN10A; (+) strand; PAM type: YTN; PAM sequence: CTG
  source 1..20: mol_type = other DNA
gcaatggcccgagacaccgt

SEQ ID NO: 62498 - DNA, 20 bp, synthetic construct
  misc_feature 1..20: note = Description of Artificial Sequence: Synthetic oligonucleotide
  misc_feature 1..20: note = Target: SCN10A; (+) strand; PAM type: YTN; PAM sequence: TTA
  source 1..20: mol_type = other DNA
cacccataacgactctcagc

SEQ ID NO: 62499 - DNA, 20 bp, synthetic construct
  misc_feature 1..20: note = Description of Artificial Sequence: Synthetic oligonucleotide
  misc_feature 1..20: note = Target: SCN10A; (+) strand; PAM type: YTN; PAM sequence: CTC
  source 1..20: mol_type = other DNA
tcagcattcactgggcttga

SEQ ID NO: 62500 - DNA, 20 bp, synthetic construct
  misc_feature 1..20: note = Description of Artificial Sequence: Synthetic oligonucleotide
  misc_feature 1..20: note = Target: SCN10A; (+) strand; PAM type: YTN; PAM sequence: CTC
  source 1..20: mol_type = other DNA
agcattcactgggcttgaat

SEQ ID NO: 62501 - DNA, 20 bp, synthetic construct
  misc_feature 1..20: note = Description of Artificial Sequence: Synthetic oligonucleotide
  misc_feature 1..20: note = Target: SCN10A; (+) strand; PAM type: YTN; PAM sequence: TTC
  source 1..20: mol_type = other DNA
actgggcttgaatatttaat

SEQ ID NO: 62502 - DNA, 20 bp, synthetic construct
  misc_feature 1..20: note = Description of Artificial Sequence: Synthetic oligonucleotide
  misc_feature 1..20: note = Target: SCN10A; (+) strand; PAM type: YTN; PAM sequence: CTG
  source 1..20: mol_type = other DNA
ggcttgaatatttaatcatg

SEQ ID NO: 62503 - DNA, 20 bp, synthetic construct
  misc_feature 1..20: note = Description of Artificial Sequence: Synthetic oligonucleotide
  misc_feature 1..20: note = Target: SCN10A; (+) strand; PAM type: YTN; PAM sequence: CTT
  source 1..20: mol_type = other DNA
gaatatttaatcatggagta

SEQ ID NO: 62504 - DNA, 20 bp, synthetic construct
  misc_feature 1..20: note = Description of Artificial Sequence: Synthetic oligonucleotide
  misc_feature 1..20: note = Target: SCN10A; (+) strand; PAM type: YTN; PAM sequence: TTG
  source 1..20: mol_type = other DNA
aatatttaatcatggagtaa

SEQ ID NO: 62505 - DNA, 20 bp, synthetic construct
  misc_feature 1..20: note = Description of Artificial Sequence: Synthetic oligonucleotide
  misc_feature 1..20: note = Target: SCN10A; (+) strand; PAM type: YTN; PAM sequence: TTT
  source 1..20: mol_type = other DNA
aatcatggagtaatgctgca

SEQ ID NO: 62506 - DNA, 20 bp, synthetic construct
  misc_feature 1..20: note = Description of Artificial Sequence: Synthetic oligonucleotide
  misc_feature 1..20: note = Target: SCN10A; (+) strand; PAM type: YTN; PAM sequence: TTA
  source 1..20: mol_type = other DNA
atcatggagtaatgctgcag

SEQ ID NO: 62507 - DNA, 20 bp, synthetic construct
  misc_feature 1..20: note = Description of Artificial Sequence: Synthetic oligonucleotide
  misc_feature 1..20: note = Target: SCN10A; (+) strand; PAM type: YTN; PAM sequence: CTG
  source 1..20: mol_type = other DNA
caggggcctgctgccctcct

SEQ ID NO: 62508 - DNA, 20 bp, synthetic construct
  misc_feature 1..20: note = Description of Artificial Sequence: Synthetic oligonucleotide
  misc_feature 1..20: note = Target: SCN10A; (+) strand; PAM type: YTN; PAM sequence: CTG
  source 1..20: mol_type = other DNA
ctgccctcctggcagctcca

SEQ ID NO: 62509 - DNA, 20 bp, synthetic construct
  misc_feature 1..20: note = Description of Artificial Sequence: Synthetic oligonucleotide
  misc_feature 1..20: note = Target: SCN10A; (+) strand; PAM type: YTN; PAM sequence: CTG
  source 1..20: mol_type = other DNA
ccctcctggcagctccagcc

SEQ ID NO: 62510 - DNA, 20 bp, synthetic construct
  misc_feature 1..20: note = Description of Artificial Sequence: Synthetic oligonucleotide
  misc_feature 1..20: note = Target: SCN10A; (+) strand; PAM type: YTN; PAM sequence: CTC
  source 1..20: mol_type = other DNA
ctggcagctccagccctata

SEQ ID NO: 62511 - DNA, 20 bp, synthetic construct
  misc_feature 1..20: note = Description of Artificial Sequence: Synthetic oligonucleotide
  misc_feature 1..20: note = Target: SCN10A; (+) strand; PAM type: YTN; PAM sequence: CTG
  source 1..20: mol_type = other DNA
gcagctccagccctataatg

SEQ ID NO: 62512 - DNA, 20 bp, synthetic construct
  misc_feature 1..20: note = Description of Artificial Sequence: Synthetic oligonucleotide
  misc_feature 1..20: note = Target: SCN10A; (+) strand; PAM type: YTN; PAM sequence: CTC
  source 1..20: mol_type = other DNA
cagccctataatgtctccag

SEQ ID NO: 62513 - DNA, 20 bp, synthetic construct
  misc_feature 1..20: note = Description of Artificial Sequence: Synthetic oligonucleotide
  misc_feature 1..20: note = Target: SCN10A; (+) strand; PAM type: YTN; PAM sequence: CTA
  source 1..20: mol_type = other DNA
taatgtctccagatgaattc

SEQ ID NO: 62514 - DNA, 20 bp, synthetic construct
  misc_feature 1..20: note = Description of Artificial Sequence: Synthetic oligonucleotide
  misc_feature 1..20: note = Target: SCN10A; (+) strand; PAM type: YTN; PAM sequence: CTC
  source 1..20: mol_type = other DNA
cagatgaattcaattagggg

SEQ ID NO: 62515 - DNA, 20 bp, synthetic construct
  misc_feature 1..20: note = Description of Artificial Sequence: Synthetic oligonucleotide
  misc_feature 1..20: note = Target: SCN10A; (+) strand; PAM type: YTN; PAM sequence: TTC
  source 1..20: mol_type = other DNA
aattaggggttgaagttgct

SEQ ID NO: 62516 - DNA, 20 bp, synthetic construct
  misc_feature 1..20: note = Description of Artificial Sequence: Synthetic oligonucleotide
  misc_feature 1..20: note = Target: SCN10A; (+) strand; PAM type: YTN; PAM sequence: TTA
  source 1..20: mol_type = other DNA
ggggttgaagttgctctcat

SEQ ID NO: 62517 - DNA, 20 bp, synthetic construct
  misc_feature 1..20: note = Description of Artificial Sequence: Synthetic oligonucleotide
  misc_feature 1..20: note = Target: SCN10A; (+) strand; PAM type: YTN; PAM sequence: TTG
  source 1..20: mol_type = other DNA
aagttgctctcatattagta

SEQ ID NO: 62518 - DNA, 20 bp, synthetic construct
  misc_feature 1..20: note = Description of Artificial Sequence: Synthetic oligonucleotide
  misc_feature 1..20: note = Target: SCN10A; (+) strand; PAM type: YTN; PAM sequence: TTG
  source 1..20: mol_type = other DNA
ctctcatattagtaaacctg

SEQ ID NO: 62519 - DNA, 20 bp, synthetic construct
  misc_feature 1..20: note = Description of Artificial Sequence: Synthetic oligonucleotide
  misc_feature 1..20: note = Target: SCN10A; (+) strand; PAM type: YTN; PAM sequence: CTC
  source 1..20: mol_type = other DNA
tcatattagtaaacctgata

SEQ ID NO: 62520 - DNA, 20 bp, synthetic construct
  misc_feature 1..20: note = Description of Artificial Sequence: Synthetic oligonucleotide
  misc_feature 1..20: note = Target: SCN10A; (+) strand; PAM type: YTN; PAM sequence: CTC
  source 1..20: mol_type = other DNA
atattagtaaacctgatagc

SEQ ID NO: 62521 - DNA, 20 bp, synthetic construct
  misc_feature 1..20: note = Description of Artificial Sequence: Synthetic oligonucleotide
  misc_feature 1..20: note = Target: SCN10A; (+) strand; PAM type: YTN; PAM sequence: TTA
  source 1..20: mol_type = other DNA
gtaaacctgatagctttgct

SEQ ID NO: 62522 - DNA, 20 bp, synthetic construct
  misc_feature 1..20: note = Description of Artificial Sequence: Synthetic oligonucleotide
  misc_feature 1..20: note = Target: SCN10A; (+) strand; PAM type: YTN; PAM sequence: CTG
  source 1..20: mol_type = other DNA
atagctttgctaatggaccc

SEQ ID NO: 62523 - DNA, 20 bp, synthetic construct
  misc_feature 1..20: note = Description of Artificial Sequence: Synthetic oligonucleotide
  misc_feature 1..20: note = Target: SCN10A; (+) strand; PAM type: YTN; PAM sequence: CTT
  source 1..20: mol_type = other DNA
tgctaatggacccaaatggt

SEQ ID NO: 62524 - DNA, 20 bp, synthetic construct
  misc_feature 1..20: note = Description of Artificial Sequence: Synthetic oligonucleotide
  misc_feature 1..20: note = Target: SCN10A; (+) strand; PAM type: YTN; PAM sequence: TTT
  source 1..20: mol_type = other DNA
gctaatggacccaaatggtg

SEQ ID NO: 62525 - DNA, 20 bp, synthetic construct
  misc_feature 1..20: note = Description of Artificial Sequence: Synthetic oligonucleotide
  misc_feature 1..20: note = Target: SCN10A; (+) strand; PAM type: YTN; PAM sequence: TTG
  source 1..20: mol_type = other DNA
ctaatggacccaaatggtgg

SEQ ID NO: 62526 - DNA, 20 bp, synthetic construct
  misc_feature 1..20: note = Description of Artificial Sequence: Synthetic oligonucleotide
  misc_feature 1..20: note = Target: SCN10A; (+) strand; PAM type: YTN; PAM sequence: CTA
  source 1..20: mol_type = other DNA
atggacccaaatggtggggc

SEQ ID NO: 62527 - DNA, 20 bp, synthetic construct
  misc_feature 1..20: note = Description of Artificial Sequence: Synthetic oligonucleotide
  misc_feature 1..20: note = Target: SCN10A; (+) strand; PAM type: YTN; PAM sequence: TTT
  source 1..20: mol_type = other DNA
gtcgctgtcaggcccctcct

SEQ ID NO: 62528 - DNA, 20 bp, synthetic construct
  misc_feature 1..20: note = Description of Artificial Sequence: Synthetic oligonucleotide
  misc_feature 1..20: note = Target: SCN10A; (+) strand; PAM type: YTN; PAM sequence: TTG
  source 1..20: mol_type = other DNA
tcgctgtcaggcccctcctg

SEQ ID NO: 62529 - DNA, 20 bp, synthetic construct
  misc_feature 1..20: note = Description of Artificial Sequence: Synthetic oligonucleotide
  misc_feature 1..20: note = Target: SCN10A; (+) strand; PAM type: YTN; PAM sequence: CTG
  source 1..20: mol_type = other DNA
tcaggcccctcctgcctagc

SEQ ID NO: 62530 - DNA, 20 bp, synthetic construct
  misc_feature 1..20: note = Description of Artificial Sequence: Synthetic oligonucleotide
  misc_feature 1..20: note = Target: SCN10A; (+) strand; PAM type: YTN; PAM sequence: CTC
  source 1..20: mol_type = other DNA
ctgcctagccggggtcatgg

SEQ ID NO: 62531 - DNA, 20 bp, synthetic construct
  misc_feature 1..20: note = Description of Artificial Sequence: Synthetic oligonucleotide
  misc_feature 1..20: note = Target: SCN10A; (+) strand; PAM type: YTN; PAM sequence: CTG
  source 1..20: mol_type = other DNA
cctagccggggtcatggaca

SEQ ID NO: 62532 - DNA, 20 bp, synthetic construct
  misc_feature 1..20: note = Description of Artificial Sequence: Synthetic oligonucleotide
  misc_feature 1..20: note = Target: SCN10A; (+) strand; PAM type: YTN; PAM sequence: CTA
  source 1..20: mol_type = other DNA
gccggggtcatggacaagaa

SEQ ID NO: 62533 - DNA, 20 bp, synthetic construct
  misc_feature 1..20: note = Description of Artificial Sequence: Synthetic oligonucleotide
  misc_feature 1..20: note = Target: SCN10A; (+) strand; PAM type: YTN; PAM sequence: TTG
  source 1..20: mol_type = other DNA
tgtactgaaaacattgagta

SEQ ID NO: 62534 - DNA, 20 bp, synthetic construct
  misc_feature 1..20: note = Description of Artificial Sequence: Synthetic oligonucleotide
  misc_feature 1..20: note = Target: SCN10A; (+) strand; PAM type: YTN; PAM sequence: CTG
  source 1..20: mol_type = other DNA
aaaacattgagtagggacaa

SEQ ID NO: 62535 - DNA, 20 bp, synthetic construct
  misc_feature 1..20: note = Description of Artificial Sequence: Synthetic oligonucleotide
  misc_feature 1..20: note = Target: SCN10A; (+) strand; PAM type: YTN; PAM sequence: TTG
  source 1..20: mol_type = other DNA
agtagggacaactagccagg

SEQ ID NO: 62536 - DNA, 20 bp, synthetic construct
  misc_feature 1..20: note = Description of Artificial Sequence: Synthetic oligonucleotide
  misc_feature 1..20: note = Target: SCN10A; (+) strand; PAM type: YTN; PAM sequence: CTA
  source 1..20: mol_type = other DNA
gccaggggagtccttggaac

SEQ ID NO: 62537 - DNA, 20 bp, synthetic construct
  misc_feature 1..20: note = Description of Artificial Sequence: Synthetic oligonucleotide
  misc_feature 1..20: note = Target: SCN10A; (+) strand; PAM type: YTN; PAM sequence: CTT
  source 1..20: mol_type = other DNA
ggaacatttgggaagaagca

SEQ ID NO: 62538 - DNA, 20 bp, synthetic construct
  misc_feature 1..20: note = Description of Artificial Sequence: Synthetic oligonucleotide
  misc_feature 1..20: note = Target: SCN10A; (+) strand; PAM type: YTN; PAM sequence: TTG
  source 1..20: mol_type = other DNA
gaacatttgggaagaagcat

SEQ ID NO: 62539 - DNA, 20 bp, synthetic construct
  misc_feature 1..20: note = Description of Artificial Sequence: Synthetic oligonucleotide
  misc_feature 1..20: note = Target: SCN10A; (+) strand; PAM type: YTN; PAM sequence: TTT
  source 1..20: mol_type = other DNA
gggaagaagcatgacatcca

SEQ ID NO: 62540 - DNA, 20 bp, synthetic construct
  misc_feature 1..20: note = Description of Artificial Sequence: Synthetic oligonucleotide
  misc_feature 1..20: note = Target: SCN10A; (+) strand; PAM type: YTN; PAM sequence: TTG
  source 1..20: mol_type = other DNA
ggaagaagcatgacatccac

SEQ ID NO: 62541 - DNA, 20 bp, synthetic construct
  misc_feature 1..20: note = Description of Artificial Sequence: Synthetic oligonucleotide
  misc_feature 1..20: note = Target: SCN10A; (+) strand; PAM type: YTN; PAM sequence: CTC
  source 1..20: mol_type = other DNA
acccagtgggaaccaagcgg

SEQ ID NO: 62542 - DNA, 20 bp, synthetic construct
  misc_feature 1..20: note = Description of Artificial Sequence: Synthetic oligonucleotide
  misc_feature 1..20: note = Target: SCN10A; (+) strand; PAM type: YTN; PAM sequence: CTT
  source 1..20: mol_type = other DNA
ctgttcacccacagccccca

SEQ ID NO: 62543 - DNA, 20 bp, synthetic construct
  misc_feature 1..20: note = Description of Artificial Sequence: Synthetic oligonucleotide
  misc_feature 1..20: note = Target: SCN10A; (+) strand; PAM type: YTN; PAM sequence: TTC
  source 1..20: mol_type = other DNA
tgttcacccacagcccccaa

SEQ ID NO: 62544 - DNA, 20 bp, synthetic construct
  misc_feature 1..20: note = Description of Artificial Sequence: Synthetic oligonucleotide
  misc_feature 1..20: note = Target: SCN10A; (+) strand; PAM type: YTN; PAM sequence: CTG
  source 1..20: mol_type = other DNA
ttcacccacagcccccaaat

SEQ ID NO: 62545 - DNA, 20 bp, synthetic construct
  misc_feature 1..20: note = Description of Artificial Sequence: Synthetic oligonucleotide
  misc_feature 1..20: note = Target: SCN10A; (+) strand; PAM type: YTN; PAM sequence: TTC
  source 1..20: mol_type = other DNA
acccacagcccccaaatccc

SEQ ID NO: 62546 - DNA, 20 bp, synthetic construct
  misc_feature 1..20: note = Description of Artificial Sequence: Synthetic oligonucleotide
  misc_feature 1..20: note = Target: SCN10A; (+) strand; PAM type: YTN; PAM sequence: CTC
  source 1..20: mol_type = other DNA
cctcttatcttaccctgctg

SEQ ID NO: 62547 - DNA, 20 bp, synthetic construct
  misc_feature 1..20: note = Description of Artificial Sequence: Synthetic oligonucleotide
  misc_feature 1..20: note = Target: SCN10A; (+) strand; PAM type: YTN; PAM sequence: CTC
  source 1..20: mol_type = other DNA
ttatcttaccctgctgtggt

SEQ ID NO: 62548 - DNA, 20 bp, synthetic construct
  misc_feature 1..20: note = Description of Artificial Sequence: Synthetic oligonucleotide
  misc_feature 1..20: note = Target: SCN10A; (+) strand; PAM type: YTN; PAM sequence: CTT
  source 1..20: mol_type = other DNA
atcttaccctgctgtggtca

SEQ ID NO: 62549 - DNA, 20 bp, synthetic construct
  misc_feature 1..20: note = Description of Artificial Sequence: Synthetic oligonucleotide
  misc_feature 1..20: note = Target: SCN10A; (+) strand; PAM type: YTN; PAM sequence: TTA
  source 1..20: mol_type = other DNA
tcttaccctgctgtggtcag

SEQ ID NO: 62550 - DNA, 20 bp, synthetic construct
  misc_feature 1..20: note = Description of Artificial Sequence: Synthetic oligonucleotide
  misc_feature 1..20: note = Target: SCN10A; (+) strand; PAM type: YTN; PAM sequence: CTT
  source 1..20: mol_type = other DNA
accctgctgtggtcagcctt

SEQ ID NO: 62551 - DNA, 20 bp, synthetic construct
  misc_feature 1..20: note = Description of Artificial Sequence: Synthetic oligonucleotide
  misc_feature 1..20: note = Target: SCN10A; (+) strand; PAM type: YTN; PAM sequence: TTA
  source 1..20: mol_type = other DNA
ccctgctgtggtcagccttg

SEQ ID NO: 62552 - DNA, 20 bp, synthetic construct
  misc_feature 1..20: note = Description of Artificial Sequence: Synthetic oligonucleotide
  misc_feature 1..20: note = Target: SCN10A; (+) strand; PAM type: YTN; PAM sequence: CTG
  source 1..20: mol_type = other DNA
ctgtggtcagccttgcctag

SEQ ID NO: 62553 - DNA, 20 bp, synthetic construct
  misc_feature 1..20: note = Description of Artificial Sequence: Synthetic oligonucleotide
  misc_feature 1..20: note = Target: SCN10A; (+) strand; PAM type: YTN; PAM sequence: CTG
  source 1..20: mol_type = other DNA
tggtcagccttgcctagggc

SEQ ID NO: 62554 - DNA, 20 bp, synthetic construct
  misc_feature 1..20: note = Description of Artificial Sequence: Synthetic oligonucleotide
  misc_feature 1..20: note = Target: SCN10A; (+) strand; PAM type: YTN; PAM sequence: CTT
  source 1..20: mol_type = other DNA
gcctagggcacacagccagt

SEQ ID NO: 62555 - DNA, 20 bp, synthetic construct
  misc_feature 1..20: note = Description of Artificial Sequence: Synthetic oligonucleotide
  misc_feature 1..20: note = Target: SCN10A; (+) strand; PAM type: YTN; PAM sequence: TTG
  source 1..20: mol_type = other DNA
cctagggcacacagccagta

SEQ ID NO: 62556 - DNA, 20 bp, synthetic construct
  misc_feature 1..20: note = Description of Artificial Sequence: Synthetic oligonucleotide
  misc_feature 1..20: note = Target: SCN10A; (+) strand; PAM type: YTN; PAM sequence: CTA
  source 1..20: mol_type = other DNA
gggcacacagccagtagctg

SEQ ID NO: 62557 - DNA, 20 bp, synthetic construct
  misc_feature 1..20: note = Description of Artificial Sequence: Synthetic oligonucleotide
  misc_feature 1..20: note = Target: SCN10A; (+) strand; PAM type: YTN; PAM sequence: CTG
  source 1..20: mol_type = other DNA
acattcttcaagctgaaggg

SEQ ID NO: 62558 - DNA, 20 bp, synthetic construct
  misc_feature 1..20: note = Description of Artificial Sequence: Synthetic oligonucleotide
  misc_feature 1..20: note = Target: SCN10A; (+) strand; PAM type: YTN; PAM sequence: TTC
  source 1..20: mol_type = other DNA
ttcaagctgaagggcttgat

SEQ ID NO: 62559 - DNA, 20 bp, synthetic construct
  misc_feature 1..20: note = Description of Artificial Sequence: Synthetic oligonucleotide
  misc_feature 1..20: note = Target: SCN10A; (+) strand; PAM type: YTN; PAM sequence: CTT
  source 1..20: mol_type = other DNA
caagctgaagggcttgataa

SEQ ID NO: 62560 - DNA, 20 bp, synthetic construct
  misc_feature 1..20: note = Description of Artificial Sequence: Synthetic oligonucleotide
  misc_feature 1..20: note = Target: SCN10A; (+) strand; PAM type: YTN; PAM sequence: TTC
  source 1..20: mol_type = other DNA
aagctgaagggcttgataac

SEQ ID NO: 62561 - DNA, 20 bp, synthetic construct
  misc_feature 1..20: note = Description of Artificial Sequence: Synthetic oligonucleotide
  misc_feature 1..20: note = Target: SCN10A; (+) strand; PAM type: YTN; PAM sequence: CTG
  source 1..20: mol_type = other DNA
aagggcttgataactttggg

SEQ ID NO: 62562 - DNA, 20 bp, synthetic construct
  misc_feature 1..20: note = Description of Artificial Sequence: Synthetic oligonucleotide
  misc_feature 1..20: note = Target: SCN10A; (+) strand; PAM type: YTN; PAM sequence: CTT
  source 1..20: mol_type = other DNA
gataactttggggatgaatt

SEQ ID NO: 62563 - DNA, 20 bp, synthetic construct
  misc_feature 1..20: note = Description of Artificial Sequence: Synthetic oligonucleotide
  misc_feature 1..20: note = Target: SCN10A; (+) strand; PAM type: YTN; PAM sequence: TTG
  source 1..20: mol_type = other DNA
ataactttggggatgaatta

SEQ ID NO: 62564 - DNA, 20 bp, synthetic construct
  misc_feature 1..20: note = Description of Artificial Sequence: Synthetic oligonucleotide
  misc_feature 1..20: note = Target: SCN10A; (+) strand; PAM type: YTN; PAM sequence: CTT
  source 1..20: mol_type = other DNA
tggggatgaattatgacttc

SEQ ID NO: 62565 - DNA, 20 bp, synthetic construct
  misc_feature 1..20: note = Description of Artificial Sequence: Synthetic oligonucleotide
  misc_feature 1..20: note = Target: SCN10A; (+) strand; PAM type: YTN; PAM sequence: TTT
  source 1..20: mol_type = other DNA
ggggatgaattatgacttcc

SEQ ID NO: 62566 - DNA, 20 bp, synthetic construct
  misc_feature 1..20: note = Description of Artificial Sequence: Synthetic oligonucleotide
  misc_feature 1..20: note = Target: SCN10A; (+) strand; PAM type: YTN; PAM sequence: TTG
  source 1..20: mol_type = other DNA
gggatgaattatgacttcct

SEQ ID NO: 62567 - DNA, 20 bp, synthetic construct
  misc_feature 1..20: note = Description of Artificial Sequence: Synthetic oligonucleotide
  misc_feature 1..20: note = Target: SCN10A; (+) strand; PAM type: YTN; PAM sequence: TTA
  source 1..20: mol_type = other DNA
tgacttccttatctctgttg

SEQ ID NO: 62568 - DNA, 20 bp, synthetic construct
  misc_feature 1..20: note = Description of Artificial Sequence: Synthetic oligonucleotide
  misc_feature 1..20: note = Target: SCN10A; (+) strand; PAM type: YTN; PAM sequence: CTT
  source 1..20: mol_type = other DNA
ccttatctctgttgagccca

SEQ ID NO: 62569 - DNA, 20 bp, synthetic construct
  misc_feature 1..20: note = Description of Artificial Sequence: Synthetic oligonucleotide
  misc_feature 1..20: note = Target: SCN10A; (+) strand; PAM type: YTN; PAM sequence: TTC
  source 1..20: mol_type = other DNA
cttatctctgttgagcccag

SEQ ID NO: 62570 - DNA, 20 bp, synthetic construct
  misc_feature 1..20: note = Description of Artificial Sequence: Synthetic oligonucleotide
  misc_feature 1..20: note = Target: SCN10A; (+) strand; PAM type: YTN; PAM sequence: CTT
  source 1..20: mol_type = other DNA
atctctgttgagcccagtgc

SEQ ID NO: 62571 - DNA, 20 bp, synthetic construct
  misc_feature 1..20: note = Description of Artificial Sequence: Synthetic oligonucleotide
  misc_feature 1..20: note = Target: SCN10A; (+) strand; PAM type: YTN; PAM sequence: TTA
  source 1..20: mol_type = other DNA
tctctgttgagcccagtgcc

SEQ ID NO: 62572 - DNA, 20 bp, synthetic construct
  misc_feature 1..20: note = Description of Artificial Sequence: Synthetic oligonucleotide
  misc_feature 1..20: note = Target: SCN10A; (+) strand; PAM type: YTN; PAM sequence: CTC
  source 1..20: mol_type = other DNA
tgttgagcccagtgcctgtc

SEQ ID NO: 62573 - DNA, 20 bp, synthetic construct
  misc_feature 1..20: note = Description of Artificial Sequence: Synthetic oligonucleotide
  misc_feature 1..20: note = Target: SCN10A; (+) strand; PAM type: YTN; PAM sequence: CTG
  source 1..20: mol_type = other DNA
ttgagcccagtgcctgtcac

SEQ ID NO: 62574 - DNA, 20 bp, synthetic construct
  misc_feature 1..20: note = Description of Artificial Sequence: Synthetic oligonucleotide
  misc_feature 1..20: note = Target: SCN10A; (+) strand; PAM type: YTN; PAM sequence: TTG
  source 1..20: mol_type = other DNA
agcccagtgcctgtcacaaa

SEQ ID NO: 62575 - DNA, 20 bp, synthetic construct
  misc_feature 1..20: note = Description of Artificial Sequence: Synthetic oligonucleotide
  misc_feature 1..20: note = Target: SCN10A; (+) strand; PAM type: YTN; PAM sequence: CTG
  source 1..20: mol_type = other DNA
tcacaaagtcagcactcagt

SEQ ID NO: 62576 - DNA, 20 bp, synthetic construct
  misc_feature 1..20: note = Description of Artificial Sequence: Synthetic oligonucleotide
  misc_feature 1..20: note = Target: SCN10A; (+) strand; PAM type: YTN; PAM sequence: CTC
  source 1..20: mol_type = other DNA
agtggctaggtgtcaaatta

SEQ ID NO: 62577 - DNA, 20 bp, synthetic construct
  misc_feature 1..20: note = Description of Artificial Sequence: Synthetic oligonucleotide
  misc_feature 1..20: note = Target: SCN10A; (+) strand; PAM type: YTN; PAM sequence: CTA
  source 1..20: mol_type = other DNA
ggtgtcaaattaaattcttg

SEQ ID NO: 62578 - DNA, 20 bp, synthetic construct
  misc_feature 1..20: note = Description of Artificial Sequence: Synthetic oligonucleotide
  misc_feature 1..20: note = Target: SCN10A; (+) strand; PAM type: YTN; PAM sequence: TTA
  source 1..20: mol_type = other DNA
aattcttgaattgaaggcag

SEQ ID NO: 62579 - DNA, 20 bp, synthetic construct
  misc_feature 1..20: note = Description of Artificial Sequence: Synthetic oligonucleotide
  misc_feature 1..20: note = Target: SCN10A; (+) strand; PAM type: YTN; PAM sequence: TTC
  source 1..20: mol_type = other DNA
ttgaattgaaggcagtgtta

SEQ ID NO: 62580 - DNA, 20 bp, synthetic construct
  misc_feature 1..20: note = Description of Artificial Sequence: Synthetic oligonucleotide
  misc_feature 1..20: note = Target: SCN10A; (+) strand; PAM type: YTN; PAM sequence: CTT
  source 1..20: mol_type = other DNA
gaattgaaggcagtgttatt

SEQ ID NO: 62581 - DNA, 20 bp, synthetic construct
  misc_feature 1..20: note = Description of Artificial Sequence: Synthetic oligonucleotide
  misc_feature 1..20: note = Target: SCN10A; (+) strand; PAM type: YTN; PAM sequence: TTG
  source 1..20: mol_type = other DNA
aattgaaggcagtgttatta

SEQ ID NO: 62582 - DNA, 20 bp, synthetic construct
  misc_feature 1..20: note = Description of Artificial Sequence: Synthetic oligonucleotide
  misc_feature 1..20: note = Target: SCN10A; (+) strand; PAM type: YTN; PAM sequence: TTG
  source 1..20: mol_type = other DNA
aaggcagtgttattaaagat

SEQ ID NO: 62583 - DNA, 20 bp, synthetic construct
  misc_feature 1..20: note = Description of Artificial Sequence: Synthetic oligonucleotide
  misc_feature 1..20: note = Target: SCN10A; (+) strand; PAM type: YTN; PAM sequence: TTA
  source 1..20: mol_type = other DNA
ttaaagatgctaaactttta

SEQ ID NO: 62584 - DNA, 20 bp, synthetic construct
  misc_feature 1..20: note = Description of Artificial Sequence: Synthetic oligonucleotide
  misc_feature 1..20: note = Target: SCN10A; (+) strand; PAM type: YTN; PAM sequence: TTA
  source 1..20: mol_type = other DNA
aagatgctaaacttttatag

SEQ ID NO: 62585 - DNA, 20 bp, synthetic construct
  misc_feature 1..20: note = Description of Artificial Sequence: Synthetic oligonucleotide
  misc_feature 1..20: note = Target: SCN10A; (+) strand; PAM type: YTN; PAM sequence: CTA
  source 1..20: mol_type = other DNA
aacttttatagatgcctctt

SEQ ID NO: 62586 - DNA, 20 bp, synthetic construct
  misc_feature 1..20: note = Description of Artificial Sequence: Synthetic oligonucleotide
  misc_feature 1..20: note = Target: SCN10A; (+) strand; PAM type: YTN; PAM sequence: CTT
  source 1..20: mol_type = other DNA
ttatagatgcctctttccct

SEQ ID NO: 62587 - DNA, 20 bp, synthetic construct
  misc_feature 1..20: note = Description of Artificial Sequence: Synthetic oligonucleotide
  misc_feature 1..20: note = Target: SCN10A; (+) strand; PAM type: YTN; PAM sequence: TTT
  source 1..20: mol_type = other DNA
tatagatgcctctttcccta

SEQ ID NO: 62588 - DNA, 20 bp, synthetic construct
  misc_feature 1..20: note = Description of Artificial Sequence: Synthetic oligonucleotide
  misc_feature 1..20: note = Target: SCN10A; (+) strand; PAM type: YTN; PAM sequence: TTT
  source 1..20: mol_type = other DNA
atagatgcctctttccctat

SEQ ID NO: 62589 - DNA, 20 bp, synthetic construct
  misc_feature 1..20: note = Description of Artificial Sequence: Synthetic oligonucleotide
  misc_feature 1..20: note = Target: SCN10A; (+) strand; PAM type: YTN; PAM sequence: TTA
  source 1..20: mol_type = other DNA
tagatgcctctttccctata

SEQ ID NO: 62590 - DNA, 20 bp, synthetic construct
  misc_feature 1..20: note = Description of Artificial Sequence: Synthetic oligonucleotide
  misc_feature 1..20: note = Target: SCN10A; (+) strand; PAM type: YTN; PAM sequence: CTC
  source 1..20: mol_type = other DNA
tttccctatagcttgtttcc

SEQ ID NO: 62591 - DNA, 20 bp, synthetic construct
  misc_feature 1..20: note = Description of Artificial Sequence: Synthetic oligonucleotide
  misc_feature 1..20: note = Target: SCN10A; (+) strand; PAM type: YTN; PAM sequence: CTT
  source 1..20: mol_type = other DNA
tccctatagcttgtttcctt

SEQ ID NO: 62592 - DNA, 20 bp, synthetic construct
  misc_feature 1..20: note = Description of Artificial Sequence: Synthetic oligonucleotide
  misc_feature 1..20: note = Target: SCN10A; (+) strand; PAM type: YTN; PAM sequence: TTT
  source 1..20: mol_type = other DNA
ccctatagcttgtttccttc

SEQ ID NO: 62593 - DNA, 20 bp, synthetic construct
  misc_feature 1..20: note = Description of Artificial Sequence: Synthetic oligonucleotide
  misc_feature 1..20: note = Target: SCN10A; (+) strand; PAM type: YTN; PAM sequence: TTC
  source 1..20: mol_type = other DNA
cctatagcttgtttccttca

SEQ ID NO: 62594 - DNA, 20 bp, synthetic construct
  misc_feature 1..20: note = Description of Artificial Sequence: Synthetic oligonucleotide
  misc_feature 1..20: note = Target: SCN10A; (+) strand; PAM type: YTN; PAM sequence: CTA
  source 1..20: mol_type = other DNA
tagcttgtttccttcaagat

SEQ ID NO: 62595 - DNA, 20 bp, synthetic construct
  misc_feature 1..20: note = Description of Artificial Sequence: Synthetic oligonucleotide
  misc_feature 1..20: note = Target: SCN10A; (+) strand; PAM type: YTN; PAM sequence: CTT
  source 1..20: mol_type = other DNA
gtttccttcaagatttgtaa

SEQ ID NO: 62596 - DNA, 20 bp, synthetic construct
  misc_feature 1..20: note = Description of Artificial Sequence: Synthetic oligonucleotide
  misc_feature 1..20: note = Target: SCN10A; (+) strand; PAM type: YTN; PAM sequence: TTG
  source 1..20: mol_type = other DNA
tttccttcaagatttgtaag

SEQ ID NO: 62597 - DNA, 20 bp, synthetic construct
  misc_feature 1..20: note = Description of Artificial Sequence: Synthetic oligonucleotide
  misc_feature 1..20: note = Target: SCN10A; (+) strand; PAM type: YTN; PAM sequence: TTT
  source 1..20: mol_type = other DNA
ccttcaagatttgtaagtga

SEQ ID NO: 62598 - DNA, 20 bp, synthetic construct
  misc_feature 1..20: note = Description of Artificial Sequence: Synthetic oligonucleotide
  misc_feature 1..20: note = Target: SCN10A; (+) strand; PAM type: YTN; PAM sequence: TTC
  source 1..20: mol_type = other DNA
cttcaagatttgtaagtgaa

SEQ ID NO: 62599 - DNA, 20 bp, synthetic construct
  misc_feature 1..20: note = Description of Artificial Sequence: Synthetic oligonucleotide
  misc_feature 1..20: note = Target: SCN10A; (+) strand; PAM type: YTN; PAM sequence: CTT
  source 1..20: mol_type = other DNA
caagatttgtaagtgaaacc

SEQ ID NO: 62600 - DNA, 20 bp, synthetic construct
  misc_feature 1..20: note = Description of Artificial Sequence: Synthetic oligonucleotide
  misc_feature 1..20: note = Target: SCN10A; (+) strand; PAM type: YTN; PAM sequence: TTC
  source 1..20: mol_type = other DNA
aagatttgtaagtgaaacca

SEQ ID NO: 62601 - DNA, 20 bp, synthetic construct
  misc_feature 1..20: note = Description of Artificial Sequence: Synthetic oligonucleotide
  misc_feature 1..20: note = Target: SCN10A; (+) strand; PAM type: YTN; PAM sequence: TTT
  source 1..20: mol_type = other DNA
gtaagtgaaaccacatttat

SEQ ID NO: 62602 - DNA, 20 bp, synthetic construct
  misc_feature 1..20: note = Description of Artificial Sequence: Synthetic oligonucleotide
  misc_feature 1..20: note = Target: SCN10A; (+) strand; PAM type: YTN; PAM sequence: TTG
  source 1..20: mol_type = other DNA
taagtgaaaccacatttatt

SEQ ID NO: 62603 - DNA, 20 bp, synthetic construct
  misc_feature 1..20: note = Description of Artificial Sequence: Synthetic oligonucleotide
  misc_feature 1..20: note = Target: SCN10A; (+) strand; PAM type: YTN; PAM sequence: TTT
  source 1..20: mol_type = other DNA
atttttaccttgtataagac

SEQ ID NO: 62604 - DNA, 20 bp, synthetic construct
  misc_feature 1..20: note = Description of Artificial Sequence: Synthetic oligonucleotide
  misc_feature 1..20: note = Target: SCN10A; (+) strand; PAM type: YTN; PAM sequence: TTA
  source 1..20: mol_type = other DNA
tttttaccttgtataagaca

SEQ ID NO: 62605 - DNA, 20 bp, synthetic construct
  misc_feature 1..20: note = Description of Artificial Sequence: Synthetic oligonucleotide
  misc_feature 1..20: note = Target: SCN10A; (+) strand; PAM type: YTN; PAM sequence: TTT
  source 1..20: mol_type = other DNA
ttaccttgtataagacaatc

SEQ ID NO: 62606 - DNA, 20 bp, synthetic construct
  misc_feature 1..20: note = Description of Artificial Sequence: Synthetic oligonucleotide
  misc_feature 1..20: note = Target: SCN10A; (+) strand; PAM type: YTN; PAM sequence: TTT
  source 1..20: mol_type = other DNA
taccttgtataagacaatcc

SEQ ID NO: 62607 - DNA, 20 bp, synthetic construct
  misc_feature 1..20: note = Description of Artificial Sequence: Synthetic oligonucleotide
  misc_feature 1..20: note = Target: SCN10A; (+) strand; PAM type: YTN; PAM sequence: TTT
  source 1..20: mol_type = other DNA
accttgtataagacaatcct

SEQ ID NO: 62608 - DNA, 20 bp, synthetic construct
  misc_feature 1..20: note = Description of Artificial Sequence: Synthetic oligonucleotide
  misc_feature 1..20: note = Target: SCN10A; (+) strand; PAM type: YTN; PAM sequence: TTA
  source 1..20: mol_type = other DNA
ccttgtataagacaatccta

SEQ ID NO: 62609 - DNA, 20 bp, synthetic construct
  misc_feature 1..20: note = Description of Artificial Sequence: Synthetic oligonucleotide
  misc_feature 1..20: note = Target: SCN10A; (+) strand; PAM type: YTN; PAM sequence: CTT
  source 1..20: mol_type = other DNA
gtataagacaatcctaaacc

SEQ ID NO: 62610 - DNA, 20 bp, synthetic construct
  misc_feature 1..20: note = Description of Artificial Sequence: Synthetic oligonucleotide
  misc_feature 1..20: note = Target: SCN10A; (+) strand; PAM type: YTN; PAM sequence: TTG
  source 1..20: mol_type = other DNA
tataagacaatcctaaacct

SEQ ID NO: 62611 - DNA, 20 bp, synthetic construct
  misc_feature 1..20: note = Description of Artificial Sequence: Synthetic oligonucleotide
  misc_feature 1..20: note = Target: SCN10A; (+) strand; PAM type: YTN; PAM sequence: CTA
  source 1..20: mol_type = other DNA
aacctctaatcttccagctc

SEQ ID NO: 62612 - DNA, 20 bp, synthetic construct
  misc_feature 1..20: note = Description of Artificial Sequence: Synthetic oligonucleotide
  misc_feature 1..20: note = Target: SCN10A; (+) strand; PAM type: YTN; PAM sequence: CTC
  source 1..20: mol_type = other DNA
taatcttccagctcagtctc

SEQ ID NO: 62613 - DNA, 20 bp, synthetic construct
  misc_feature 1..20: note = Description of Artificial Sequence: Synthetic oligonucleotide
  misc_feature 1..20: note = Target: SCN10A; (+) strand; PAM type: YTN; PAM sequence: CTA
  source 1..20: mol_type = other DNA
atcttccagctcagtctctg

SEQ ID NO: 62614 - DNA, 20 bp, synthetic construct
  misc_feature 1..20: note = Description of Artificial Sequence: Synthetic oligonucleotide
  misc_feature 1..20: note = Target: SCN10A; (+) strand; PAM type: YTN; PAM sequence: CTT
  source 1..20: mol_type = other DNA
ccagctcagtctctgtgagg

SEQ ID NO: 62615 - DNA, 20 bp, synthetic construct
  misc_feature 1..20: note = Description of Artificial Sequence: Synthetic oligonucleotide
  misc_feature 1..20: note = Target: SCN10A; (+) strand; PAM type: YTN; PAM sequence: TTC
  source 1..20: mol_type = other DNA
cagctcagtctctgtgaggc

SEQ ID NO: 62616 - DNA, 20 bp, synthetic construct
  misc_feature 1..20: note = Description of Artificial Sequence: Synthetic oligonucleotide
  misc_feature 1..20: note = Target: SCN10A; (+) strand; PAM type: YTN; PAM sequence: CTC
  source 1..20: mol_type = other DNA
agtctctgtgaggctgtcac

SEQ ID NO: 62617 - DNA, 20 bp, synthetic construct
  misc_feature 1..20: note = Description of Artificial Sequence: Synthetic oligonucleotide
  misc_feature 1..20: note = Target: SCN10A; (+) strand; PAM type: YTN; PAM sequence: CTC
  source 1..20: mol_type = other DNA
tgtgaggctgtcacttcact

SEQ ID NO: 62618 - DNA, 20 bp, synthetic construct
  misc_feature 1..20: note = Description of Artificial Sequence: Synthetic oligonucleotide
  misc_feature 1..20: note = Target: SCN10A; (+) strand; PAM type: YTN; PAM sequence: CTG
  source 1..20: mol_type = other DNA
tgaggctgtcacttcactac

SEQ ID NO: 62619 - DNA, 20 bp, synthetic construct
  misc_feature 1..20: note = Description of Artificial Sequence: Synthetic oligonucleotide
  misc_feature 1..20: note = Target: SCN10A; (+) strand; PAM type: YTN; PAM sequence: CTG
  source 1..20: mol_type = other DNA
tcacttcactactcacctat

SEQ ID NO: 62620 - DNA, 20 bp, synthetic construct
  misc_feature 1..20: note = Description of Artificial Sequence: Synthetic oligonucleotide
  misc_feature 1..20: note = Target: SCN10A; (+) strand; PAM type: YTN; PAM sequence: CTT
  source 1..20: mol_type = other DNA
cactactcacctatagagag

SEQ ID NO: 62621 - DNA, 20 bp, synthetic construct
  misc_feature 1..20: note = Description of Artificial Sequence: Synthetic oligonucleotide
  misc_feature 1..20: note = Target: SCN10A; (+) strand; PAM type: YTN; PAM sequence: TTC
  source 1..20: mol_type = other DNA
actactcacctatagagagc

SEQ ID NO: 62622 - DNA, 20 bp, synthetic construct
  misc_feature 1..20: note = Description of Artificial Sequence: Synthetic oligonucleotide
  misc_feature 1..20: note = Target: SCN10A; (+) strand; PAM type: YTN; PAM sequence: CTA
  source 1..20: mol_type = other DNA
ctcacctatagagagcctct

SEQ ID NO: 62623 - DNA, 20 bp, synthetic construct
  misc_feature 1..20: note = Description of Artificial Sequence: Synthetic oligonucleotide
  misc_feature 1..20: note = Target: SCN10A; (+) strand; PAM type: YTN; PAM sequence: CTC
  source 1..20: mol_type = other DNA
acctatagagagcctctccc

SEQ ID NO: 62624 - DNA, 20 bp, synthetic construct
  misc_feature 1..20: note = Description of Artificial Sequence: Synthetic oligonucleotide
  misc_feature 1..20: note = Target: SCN10A; (+) strand; PAM type: YTN; PAM sequence: CTA
  source 1..20: mol_type = other DNA
tagagagcctctccctagcc

SEQ ID NO: 62625 - DNA, 20 bp, synthetic construct
  misc_feature 1..20: note = Description of Artificial Sequence: Synthetic oligonucleotide
  misc_feature 1..20: note = Target: SCN10A; (+) strand; PAM type: YTN; PAM sequence: CTC
  source 1..20: mol_type = other DNA
tccctagccccaggctactt

SEQ ID NO: 62626 - DNA, 20 bp, synthetic construct
  misc_feature 1..20: note = Description of Artificial Sequence: Synthetic oligonucleotide
  misc_feature 1..20: note = Target: SCN10A; (+) strand; PAM type: YTN; PAM sequence: CTC
  source 1..20: mol_type = other DNA
cctagccccaggctactttt

SEQ ID NO: 62627 - DNA, 20 bp, synthetic construct
  misc_feature 1..20: note = Description of Artificial Sequence: Synthetic oligonucleotide
  misc_feature 1..20: note = Target: SCN10A; (+) strand; PAM type: YTN; PAM sequence: CTA
  source 1..20: mol_type = other DNA
gccccaggctacttttgcct

SEQ ID NO: 62628 - DNA, 20 bp, synthetic construct
  misc_feature 1..20: note = Description of Artificial Sequence: Synthetic oligonucleotide
  misc_feature 1..20: note = Target: SCN10A; (+) strand; PAM type: YTN; PAM sequence: CTA
  source 1..20: mol_type = other DNA
cttttgcctagagaaaatga

SEQ ID NO: 62629 - DNA, 20 bp, synthetic construct
  misc_feature 1..20: note = Description of Artificial Sequence: Synthetic oligonucleotide
  misc_feature 1..20: note = Target: SCN10A; (+) strand; PAM type: YTN; PAM sequence: CTT
  source 1..20: mol_type = other DNA
ttgcctagagaaaatgatgt

SEQ ID NO: 62630 - DNA, 20 bp, synthetic construct
  misc_feature 1..20: note = Description of Artificial Sequence: Synthetic oligonucleotide
  misc_feature 1..20: note = Target: SCN10A; (+) strand; PAM type: YTN; PAM sequence: TTT
  source 1..20: mol_type = other DNA
tgcctagagaaaatgatgtg

SEQ ID NO: 62631 - DNA, 20 bp, synthetic construct
  misc_feature 1..20: note = Description of Artificial Sequence: Synthetic oligonucleotide
  misc_feature 1..20: note = Target: SCN10A; (+) strand; PAM type: YTN; PAM sequence: TTT
  source 1..20: mol_type = other DNA
gcctagagaaaatgatgtgg

SEQ ID NO: 62632 - DNA, 20 bp, synthetic construct
  misc_feature 1..20: note = Description of Artificial Sequence: Synthetic oligonucleotide
  misc_feature 1..20: note = Target: SCN10A; (+) strand; PAM type: YTN; PAM sequence: TTG
  source 1..20: mol_type = other DNA
cctagagaaaatgatgtgga

SEQ ID NO: 62633 - DNA, 20 bp, synthetic construct
  misc_feature 1..20: note = Description of Artificial Sequence: Synthetic oligonucleotide
  misc_feature 1..20: note = Target: SCN10A; (+) strand; PAM type: YTN; PAM sequence: CTA
  source 1..20: mol_type = other DNA
gagaaaatgatgtggacaaa

SEQ ID NO: 62634 - DNA, 20 bp, synthetic construct
  misc_feature 1..20: note = Description of Artificial Sequence: Synthetic oligonucleotide
  misc_feature 1..20: note = Target: SCN10A; (+) strand; PAM type: YTN; PAM sequence: CTT
  source 1..20: mol_type = other DNA
cttcatctgtgagcacctcc

SEQ ID NO: 62635 - DNA, 20 bp, synthetic construct
  misc_feature 1..20: note = Description of Artificial Sequence: Synthetic oligonucleotide
  misc_feature 1..20: note = Target: SCN10A; (+) strand; PAM type: YTN; PAM sequence: TTC
  source 1..20: mol_type = other DNA
ttcatctgtgagcacctcca

SEQ ID NO: 62636 - DNA, 20 bp, synthetic construct
  misc_feature 1..20: note = Description of Artificial Sequence: Synthetic oligonucleotide
  misc_feature 1..20: note = Target: SCN10A; (+) strand; PAM type: YTN; PAM sequence: CTT
  source 1..20: mol_type = other DNA
catctgtgagcacctccaac

SEQ ID NO: 62637 - DNA, 20 bp, synthetic construct
  misc_feature 1..20: note = Description of Artificial Sequence: Synthetic oligonucleotide
  misc_feature 1..20: note = Target: SCN10A; (+) strand; PAM type: YTN; PAM sequence: TTC
  source 1..20: mol_type = other DNA
atctgtgagcacctccaact

SEQ ID NO: 62638 - DNA, 20 bp, synthetic construct
  misc_feature 1..20: note = Description of Artificial Sequence: Synthetic oligonucleotide
  misc_feature 1..20: note = Target: SCN10A; (+) strand; PAM type: YTN; PAM sequence: CTG
  source 1..20: mol_type = other DNA
tgagcacctccaactcttat

SEQ ID NO: 62639 - DNA, 20 bp, synthetic construct
  misc_feature 1..20: note = Description of Artificial Sequence: Synthetic oligonucleotide
  misc_feature 1..20: note = Target: SCN10A; (+) strand; PAM type: YTN; PAM sequence: CTC
  source 1..20: mol_type = other DNA
caactcttatttgctggctc

SEQ ID NO: 62640 - DNA, 20 bp, synthetic construct
  misc_feature 1..20: note = Description of Artificial Sequence: Synthetic oligonucleotide
  misc_feature 1..20: note = Target: SCN10A; (+) strand; PAM type: YTN; PAM sequence: CTC
  source 1..20: mol_type = other DNA
ttatttgctggctctgaaag

SEQ ID NO: 62641 - DNA, 20 bp, synthetic construct
  misc_feature 1..20: note = Description of Artificial Sequence: Synthetic oligonucleotide
  misc_feature 1..20: note = Target: SCN10A; (+) strand; PAM type: YTN; PAM sequence: CTT
  source 1..20: mol_type = other DNA
atttgctggctctgaaagat

SEQ ID NO: 62642 - DNA, 20 bp, synthetic construct
  misc_feature 1..20: note = Description of Artificial Sequence: Synthetic oligonucleotide
  misc_feature 1..20: note = Target: SCN10A; (+) strand; PAM type: YTN; PAM sequence: TTA
  source 1..20: mol_type = other DNA
tttgctggctctgaaagata

SEQ ID NO: 62643 - DNA, 20 bp, synthetic construct
  misc_feature 1..20: note = Description of Artificial Sequence: Synthetic oligonucleotide
  misc_feature 1..20: note = Target: SCN10A; (+) strand; PAM type: YTN; PAM sequence: TTT
  source 1..20: mol_type = other DNA
gctggctctgaaagatattt

SEQ ID NO: 62644 - DNA, 20 bp, synthetic construct
  misc_feature 1..20: note = Description of Artificial Sequence: Synthetic oligonucleotide
  misc_feature 1..20: note = Target: SCN10A; (+) strand; PAM type: YTN; PAM sequence: TTG
  source 1..20: mol_type = other DNA
ctggctctgaaagatatttg

SEQ ID NO: 62645 - DNA, 20 bp, synthetic construct
  misc_feature 1..20: note = Description of Artificial Sequence: Synthetic oligonucleotide
  misc_feature 1..20: note = Target: SCN10A; (+) strand; PAM type: YTN; PAM sequence: CTG
  source 1..20: mol_type = other DNA
gctctgaaagatatttgact

SEQ ID NO: 62646 - DNA, 20 bp, synthetic construct
  misc_feature 1..20: note = Description of Artificial Sequence: Synthetic oligonucleotide
  misc_feature 1..20: note = Target: SCN10A; (+) strand; PAM type: YTN; PAM sequence: CTC
  source 1..20: mol_type = other DNA
tgaaagatatttgactttct

SEQ ID NO: 62647 - DNA, 20 bp, synthetic construct
  misc_feature 1..20: note = Description of Artificial Sequence: Synthetic oligonucleotide
  misc_feature 1..20: note = Target: SCN10A; (+) strand; PAM type: YTN; PAM sequence: CTG
  source 1..20: mol_type = other DNA
aaagatatttgactttcttt

SEQ ID NO: 62648 - DNA, 20 bp, synthetic construct
  misc_feature 1..20: note = Description of Artificial Sequence: Synthetic oligonucleotide
  misc_feature 1..20: note = Target: SCN10A; (+) strand; PAM type: YTN; PAM sequence: TTT
  source 1..20: mol_type = other DNA
gactttctttgtgcgttgtc

SEQ ID NO: 62649 - DNA, 20 bp, synthetic construct
  misc_feature 1..20: note = Description of Artificial Sequence: Synthetic oligonucleotide
  misc_feature 1..20: note = Target: SCN10A; (+) strand; PAM type: YTN; PAM sequence: TTG
  source 1..20: mol_type = other DNA
actttctttgtgcgttgtct

SEQ ID NO: 62650 - DNA, 20 bp, synthetic construct
  misc_feature 1..20: note = Description of Artificial Sequence: Synthetic oligonucleotide
  misc_feature 1..20: note = Target: SCN10A; (+) strand; PAM type: YTN; PAM sequence: CTT
  source 1..20: mol_type = other DNA
tctttgtgcgttgtctttcg

SEQ ID NO: 62651 - DNA, 20 bp, synthetic construct
  misc_feature 1..20: note = Description of Artificial Sequence: Synthetic oligonucleotide
  misc_feature 1..20: note = Target: SCN10A; (+) strand; PAM type: YTN; PAM sequence: TTT
  source 1..20: mol_type = other DNA
ctttgtgcgttgtctttcgt

SEQ ID NO: 62652 - DNA, 20 bp, synthetic construct
  misc_feature 1..20: note = Description of Artificial Sequence: Synthetic oligonucleotide
  misc_feature 1..20: note = Target: SCN10A; (+) strand; PAM type: YTN; PAM sequence: TTC
  source 1..20: mol_type = other DNA
tttgtgcgttgtctttcgtt

SEQ ID NO: 62653 - DNA, 20 bp, synthetic construct
  misc_feature 1..20: note = Description of Artificial Sequence: Synthetic oligonucleotide
  misc_feature 1..20: note = Target: SCN10A; (+) strand; PAM type: YTN; PAM sequence: CTT
  source 1..20: mol_type = other DNA
tgtgcgttgtctttcgtttc

SEQ ID NO: 62654 - DNA, 20 bp, synthetic construct
  misc_feature 1..20: note = Description of Artificial Sequence: Synthetic oligonucleotide
  misc_feature 1..20: note = Target: SCN10A; (+) strand; PAM type: YTN; PAM sequence: TTT
  source 1..20: mol_type = other DNA
gtgcgttgtctttcgtttcc

SEQ ID NO: 62655 - DNA, 20 bp, synthetic construct
  misc_feature 1..20: note = Description of Artificial Sequence: Synthetic oligonucleotide
  misc_feature 1..20: note = Target: SCN10A; (+) strand; PAM type: YTN; PAM sequence: TTG
  source 1..20: mol_type = other DNA
tgcgttgtctttcgtttcct

SEQ ID NO: 62656 - DNA, 20 bp, synthetic construct
  misc_feature 1..20: note = Description of Artificial Sequence: Synthetic oligonucleotide
  misc_feature 1..20: note = Target: SCN10A; (+) strand; PAM type: YTN; PAM sequence: TTG
  source 1..20: mol_type = other DNA
tctttcgtttccttttttct

SEQ ID NO: 62657 - DNA, 20 bp, synthetic construct
  misc_feature 1..20: note = Description of Artificial Sequence: Synthetic oligonucleotide
  misc_feature 1..20: note = Target: SCN10A; (+) strand; PAM type: YTN; PAM sequence: CTT
  source 1..20: mol_type = other DNA
tcgtttccttttttcttggc

SEQ ID NO: 62658 - DNA, 20 bp, synthetic construct
  misc_feature 1..20: note = Description of Artificial Sequence: Synthetic oligonucleotide
  misc_feature 1..20: note = Target: SCN10A; (+) strand; PAM type: YTN; PAM sequence: TTT
  source 1..20: mol_type = other DNA
cgtttccttttttcttggct

SEQ ID NO: 62659 - DNA, 20 bp, synthetic construct
  misc_feature 1..20: note = Description of Artificial Sequence: Synthetic oligonucleotide
  misc_feature 1..20: note = Target: SCN10A; (+) strand; PAM type: YTN; PAM sequence: TTC
  source 1..20: mol_type = other DNA
gtttccttttttcttggctg

SEQ ID NO: 62660 - DNA, 20 bp, synthetic construct
  misc_feature 1..20: note = Description of Artificial Sequence: Synthetic oligonucleotide
  misc_feature 1..20: note = Target: SCN10A; (+) strand; PAM type: YTN; PAM sequence: TTT
  source 1..20: mol_type = other DNA
ccttttttcttggctgtcat

SEQ ID NO: 62661 - DNA, 20 bp, synthetic construct
  misc_feature 1..20: note = Description of Artificial Sequence: Synthetic oligonucleotide
  misc_feature 1..20: note = Target: SCN10A; (+) strand; PAM type: YTN; PAM sequence: TTC
  source 1..20: mol_type = other DNA
cttttttcttggctgtcatt

SEQ ID NO: 62662 - DNA, 20 bp, synthetic construct
  misc_feature 1..20: note = Description of Artificial Sequence: Synthetic oligonucleotide
  misc_feature 1..20: note = Target: SCN10A; (+) strand; PAM type: YTN; PAM sequence: CTT
  source 1..20: mol_type = other DNA
ttttcttggctgtcatttcc

SEQ ID NO: 62663 - DNA, 20 bp, synthetic construct
  misc_feature 1..20: note = Description of Artificial Sequence: Synthetic oligonucleotide
  misc_feature 1..20: note = Target: SCN10A; (+) strand; PAM type: YTN; PAM sequence: TTT
  source 1..20: mol_type = other DNA
tttcttggctgtcatttcct

SEQ ID NO: 62664 - DNA, 20 bp, synthetic construct
  misc_feature 1..20: note = Description of Artificial Sequence: Synthetic oligonucleotide
  misc_feature 1..20: note = Target: SCN10A; (+) strand; PAM type: YTN; PAM sequence: TTT
  source 1..20: mol_type = other DNA
ttcttggctgtcatttcctg

SEQ ID NO: 62665 - DNA, 20 bp, synthetic construct
  misc_feature 1..20: note = Description of Artificial Sequence: Synthetic oligonucleotide
  misc_feature 1..20: note = Target: SCN10A; (+) strand; PAM type: YTN; PAM sequence: TTT
  source 1..20: mol_type = other DNA
tcttggctgtcatttcctgg

SEQ ID NO: 62666 - DNA, 20 bp, synthetic construct
  misc_feature 1..20: note = Description of Artificial Sequence: Synthetic oligonucleotide
  misc_feature 1..20: note = Target: SCN10A; (+) strand; PAM type: YTN; PAM sequence: TTT
  source 1..20: mol_type = other DNA
cttggctgtcatttcctggg

SEQ ID NO: 62667 - DNA, 20 bp, synthetic construct
  misc_feature 1..20: note = Description of Artificial Sequence: Synthetic oligonucleotide
  misc_feature 1..20: note = Target: SCN10A; (+) strand; PAM type: YTN; PAM sequence: TTC
  source 1..20: mol_type = other DNA
ttggctgtcatttcctgggc

SEQ ID NO: 62668 - DNA, 20 bp, synthetic construct
  misc_feature 1..20: note = Description of Artificial Sequence: Synthetic oligonucleotide
  misc_feature 1..20: note = Target: SCN10A; (+) strand; PAM type: YTN; PAM sequence: CTT
  source 1..20: mol_type = other DNA
ggctgtcatttcctgggcac

SEQ ID NO: 62669 - DNA, 20 bp, synthetic construct
  misc_feature 1..20: note = Description of Artificial Sequence: Synthetic oligonucleotide
  misc_feature 1..20: note = Target: SCN10A; (+) strand; PAM type: YTN; PAM sequence: TTG
  source 1..20: mol_type = other DNA
gctgtcatttcctgggcact

SEQ ID NO: 62670 - DNA, 20 bp, synthetic construct
  misc_feature 1..20: note = Description of Artificial Sequence: Synthetic oligonucleotide
  misc_feature 1..20: note = Target: SCN10A; (+) strand; PAM type: YTN; PAM sequence: CTG
  source 1..20: mol_type = other DNA
tcatttcctgggcacttact

SEQ ID NO: 62671 - DNA, 20 bp, synthetic construct
  misc_feature 1..20: note = Description of Artificial Sequence: Synthetic oligonucleotide
  misc_feature 1..20: note = Target: SCN10A; (+) strand; PAM type: YTN; PAM sequence: TTT
  source 1..20: mol_type = other DNA
cctgggcacttactttgtct

SEQ ID NO: 62672 - DNA, 20 bp, synthetic construct
  misc_feature 1..20: note = Description of Artificial Sequence: Synthetic oligonucleotide
  misc_feature 1..20: note = Target: SCN10A; (+) strand; PAM type: YTN; PAM sequence: TTC
  source 1..20: mol_type = other DNA
ctgggcacttactttgtctc

SEQ ID NO: 62673 - DNA, 20 bp, synthetic construct
  misc_feature 1..20: note = Description of Artificial Sequence: Synthetic oligonucleotide
  misc_feature 1..20: note = Target: SCN10A; (+) strand; PAM type: YTN; PAM sequence: CTG
  source 1..20: mol_type = other DNA
ggcacttactttgtctcagg

SEQ ID NO: 62674 - DNA, 20 bp, synthetic construct
  misc_feature 1..20: note = Description of Artificial Sequence: Synthetic oligonucleotide
  misc_feature 1..20: note = Target: SCN10A; (+) strand; PAM type: YTN; PAM sequence: CTT
  source 1..20: mol_type = other DNA
actttgtctcaggcaggacc

SEQ ID NO: 62675 - DNA, 20 bp, synthetic construct
  misc_feature 1..20: note = Description of Artificial Sequence: Synthetic oligonucleotide
  misc_feature 1..20: note = Target: SCN10A; (+) strand; PAM type: YTN; PAM sequence: TTA
  source 1..20: mol_type = other DNA
ctttgtctcaggcaggacct

SEQ ID NO: 62676 - DNA, 20 bp, synthetic construct
  misc_feature 1..20: note = Description of Artificial Sequence: Synthetic oligonucleotide
  misc_feature 1..20: note = Target: SCN10A; (+) strand; PAM type: YTN; PAM sequence: CTT
  source 1..20: mol_type = other DNA
tgtctcaggcaggacctaaa

SEQ ID NO: 62677 - DNA, 20 bp, synthetic construct
  misc_feature 1..20: note = Description of Artificial Sequence: Synthetic oligonucleotide
  misc_feature 1..20: note = Target: SCN10A; (+) strand; PAM type: YTN; PAM sequence: TTT
  source 1..20: mol_type = other DNA
gtctcaggcaggacctaaac

SEQ ID NO: 62678 - DNA, 20 bp, synthetic construct
  misc_feature 1..20: note = Description of Artificial Sequence: Synthetic oligonucleotide
  misc_feature 1..20: note = Target: SCN10A; (+) strand; PAM type: YTN; PAM sequence: TTG
  source 1..20: mol_type = other DNA
tctcaggcaggacctaaaca

SEQ ID NO: 62679 - DNA, 20 bp, synthetic construct
  misc_feature 1..20: note = Description of Artificial Sequence: Synthetic oligonucleotide
  misc_feature 1..20: note = Target: SCN10A; (+) strand; PAM type: YTN; PAM sequence: CTC
  source 1..20: mol_type = other DNA
aggcaggacctaaacatttg

SEQ ID NO: 62680 - DNA, 20 bp, synthetic construct
  misc_feature 1..20: note = Description of Artificial Sequence: Synthetic oligonucleotide
  misc_feature 1..20: note = Target: SCN10A; (+) strand; PAM type: YTN; PAM sequence: CTA
  source 1..20: mol_type = other DNA
aacatttgacaagcagcatc

SEQ ID NO: 62681 - DNA, 20 bp, synthetic construct
  misc_feature 1..20: note = Description of Artificial Sequence: Synthetic oligonucleotide
  misc_feature 1..20: note = Target: SCN10A; (+) strand; PAM type: YTN; PAM sequence: TTT
  source 1..20: mol_type = other DNA
gacaagcagcatctcattta

SEQ ID NO: 62682 - DNA, 20 bp, synthetic construct
  misc_feature 1..20: note = Description of Artificial Sequence: Synthetic oligonucleotide
  misc_feature 1..20: note = Target: SCN10A; (+) strand; PAM type: YTN; PAM sequence: TTG
  source 1..20: mol_type = other DNA
acaagcagcatctcatttaa

SEQ ID NO: 62683 - DNA, 20 bp, synthetic construct
  misc_feature 1..20: note = Description of Artificial Sequence: Synthetic oligonucleotide
  misc_feature 1..20: note = Target: SCN10A; (+) strand; PAM type: YTN; PAM sequence: CTC
  source 1..20: mol_type = other DNA
atttaagcttcaaaataatc

SEQ ID NO: 62684 - DNA, 20 bp, synthetic construct
  misc_feature 1..20: note = Description of Artificial Sequence: Synthetic oligonucleotide
  misc_feature 1..20: note = Target: SCN10A; (+) strand; PAM type: YTN; PAM sequence: TTT
  source 1..20: mol_type = other DNA
aagcttcaaaataatcctac

SEQ ID NO: 62685 - DNA, 20 bp, synthetic construct
  misc_feature 1..20: note = Description of Artificial Sequence: Synthetic oligonucleotide
  misc_feature 1..20: note = Target: SCN10A; (+) strand; PAM type: YTN; PAM sequence: TTA
  source 1..20: mol_type = other DNA
agcttcaaaataatcctacc

SEQ ID NO: 62686 - DNA, 20 bp, synthetic construct
  misc_feature 1..20: note = Description of Artificial Sequence: Synthetic oligonucleotide
  misc_feature 1..20: note = Target: SCN10A; (+) strand; PAM type: YTN; PAM sequence: CTT
  source 1..20: mol_type = other DNA
caaaataatcctaccaagta

SEQ ID NO: 62687 - DNA, 20 bp, synthetic construct
  misc_feature 1..20: note = Description of Artificial Sequence: Synthetic oligonucleotide
  misc_feature 1..20: note = Target: SCN10A; (+) strand; PAM type: YTN; PAM sequence: TTC
  source 1..20: mol_type = other DNA
aaaataatcctaccaagtag

SEQ ID NO: 62688 - DNA, 20 bp, synthetic construct
  misc_feature 1..20: note = Description of Artificial Sequence: Synthetic oligonucleotide
  misc_feature 1..20: note = Target: SCN10A; (+) strand; PAM type: YTN; PAM sequence: CTA
  source 1..20: mol_type = other DNA
ccaagtaggcattaccattc

SEQ ID NO: 62689 - DNA, 20 bp, synthetic construct
  misc_feature 1..20: note = Description of Artificial Sequence: Synthetic oligonucleotide
  misc_feature 1..20: note = Target: SCN10A; (+) strand; PAM type: YTN; PAM sequence: TTA
  source 1..20: mol_type = other DNA
ccattcagtttcatagatga

SEQ ID NO: 62690 - DNA, 20 bp, synthetic construct
  misc_feature 1..20: note = Description of Artificial Sequence: Synthetic oligonucleotide
  misc_feature 1..20: note = Target: SCN10A; (+) strand; PAM type: YTN; PAM sequence: TTC
  source 1..20: mol_type = other DNA
agtttcatagatgaataaat

SEQ ID NO: 62691 - DNA, 20 bp, synthetic construct
  misc_feature 1..20: note = Description of Artificial Sequence: Synthetic oligonucleotide
  misc_feature 1..20: note = Target: SCN10A; (+) strand; PAM type: YTN; PAM sequence: TTT
  source 1..20: mol_type = other DNA
catagatgaataaatggcgg

SEQ ID NO: 62692 - DNA, 20 bp, synthetic construct
  misc_feature 1..20: note = Description of Artificial Sequence: Synthetic oligonucleotide
  misc_feature 1..20: note = Target: SCN10A; (+) strand; PAM type: YTN; PAM sequence: TTC
  source 1..20: mol_type = other DNA
atagatgaataaatggcggc

SEQ ID NO: 62693 - DNA, 20 bp, synthetic construct
  misc_feature 1..20: note = Description of Artificial Sequence: Synthetic oligonucleotide
  misc_feature 1..20: note = Target: SCN10A; (+) strand; PAM type: YTN; PAM sequence: CTC
  source 1..20: mol_type = other DNA
agagaggtttgggaactgat

SEQ ID NO: 62694 - DNA, 20 bp, synthetic construct
  misc_feature 1..20: note = Description of Artificial Sequence: Synthetic oligonucleotide
  misc_feature 1..20: note = Target: SCN10A; (+) strand; PAM type: YTN; PAM sequence: TTT
  source 1..20: mol_type = other DNA
gggaactgatcttaggtccc

SEQ ID NO: 62695 - DNA, 20 bp, synthetic construct
  misc_feature 1..20: note = Description of Artificial Sequence: Synthetic oligonucleotide
  misc_feature 1..20: note = Target: SCN10A; (+) strand; PAM type: YTN; PAM sequence: TTG
  source 1..20: mol_type = other DNA
ggaactgatcttaggtccca

SEQ ID NO: 62696 - DNA, 20 bp, synthetic construct
  misc_feature 1..20: note = Description of Artificial Sequence: Synthetic oligonucleotide
  misc_feature 1..20: note = Target: SCN10A; (+) strand; PAM type: YTN; PAM sequence: CTG
  source 1..20: mol_type = other DNA
atcttaggtcccacagcttg

SEQ ID NO: 62697 - DNA, 20 bp, synthetic construct
  misc_feature 1..20: note = Description of Artificial Sequence: Synthetic oligonucleotide
  misc_feature 1..20: note = Target: SCN10A; (+) strand; PAM type: YTN; PAM sequence: CTT
  source 1..20: mol_type = other DNA
aggtcccacagcttgtggag

SEQ ID NO: 62698 - DNA, 20 bp, synthetic construct
  misc_feature 1..20: note = Description of Artificial Sequence: Synthetic oligonucleotide
  misc_feature 1..20: note = Target: SCN10A; (+) strand; PAM type: YTN; PAM sequence: TTA
  source 1..20: mol_type = other DNA
ggtcccacagcttgtggagt

SEQ ID NO: 62699 - DNA, 20 bp, synthetic construct
  misc_feature 1..20: note = Description of Artificial Sequence: Synthetic oligonucleotide
  misc_feature 1..20: note = Target: SCN10A; (+) strand; PAM type: YTN; PAM sequence: CTT
  source 1..20: mol_type = other DNA
gtggagtctcactctttctt

SEQ ID NO: 62700 - DNA, 20 bp, synthetic construct
  misc_feature 1..20: note = Description of Artificial Sequence: Synthetic oligonucleotide
  misc_feature 1..20: note = Target: SCN10A; (+) strand; PAM type: YTN; PAM sequence: TTG
  source 1..20: mol_type = other DNA
tggagtctcactctttcttt

SEQ ID NO: 62701 - DNA, 20 bp, synthetic construct
  misc_feature 1..20: note = Description of Artificial Sequence: Synthetic oligonucleotide
  misc_feature 1..20: note = Target: SCN10A; (+) strand; PAM type: YTN; PAM sequence: CTC
  source 1..20: mol_type = other DNA
actctttctttctataccta

SEQ ID NO: 62702 - DNA, 20 bp, synthetic construct
  misc_feature 1..20: note = Description of Artificial Sequence: Synthetic oligonucleotide
  misc_feature 1..20: note = Target: SCN10A; (+) strand; PAM type: YTN; PAM sequence: CTC
  source 1..20: mol_type = other DNA
tttctttctatacctagaac

SEQ ID NO: 62703 - DNA, 20 bp, synthetic construct
  misc_feature 1..20: note = Description of Artificial Sequence: Synthetic oligonucleotide
  misc_feature 1..20: note = Target: SCN10A; (+) strand; PAM type: YTN; PAM sequence: CTT
  source 1..20: mol_type = other DNA
tctttctatacctagaacca

SEQ ID NO: 62704 - DNA, 20 bp, synthetic construct
  misc_feature 1..20: note = Description of Artificial Sequence: Synthetic oligonucleotide
  misc_feature 1..20: note = Target: SCN10A; (+) strand; PAM type: YTN; PAM sequence: TTT
  source 1..20: mol_type = other DNA
ctttctatacctagaaccac

SEQ ID NO: 62705 - DNA, 20 bp, synthetic construct
  misc_feature 1..20: note = Description of Artificial Sequence: Synthetic oligonucleotide
  misc_feature 1..20: note = Target: SCN10A; (+) strand; PAM type: YTN; PAM sequence: TTC
  source 1..20: mol_type = other DNA
tttctatacctagaaccacc

SEQ ID NO: 62706 - DNA, 20 bp, synthetic construct
  misc_feature 1..20: note = Description of Artificial Sequence: Synthetic oligonucleotide
  misc_feature 1..20: note = Target: SCN10A; (+) strand; PAM type: YTN; PAM sequence: CTT
  source 1..20: mol_type = other DNA
tctatacctagaaccaccct

SEQ ID NO: 62707 - DNA, 20 bp, synthetic construct
  misc_feature 1..20: note = Description of Artificial Sequence: Synthetic oligonucleotide
  misc_feature 1..20: note = Target: SCN10A; (+) strand; PAM type: YTN; PAM sequence: TTT
  source 1..20: mol_type = other DNA
ctatacctagaaccaccctg

SEQ ID NO: 62708 - DNA, 20 bp, synthetic construct
  misc_feature 1..20: note = Description of Artificial Sequence: Synthetic oligonucleotide
  misc_feature 1..20: note = Target: SCN10A; (+) strand; PAM type: YTN; PAM sequence: TTC
  source 1..20: mol_type = other DNA
tatacctagaaccaccctgg

SEQ ID NO: 62709 - DNA, 20 bp, synthetic construct
  misc_feature 1..20: note = Description of Artificial Sequence: Synthetic oligonucleotide
  misc_feature 1..20: note = Target: SCN10A; (+) strand; PAM type: YTN; PAM sequence: CTA
  source 1..20: mol_type = other DNA
tacctagaaccaccctggag

SEQ ID NO: 62710 - DNA, 20 bp, synthetic construct
  misc_feature 1..20: note = Description of Artificial Sequence: Synthetic oligonucleotide
  misc_feature 1..20: note = Target: SCN10A; (+) strand; PAM type: YTN; PAM sequence: CTA
  source 1..20: mol_type = other DNA
gaaccaccctggagtgagat

SEQ ID NO: 62711 - DNA, 20 bp, synthetic construct
  misc_feature 1..20: note = Description of Artificial Sequence: Synthetic oligonucleotide
  misc_feature 1..20: note = Target: SCN10A; (+) strand; PAM type: YTN; PAM sequence: CTG
  source 1..20: mol_type = other DNA
gagtgagattgtggcaatgg

SEQ ID NO: 62712 - DNA, 20 bp, synthetic construct
  misc_feature 1..20: note = Description of Artificial Sequence: Synthetic oligonucleotide
  misc_feature 1..20: note = Target: SCN10A; (+) strand; PAM type: YTN; PAM sequence: TTG
  source 1..20: mol_type = other DNA
tggcaatggtatatggtgaa

SEQ ID NO: 62713 - DNA, 20 bp, synthetic construct
  misc_feature 1..20: note = Description of Artificial Sequence: Synthetic oligonucleotide
  misc_feature 1..20: note = Target: SCN10A; (+) strand; PAM type: YTN; PAM sequence: TTG
  source 1..20: mol_type = other DNA
aaattgtgcggattagccgg

SEQ ID NO: 62714 - DNA, 20 bp, synthetic construct
  misc_feature 1..20: note = Description of Artificial Sequence: Synthetic oligonucleotide
  misc_feature 1..20: note = Target: SCN10A; (+) strand; PAM type: YTN; PAM sequence: TTG
  source 1..20: mol_type = other DNA
tgcggattagccggaggttg

SEQ ID NO: 62715 - DNA, 20 bp, synthetic construct
  misc_feature 1..20: note = Description of Artificial Sequence: Synthetic oligonucleotide
  misc_feature 1..20: note = Target: SCN10A; (+) strand; PAM type: YTN; PAM sequence: TTA
  source 1..20: mol_type = other DNA
gccggaggttgggagggact

SEQ ID NO: 62716 - DNA, 20 bp, synthetic construct
  misc_feature 1..20: note = Description of Artificial Sequence: Synthetic oligonucleotide
  misc_feature 1..20: note = Target: SCN10A; (+) strand; PAM type: YTN; PAM sequence: TTG
  source 1..20: mol_type = other DNA
ggagggactttaaaaattcc

SEQ ID NO: 62717 - DNA, 20 bp, synthetic construct
  misc_feature 1..20: note = Description of Artificial Sequence: Synthetic oligonucleotide
  misc_feature 1..20: note = Target: SCN10A; (+) strand; PAM type: YTN; PAM sequence: CTT
  source 1..20: mol_type = other DNA
taaaaattcccaggataaga

SEQ ID NO: 62718 - DNA, 20 bp, synthetic construct
  misc_feature 1..20: note = Description of Artificial Sequence: Synthetic oligonucleotide
  misc_feature 1..20: note = Target: SCN10A; (+) strand; PAM type: YTN; PAM sequence: TTT
  source 1..20: mol_type = other DNA
aaaaattcccaggataagaa

SEQ ID NO: 62719 - DNA, 20 bp, synthetic construct
  misc_feature 1..20: note = Description of Artificial Sequence: Synthetic oligonucleotide
  misc_feature 1..20: note = Target: SCN10A; (+) strand; PAM type: YTN; PAM sequence: TTA
  source 1..20: mol_type = other DNA
aaaattcccaggataagaaa

SEQ ID NO: 62720 - DNA, 20 bp, synthetic construct
  misc_feature 1..20: note = Description of Artificial Sequence: Synthetic oligonucleotide
  misc_feature 1..20: note = Target: SCN10A; (+) strand; PAM type: YTN; PAM sequence: TTC
  source 1..20: mol_type = other DNA
ccaggataagaaatgaggtt

SEQ ID NO: 62721 - DNA, 20 bp, synthetic construct
  misc_feature 1..20: note = Description of Artificial Sequence: Synthetic oligonucleotide
  misc_feature 1..20: note = Target: SCN10A; (+) strand; PAM type: YTN; PAM sequence: TTA
  source 1..20: mol_type = other DNA
tgtgattgagtgcagtctgg

SEQ ID NO: 62722 - DNA, 20 bp, synthetic construct
  misc_feature 1..20: note = Description of Artificial Sequence: Synthetic oligonucleotide
  misc_feature 1..20: note = Target: SCN10A; (+) strand; PAM type: YTN; PAM sequence: TTG
  source 1..20: mol_type = other DNA
agtgcagtctggaatacccc

SEQ ID NO: 62723 - DNA, 20 bp, synthetic construct
  misc_feature 1..20: note = Description of Artificial Sequence: Synthetic oligonucleotide
  misc_feature 1..20: note = Target: SCN10A; (+) strand; PAM type: YTN; PAM sequence: CTG
  source 1..20: mol_type = other DNA
gaataccccaccttcaccgc

SEQ ID NO: 62724 - DNA, 20 bp, synthetic construct
  misc_feature 1..20: note = Description of Artificial Sequence: Synthetic oligonucleotide
  misc_feature 1..20: note = Target: SCN10A; (+) strand; PAM type: YTN; PAM sequence: CTT
  source 1..20: mol_type = other DNA
caccgccaccctccagcctc

SEQ ID NO: 62725 - DNA, 20 bp, synthetic construct
  misc_feature 1..20: note = Description of Artificial Sequence: Synthetic oligonucleotide
  misc_feature 1..20: note = Target: SCN10A; (+) strand; PAM type: YTN; PAM sequence: TTC
  source 1..20: mol_type = other DNA
accgccaccctccagcctct

SEQ ID NO: 62726 - DNA, 20 bp, synthetic construct
  misc_feature 1..20: note = Description of Artificial Sequence: Synthetic oligonucleotide
  misc_feature 1..20: note = Target: SCN10A; (+) strand; PAM type: YTN; PAM sequence: CTC
  source 1..20: mol_type = other DNA
cagcctctaccagcccactg

SEQ ID NO: 62727 - DNA, 20 bp, synthetic construct
  misc_feature 1..20: note = Description of Artificial Sequence: Synthetic oligonucleotide
  misc_feature 1..20: note = Target: SCN10A; (+) strand; PAM type: YTN; PAM sequence: CTC
  source 1..20: mol_type = other DNA
taccagcccactgctcagtg

SEQ ID NO: 62728 - DNA, 20 bp, synthetic construct
  misc_feature 1..20: note = Description of Artificial Sequence: Synthetic oligonucleotide
  misc_feature 1..20: note = Target: SCN10A; (+) strand; PAM type: YTN; PAM sequence: CTA
  source 1..20: mol_type = other DNA
ccagcccactgctcagtgtc

SEQ ID NO: 62729 - DNA, 20 bp, synthetic construct
  misc_feature 1..20: note = Description of Artificial Sequence: Synthetic oligonucleotide
  misc_feature 1..20: note = Target: SCN10A; (+) strand; PAM type: YTN; PAM sequence: CTG
  source 1..20: mol_type = other DNA
ctcagtgtctggctggctgt

SEQ ID NO: 62730 - DNA, 20 bp, synthetic construct
  misc_feature 1..20: note = Description of Artificial Sequence: Synthetic oligonucleotide
  misc_feature 1..20: note = Target: SCN10A; (+) strand; PAM type: YTN; PAM sequence: CTC
  source 1..20: mol_type = other DNA
agtgtctggctggctgtcca

SEQ ID NO: 62731 - DNA, 20 bp, synthetic construct
  misc_feature 1..20: note = Description of Artificial Sequence: Synthetic oligonucleotide
  misc_feature 1..20: note = Target: SCN10A; (+) strand; PAM type: YTN; PAM sequence: CTG
  source 1..20: mol_type = other DNA
gctggctgtccaacctctcc

SEQ ID NO: 62732 - DNA, 20 bp, synthetic construct
  misc_feature 1..20: note = Description of Artificial Sequence: Synthetic oligonucleotide
  misc_feature 1..20: note = Target: SCN10A; (+) strand; PAM type: YTN; PAM sequence: CTG
  source 1..20: mol_type = other DNA
gctgtccaacctctccagga

SEQ ID NO: 62733 - DNA, 20 bp, synthetic construct
  misc_feature 1..20: note = Description of Artificial Sequence: Synthetic oligonucleotide
  misc_feature 1..20: note = Target: SCN10A; (+) strand; PAM type: YTN; PAM sequence: CTG
  source 1..20: mol_type = other DNA
tccaacctctccaggaagct

SEQ ID NO: 62734 - DNA, 20 bp, synthetic construct
  misc_feature 1..20: note = Description of Artificial Sequence: Synthetic oligonucleotide
  misc_feature 1..20: note = Target: SCN10A; (+) strand; PAM type: YTN; PAM sequence: CTC
  source 1..20: mol_type = other DNA
tccaggaagctgacatacct

SEQ ID NO: 62735 - DNA, 20 bp, synthetic construct
  misc_feature 1..20: note = Description of Artificial Sequence: Synthetic oligonucleotide
  misc_feature 1..20: note = Target: SCN10A; (+) strand; PAM type: YTN; PAM sequence: CTC
  source 1..20: mol_type = other DNA
caggaagctgacatacctac

SEQ ID NO: 62736 - DNA, 20 bp, synthetic construct
  misc_feature 1..20: note = Description of Artificial Sequence: Synthetic oligonucleotide
  misc_feature 1..20: note = Target: SCN10A; (+) strand; PAM type: YTN; PAM sequence: CTG
  source 1..20: mol_type = other DNA
acatacctacctcagcaggg

SEQ ID NO: 62737 - DNA, 20 bp, synthetic construct
  misc_feature 1..20: note = Description of Artificial Sequence: Synthetic oligonucleotide
  misc_feature 1..20: note = Target: SCN10A; (+) strand; PAM type: YTN; PAM sequence: CTA
  source 1..20: mol_type = other DNA
cctcagcagggacctgagga

SEQ ID NO: 62738 - DNA, 20 bp, synthetic construct
  misc_feature 1..20: note = Description of Artificial Sequence: Synthetic oligonucleotide
  misc_feature 1..20: note = Target: SCN10A; (+) strand; PAM type: YTN; PAM sequence: CTC
  source 1..20: mol_type = other DNA
agcagggacctgaggaacag

SEQ ID NO: 62739 - DNA, 20 bp, synthetic construct
  misc_feature 1..20: note = Description of Artificial Sequence: Synthetic oligonucleotide
  misc_feature 1..20: note = Target: SCN10A; (+) strand; PAM type: YTN; PAM sequence: CTG
  source 1..20: mol_type = other DNA
aggaacagactcatctttcc

SEQ ID NO: 62740 - DNA, 20 bp, synthetic construct
  misc_feature 1..20: note = Description of Artificial Sequence: Synthetic oligonucleotide
  misc_feature 1..20: note = Target: SCN10A; (+) strand; PAM type: YTN; PAM sequence: CTC
  source 1..20: mol_type = other DNA
atctttccacgtctcaccca

SEQ ID NO: 62741 - DNA, 20 bp, synthetic construct
  misc_feature 1..20: note = Description of Artificial Sequence: Synthetic oligonucleotide
  misc_feature 1..20: note = Target: SCN10A; (+) strand; PAM type: YTN; PAM sequence: CTT
  source 1..20: mol_type = other DNA
tccacgtctcacccagggat

SEQ ID NO: 62742 - DNA, 20 bp, synthetic construct
  misc_feature 1..20: note = Description of Artificial Sequence: Synthetic oligonucleotide
  misc_feature 1..20: note = Target: SCN10A; (+) strand; PAM type: YTN; PAM sequence: TTT
  source 1..20: mol_type = other DNA
ccacgtctcacccagggatg

SEQ ID NO: 62743 - DNA, 20 bp, synthetic construct
  misc_feature 1..20: note = Description of Artificial Sequence: Synthetic oligonucleotide
  misc_feature 1..20: note = Target: SCN10A; (+) strand; PAM type: YTN; PAM sequence: TTC
  source 1..20: mol_type = other DNA
cacgtctcacccagggatgg

SEQ ID NO: 62744 - DNA, 20 bp, synthetic construct
  misc_feature 1..20: note = Description of Artificial Sequence: Synthetic oligonucleotide
  misc_feature 1..20: note = Target: SCN10A; (+) strand; PAM type: YTN; PAM sequence: CTC
  source 1..20: mol_type = other DNA
acccagggatggagccaggt

SEQ ID NO: 62745 - DNA, 20 bp, synthetic construct
  misc_feature 1..20: note = Description of Artificial Sequence: Synthetic oligonucleotide
  misc_feature 1..20: note = Target: SCN10A; (+) strand; PAM type: YTN; PAM sequence: CTC
  source 1..20: mol_type = other DNA
agaagatgttccagtgcctg

SEQ ID NO: 62746 - DNA, 20 bp, synthetic construct
  misc_feature 1..20: note = Description of Artificial Sequence: Synthetic oligonucleotide
  misc_feature 1..20: note = Target: SCN10A; (+) strand; PAM type: YTN; PAM sequence: TTC
  source 1..20: mol_type = other DNA
cagtgcctgggctcctgggt

SEQ ID NO: 62747 - DNA, 20 bp, synthetic construct
  misc_feature 1..20: note = Description of Artificial Sequence: Synthetic oligonucleotide
  misc_feature 1..20: note = Target: SCN10A; (+) strand; PAM type: YTN; PAM sequence: CTG
  source 1..20: mol_type = other DNA
ggctcctgggtgtcaggtgg

SEQ ID NO: 62748 - DNA, 20 bp, synthetic construct
  misc_feature 1..20: note = Description of Artificial Sequence: Synthetic oligonucleotide
  misc_feature 1..20: note = Target: SCN10A; (+) strand; PAM type: YTN; PAM sequence: CTC
  source 1..20: mol_type = other DNA
ctgggtgtcaggtggtcccc

SEQ ID NO: 62749 - DNA, 20 bp, synthetic construct
  misc_feature 1..20: note = Description of Artificial Sequence: Synthetic oligonucleotide
  misc_feature 1..20: note = Target: SCN10A; (+) strand; PAM type: YTN; PAM sequence: CTG
  source 1..20: mol_type = other DNA
ggtgtcaggtggtccccaca

SEQ ID NO: 62750 - DNA, 20 bp, synthetic construct
  misc_feature 1..20: note = Description of Artificial Sequence: Synthetic oligonucleotide
  misc_feature 1..20: note = Target: SCN10A; (+) strand; PAM type: YTN; PAM sequence: CTC
  source 1..20: mol_type = other DNA
tcgacttgctgcagctgctc

SEQ ID NO: 62751 - DNA, 20 bp, synthetic construct
  misc_feature 1..20: note = Description of Artificial Sequence: Synthetic oligonucleotide
  misc_feature 1..20: note = Target: SCN10A; (+) strand; PAM type: YTN; PAM sequence: CTC
  source 1..20: mol_type = other DNA
gacttgctgcagctgctcct

SEQ ID NO: 62752 - DNA, 20 bp, synthetic construct
  misc_feature 1..20: note = Description of Artificial Sequence: Synthetic oligonucleotide
  misc_feature 1..20: note = Target: SCN10A; (+) strand; PAM type: YTN; PAM sequence: CTT
  source 1..20: mol_type = other DNA
gctgcagctgctcctgctag

SEQ ID NO: 62753 - DNA, 20 bp, synthetic construct
  misc_feature 1..20: note = Description of Artificial Sequence: Synthetic oligonucleotide
  misc_feature 1..20: note = Target: SCN10A; (+) strand; PAM type: YTN; PAM sequence: TTG
  source 1..20: mol_type = other DNA
ctgcagctgctcctgctagt

SEQ ID NO: 62754 - DNA, 20 bp, synthetic construct
  misc_feature 1..20: note = Description of Artificial Sequence: Synthetic oligonucleotide
  misc_feature 1..20: note = Target: SCN10A; (+) strand; PAM type: YTN; PAM sequence: CTG
  source 1..20: mol_type = other DNA
cagctgctcctgctagtgag

SEQ ID NO: 62755 - DNA, 20 bp, synthetic construct
  misc_feature 1..20: note = Description of Artificial Sequence: Synthetic oligonucleotide
  misc_feature 1..20: note = Target: SCN10A; (+) strand; PAM type: YTN; PAM sequence: CTG
  source 1..20: mol_type = other DNA
ctcctgctagtgagagaggg

SEQ ID NO: 62756 - DNA, 20 bp, synthetic construct
  misc_feature 1..20: note = Description of Artificial Sequence: Synthetic oligonucleotide
  misc_feature 1..20: note = Target: SCN10A; (+) strand; PAM type: YTN; PAM sequence: CTC
  source 1..20: mol_type = other DNA
ctgctagtgagagagggtcc

SEQ ID NO: 62757 - DNA, 20 bp, synthetic construct
  misc_feature 1..20: note = Description of Artificial Sequence: Synthetic oligonucleotide
  misc_feature 1..20: note = Target: SCN10A; (+) strand; PAM type: YTN; PAM sequence: CTG
  source 1..20: mol_type = other DNA
ctagtgagagagggtcccaa

SEQ ID NO: 62758 - DNA, 20 bp, synthetic construct
  misc_feature 1..20: note = Description of Artificial Sequence: Synthetic oligonucleotide
  misc_feature 1..20: note = Target: SCN10A; (+) strand; PAM type: YTN; PAM sequence: CTA
  source 1..20: mol_type = other DNA
gtgagagagggtcccaactg

SEQ ID NO: 62759 - DNA, 20 bp, synthetic construct
  misc_feature 1..20: note = Description of Artificial Sequence: Synthetic oligonucleotide
  misc_feature 1..20: note = Target: SCN10A; (+) strand; PAM type: YTN; PAM sequence: CTG
  source 1..20: mol_type = other DNA
ggtgcctggccccaccctta

SEQ ID NO: 62760 - DNA, 20 bp, synthetic construct
  misc_feature 1..20: note = Description of Artificial Sequence: Synthetic oligonucleotide
  misc_feature 1..20: note = Target: SCN10A; (+) strand; PAM type: YTN; PAM sequence: CTG
  source 1..20: mol_type = other DNA
gccccacccttagatgacca

SEQ ID NO: 62761 - DNA, 20 bp, synthetic construct
  misc_feature 1..20: note = Description of Artificial Sequence: Synthetic oligonucleotide
  misc_feature 1..20: note = Target: SCN10A; (+) strand; PAM type: YTN; PAM sequence: CTT
  source 1..20: mol_type = other DNA
agatgaccagttctaaattt

SEQ ID NO: 62762 - DNA, 20 bp, synthetic construct
  misc_feature 1..20: note = Description of Artificial Sequence: Synthetic oligonucleotide
  misc_feature 1..20: note = Target: SCN10A; (+) strand; PAM type: YTN; PAM sequence: TTA
  source 1..20: mol_type = other DNA
gatgaccagttctaaatttg

SEQ ID NO: 62763 - DNA, 20 bp, synthetic construct
  misc_feature 1..20: note = Description of Artificial Sequence: Synthetic oligonucleotide
  misc_feature 1..20: note = Target: SCN10A; (+) strand; PAM type: YTN; PAM sequence: TTC
  source 1..20: mol_type = other DNA
taaatttgaagggatcttgc

SEQ ID NO: 62764 - DNA, 20 bp, synthetic construct
  misc_feature 1..20: note = Description of Artificial Sequence: Synthetic oligonucleotide
  misc_feature 1..20: note = Target: SCN10A; (+) strand; PAM type: YTN; PAM sequence: CTA
  source 1..20: mol_type = other DNA
aatttgaagggatcttgcac

SEQ ID NO: 62765 - DNA, 20 bp, synthetic construct
  misc_feature 1..20: note = Description of Artificial Sequence: Synthetic oligonucleotide
  misc_feature 1..20: note = Target: SCN10A; (+) strand; PAM type: YTN; PAM sequence: TTT
  source 1..20: mol_type = other DNA
gaagggatcttgcacatcac

SEQ ID NO: 62766 - DNA, 20 bp, synthetic construct
  misc_feature 1..20: note = Description of Artificial Sequence: Synthetic oligonucleotide
  misc_feature 1..20: note = Target: SCN10A; (+) strand; PAM type: YTN; PAM sequence: TTG
  source 1..20: mol_type = other DNA
aagggatcttgcacatcaca

SEQ ID NO: 62767 - DNA, 20 bp, synthetic construct
  misc_feature 1..20: note = Description of Artificial Sequence: Synthetic oligonucleotide
  misc_feature 1..20: note = Target: SCN10A; (+) strand; PAM type: YTN; PAM sequence: CTT
  source 1..20: mol_type = other DNA
gcacatcacaggctgccaga

SEQ ID NO: 62768 - DNA, 20 bp, synthetic construct
  misc_feature 1..20: note = Description of Artificial Sequence: Synthetic oligonucleotide
  misc_feature 1..20: note = Target: SCN10A; (+) strand; PAM type: YTN; PAM sequence: TTG
  source 1..20: mol_type = other DNA
cacatcacaggctgccagag

SEQ ID NO: 62769 - DNA, 20 bp, synthetic construct
  misc_feature 1..20: note = Description of Artificial Sequence: Synthetic oligonucleotide
  misc_feature 1..20: note = Target: SCN10A; (+) strand; PAM type: YTN; PAM sequence: CTG
  source 1..20: mol_type = other DNA
ccagagccaagagtttcata

SEQ ID NO: 62770 - DNA, 20 bp, synthetic construct
  misc_feature 1..20: note = Description of Artificial Sequence: Synthetic oligonucleotide
  misc_feature 1..20: note = Target: SCN10A; (+) strand; PAM type: YTN; PAM sequence: TTT
  source 1..20: mol_type = other DNA
catatatgcaactcatgtac

SEQ ID NO: 62771 - DNA, 20 bp, synthetic construct
  misc_feature 1..20: note = Description of Artificial Sequence: Synthetic oligonucleotide
  misc_feature 1..20: note = Target: SCN10A; (+) strand; PAM type: YTN; PAM sequence: TTC
  source 1..20: mol_type = other DNA
atatatgcaactcatgtaca

SEQ ID NO: 62772 - DNA, 20 bp, synthetic construct
  misc_feature 1..20: note = Description of Artificial Sequence: Synthetic oligonucleotide
  misc_feature 1..20: note = Target: SCN10A; (+) strand; PAM type: YTN; PAM sequence: CTC
  source 1..20: mol_type = other DNA
atgtacatacatatatacat

SEQ ID NO: 62773 - DNA, 20 bp, synthetic construct
  misc_feature 1..20: note = Description of Artificial Sequence: Synthetic oligonucleotide
  misc_feature 1..20: note = Target: SCN10A; (+) strand; PAM type: YTN; PAM sequence: CTA
  source 1..20: mol_type = other DNA
tagctagatagacctatgtt

SEQ ID NO: 62774 - DNA, 20 bp, synthetic construct
  misc_feature 1..20: note = Description of Artificial Sequence: Synthetic oligonucleotide
  misc_feature 1..20: note = Target: SCN10A; (+) strand; PAM type: YTN; PAM sequence: CTA
  source 1..20: mol_type = other DNA
gatagacctatgttttatcc

SEQ ID NO: 62775 - DNA, 20 bp, synthetic construct
  misc_feature 1..20: note = Description of Artificial Sequence: Synthetic oligonucleotide
  misc_feature 1..20: note = Target: SCN10A; (+) strand; PAM type: YTN; PAM sequence: CTA
  source 1..20: mol_type = other DNA
tgttttatccttgggctcca

SEQ ID NO: 62776 - DNA, 20 bp, synthetic construct
  misc_feature 1..20: note = Description of Artificial Sequence: Synthetic oligonucleotide
  misc_feature 1..20: note = Target: SCN10A; (+) strand; PAM type: YTN; PAM sequence: TTT
  source 1..20: mol_type = other DNA
tatccttgggctccattaat

SEQ ID NO: 62777 - DNA, 20 bp, synthetic construct
  misc_feature 1..20: note = Description of Artificial Sequence: Synthetic oligonucleotide
  misc_feature 1..20: note = Target: SCN10A; (+) strand; PAM type: YTN; PAM sequence: TTT
  source 1..20: mol_type = other DNA
atccttgggctccattaatt

SEQ ID NO: 62778 - DNA, 20 bp, synthetic construct
  misc_feature 1..20: note = Description of Artificial Sequence: Synthetic oligonucleotide
  misc_feature 1..20: note = Target: SCN10A; (+) strand; PAM type: YTN; PAM sequence: TTA
  source 1..20: mol_type = other DNA
tccttgggctccattaatta

SEQ ID NO: 62779 - DNA, 20 bp, synthetic construct
  misc_feature 1..20: note = Description of Artificial Sequence: Synthetic oligonucleotide
  misc_feature 1..20: note = Target: SCN10A; (+) strand; PAM type: YTN; PAM sequence: CTT
  source 1..20: mol_type = other DNA
gggctccattaattataaga

SEQ ID NO: 62780 - DNA, 20 bp, synthetic construct
  misc_feature 1..20: note = Description of Artificial Sequence: Synthetic oligonucleotide
  misc_feature 1..20: note = Target: SCN10A; (+) strand; PAM type: YTN; PAM sequence: TTG
  source 1..20: mol_type = other DNA
ggctccattaattataagat

SEQ ID NO: 62781 - DNA, 20 bp, synthetic construct
  misc_feature 1..20: note = Description of Artificial Sequence: Synthetic oligonucleotide
  misc_feature 1..20: note = Target: SCN10A; (+) strand; PAM type: YTN; PAM sequence: CTC
  source 1..20: mol_type = other DNA
cattaattataagatgtgtg

SEQ ID NO: 62782 - DNA, 20 bp, synthetic construct
  misc_feature 1..20: note = Description of Artificial Sequence: Synthetic oligonucleotide
  misc_feature 1..20: note = Target: SCN10A; (+) strand; PAM type: YTN; PAM sequence: TTA
  source 1..20: mol_type = other DNA
attataagatgtgtgacctt

SEQ ID NO: 62783 - DNA, 20 bp, synthetic construct
  misc_feature 1..20: note = Description of Artificial Sequence: Synthetic oligonucleotide
  misc_feature 1..20: note = Target: SCN10A; (+) strand; PAM type: YTN; PAM sequence: TTA
  source 1..20: mol_type = other DNA
taagatgtgtgaccttaggc

SEQ ID NO: 62784 - DNA, 20 bp, synthetic construct
  misc_feature 1..20: note = Description of Artificial Sequence: Synthetic oligonucleotide
  misc_feature 1..20: note = Target: SCN10A; (+) strand; PAM type: YTN; PAM sequence: CTT
  source 1..20: mol_type = other DNA
aggcaagttgtttaacctct

SEQ ID NO: 62785 - DNA, 20 bp, synthetic construct
  misc_feature 1..20: note = Description of Artificial Sequence: Synthetic oligonucleotide
  misc_feature 1..20: note = Target: SCN10A; (+) strand; PAM type: YTN; PAM sequence: TTA
  source 1..20: mol_type = other DNA
ggcaagttgtttaacctctc

SEQ ID NO: 62786 - DNA, 20 bp, synthetic construct
  misc_feature 1..20: note = Description of Artificial Sequence: Synthetic oligonucleotide
  misc_feature 1..20: note = Target: SCN10A; (+) strand; PAM type: YTN; PAM sequence: TTG
  source 1..20: mol_type = other DNA
tttaacctctctaatcttca

SEQ ID NO: 62787 - DNA, 20 bp, synthetic construct
  misc_feature 1..20: note = Description of Artificial Sequence: Synthetic oligonucleotide
  misc_feature 1..20: note = Target: SCN10A; (+) strand; PAM type: YTN; PAM sequence: TTT
  source 1..20: mol_type = other DNA
aacctctctaatcttcattt

SEQ ID NO: 62788 - DNA, 20 bp, synthetic construct
  misc_feature 1..20: note = Description of Artificial Sequence: Synthetic oligonucleotide
  misc_feature 1..20: note = Target: SCN10A; (+) strand; PAM type: YTN; PAM sequence: TTA
  source 1..20: mol_type = other DNA
acctctctaatcttcatttt

SEQ ID NO: 62789 - DNA, 20 bp, synthetic construct
  misc_feature 1..20: note = Description of Artificial Sequence: Synthetic oligonucleotide
  misc_feature 1..20: note = Target: SCN10A; (+) strand; PAM type: YTN; PAM sequence: CTC
  source 1..20: mol_type = other DNA
tctaatcttcatttttccca

SEQ ID NO: 62790 - DNA, 20 bp, synthetic construct
  misc_feature 1..20: note = Description of Artificial Sequence: Synthetic oligonucleotide
  misc_feature 1..20: note = Target: SCN10A; (+) strand; PAM type: YTN; PAM sequence: CTC
  source 1..20: mol_type = other DNA
taatcttcatttttcccagc

SEQ ID NO: 62791 - DNA, 20 bp, synthetic construct
  misc_feature 1..20: note = Description of Artificial Sequence: Synthetic oligonucleotide
  misc_feature 1..20: note = Target: SCN10A; (+) strand; PAM type: YTN; PAM sequence: CTA
  source 1..20: mol_type = other DNA
atcttcatttttcccagctt

SEQ ID NO: 62792 - DNA, 20 bp, synthetic construct
  misc_feature 1..20: note = Description of Artificial Sequence: Synthetic oligonucleotide
  misc_feature 1..20: note = Target: SCN10A; (+) strand; PAM type: YTN; PAM sequence: CTT
  source 1..20: mol_type = other DNA
catttttcccagcttcaaaa

SEQ ID NO: 62793 - DNA, 20 bp, synthetic construct
  misc_feature 1..20: note = Description of Artificial Sequence: Synthetic oligonucleotide
  misc_feature 1..20: note = Target: SCN10A; (+) strand; PAM type: YTN; PAM sequence: TTC
  source 1..20: mol_type = other DNA
atttttcccagcttcaaaat

SEQ ID NO: 62794 - DNA, 20 bp, synthetic construct
  misc_feature 1..20: note = Description of Artificial Sequence: Synthetic oligonucleotide
  misc_feature 1..20: note = Target: SCN10A; (+) strand; PAM type: YTN; PAM sequence: TTT
  source 1..20: mol_type = other DNA
ttcccagcttcaaaattgaa

SEQ ID NO: 62795 - DNA, 20 bp, synthetic construct
  misc_feature 1..20: note = Description of Artificial Sequence: Synthetic oligonucleotide
  misc_feature 1..20: note = Target: SCN10A; (+) strand; PAM type: YTN; PAM sequence: TTT
  source 1..20: mol_type = other DNA
tcccagcttcaaaattgaaa

SEQ ID NO: 62796 - DNA, 20 bp, synthetic construct
  misc_feature 1..20: note = Description of Artificial Sequence: Synthetic oligonucleotide
  misc_feature 1..20: note = Target: SCN10A; (+) strand; PAM type: YTN; PAM sequence: TTT
  source 1..20: mol_type = other DNA
cccagcttcaaaattgaaaa

SEQ ID NO: 62797 - DNA, 20 bp, synthetic construct
  misc_feature 1..20: note = Description of Artificial Sequence: Synthetic oligonucleotide
  misc_feature 1..20: note = Target: SCN10A; (+) strand; PAM type: YTN; PAM sequence: TTC
  source 1..20: mol_type = other DNA
ccagcttcaaaattgaaaag

SEQ ID NO: 62798 - DNA, 20 bp, synthetic construct
  misc_feature 1..20: note = Description of Artificial Sequence: Synthetic oligonucleotide
  misc_feature 1..20: note = Target: SCN10A; (+) strand; PAM type: YTN; PAM sequence: CTT
  source 1..20: mol_type = other DNA
caaaattgaaaaggctagat

SEQ ID NO: 62799 - DNA, 20 bp, synthetic construct
  misc_feature 1..20: note = Description of Artificial Sequence: Synthetic oligonucleotide
  misc_feature 1..20: note = Target: SCN10A; (+) strand; PAM type: YTN; PAM sequence: TTC
  source 1..20: mol_type = other DNA
aaaattgaaaaggctagatc

SEQ ID NO: 62800 - DNA, 20 bp, synthetic construct
  misc_feature 1..20: note = Description of Artificial Sequence: Synthetic oligonucleotide
  misc_feature 1..20: note = Target: SCN10A; (+) strand; PAM type: YTN; PAM sequence: TTG
  source 1..20: mol_type = other DNA
aaaaggctagatctgcatca

SEQ ID NO: 62801 - DNA, 20 bp, synthetic construct
  misc_feature 1..20: note = Description of Artificial Sequence: Synthetic oligonucleotide
  misc_feature 1..20: note = Target: SCN10A; (+) strand; PAM type: YTN; PAM sequence: CTA
  source 1..20: mol_type = other DNA
gatctgcatcattcagctgt

SEQ ID NO: 62802 - DNA, 20 bp, synthetic construct
  misc_feature 1..20: note = Description of Artificial Sequence: Synthetic oligonucleotide
  misc_feature 1..20: note = Target: SCN10A; (+) strand; PAM type: YTN; PAM sequence: CTG
  source 1..20: mol_type = other DNA
catcattcagctgttttgat

SEQ ID NO: 62803 - DNA, 20 bp, synthetic construct
  misc_feature 1..20: note = Description of Artificial Sequence: Synthetic oligonucleotide
  misc_feature 1..20: note = Target: SCN10A; (+) strand; PAM type: YTN; PAM sequence: TTC
  source 1..20: mol_type = other DNA
agctgttttgatgactaaat

SEQ ID NO: 62804 - DNA, 20 bp, synthetic construct
  misc_feature 1..20: note = Description of Artificial Sequence: Synthetic oligonucleotide
  misc_feature 1..20: note = Target: SCN10A; (+) strand; PAM type: YTN; PAM sequence: CTG
  source 1..20: mol_type = other DNA
ttttgatgactaaatatgtt

SEQ ID NO: 62805 - DNA, 20 bp, synthetic construct
  misc_feature 1..20: note = Description of Artificial Sequence: Synthetic oligonucleotide
  misc_feature 1..20: note = Target: SCN10A; (+) strand; PAM type: YTN; PAM sequence: TTT
  source 1..20: mol_type = other DNA
tgatgactaaatatgttagc

SEQ ID NO: 62806 - DNA, 20 bp, synthetic construct
  misc_feature 1..20: note = Description of Artificial Sequence: Synthetic oligonucleotide
  misc_feature 1..20: note = Target: SCN10A; (+) strand; PAM type: YTN; PAM sequence: TTT
  source 1..20: mol_type = other DNA
gatgactaaatatgttagcg

SEQ ID NO: 62807 - DNA, 20 bp, synthetic construct
  misc_feature 1..20: note = Description of Artificial Sequence: Synthetic oligonucleotide
  misc_feature 1..20: note = Target: SCN10A; (+) strand; PAM type: YTN; PAM sequence: TTG
  source 1..20: mol_type = other DNA
atgactaaatatgttagcgc

SEQ ID NO: 62808 - DNA, 20 bp, synthetic construct
  misc_feature 1..20: note = Description of Artificial Sequence: Synthetic oligonucleotide
  misc_feature 1..20: note = Target: SCN10A; (+) strand; PAM type: YTN; PAM sequence: CTA
  source 1..20: mol_type = other DNA
aatatgttagcgcttgtaaa

SEQ ID NO: 62809 - DNA, 20 bp, synthetic construct
  misc_feature 1..20: note = Description of Artificial Sequence: Synthetic oligonucleotide
  misc_feature 1..20: note = Target: SCN10A; (+) strand; PAM type: YTN; PAM sequence: TTA
  source 1..20: mol_type = other DNA
gcgcttgtaaaacactttgc

SEQ ID NO: 62810 - DNA, 20 bp, synthetic construct
  misc_feature 1..20: note = Description of Artificial Sequence: Synthetic oligonucleotide
  misc_feature 1..20: note = Target: SCN10A; (+) strand; PAM type: YTN; PAM sequence: CTT
  source 1..20: mol_type = other DNA
gtaaaacactttgcacgaag

SEQ ID NO: 62811 - DNA, 20 bp, synthetic construct
  misc_feature 1..20: note = Description of Artificial Sequence: Synthetic oligonucleotide
  misc_feature 1..20: note = Target: SCN10A; (+) strand; PAM type: YTN; PAM sequence: TTG
  source 1..20: mol_type = other DNA
taaaacactttgcacgaagt

SEQ ID NO: 62812 - DNA, 20 bp, synthetic construct
  misc_feature 1..20: note = Description of Artificial Sequence: Synthetic oligonucleotide
  misc_feature 1..20: note = Target: SCN10A; (+) strand; PAM type: YTN; PAM sequence: CTT
  source 1..20: mol_type = other DNA
tgcacgaagtgcttggctca

SEQ ID NO: 62813 - DNA, 20 bp, synthetic construct
  misc_feature 1..20: note = Description of Artificial Sequence: Synthetic oligonucleotide
  misc_feature 1..20: note = Target: SCN10A; (+) strand; PAM type: YTN; PAM sequence: TTT
  source 1..20: mol_type = other DNA
gcacgaagtgcttggctcaa

SEQ ID NO: 62814 - DNA, 20 bp, synthetic construct
  misc_feature 1..20: note = Description of Artificial Sequence: Synthetic oligonucleotide
  misc_feature 1..20: note = Target: SCN10A; (+) strand; PAM type: YTN; PAM sequence: TTG
  source 1..20: mol_type = other DNA
cacgaagtgcttggctcaat

SEQ ID NO: 62815 - DNA, 20 bp, synthetic construct
  misc_feature 1..20: note = Description of Artificial Sequence: Synthetic oligonucleotide
  misc_feature 1..20: note = Target: SCN10A; (+) strand; PAM type: YTN; PAM sequence: CTT
  source 1..20: mol_type = other DNA
ggctcaatagattttagcca

SEQ ID NO: 62816 - DNA, 20 bp, synthetic construct
  misc_feature 1..20: note = Description of Artificial Sequence: Synthetic oligonucleotide
  misc_feature 1..20: note = Target: SCN10A; (+) strand; PAM type: YTN; PAM sequence: TTG
  source 1..20: mol_type = other DNA
gctcaatagattttagccat

SEQ ID NO: 62817 - DNA, 20 bp, synthetic construct
  misc_feature 1..20: note = Description of Artificial Sequence: Synthetic oligonucleotide
  misc_feature 1..20: note = Target: SCN10A; (+) strand; PAM type: YTN; PAM sequence: CTC
  source 1..20: mol_type = other DNA
aatagattttagccatgacc

SEQ ID NO: 62818 - DNA, 20 bp, synthetic construct
  misc_feature 1..20: note = Description of Artificial Sequence: Synthetic oligonucleotide
  misc_feature 1..20: note = Target: SCN10A; (+) strand; PAM type: YTN; PAM sequence: TTT
  source 1..20: mol_type = other DNA
tagccatgaccattgttatt

SEQ ID NO: 62819 - DNA, 20 bp, synthetic construct
  misc_feature 1..20: note = Description of Artificial Sequence: Synthetic oligonucleotide
  misc_feature 1..20: note = Target: SCN10A; (+) strand; PAM type: YTN; PAM sequence: TTT
  source 1..20: mol_type = other DNA
agccatgaccattgttattt

SEQ ID NO: 62820 - DNA, 20 bp, synthetic construct
  misc_feature 1..20: note = Description of Artificial Sequence: Synthetic oligonucleotide
  misc_feature 1..20: note = Target: SCN10A; (+) strand; PAM type: YTN; PAM sequence: TTA
  source 1..20: mol_type = other DNA
gccatgaccattgttatttg

SEQ ID NO: 62821 - DNA, 20 bp, synthetic construct
  misc_feature 1..20: note = Description of Artificial Sequence: Synthetic oligonucleotide
  misc_feature 1..20: note = Target: SCN10A; (+) strand; PAM type: YTN; PAM sequence: TTG
  source 1..20: mol_type = other DNA
ttatttgtccagaggtcaaa

SEQ ID NO: 62822 - DNA, 20 bp, synthetic construct
  misc_feature 1..20: note = Description of Artificial Sequence: Synthetic oligonucleotide
  misc_feature 1..20: note = Target: SCN10A; (+) strand; PAM type: YTN; PAM sequence: TTA
  source 1..20: mol_type = other DNA
tttgtccagaggtcaaaatt

SEQ ID NO: 62823 - DNA, 20 bp, synthetic construct
  misc_feature 1..20: note = Description of Artificial Sequence: Synthetic oligonucleotide
  misc_feature 1..20: note = Target: SCN10A; (+) strand; PAM type: YTN; PAM sequence: TTT
  source 1..20: mol_type = other DNA
gtccagaggtcaaaattgta

SEQ ID NO: 62824 - DNA, 20 bp, synthetic construct
  misc_feature 1..20: note = Description of Artificial Sequence: Synthetic oligonucleotide
  misc_feature 1..20: note = Target: SCN10A; (+) strand; PAM type: YTN; PAM sequence: TTG
  source 1..20: mol_type = other DNA
tccagaggtcaaaattgtag

SEQ ID NO: 62825 - DNA, 20 bp, synthetic construct
  misc_feature 1..20: note = Description of Artificial Sequence: Synthetic oligonucleotide
  misc_feature 1..20: note = Target: SCN10A; (+) strand; PAM type: YTN; PAM sequence: TTG
  source 1..20: mol_type = other DNA
tagggaacttggccacctgg

SEQ ID NO: 62826 - DNA, 20 bp, synthetic construct
  misc_feature 1..20: note = Description of Artificial Sequence: Synthetic oligonucleotide
  misc_feature 1..20: note = Target: SCN10A; (+) strand; PAM type: YTN; PAM sequence: CTT
  source 1..20: mol_type = other DNA
ggccacctggagctccctaa

SEQ ID NO: 62827 - DNA, 20 bp, synthetic construct
  misc_feature 1..20: note = Description of Artificial Sequence: Synthetic oligonucleotide
  misc_feature 1..20: note = Target: SCN10A; (+) strand; PAM type: YTN; PAM sequence: TTG
  source 1..20: mol_type = other DNA
gccacctggagctccctaag

SEQ ID NO: 62828 - DNA, 20 bp, synthetic construct
  misc_feature 1..20: note = Description of Artificial Sequence: Synthetic oligonucleotide
  misc_feature 1..20: note = Target: SCN10A; (+) strand; PAM type: YTN; PAM sequence: CTG
  source 1..20: mol_type = other DNA
gagctccctaagagccccaa

SEQ ID NO: 62829 - DNA, 20 bp, synthetic construct
  misc_feature 1..20: note = Description of Artificial Sequence: Synthetic oligonucleotide
  misc_feature 1..20: note = Target: SCN10A; (+) strand; PAM type: YTN; PAM sequence: CTC
  source 1..20: mol_type = other DNA
cctaagagccccaaagtaac

SEQ ID NO: 62830 - DNA, 20 bp, synthetic construct
  misc_feature 1..20: note = Description of Artificial Sequence: Synthetic oligonucleotide
  misc_feature 1..20: note = Target: SCN10A; (+) strand; PAM type: YTN; PAM sequence: CTA
  source 1..20: mol_type = other DNA
agagccccaaagtaactgaa

SEQ ID NO: 62831 - DNA, 20 bp, synthetic construct
  misc_feature 1..20: note = Description of Artificial Sequence: Synthetic oligonucleotide
  misc_feature 1..20: note = Target: SCN10A; (+) strand; PAM type: YTN; PAM sequence: CTG
  source 1..20: mol_type = other DNA
aaaatgcttctgagtggcag

SEQ ID NO: 62832 - DNA, 20 bp, synthetic construct
  misc_feature 1..20: note = Description of Artificial Sequence: Synthetic oligonucleotide
  misc_feature 1..20: note = Target: SCN10A; (+) strand; PAM type: YTN; PAM sequence: CTT
  source 1..20: mol_type = other DNA
ctgagtggcagacagctgtc

SEQ ID NO: 62833 - DNA, 20 bp, synthetic construct
  misc_feature 1..20: note = Description of Artificial Sequence: Synthetic oligonucleotide
  misc_feature 1..20: note = Target: SCN10A; (+) strand; PAM type: YTN; PAM sequence: TTC
  source 1..20: mol_type = other DNA
tgagtggcagacagctgtca

SEQ ID NO: 62834 - DNA, 20 bp, synthetic construct
  misc_feature 1..20: note = Description of Artificial Sequence: Synthetic oligonucleotide
  misc_feature 1..20: note = Target: SCN10A; (+) strand; PAM type: YTN; PAM sequence: CTG
  source 1..20: mol_type = other DNA
agtggcagacagctgtcaca

SEQ ID NO: 62835 - DNA, 20 bp, synthetic construct
  misc_feature 1..20: note = Description of Artificial Sequence: Synthetic oligonucleotide
  misc_feature 1..20: note = Target: SCN10A; (+) strand; PAM type: YTN; PAM sequence: CTG
  source 1..20: mol_type = other DNA
tcacagagttcatgctctct

SEQ ID NO: 62836 - DNA, 20 bp, synthetic construct
  misc_feature 1..20: note = Description of Artificial Sequence: Synthetic oligonucleotide
  misc_feature 1..20: note = Target: SCN10A; (+) strand; PAM type: YTN; PAM sequence: TTC
  source 1..20: mol_type = other DNA
atgctctctgctgttaccta

SEQ ID NO: 62837 - DNA, 20 bp, synthetic construct
  misc_feature 1..20: note = Description of Artificial Sequence: Synthetic oligonucleotide
  misc_feature 1..20: note = Target: SCN10A; (+) strand; PAM type: YTN; PAM sequence: CTC
  source 1..20: mol_type = other DNA
tctgctgttacctagacaaa

SEQ ID NO: 62838 - DNA, 20 bp, synthetic construct
  misc_feature 1..20: note = Description of Artificial Sequence: Synthetic oligonucleotide
  misc_feature 1..20: note = Target: SCN10A; (+) strand; PAM type: YTN; PAM sequence: CTC
  source 1..20: mol_type = other DNA
tgctgttacctagacaaagg

SEQ ID NO: 62839 - DNA, 20 bp, synthetic construct
  misc_feature 1..20: note = Description of Artificial Sequence: Synthetic oligonucleotide
  misc_feature 1..20: note = Target: SCN10A; (+) strand; PAM type: YTN; PAM sequence: CTG
  source 1..20: mol_type = other DNA
ctgttacctagacaaaggca

SEQ ID NO: 62840 - DNA, 20 bp, synthetic construct
  misc_feature 1..20: note = Description of Artificial Sequence: Synthetic oligonucleotide
  misc_feature 1..20: note = Target: SCN10A; (+) strand; PAM type: YTN; PAM sequence: CTG
  source 1..20: mol_type = other DNA
ttacctagacaaaggcatgt

SEQ ID NO: 62841 - DNA, 20 bp, synthetic construct
  misc_feature 1..20: note = Description of Artificial Sequence: Synthetic oligonucleotide
  misc_feature 1..20: note = Target: SCN10A; (+) strand; PAM type: YTN; PAM sequence: TTA
  source 1..20: mol_type = other DNA
cctagacaaaggcatgtaaa

SEQ ID NO: 62842 - DNA, 20 bp, synthetic construct
  misc_feature 1..20: note = Description of Artificial Sequence: Synthetic oligonucleotide
  misc_feature 1..20: note = Target: SCN10A; (+) strand; PAM type: YTN; PAM sequence: CTA
  source 1..20: mol_type = other DNA
gacaaaggcatgtaaaatat

SEQ ID NO: 62843 - DNA, 20 bp, synthetic construct
  misc_feature 1..20: note = Description of Artificial Sequence: Synthetic oligonucleotide
  misc_feature 1..20: note = Target: SCN10A; (+) strand; PAM type: YTN; PAM sequence: CTG
  source 1..20: mol_type = other DNA
ataacagcagctgctggaac

SEQ ID NO: 62844 - DNA, 20 bp, synthetic construct
  misc_feature 1..20: note = Description of Artificial Sequence: Synthetic oligonucleotide
  misc_feature 1..20: note = Target: SCN10A; (+) strand; PAM type: YTN; PAM sequence: CTG
  source 1..20: mol_type = other DNA
ctggaacacaagtgacgact

SEQ ID NO: 62845 - DNA, 20 bp, synthetic construct
  misc_feature 1..20: note = Description of Artificial Sequence: Synthetic oligonucleotide
  misc_feature 1..20: note = Target: SCN10A; (+) strand; PAM type: YTN; PAM sequence: CTG
  source 1..20: mol_type = other DNA
gaacacaagtgacgactgca

SEQ ID NO: 62846 - DNA, 20 bp, synthetic construct
  misc_feature 1..20: note = Description of Artificial Sequence: Synthetic oligonucleotide
  misc_feature 1..20: note = Target: SCN10A; (+) strand; PAM type: YTN; PAM sequence: CTG
  source 1..20: mol_type = other DNA
cagggaagaaggctatggga

SEQ ID NO: 62847 - DNA, 20 bp, synthetic construct
  misc_feature 1..20: note = Description of Artificial Sequence: Synthetic oligonucleotide
  misc_feature 1..20: note = Target: SCN10A; (+) strand; PAM type: YTN; PAM sequence: CTA
  source 1..20: mol_type = other DNA
tgggagagctacagactcaa

SEQ ID NO: 62848 - DNA, 20 bp, synthetic construct
  misc_feature 1..20: note = Description of Artificial Sequence: Synthetic oligonucleotide
  misc_feature 1..20: note = Target: SCN10A; (+) strand; PAM type: YTN; PAM sequence: CTA
  source 1..20: mol_type = other DNA
cagactcaaagcacagcttt

SEQ ID NO: 62849 - DNA, 20 bp, synthetic construct
  misc_feature 1..20: note = Description of Artificial Sequence: Synthetic oligonucleotide
  misc_feature 1..20: note = Target: SCN10A; (+) strand; PAM type: YTN; PAM sequence: CTC
  source 1..20: mol_type = other DNA
aaagcacagcttttctggac

SEQ ID NO: 62850 - DNA, 20 bp, synthetic construct
  misc_feature 1..20: note = Description of Artificial Sequence: Synthetic oligonucleotide
  misc_feature 1..20: note = Target: SCN10A; (+) strand; PAM type: YTN; PAM sequence: CTT
  source 1..20: mol_type = other DNA
ttctggaccacttagtaacc

SEQ ID NO: 62851 - DNA, 20 bp, synthetic construct
  misc_feature 1..20: note = Description of Artificial Sequence: Synthetic oligonucleotide
  misc_feature 1..20: note = Target: SCN10A; (+) strand; PAM type: YTN; PAM sequence: TTT
  source 1..20: mol_type = other DNA
tctggaccacttagtaacct

SEQ ID NO: 62852 - DNA, 20 bp, synthetic construct
  misc_feature 1..20: note = Description of Artificial Sequence: Synthetic oligonucleotide
  misc_feature 1..20: note = Target: SCN10A; (+) strand; PAM type: YTN; PAM sequence: TTT
  source 1..20: mol_type = other DNA
ctggaccacttagtaacctg

SEQ ID NO: 62853 - DNA, 20 bp, synthetic construct
  misc_feature 1..20: note = Description of Artificial Sequence: Synthetic oligonucleotide
  misc_feature 1..20: note = Target: SCN10A; (+) strand; PAM type: YTN; PAM sequence: TTC
  source 1..20: mol_type = other DNA
tggaccacttagtaacctgg

SEQ ID NO: 62854 - DNA, 20 bp, synthetic construct
  misc_feature 1..20: note = Description of Artificial Sequence: Synthetic oligonucleotide
  misc_feature 1..20: note = Target: SCN10A; (+) strand; PAM type: YTN; PAM sequence: CTG
  source 1..20: mol_type = other DNA
gaccacttagtaacctggcc

SEQ ID NO: 62855 - DNA, 20 bp, synthetic construct
  misc_feature 1..20: note = Description of Artificial Sequence: Synthetic oligonucleotide
  misc_feature 1..20: note = Target: SCN10A; (+) strand; PAM type: YTN; PAM sequence: CTT
  source 1..20: mol_type = other DNA
agtaacctggccagcagccc

SEQ ID NO: 62856 - DNA, 20 bp, synthetic construct
  misc_feature 1..20: note = Description of Artificial Sequence: Synthetic oligonucleotide
  misc_feature 1..20: note = Target: SCN10A; (+) strand; PAM type: YTN; PAM sequence: TTA
  source 1..20: mol_type = other DNA
gtaacctggccagcagccct

SEQ ID NO: 62857 - DNA, 20 bp, synthetic construct
  misc_feature 1..20: note = Description of Artificial Sequence: Synthetic oligonucleotide
  misc_feature 1..20: note = Target: SCN10A; (+) strand; PAM type: YTN; PAM sequence: CTG
  source 1..20: mol_type = other DNA
gccagcagccctgcatgttc

SEQ ID NO: 62858 - DNA, 20 bp, synthetic construct
  misc_feature 1..20: note = Description of Artificial Sequence: Synthetic oligonucleotide
  misc_feature 1..20: note = Target: SCN10A; (+) strand; PAM type: YTN; PAM sequence: CTG
  source 1..20: mol_type = other DNA
catgttcctgaggcctcaca

SEQ ID NO: 62859 - DNA, 20 bp, synthetic construct
  misc_feature 1..20: note = Description of Artificial Sequence: Synthetic oligonucleotide
  misc_feature 1..20: note = Target: SCN10A; (+) strand; PAM type: YTN; PAM sequence: TTC
  source 1..20: mol_type = other DNA
ctgaggcctcacagggttcc

SEQ ID NO: 62860 - DNA, 20 bp, synthetic construct
  misc_feature 1..20: note = Description of Artificial Sequence: Synthetic oligonucleotide
  misc_feature 1..20: note = Target: SCN10A; (+) strand; PAM type: YTN; PAM sequence: CTG
  source 1..20: mol_type = other DNA
aggcctcacagggttccctg

SEQ ID NO: 62861 - DNA, 20 bp, synthetic construct
  misc_feature 1..20: note = Description of Artificial Sequence: Synthetic oligonucleotide
  misc_feature 1..20: note = Target: SCN10A; (+) strand; PAM type: YTN; PAM sequence: CTC
  source 1..20: mol_type = other DNA
acagggttccctgccttccc

SEQ ID NO: 62862 - DNA, 20 bp, synthetic construct
  misc_feature 1..20: note = Description of Artificial Sequence: Synthetic oligonucleotide
  misc_feature 1..20: note = Target: SCN10A; (+) strand; PAM type: YTN; PAM sequence: TTC
  source 1..20: mol_type = other DNA
cctgccttcccacgttgggc

SEQ ID NO: 62863 - DNA, 20 bp, synthetic construct
  misc_feature 1..20: note = Description of Artificial Sequence: Synthetic oligonucleotide
  misc_feature 1..20: note = Target: SCN10A; (+) strand; PAM type: YTN; PAM sequence: CTG
  source 1..20: mol_type = other DNA
ccttcccacgttgggcagag

SEQ ID NO: 62864 - DNA, 20 bp, synthetic construct
  misc_feature 1..20: note = Description of Artificial Sequence: Synthetic oligonucleotide
  misc_feature 1..20: note = Target: SCN10A; (+) strand; PAM type: YTN; PAM sequence: CTT
  source 1..20: mol_type = other DNA
cccacgttgggcagaggtga

SEQ ID NO: 62865 - DNA, 20 bp, synthetic construct
  misc_feature 1..20: note = Description of Artificial Sequence: Synthetic oligonucleotide
  misc_feature 1..20: note = Target: SCN10A; (+) strand; PAM type: YTN; PAM sequence: TTC
  source 1..20: mol_type = other DNA
ccacgttgggcagaggtgaa

SEQ ID NO: 62866 - DNA, 20 bp, synthetic construct
  misc_feature 1..20: note = Description of Artificial Sequence: Synthetic oligonucleotide
  misc_feature 1..20: note = Target: SCN10A; (+) strand; PAM type: YTN; PAM sequence: TTG
  source 1..20: mol_type = other DNA
ggcagaggtgaatgccctga

SEQ ID NO: 62867 - DNA, 20 bp, synthetic construct
  misc_feature 1..20: note = Description of Artificial Sequence: Synthetic oligonucleotide
  misc_feature 1..20: note = Target: SCN10A; (+) strand; PAM type: YTN; PAM sequence: CTG
  source 1..20: mol_type = other DNA
agttactgagaagaggttag

SEQ ID NO: 62868 - DNA, 20 bp, synthetic construct
  misc_feature 1..20: note = Description of Artificial Sequence: Synthetic oligonucleotide
  misc_feature 1..20: note = Target: SCN10A; (+) strand; PAM type: YTN; PAM sequence: TTA
  source 1..20: mol_type = other DNA
ctgagaagaggttagcgagg

SEQ ID NO: 62869 - DNA, 20 bp, synthetic construct
  misc_feature 1..20: note = Description of Artificial Sequence: Synthetic oligonucleotide
  misc_feature 1..20: note = Target: SCN10A; (+) strand; PAM type: YTN; PAM sequence: CTG
  source 1..20: mol_type = other DNA
agaagaggttagcgagggtt

SEQ ID NO: 62870 - DNA, 20 bp, synthetic construct
  misc_feature 1..20: note = Description of Artificial Sequence: Synthetic oligonucleotide
  misc_feature 1..20: note = Target: SCN10A; (+) strand; PAM type: YTN; PAM sequence: TTA
  source 1..20: mol_type = other DNA
gcgagggttgatataccagc

SEQ ID NO: 62871 - DNA, 20 bp, synthetic construct
  misc_feature 1..20: note = Description of Artificial Sequence: Synthetic oligonucleotide
  misc_feature 1..20: note = Target: SCN10A; (+) strand; PAM type: YTN; PAM sequence: TTG
  source 1..20: mol_type = other DNA
atataccagcttaaggtagt

SEQ ID NO: 62872 - DNA, 20 bp, synthetic construct
  misc_feature 1..20: note = Description of Artificial Sequence: Synthetic oligonucleotide
  misc_feature 1..20: note = Target: SCN10A; (+) strand; PAM type: YTN; PAM sequence: CTT
  source 1..20: mol_type = other DNA
aaggtagtaaggaatagtgc

SEQ ID NO: 62873 - DNA, 20 bp, synthetic construct
  misc_feature 1..20: note = Description of Artificial Sequence: Synthetic oligonucleotide
  misc_feature 1..20: note = Target: SCN10A; (+) strand; PAM type: YTN; PAM sequence: TTA
  source 1..20: mol_type = other DNA
aggtagtaaggaatagtgcc

SEQ ID NO: 62874 - DNA, 20 bp, synthetic construct
  misc_feature 1..20: note = Description of Artificial Sequence: Synthetic oligonucleotide
  misc_feature 1..20: note = Target: SCN10A; (+) strand; PAM type: YTN; PAM sequence: TTT
  source 1..20: mol_type = other DNA
aaaaatatatattatcaaat

SEQ ID NO: 62875 - DNA, 20 bp, synthetic construct
  misc_feature 1..20: note = Description of Artificial Sequence: Synthetic oligonucleotide
  misc_feature 1..20: note = Target: SCN10A; (+) strand; PAM type: YTN; PAM sequence: TTA
  source 1..20: mol_type = other DNA
aaaatatatattatcaaatg

SEQ ID NO: 62876 - DNA, 20 bp, synthetic construct
  misc_feature 1..20: note = Description of Artificial Sequence: Synthetic oligonucleotide
  misc_feature 1..20: note = Target: SCN10A; (+) strand; PAM type: YTN; PAM sequence: TTA
  source 1..20: mol_type = other DNA
tcaaatggctcaaatgtgct

SEQ ID NO: 62877 - DNA, 20 bp, synthetic construct
  misc_feature 1..20: note = Description of Artificial Sequence: Synthetic oligonucleotide
  misc_feature 1..20: note = Target: SCN10A; (+) strand; PAM type: YTN; PAM sequence: CTC
  source 1..20: mol_type = other DNA
aaatgtgctttaaattagtt

SEQ ID NO: 62878 - DNA, 20 bp, synthetic construct
  misc_feature 1..20: note = Description of Artificial Sequence: Synthetic oligonucleotide
  misc_feature 1..20: note = Target: SCN10A; (+) strand; PAM type: YTN; PAM sequence: CTT
  source 1..20: mol_type = other DNA
taaattagttggtgccaaaa

SEQ ID NO: 62879 - DNA, 20 bp, synthetic construct
  misc_feature 1..20: note = Description of Artificial Sequence: Synthetic oligonucleotide
  misc_feature 1..20: note = Target: SCN10A; (+) strand; PAM type: YTN; PAM sequence: TTT
  source 1..20: mol_type = other DNA
aaattagttggtgccaaaag

SEQ ID NO: 62880 - DNA, 20 bp, synthetic construct
  misc_feature 1..20: note = Description of Artificial Sequence: Synthetic oligonucleotide
  misc_feature 1..20: note = Target: SCN10A; (+) strand; PAM type: YTN; PAM sequence: TTA
  source 1..20: mol_type = other DNA
aattagttggtgccaaaagg

SEQ ID NO: 62881 - DNA, 20 bp, synthetic construct
  misc_feature 1..20: note = Description of Artificial Sequence: Synthetic oligonucleotide
  misc_feature 1..20: note = Target: SCN10A; (+) strand; PAM type: YTN; PAM sequence: TTA
  source 1..20: mol_type = other DNA
gttggtgccaaaaggagcgt

SEQ ID NO: 62882 - DNA, 20 bp, synthetic construct
  misc_feature 1..20: note = Description of Artificial Sequence: Synthetic oligonucleotide
  misc_feature 1..20: note = Target: SCN10A; (+) strand; PAM type: YTN; PAM sequence: TTG
  source 1..20: mol_type = other DNA
gtgccaaaaggagcgtgtca

SEQ ID NO: 62883 - DNA, 20 bp, synthetic construct
  misc_feature 1..20: note = Description of Artificial Sequence: Synthetic oligonucleotide
  misc_feature 1..20: note = Target: SCN10A; (+) strand; PAM type: YTN; PAM sequence: TTT
  source 1..20: mol_type = other DNA
ccctgtgataccacttgtgg

SEQ ID NO: 62884 - DNA, 20 bp, synthetic construct
  misc_feature 1..20: note = Description of Artificial Sequence: Synthetic oligonucleotide
  misc_feature 1..20: note = Target: SCN10A; (+) strand; PAM type: YTN; PAM sequence: TTC
  source 1..20: mol_type = other DNA
cctgtgataccacttgtggg

SEQ ID NO: 62885 - DNA, 20 bp, synthetic construct
  misc_feature 1..20: note = Description of Artificial Sequence: Synthetic oligonucleotide
  misc_feature 1..20: note = Target: SCN10A; (+) strand; PAM type: YTN; PAM sequence: CTG
  source 1..20: mol_type = other DNA
tgataccacttgtggggaaa

SEQ ID NO: 62886 - DNA, 20 bp, synthetic construct
  misc_feature 1..20: note = Description of Artificial Sequence: Synthetic oligonucleotide
  misc_feature 1..20: note = Target: SCN10A; (+) strand; PAM type: YTN; PAM sequence: CTT
  source 1..20: mol_type = other DNA
gtggggaaaagctggctaaa

SEQ ID NO: 62887 - DNA, 20 bp, synthetic construct
  misc_feature 1..20: note = Description of Artificial Sequence: Synthetic oligonucleotide
  misc_feature 1..20: note = Target: SCN10A; (+) strand; PAM type: YTN; PAM sequence: TTG
  source 1..20: mol_type = other DNA
tggggaaaagctggctaaat

SEQ ID NO: 62888 - DNA, 20 bp, synthetic construct
  misc_feature 1..20: note = Description of Artificial Sequence: Synthetic oligonucleotide
  misc_feature 1..20: note = Target: SCN10A; (+) strand; PAM type: YTN; PAM sequence: CTG
  source 1..20: mol_type = other DNA
gctaaatgagtcacataaga

SEQ ID NO: 62889 - DNA, 20 bp, synthetic construct
  misc_feature 1..20: note = Description of Artificial Sequence: Synthetic oligonucleotide
  misc_feature 1..20: note = Target: SCN10A; (+) strand; PAM type: YTN; PAM sequence: CTA
  source 1..20: mol_type = other DNA
aatgagtcacataagaatca

SEQ ID NO: 62890 - DNA, 20 bp, synthetic construct
  misc_feature 1..20: note = Description of Artificial Sequence: Synthetic oligonucleotide
  misc_feature 1..20: note = Target: SCN10A; (+) strand; PAM type: YTN; PAM sequence: CTT
  source 1..20: mol_type = other DNA
cttaggatgctggtaaagat

SEQ ID NO: 62891 - DNA, 20 bp, synthetic construct
  misc_feature 1..20: note = Description of Artificial Sequence: Synthetic oligonucleotide
  misc_feature 1..20: note = Target: SCN10A; (+) strand; PAM type: YTN; PAM sequence: TTC
  source 1..20: mol_type = other DNA
ttaggatgctggtaaagatt

SEQ ID NO: 62892 - DNA, 20 bp, synthetic construct
  misc_feature 1..20: note = Description of Artificial Sequence: Synthetic oligonucleotide
  misc_feature 1..20: note = Target: SCN10A; (+) strand; PAM type: YTN; PAM sequence: CTT
  source 1..20: mol_type = other DNA
aggatgctggtaaagattag

SEQ ID NO: 62893 - DNA, 20 bp, synthetic construct
  misc_feature 1..20: note = Description of Artificial Sequence: Synthetic oligonucleotide
  misc_feature 1..20: note = Target: SCN10A; (+) strand; PAM type: YTN; PAM sequence: TTA
  source 1..20: mol_type = other DNA
ggatgctggtaaagattaga

SEQ ID NO: 62894 - DNA, 20 bp, synthetic construct
  misc_feature 1..20: note = Description of Artificial Sequence: Synthetic oligonucleotide
  misc_feature 1..20: note = Target: SCN10A; (+) strand; PAM type: YTN; PAM sequence: CTG
  source 1..20: mol_type = other DNA
gtaaagattagatgagcctt

SEQ ID NO: 62895 - DNA, 20 bp, synthetic construct
  misc_feature 1..20: note = Description of Artificial Sequence: Synthetic oligonucleotide
  misc_feature 1..20: note = Target: SCN10A; (+) strand; PAM type: YTN; PAM sequence: TTA
  source 1..20: mol_type = other DNA
gatgagccttgctcttggac

SEQ ID NO: 62896 - DNA, 20 bp, synthetic construct
  misc_feature 1..20: note = Description of Artificial Sequence: Synthetic oligonucleotide
  misc_feature 1..20: note = Target: SCN10A; (+) strand; PAM type: YTN; PAM sequence: CTT
  source 1..20: mol_type = other DNA
gctcttggacaacatcctgt

SEQ ID NO: 62897 - DNA, 20 bp, synthetic construct
  misc_feature 1..20: note = Description of Artificial Sequence: Synthetic oligonucleotide
  misc_feature 1..20: note = Target: SCN10A; (+) strand; PAM type: YTN; PAM sequence: TTG
  source 1..20: mol_type = other DNA
ctcttggacaacatcctgtt

SEQ ID NO: 62898 - DNA, 20 bp, synthetic construct
  misc_feature 1..20: note = Description of Artificial Sequence: Synthetic oligonucleotide
  misc_feature 1..20: note = Target: SCN10A; (+) strand; PAM type: YTN; PAM sequence: CTC
  source 1..20: mol_type = other DNA
ttggacaacatcctgttctt

SEQ ID NO: 62899 - DNA, 20 bp, synthetic construct
  misc_feature 1..20: note = Description of Artificial Sequence: Synthetic oligonucleotide
  misc_feature 1..20: note = Target: SCN10A; (+) strand; PAM type: YTN; PAM sequence: CTT
  source 1..20: mol_type = other DNA
ggacaacatcctgttcttag

SEQ ID NO: 62900 - DNA, 20 bp, synthetic construct
  misc_feature 1..20: note = Description of Artificial Sequence: Synthetic oligonucleotide
  misc_feature 1..20: note = Target: SCN10A; (+) strand; PAM type: YTN; PAM sequence: TTG
  source 1..20: mol_type = other DNA
gacaacatcctgttcttaga

SEQ ID NO: 62901 - DNA, 20 bp, synthetic construct
  misc_feature 1..20: note = Description of Artificial Sequence: Synthetic oligonucleotide
  misc_feature 1..20: note = Target: SCN10A; (+) strand; PAM type: YTN; PAM sequence: CTG
  source 1..20: mol_type = other DNA
ttcttagagaaatctcatta

SEQ ID NO: 62902 - DNA, 20 bp, synthetic construct
  misc_feature 1..20: note = Description of Artificial Sequence: Synthetic oligonucleotide
  misc_feature 1..20: note = Target: SCN10A; (+) strand; PAM type: YTN; PAM sequence: TTC
  source 1..20: mol_type = other DNA
ttagagaaatctcattagca

SEQ ID NO: 62903 - DNA, 20 bp, synthetic construct
  misc_feature 1..20: note = Description of Artificial Sequence: Synthetic oligonucleotide
  misc_feature 1..20: note = Target: SCN10A; (+) strand; PAM type: YTN; PAM sequence: CTT
  source 1..20: mol_type = other DNA
agagaaatctcattagcatc

SEQ ID NO: 62904 - DNA, 20 bp, synthetic construct
  misc_feature 1..20: note = Description of Artificial Sequence: Synthetic oligonucleotide
  misc_feature 1..20: note = Target: SCN10A; (+) strand; PAM type: YTN; PAM sequence: TTA
  source 1..20: mol_type = other DNA
gagaaatctcattagcatct

SEQ ID NO: 62905 - DNA, 20 bp, synthetic construct
  misc_feature 1..20: note = Description of Artificial Sequence: Synthetic oligonucleotide
  misc_feature 1..20: note = Target: SCN10A; (+) strand; PAM type: YTN; PAM sequence: CTC
  source 1..20: mol_type = other DNA
attagcatctcatgcacaga

SEQ ID NO: 62906 - DNA, 20 bp, synthetic construct
  misc_feature 1..20: note = Description of Artificial Sequence: Synthetic oligonucleotide
  misc_feature 1..20: note = Target: SCN10A; (+) strand; PAM type: YTN; PAM sequence: TTA
  source 1..20: mol_type = other DNA
gcatctcatgcacagagcct

SEQ ID NO: 62907 - DNA, 20 bp, synthetic construct
  misc_feature 1..20: note = Description of Artificial Sequence: Synthetic oligonucleotide
  misc_feature 1..20: note = Target: SCN10A; (+) strand; PAM type: YTN; PAM sequence: CTC
  source 1..20: mol_type = other DNA
atgcacagagcctgggttgg

SEQ ID NO: 62908 - DNA, 20 bp, synthetic construct
  misc_feature 1..20: note = Description of Artificial Sequence: Synthetic oligonucleotide
  misc_feature 1..20: note = Target: SCN10A; (+) strand; PAM type: YTN; PAM sequence: CTG
  source 1..20: mol_type = other DNA
ggttgggcagagcgcatggg

SEQ ID NO: 62909 - DNA, 20 bp, synthetic construct
  misc_feature 1..20: note = Description of Artificial Sequence: Synthetic oligonucleotide
  misc_feature 1..20: note = Target: SCN10A; (+) strand; PAM type: YTN; PAM sequence: TTG
  source 1..20: mol_type = other DNA
ggcagagcgcatgggacagc

SEQ ID NO: 62910 - DNA, 20 bp, synthetic construct
  misc_feature 1..20: note = Description of Artificial Sequence: Synthetic oligonucleotide
  misc_feature 1..20: note = Target: SCN10A; (+) strand; PAM type: YTN; PAM sequence: CTG
  source 1..20: mol_type = other DNA
tgtgaaagacaatccccaag

SEQ ID NO: 62911 - DNA, 20 bp, synthetic construct
  misc_feature 1..20: note = Description of Artificial Sequence: Synthetic oligonucleotide
  misc_feature 1..20: note = Target: SCN10A; (+) strand; PAM type: YTN; PAM sequence: CTC
  source 1..20: mol_type = other DNA
aaggtggccttttgctcacc

SEQ ID NO: 62912 - DNA, 20 bp, synthetic construct
  misc_feature 1..20: note = Description of Artificial Sequence: Synthetic oligonucleotide
  misc_feature 1..20: note = Target: SCN10A; (+) strand; PAM type: YTN; PAM sequence: CTT
  source 1..20: mol_type = other DNA
ttgctcacctgctgcccccc

SEQ ID NO: 62913 - DNA, 20 bp, synthetic construct
  misc_feature 1..20: note = Description of Artificial Sequence: Synthetic oligonucleotide
  misc_feature 1..20: note = Target: SCN10A; (+) strand; PAM type: YTN; PAM sequence: TTT
  source 1..20: mol_type = other DNA
tgctcacctgctgcccccca

SEQ ID NO: 62914 - DNA, 20 bp, synthetic construct
  misc_feature 1..20: note = Description of Artificial Sequence: Synthetic oligonucleotide
  misc_feature 1..20: note = Target: SCN10A; (+) strand; PAM type: YTN; PAM sequence: TTT
  source 1..20: mol_type = other DNA
gctcacctgctgccccccac

SEQ ID NO: 62915 - DNA, 20 bp, synthetic construct
  misc_feature 1..20: note = Description of Artificial Sequence: Synthetic oligonucleotide
  misc_feature 1..20: note = Target: SCN10A; (+) strand; PAM type: YTN; PAM sequence: TTG
  source 1..20: mol_type = other DNA
ctcacctgctgccccccact

SEQ ID NO: 62916 - DNA, 20 bp, synthetic construct
  misc_feature 1..20: note = Description of Artificial Sequence: Synthetic oligonucleotide
  misc_feature 1..20: note = Target: SCN10A; (+) strand; PAM type: YTN; PAM sequence: CTC
  source 1..20: mol_type = other DNA
acctgctgccccccactccc

SEQ ID NO: 62917 - DNA, 20 bp, synthetic construct
  misc_feature 1..20: note = Description of Artificial Sequence: Synthetic oligonucleotide
  misc_feature 1..20: note = Target: SCN10A; (+) strand; PAM type: YTN; PAM sequence: CTG
  source 1..20: mol_type = other DNA
ctgccccccactccctgttt

SEQ ID NO: 62918 - DNA, 20 bp, synthetic construct
  misc_feature 1..20: note = Description of Artificial Sequence: Synthetic oligonucleotide
  misc_feature 1..20: note = Target: SCN10A; (+) strand; PAM type: YTN; PAM sequence: CTG
  source 1..20: mol_type = other DNA
ccccccactccctgtttgtc

SEQ ID NO: 62919 - DNA, 20 bp, synthetic construct
  misc_feature 1..20: note = Description of Artificial Sequence: Synthetic oligonucleotide
  misc_feature 1..20: note = Target: SCN10A; (+) strand; PAM type: YTN; PAM sequence: CTC
  source 1..20: mol_type = other DNA
cctgtttgtctgcctgggga

SEQ ID NO: 62920 - DNA, 20 bp, synthetic construct
  misc_feature 1..20: note = Description of Artificial Sequence: Synthetic oligonucleotide
  misc_feature 1..20: note = Target: SCN10A; (+) strand; PAM type: YTN; PAM sequence: CTG
  source 1..20: mol_type = other DNA
tttgtctgcctggggaattc

SEQ ID NO: 62921 - DNA, 20 bp, synthetic construct
  misc_feature 1..20: note = Description of Artificial Sequence: Synthetic oligonucleotide
  misc_feature 1..20: note = Target: SCN10A; (+) strand; PAM type: YTN; PAM sequence: TTT
  source 1..20: mol_type = other DNA
gtctgcctggggaattctga

SEQ ID NO: 62922 - DNA, 20 bp, synthetic construct
  misc_feature 1..20: note = Description of Artificial Sequence: Synthetic oligonucleotide
  misc_feature 1..20: note = Target: SCN10A; (+) strand; PAM type: YTN; PAM sequence: TTG
  source 1..20: mol_type = other DNA
tctgcctggggaattctgac

SEQ ID NO: 62923 - DNA, 20 bp, synthetic construct
  misc_feature 1..20: note = Description of Artificial Sequence: Synthetic oligonucleotide
  misc_feature 1..20: note = Target: SCN10A; (+) strand; PAM type: YTN; PAM sequence: CTG
  source 1..20: mol_type = other DNA
cctggggaattctgactttt

SEQ ID NO: 62924 - DNA, 20 bp, synthetic construct
  misc_feature 1..20: note = Description of Artificial Sequence: Synthetic oligonucleotide
  misc_feature 1..20: note = Target: SCN10A; (+) strand; PAM type: YTN; PAM sequence: CTG
  source 1..20: mol_type = other DNA
gggaattctgactttttctt

SEQ ID NO: 62925 - DNA, 20 bp, synthetic construct
  misc_feature 1..20: note = Description of Artificial Sequence: Synthetic oligonucleotide
  misc_feature 1..20: note = Target: SCN10A; (+) strand; PAM type: YTN; PAM sequence: TTC
  source 1..20: mol_type = other DNA
tgactttttcttccaggccc

SEQ ID NO: 62926 - DNA, 20 bp, synthetic construct
  misc_feature 1..20: note = Description of Artificial Sequence: Synthetic oligonucleotide
  misc_feature 1..20: note = Target: SCN10A; (+) strand; PAM type: YTN; PAM sequence: CTG
  source 1..20: mol_type = other DNA
actttttcttccaggccctg

SEQ ID NO: 62927 - DNA, 20 bp, synthetic construct
  misc_feature 1..20: note = Description of Artificial Sequence: Synthetic oligonucleotide
  misc_feature 1..20: note = Target: SCN10A; (+) strand; PAM type: YTN; PAM sequence: CTT
  source 1..20: mol_type = other DNA
tttcttccaggccctgctca

SEQ ID NO: 62928 - DNA, 20 bp, synthetic construct
  misc_feature 1..20: note = Description of Artificial Sequence: Synthetic oligonucleotide
  misc_feature 1..20: note = Target: SCN10A; (+) strand; PAM type: YTN; PAM sequence: TTT
  source 1..20: mol_type = other DNA
ttcttccaggccctgctcaa

SEQ ID NO: 62929 - DNA, 20 bp, synthetic construct
  misc_feature 1..20: note = Description of Artificial Sequence: Synthetic oligonucleotide
  misc_feature 1..20: note = Target: SCN10A; (+) strand; PAM type: YTN; PAM sequence: TTT
  source 1..20: mol_type = other DNA
tcttccaggccctgctcaaa

SEQ ID NO: 62930 - DNA, 20 bp, synthetic construct
  misc_feature 1..20: note = Description of Artificial Sequence: Synthetic oligonucleotide
  misc_feature 1..20: note = Target: SCN10A; (+) strand; PAM type: YTN; PAM sequence: TTT
  source 1..20: mol_type = other DNA
cttccaggccctgctcaaac

SEQ ID NO: 62931 - DNA, 20 bp, synthetic construct
  misc_feature 1..20: note = Description of Artificial Sequence: Synthetic oligonucleotide
  misc_feature 1..20: note = Target: SCN10A; (+) strand; PAM type: YTN; PAM sequence: TTC
  source 1..20: mol_type = other DNA
ttccaggccctgctcaaacg

SEQ ID NO: 62932 - DNA, 20 bp, synthetic construct
  misc_feature 1..20: note = Description of Artificial Sequence: Synthetic oligonucleotide
  misc_feature 1..20: note = Target: SCN10A; (+) strand; PAM type: YTN; PAM sequence: CTT
  source 1..20: mol_type = other DNA
ccaggccctgctcaaacgcc

SEQ ID NO: 62933 - DNA, 20 bp, synthetic construct
  misc_feature 1..20: note = Description of Artificial Sequence: Synthetic oligonucleotide
  misc_feature 1..20: note = Target: SCN10A; (+) strand; PAM type: YTN; PAM sequence: TTC
  source 1..20: mol_type = other DNA
caggccctgctcaaacgcca

SEQ ID NO: 62934 - DNA, 20 bp, synthetic construct
  misc_feature 1..20: note = Description of Artificial Sequence: Synthetic oligonucleotide
  misc_feature 1..20: note = Target: SCN10A; (+) strand; PAM type: YTN; PAM sequence: CTG
  source 1..20: mol_type = other DNA
ctcaaacgccaactcctctg

SEQ ID NO: 62935 - DNA, 20 bp, synthetic construct
  misc_feature 1..20: note = Description of Artificial Sequence: Synthetic oligonucleotide
  misc_feature 1..20: note = Target: SCN10A; (+) strand; PAM type: YTN; PAM sequence: CTC
  source 1..20: mol_type = other DNA
aaacgccaactcctctggaa

SEQ ID NO: 62936 - DNA, 20 bp, synthetic construct
  misc_feature 1..20: note = Description of Artificial Sequence: Synthetic oligonucleotide
  misc_feature 1..20: note = Target: SCN10A; (+) strand; PAM type: YTN; PAM sequence: CTC
  source 1..20: mol_type = other DNA
ctctggaaagcttggcatgg

SEQ ID NO: 62937 - DNA, 20 bp, synthetic construct
  misc_feature 1..20: note = Description of Artificial Sequence: Synthetic oligonucleotide
  misc_feature 1..20: note = Target: SCN10A; (+) strand; PAM type: YTN; PAM sequence: CTC
  source 1..20: mol_type = other DNA
tggaaagcttggcatggttt

SEQ ID NO: 62938 - DNA, 20 bp, synthetic construct
  misc_feature 1..20: note = Description of Artificial Sequence: Synthetic oligonucleotide
  misc_feature 1..20: note = Target: SCN10A; (+) strand; PAM type: YTN; PAM sequence: CTG
  source 1..20: mol_type = other DNA
gaaagcttggcatggtttaa

SEQ ID NO: 62939 - DNA, 20 bp, synthetic construct
  misc_feature 1..20: note = Description of Artificial Sequence: Synthetic oligonucleotide
  misc_feature 1..20: note = Target: SCN10A; (+) strand; PAM type: YTN; PAM sequence: CTT
  source 1..20: mol_type = other DNA
ggcatggtttaaacttcttt

SEQ ID NO: 62940 - DNA, 20 bp, synthetic construct
  misc_feature 1..20: note = Description of Artificial Sequence: Synthetic oligonucleotide
  misc_feature 1..20: note = Target: SCN10A; (+) strand; PAM type: YTN; PAM sequence: TTG
  source 1..20: mol_type = other DNA
gcatggtttaaacttcttta

SEQ ID NO: 62941 - DNA, 20 bp, synthetic construct
  misc_feature 1..20: note = Description of Artificial Sequence: Synthetic oligonucleotide
  misc_feature 1..20: note = Target: SCN10A; (+) strand; PAM type: YTN; PAM sequence: TTT
  source 1..20: mol_type = other DNA
aaacttctttatgtcaaggt

SEQ ID NO: 62942 - DNA, 20 bp, synthetic construct
  misc_feature 1..20: note = Description of Artificial Sequence: Synthetic oligonucleotide
  misc_feature 1..20: note = Target: SCN10A; (+) strand; PAM type: YTN; PAM sequence: TTA
  source 1..20: mol_type = other DNA
aacttctttatgtcaaggtc

SEQ ID NO: 62943 - DNA, 20 bp, synthetic construct
  misc_feature 1..20: note = Description of Artificial Sequence: Synthetic oligonucleotide
  misc_feature 1..20: note = Target: SCN10A; (+) strand; PAM type: YTN; PAM sequence: CTT
  source 1..20: mol_type = other DNA
ctttatgtcaaggtctcctc

SEQ ID NO: 62944 - DNA, 20 bp, synthetic construct
  misc_feature 1..20: note = Description of Artificial Sequence: Synthetic oligonucleotide
  misc_feature 1..20: note = Target: SCN10A; (+) strand; PAM type: YTN; PAM sequence: TTC
  source 1..20: mol_type = other DNA
tttatgtcaaggtctcctct

SEQ ID NO: 62945 - DNA, 20 bp, synthetic construct
  misc_feature 1..20: note = Description of Artificial Sequence: Synthetic oligonucleotide
  misc_feature 1..20: note = Target: SCN10A; (+) strand; PAM type: YTN; PAM sequence: CTT
  source 1..20: mol_type = other DNA
tatgtcaaggtctcctctgc

SEQ ID NO: 62946 - DNA, 20 bp, synthetic construct
  misc_feature 1..20: note = Description of Artificial Sequence: Synthetic oligonucleotide
  misc_feature 1..20: note = Target: SCN10A; (+) strand; PAM type: YTN; PAM sequence: TTT
  source 1..20: mol_type = other DNA
atgtcaaggtctcctctgca

SEQ ID NO: 62947 - DNA, 20 bp, synthetic construct
  misc_feature 1..20: note = Description of Artificial Sequence: Synthetic oligonucleotide
  misc_feature 1..20: note = Target: SCN10A; (+) strand; PAM type: YTN; PAM sequence: TTA
  source 1..20: mol_type = other DNA
tgtcaaggtctcctctgcat

SEQ ID NO: 62948 - DNA, 20 bp, synthetic construct
  misc_feature 1..20: note = Description of Artificial Sequence: Synthetic oligonucleotide
  misc_feature 1..20: note = Target: SCN10A; (+) strand; PAM type: YTN; PAM sequence: CTC
  source 1..20: mol_type = other DNA
ctctgcatttcccttttgcc

SEQ ID NO: 62949 - DNA, 20 bp, synthetic construct
  misc_feature 1..20: note = Description of Artificial Sequence: Synthetic oligonucleotide
  misc_feature 1..20: note = Target: SCN10A; (+) strand; PAM type: YTN; PAM sequence: CTC
  source 1..20: mol_type = other DNA
tgcatttcccttttgccctt

SEQ ID NO: 62950 - DNA, 20 bp, synthetic construct
  misc_feature 1..20: note = Description of Artificial Sequence: Synthetic oligonucleotide
  misc_feature 1..20: note = Target: SCN10A; (+) strand; PAM type: YTN; PAM sequence: CTG
  source 1..20: mol_type = other DNA
catttcccttttgccctttg

SEQ ID NO: 62951 - DNA, 20 bp, synthetic construct
  misc_feature 1..20: note = Description of Artificial Sequence: Synthetic oligonucleotide
  misc_feature 1..20: note = Target: SCN10A; (+) strand; PAM type: YTN; PAM sequence: TTT
  source 1..20: mol_type = other DNA
cccttttgccctttgtcact

SEQ ID NO: 62952 - DNA, 20 bp, synthetic construct
  misc_feature 1..20: note = Description of Artificial Sequence: Synthetic oligonucleotide
  misc_feature 1..20: note = Target: SCN10A; (+) strand; PAM type: YTN; PAM sequence: TTC
  source 1..20: mol_type = other DNA
ccttttgccctttgtcactc

SEQ ID NO: 62953 - DNA, 20 bp, synthetic construct
  misc_feature 1..20: note = Description of Artificial Sequence: Synthetic oligonucleotide
  misc_feature 1..20: note = Target: SCN10A; (+) strand; PAM type: YTN; PAM sequence: CTT
  source 1..20: mol_type = other DNA
ttgccctttgtcactcaagc

SEQ ID NO: 62954 - DNA, 20 bp, synthetic construct
  misc_feature 1..20: note = Description of Artificial Sequence: Synthetic oligonucleotide
  misc_feature 1..20: note = Target: SCN10A; (+) strand; PAM type: YTN; PAM sequence: TTT
  source 1..20: mol_type = other DNA
tgccctttgtcactcaagcc

SEQ ID NO: 62955 - DNA, 20 bp, synthetic construct
  misc_feature 1..20: note = Description of Artificial Sequence: Synthetic oligonucleotide
  misc_feature 1..20: note = Target: SCN10A; (+) strand; PAM type: YTN; PAM sequence: TTT
  source 1..20: mol_type = other DNA
gccctttgtcactcaagccc

SEQ ID NO: 62956 - DNA, 20 bp, synthetic construct
  misc_feature 1..20: note = Description of Artificial Sequence: Synthetic oligonucleotide
  misc_feature 1..20: note = Target: SCN10A; (+) strand; PAM type: YTN; PAM sequence: TTG
  source 1..20: mol_type = other DNA
ccctttgtcactcaagccct

SEQ ID NO: 62957 - DNA, 20 bp, synthetic construct
  misc_feature 1..20: note = Description of Artificial Sequence: Synthetic oligonucleotide
  misc_feature 1..20: note = Target: SCN10A; (+) strand; PAM type: YTN; PAM sequence: CTT
  source 1..20: mol_type = other DNA
tgtcactcaagccctgaagc

SEQ ID NO: 62958 - DNA, 20 bp, synthetic construct
  misc_feature 1..20: note = Description of Artificial Sequence: Synthetic oligonucleotide
  misc_feature 1..20: note = Target: SCN10A; (+) strand; PAM type: YTN; PAM sequence: TTT
  source 1..20: mol_type = other DNA
gtcactcaagccctgaagcc

SEQ ID NO: 62959 - DNA, 20 bp, synthetic construct
  misc_feature 1..20: note = Description of Artificial Sequence: Synthetic oligonucleotide
  misc_feature 1..20: note = Target: SCN10A; (+) strand; PAM type: YTN; PAM sequence: TTG
  source 1..20: mol_type = other DNA
tcactcaagccctgaagccc

SEQ ID NO: 62960 - DNA, 20 bp, synthetic construct
  misc_feature 1..20: note = Description of Artificial Sequence: Synthetic oligonucleotide
  misc_feature 1..20: note = Target: SCN10A; (+) strand; PAM type: YTN; PAM sequence: CTC
  source 1..20: mol_type = other DNA
aagccctgaagcccctcccc

SEQ ID NO: 62961 - DNA, 20 bp, synthetic construct
  misc_feature 1..20: note = Description of Artificial Sequence: Synthetic oligonucleotide
  misc_feature 1..20: note = Target: SCN10A; (+) strand; PAM type: YTN; PAM sequence: CTG
  source 1..20: mol_type = other DNA
aagcccctccccactgcctg

SEQ ID NO: 62962 - DNA, 20 bp, synthetic construct
  misc_feature 1..20: note = Description of Artificial Sequence: Synthetic oligonucleotide
  misc_feature 1..20: note = Target: SCN10A; (+) strand; PAM type: YTN; PAM sequence: CTC
  source 1..20: mol_type = other DNA
cccactgcctgtggctgtcc

SEQ ID NO: 62963 - DNA, 20 bp, synthetic construct
  misc_feature 1..20: note = Description of Artificial Sequence: Synthetic oligonucleotide
  misc_feature 1..20: note = Target: SCN10A; (+) strand; PAM type: YTN; PAM sequence: CTG
  source 1..20: mol_type = other DNA
cctgtggctgtcccttgggg

SEQ ID NO: 62964 - DNA, 20 bp, synthetic construct
  misc_feature 1..20: note = Description of Artificial Sequence: Synthetic oligonucleotide
  misc_feature 1..20: note = Target: SCN10A; (+) strand; PAM type: YTN; PAM sequence: CTG
  source 1..20: mol_type = other DNA
tggctgtcccttggggataa

SEQ ID NO: 62965 - DNA, 20 bp, synthetic construct
  misc_feature 1..20: note = Description of Artificial Sequence: Synthetic oligonucleotide
  misc_feature 1..20: note = Target: SCN10A; (+) strand; PAM type: YTN; PAM sequence: CTG
  source 1..20: mol_type = other DNA
tcccttggggataactctta

SEQ ID NO: 62966 - DNA, 20 bp, synthetic construct
  misc_feature 1..20: note = Description of Artificial Sequence: Synthetic oligonucleotide
  misc_feature 1..20: note = Target: SCN10A; (+) strand; PAM type: YTN; PAM sequence: CTT
  source 1..20: mol_type = other DNA
ggggataactcttacctgtc

SEQ ID NO: 62967 - DNA, 20 bp, synthetic construct
  misc_feature 1..20: note = Description of Artificial Sequence: Synthetic oligonucleotide
  misc_feature 1..20: note = Target: SCN10A; (+) strand; PAM type: YTN; PAM sequence: TTG
  source 1..20: mol_type = other DNA
gggataactcttacctgtcc

SEQ ID NO: 62968 - DNA, 20 bp, synthetic construct
  misc_feature 1..20: note = Description of Artificial Sequence: Synthetic oligonucleotide
  misc_feature 1..20: note = Target: SCN10A; (+) strand; PAM type: YTN; PAM sequence: CTC
  source 1..20: mol_type = other DNA
ttacctgtcctttggggatc

SEQ ID NO: 62969 - DNA, 20 bp, synthetic construct
  misc_feature 1..20: note = Description of Artificial Sequence: Synthetic oligonucleotide
  misc_feature 1..20: note = Target: SCN10A; (+) strand; PAM type: YTN; PAM sequence: CTT
  source 1..20: mol_type = other DNA
acctgtcctttggggatcac

SEQ ID NO: 62970 - DNA, 20 bp, synthetic construct
  misc_feature 1..20: note = Description of Artificial Sequence: Synthetic oligonucleotide
  misc_feature 1..20: note = Target: SCN10A; (+) strand; PAM type: YTN; PAM sequence: TTA
  source 1..20: mol_type = other DNA
cctgtcctttggggatcact

SEQ ID NO: 62971 - DNA, 20 bp, synthetic construct
  misc_feature 1..20: note = Description of Artificial Sequence: Synthetic oligonucleotide
  misc_feature 1..20: note = Target: SCN10A; (+) strand; PAM type: YTN; PAM sequence: CTG
  source 1..20: mol_type = other DNA
tcctttggggatcacttcct

SEQ ID NO: 62972 - DNA, 20 bp, synthetic construct
  misc_feature 1..20: note = Description of Artificial Sequence: Synthetic oligonucleotide
  misc_feature 1..20: note = Target: SCN10A; (+) strand; PAM type: YTN; PAM sequence: CTT
  source 1..20: mol_type = other DNA
tggggatcacttcctgctgg

SEQ ID NO: 62973 - DNA, 20 bp, synthetic construct
  misc_feature 1..20: note = Description of Artificial Sequence: Synthetic oligonucleotide
  misc_feature 1..20: note = Target: SCN10A; (+) strand; PAM type: YTN; PAM sequence: TTT
  source 1..20: mol_type = other DNA
ggggatcacttcctgctgga

SEQ ID NO: 62974 - DNA, 20 bp, synthetic construct
  misc_feature 1..20: note = Description of Artificial Sequence: Synthetic oligonucleotide
  misc_feature 1..20: note = Target: SCN10A; (+) strand; PAM type: YTN; PAM sequence: TTG
  source 1..20: mol_type = other DNA
gggatcacttcctgctggaa

SEQ ID NO: 62975 - DNA, 20 bp, synthetic construct
  misc_feature 1..20: note = Description of Artificial Sequence: Synthetic oligonucleotide
  misc_feature 1..20: note = Target: SCN10A; (+) strand; PAM type: YTN; PAM sequence: CTT
  source 1..20: mol_type = other DNA
cctgctggaagctctgagca

SEQ ID NO: 62976 - DNA, 20 bp, synthetic construct
  misc_feature 1..20: note = Description of Artificial Sequence: Synthetic oligonucleotide
  misc_feature 1..20: note = Target: SCN10A; (+) strand; PAM type: YTN; PAM sequence: TTC
  source 1..20: mol_type = other DNA
ctgctggaagctctgagcat

SEQ ID NO: 62977 - DNA, 20 bp, synthetic construct
  misc_feature 1..20: note = Description of Artificial Sequence: Synthetic oligonucleotide
  misc_feature 1..20: note = Target: SCN10A; (+) strand; PAM type: YTN; PAM sequence: CTG
  source 1..20: mol_type = other DNA
ctggaagctctgagcatctt

SEQ ID NO: 62978 - DNA, 20 bp, synthetic construct
  misc_feature 1..20: note = Description of Artificial Sequence: Synthetic oligonucleotide
  misc_feature 1..20: note = Target: SCN10A; (+) strand; PAM type: YTN; PAM sequence: CTG
  source 1..20: mol_type = other DNA
gaagctctgagcatcttccc

SEQ ID NO: 62979 - DNA, 20 bp, synthetic construct
  misc_feature 1..20: note = Description of Artificial Sequence: Synthetic oligonucleotide
  misc_feature 1..20: note = Target: SCN10A; (+) strand; PAM type: YTN; PAM sequence: CTC
  source 1..20: mol_type = other DNA
tgagcatcttccccaccatc

SEQ ID NO: 62980 - DNA, 20 bp, synthetic construct
  misc_feature 1..20: note = Description of Artificial Sequence: Synthetic oligonucleotide
  misc_feature 1..20: note = Target: SCN10A; (+) strand; PAM type: YTN; PAM sequence: CTG
  source 1..20: mol_type = other DNA
agcatcttccccaccatcat

SEQ ID NO: 62981 - DNA, 20 bp, synthetic construct
  misc_feature 1..20: note = Description of Artificial Sequence: Synthetic oligonucleotide
  misc_feature 1..20: note = Target: SCN10A; (+) strand; PAM type: YTN; PAM sequence: CTT
  source 1..20: mol_type = other DNA
ccccaccatcatcctccaag

SEQ ID NO: 62982 - DNA, 20 bp, synthetic construct
  misc_feature 1..20: note = Description of Artificial Sequence: Synthetic oligonucleotide
  misc_feature 1..20: note = Target: SCN10A; (+) strand; PAM type: YTN; PAM sequence: TTC
  source 1..20: mol_type = other DNA
cccaccatcatcctccaagt

SEQ ID NO: 62983 - DNA, 20 bp, synthetic construct
  misc_feature 1..20: note = Description of Artificial Sequence: Synthetic oligonucleotide
  misc_feature 1..20: note = Target: SCN10A; (+) strand; PAM type: YTN; PAM sequence: CTC
  source 1..20: mol_type = other DNA
caagtcatcaagatcagatt

SEQ ID NO: 62984 - DNA, 20 bp, synthetic construct
  misc_feature 1..20: note = Description of Artificial Sequence: Synthetic oligonucleotide
  misc_feature 1..20: note = Target: SCN10A; (+) strand; PAM type: YTN; PAM sequence: TTC
  source 1..20: mol_type = other DNA
accctcagcaatgggcacag

SEQ ID NO: 62985 - DNA, 20 bp, synthetic construct
  misc_feature 1..20: note = Description of Artificial Sequence: Synthetic oligonucleotide
  misc_feature 1..20: note = Target: SCN10A; (+) strand; PAM type: YTN; PAM sequence: CTC
  source 1..20: mol_type = other DNA
agcaatgggcacagagaccc

SEQ ID NO: 62986 - DNA, 20 bp, synthetic construct
  misc_feature 1..20: note = Description of Artificial Sequence: Synthetic oligonucleotide
  misc_feature 1..20: note = Target: SCN10A; (+) strand; PAM type: YTN; PAM sequence: TTA
  source 1..20: mol_type = other DNA
gcgatgaagtcactgtgctc

SEQ ID NO: 62987 - DNA, 20 bp, synthetic construct
  misc_feature 1..20: note = Description of Artificial Sequence: Synthetic oligonucleotide
  misc_feature 1..20: note = Target: SCN10A; (+) strand; PAM type: YTN; PAM sequence: CTG
  source 1..20: mol_type = other DNA
tgctcatccctggggcctct

SEQ ID NO: 62988 - DNA, 20 bp, synthetic construct
  misc_feature 1..20: note = Description of Artificial Sequence: Synthetic oligonucleotide
  misc_feature 1..20: note = Target: SCN10A; (+) strand; PAM type: YTN; PAM sequence: CTC
  source 1..20: mol_type = other DNA
atccctggggcctctgggag

SEQ ID NO: 62989 - DNA, 20 bp, synthetic construct
  misc_feature 1..20: note = Description of Artificial Sequence: Synthetic oligonucleotide
  misc_feature 1..20: note = Target: SCN10A; (+) strand; PAM type: YTN; PAM sequence: CTG
  source 1..20: mol_type = other DNA
gggcctctgggagcttggag

SEQ ID NO: 62990 - DNA, 20 bp, synthetic construct
  misc_feature 1..20: note = Description of Artificial Sequence: Synthetic oligonucleotide
  misc_feature 1..20: note = Target: SCN10A; (+) strand; PAM type: YTN; PAM sequence: CTC
  source 1..20: mol_type = other DNA
tgggagcttggagccctcca

SEQ ID NO: 62991 - DNA, 20 bp, synthetic construct
  misc_feature 1..20: note = Description of Artificial Sequence: Synthetic oligonucleotide
  misc_feature 1..20: note = Target: SCN10A; (+) strand; PAM type: YTN; PAM sequence: CTG
  source 1..20: mol_type = other DNA
ggagcttggagccctccaga

SEQ ID NO: 62992 - DNA, 20 bp, synthetic construct
  misc_feature 1..20: note = Description of Artificial Sequence: Synthetic oligonucleotide
  misc_feature 1..20: note = Target: SCN10A; (+) strand; PAM type: YTN; PAM sequence: CTT
  source 1..20: mol_type = other DNA
ggagccctccagagctcccc

SEQ ID NO: 62993 - DNA, 20 bp, synthetic construct
  misc_feature 1..20: note = Description of Artificial Sequence: Synthetic oligonucleotide
  misc_feature 1..20: note = Target: SCN10A; (+) strand; PAM type: YTN; PAM sequence: TTG
  source 1..20: mol_type = other DNA
gagccctccagagctccccc

SEQ ID NO: 62994 - DNA, 20 bp, synthetic construct
  misc_feature 1..20: note = Description of Artificial Sequence: Synthetic oligonucleotide
  misc_feature 1..20: note = Target: SCN10A; (+) strand; PAM type: YTN; PAM sequence: CTC
  source 1..20: mol_type = other DNA
cagagctccccctggcagtg

SEQ ID NO: 62995 - DNA, 20 bp, synthetic construct
  misc_feature 1..20: note = Description of Artificial Sequence: Synthetic oligonucleotide
  misc_feature 1..20: note = Target: SCN10A; (+) strand; PAM type: YTN; PAM sequence: CTC
  source 1..20: mol_type = other DNA
cccctggcagtgttggcagc

SEQ ID NO: 62996 - DNA, 20 bp, synthetic construct
  misc_feature 1..20: note = Description of Artificial Sequence: Synthetic oligonucleotide
  misc_feature 1..20: note = Target: SCN10A; (+) strand; PAM type: YTN; PAM sequence: CTG
  source 1..20: mol_type = other DNA
gcagtgttggcagcaatgtg

SEQ ID NO: 62997 - DNA, 20 bp, synthetic construct
  misc_feature 1..20: note = Description of Artificial Sequence: Synthetic oligonucleotide
  misc_feature 1..20: note = Target: SCN10A; (+) strand; PAM type: YTN; PAM sequence: TTG
  source 1..20: mol_type = other DNA
gcagcaatgtggttctcagc

SEQ ID NO: 62998 - DNA, 20 bp, synthetic construct
  misc_feature 1..20: note = Description of Artificial Sequence: Synthetic oligonucleotide
  misc_feature 1..20: note = Target: SCN10A; (+) strand; PAM type: YTN; PAM sequence: TTC
  source 1..20: mol_type = other DNA
tcagccttggagctggagag

SEQ ID NO: 62999 - DNA, 20 bp, synthetic construct
  misc_feature 1..20: note = Description of Artificial Sequence: Synthetic oligonucleotide
  misc_feature 1..20: note = Target: SCN10A; (+) strand; PAM type: YTN; PAM sequence: CTC
  source 1..20: mol_type = other DNA
agccttggagctggagagtg

SEQ ID NO: 63000 - DNA, 20 bp, synthetic construct
  misc_feature 1..20: note = Description of Artificial Sequence: Synthetic oligonucleotide
  misc_feature 1..20: note = Target: SCN10A; (+) strand; PAM type: YTN; PAM sequence: CTT
  source 1..20: mol_type = other DNA
ggagctggagagtgggagtt

SEQ ID NO: 63001 - DNA, 20 bp, synthetic construct
  misc_feature 1..20: note = Description of Artificial Sequence: Synthetic oligonucleotide
  misc_feature 1..20: note = Target: SCN10A; (+) strand; PAM type: YTN; PAM sequence: TTG
  source 1..20: mol_type = other DNA
gagctggagagtgggagttt

SEQ ID NO: 63002 - DNA, 20 bp, synthetic construct
  misc_feature 1..20: note = Description of Artificial Sequence: Synthetic oligonucleotide
  misc_feature 1..20: note = Target: SCN10A; (+) strand; PAM type: YTN; PAM sequence: CTG
  source 1..20: mol_type = other DNA
gagagtgggagtttcaccac

SEQ ID NO: 63003 - DNA, 20 bp, synthetic construct
  misc_feature 1..20: note = Description of Artificial Sequence: Synthetic oligonucleotide
  misc_feature 1..20: note = Target: SCN10A; (+) strand; PAM type: YTN; PAM sequence: TTT
  source 1..20: mol_type = other DNA
caccaccagctcaggctctg

SEQ ID NO: 63004 - DNA, 20 bp, synthetic construct
  misc_feature 1..20: note = Description of Artificial Sequence: Synthetic oligonucleotide
  misc_feature 1..20: note = Target: SCN10A; (+) strand; PAM type: YTN; PAM sequence: TTC
  source 1..20: mol_type = other DNA
accaccagctcaggctctgc

SEQ ID NO: 63005 - DNA, 20 bp, synthetic construct
  misc_feature 1..20: note = Description of Artificial Sequence: Synthetic oligonucleotide
  misc_feature 1..20: note = Target: SCN10A; (+) strand; PAM type: YTN; PAM sequence: CTC
  source 1..20: mol_type = other DNA
aggctctgccttgggctggg

SEQ ID NO: 63006 - DNA, 20 bp, synthetic construct
  misc_feature 1..20: note = Description of Artificial Sequence: Synthetic oligonucleotide
  misc_feature 1..20: note = Target: SCN10A; (+) strand; PAM type: YTN; PAM sequence: CTC
  source 1..20: mol_type = other DNA
tgccttgggctgggggaatg

SEQ ID NO: 63007 - DNA, 20 bp, synthetic construct
  misc_feature 1..20: note = Description of Artificial Sequence: Synthetic oligonucleotide
  misc_feature 1..20: note = Target: SCN10A; (+) strand; PAM type: YTN; PAM sequence: CTG
  source 1..20: mol_type = other DNA
ccttgggctgggggaatggg

SEQ ID NO: 63008 - DNA, 20 bp, synthetic construct
  misc_feature 1..20: note = Description of Artificial Sequence: Synthetic oligonucleotide
  misc_feature 1..20: note = Target: SCN10A; (+) strand; PAM type: YTN; PAM sequence: CTT
  source 1..20: mol_type = other DNA
gggctgggggaatgggcagg

SEQ ID NO: 63009 - DNA, 20 bp, synthetic construct
  misc_feature 1..20: note = Description of Artificial Sequence: Synthetic oligonucleotide
  misc_feature 1..20: note = Target: SCN10A; (+) strand; PAM type: YTN; PAM sequence: TTG
  source 1..20: mol_type = other DNA
ggctgggggaatgggcagga

SEQ ID NO: 63010 - DNA, 20 bp, synthetic construct
  misc_feature 1..20: note = Description of Artificial Sequence: Synthetic oligonucleotide
  misc_feature 1..20: note = Target: SCN10A; (+) strand; PAM type: YTN; PAM sequence: CTG
  source 1..20: mol_type = other DNA
ggggaatgggcaggacctgc

SEQ ID NO: 63011 - DNA, 20 bp, synthetic construct
  misc_feature 1..20: note = Description of Artificial Sequence: Synthetic oligonucleotide
  misc_feature 1..20: note = Target: SCN10A; (+) strand; PAM type: YTN; PAM sequence: CTG
  source 1..20: mol_type = other DNA
ctgaagaagctgcaaagagc

SEQ ID NO: 63012 - DNA, 20 bp, synthetic construct
  misc_feature 1..20: note = Description of Artificial Sequence: Synthetic oligonucleotide
  misc_feature 1..20: note = Target: SCN10A; (+) strand; PAM type: YTN; PAM sequence: CTG
  source 1..20: mol_type = other DNA
aagaagctgcaaagagcctg

SEQ ID NO: 63013 - DNA, 20 bp, synthetic construct
  misc_feature 1..20: note = Description of Artificial Sequence: Synthetic oligonucleotide
  misc_feature 1..20: note = Target: SCN10A; (+) strand; PAM type: YTN; PAM sequence: CTG
  source 1..20: mol_type = other DNA
caaagagcctgtttggtacg

SEQ ID NO: 63014 - DNA, 20 bp, synthetic construct
  misc_feature 1..20: note = Description of Artificial Sequence: Synthetic oligonucleotide
  misc_feature 1..20: note = Target: SCN10A; (+) strand; PAM type: YTN; PAM sequence: CTG
  source 1..20: mol_type = other DNA
tttggtacgatggccaaaga

SEQ ID NO: 63015 - DNA, 20 bp, synthetic construct
  misc_feature 1..20: note = Description of Artificial Sequence: Synthetic oligonucleotide
  misc_feature 1..20: note = Target: SCN10A; (+) strand; PAM type: YTN; PAM sequence: TTT
  source 1..20: mol_type = other DNA
ggtacgatggccaaagacct

SEQ ID NO: 63016 - DNA, 20 bp, synthetic construct
  misc_feature 1..20: note = Description of Artificial Sequence: Synthetic oligonucleotide
  misc_feature 1..20: note = Target: SCN10A; (+) strand; PAM type: YTN; PAM sequence: TTG
  source 1..20: mol_type = other DNA
gtacgatggccaaagacctg

SEQ ID NO: 63017 - DNA, 20 bp, synthetic construct
  misc_feature 1..20: note = Description of Artificial Sequence: Synthetic oligonucleotide
  misc_feature 1..20: note = Target: SCN10A; (+) strand; PAM type: YTN; PAM sequence: CTG
  source 1..20: mol_type = other DNA
gatccgtgccagggccacct

SEQ ID NO: 63018 - DNA, 20 bp, synthetic construct
  misc_feature 1..20: note = Description of Artificial Sequence: Synthetic oligonucleotide
  misc_feature 1..20: note = Target: SCN10A; (+) strand; PAM type: YTN; PAM sequence: CTG
  source 1..20: mol_type = other DNA
caggttgttcacctccccat

SEQ ID NO: 63019 - DNA, 20 bp, synthetic construct
  misc_feature 1..20: note = Description of Artificial Sequence: Synthetic oligonucleotide
  misc_feature 1..20: note = Target: SCN10A; (+) strand; PAM type: YTN; PAM sequence: TTG
  source 1..20: mol_type = other DNA
ttcacctccccatcgtcctc

SEQ ID NO: 63020 - DNA, 20 bp, synthetic construct
  misc_feature 1..20: note = Description of Artificial Sequence: Synthetic oligonucleotide
  misc_feature 1..20: note = Target: SCN10A; (+) strand; PAM type: YTN; PAM sequence: TTC
  source 1..20: mol_type = other DNA
acctccccatcgtcctccgg

SEQ ID NO: 63021 - DNA, 20 bp, synthetic construct
  misc_feature 1..20: note = Description of Artificial Sequence: Synthetic oligonucleotide
  misc_feature 1..20: note = Target: SCN10A; (+) strand; PAM type: YTN; PAM sequence: CTC
  source 1..20: mol_type = other DNA
cccatcgtcctccggggctg

SEQ ID NO: 63022 - DNA, 20 bp, synthetic construct
  misc_feature 1..20: note = Description of Artificial Sequence: Synthetic oligonucleotide
  misc_feature 1..20: note = Target: SCN10A; (+) strand; PAM type: YTN; PAM sequence: CTC
  source 1..20: mol_type = other DNA
cggggctgtgaggttgtcag

SEQ ID NO: 63023 - DNA, 20 bp, synthetic construct
  misc_feature 1..20: note = Description of Artificial Sequence: Synthetic oligonucleotide
  misc_feature 1..20: note = Target: SCN10A; (+) strand; PAM type: YTN; PAM sequence: CTG
  source 1..20: mol_type = other DNA
tgaggttgtcagcactgaaa

SEQ ID NO: 63024 - DNA, 20 bp, synthetic construct
  misc_feature 1..20: note = Description of Artificial Sequence: Synthetic oligonucleotide
  misc_feature 1..20: note = Target: SCN10A; (+) strand; PAM type: YTN; PAM sequence: TTG
  source 1..20: mol_type = other DNA
tcagcactgaaagagttcaa

SEQ ID NO: 63025 - DNA, 20 bp, synthetic construct
  misc_feature 1..20: note = Description of Artificial Sequence: Synthetic oligonucleotide
  misc_feature 1..20: note = Target: SCN10A; (+) strand; PAM type: YTN; PAM sequence: CTG
  source 1..20: mol_type = other DNA
aaagagttcaatagcagggc

SEQ ID NO: 63026 - DNA, 20 bp, synthetic construct
  misc_feature 1..20: note = Description of Artificial Sequence: Synthetic oligonucleotide
  misc_feature 1..20: note = Target: SCN10A; (+) strand; PAM type: YTN; PAM sequence: TTC
  source 1..20: mol_type = other DNA
aatagcagggcgatgaacag

SEQ ID NO: 63027 - DNA, 20 bp, synthetic construct
  misc_feature 1..20: note = Description of Artificial Sequence: Synthetic oligonucleotide
  misc_feature 1..20: note = Target: SCN10A; (+) strand; PAM type: YTN; PAM sequence: TTA
  source 1..20: mol_type = other DNA
agcacctgaagagaaggaat

SEQ ID NO: 63028 - DNA, 20 bp, synthetic construct
  misc_feature 1..20: note = Description of Artificial Sequence: Synthetic oligonucleotide
  misc_feature 1..20: note = Target: SCN10A; (+) strand; PAM type: YTN; PAM sequence: CTG
  source 1..20: mol_type = other DNA
aagagaaggaatggaaggga

SEQ ID NO: 63029 - DNA, 20 bp, synthetic construct
  misc_feature 1..20: note = Description of Artificial Sequence: Synthetic oligonucleotide
  misc_feature 1..20: note = Target: SCN10A; (+) strand; PAM type: YTN; PAM sequence: TTG
  source 1..20: mol_type = other DNA
atcaatctctaagctgagcc

SEQ ID NO: 63030 - DNA, 20 bp, synthetic construct
  misc_feature 1..20: note = Description of Artificial Sequence: Synthetic oligonucleotide
  misc_feature 1..20: note = Target: SCN10A; (+) strand; PAM type: YTN; PAM sequence: CTC
  source 1..20: mol_type = other DNA
taagctgagccccacattgg

SEQ ID NO: 63031 - DNA, 20 bp, synthetic construct
  misc_feature 1..20: note = Description of Artificial Sequence: Synthetic oligonucleotide
  misc_feature 1..20: note = Target: SCN10A; (+) strand; PAM type: YTN; PAM sequence: CTA
  source 1..20: mol_type = other DNA
agctgagccccacattggcc

SEQ ID NO: 63032 - DNA, 20 bp, synthetic construct
  misc_feature 1..20: note = Description of Artificial Sequence: Synthetic oligonucleotide
  misc_feature 1..20: note = Target: SCN10A; (+) strand; PAM type: YTN; PAM sequence: CTG
  source 1..20: mol_type = other DNA
agccccacattggcctaccg

SEQ ID NO: 63033 - DNA, 20 bp, synthetic construct
  misc_feature 1..20: note = Description of Artificial Sequence: Synthetic oligonucleotide
  misc_feature 1..20: note = Target: SCN10A; (+) strand; PAM type: YTN; PAM sequence: TTG
  source 1..20: mol_type = other DNA
gcctaccgggttagcagctg

SEQ ID NO: 63034 - DNA, 20 bp, synthetic construct
  misc_feature 1..20: note = Description of Artificial Sequence: Synthetic oligonucleotide
  misc_feature 1..20: note = Target: SCN10A; (+) strand; PAM type: YTN; PAM sequence: CTA
  source 1..20: mol_type = other DNA
ccgggttagcagctggctgg

SEQ ID NO: 63035 - DNA, 20 bp, synthetic construct
  misc_feature 1..20: note = Description of Artificial Sequence: Synthetic oligonucleotide
  misc_feature 1..20: note = Target: SCN10A; (+) strand; PAM type: YTN; PAM sequence: TTA
  source 1..20: mol_type = other DNA
gcagctggctggcaagacag

SEQ ID NO: 63036 - DNA, 20 bp, synthetic construct
  misc_feature 1..20: note = Description of Artificial Sequence: Synthetic oligonucleotide
  misc_feature 1..20: note = Target: SCN10A; (+) strand; PAM type: YTN; PAM sequence: CTG
  source 1..20: mol_type = other DNA
gctggcaagacagccacggc

SEQ ID NO: 63037 - DNA, 20 bp, synthetic construct
  misc_feature 1..20: note = Description of Artificial Sequence: Synthetic oligonucleotide
  misc_feature 1..20: note = Target: SCN10A; (+) strand; PAM type: YTN; PAM sequence: CTG
  source 1..20: mol_type = other DNA
gcaagacagccacggcctgg

SEQ ID NO: 63038 - DNA, 20 bp, synthetic construct
  misc_feature 1..20: note = Description of Artificial Sequence: Synthetic oligonucleotide
  misc_feature 1..20: note = Target: SCN10A; (+) strand; PAM type: YTN; PAM sequence: CTG
  source 1..20: mol_type = other DNA
ggcctcttcctgcccacccg

SEQ ID NO: 63039 - DNA, 20 bp, synthetic construct
  misc_feature 1..20: note = Description of Artificial Sequence: Synthetic oligonucleotide
  misc_feature 1..20: note = Target: SCN10A; (+) strand; PAM type: YTN; PAM sequence: CTC
  source 1..20: mol_type = other DNA
ttcctgcccacccgggatgc

SEQ ID NO: 63040 - DNA, 20 bp, synthetic construct
  misc_feature 1..20: note = Description of Artificial Sequence: Synthetic oligonucleotide
  misc_feature 1..20: note = Target: SCN10A; (+) strand; PAM type: YTN; PAM sequence: CTT
  source 1..20: mol_type = other DNA
cctgcccacccgggatgctg

SEQ ID NO: 63041 - DNA, 20 bp, synthetic construct
  misc_feature 1..20: note = Description of Artificial Sequence: Synthetic oligonucleotide
  misc_feature 1..20: note = Target: SCN10A; (+) strand; PAM type: YTN; PAM sequence: TTC
  source 1..20: mol_type = other DNA
ctgcccacccgggatgctgt

SEQ ID NO: 63042 - DNA, 20 bp, synthetic construct
  misc_feature 1..20: note = Description of Artificial Sequence: Synthetic oligonucleotide
  misc_feature 1..20: note = Target: SCN10A; (+) strand; PAM type: YTN; PAM sequence: CTG
  source 1..20: mol_type = other DNA
cccacccgggatgctgtccc

SEQ ID NO: 63043 - DNA, 20 bp, synthetic construct
  misc_feature 1..20: note = Description of Artificial Sequence: Synthetic oligonucleotide
  misc_feature 1..20: note = Target: SCN10A; (+) strand; PAM type: YTN; PAM sequence: CTG
  source 1..20: mol_type = other DNA
tcccttttgggggaatggac

SEQ ID NO: 63044 - DNA, 20 bp, synthetic construct
  misc_feature 1..20: note = Description of Artificial Sequence: Synthetic oligonucleotide
  misc_feature 1..20: note = Target: SCN10A; (+) strand; PAM type: YTN; PAM sequence: CTT
  source 1..20: mol_type = other DNA
ttgggggaatggactttctg

SEQ ID NO: 63045 - DNA, 20 bp, synthetic construct
  misc_feature 1..20: note = Description of Artificial Sequence: Synthetic oligonucleotide
  misc_feature 1..20: note = Target: SCN10A; (+) strand; PAM type: YTN; PAM sequence: TTT
  source 1..20: mol_type = other DNA
tgggggaatggactttctga

SEQ ID NO: 63046 - DNA, 20 bp, synthetic construct
  misc_feature 1..20: note = Description of Artificial Sequence: Synthetic oligonucleotide
  misc_feature 1..20: note = Target: SCN10A; (+) strand; PAM type: YTN; PAM sequence: TTT
  source 1..20: mol_type = other DNA
gggggaatggactttctgag

SEQ ID NO: 63047 - DNA, 20 bp, synthetic construct
  misc_feature 1..20: note = Description of Artificial Sequence: Synthetic oligonucleotide
  misc_feature 1..20: note = Target: SCN10A; (+) strand; PAM type: YTN; PAM sequence: TTG
  source 1..20: mol_type = other DNA
ggggaatggactttctgaga

SEQ ID NO: 63048 - DNA, 20 bp, synthetic construct
  misc_feature 1..20: note = Description of Artificial Sequence: Synthetic oligonucleotide
  misc_feature 1..20: note = Target: SCN10A; (+) strand; PAM type: YTN; PAM sequence: CTT
  source 1..20: mol_type = other DNA
tctgagagcagttgagggaa

SEQ ID NO: 63049 - DNA, 20 bp, synthetic construct
  misc_feature 1..20: note = Description of Artificial Sequence: Synthetic oligonucleotide
  misc_feature 1..20: note = Target: SCN10A; (+) strand; PAM type: YTN; PAM sequence: TTT
  source 1..20: mol_type = other DNA
ctgagagcagttgagggaaa

SEQ ID NO: 63050 - DNA, 20 bp, synthetic construct
  misc_feature 1..20: note = Description of Artificial Sequence: Synthetic oligonucleotide
  misc_feature 1..20: note = Target: SCN10A; (+) strand; PAM type: YTN; PAM sequence: TTC
  source 1..20: mol_type = other DNA
tgagagcagttgagggaaag

SEQ ID NO: 63051 - DNA, 20 bp, synthetic construct
  misc_feature 1..20: note = Description of Artificial Sequence: Synthetic oligonucleotide
  misc_feature 1..20: note = Target: SCN10A; (+) strand; PAM type: YTN; PAM sequence: CTG
  source 1..20: mol_type = other DNA
agagcagttgagggaaagtt

SEQ ID NO: 63052 - DNA, 20 bp, synthetic construct
  misc_feature 1..20: note = Description of Artificial Sequence: Synthetic oligonucleotide
  misc_feature 1..20: note = Target: SCN10A; (+) strand; PAM type: YTN; PAM sequence: TTG
  source 1..20: mol_type = other DNA
agggaaagtttggggatgtc

SEQ ID NO: 63053 - DNA, 20 bp, synthetic construct
  misc_feature 1..20: note = Description of Artificial Sequence: Synthetic oligonucleotide
  misc_feature 1..20: note = Target: SCN10A; (+) strand; PAM type: YTN; PAM sequence: TTT
  source 1..20: mol_type = other DNA
ggggatgtcctggagtgacc

SEQ ID NO: 63054 - DNA, 20 bp, synthetic construct
  misc_feature 1..20: note = Description of Artificial Sequence: Synthetic oligonucleotide
  misc_feature 1..20: note = Target: SCN10A; (+) strand; PAM type: YTN; PAM sequence: TTG
  source 1..20: mol_type = other DNA
gggatgtcctggagtgaccc

SEQ ID NO: 63055 - DNA, 20 bp, synthetic construct
  misc_feature 1..20: note = Description of Artificial Sequence: Synthetic oligonucleotide
  misc_feature 1..20: note = Target: SCN10A; (+) strand; PAM type: YTN; PAM sequence: CTG
  source 1..20: mol_type = other DNA
gagtgacccgcctcagtgga

SEQ ID NO: 63056 - DNA, 20 bp, synthetic construct
  misc_feature 1..20: note = Description of Artificial Sequence: Synthetic oligonucleotide
  misc_feature 1..20: note = Target: SCN10A; (+) strand; PAM type: YTN; PAM sequence: CTC
  source 1..20: mol_type = other DNA
agtggacgaggcttggaagc

SEQ ID NO: 63057 - DNA, 20 bp, synthetic construct
  misc_feature 1..20: note = Description of Artificial Sequence: Synthetic oligonucleotide
  misc_feature 1..20: note = Target: SCN10A; (+) strand; PAM type: YTN; PAM sequence: CTT
  source 1..20: mol_type = other DNA
ggaagcatattttccaccat

SEQ ID NO: 63058 - DNA, 20 bp, synthetic construct
  misc_feature 1..20: note = Description of Artificial Sequence: Synthetic oligonucleotide
  misc_feature 1..20: note = Target: SCN10A; (+) strand; PAM type: YTN; PAM sequence: TTG
  source 1..20: mol_type = other DNA
gaagcatattttccaccata

SEQ ID NO: 63059 - DNA, 20 bp, synthetic construct
  misc_feature 1..20: note = Description of Artificial Sequence: Synthetic oligonucleotide
  misc_feature 1..20: note = Target: SCN10A; (+) strand; PAM type: YTN; PAM sequence: TTT
  source 1..20: mol_type = other DNA
tccaccataaaggaggagcc

SEQ ID NO: 63060 - DNA, 20 bp, synthetic construct
  misc_feature 1..20: note = Description of Artificial Sequence: Synthetic oligonucleotide
  misc_feature 1..20: note = Target: SCN10A; (+) strand; PAM type: YTN; PAM sequence: TTT
  source 1..20: mol_type = other DNA
ccaccataaaggaggagccc

SEQ ID NO: 63061 - DNA, 20 bp, synthetic construct
  misc_feature 1..20: note = Description of Artificial Sequence: Synthetic oligonucleotide
  misc_feature 1..20: note = Target: SCN10A; (+) strand; PAM type: YTN; PAM sequence: TTC
  source 1..20: mol_type = other DNA
caccataaaggaggagcccc

SEQ ID NO: 63062 - DNA, 20 bp, synthetic construct
  misc_feature 1..20: note = Description of Artificial Sequence: Synthetic oligonucleotide
  misc_feature 1..20: note = Target: SCN10A; (+) strand; PAM type: YTN; PAM sequence: CTG
  source 1..20: mol_type = other DNA
agcagagggacatttaggga

SEQ ID NO: 63063 - DNA, 20 bp, synthetic construct
  misc_feature 1..20: note = Description of Artificial Sequence: Synthetic oligonucleotide
  misc_feature 1..20: note = Target: SCN10A; (+) strand; PAM type: YTN; PAM sequence: TTT
  source 1..20: mol_type = other DNA
agggacaacagagagaaggc

SEQ ID NO: 63064 - DNA, 20 bp, synthetic construct
  misc_feature 1..20: note = Description of Artificial Sequence: Synthetic oligonucleotide
  misc_feature 1..20: note = Target: SCN10A; (+) strand; PAM type: YTN; PAM sequence: TTA
  source 1..20: mol_type = other DNA
gggacaacagagagaaggca

SEQ ID NO: 63065 - DNA, 20 bp, synthetic construct
  misc_feature 1..20: note = Description of Artificial Sequence: Synthetic oligonucleotide
  misc_feature 1..20: note = Target: SCN10A; (+) strand; PAM type: YTN; PAM sequence: CTT
  source 1..20: mol_type = other DNA
cctgcaaccaccctcatgtg

SEQ ID NO: 63066 - DNA, 20 bp, synthetic construct
  misc_feature 1..20: note = Description of Artificial Sequence: Synthetic oligonucleotide
  misc_feature 1..20: note = Target: SCN10A; (+) strand; PAM type: YTN; PAM sequence: TTC
  source 1..20: mol_type = other DNA
ctgcaaccaccctcatgtgc

SEQ ID NO: 63067 - DNA, 20 bp, synthetic construct
  misc_feature 1..20: note = Description of Artificial Sequence: Synthetic oligonucleotide
  misc_feature 1..20: note = Target: SCN10A; (+) strand; PAM type: YTN; PAM sequence: CTG
  source 1..20: mol_type = other DNA
caaccaccctcatgtgccaa

SEQ ID NO: 63068 - DNA, 20 bp, synthetic construct
  misc_feature 1..20: note = Description of Artificial Sequence: Synthetic oligonucleotide
  misc_feature 1..20: note = Target: SCN10A; (+) strand; PAM type: YTN; PAM sequence: CTC
  source 1..20: mol_type = other DNA
atgtgccaaagccctgggct

SEQ ID NO: 63069 - DNA, 20 bp, synthetic construct
  misc_feature 1..20: note = Description of Artificial Sequence: Synthetic oligonucleotide
  misc_feature 1..20: note = Target: SCN10A; (+) strand; PAM type: YTN; PAM sequence: CTG
  source 1..20: mol_type = other DNA
ggctctgttcctgactctgg

SEQ ID NO: 63070 - DNA, 20 bp, synthetic construct
  misc_feature 1..20: note = Description of Artificial Sequence: Synthetic oligonucleotide
  misc_feature 1..20: note = Target: SCN10A; (+) strand; PAM type: YTN; PAM sequence: CTC
  source 1..20: mol_type = other DNA
tgttcctgactctggaatcc

SEQ ID NO: 63071 - DNA, 20 bp, synthetic construct
  misc_feature 1..20: note = Description of Artificial Sequence: Synthetic oligonucleotide
  misc_feature 1..20: note = Target: SCN10A; (+) strand; PAM type: YTN; PAM sequence: CTG
  source 1..20: mol_type = other DNA
ttcctgactctggaatcctg

SEQ ID NO: 63072 - DNA, 20 bp, synthetic construct
  misc_feature 1..20: note = Description of Artificial Sequence: Synthetic oligonucleotide
  misc_feature 1..20: note = Target: SCN10A; (+) strand; PAM type: YTN; PAM sequence: TTC
  source 1..20: mol_type = other DNA
ctgactctggaatcctgggc

SEQ ID NO: 63073 - DNA, 20 bp, synthetic construct
  misc_feature 1..20: note = Description of Artificial Sequence: Synthetic oligonucleotide
  misc_feature 1..20: note = Target: SCN10A; (+) strand; PAM type: YTN; PAM sequence: CTG
  source 1..20: mol_type = other DNA
actctggaatcctgggcaca

SEQ ID NO: 63074 - DNA, 20 bp, synthetic construct
  misc_feature 1..20: note = Description of Artificial Sequence: Synthetic oligonucleotide
  misc_feature 1..20: note = Target: SCN10A; (+) strand; PAM type: YTN; PAM sequence: CTC
  source 1..20: mol_type = other DNA
tggaatcctgggcacatctt

SEQ ID NO: 63075 - DNA, 20 bp, synthetic construct
  misc_feature 1..20: note = Description of Artificial Sequence: Synthetic oligonucleotide
  misc_feature 1..20: note = Target: SCN10A; (+) strand; PAM type: YTN; PAM sequence: CTG
  source 1..20: mol_type = other DNA
gaatcctgggcacatcttgc

SEQ ID NO: 63076 - DNA, 20 bp, synthetic construct
  misc_feature 1..20: note = Description of Artificial Sequence: Synthetic oligonucleotide
  misc_feature 1..20: note = Target: SCN10A; (+) strand; PAM type: YTN; PAM sequence: CTG
  source 1..20: mol_type = other DNA
ggcacatcttgctgcttcca

SEQ ID NO: 63077 - DNA, 20 bp, synthetic construct
  misc_feature 1..20: note = Description of Artificial Sequence: Synthetic oligonucleotide
  misc_feature 1..20: note = Target: SCN10A; (+) strand; PAM type: YTN; PAM sequence: CTT
  source 1..20: mol_type = other DNA
gctgcttccagttcttcact

SEQ ID NO: 63078 - DNA, 20 bp, synthetic construct
  misc_feature 1..20: note = Description of Artificial Sequence: Synthetic oligonucleotide
  misc_feature 1..20: note = Target: SCN10A; (+) strand; PAM type: YTN; PAM sequence: TTG
  source 1..20: mol_type = other DNA
ctgcttccagttcttcactt

SEQ ID NO: 63079 - DNA, 20 bp, synthetic construct
  misc_feature 1..20: note = Description of Artificial Sequence: Synthetic oligonucleotide
  misc_feature 1..20: note = Target: SCN10A; (+) strand; PAM type: YTN; PAM sequence: CTG
  source 1..20: mol_type = other DNA
cttccagttcttcacttgag

SEQ ID NO: 63080 - DNA, 20 bp, synthetic construct
  misc_feature 1..20: note = Description of Artificial Sequence: Synthetic oligonucleotide
  misc_feature 1..20: note = Target: SCN10A; (+) strand; PAM type: YTN; PAM sequence: CTT
  source 1..20: mol_type = other DNA
ccagttcttcacttgagagc

SEQ ID NO: 63081 - DNA, 20 bp, synthetic construct
  misc_feature 1..20: note = Description of Artificial Sequence: Synthetic oligonucleotide
  misc_feature 1..20: note = Target: SCN10A; (+) strand; PAM type: YTN; PAM sequence: TTC
  source 1..20: mol_type = other DNA
cagttcttcacttgagagca

SEQ ID NO: 63082 - DNA, 20 bp, synthetic construct
  misc_feature 1..20: note = Description of Artificial Sequence: Synthetic oligonucleotide
  misc_feature 1..20: note = Target: SCN10A; (+) strand; PAM type: YTN; PAM sequence: TTC
  source 1..20: mol_type = other DNA
ttcacttgagagcagatgaa

SEQ ID NO: 63083 - DNA, 20 bp, synthetic construct
  misc_feature 1..20: note = Description of Artificial Sequence: Synthetic oligonucleotide
  misc_feature 1..20: note = Target: SCN10A; (+) strand; PAM type: YTN; PAM sequence: CTT
  source 1..20: mol_type = other DNA
cacttgagagcagatgaaga

SEQ ID NO: 63084 - DNA, 20 bp, synthetic construct
  misc_feature 1..20: note = Description of Artificial Sequence: Synthetic oligonucleotide
  misc_feature 1..20: note = Target: SCN10A; (+) strand; PAM type: YTN; PAM sequence: TTC
  source 1..20: mol_type = other DNA
acttgagagcagatgaagag

SEQ ID NO: 63085 - DNA, 20 bp, synthetic construct
  misc_feature 1..20: note = Description of Artificial Sequence: Synthetic oligonucleotide
  misc_feature 1..20: note = Target: SCN10A; (+) strand; PAM type: YTN; PAM sequence: CTT
  source 1..20: mol_type = other DNA
gagagcagatgaagagcggt

SEQ ID NO: 63086 - DNA, 20 bp, synthetic construct
  misc_feature 1..20: note = Description of Artificial Sequence: Synthetic oligonucleotide
  misc_feature 1..20: note = Target: SCN10A; (+) strand; PAM type: YTN; PAM sequence: TTG
  source 1..20: mol_type = other DNA
agagcagatgaagagcggtt

SEQ ID NO: 63087 - DNA, 20 bp, synthetic construct
  misc_feature 1..20: note = Description of Artificial Sequence: Synthetic oligonucleotide
  misc_feature 1..20: note = Target: SCN10A; (+) strand; PAM type: YTN; PAM sequence: TTG
  source 1..20: mol_type = other DNA
tgaagacaaaatgatatgag

SEQ ID NO: 63088 - DNA, 20 bp, synthetic construct
  misc_feature 1..20: note = Description of Artificial Sequence: Synthetic oligonucleotide
  misc_feature 1..20: note = Target: SCN10A; (+) strand; PAM type: YTN; PAM sequence: CTC
  source 1..20: mol_type = other DNA
agaggggtaaacttcctgtc

SEQ ID NO: 63089 - DNA, 20 bp, synthetic construct
  misc_feature 1..20: note = Description of Artificial Sequence: Synthetic oligonucleotide
  misc_feature 1..20: note = Target: SCN10A; (+) strand; PAM type: YTN; PAM sequence: CTT
  source 1..20: mol_type = other DNA
cctgtctgagggtgaggggc

SEQ ID NO: 63090 - DNA, 20 bp, synthetic construct
  misc_feature 1..20: note = Description of Artificial Sequence: Synthetic oligonucleotide
  misc_feature 1..20: note = Target: SCN10A; (+) strand; PAM type: YTN; PAM sequence: TTC
  source 1..20: mol_type = other DNA
ctgtctgagggtgaggggca

SEQ ID NO: 63091 - DNA, 20 bp, synthetic construct
  misc_feature 1..20: note = Description of Artificial Sequence: Synthetic oligonucleotide
  misc_feature 1..20: note = Target: SCN10A; (+) strand; PAM type: YTN; PAM sequence: CTG
  source 1..20: mol_type = other DNA
tctgagggtgaggggcatct

SEQ ID NO: 63092 - DNA, 20 bp, synthetic construct
  misc_feature 1..20: note = Description of Artificial Sequence: Synthetic oligonucleotide
  misc_feature 1..20: note = Target: SCN10A; (+) strand; PAM type: YTN; PAM sequence: CTG
  source 1..20: mol_type = other DNA
agggtgaggggcatctgtgg

SEQ ID NO: 63093 - DNA, 20 bp, synthetic construct
  misc_feature 1..20: note = Description of Artificial Sequence: Synthetic oligonucleotide
  misc_feature 1..20: note = Target: SCN10A; (+) strand; PAM type: YTN; PAM sequence: CTG
  source 1..20: mol_type = other DNA
tggctctgcagggatggtgg

SEQ ID NO: 63094 - DNA, 20 bp, synthetic construct
  misc_feature 1..20: note = Description of Artificial Sequence: Synthetic oligonucleotide
  misc_feature 1..20: note = Target: SCN10A; (+) strand; PAM type: YTN; PAM sequence: CTC
  source 1..20: mol_type = other DNA
tgcagggatggtgggctcag

SEQ ID NO: 63095 - DNA, 20 bp, synthetic construct
  misc_feature 1..20: note = Description of Artificial Sequence: Synthetic oligonucleotide
  misc_feature 1..20: note = Target: SCN10A; (+) strand; PAM type: YTN; PAM sequence: CTG
  source 1..20: mol_type = other DNA
cagggatggtgggctcagcc

SEQ ID NO: 63096 - DNA, 20 bp, synthetic construct
  misc_feature 1..20: note = Description of Artificial Sequence: Synthetic oligonucleotide
  misc_feature 1..20: note = Target: SCN10A; (+) strand; PAM type: YTN; PAM sequence: CTC
  source 1..20: mol_type = other DNA
agcctggaagaacagagttt

SEQ ID NO: 63097 - DNA, 20 bp, synthetic construct
  misc_feature 1..20: note = Description of Artificial Sequence: Synthetic oligonucleotide
  misc_feature 1..20: note = Target: SCN10A; (+) strand; PAM type: YTN; PAM sequence: CTG
  source 1..20: mol_type = other DNA
gaagaacagagtttctggga

SEQ ID NO: 63098 - DNA, 20 bp, synthetic construct
  misc_feature 1..20: note = Description of Artificial Sequence: Synthetic oligonucleotide
  misc_feature 1..20: note = Target: SCN10A; (+) strand; PAM type: YTN; PAM sequence: TTT
  source 1..20: mol_type = other DNA
ctgggatgcaggcagaggca

SEQ ID NO: 63099 - DNA, 20 bp, synthetic construct
  misc_feature 1..20: note = Description of Artificial Sequence: Synthetic oligonucleotide
  misc_feature 1..20: note = Target: SCN10A; (+) strand; PAM type: YTN; PAM sequence: TTC
  source 1..20: mol_type = other DNA
tgggatgcaggcagaggcat

SEQ ID NO: 63100 - DNA, 20 bp, synthetic construct
  misc_feature 1..20: note = Description of Artificial Sequence: Synthetic oligonucleotide
  misc_feature 1..20: note = Target: SCN10A; (+) strand; PAM type: YTN; PAM sequence: CTG
  source 1..20: mol_type = other DNA
ggatgcaggcagaggcatcc

SEQ ID NO: 63101 - DNA, 20 bp, synthetic construct
  misc_feature 1..20: note = Description of Artificial Sequence: Synthetic oligonucleotide
  misc_feature 1..20: note = Target: SCN10A; (+) strand; PAM type: YTN; PAM sequence: CTG
  source 1..20: mol_type = other DNA
gctcaggcaccagggtggaa

SEQ ID NO: 63102 - DNA, 20 bp, synthetic construct
  misc_feature 1..20: note = Description of Artificial Sequence: Synthetic oligonucleotide
  misc_feature 1..20: note = Target: SCN10A; (+) strand; PAM type: YTN; PAM sequence: CTC
  source 1..20: mol_type = other DNA
aggcaccagggtggaaaaga

SEQ ID NO: 63103 - DNA, 20 bp, synthetic construct
  misc_feature 1..20: note = Description of Artificial Sequence: Synthetic oligonucleotide
  misc_feature 1..20: note = Target: SCN10A; (+) strand; PAM type: YTN; PAM sequence: CTA
  source 1..20: mol_type = other DNA
aagagtctggatttgttgtt

SEQ ID NO: 63104 - DNA, 20 bp, synthetic construct
  misc_feature 1..20: note = Description of Artificial Sequence: Synthetic oligonucleotide
  misc_feature 1..20: note = Target: SCN10A; (+) strand; PAM type: YTN; PAM sequence: CTG
  source 1..20: mol_type = other DNA
gatttgttgttgcttccctt

SEQ ID NO: 63105 - DNA, 20 bp, synthetic construct
  misc_feature 1..20: note = Description of Artificial Sequence: Synthetic oligonucleotide
  misc_feature 1..20: note = Target: SCN10A; (+) strand; PAM type: YTN; PAM sequence: TTT
  source 1..20: mol_type = other DNA
gttgttgcttcccttttctt

SEQ ID NO: 63106 - DNA, 20 bp, synthetic construct
  misc_feature 1..20: note = Description of Artificial Sequence: Synthetic oligonucleotide
  misc_feature 1..20: note = Target: SCN10A; (+) strand; PAM type: YTN; PAM sequence: TTG
  source 1..20: mol_type = other DNA
ttgttgcttcccttttcttg

SEQ ID NO: 63107 - DNA, 20 bp, synthetic construct
  misc_feature 1..20: note = Description of Artificial Sequence: Synthetic oligonucleotide
  misc_feature 1..20: note = Target: SCN10A; (+) strand; PAM type: YTN; PAM sequence: TTG
  source 1..20: mol_type = other DNA
ttgcttcccttttcttggtt

SEQ ID NO: 63108 - DNA, 20 bp, synthetic construct
  misc_feature 1..20: note = Description of Artificial Sequence: Synthetic oligonucleotide
  misc_feature 1..20: note = Target: SCN10A; (+) strand; PAM type: YTN; PAM sequence: TTG
  source 1..20: mol_type = other DNA
cttcccttttcttggtttag

SEQ ID NO: 63109 - DNA, 20 bp, synthetic construct
  misc_feature 1..20: note = Description of Artificial Sequence: Synthetic oligonucleotide
  misc_feature 1..20: note = Target: SCN10A; (+) strand; PAM type: YTN; PAM sequence: CTT
  source 1..20: mol_type = other DNA
cccttttcttggtttagctt

SEQ ID NO: 63110 - DNA, 20 bp, synthetic construct
  misc_feature 1..20: note = Description of Artificial Sequence: Synthetic oligonucleotide
  misc_feature 1..20: note = Target: SCN10A; (+) strand; PAM type: YTN; PAM sequence: TTC
  source 1..20: mol_type = other DNA
ccttttcttggtttagcttt

SEQ ID NO: 63111 - DNA, 20 bp, synthetic construct
  misc_feature 1..20: note = Description of Artificial Sequence: Synthetic oligonucleotide
  misc_feature 1..20: note = Target: SCN10A; (+) strand; PAM type: YTN; PAM sequence: CTT
  source 1..20: mol_type = other DNA
ttcttggtttagctttcttc

SEQ ID NO: 63112 - DNA, 20 bp, synthetic construct
  misc_feature 1..20: note = Description of Artificial Sequence: Synthetic oligonucleotide
  misc_feature 1..20: note = Target: SCN10A; (+) strand; PAM type: YTN; PAM sequence: TTT
  source 1..20: mol_type = other DNA
tcttggtttagctttcttct

SEQ ID NO: 63113 - DNA, 20 bp, synthetic construct
  misc_feature 1..20: note = Description of Artificial Sequence: Synthetic oligonucleotide
  misc_feature 1..20: note = Target: SCN10A; (+) strand; PAM type: YTN; PAM sequence: TTT
  source 1..20: mol_type = other DNA
cttggtttagctttcttctg

SEQ ID NO: 63114 - DNA, 20 bp, synthetic construct
  misc_feature 1..20: note = Description of Artificial Sequence: Synthetic oligonucleotide
  misc_feature 1..20: note = Target: SCN10A; (+) strand; PAM type: YTN; PAM sequence: TTC
  source 1..20: mol_type = other DNA
ttggtttagctttcttctgt

SEQ ID NO: 63115 - DNA, 20 bp, synthetic construct
  misc_feature 1..20: note = Description of Artificial Sequence: Synthetic oligonucleotide
  misc_feature 1..20: note = Target: SCN10A; (+) strand; PAM type: YTN; PAM sequence: CTT
  source 1..20: mol_type = other DNA
ggtttagctttcttctgtct

SEQ ID NO: 63116 - DNA, 20 bp, synthetic construct
  misc_feature 1..20: note = Description of Artificial Sequence: Synthetic oligonucleotide
  misc_feature 1..20: note = Target: SCN10A; (+) strand; PAM type: YTN; PAM sequence: TTG
  source 1..20: mol_type = other DNA
gtttagctttcttctgtcta

SEQ ID NO: 63117 - DNA, 20 bp, synthetic construct
  misc_feature 1..20: note = Description of Artificial Sequence: Synthetic oligonucleotide
  misc_feature 1..20: note = Target: SCN10A; (+) strand; PAM type: YTN; PAM sequence: TTT
  source 1..20: mol_type = other DNA
agctttcttctgtctataaa

SEQ ID NO: 63118 - DNA, 20 bp, synthetic construct
  misc_feature 1..20: note = Description of Artificial Sequence: Synthetic oligonucleotide
  misc_feature 1..20: note = Target: SCN10A; (+) strand; PAM type: YTN; PAM sequence: TTA
  source 1..20: mol_type = other DNA
gctttcttctgtctataaaa

SEQ ID NO: 63119 - DNA, 20 bp, synthetic construct
  misc_feature 1..20: note = Description of Artificial Sequence: Synthetic oligonucleotide
  misc_feature 1..20: note = Target: SCN10A; (+) strand; PAM type: YTN; PAM sequence: CTT
  source 1..20: mol_type = other DNA
tcttctgtctataaaactca

SEQ ID NO: 63120 - DNA, 20 bp, synthetic construct
  misc_feature 1..20: note = Description of Artificial Sequence: Synthetic oligonucleotide
  misc_feature 1..20: note = Target: SCN10A; (+) strand; PAM type: YTN; PAM sequence: TTT
  source 1..20: mol_type = other DNA
cttctgtctataaaactcat

SEQ ID NO: 63121 - DNA, 20 bp, synthetic construct
  misc_feature 1..20: note = Description of Artificial Sequence: Synthetic oligonucleotide
  misc_feature 1..20: note = Target: SCN10A; (+) strand; PAM type: YTN; PAM sequence: TTC
  source 1..20: mol_type = other DNA
ttctgtctataaaactcatg

SEQ ID NO: 63122 - DNA, 20 bp, synthetic construct
  misc_feature 1..20: note = Description of Artificial Sequence: Synthetic oligonucleotide
  misc_feature 1..20: note = Target: SCN10A; (+) strand; PAM type: YTN; PAM sequence: CTT
  source 1..20: mol_type = other DNA
ctgtctataaaactcatgag

SEQ ID NO: 63123 - DNA, 20 bp, synthetic construct
  misc_feature 1..20: note = Description of Artificial Sequence: Synthetic oligonucleotide
  misc_feature 1..20: note = Target: SCN10A; (+) strand; PAM type: YTN; PAM sequence: TTC
  source 1..20: mol_type = other DNA
tgtctataaaactcatgagg

SEQ ID NO: 63124 - DNA, 20 bp, synthetic construct
  misc_feature 1..20: note = Description of Artificial Sequence: Synthetic oligonucleotide
  misc_feature 1..20: note = Target: SCN10A; (+) strand; PAM type: YTN; PAM sequence: CTG
  source 1..20: mol_type = other DNA
tctataaaactcatgaggaa

SEQ ID NO: 63125 - DNA, 20 bp, synthetic construct
  misc_feature 1..20: note = Description of Artificial Sequence: Synthetic oligonucleotide
  misc_feature 1..20: note = Target: SCN10A; (+) strand; PAM type: YTN; PAM sequence: CTA
  source 1..20: mol_type = other DNA
taaaactcatgaggaaagaa

SEQ ID NO: 63126 - DNA, 20 bp, synthetic construct
  misc_feature 1..20: note = Description of Artificial Sequence: Synthetic oligonucleotide
  misc_feature 1..20: note = Target: SCN10A; (+) strand; PAM type: YTN; PAM sequence: CTC
  source 1..20: mol_type = other DNA
atgaggaaagaacccaagtt

SEQ ID NO: 63127 - DNA, 20 bp, synthetic construct
  misc_feature 1..20: note = Description of Artificial Sequence: Synthetic oligonucleotide
  misc_feature 1..20: note = Target: SCN10A; (+) strand; PAM type: YTN; PAM sequence: TTG
  source 1..20: mol_type = other DNA
gttgatgtccagggcaataa

SEQ ID NO: 63128 - DNA, 20 bp, synthetic construct
  misc_feature 1..20: note = Description of Artificial Sequence: Synthetic oligonucleotide
  misc_feature 1..20: note = Target: SCN10A; (+) strand; PAM type: YTN; PAM sequence: TTG
  source 1..20: mol_type = other DNA
atgtccagggcaataagaaa

SEQ ID NO: 63129 - DNA, 20 bp, synthetic construct
  misc_feature 1..20: note = Description of Artificial Sequence: Synthetic oligonucleotide
  misc_feature 1..20: note = Target: SCN10A; (+) strand; PAM type: YTN; PAM sequence: CTT
  source 1..20: mol_type = other DNA
ctggaagactgcatcctccc

SEQ ID NO: 63130 - DNA, 20 bp, synthetic construct
  misc_feature 1..20: note = Description of Artificial Sequence: Synthetic oligonucleotide
  misc_feature 1..20: note = Target: SCN10A; (+) strand; PAM type: YTN; PAM sequence: TTC
  source 1..20: mol_type = other DNA
tggaagactgcatcctccca

SEQ ID NO: 63131 - DNA, 20 bp, synthetic construct
  misc_feature 1..20: note = Description of Artificial Sequence: Synthetic oligonucleotide
  misc_feature 1..20: note = Target: SCN10A; (+) strand; PAM type: YTN; PAM sequence: CTG
  source 1..20: mol_type = other DNA
gaagactgcatcctcccaca

SEQ ID NO: 63132 - DNA, 20 bp, synthetic construct
  misc_feature 1..20: note = Description of Artificial Sequence: Synthetic oligonucleotide
  misc_feature 1..20: note = Target: SCN10A; (+) strand; PAM type: YTN; PAM sequence: CTG
  source 1..20: mol_type = other DNA
catcctcccacacaaccagt

SEQ ID NO: 63133 - DNA, 20 bp, synthetic construct
  misc_feature 1..20: note = Description of Artificial Sequence: Synthetic oligonucleotide
  misc_feature 1..20: note = Target: SCN10A; (+) strand; PAM type: YTN; PAM sequence: CTC
  source 1..20: mol_type = other DNA
ccacacaaccagtcagtccc

SEQ ID NO: 63134 - DNA, 20 bp, synthetic construct
  misc_feature 1..20: note = Description of Artificial Sequence: Synthetic oligonucleotide
  misc_feature 1..20: note = Target: SCN10A; (+) strand; PAM type: YTN; PAM sequence: CTG
  source 1..20: mol_type = other DNA
agggcagggggccaggctgg

SEQ ID NO: 63135 - DNA, 20 bp, synthetic construct
  misc_feature 1..20: note = Description of Artificial Sequence: Synthetic oligonucleotide
  misc_feature 1..20: note = Target: SCN10A; (+) strand; PAM type: YTN; PAM sequence: CTG
  source 1..20: mol_type = other DNA
gggcggagaaggggtattgg

SEQ ID NO: 63136 - DNA, 20 bp, synthetic construct
  misc_feature 1..20: note = Description of Artificial Sequence: Synthetic oligonucleotide
  misc_feature 1..20: note = Target: SCN10A; (+) strand; PAM type: YTN; PAM sequence: TTG
  source 1..20: mol_type = other DNA
gggcttattggcaagtgagt

SEQ ID NO: 63137 - DNA, 20 bp, synthetic construct
  misc_feature 1..20: note = Description of Artificial Sequence: Synthetic oligonucleotide
  misc_feature 1..20: note = Target: SCN10A; (+) strand; PAM type: YTN; PAM sequence: CTT
  source 1..20: mol_type = other DNA
attggcaagtgagtctccag

SEQ ID NO: 63138 - DNA, 20 bp, synthetic construct
  misc_feature 1..20: note = Description of Artificial Sequence: Synthetic oligonucleotide
  misc_feature 1..20: note = Target: SCN10A; (+) strand; PAM type: YTN; PAM sequence: TTA
  source 1..20: mol_type = other DNA
ttggcaagtgagtctccaga

SEQ ID NO: 63139 - DNA, 20 bp, synthetic construct
  misc_feature 1..20: note = Description of Artificial Sequence: Synthetic oligonucleotide
  misc_feature 1..20: note = Target: SCN10A; (+) strand; PAM type: YTN; PAM sequence: TTG
  source 1..20: mol_type = other DNA
gcaagtgagtctccagaggg

SEQ ID NO: 63140 - DNA, 20 bp, synthetic construct
  misc_feature 1..20: note = Description of Artificial Sequence: Synthetic oligonucleotide
  misc_feature 1..20: note = Target: SCN10A; (+) strand; PAM type: YTN; PAM sequence: CTC
  source 1..20: mol_type = other DNA
cagaggggcttcctccaaac

SEQ ID NO: 63141 - DNA, 20 bp, synthetic construct
  misc_feature 1..20: note = Description of Artificial Sequence: Synthetic oligonucleotide
  misc_feature 1..20: note = Target: SCN10A; (+) strand; PAM type: YTN; PAM sequence: CTT
  source 1..20: mol_type = other DNA
cctccaaacatggagtagat

SEQ ID NO: 63142 - DNA, 20 bp, synthetic construct
  misc_feature 1..20: note = Description of Artificial Sequence: Synthetic oligonucleotide
  misc_feature 1..20: note = Target: SCN10A; (+) strand; PAM type: YTN; PAM sequence: TTC
  source 1..20: mol_type = other DNA
ctccaaacatggagtagatt

SEQ ID NO: 63143 - DNA, 20 bp, synthetic construct
  misc_feature 1..20: note = Description of Artificial Sequence: Synthetic oligonucleotide
  misc_feature 1..20: note = Target: SCN10A; (+) strand; PAM type: YTN; PAM sequence: CTC
  source 1..20: mol_type = other DNA
caaacatggagtagattttg

SEQ ID NO: 63144 - DNA, 20 bp, synthetic construct
  misc_feature 1..20: note = Description of Artificial Sequence: Synthetic oligonucleotide
  misc_feature 1..20: note = Target: SCN10A; (+) strand; PAM type: YTN; PAM sequence: TTT
  source 1..20: mol_type = other DNA
tgttattatttctgtggcct

SEQ ID NO: 63145 - DNA, 20 bp, synthetic construct
  misc_feature 1..20: note = Description of Artificial Sequence: Synthetic oligonucleotide
  misc_feature 1..20: note = Target: SCN10A; (+) strand; PAM type: YTN; PAM sequence: TTT
  source 1..20: mol_type = other DNA
gttattatttctgtggcctt

SEQ ID NO: 63146 - DNA, 20 bp, synthetic construct
  misc_feature 1..20: note = Description of Artificial Sequence: Synthetic oligonucleotide
  misc_feature 1..20: note = Target: SCN10A; (+) strand; PAM type: YTN; PAM sequence: TTG
  source 1..20: mol_type = other DNA
ttattatttctgtggccttg

SEQ ID NO: 63147 - DNA, 20 bp, synthetic construct
  misc_feature 1..20: note = Description of Artificial Sequence: Synthetic oligonucleotide
  misc_feature 1..20: note = Target: SCN10A; (+) strand; PAM type: YTN; PAM sequence: TTA
  source 1..20: mol_type = other DNA
ttatttctgtggccttggat

SEQ ID NO: 63148 - DNA, 20 bp, synthetic construct
  misc_feature 1..20: note = Description of Artificial Sequence: Synthetic oligonucleotide
  misc_feature 1..20: note = Target: SCN10A; (+) strand; PAM type: YTN; PAM sequence: TTA
  source 1..20: mol_type = other DNA
tttctgtggccttggatgtt

SEQ ID NO: 63149 - DNA, 20 bp, synthetic construct
  misc_feature 1..20: note = Description of Artificial Sequence: Synthetic oligonucleotide
  misc_feature 1..20: note = Target: SCN10A; (+) strand; PAM type: YTN; PAM sequence: TTT
  source 1..20: mol_type = other DNA
ctgtggccttggatgttgtc

SEQ ID NO: 63150 - DNA, 20 bp, synthetic construct
  misc_feature 1..20: note = Description of Artificial Sequence: Synthetic oligonucleotide
  misc_feature 1..20: note = Target: SCN10A; (+) strand; PAM type: YTN; PAM sequence: TTC
  source 1..20: mol_type = other DNA
tgtggccttggatgttgtcc

SEQ ID NO: 63151 - DNA, 20 bp, synthetic construct
  misc_feature 1..20: note = Description of Artificial Sequence: Synthetic oligonucleotide
  misc_feature 1..20: note = Target: SCN10A; (+) strand; PAM type: YTN; PAM sequence: CTG
  source 1..20: mol_type = other DNA
tggccttggatgttgtccgt

SEQ ID NO: 63152 - DNA, 20 bp, synthetic construct
  misc_feature 1..20: note = Description of Artificial Sequence: Synthetic oligonucleotide
  misc_feature 1..20: note = Target: SCN10A; (+) strand; PAM type: YTN; PAM sequence: CTT
  source 1..20: mol_type = other DNA
ggatgttgtccgtgacccat

SEQ ID NO: 63153 - DNA, 20 bp, synthetic construct
  misc_feature 1..20: note = Description of Artificial Sequence: Synthetic oligonucleotide
  misc_feature 1..20: note = Target: SCN10A; (+) strand; PAM type: YTN; PAM sequence: TTG
  source 1..20: mol_type = other DNA
gatgttgtccgtgacccatt

SEQ ID NO: 63154 - DNA, 20 bp, synthetic construct
  misc_feature 1..20: note = Description of Artificial Sequence: Synthetic oligonucleotide
  misc_feature 1..20: note = Target: SCN10A; (+) strand; PAM type: YTN; PAM sequence: TTG
  source 1..20: mol_type = other DNA
tccgtgacccattgtgcccc

SEQ ID NO: 63155 - DNA, 20 bp, synthetic construct
  misc_feature 1..20: note = Description of Artificial Sequence: Synthetic oligonucleotide
  misc_feature 1..20: note = Target: SCN10A; (+) strand; PAM type: YTN; PAM sequence: TTG
  source 1..20: mol_type = other DNA
tgccccctccctgcagcctc

SEQ ID NO: 63156 - DNA, 20 bp, synthetic construct
  misc_feature 1..20: note = Description of Artificial Sequence: Synthetic oligonucleotide
  misc_feature 1..20: note = Target: SCN10A; (+) strand; PAM type: YTN; PAM sequence: CTC
  source 1..20: mol_type = other DNA
cctgcagcctctccccctgc

SEQ ID NO: 63157 - DNA, 20 bp, synthetic construct
  misc_feature 1..20: note = Description of Artificial Sequence: Synthetic oligonucleotide
  misc_feature 1..20: note = Target: SCN10A; (+) strand; PAM type: YTN; PAM sequence: CTG
  source 1..20: mol_type = other DNA
cagcctctccccctgctccc

SEQ ID NO: 63158 - DNA, 20 bp, synthetic construct
  misc_feature 1..20: note = Description of Artificial Sequence: Synthetic oligonucleotide
  misc_feature 1..20: note = Target: SCN10A; (+) strand; PAM type: YTN; PAM sequence: CTC
  source 1..20: mol_type = other DNA
tccccctgctcccagctagg

SEQ ID NO: 63159 - DNA, 20 bp, synthetic construct
  misc_feature 1..20: note = Description of Artificial Sequence: Synthetic oligonucleotide
  misc_feature 1..20: note = Target: SCN10A; (+) strand; PAM type: YTN; PAM sequence: CTC
  source 1..20: mol_type = other DNA
cccctgctcccagctaggac

SEQ ID NO: 63160 - DNA, 20 bp, synthetic construct
  misc_feature 1..20: note = Description of Artificial Sequence: Synthetic oligonucleotide
  misc_feature 1..20: note = Target: SCN10A; (+) strand; PAM type: YTN; PAM sequence: CTG
  source 1..20: mol_type = other DNA
ctcccagctaggacctgtgc

SEQ ID NO: 63161 - DNA, 20 bp, synthetic construct
  misc_feature 1..20: note = Description of Artificial Sequence: Synthetic oligonucleotide
  misc_feature 1..20: note = Target: SCN10A; (+) strand; PAM type: YTN; PAM sequence: CTC
  source 1..20: mol_type = other DNA
ccagctaggacctgtgcagc

SEQ ID NO: 63162 - DNA, 20 bp, synthetic construct
  misc_feature 1..20: note = Description of Artificial Sequence: Synthetic oligonucleotide
  misc_feature 1..20: note = Target: SCN10A; (+) strand; PAM type: YTN; PAM sequence: CTA
  source 1..20: mol_type = other DNA
ggacctgtgcagcttggaga

SEQ ID NO: 63163 - DNA, 20 bp, synthetic construct
  misc_feature 1..20: note = Description of Artificial Sequence: Synthetic oligonucleotide
  misc_feature 1..20: note = Target: SCN10A; (+) strand; PAM type: YTN; PAM sequence: CTG
  source 1..20: mol_type = other DNA
tgcagcttggagaaatcagt

SEQ ID NO: 63164 - DNA, 20 bp, synthetic construct
  misc_feature 1..20: note = Description of Artificial Sequence: Synthetic oligonucleotide
  misc_feature 1..20: note = Target: SCN10A; (+) strand; PAM type: YTN; PAM sequence: CTT
  source 1..20: mol_type = other DNA
ggagaaatcagtcagctctt

SEQ ID NO: 63165 - DNA, 20 bp, synthetic construct
  misc_feature 1..20: note = Description of Artificial Sequence: Synthetic oligonucleotide
  misc_feature 1..20: note = Target: SCN10A; (+) strand; PAM type: YTN; PAM sequence: TTG
  source 1..20: mol_type = other DNA
gagaaatcagtcagctctta

SEQ ID NO: 63166 - DNA, 20 bp, synthetic construct
  misc_feature 1..20: note = Description of Artificial Sequence: Synthetic oligonucleotide
  misc_feature 1..20: note = Target: SCN10A; (+) strand; PAM type: YTN; PAM sequence: CTC
  source 1..20: mol_type = other DNA
ttacttccctgaataaaaat

SEQ ID NO: 63167 - DNA, 20 bp, synthetic construct
  misc_feature 1..20: note = Description of Artificial Sequence: Synthetic oligonucleotide
  misc_feature 1..20: note = Target: SCN10A; (+) strand; PAM type: YTN; PAM sequence: CTT
  source 1..20: mol_type = other DNA
acttccctgaataaaaatgt

SEQ ID NO: 63168 - DNA, 20 bp, synthetic construct
  misc_feature 1..20: note = Description of Artificial Sequence: Synthetic oligonucleotide
  misc_feature 1..20: note = Target: SCN10A; (+) strand; PAM type: YTN; PAM sequence: TTA
  source 1..20: mol_type = other DNA
cttccctgaataaaaatgtt

SEQ ID NO: 63169 - DNA, 20 bp, synthetic construct
  misc_feature 1..20: note = Description of Artificial Sequence: Synthetic oligonucleotide
  misc_feature 1..20: note = Target: SCN10A; (+) strand; PAM type: YTN; PAM sequence: CTT
  source 1..20: mol_type = other DNA
ccctgaataaaaatgttttc

SEQ ID NO: 63170 - DNA, 20 bp, synthetic construct
  misc_feature 1..20: note = Description of Artificial Sequence: Synthetic oligonucleotide
  misc_feature 1..20: note = Target: SCN10A; (+) strand; PAM type: YTN; PAM sequence: TTC
  source 1..20: mol_type = other DNA
cctgaataaaaatgttttct

SEQ ID NO: 63171 - DNA, 20 bp, synthetic construct
  misc_feature 1..20: note = Description of Artificial Sequence: Synthetic oligonucleotide
  misc_feature 1..20: note = Target: SCN10A; (+) strand; PAM type: YTN; PAM sequence: CTG
  source 1..20: mol_type = other DNA
aataaaaatgttttctgagc

SEQ ID NO: 63172 - DNA, 20 bp, synthetic construct
  misc_feature 1..20: note = Description of Artificial Sequence: Synthetic oligonucleotide
  misc_feature 1..20: note = Target: SCN10A; (+) strand; PAM type: YTN; PAM sequence: TTT
  source 1..20: mol_type = other DNA
tctgagccccctcagattgg

SEQ ID NO: 63173 - DNA, 20 bp, synthetic construct
  misc_feature 1..20: note = Description of Artificial Sequence: Synthetic oligonucleotide
  misc_feature 1..20: note = Target: SCN10A; (+) strand; PAM type: YTN; PAM sequence: TTT
  source 1..20: mol_type = other DNA
ctgagccccctcagattggg

SEQ ID NO: 63174 - DNA, 20 bp, synthetic construct
  misc_feature 1..20: note = Description of Artificial Sequence: Synthetic oligonucleotide
  misc_feature 1..20: note = Target: SCN10A; (+) strand; PAM type: YTN; PAM sequence: TTC
  source 1..20: mol_type = other DNA
tgagccccctcagattgggg

SEQ ID NO: 63175 - DNA, 20 bp, synthetic construct
  misc_feature 1..20: note = Description of Artificial Sequence: Synthetic oligonucleotide
  misc_feature 1..20: note = Target: SCN10A; (+) strand; PAM type: YTN; PAM sequence: CTG
  source 1..20: mol_type = other DNA
agccccctcagattggggaa

SEQ ID NO: 63176 - DNA, 20 bp, synthetic construct
  misc_feature 1..20: note = Description of Artificial Sequence: Synthetic oligonucleotide
  misc_feature 1..20: note = Target: SCN10A; (+) strand; PAM type: YTN; PAM sequence: CTC
  source 1..20: mol_type = other DNA
agattggggaaggacatttt

SEQ ID NO: 63177 - DNA, 20 bp, synthetic construct
  misc_feature 1..20: note = Description of Artificial Sequence: Synthetic oligonucleotide
  misc_feature 1..20: note = Target: SCN10A; (+) strand; PAM type: YTN; PAM sequence: TTG
  source 1..20: mol_type = other DNA
gggaaggacatttttccttt

SEQ ID NO: 63178 - DNA, 20 bp, synthetic construct
  misc_feature 1..20: note = Description of Artificial Sequence: Synthetic oligonucleotide
  misc_feature 1..20: note = Target: SCN10A; (+) strand; PAM type: YTN; PAM sequence: TTT
  source 1..20: mol_type = other DNA
ttcctttaacagctaataga

SEQ ID NO: 63179 - DNA, 20 bp, synthetic construct
  misc_feature 1..20: note = Description of Artificial Sequence: Synthetic oligonucleotide
  misc_feature 1..20: note = Target: SCN10A; (+) strand; PAM type: YTN; PAM sequence: TTT
  source 1..20: mol_type = other DNA
tcctttaacagctaatagac

SEQ ID NO: 63180 - DNA, 20 bp, synthetic construct
  misc_feature 1..20: note = Description of Artificial Sequence: Synthetic oligonucleotide
  misc_feature 1..20: note = Target: SCN10A; (+) strand; PAM type: YTN; PAM sequence: TTT
  source 1..20: mol_type = other DNA
cctttaacagctaatagaca

SEQ ID NO: 63181 - DNA, 20 bp, synthetic construct
  misc_feature 1..20: note = Description of Artificial Sequence: Synthetic oligonucleotide
  misc_feature 1..20: note = Target: SCN10A; (+) strand; PAM type: YTN; PAM sequence: TTC
  source 1..20: mol_type = other DNA
ctttaacagctaatagacac

SEQ ID NO: 63182 - DNA, 20 bp, synthetic construct
  misc_feature 1..20: note = Description of Artificial Sequence: Synthetic oligonucleotide
  misc_feature 1..20: note = Target: SCN10A; (+) strand; PAM type: YTN; PAM sequence: CTT
  source 1..20: mol_type = other DNA
taacagctaatagacaccgt

SEQ ID NO: 63183 - DNA, 20 bp, synthetic construct
  misc_feature 1..20: note = Description of Artificial Sequence: Synthetic oligonucleotide
  misc_feature 1..20: note = Target: SCN10A; (+) strand; PAM type: YTN; PAM sequence: TTT
  source 1..20: mol_type = other DNA
aacagctaatagacaccgtt

SEQ ID NO: 63184 - DNA, 20 bp, synthetic construct
  misc_feature 1..20: note = Description of Artificial Sequence: Synthetic oligonucleotide
  misc_feature 1..20: note = Target: SCN10A; (+) strand; PAM type: YTN; PAM sequence: TTA
  source 1..20: mol_type = other DNA
acagctaatagacaccgttt

SEQ ID NO: 63185 - DNA, 20 bp, synthetic construct
  misc_feature 1..20: note = Description of Artificial Sequence: Synthetic oligonucleotide
  misc_feature 1..20: note = Target: SCN10A; (+) strand; PAM type: YTN; PAM sequence: CTA
  source 1..20: mol_type = other DNA
atagacaccgtttattgagt

SEQ ID NO: 63186 - DNA, 20 bp, synthetic construct
  misc_feature 1..20: note = Description of Artificial Sequence: Synthetic oligonucleotide
  misc_feature 1..20: note = Target: SCN10A; (+) strand; PAM type: YTN; PAM sequence: TTT
  source 1..20: mol_type = other DNA
attgagttcctgcctcagcc

SEQ ID NO: 63187 - DNA, 20 bp, synthetic construct
  misc_feature 1..20: note = Description of Artificial Sequence: Synthetic oligonucleotide
  misc_feature 1..20: note = Target: SCN10A; (+) strand; PAM type: YTN; PAM sequence: TTA
  source 1..20: mol_type = other DNA
ttgagttcctgcctcagccc

SEQ ID NO: 63188 - DNA, 20 bp, synthetic construct
  misc_feature 1..20: note = Description of Artificial Sequence: Synthetic oligonucleotide
  misc_feature 1..20: note = Target: SCN10A; (+) strand; PAM type: YTN; PAM sequence: TTG
  source 1..20: mol_type = other DNA
agttcctgcctcagcccaga

SEQ ID NO: 63189 - DNA, 20 bp, synthetic construct
  misc_feature 1..20: note = Description of Artificial Sequence: Synthetic oligonucleotide
  misc_feature 1..20: note = Target: SCN10A; (+) strand; PAM type: YTN; PAM sequence: TTC
  source 1..20: mol_type = other DNA
ctgcctcagcccagacattg

SEQ ID NO: 63190 - DNA, 20 bp, synthetic construct
  misc_feature 1..20: note = Description of Artificial Sequence: Synthetic oligonucleotide
  misc_feature 1..20: note = Target: SCN10A; (+) strand; PAM type: YTN; PAM sequence: CTG
  source 1..20: mol_type = other DNA
cctcagcccagacattgcat

SEQ ID NO: 63191 - DNA, 20 bp, synthetic construct
  misc_feature 1..20: note = Description of Artificial Sequence: Synthetic oligonucleotide
  misc_feature 1..20: note = Target: SCN10A; (+) strand; PAM type: YTN; PAM sequence: CTC
  source 1..20: mol_type = other DNA
agcccagacattgcattagg

SEQ ID NO: 63192 - DNA, 20 bp, synthetic construct
  misc_feature 1..20: note = Description of Artificial Sequence: Synthetic oligonucleotide
  misc_feature 1..20: note = Target: SCN10A; (+) strand; PAM type: YTN; PAM sequence: TTG
  source 1..20: mol_type = other DNA
cattaggcaatttgcatatg

SEQ ID NO: 63193 - DNA, 20 bp, synthetic construct
  misc_feature 1..20: note = Description of Artificial Sequence: Synthetic oligonucleotide
  misc_feature 1..20: note = Target: SCN10A; (+) strand; PAM type: YTN; PAM sequence: TTA
  source 1..20: mol_type = other DNA
ggcaatttgcatatgtcatc

SEQ ID NO: 63194 - DNA, 20 bp, synthetic construct
  misc_feature 1..20: note = Description of Artificial Sequence: Synthetic oligonucleotide
  misc_feature 1..20: note = Target: SCN10A; (+) strand; PAM type: YTN; PAM sequence: TTT
  source 1..20: mol_type = other DNA
gcatatgtcatctcctgtca

SEQ ID NO: 63195 - DNA, 20 bp, synthetic construct
  misc_feature 1..20: note = Description of Artificial Sequence: Synthetic oligonucleotide
  misc_feature 1..20: note = Target: SCN10A; (+) strand; PAM type: YTN; PAM sequence: TTG
  source 1..20: mol_type = other DNA
catatgtcatctcctgtcat

SEQ ID NO: 63196 - DNA, 20 bp, synthetic construct
  misc_feature 1..20: note = Description of Artificial Sequence: Synthetic oligonucleotide
  misc_feature 1..20: note = Target: SCN10A; (+) strand; PAM type: YTN; PAM sequence: CTC
  source 1..20: mol_type = other DNA
ctgtcatttaattctcccag

SEQ ID NO: 63197 - DNA, 20 bp, synthetic construct
  misc_feature 1..20: note = Description of Artificial Sequence: Synthetic oligonucleotide
  misc_feature 1..20: note = Target: SCN10A; (+) strand; PAM type: YTN; PAM sequence: CTG
  source 1..20: mol_type = other DNA
tcatttaattctcccagtaa

SEQ ID NO: 63198 - DNA, 20 bp, synthetic construct
  misc_feature 1..20: note = Description of Artificial Sequence: Synthetic oligonucleotide
  misc_feature 1..20: note = Target: SCN10A; (+) strand; PAM type: YTN; PAM sequence: TTT
  source 1..20: mol_type = other DNA
aattctcccagtaaacccat

SEQ ID NO: 63199 - DNA, 20 bp, synthetic construct
  misc_feature 1..20: note = Description of Artificial Sequence: Synthetic oligonucleotide
  misc_feature 1..20: note = Target: SCN10A; (+) strand; PAM type: YTN; PAM sequence: TTA
  source 1..20: mol_type = other DNA
attctcccagtaaacccatg

SEQ ID NO: 63200 - DNA, 20 bp, synthetic construct
  misc_feature 1..20: note = Description of Artificial Sequence: Synthetic oligonucleotide
  misc_feature 1..20: note = Target: SCN10A; (+) strand; PAM type: YTN; PAM sequence: TTC
  source 1..20: mol_type = other DNA
tcccagtaaacccatgagta

SEQ ID NO: 63201 - DNA, 20 bp, synthetic construct
  misc_feature 1..20: note = Description of Artificial Sequence: Synthetic oligonucleotide
  misc_feature 1..20: note = Target: SCN10A; (+) strand; PAM type: YTN; PAM sequence: CTC
  source 1..20: mol_type = other DNA
ccagtaaacccatgagtaag

SEQ ID NO: 63202 - DNA, 20 bp, synthetic construct
  misc_feature 1..20: note = Description of Artificial Sequence: Synthetic oligonucleotide
  misc_feature 1..20: note = Target: SCN10A; (+) strand; PAM type: YTN; PAM sequence: TTA
  source 1..20: mol_type = other DNA
ttttcttgattttaaggaaa

SEQ ID NO: 63203 - DNA, 20 bp, synthetic construct
  misc_feature 1..20: note = Description of Artificial Sequence: Synthetic oligonucleotide
  misc_feature 1..20: note = Target: SCN10A; (+) strand; PAM type: YTN; PAM sequence: TTT
  source 1..20: mol_type = other DNA
tcttgattttaaggaaatta

SEQ ID NO: 63204 - DNA, 20 bp, synthetic construct
  misc_feature 1..20: note = Description of Artificial Sequence: Synthetic oligonucleotide
  misc_feature 1..20: note = Target: SCN10A; (+) strand; PAM type: YTN; PAM sequence: TTT
  source 1..20: mol_type = other DNA
cttgattttaaggaaattag

SEQ ID NO: 63205 - DNA, 20 bp, synthetic construct
  misc_feature 1..20: note = Description of Artificial Sequence: Synthetic oligonucleotide
  misc_feature 1..20: note = Target: SCN10A; (+) strand; PAM type: YTN; PAM sequence: TTC
  source 1..20: mol_type = other DNA
ttgattttaaggaaattaga

SEQ ID NO: 63206 - DNA, 20 bp, synthetic construct
  misc_feature 1..20: note = Description of Artificial Sequence: Synthetic oligonucleotide
  misc_feature 1..20: note = Target: SCN10A; (+) strand; PAM type: YTN; PAM sequence: CTT
  source 1..20: mol_type = other DNA
gattttaaggaaattagatc

SEQ ID NO: 63207 - DNA, 20 bp, synthetic construct
  misc_feature 1..20: note = Description of Artificial Sequence: Synthetic oligonucleotide
  misc_feature 1..20: note = Target: SCN10A; (+) strand; PAM type: YTN; PAM sequence: TTG
  source 1..20: mol_type = other DNA
attttaaggaaattagatct

SEQ ID NO: 63208 - DNA, 20 bp, synthetic construct
  misc_feature 1..20: note = Description of Artificial Sequence: Synthetic oligonucleotide
  misc_feature 1..20: note = Target: SCN10A; (+) strand; PAM type: YTN; PAM sequence: TTT
  source 1..20: mol_type = other DNA
taaggaaattagatcttgag

SEQ ID NO: 63209 - DNA, 20 bp, synthetic construct
  misc_feature 1..20: note = Description of Artificial Sequence: Synthetic oligonucleotide
  misc_feature 1..20: note = Target: SCN10A; (+) strand; PAM type: YTN; PAM sequence: TTT
  source 1..20: mol_type = other DNA
aaggaaattagatcttgagg

SEQ ID NO: 63210 - DNA, 20 bp, synthetic construct
  misc_feature 1..20: note = Description of Artificial Sequence: Synthetic oligonucleotide
  misc_feature 1..20: note = Target: SCN10A; (+) strand; PAM type: YTN; PAM sequence: TTA
  source 1..20: mol_type = other DNA
aggaaattagatcttgagga

SEQ ID NO: 63211 - DNA, 20 bp, synthetic construct
  misc_feature 1..20: note = Description of Artificial Sequence: Synthetic oligonucleotide
  misc_feature 1..20: note = Target: SCN10A; (+) strand; PAM type: YTN; PAM sequence: TTA
  source 1..20: mol_type = other DNA
gatcttgaggagattaagtc

SEQ ID NO: 63212 - DNA, 20 bp, synthetic construct
  misc_feature 1..20: note = Description of Artificial Sequence: Synthetic oligonucleotide
  misc_feature 1..20: note = Target: SCN10A; (+) strand; PAM type: YTN; PAM sequence: CTT
  source 1..20: mol_type = other DNA
gaggagattaagtctcttgc

SEQ ID NO: 63213 - DNA, 20 bp, synthetic construct
  misc_feature 1..20: note = Description of Artificial Sequence: Synthetic oligonucleotide
  misc_feature 1..20: note = Target: SCN10A; (+) strand; PAM type: YTN; PAM sequence: TTG
  source 1..20: mol_type = other DNA
aggagattaagtctcttgcc

SEQ ID NO: 63214 - DNA, 20 bp, synthetic construct
  misc_feature 1..20: note = Description of Artificial Sequence: Synthetic oligonucleotide
  misc_feature 1..20: note = Target: SCN10A; (+) strand; PAM type: YTN; PAM sequence: TTA
  source 1..20: mol_type = other DNA
agtctcttgcctggggtcac

SEQ ID NO: 63215 - DNA, 20 bp, synthetic construct
  misc_feature 1..20: note = Description of Artificial Sequence: Synthetic oligonucleotide
  misc_feature 1..20: note = Target: SCN10A; (+) strand; PAM type: YTN; PAM sequence: CTC
  source 1..20: mol_type = other DNA
ttgcctggggtcacccacct

SEQ ID NO: 63216 - DNA, 20 bp, synthetic construct
  misc_feature 1..20: note = Description of Artificial Sequence: Synthetic oligonucleotide
  misc_feature 1..20: note = Target: SCN10A; (+) strand; PAM type: YTN; PAM sequence: CTT
  source 1..20: mol_type = other DNA
gcctggggtcacccacctag

SEQ ID NO: 63217 - DNA, 20 bp, synthetic construct
  misc_feature 1..20: note = Description of Artificial Sequence: Synthetic oligonucleotide
  misc_feature 1..20: note = Target: SCN10A; (+) strand; PAM type: YTN; PAM sequence: TTG
  source 1..20: mol_type = other DNA
cctggggtcacccacctagt

SEQ ID NO: 63218 - DNA, 20 bp, synthetic construct
  misc_feature 1..20: note = Description of Artificial Sequence: Synthetic oligonucleotide
  misc_feature 1..20: note = Target: SCN10A; (+) strand; PAM type: YTN; PAM sequence: CTG
  source 1..20: mol_type = other DNA
gggtcacccacctagtaaat

SEQ ID NO: 63219 - DNA, 20 bp, synthetic construct
  misc_feature 1..20: note = Description of Artificial Sequence: Synthetic oligonucleotide
  misc_feature 1..20: note = Target: SCN10A; (+) strand; PAM type: YTN; PAM sequence: CTA
  source 1..20: mol_type = other DNA
gtaaatggtggagcagagat

SEQ ID NO: 63220 - DNA, 20 bp, synthetic construct
  misc_feature 1..20: note = Description of Artificial Sequence: Synthetic oligonucleotide
  misc_feature 1..20: note = Target: SCN10A; (+) strand; PAM type: YTN; PAM sequence: TTC
  source 1..20: mol_type = other DNA
tacaccaggtctttcttttc

SEQ ID NO: 63221 - DNA, 20 bp, synthetic construct
  misc_feature 1..20: note = Description of Artificial Sequence: Synthetic oligonucleotide
  misc_feature 1..20: note = Target: SCN10A; (+) strand; PAM type: YTN; PAM sequence: CTA
  source 1..20: mol_type = other DNA
caccaggtctttcttttcta

SEQ ID NO: 63222 - DNA, 20 bp, synthetic construct
  misc_feature 1..20: note = Description of Artificial Sequence: Synthetic oligonucleotide
  misc_feature 1..20: note = Target: SCN10A; (+) strand; PAM type: YTN; PAM sequence: CTT
  source 1..20: mol_type = other DNA
tcttttctaatcatatgttc

SEQ ID NO: 63223 - DNA, 20 bp, synthetic construct
  misc_feature 1..20: note = Description of Artificial Sequence: Synthetic oligonucleotide
  misc_feature 1..20: note = Target: SCN10A; (+) strand; PAM type: YTN; PAM sequence: TTT
  source 1..20: mol_type = other DNA
cttttctaatcatatgttct

SEQ ID NO: 63224 - DNA, 20 bp, synthetic construct
  misc_feature 1..20: note = Description of Artificial Sequence: Synthetic oligonucleotide
  misc_feature 1..20: note = Target: SCN10A; (+) strand; PAM type: YTN; PAM sequence: TTC
  source 1..20: mol_type = other DNA
ttttctaatcatatgttctc

SEQ ID NO: 63225 - DNA, 20 bp, synthetic construct
  misc_feature 1..20: note = Description of Artificial Sequence: Synthetic oligonucleotide
  misc_feature 1..20: note = Target: SCN10A; (+) strand; PAM type: YTN; PAM sequence: CTT
  source 1..20: mol_type = other DNA
ttctaatcatatgttctcat

SEQ ID NO: 63226 - DNA, 20 bp, synthetic construct
  misc_feature 1..20: note = Description of Artificial Sequence: Synthetic oligonucleotide
  misc_feature 1..20: note = Target: SCN10A; (+) strand; PAM type: YTN; PAM sequence: TTT
  source 1..20: mol_type = other DNA
tctaatcatatgttctcatt

SEQ ID NO: 63227 - DNA, 20 bp, synthetic construct
  misc_feature 1..20: note = Description of Artificial Sequence: Synthetic oligonucleotide
  misc_feature 1..20: note = Target: SCN10A; (+) strand; PAM type: YTN; PAM sequence: TTT
  source 1..20: mol_type = other DNA
ctaatcatatgttctcattc

SEQ ID NO: 63228 - DNA, 20 bp, synthetic construct
  misc_feature 1..20: note = Description of Artificial Sequence: Synthetic oligonucleotide
  misc_feature 1..20: note = Target: SCN10A; (+) strand; PAM type: YTN; PAM sequence: TTC
  source 1..20: mol_type = other DNA
taatcatatgttctcattcc

SEQ ID NO: 63229 - DNA, 20 bp, synthetic construct
  misc_feature 1..20: note = Description of Artificial Sequence: Synthetic oligonucleotide
  misc_feature 1..20: note = Target: SCN10A; (+) strand; PAM type: YTN; PAM sequence: CTA
  source 1..20: mol_type = other DNA
atcatatgttctcattcctg

SEQ ID NO: 63230 - DNA, 20 bp, synthetic construct
  misc_feature 1..20: note = Description of Artificial Sequence: Synthetic oligonucleotide
  misc_feature 1..20: note = Target: SCN10A; (+) strand; PAM type: YTN; PAM sequence: TTC
  source 1..20: mol_type = other DNA
tcattcctgcaagtcagact

SEQ ID NO: 63231 - DNA, 20 bp, synthetic construct
  misc_feature 1..20: note = Description of Artificial Sequence: Synthetic oligonucleotide
  misc_feature 1..20: note = Target: SCN10A; (+) strand; PAM type: YTN; PAM sequence: CTC
  source 1..20: mol_type = other DNA
attcctgcaagtcagactgc

SEQ ID NO: 63232 - DNA, 20 bp, synthetic construct
  misc_feature 1..20: note = Description of Artificial Sequence: Synthetic oligonucleotide
  misc_feature 1..20: note = Target: SCN10A; (+) strand; PAM type: YTN; PAM sequence: TTC
  source 1..20: mol_type = other DNA
ctgcaagtcagactgcctcc

SEQ ID NO: 63233 - DNA, 20 bp, synthetic construct
  misc_feature 1..20: note = Description of Artificial Sequence: Synthetic oligonucleotide
  misc_feature 1..20: note = Target: SCN10A; (+) strand; PAM type: YTN; PAM sequence: CTG
  source 1..20: mol_type = other DNA
caagtcagactgcctcccaa

SEQ ID NO: 63234 - DNA, 20 bp, synthetic construct
  misc_feature 1..20: note = Description of Artificial Sequence: Synthetic oligonucleotide
  misc_feature 1..20: note = Target: SCN10A; (+) strand; PAM type: YTN; PAM sequence: CTG
  source 1..20: mol_type = other DNA
cctcccaaggcacacttctt

SEQ ID NO: 63235 - DNA, 20 bp, synthetic construct
  misc_feature 1..20: note = Description of Artificial Sequence: Synthetic oligonucleotide
  misc_feature 1..20: note = Target: SCN10A; (+) strand; PAM type: YTN; PAM sequence: CTC
  source 1..20: mol_type = other DNA
ccaaggcacacttcttgtaa

SEQ ID NO: 63236 - DNA, 20 bp, synthetic construct
  misc_feature 1..20: note = Description of Artificial Sequence: Synthetic oligonucleotide
  misc_feature 1..20: note = Target: SCN10A; (+) strand; PAM type: YTN; PAM sequence: CTT
  source 1..20: mol_type = other DNA
cttgtaatgaatcccacatg

SEQ ID NO: 63237 - DNA, 20 bp, synthetic construct
  misc_feature 1..20: note = Description of Artificial Sequence: Synthetic oligonucleotide
  misc_feature 1..20: note = Target: SCN10A; (+) strand; PAM type: YTN; PAM sequence: TTC
  source 1..20: mol_type = other DNA
ttgtaatgaatcccacatga

SEQ ID NO: 63238 - DNA, 20 bp, synthetic construct
  misc_feature 1..20: note = Description of Artificial Sequence: Synthetic oligonucleotide
  misc_feature 1..20: note = Target: SCN10A; (+) strand; PAM type: YTN; PAM sequence: CTT
  source 1..20: mol_type = other DNA
gtaatgaatcccacatgaat

SEQ ID NO: 63239 - DNA, 20 bp, synthetic construct
  misc_feature 1..20: note = Description of Artificial Sequence: Synthetic oligonucleotide
  misc_feature 1..20: note = Target: SCN10A; (+) strand; PAM type: YTN; PAM sequence: TTG
  source 1..20: mol_type = other DNA
taatgaatcccacatgaatt

SEQ ID NO: 63240 - DNA, 20 bp, synthetic construct
  misc_feature 1..20: note = Description of Artificial Sequence: Synthetic oligonucleotide
  misc_feature 1..20: note = Target: SCN10A; (+) strand; PAM type: YTN; PAM sequence: TTT
  source 1..20: mol_type = other DNA
gaaaagtttgaagacttttc

SEQ ID NO: 63241 - DNA, 20 bp, synthetic construct
  misc_feature 1..20: note = Description of Artificial Sequence: Synthetic oligonucleotide
  misc_feature 1..20: note = Target: SCN10A; (+) strand; PAM type: YTN; PAM sequence: TTG
  source 1..20: mol_type = other DNA
aaaagtttgaagacttttca

SEQ ID NO: 63242 - DNA, 20 bp, synthetic construct
  misc_feature 1..20: note = Description of Artificial Sequence: Synthetic oligonucleotide
  misc_feature 1..20: note = Target: SCN10A; (+) strand; PAM type: YTN; PAM sequence: TTT
  source 1..20: mol_type = other DNA
gaagacttttcaaccagaga

SEQ ID NO: 63243 - DNA, 20 bp, synthetic construct
  misc_feature 1..20: note = Description of Artificial Sequence: Synthetic oligonucleotide
  misc_feature 1..20: note = Target: SCN10A; (+) strand; PAM type: YTN; PAM sequence: TTG
  source 1..20: mol_type = other DNA
aagacttttcaaccagagaa

SEQ ID NO: 63244 - DNA, 20 bp, synthetic construct
  misc_feature 1..20: note = Description of Artificial Sequence: Synthetic oligonucleotide
  misc_feature 1..20: note = Target: SCN10A; (+) strand; PAM type: YTN; PAM sequence: CTT
  source 1..20: mol_type = other DNA
ttcaaccagagaagtacaat

SEQ ID NO: 63245 - DNA, 20 bp, synthetic construct
  misc_feature 1..20: note = Description of Artificial Sequence: Synthetic oligonucleotide
  misc_feature 1..20: note = Target: SCN10A; (+) strand; PAM type: YTN; PAM sequence: TTT
  source 1..20: mol_type = other DNA
tcaaccagagaagtacaatc

SEQ ID NO: 63246 - DNA, 20 bp, synthetic construct
  misc_feature 1..20: note = Description of Artificial Sequence: Synthetic oligonucleotide
  misc_feature 1..20: note = Target: SCN10A; (+) strand; PAM type: YTN; PAM sequence: TTT
  source 1..20: mol_type = other DNA
caaccagagaagtacaatct

SEQ ID NO: 63247 - DNA, 20 bp, synthetic construct
  misc_feature 1..20: note = Description of Artificial Sequence: Synthetic oligonucleotide
  misc_feature 1..20: note = Target: SCN10A; (+) strand; PAM type: YTN; PAM sequence: TTC
  source 1..20: mol_type = other DNA
aaccagagaagtacaatctg

SEQ ID NO: 63248 - DNA, 20 bp, synthetic construct
  misc_feature 1..20: note = Description of Artificial Sequence: Synthetic oligonucleotide
  misc_feature 1..20: note = Target: SCN10A; (+) strand; PAM type: YTN; PAM sequence: CTG
  source 1..20: mol_type = other DNA
ggcataaaaatgcagatcaa

SEQ ID NO: 63249 - DNA, 20 bp, synthetic construct
  misc_feature 1..20: note = Description of Artificial Sequence: Synthetic oligonucleotide
  misc_feature 1..20: note = Target: SCN10A; (+) strand; PAM type: YTN; PAM sequence: CTT
  source 1..20: mol_type = other DNA
tttcagataacccagaagcc

SEQ ID NO: 63250 - DNA, 20 bp, synthetic construct
  misc_feature 1..20: note = Description of Artificial Sequence: Synthetic oligonucleotide
  misc_feature 1..20: note = Target: SCN10A; (+) strand; PAM type: YTN; PAM sequence: TTT
  source 1..20: mol_type = other DNA
ttcagataacccagaagcct

SEQ ID NO: 63251 - DNA, 20 bp, synthetic construct
  misc_feature 1..20: note = Description of Artificial Sequence: Synthetic oligonucleotide
  misc_feature 1..20: note = Target: SCN10A; (+) strand; PAM type: YTN; PAM sequence: TTT
  source 1..20: mol_type = other DNA
tcagataacccagaagcctt

SEQ ID NO: 63252 - DNA, 20 bp, synthetic construct
  misc_feature 1..20: note = Description of Artificial Sequence: Synthetic oligonucleotide
  misc_feature 1..20: note = Target: SCN10A; (+) strand; PAM type: YTN; PAM sequence: TTT
  source 1..20: mol_type = other DNA
cagataacccagaagccttc

SEQ ID NO: 63253 - DNA, 20 bp, synthetic construct
  misc_feature 1..20: note = Description of Artificial Sequence: Synthetic oligonucleotide
  misc_feature 1..20: note = Target: SCN10A; (+) strand; PAM type: YTN; PAM sequence: TTC
  source 1..20: mol_type = other DNA
agataacccagaagccttct

SEQ ID NO: 63254 - DNA, 20 bp, synthetic construct
  misc_feature 1..20: note = Description of Artificial Sequence: Synthetic oligonucleotide
  misc_feature 1..20: note = Target: SCN10A; (+) strand; PAM type: YTN; PAM sequence: CTT
  source 1..20: mol_type = other DNA
ctcctttccccaggagacag

SEQ ID NO: 63255 - DNA, 20 bp, synthetic construct
  misc_feature 1..20: note = Description of Artificial Sequence: Synthetic oligonucleotide
  misc_feature 1..20: note = Target: SCN10A; (+) strand; PAM type: YTN; PAM sequence: TTC
  source 1..20: mol_type = other DNA
tcctttccccaggagacagt

SEQ ID NO: 63256 - DNA, 20 bp, synthetic construct
  misc_feature 1..20: note = Description of Artificial Sequence: Synthetic oligonucleotide
  misc_feature 1..20: note = Target: SCN10A; (+) strand; PAM type: YTN; PAM sequence: CTC
  source 1..20: mol_type = other DNA
ctttccccaggagacagtgc

SEQ ID NO: 63257 - DNA, 20 bp, synthetic construct
  misc_feature 1..20: note = Description of Artificial Sequence: Synthetic oligonucleotide
  misc_feature 1..20: note = Target: SCN10A; (+) strand; PAM type: YTN; PAM sequence: CTT
  source 1..20: mol_type = other DNA
tccccaggagacagtgcccc

SEQ ID NO: 63258 - DNA, 20 bp, synthetic construct
  misc_feature 1..20: note = Description of Artificial Sequence: Synthetic oligonucleotide
  misc_feature 1..20: note = Target: SCN10A; (+) strand; PAM type: YTN; PAM sequence: TTT
  source 1..20: mol_type = other DNA
ccccaggagacagtgccccc

SEQ ID NO: 63259 - DNA, 20 bp, synthetic construct
  misc_feature 1..20: note = Description of Artificial Sequence: Synthetic oligonucleotide
  misc_feature 1..20: note = Target: SCN10A; (+) strand; PAM type: YTN; PAM sequence: TTC
  source 1..20: mol_type = other DNA
cccaggagacagtgccccca

SEQ ID NO: 63260 - DNA, 20 bp, synthetic construct
  misc_feature 1..20: note = Description of Artificial Sequence: Synthetic oligonucleotide
  misc_feature 1..20: note = Target: SCN10A; (+) strand; PAM type: YTN; PAM sequence: TTC
  source 1..20: mol_type = other DNA
accactcaccaccaggttcc

SEQ ID NO: 63261 - DNA, 20 bp, synthetic construct
  misc_feature 1..20: note = Description of Artificial Sequence: Synthetic oligonucleotide
  misc_feature 1..20: note = Target: SCN10A; (+) strand; PAM type: YTN; PAM sequence: CTC
  source 1..20: mol_type = other DNA
accaccaggttccctagcac

SEQ ID NO: 63262 - DNA, 20 bp, synthetic construct
  misc_feature 1..20: note = Description of Artificial Sequence: Synthetic oligonucleotide
  misc_feature 1..20: note = Target: SCN10A; (+) strand; PAM type: YTN; PAM sequence: TTC
  source 1..20: mol_type = other DNA
cctagcaccatcaccgtcaa

SEQ ID NO: 63263 - DNA, 20 bp, synthetic construct
  misc_feature 1..20: note = Description of Artificial Sequence: Synthetic oligonucleotide
  misc_feature 1..20: note = Target: SCN10A; (+) strand; PAM type: YTN; PAM sequence: CTA
  source 1..20: mol_type = other DNA
gcaccatcaccgtcaagaaa

SEQ ID NO: 63264 - DNA, 20 bp, synthetic construct
  misc_feature 1..20: note = Description of Artificial Sequence: Synthetic oligonucleotide
  misc_feature 1..20: note = Target: SCN10A; (+) strand; PAM type: YTN; PAM sequence: TTT
  source 1..20: mol_type = other DNA
ttggccaacttccatgcagg

SEQ ID NO: 63265 - DNA, 20 bp, synthetic construct
  misc_feature 1..20: note = Description of Artificial Sequence: Synthetic oligonucleotide
  misc_feature 1..20: note = Target: SCN10A; (+) strand; PAM type: YTN; PAM sequence: TTT
  source 1..20: mol_type = other DNA
tggccaacttccatgcaggc

SEQ ID NO: 63266 - DNA, 20 bp, synthetic construct
  misc_feature 1..20: note = Description of Artificial Sequence: Synthetic oligonucleotide
  misc_feature 1..20: note = Target: SCN10A; (+) strand; PAM type: YTN; PAM sequence: TTT
  source 1..20: mol_type = other DNA
ggccaacttccatgcaggcc

SEQ ID NO: 63267 - DNA, 20 bp, synthetic construct
  misc_feature 1..20: note = Description of Artificial Sequence: Synthetic oligonucleotide
  misc_feature 1..20: note = Target: SCN10A; (+) strand; PAM type: YTN; PAM sequence: TTG
  source 1..20: mol_type = other DNA
gccaacttccatgcaggccc

SEQ ID NO: 63268 - DNA, 20 bp, synthetic construct
  misc_feature 1..20: note = Description of Artificial Sequence: Synthetic oligonucleotide
  misc_feature 1..20: note = Target: SCN10A; (+) strand; PAM type: YTN; PAM sequence: CTT
  source 1..20: mol_type = other DNA
ccatgcaggcccacatgttc

SEQ ID NO: 63269 - DNA, 20 bp, synthetic construct
  misc_feature 1..20: note = Description of Artificial Sequence: Synthetic oligonucleotide
  misc_feature 1..20: note = Target: SCN10A; (+) strand; PAM type: YTN; PAM sequence: TTC
  source 1..20: mol_type = other DNA
catgcaggcccacatgttct

SEQ ID NO: 63270 - DNA, 20 bp, synthetic construct
  misc_feature 1..20: note = Description of Artificial Sequence: Synthetic oligonucleotide
  misc_feature 1..20: note = Target: SCN10A; (+) strand; PAM type: YTN; PAM sequence: TTC
  source 1..20: mol_type = other DNA
tcaatccactctccacagag

SEQ ID NO: 63271 - DNA, 20 bp, synthetic construct
  misc_feature 1..20: note = Description of Artificial Sequence: Synthetic oligonucleotide
  misc_feature 1..20: note = Target: SCN10A; (+) strand; PAM type: YTN; PAM sequence: CTC
  source 1..20: mol_type = other DNA
aatccactctccacagagga

SEQ ID NO: 63272 - DNA, 20 bp, synthetic construct
  misc_feature 1..20: note = Description of Artificial Sequence: Synthetic oligonucleotide
  misc_feature 1..20: note = Target: SCN10A; (+) strand; PAM type: YTN; PAM sequence: CTC
  source 1..20: mol_type = other DNA
tccacagaggatacggaaga

SEQ ID NO: 63273 - DNA, 20 bp, synthetic construct
  misc_feature 1..20: note = Description of Artificial Sequence: Synthetic oligonucleotide
  misc_feature 1..20: note = Target: SCN10A; (+) strand; PAM type: YTN; PAM sequence: CTC
  source 1..20: mol_type = other DNA
cacagaggatacggaagaca

SEQ ID NO: 63274 - DNA, 20 bp, synthetic construct
  misc_feature 1..20: note = Description of Artificial Sequence: Synthetic oligonucleotide
  misc_feature 1..20: note = Target: SCN10A; (+) strand; PAM type: YTN; PAM sequence: CTT
  source 1..20: mol_type = other DNA
catggggcgcggagatattt

SEQ ID NO: 63275 - DNA, 20 bp, synthetic construct
  misc_feature 1..20: note = Description of Artificial Sequence: Synthetic oligonucleotide
  misc_feature 1..20: note = Target: SCN10A; (+) strand; PAM type: YTN; PAM sequence: TTC
  source 1..20: mol_type = other DNA
atggggcgcggagatatttt

SEQ ID NO: 63276 - DNA, 20 bp, synthetic construct
  misc_feature 1..20: note = Description of Artificial Sequence: Synthetic oligonucleotide
  misc_feature 1..20: note = Target: SCN10A; (+) strand; PAM type: YTN; PAM sequence: TTT
  source 1..20: mol_type = other DNA
tttcggttgttacggtagtt

SEQ ID NO: 63277 - DNA, 20 bp, synthetic construct
  misc_feature 1..20: note = Description of Artificial Sequence: Synthetic oligonucleotide
  misc_feature 1..20: note = Target: SCN10A; (+) strand; PAM type: YTN; PAM sequence: TTT
  source 1..20: mol_type = other DNA
ttcggttgttacggtagttt

SEQ ID NO: 63278 - DNA, 20 bp, synthetic construct
  misc_feature 1..20: note = Description of Artificial Sequence: Synthetic oligonucleotide
  misc_feature 1..20: note = Target: SCN10A; (+) strand; PAM type: YTN; PAM sequence: TTT
  source 1..20: mol_type = other DNA
tcggttgttacggtagtttt

SEQ ID NO: 63279 - DNA, 20 bp, synthetic construct
  misc_feature 1..20: note = Description of Artificial Sequence: Synthetic oligonucleotide
  misc_feature 1..20: note = Target: SCN10A; (+) strand; PAM type: YTN; PAM sequence: TTT
  source 1..20: mol_type = other DNA
cggttgttacggtagttttc

SEQ ID NO: 63280 - DNA, 20 bp, synthetic construct
  misc_feature 1..20: note = Description of Artificial Sequence: Synthetic oligonucleotide
  misc_feature 1..20: note = Target: SCN10A; (+) strand; PAM type: YTN; PAM sequence: TTC
  source 1..20: mol_type = other DNA
ggttgttacggtagttttcc

SEQ ID NO: 63281 - DNA, 20 bp, synthetic construct
  misc_feature 1..20: note = Description of Artificial Sequence: Synthetic oligonucleotide
  misc_feature 1..20: note = Target: SCN10A; (+) strand; PAM type: YTN; PAM sequence: TTG
  source 1..20: mol_type = other DNA
ttacggtagttttcccctag

SEQ ID NO: 63282 - DNA, 20 bp, synthetic construct
  misc_feature 1..20: note = Description of Artificial Sequence: Synthetic oligonucleotide
  misc_feature 1..20: note = Target: SCN10A; (+) strand; PAM type: YTN; PAM sequence: TTA
  source 1..20: mol_type = other DNA
cggtagttttcccctaggag

SEQ ID NO: 63283 - DNA, 20 bp, synthetic construct
  misc_feature 1..20: note = Description of Artificial Sequence: Synthetic oligonucleotide
  misc_feature 1..20: note = Target: SCN10A; (+) strand; PAM type: YTN; PAM sequence: TTT
  source 1..20: mol_type = other DNA
tcccctaggagctgcttgcc

SEQ ID NO: 63284 - DNA, 20 bp, synthetic construct
  misc_feature 1..20: note = Description of Artificial Sequence: Synthetic oligonucleotide
  misc_feature 1..20: note = Target: SCN10A; (+) strand; PAM type: YTN; PAM sequence: TTT
  source 1..20: mol_type = other DNA
cccctaggagctgcttgcca

SEQ ID NO: 63285 - DNA, 20 bp, synthetic construct
  misc_feature 1..20: note = Description of Artificial Sequence: Synthetic oligonucleotide
  misc_feature 1..20: note = Target: SCN10A; (+) strand; PAM type: YTN; PAM sequence: TTC
  source 1..20: mol_type = other DNA
ccctaggagctgcttgccaa

SEQ ID NO: 63286 - DNA, 20 bp, synthetic construct
  misc_feature 1..20: note = Description of Artificial Sequence: Synthetic oligonucleotide
  misc_feature 1..20: note = Target: SCN10A; (+) strand; PAM type: YTN; PAM sequence: CTA
  source 1..20: mol_type = other DNA
ggagctgcttgccaaccaga

SEQ ID NO: 63287 - DNA, 20 bp, synthetic construct
  misc_feature 1..20: note = Description of Artificial Sequence: Synthetic oligonucleotide
  misc_feature 1..20: note = Target: SCN10A; (+) strand; PAM type: YTN; PAM sequence: CTG
  source 1..20: mol_type = other DNA
cttgccaaccagagcaaaga

SEQ ID NO: 63288 - DNA, 20 bp, synthetic construct
  misc_feature 1..20: note = Description of Artificial Sequence: Synthetic oligonucleotide
  misc_feature 1..20: note = Target: SCN10A; (+) strand; PAM type: YTN; PAM sequence: CTT
  source 1..20: mol_type = other DNA
gccaaccagagcaaagacaa

SEQ ID NO: 63289 - DNA, 20 bp, synthetic construct
  misc_feature 1..20: note = Description of Artificial Sequence: Synthetic oligonucleotide
  misc_feature 1..20: note = Target: SCN10A; (+) strand; PAM type: YTN; PAM sequence: TTG
  source 1..20: mol_type = other DNA
ccaaccagagcaaagacaaa

SEQ ID NO: 63290 - DNA, 20 bp, synthetic construct
  misc_feature 1..20: note = Description of Artificial Sequence: Synthetic oligonucleotide
  misc_feature 1..20: note = Target: SCN10A; (+) strand; PAM type: YTN; PAM sequence: TTC
  source 1..20: mol_type = other DNA
cccagtgcccccactgagtt

SEQ ID NO: 63291 - DNA, 20 bp, synthetic construct
  misc_feature 1..20: note = Description of Artificial Sequence: Synthetic oligonucleotide
  misc_feature 1..20: note = Target: SCN10A; (+) strand; PAM type: YTN; PAM sequence: CTG
  source 1..20: mol_type = other DNA
agtttccgatgatcttgatg

SEQ ID NO: 63292 - DNA, 20 bp, synthetic construct
  misc_feature 1..20: note = Description of Artificial Sequence: Synthetic oligonucleotide
  misc_feature 1..20: note = Target: SCN10A; (+) strand; PAM type: YTN; PAM sequence: TTT
  source 1..20: mol_type = other DNA
ccgatgatcttgatgagtgt

SEQ ID NO: 63293 - DNA, 20 bp, synthetic construct
  misc_feature 1..20: note = Description of Artificial Sequence: Synthetic oligonucleotide
  misc_feature 1..20: note = Target: SCN10A; (+) strand; PAM type: YTN; PAM sequence: TTC
  source 1..20: mol_type = other DNA
cgatgatcttgatgagtgtg

SEQ ID NO: 63294 - DNA, 20 bp, synthetic construct
  misc_feature 1..20: note = Description of Artificial Sequence: Synthetic oligonucleotide
  misc_feature 1..20: note = Target: SCN10A; (+) strand; PAM type: YTN; PAM sequence: CTT
  source 1..20: mol_type = other DNA
gatgagtgtgtttaaggtgg

SEQ ID NO: 63295 - DNA, 20 bp, synthetic construct
  misc_feature 1..20: note = Description of Artificial Sequence: Synthetic oligonucleotide
  misc_feature 1..20: note = Target: SCN10A; (+) strand; PAM type: YTN; PAM sequence: TTG
  source 1..20: mol_type = other DNA
atgagtgtgtttaaggtggg

SEQ ID NO: 63296 - DNA, 20 bp, synthetic construct
  misc_feature 1..20: note = Description of Artificial Sequence: Synthetic oligonucleotide
  misc_feature 1..20: note = Target: SCN10A; (+) strand; PAM type: YTN; PAM sequence: TTT
  source 1..20: mol_type = other DNA
aaggtgggccaggatttggc

SEQ ID NO: 63297 - DNA, 20 bp, synthetic construct
  misc_feature 1..20: note = Description of Artificial Sequence: Synthetic oligonucleotide
  misc_feature 1..20: note = Target: SCN10A; (+) strand; PAM type: YTN; PAM sequence: TTA
  source 1..20: mol_type = other DNA
aggtgggccaggatttggcc

SEQ ID NO: 63298 - DNA, 20 bp, synthetic construct
  misc_feature 1..20: note = Description of Artificial Sequence: Synthetic oligonucleotide
  misc_feature 1..20: note = Target: SCN10A; (+) strand; PAM type: YTN; PAM sequence: TTT
  source 1..20: mol_type = other DNA
ggccagcttgaatacgcgca

SEQ ID NO: 63299 - DNA, 20 bp, synthetic construct
  misc_feature 1..20: note = Description of Artificial Sequence: Synthetic oligonucleotide
  misc_feature 1..20: note = Target: SCN10A; (+) strand; PAM type: YTN; PAM sequence: TTG
  source 1..20: mol_type = other DNA
gccagcttgaatacgcgcag

SEQ ID NO: 63300 - DNA, 20 bp, synthetic construct
  misc_feature 1..20: note = Description of Artificial Sequence: Synthetic oligonucleotide
  misc_feature 1..20: note = Target: SCN10A; (+) strand; PAM type: YTN; PAM sequence: CTT
  source 1..20: mol_type = other DNA
gaatacgcgcagctgcagag

SEQ ID NO: 63301 - DNA, 20 bp, synthetic construct
  misc_feature 1..20: note = Description of Artificial Sequence: Synthetic oligonucleotide
  misc_feature 1..20: note = Target: SCN10A; (+) strand; PAM type: YTN; PAM sequence: TTG
  source 1..20: mol_type = other DNA
aatacgcgcagctgcagaga

SEQ ID NO: 63302 - DNA, 20 bp, synthetic construct
  misc_feature 1..20: note = Description of Artificial Sequence: Synthetic oligonucleotide
  misc_feature 1..20: note = Target: SCN10A; (+) strand; PAM type: YTN; PAM sequence: CTG
  source 1..20: mol_type = other DNA
cagagaaacagagaccgtca

SEQ ID NO: 63303 - DNA, 20 bp, synthetic construct
  misc_feature 1..20: note = Description of Artificial Sequence: Synthetic oligonucleotide
  misc_feature 1..20: note = Target: SCN10A; (+) strand; PAM type: YTN; PAM sequence: TTT
  source 1..20: mol_type = other DNA
tggtagctgtgctcattacc

SEQ ID NO: 63304 - DNA, 20 bp, synthetic construct
  misc_feature 1..20: note = Description of Artificial Sequence: Synthetic oligonucleotide
  misc_feature 1..20: note = Target: SCN10A; (+) strand; PAM type: YTN; PAM sequence: TTT
  source 1..20: mol_type = other DNA
ggtagctgtgctcattacct

SEQ ID NO: 63305 - DNA, 20 bp, synthetic construct
  misc_feature 1..20: note = Description of Artificial Sequence: Synthetic oligonucleotide
  misc_feature 1..20: note = Target: SCN10A; (+) strand; PAM type: YTN; PAM sequence: TTG
  source 1..20: mol_type = other DNA
gtagctgtgctcattacctt

SEQ ID NO: 63306 - DNA, 20 bp, synthetic construct
  misc_feature 1..20: note = Description of Artificial Sequence: Synthetic oligonucleotide
  misc_feature 1..20: note = Target: SCN10A; (+) strand; PAM type: YTN; PAM sequence: CTG
  source 1..20: mol_type = other DNA
tgctcattacctttcatcta

SEQ ID NO: 63307 - DNA, 20 bp, synthetic construct
  misc_feature 1..20: note = Description of Artificial Sequence: Synthetic oligonucleotide
  misc_feature 1..20: note = Target: SCN10A; (+) strand; PAM type: YTN; PAM sequence: CTC
  source 1..20: mol_type = other DNA
attacctttcatctaaagtt

SEQ ID NO: 63308 - DNA, 20 bp, synthetic construct
  misc_feature 1..20: note = Description of Artificial Sequence: Synthetic oligonucleotide
  misc_feature 1..20: note = Target: SCN10A; (+) strand; PAM type: YTN; PAM sequence: TTA
  source 1..20: mol_type = other DNA
cctttcatctaaagttttgc

SEQ ID NO: 63309 - DNA, 20 bp, synthetic construct
  misc_feature 1..20: note = Description of Artificial Sequence: Synthetic oligonucleotide
  misc_feature 1..20: note = Target: SCN10A; (+) strand; PAM type: YTN; PAM sequence: CTT
  source 1..20: mol_type = other DNA
tcatctaaagttttgcctgg

SEQ ID NO: 63310 - DNA, 20 bp, synthetic construct
  misc_feature 1..20: note = Description of Artificial Sequence: Synthetic oligonucleotide
  misc_feature 1..20: note = Target: SCN10A; (+) strand; PAM type: YTN; PAM sequence: TTT
  source 1..20: mol_type = other DNA
catctaaagttttgcctgga

SEQ ID NO: 63311 - DNA, 20 bp, synthetic construct
  misc_feature 1..20: note = Description of Artificial Sequence: Synthetic oligonucleotide
  misc_feature 1..20: note = Target: SCN10A; (+) strand; PAM type: YTN; PAM sequence: TTC
  source 1..20: mol_type = other DNA
atctaaagttttgcctggaa

SEQ ID NO: 63312 - DNA, 20 bp, synthetic construct
  misc_feature 1..20: note = Description of Artificial Sequence: Synthetic oligonucleotide
  misc_feature 1..20: note = Target: SCN10A; (+) strand; PAM type: YTN; PAM sequence: CTA
  source 1..20: mol_type = other DNA
aagttttgcctggaaaccaa

SEQ ID NO: 63313 - DNA, 20 bp, synthetic construct
  misc_feature 1..20: note = Description of Artificial Sequence: Synthetic oligonucleotide
  misc_feature 1..20: note = Target: SCN10A; (+) strand; PAM type: YTN; PAM sequence: TTT
  source 1..20: mol_type = other DNA
tgcctggaaaccaaagatct

SEQ ID NO: 63314 - DNA, 20 bp, synthetic construct
  misc_feature 1..20: note = Description of Artificial Sequence: Synthetic oligonucleotide
  misc_feature 1..20: note = Target: SCN10A; (+) strand; PAM type: YTN; PAM sequence: TTT
  source 1..20: mol_type = other DNA
gcctggaaaccaaagatctg

SEQ ID NO: 63315 - DNA, 20 bp, synthetic construct
  misc_feature 1..20: note = Description of Artificial Sequence: Synthetic oligonucleotide
  misc_feature 1..20: note = Target: SCN10A; (+) strand; PAM type: YTN; PAM sequence: TTG
  source 1..20: mol_type = other DNA
cctggaaaccaaagatctgg

SEQ ID NO: 63316 - DNA, 20 bp, synthetic construct
  misc_feature 1..20: note = Description of Artificial Sequence: Synthetic oligonucleotide
  misc_feature 1..20: note = Target: SCN10A; (+) strand; PAM type: YTN; PAM sequence: CTG
  source 1..20: mol_type = other DNA
gaaaccaaagatctgggaaa

SEQ ID NO: 63317 - DNA, 20 bp, synthetic construct
  misc_feature 1..20: note = Description of Artificial Sequence: Synthetic oligonucleotide
  misc_feature 1..20: note = Target: SCN10A; (+) strand; PAM type: YTN; PAM sequence: CTG
  source 1..20: mol_type = other DNA
ggaaaaacacaaggcctctc

SEQ ID NO: 63318 - DNA, 20 bp, synthetic construct
  misc_feature 1..20: note = Description of Artificial Sequence: Synthetic oligonucleotide
  misc_feature 1..20: note = Target: SCN10A; (+) strand; PAM type: YTN; PAM sequence: CTC
  source 1..20: mol_type = other DNA
tcatcccattaaaccagggc

SEQ ID NO: 63319 - DNA, 20 bp, synthetic construct
  misc_feature 1..20: note = Description of Artificial Sequence: Synthetic oligonucleotide
  misc_feature 1..20: note = Target: SCN10A; (+) strand; PAM type: YTN; PAM sequence: CTC
  source 1..20: mol_type = other DNA
atcccattaaaccagggcgt

SEQ ID NO: 63320 - DNA, 20 bp, synthetic construct
  misc_feature 1..20: note = Description of Artificial Sequence: Synthetic oligonucleotide
  misc_feature 1..20: note = Target: SCN10A; (+) strand; PAM type: YTN; PAM sequence: TTA
  source 1..20: mol_type = other DNA
aaccagggcgttttctggac

SEQ ID NO: 63321 - DNA, 20 bp, synthetic construct
  misc_feature 1..20: note = Description of Artificial Sequence: Synthetic oligonucleotide
  misc_feature 1..20: note = Target: SCN10A; (+) strand; PAM type: YTN; PAM sequence: TTT
  source 1..20: mol_type = other DNA
tctggacactgcttttggag

SEQ ID NO: 63322 - DNA, 20 bp, synthetic construct
  misc_feature 1..20: note = Description of Artificial Sequence: Synthetic oligonucleotide
  misc_feature 1..20: note = Target: SCN10A; (+) strand; PAM type: YTN; PAM sequence: TTT
  source 1..20: mol_type = other DNA
ctggacactgcttttggaga

SEQ ID NO: 63323 - DNA, 20 bp, synthetic construct
  misc_feature 1..20: note = Description of Artificial Sequence: Synthetic oligonucleotide
  misc_feature 1..20: note = Target: SCN10A; (+) strand; PAM type: YTN; PAM sequence: TTC
  source 1..20: mol_type = other DNA
tggacactgcttttggagac

SEQ ID NO: 63324 - DNA, 20 bp, synthetic construct
  misc_feature 1..20: note = Description of Artificial Sequence: Synthetic oligonucleotide
  misc_feature 1..20: note = Target: SCN10A; (+) strand; PAM type: YTN; PAM sequence: CTG
  source 1..20: mol_type = other DNA
gacactgcttttggagacct

SEQ ID NO: 63325 - DNA, 20 bp, synthetic construct
  misc_feature 1..20: note = Description of Artificial Sequence: Synthetic oligonucleotide
  misc_feature 1..20: note = Target: SCN10A; (+) strand; PAM type: YTN; PAM sequence: CTG
  source 1..20: mol_type = other DNA
cttttggagacctttcttcc

SEQ ID NO: 63326 - DNA, 20 bp, synthetic construct
  misc_feature 1..20: note = Description of Artificial Sequence: Synthetic oligonucleotide
  misc_feature 1..20: note = Target: SCN10A; (+) strand; PAM type: YTN; PAM sequence: CTT
  source 1..20: mol_type = other DNA
ttggagacctttcttcctat

SEQ ID NO: 63327 - DNA, 20 bp, synthetic construct
  misc_feature 1..20: note = Description of Artificial Sequence: Synthetic oligonucleotide
  misc_feature 1..20: note = Target: SCN10A; (+) strand; PAM type: YTN; PAM sequence: TTT
  source 1..20: mol_type = other DNA
tggagacctttcttcctatg

SEQ ID NO: 63328 - DNA, 20 bp, synthetic construct
  misc_feature 1..20: note = Description of Artificial Sequence: Synthetic oligonucleotide
  misc_feature 1..20: note = Target: SCN10A; (+) strand; PAM type: YTN; PAM sequence: TTT
  source 1..20: mol_type = other DNA
ggagacctttcttcctatgc

SEQ ID NO: 63329 - DNA, 20 bp, synthetic construct
  misc_feature 1..20: note = Description of Artificial Sequence: Synthetic oligonucleotide
  misc_feature 1..20: note = Target: SCN10A; (+) strand; PAM type: YTN; PAM sequence: TTG
  source 1..20: mol_type = other DNA
gagacctttcttcctatgct

SEQ ID NO: 63330 - DNA, 20 bp, synthetic construct
  misc_feature 1..20: note = Description of Artificial Sequence: Synthetic oligonucleotide
  misc_feature 1..20: note = Target: SCN10A; (+) strand; PAM type: YTN; PAM sequence: CTT
  source 1..20: mol_type = other DNA
tcttcctatgctataaatta

SEQ ID NO: 63331 - DNA, 20 bp, synthetic construct
  misc_feature 1..20: note = Description of Artificial Sequence: Synthetic oligonucleotide
  misc_feature 1..20: note = Target: SCN10A; (+) strand; PAM type: YTN; PAM sequence: TTT
  source 1..20: mol_type = other DNA
cttcctatgctataaattac

SEQ ID NO: 63332 - DNA, 20 bp, synthetic construct
  misc_feature 1..20: note = Description of Artificial Sequence: Synthetic oligonucleotide
  misc_feature 1..20: note = Target: SCN10A; (+) strand; PAM type: YTN; PAM sequence: TTC
  source 1..20: mol_type = other DNA
ttcctatgctataaattact

SEQ ID NO: 63333 - DNA, 20 bp, synthetic construct
  misc_feature 1..20: note = Description of Artificial Sequence: Synthetic oligonucleotide
  misc_feature 1..20: note = Target: SCN10A; (+) strand; PAM type: YTN; PAM sequence: CTT
  source 1..20: mol_type = other DNA
cctatgctataaattactca

SEQ ID NO: 63334 - DNA, 20 bp, synthetic construct
  misc_feature 1..20: note = Description of Artificial Sequence: Synthetic oligonucleotide
  misc_feature 1..20: note = Target: SCN10A; (+) strand; PAM type: YTN; PAM sequence: TTC
  source 1..20: mol_type = other DNA
ctatgctataaattactcaa

SEQ ID NO: 63335 - DNA, 20 bp, synthetic construct
  misc_feature 1..20: note = Description of Artificial Sequence: Synthetic oligonucleotide
  misc_feature 1..20: note = Target: SCN10A; (+) strand; PAM type: YTN; PAM sequence: CTA
  source 1..20: mol_type = other DNA
tgctataaattactcaaaaa

SEQ ID NO: 63336 - DNA, 20 bp, synthetic construct
  misc_feature 1..20: note = Description of Artificial Sequence: Synthetic oligonucleotide
  misc_feature 1..20: note = Target: SCN10A; (+) strand; PAM type: YTN; PAM sequence: CTA
  source 1..20: mol_type = other DNA
taaattactcaaaaatatga

SEQ ID NO: 63337 - DNA, 20 bp, synthetic construct
  misc_feature 1..20: note = Description of Artificial Sequence: Synthetic oligonucleotide
  misc_feature 1..20: note = Target: SCN10A; (+) strand; PAM type: YTN; PAM sequence: TTA
  source 1..20: mol_type = other DNA
ctcaaaaatatgatctgcct

SEQ ID NO: 63338 - DNA, 20 bp, synthetic construct
  misc_feature 1..20: note = Description of Artificial Sequence: Synthetic oligonucleotide
  misc_feature 1..20: note = Target: SCN10A; (+) strand; PAM type: YTN; PAM sequence: CTC
  source 1..20: mol_type = other DNA
aaaaatatgatctgccttct

SEQ ID NO: 63339 - DNA, 20 bp, synthetic construct
  misc_feature 1..20: note = Description of Artificial Sequence: Synthetic oligonucleotide
  misc_feature 1..20: note = Target: SCN10A; (+) strand; PAM type: YTN; PAM sequence: CTG
  source 1..20: mol_type = other DNA
ccttctatggttcataagta

SEQ ID NO: 63340 - DNA, 20 bp, synthetic construct
  misc_feature 1..20: note = Description of Artificial Sequence: Synthetic oligonucleotide
  misc_feature 1..20: note = Target: SCN10A; (+) strand; PAM type: YTN; PAM sequence: CTT
  source 1..20: mol_type = other DNA
ctatggttcataagtatcaa

SEQ ID NO: 63341 - DNA, 20 bp, synthetic construct
  misc_feature 1..20: note = Description of Artificial Sequence: Synthetic oligonucleotide
  misc_feature 1..20: note = Target: SCN10A; (+) strand; PAM type: YTN; PAM sequence: TTC
  source 1..20: mol_type = other DNA
tatggttcataagtatcaat

SEQ ID NO: 63342 - DNA, 20 bp, synthetic construct
  misc_feature 1..20: note = Description of Artificial Sequence: Synthetic oligonucleotide
  misc_feature 1..20: note = Target: SCN10A; (+) strand; PAM type: YTN; PAM sequence: CTA
  source 1..20: mol_type = other DNA
tggttcataagtatcaatgt

SEQ ID NO: 63343 - DNA, 20 bp, synthetic construct
  misc_feature 1..20: note = Description of Artificial Sequence: Synthetic oligonucleotide
  misc_feature 1..20: note = Target: SCN10A; (+) strand; PAM type: YTN; PAM sequence: TTC
  source 1..20: mol_type = other DNA
ataagtatcaatgtgcttca

SEQ ID NO: 63344 - DNA, 20 bp, synthetic construct
  misc_feature 1..20: note = Description of Artificial Sequence: Synthetic oligonucleotide
  misc_feature 1..20: note = Target: SCN10A; (+) strand; PAM type: YTN; PAM sequence: CTT
  source 1..20: mol_type = other DNA
cattgactgtggctgagtca

SEQ ID NO: 63345 - DNA, 20 bp, synthetic construct
  misc_feature 1..20: note = Description of Artificial Sequence: Synthetic oligonucleotide
  misc_feature 1..20: note = Target: SCN10A; (+) strand; PAM type: YTN; PAM sequence: TTC
  source 1..20: mol_type = other DNA
attgactgtggctgagtcag

SEQ ID NO: 63346 - DNA, 20 bp, synthetic construct
  misc_feature 1..20: note = Description of Artificial Sequence: Synthetic oligonucleotide
  misc_feature 1..20: note = Target: SCN10A; (+) strand; PAM type: YTN; PAM sequence: TTG
  source 1..20: mol_type = other DNA
actgtggctgagtcagggtc

SEQ ID NO: 63347 - DNA, 20 bp, synthetic construct
  misc_feature 1..20: note = Description of Artificial Sequence: Synthetic oligonucleotide
  misc_feature 1..20: note = Target: SCN10A; (+) strand; PAM type: YTN; PAM sequence: CTG
  source 1..20: mol_type = other DNA
tggctgagtcagggtcttct

SEQ ID NO: 63348 - DNA, 20 bp, synthetic construct
  misc_feature 1..20: note = Description of Artificial Sequence: Synthetic oligonucleotide
  misc_feature 1..20: note = Target: SCN10A; (+) strand; PAM type: YTN; PAM sequence: CTG
  source 1..20: mol_type = other DNA
agtcagggtcttctactggg

SEQ ID NO: 63349 - DNA, 20 bp, synthetic construct
  misc_feature 1..20: note = Description of Artificial Sequence: Synthetic oligonucleotide
  misc_feature 1..20: note = Target: SCN10A; (+) strand; PAM type: YTN; PAM sequence: CTT
  source 1..20: mol_type = other DNA
ctactggggtggtggccttg

SEQ ID NO: 63350 - DNA, 20 bp, synthetic construct
  misc_feature 1..20: note = Description of Artificial Sequence: Synthetic oligonucleotide
  misc_feature 1..20: note = Target: SCN10A; (+) strand; PAM type: YTN; PAM sequence: TTC
  source 1..20: mol_type = other DNA
tactggggtggtggccttgc

SEQ ID NO: 63351 - DNA, 20 bp, synthetic construct
  misc_feature 1..20: note = Description of Artificial Sequence: Synthetic oligonucleotide
  misc_feature 1..20: note = Target: SCN10A; (+) strand; PAM type: YTN; PAM sequence: CTA
  source 1..20: mol_type = other DNA
ctggggtggtggccttgcga

SEQ ID NO: 63352 - DNA, 20 bp, synthetic construct
  misc_feature 1..20: note = Description of Artificial Sequence: Synthetic oligonucleotide
  misc_feature 1..20: note = Target: SCN10A; (+) strand; PAM type: YTN; PAM sequence: CTG
  source 1..20: mol_type = other DNA
gggtggtggccttgcgatct

SEQ ID NO: 63353 - DNA, 20 bp, synthetic construct
  misc_feature 1..20: note = Description of Artificial Sequence: Synthetic oligonucleotide
  misc_feature 1..20: note = Target: SCN10A; (+) strand; PAM type: YTN; PAM sequence: CTT
  source 1..20: mol_type = other DNA
gcgatctgtactctgttcta

SEQ ID NO: 63354 - DNA, 20 bp, synthetic construct
  misc_feature 1..20: note = Description of Artificial Sequence: Synthetic oligonucleotide
  misc_feature 1..20: note = Target: SCN10A; (+) strand; PAM type: YTN; PAM sequence: TTG
  source 1..20: mol_type = other DNA
cgatctgtactctgttctat

SEQ ID NO: 63355 - DNA, 20 bp, synthetic construct
  misc_feature 1..20: note = Description of Artificial Sequence: Synthetic oligonucleotide
  misc_feature 1..20: note = Target: SCN10A; (+) strand; PAM type: YTN; PAM sequence: CTG
  source 1..20: mol_type = other DNA
tactctgttctatagccaca

SEQ ID NO: 63356 - DNA, 20 bp, synthetic construct
  misc_feature 1..20: note = Description of Artificial Sequence: Synthetic oligonucleotide
  misc_feature 1..20: note = Target: SCN10A; (+) strand; PAM type: YTN; PAM sequence: CTC
  source 1..20: mol_type = other DNA
tgttctatagccacaggcct

SEQ ID NO: 63357 - DNA, 20 bp, synthetic construct
  misc_feature 1..20: note = Description of Artificial Sequence: Synthetic oligonucleotide
  misc_feature 1..20: note = Target: SCN10A; (+) strand; PAM type: YTN; PAM sequence: CTG
  source 1..20: mol_type = other DNA
ttctatagccacaggcctga

SEQ ID NO: 63358 - DNA, 20 bp, synthetic construct
  misc_feature 1..20: note = Description of Artificial Sequence: Synthetic oligonucleotide
  misc_feature 1..20: note = Target: SCN10A; (+) strand; PAM type: YTN; PAM sequence: TTC
  source 1..20: mol_type = other DNA
tatagccacaggcctgatcc

SEQ ID NO: 63359 - DNA, 20 bp, synthetic construct
  misc_feature 1..20: note = Description of Artificial Sequence: Synthetic oligonucleotide
  misc_feature 1..20: note = Target: SCN10A; (+) strand; PAM type: YTN; PAM sequence: CTA
  source 1..20: mol_type = other DNA
tagccacaggcctgatccct

SEQ ID NO: 63360 - DNA, 20 bp, synthetic construct
  misc_feature 1..20: note = Description of Artificial Sequence: Synthetic oligonucleotide
  misc_feature 1..20: note = Target: SCN10A; (+) strand; PAM type: YTN; PAM sequence: CTG
  source 1..20: mol_type = other DNA
atccctcctgaatatgggcc

SEQ ID NO: 63361 - DNA, 20 bp, synthetic construct
  misc_feature 1..20: note = Description of Artificial Sequence: Synthetic oligonucleotide
  misc_feature 1..20: note = Target: SCN10A; (+) strand; PAM type: YTN; PAM sequence: CTC
  source 1..20: mol_type = other DNA
ctgaatatgggcctcttctg

SEQ ID NO: 63362 - DNA, 20 bp, synthetic construct
  misc_feature 1..20: note = Description of Artificial Sequence: Synthetic oligonucleotide
  misc_feature 1..20: note = Target: SCN10A; (+) strand; PAM type: YTN; PAM sequence: CTG
  source 1..20: mol_type = other DNA
aatatgggcctcttctgtgg

SEQ ID NO: 63363 - DNA, 20 bp, synthetic construct
  misc_feature 1..20: note = Description of Artificial Sequence: Synthetic oligonucleotide
  misc_feature 1..20: note = Target: SCN10A; (+) strand; PAM type: YTN; PAM sequence: CTC
  source 1..20: mol_type = other DNA
ttctgtggaggtggggtggg

SEQ ID NO: 63364 - DNA, 20 bp, synthetic construct
  misc_feature 1..20: note = Description of Artificial Sequence: Synthetic oligonucleotide
  misc_feature 1..20: note = Target: SCN10A; (+) strand; PAM type: YTN; PAM sequence: CTT
  source 1..20: mol_type = other DNA
ctgtggaggtggggtgggtg

SEQ ID NO: 63365 - DNA, 20 bp, synthetic construct
  misc_feature 1..20: note = Description of Artificial Sequence: Synthetic oligonucleotide
  misc_feature 1..20: note = Target: SCN10A; (+) strand; PAM type: YTN; PAM sequence: TTC
  source 1..20: mol_type = other DNA
tgtggaggtggggtgggtgt

SEQ ID NO: 63366 - DNA, 20 bp, synthetic construct
  misc_feature 1..20: note = Description of Artificial Sequence: Synthetic oligonucleotide
  misc_feature 1..20: note = Target: SCN10A; (+) strand; PAM type: YTN; PAM sequence: CTG
  source 1..20: mol_type = other DNA
tggaggtggggtgggtgtga

SEQ ID NO: 63367 - DNA, 20 bp, synthetic construct
  misc_feature 1..20: note = Description of Artificial Sequence: Synthetic oligonucleotide
  misc_feature 1..20: note = Target: SCN10A; (+) strand; PAM type: YTN; PAM sequence: CTC
  source 1..20: mol_type = other DNA
acaaataagtgagaacaagc

SEQ ID NO: 63368 - DNA, 20 bp, synthetic construct
  misc_feature 1..20: note = Description of Artificial Sequence: Synthetic oligonucleotide
  misc_feature 1..20: note = Target: SCN10A; (+) strand; PAM type: YTN; PAM sequence: CTT
  source 1..20: mol_type = other DNA
atttatgactgaagagagac

SEQ ID NO: 63369 - DNA, 20 bp, synthetic construct
  misc_feature 1..20: note = Description of Artificial Sequence: Synthetic oligonucleotide
  misc_feature 1..20: note = Target: SCN10A; (+) strand; PAM type: YTN; PAM sequence: TTA
  source 1..20: mol_type = other DNA
tttatgactgaagagagacc

SEQ ID NO: 63370 - DNA, 20 bp, synthetic construct
  misc_feature 1..20: note = Description of Artificial Sequence: Synthetic oligonucleotide
  misc_feature 1..20: note = Target: SCN10A; (+) strand; PAM type: YTN; PAM sequence: TTT
  source 1..20: mol_type = other DNA
atgactgaagagagaccagc

SEQ ID NO: 63371 - DNA, 20 bp, synthetic construct
  misc_feature 1..20: note = Description of Artificial Sequence: Synthetic oligonucleotide
  misc_feature 1..20: note = Target: SCN10A; (+) strand; PAM type: YTN; PAM sequence: TTA
  source 1..20: mol_type = other DNA
tgactgaagagagaccagcc

SEQ ID NO: 63372 - DNA, 20 bp, synthetic construct
  misc_feature 1..20: note = Description of Artificial Sequence: Synthetic oligonucleotide
  misc_feature 1..20: note = Target: SCN10A; (+) strand; PAM type: YTN; PAM sequence: CTG
  source 1..20: mol_type = other DNA
aagagagaccagcctccttc

SEQ ID NO: 63373 - DNA, 20 bp, synthetic construct
  misc_feature 1..20: note = Description of Artificial Sequence: Synthetic oligonucleotide
  misc_feature 1..20: note = Target: SCN10A; (+) strand; PAM type: YTN; PAM sequence: CTC
  source 1..20: mol_type = other DNA
cttcgggtaggggatgaccc

SEQ ID NO: 63374 - DNA, 20 bp, synthetic construct
  misc_feature 1..20: note = Description of Artificial Sequence: Synthetic oligonucleotide
  misc_feature 1..20: note = Target: SCN10A; (+) strand; PAM type: YTN; PAM sequence: CTT
  source 1..20: mol_type = other DNA
cgggtaggggatgacccact

SEQ ID NO: 63375 - DNA, 20 bp, synthetic construct
  misc_feature 1..20: note = Description of Artificial Sequence: Synthetic oligonucleotide
  misc_feature 1..20: note = Target: SCN10A; (+) strand; PAM type: YTN; PAM sequence: TTC
  source 1..20: mol_type = other DNA
gggtaggggatgacccactg

SEQ ID NO: 63376 - DNA, 20 bp, synthetic construct
  misc_feature 1..20: note = Description of Artificial Sequence: Synthetic oligonucleotide
  misc_feature 1..20: note = Target: SCN10A; (+) strand; PAM type: YTN; PAM sequence: CTG
  source 1..20: mol_type = other DNA
cattcgataggtattggcaa

SEQ ID NO: 63377 - DNA, 20 bp, synthetic construct
  misc_feature 1..20: note = Description of Artificial Sequence: Synthetic oligonucleotide
  misc_feature 1..20: note = Target: SCN10A; (+) strand; PAM type: YTN; PAM sequence: TTC
  source 1..20: mol_type = other DNA
gataggtattggcaaaacat

SEQ ID NO: 63378 - DNA, 20 bp, synthetic construct
  misc_feature 1..20: note = Description of Artificial Sequence: Synthetic oligonucleotide
  misc_feature 1..20: note = Target: SCN10A; (+) strand; PAM type: YTN; PAM sequence: TTG
  source 1..20: mol_type = other DNA
gcaaaacatctcttagggca

SEQ ID NO: 63379 - DNA, 20 bp, synthetic construct
  misc_feature 1..20: note = Description of Artificial Sequence: Synthetic oligonucleotide
  misc_feature 1..20: note = Target: SCN10A; (+) strand; PAM type: YTN; PAM sequence: CTC
  source 1..20: mol_type = other DNA
ttagggcatttctcatcttg

SEQ ID NO: 63380 - DNA, 20 bp, synthetic construct
  misc_feature 1..20: note = Description of Artificial Sequence: Synthetic oligonucleotide
  misc_feature 1..20: note = Target: SCN10A; (+) strand; PAM type: YTN; PAM sequence: CTT
  source 1..20: mol_type = other DNA
agggcatttctcatcttggg

SEQ ID NO: 63381 - DNA, 20 bp, synthetic construct
  misc_feature 1..20: note = Description of Artificial Sequence: Synthetic oligonucleotide
  misc_feature 1..20: note = Target: SCN10A; (+) strand; PAM type: YTN; PAM sequence: TTA
  source 1..20: mol_type = other DNA
gggcatttctcatcttgggg

SEQ ID NO: 63382 - DNA, 20 bp, synthetic construct
  misc_feature 1..20: note = Description of Artificial Sequence: Synthetic oligonucleotide
  misc_feature 1..20: note = Target: SCN10A; (+) strand; PAM type: YTN; PAM sequence: TTT
  source 1..20: mol_type = other DNA
ctcatcttggggcagtggac

SEQ ID NO: 63383 - DNA, 20 bp, synthetic construct
  misc_feature 1..20: note = Description of Artificial Sequence: Synthetic oligonucleotide
  misc_feature 1..20: note = Target: SCN10A; (+) strand; PAM type: YTN; PAM sequence: TTC
  source 1..20: mol_type = other DNA
tcatcttggggcagtggaca

SEQ ID NO: 63384 - DNA, 20 bp, synthetic construct
  misc_feature 1..20: note = Description of Artificial Sequence: Synthetic oligonucleotide
  misc_feature 1..20: note = Target: SCN10A; (+) strand; PAM type: YTN; PAM sequence: CTC
  source 1..20: mol_type = other DNA
atcttggggcagtggacaac

SEQ ID NO: 63385 - DNA, 20 bp, synthetic construct
  misc_feature 1..20: note = Description of Artificial Sequence: Synthetic oligonucleotide
  misc_feature 1..20: note = Target: SCN10A; (+) strand; PAM type: YTN; PAM sequence: CTT
  source 1..20: mol_type = other DNA
ggggcagtggacaacatctg

SEQ ID NO: 63386 - DNA, 20 bp, synthetic construct
  misc_feature 1..20: note = Description of Artificial Sequence: Synthetic oligonucleotide
  misc_feature 1..20: note = Target: SCN10A; (+) strand; PAM type: YTN; PAM sequence: TTG
  source 1..20: mol_type = other DNA
gggcagtggacaacatctgt

SEQ ID NO: 63387 - DNA, 20 bp, synthetic construct
  misc_feature 1..20: note = Description of Artificial Sequence: Synthetic oligonucleotide
  misc_feature 1..20: note = Target: SCN10A; (+) strand; PAM type: YTN; PAM sequence: CTG
  source 1..20: mol_type = other DNA
ttgctcccaccagctttgaa

SEQ ID NO: 63388 - DNA, 20 bp, synthetic construct
  misc_feature 1..20: note = Description of Artificial Sequence: Synthetic oligonucleotide
  misc_feature 1..20: note = Target: SCN10A; (+) strand; PAM type: YTN; PAM sequence: TTG
  source 1..20: mol_type = other DNA
ctcccaccagctttgaaact

SEQ ID NO: 63389 - DNA, 20 bp, synthetic construct
  misc_feature 1..20: note = Description of Artificial Sequence: Synthetic oligonucleotide
  misc_feature 1..20: note = Target: SCN10A; (+) strand; PAM type: YTN; PAM sequence: CTC
  source 1..20: mol_type = other DNA
ccaccagctttgaaactgca

SEQ ID NO: 63390 - DNA, 20 bp, synthetic construct
  misc_feature 1..20: note = Description of Artificial Sequence: Synthetic oligonucleotide
  misc_feature 1..20: note = Target: SCN10A; (+) strand; PAM type: YTN; PAM sequence: CTT
  source 1..20: mol_type = other DNA
tgaaactgcaaatgtccatg

SEQ ID NO: 63391 - DNA, 20 bp, synthetic construct
  misc_feature 1..20: note = Description of Artificial Sequence: Synthetic oligonucleotide
  misc_feature 1..20: note = Target: SCN10A; (+) strand; PAM type: YTN; PAM sequence: TTT
  source 1..20: mol_type = other DNA
gaaactgcaaatgtccatga

SEQ ID NO: 63392 - DNA, 20 bp, synthetic construct
  misc_feature 1..20: note = Description of Artificial Sequence: Synthetic oligonucleotide
  misc_feature 1..20: note = Target: SCN10A; (+) strand; PAM type: YTN; PAM sequence: TTG
  source 1..20: mol_type = other DNA
aaactgcaaatgtccatgat

SEQ ID NO: 63393 - DNA, 20 bp, synthetic construct
  misc_feature 1..20: note = Description of Artificial Sequence: Synthetic oligonucleotide
  misc_feature 1..20: note = Target: SCN10A; (+) strand; PAM type: YTN; PAM sequence: CTG
  source 1..20: mol_type = other DNA
caaatgtccatgatttcatg

SEQ ID NO: 63394 - DNA, 20 bp, synthetic construct
  misc_feature 1..20: note = Description of Artificial Sequence: Synthetic oligonucleotide
  misc_feature 1..20: note = Target: SCN10A; (+) strand; PAM type: YTN; PAM sequence: TTT
  source 1..20: mol_type = other DNA
catggactcagcattcataa

SEQ ID NO: 63395 - DNA, 20 bp, synthetic construct
  misc_feature 1..20: note = Description of Artificial Sequence: Synthetic oligonucleotide
  misc_feature 1..20: note = Target: SCN10A; (+) strand; PAM type: YTN; PAM sequence: TTC
  source 1..20: mol_type = other DNA
atggactcagcattcataag

SEQ ID NO: 63396 - DNA, 20 bp, synthetic construct
  misc_feature 1..20: note = Description of Artificial Sequence: Synthetic oligonucleotide
  misc_feature 1..20: note = Target: SCN10A; (+) strand; PAM type: YTN; PAM sequence: CTC
  source 1..20: mol_type = other DNA
agcattcataagttgattta

SEQ ID NO: 63397 - DNA, 20 bp, synthetic construct
  misc_feature 1..20: note = Description of Artificial Sequence: Synthetic oligonucleotide
  misc_feature 1..20: note = Target: SCN10A; (+) strand; PAM type: YTN; PAM sequence: TTC
  source 1..20: mol_type = other DNA
ataagttgatttaattgacc

SEQ ID NO: 63398 - DNA, 20 bp, synthetic construct
  misc_feature 1..20: note = Description of Artificial Sequence: Synthetic oligonucleotide
  misc_feature 1..20: note = Target: SCN10A; (+) strand; PAM type: YTN; PAM sequence: TTG
  source 1..20: mol_type = other DNA
atttaattgaccaacgaacc

SEQ ID NO: 63399 - DNA, 20 bp, synthetic construct
  misc_feature 1..20: note = Description of Artificial Sequence: Synthetic oligonucleotide
  misc_feature 1..20: note = Target: SCN10A; (+) strand; PAM type: YTN; PAM sequence: TTT
  source 1..20: mol_type = other DNA
aattgaccaacgaacctacc

SEQ ID NO: 63400 - DNA, 20 bp, synthetic construct
  misc_feature 1..20: note = Description of Artificial Sequence: Synthetic oligonucleotide
  misc_feature 1..20: note = Target: SCN10A; (+) strand; PAM type: YTN; PAM sequence: TTA
  source 1..20: mol_type = other DNA
attgaccaacgaacctaccc

SEQ ID NO: 63401 - DNA, 20 bp, synthetic construct
  misc_feature 1..20: note = Description of Artificial Sequence: Synthetic oligonucleotide
  misc_feature 1..20: note = Target: SCN10A; (+) strand; PAM type: YTN; PAM sequence: TTG
  source 1..20: mol_type = other DNA
accaacgaacctacccccca

SEQ ID NO: 63402 - DNA, 20 bp, synthetic construct
  misc_feature 1..20: note = Description of Artificial Sequence: Synthetic oligonucleotide
  misc_feature 1..20: note = Target: SCN10A; (+) strand; PAM type: YTN; PAM sequence: CTA
  source 1..20: mol_type = other DNA
ccccccagaactccagccgt

SEQ ID NO: 63403 - DNA, 20 bp, synthetic construct
  misc_feature 1..20: note = Description of Artificial Sequence: Synthetic oligonucleotide
  misc_feature 1..20: note = Target: SCN10A; (+) strand; PAM type: YTN; PAM sequence: CTC
  source 1..20: mol_type = other DNA
cagccgtgcaggtgcatggc

SEQ ID NO: 63404 - DNA, 20 bp, synthetic construct
  misc_feature 1..20: note = Description of Artificial Sequence: Synthetic oligonucleotide
  misc_feature 1..20: note = Target: SCN10A; (+) strand; PAM type: YTN; PAM sequence: CTA
  source 1..20: mol_type = other DNA
gcctatgaggtgtatgaaga

SEQ ID NO: 63405 - DNA, 20 bp, synthetic construct
  misc_feature 1..20: note = Description of Artificial Sequence: Synthetic oligonucleotide
  misc_feature 1..20: note = Target: SCN10A; (+) strand; PAM type: YTN; PAM sequence: CTA
  source 1..20: mol_type = other DNA
tgaggtgtatgaagagaggt

SEQ ID NO: 63406 - DNA, 20 bp, synthetic construct
  misc_feature 1..20: note = Description of Artificial Sequence: Synthetic oligonucleotide
  misc_feature 1..20: note = Target: SCN10A; (+) strand; PAM type: YTN; PAM sequence: CTC
  source 1..20: mol_type = other DNA
ttgctctcatggaaccaatg

SEQ ID NO: 63407 - DNA, 20 bp, synthetic construct
  misc_feature 1..20: note = Description of Artificial Sequence: Synthetic oligonucleotide
  misc_feature 1..20: note = Target: SCN10A; (+) strand; PAM type: YTN; PAM sequence: CTT
  source 1..20: mol_type = other DNA
gctctcatggaaccaatggt

SEQ ID NO: 63408 - DNA, 20 bp, synthetic construct
  misc_feature 1..20: note = Description of Artificial Sequence: Synthetic oligonucleotide
  misc_feature 1..20: note = Target: SCN10A; (+) strand; PAM type: YTN; PAM sequence: TTG
  source 1..20: mol_type = other DNA
ctctcatggaaccaatggtt

SEQ ID NO: 63409 - DNA, 20 bp, synthetic construct
  misc_feature 1..20: note = Description of Artificial Sequence: Synthetic oligonucleotide
  misc_feature 1..20: note = Target: SCN10A; (+) strand; PAM type: YTN; PAM sequence: CTC
  source 1..20: mol_type = other DNA
tcatggaaccaatggtttag

SEQ ID NO: 63410 - DNA, 20 bp, synthetic construct
  misc_feature 1..20: note = Description of Artificial Sequence: Synthetic oligonucleotide
  misc_feature 1..20: note = Target: SCN10A; (+) strand; PAM type: YTN; PAM sequence: CTC
  source 1..20: mol_type = other DNA
atggaaccaatggtttagtt

SEQ ID NO: 63411 - DNA, 20 bp, synthetic construct
  misc_feature 1..20: note = Description of Artificial Sequence: Synthetic oligonucleotide
  misc_feature 1..20: note = Target: SCN10A; (+) strand; PAM type: YTN; PAM sequence: TTT
  source 1..20: mol_type = other DNA
agttactgagaaaagatgaa

SEQ ID NO: 63412 - DNA, 20 bp, synthetic construct
  misc_feature 1..20: note = Description of Artificial Sequence: Synthetic oligonucleotide
  misc_feature 1..20: note = Target: SCN10A; (+) strand; PAM type: YTN; PAM sequence: TTA
  source 1..20: mol_type = other DNA
gttactgagaaaagatgaag

SEQ ID NO: 63413 - DNA, 20 bp, synthetic construct
  misc_feature 1..20: note = Description of Artificial Sequence: Synthetic oligonucleotide
  misc_feature 1..20: note = Target: SCN10A; (+) strand; PAM type: YTN; PAM sequence: TTA
  source 1..20: mol_type = other DNA
ctgagaaaagatgaagtctc

SEQ ID NO: 63414 - DNA, 20 bp, synthetic construct
  misc_feature 1..20: note = Description of Artificial Sequence: Synthetic oligonucleotide
  misc_feature 1..20: note = Target: SCN10A; (+) strand; PAM type: YTN; PAM sequence: CTG
  source 1..20: mol_type = other DNA
agaaaagatgaagtctcaaa

SEQ ID NO: 63415 - DNA, 20 bp, synthetic construct
  misc_feature 1..20: note = Description of Artificial Sequence: Synthetic oligonucleotide
  misc_feature 1..20: note = Target: SCN10A; (+) strand; PAM type: YTN; PAM sequence: CTC
  source 1..20: mol_type = other DNA
aaaagtcttcactgtaaact

SEQ ID NO: 63416 - DNA, 20 bp, synthetic construct
  misc_feature 1..20: note = Description of Artificial Sequence: Synthetic oligonucleotide
  misc_feature 1..20: note = Target: SCN10A; (+) strand; PAM type: YTN; PAM sequence: CTT
  source 1..20: mol_type = other DNA
cactgtaaactcaaatatgc

SEQ ID NO: 63417 - DNA, 20 bp, synthetic construct
  misc_feature 1..20: note = Description of Artificial Sequence: Synthetic oligonucleotide
  misc_feature 1..20: note = Target: SCN10A; (+) strand; PAM type: YTN; PAM sequence: TTC
  source 1..20: mol_type = other DNA
actgtaaactcaaatatgct

SEQ ID NO: 63418 - DNA, 20 bp, synthetic construct
  misc_feature 1..20: note = Description of Artificial Sequence: Synthetic oligonucleotide
  misc_feature 1..20: note = Target: SCN10A; (+) strand; PAM type: YTN; PAM sequence: CTG
  source 1..20: mol_type = other DNA
taaactcaaatatgctaagt

SEQ ID NO: 63419 - DNA, 20 bp, synthetic construct
  misc_feature 1..20: note = Description of Artificial Sequence: Synthetic oligonucleotide
  misc_feature 1..20: note = Target: SCN10A; (+) strand; PAM type: YTN; PAM sequence: CTC
  source 1..20: mol_type = other DNA
aaatatgctaagtcccacaa

SEQ ID NO: 63420 - DNA, 20 bp, synthetic construct
  misc_feature 1..20: note = Description of Artificial Sequence: Synthetic oligonucleotide
  misc_feature 1..20: note = Target: SCN10A; (+) strand; PAM type: YTN; PAM sequence: CTA
  source 1..20: mol_type = other DNA
agtcccacaagacagcaaaa

SEQ ID NO: 63421 - DNA, 20 bp, synthetic construct
  misc_feature 1..20: note = Description of Artificial Sequence: Synthetic oligonucleotide
  misc_feature 1..20: note = Target: SCN10A; (+) strand; PAM type: YTN; PAM sequence: TTT
  source 1..20: mol_type = other DNA
taaaatatatttgtatggtt

SEQ ID NO: 63422 - DNA, 20 bp, synthetic construct
  misc_feature 1..20: note = Description of Artificial Sequence: Synthetic oligonucleotide
  misc_feature 1..20: note = Target: SCN10A; (+) strand; PAM type: YTN; PAM sequence: TTT
  source 1..20: mol_type = other DNA
aaaatatatttgtatggttc

SEQ ID NO: 63423 - DNA, 20 bp, synthetic construct
  misc_feature 1..20: note = Description of Artificial Sequence: Synthetic oligonucleotide
  misc_feature 1..20: note = Target: SCN10A; (+) strand; PAM type: YTN; PAM sequence: TTA
  source 1..20: mol_type = other DNA
aaatatatttgtatggttct

SEQ ID NO: 63424 - DNA, 20 bp, synthetic construct
  misc_feature 1..20: note = Description of Artificial Sequence: Synthetic oligonucleotide
  misc_feature 1..20: note = Target: SCN10A; (+) strand; PAM type: YTN; PAM sequence: TTT
  source 1..20: mol_type = other DNA
gtatggttctctaatttgtc

SEQ ID NO: 63425 - DNA, 20 bp, synthetic construct
  misc_feature 1..20: note = Description of Artificial Sequence: Synthetic oligonucleotide
  misc_feature 1..20: note = Target: SCN10A; (+) strand; PAM type: YTN; PAM sequence: TTG
  source 1..20: mol_type = other DNA
tatggttctctaatttgtca

SEQ ID NO: 63426 - DNA, 20 bp, synthetic construct
  misc_feature 1..20: note = Description of Artificial Sequence: Synthetic oligonucleotide
  misc_feature 1..20: note = Target: SCN10A; (+) strand; PAM type: YTN; PAM sequence: TTC
  source 1..20: mol_type = other DNA
tctaatttgtcaggaaaaaa

SEQ ID NO: 63427 - DNA, 20 bp, synthetic construct
  misc_feature 1..20: note = Description of Artificial Sequence: Synthetic oligonucleotide
  misc_feature 1..20: note = Target: SCN10A; (+) strand; PAM type: YTN; PAM sequence: CTC
  source 1..20: mol_type = other DNA
taatttgtcaggaaaaaaaa

SEQ ID NO: 63428 - DNA, 20 bp, synthetic construct
  misc_feature 1..20: note = Description of Artificial Sequence: Synthetic oligonucleotide
  misc_feature 1..20: note = Target: SCN10A; (+) strand; PAM type: YTN; PAM sequence: CTA
  source 1..20: mol_type = other DNA
atttgtcaggaaaaaaaatc

SEQ ID NO: 63429 - DNA, 20 bp, synthetic construct
  misc_feature 1..20: note = Description of Artificial Sequence: Synthetic oligonucleotide
  misc_feature 1..20: note = Target: SCN10A; (+) strand; PAM type: YTN; PAM sequence: TTT
  source 1..20: mol_type = other DNA
gtcaggaaaaaaaatctgag

SEQ ID NO: 63430 - DNA, 20 bp, synthetic construct
  misc_feature 1..20: note = Description of Artificial Sequence: Synthetic oligonucleotide
  misc_feature 1..20: note = Target: SCN10A; (+) strand; PAM type: YTN; PAM sequence: TTG
  source 1..20: mol_type = other DNA
tcaggaaaaaaaatctgagc

SEQ ID NO: 63431 - DNA, 20 bp, synthetic construct
  misc_feature 1..20: note = Description of Artificial Sequence: Synthetic oligonucleotide
  misc_feature 1..20: note = Target: SCN10A; (+) strand; PAM type: YTN; PAM sequence: CTG
  source 1..20: mol_type = other DNA
agctcaactgtcagtctgtc

SEQ ID NO: 63432 - DNA, 20 bp, synthetic construct
  misc_feature 1..20: note = Description of Artificial Sequence: Synthetic oligonucleotide
  misc_feature 1..20: note = Target: SCN10A; (+) strand; PAM type: YTN; PAM sequence: CTC
  source 1..20: mol_type = other DNA
aactgtcagtctgtcagtca

SEQ ID NO: 63433 - DNA, 20 bp, synthetic construct
  misc_feature 1..20: note = Description of Artificial Sequence: Synthetic oligonucleotide
  misc_feature 1..20: note = Target: SCN10A; (+) strand; PAM type: YTN; PAM sequence: CTG
  source 1..20: mol_type = other DNA
tcagtctgtcagtcaaggtg

SEQ ID NO: 63434 - DNA, 20 bp, synthetic construct
  misc_feature 1..20: note = Description of Artificial Sequence: Synthetic oligonucleotide
  misc_feature 1..20: note = Target: SCN10A; (+) strand; PAM type: YTN; PAM sequence: CTG
  source 1..20: mol_type = other DNA
tcagtcaaggtgtgtttatg

SEQ ID NO: 63435 - DNA, 20 bp, synthetic construct
  misc_feature 1..20: note = Description of Artificial Sequence: Synthetic oligonucleotide
  misc_feature 1..20: note = Target: SCN10A; (+) strand; PAM type: YTN; PAM sequence: TTT
  source 1..20: mol_type = other DNA
atggagcacctactaagagc

SEQ ID NO: 63436 - DNA, 20 bp, synthetic construct
  misc_feature 1..20: note = Description of Artificial Sequence: Synthetic oligonucleotide
  misc_feature 1..20: note = Target: SCN10A; (+) strand; PAM type: YTN; PAM sequence: TTA
  source 1..20: mol_type = other DNA
tggagcacctactaagagcc

SEQ ID NO: 63437 - DNA, 20 bp, synthetic construct
  misc_feature 1..20: note = Description of Artificial Sequence: Synthetic oligonucleotide
  misc_feature 1..20: note = Target: SCN10A; (+) strand; PAM type: YTN; PAM sequence: CTA
  source 1..20: mol_type = other DNA
ctaagagccaggctgtggct

SEQ ID NO: 63438 - DNA, 20 bp, synthetic construct
  misc_feature 1..20: note = Description of Artificial Sequence: Synthetic oligonucleotide
  misc_feature 1..20: note = Target: SCN10A; (+) strand; PAM type: YTN; PAM sequence: CTA
  source 1..20: mol_type = other DNA
agagccaggctgtggcttag

SEQ ID NO: 63439 - DNA, 20 bp, synthetic construct
  misc_feature 1..20: note = Description of Artificial Sequence: Synthetic oligonucleotide
  misc_feature 1..20: note = Target: SCN10A; (+) strand; PAM type: YTN; PAM sequence: CTG
  source 1..20: mol_type = other DNA
tggcttaggtgctaggatgc

SEQ ID NO: 63440 - DNA, 20 bp, synthetic construct
  misc_feature 1..20: note = Description of Artificial Sequence: Synthetic oligonucleotide
  misc_feature 1..20: note = Target: SCN10A; (+) strand; PAM type: YTN; PAM sequence: CTT
  source 1..20: mol_type = other DNA
aggtgctaggatgcaatgct

SEQ ID NO: 63441 - DNA, 20 bp, synthetic construct
  misc_feature 1..20: note = Description of Artificial Sequence: Synthetic oligonucleotide
  misc_feature 1..20: note = Target: SCN10A; (+) strand; PAM type: YTN; PAM sequence: TTA
  source 1..20: mol_type = other DNA
ggtgctaggatgcaatgctg

SEQ ID NO: 63442 - DNA, 20 bp, synthetic construct
  misc_feature 1..20: note = Description of Artificial Sequence: Synthetic oligonucleotide
  misc_feature 1..20: note = Target: SCN10A; (+) strand; PAM type: YTN; PAM sequence: CTA
  source 1..20: mol_type = other DNA
ggatgcaatgctgaacacaa

SEQ ID NO: 63443 - DNA, 20 bp, synthetic construct
  misc_feature 1..20: note = Description of Artificial Sequence: Synthetic oligonucleotide
  misc_feature 1..20: note = Target: SCN10A; (+) strand; PAM type: YTN; PAM sequence: CTG
  source 1..20: mol_type = other DNA
aacacaacagtgtagctaca

SEQ ID NO: 63444 - DNA, 20 bp, synthetic construct
  misc_feature 1..20: note = Description of Artificial Sequence: Synthetic oligonucleotide
  misc_feature 1..20: note = Target: SCN10A; (+) strand; PAM type: YTN; PAM sequence: CTA
  source 1..20: mol_type = other DNA
caattttatcacccatatcc

SEQ ID NO: 63445 - DNA, 20 bp, synthetic construct
  misc_feature 1..20: note = Description of Artificial Sequence: Synthetic oligonucleotide
  misc_feature 1..20: note = Target: SCN10A; (+) strand; PAM type: YTN; PAM sequence: TTT
  source 1..20: mol_type = other DNA
tatcacccatatccgtgagt

SEQ ID NO: 63446 - DNA, 20 bp, synthetic construct
  misc_feature 1..20: note = Description of Artificial Sequence: Synthetic oligonucleotide
  misc_feature 1..20: note = Target: SCN10A; (+) strand; PAM type: YTN; PAM sequence: TTT
  source 1..20: mol_type = other DNA
atcacccatatccgtgagta

SEQ ID NO: 63447 - DNA, 20 bp, synthetic construct
  misc_feature 1..20: note = Description of Artificial Sequence: Synthetic oligonucleotide
  misc_feature 1..20: note = Target: SCN10A; (+) strand; PAM type: YTN; PAM sequence: TTA
  source 1..20: mol_type = other DNA
tcacccatatccgtgagtaa

SEQ ID NO: 63448 - DNA, 20 bp, synthetic construct
  misc_feature 1..20: note = Description of Artificial Sequence: Synthetic oligonucleotide
  misc_feature 1..20: note = Target: SCN10A; (+) strand; PAM type: YTN; PAM sequence: TTT
  source 1..20: mol_type = other DNA
aatcctgttatacagtaagt

SEQ ID NO: 63449 - DNA, 20 bp, synthetic construct
  misc_feature 1..20: note = Description of Artificial Sequence: Synthetic oligonucleotide
  misc_feature 1..20: note = Target: SCN10A; (+) strand; PAM type: YTN; PAM sequence: TTA
  source 1..20: mol_type = other DNA
atcctgttatacagtaagtg

SEQ ID NO: 63450 - DNA, 20 bp, synthetic construct
  misc_feature 1..20: note = Description of Artificial Sequence: Synthetic oligonucleotide
  misc_feature 1..20: note = Target: SCN10A; (+) strand; PAM type: YTN; PAM sequence: CTG
  source 1..20: mol_type = other DNA
ttatacagtaagtgctgtat

SEQ ID NO: 63451 - DNA, 20 bp, synthetic construct
  misc_feature 1..20: note = Description of Artificial Sequence: Synthetic oligonucleotide
  misc_feature 1..20: note = Target: SCN10A; (+) strand; PAM type: YTN; PAM sequence: TTA
  source 1..20: mol_type = other DNA
tacagtaagtgctgtatgca

SEQ ID NO: 63452 - DNA, 20 bp, synthetic construct
  misc_feature 1..20: note = Description of Artificial Sequence: Synthetic oligonucleotide
  misc_feature 1..20: note = Target: SCN10A; (+) strand; PAM type: YTN; PAM sequence: CTG
  source 1..20: mol_type = other DNA
tatgcacctctttatgtgat

SEQ ID NO: 63453 - DNA, 20 bp, synthetic construct
  misc_feature 1..20: note = Description of Artificial Sequence: Synthetic oligonucleotide
  misc_feature 1..20: note = Target: SCN10A; (+) strand; PAM type: YTN; PAM sequence: CTC
  source 1..20: mol_type = other DNA
tttatgtgatgggggagagc

SEQ ID NO: 63454 - DNA, 20 bp, synthetic construct
  misc_feature 1..20: note = Description of Artificial Sequence: Synthetic oligonucleotide
  misc_feature 1..20: note = Target: SCN10A; (+) strand; PAM type: YTN; PAM sequence: CTT
  source 1..20: mol_type = other DNA
tatgtgatgggggagagcgg

SEQ ID NO: 63455 - DNA, 20 bp, synthetic construct
  misc_feature 1..20: note = Description of Artificial Sequence: Synthetic oligonucleotide
  misc_feature 1..20: note = Target: SCN10A; (+) strand; PAM type: YTN; PAM sequence: TTT
  source 1..20: mol_type = other DNA
atgtgatgggggagagcggg

SEQ ID NO: 63456 - DNA, 20 bp, synthetic construct
  misc_feature 1..20: note = Description of Artificial Sequence: Synthetic oligonucleotide
  misc_feature 1..20: note = Target: SCN10A; (+) strand; PAM type: YTN; PAM sequence: TTA
  source 1..20: mol_type = other DNA
tgtgatgggggagagcgggt

SEQ ID NO: 63457 - DNA, 20 bp, synthetic construct
  misc_feature 1..20: note = Description of Artificial Sequence: Synthetic oligonucleotide
  misc_feature 1..20: note = Target: SCN10A; (+) strand; PAM type: YTN; PAM sequence: TTC
  source 1..20: mol_type = other DNA
accttacacccaatctggaa

SEQ ID NO: 63458 - DNA, 20 bp, synthetic construct
  misc_feature 1..20: note = Description of Artificial Sequence: Synthetic oligonucleotide
  misc_feature 1..20: note = Target: SCN10A; (+) strand; PAM type: YTN; PAM sequence: CTT
  source 1..20: mol_type = other DNA
acacccaatctggaagttac

SEQ ID NO: 63459 - DNA, 20 bp, synthetic construct
  misc_feature 1..20: note = Description of Artificial Sequence: Synthetic oligonucleotide
  misc_feature 1..20: note = Target: SCN10A; (+) strand; PAM type: YTN; PAM sequence: TTA
  source 1..20: mol_type = other DNA
cacccaatctggaagttact

SEQ ID NO: 63460 - DNA, 20 bp, synthetic construct
  misc_feature 1..20: note = Description of Artificial Sequence: Synthetic oligonucleotide
  misc_feature 1..20: note = Target: SCN10A; (+) strand; PAM type: YTN; PAM sequence: CTG
  source 1..20: mol_type = other DNA
gaagttactctcctcatatg

SEQ ID NO: 63461 - DNA, 20 bp, synthetic construct
  misc_feature 1..20: note = Description of Artificial Sequence: Synthetic oligonucleotide
  misc_feature 1..20: note = Target: SCN10A; (+) strand; PAM type: YTN; PAM sequence: TTA
  source 1..20: mol_type = other DNA
ctctcctcatatgggaagca

SEQ ID NO: 63462 - DNA, 20 bp, synthetic construct
  misc_feature 1..20: note = Description of Artificial Sequence: Synthetic oligonucleotide
  misc_feature 1..20: note = Target: SCN10A; (+) strand; PAM type: YTN; PAM sequence: CTC
  source 1..20: mol_type = other DNA
tcctcatatgggaagcagag

SEQ ID NO: 63463 - DNA, 20 bp, synthetic construct
  misc_feature 1..20: note = Description of Artificial Sequence: Synthetic oligonucleotide
  misc_feature 1..20: note = Target: SCN10A; (+) strand; PAM type: YTN; PAM sequence: CTC
  source 1..20: mol_type = other DNA
ctcatatgggaagcagagct

SEQ ID NO: 63464 - DNA, 20 bp, synthetic construct
  misc_feature 1..20: note = Description of Artificial Sequence: Synthetic oligonucleotide
  misc_feature 1..20: note = Target: SCN10A; (+) strand; PAM type: YTN; PAM sequence: CTC
  source 1..20: mol_type = other DNA
atatgggaagcagagcttaa

SEQ ID NO: 63465 - DNA, 20 bp, synthetic construct
  misc_feature 1..20: note = Description of Artificial Sequence: Synthetic oligonucleotide
  misc_feature 1..20: note = Target: SCN10A; (+) strand; PAM type: YTN; PAM sequence: CTT
  source 1..20: mol_type = other DNA
aaaacaacaactctgtggac

SEQ ID NO: 63466 - DNA, 20 bp, synthetic construct
  misc_feature 1..20: note = Description of Artificial Sequence: Synthetic oligonucleotide
  misc_feature 1..20: note = Target: SCN10A; (+) strand; PAM type: YTN; PAM sequence: TTA
  source 1..20: mol_type = other DNA
aaacaacaactctgtggact

SEQ ID NO: 63467 - DNA, 20 bp, synthetic construct
  misc_feature 1..20: note = Description of Artificial Sequence: Synthetic oligonucleotide
  misc_feature 1..20: note = Target: SCN10A; (+) strand; PAM type: YTN; PAM sequence: CTC
  source 1..20: mol_type = other DNA
tgtggactggtcacagaggc

SEQ ID NO: 63468 - DNA, 20 bp, synthetic construct
  misc_feature 1..20: note = Description of Artificial Sequence: Synthetic oligonucleotide
  misc_feature 1..20: note = Target: SCN10A; (+) strand; PAM type: YTN; PAM sequence: CTG
  source 1..20: mol_type = other DNA
tggactggtcacagaggcag

SEQ ID NO: 63469 - DNA, 20 bp, synthetic construct
  misc_feature 1..20: note = Description of Artificial Sequence: Synthetic oligonucleotide
  misc_feature 1..20: note = Target: SCN10A; (+) strand; PAM type: YTN; PAM sequence: CTG
  source 1..20: mol_type = other DNA
gtcacagaggcagctgataa

SEQ ID NO: 63470 - DNA, 20 bp, synthetic construct
  misc_feature 1..20: note = Description of Artificial Sequence: Synthetic oligonucleotide
  misc_feature 1..20: note = Target: SCN10A; (+) strand; PAM type: YTN; PAM sequence: CTG
  source 1..20: mol_type = other DNA
ataaacacaaataaaaactg

SEQ ID NO: 63471 - DNA, 20 bp, synthetic construct
  misc_feature 1..20: note = Description of Artificial Sequence: Synthetic oligonucleotide
  misc_feature 1..20: note = Target: SCN10A; (+) strand; PAM type: YTN; PAM sequence: CTG
  source 1..20: mol_type = other DNA
agcattagtaactagtatgg

SEQ ID NO: 63472 - DNA, 20 bp, synthetic construct
  misc_feature 1..20: note = Description of Artificial Sequence: Synthetic oligonucleotide
  misc_feature 1..20: note = Target: SCN10A; (+) strand; PAM type: YTN; PAM sequence: TTA
  source 1..20: mol_type = other DNA
gtaactagtatggggagcag

SEQ ID NO: 63473 - DNA, 20 bp, synthetic construct
  misc_feature 1..20: note = Description of Artificial Sequence: Synthetic oligonucleotide
  misc_feature 1..20: note = Target: SCN10A; (+) strand; PAM type: YTN; PAM sequence: CTA
  source 1..20: mol_type = other DNA
gtatggggagcaggaaacgt

SEQ ID NO: 63474 - DNA, 20 bp, synthetic construct
  misc_feature 1..20: note = Description of Artificial Sequence: Synthetic oligonucleotide
  misc_feature 1..20: note = Target: SCN10A; (+) strand; PAM type: YTN; PAM sequence: CTG
  source 1..20: mol_type = other DNA
ccgaaggttgtaagcctagc

SEQ ID NO: 63475 - DNA, 20 bp, synthetic construct
  misc_feature 1..20: note = Description of Artificial Sequence: Synthetic oligonucleotide
  misc_feature 1..20: note = Target: SCN10A; (+) strand; PAM type: YTN; PAM sequence: TTG
  source 1..20: mol_type = other DNA
taagcctagcaggaatttct

SEQ ID NO: 63476 - DNA, 20 bp, synthetic construct
  misc_feature 1..20: note = Description of Artificial Sequence: Synthetic oligonucleotide
  misc_feature 1..20: note = Target: SCN10A; (+) strand; PAM type: YTN; PAM sequence: CTA
  source 1..20: mol_type = other DNA
gcaggaatttctccctgctt

SEQ ID NO: 63477 - DNA, 20 bp, synthetic construct
  misc_feature 1..20: note = Description of Artificial Sequence: Synthetic oligonucleotide
  misc_feature 1..20: note = Target: SCN10A; (+) strand; PAM type: YTN; PAM sequence: TTT
  source 1..20: mol_type = other DNA
ctccctgctttaagactaga

SEQ ID NO: 63478 - DNA, 20 bp, synthetic construct
  misc_feature 1..20: note = Description of Artificial Sequence: Synthetic oligonucleotide
  misc_feature 1..20: note = Target: SCN10A; (+) strand; PAM type: YTN; PAM sequence: TTC
  source 1..20: mol_type = other DNA
tccctgctttaagactagat

SEQ ID NO: 63479 - DNA, 20 bp, synthetic construct
  misc_feature 1..20: note = Description of Artificial Sequence: Synthetic oligonucleotide
  misc_feature 1..20: note = Target: SCN10A; (+) strand; PAM type: YTN; PAM sequence: CTC
  source 1..20: mol_type = other DNA
cctgctttaagactagatcc

SEQ ID NO: 63480 - DNA, 20 bp, synthetic construct
  misc_feature 1..20: note = Description of Artificial Sequence: Synthetic oligonucleotide
  misc_feature 1..20: note = Target: SCN10A; (+) strand; PAM type: YTN; PAM sequence: CTG
  source 1..20: mol_type = other DNA
ctttaagactagatcccaaa

SEQ ID NO: 63481 - DNA, 20 bp, synthetic construct
  misc_feature 1..20: note = Description of Artificial Sequence: Synthetic oligonucleotide
  misc_feature 1..20: note = Target: SCN10A; (+) strand; PAM type: YTN; PAM sequence: CTT
  source 1..20: mol_type = other DNA
taagactagatcccaaagag

SEQ ID NO: 63482 - DNA, 20 bp, synthetic construct
  misc_feature 1..20: note = Description of Artificial Sequence: Synthetic oligonucleotide
  misc_feature 1..20: note = Target: SCN10A; (+) strand; PAM type: YTN; PAM sequence: TTT
  source 1..20: mol_type = other DNA
aagactagatcccaaagagc

SEQ ID NO: 63483 - DNA, 20 bp, synthetic construct
  misc_feature 1..20: note = Description of Artificial Sequence: Synthetic oligonucleotide
  misc_feature 1..20: note = Target: SCN10A; (+) strand; PAM type: YTN; PAM sequence: TTA
  source 1..20: mol_type = other DNA
agactagatcccaaagagct

SEQ ID NO: 63484 - DNA, 20 bp, synthetic construct
  misc_feature 1..20: note = Description of Artificial Sequence: Synthetic oligonucleotide
  misc_feature 1..20: note = Target: SCN10A; (+) strand; PAM type: YTN; PAM sequence: CTA
  source 1..20: mol_type = other DNA
gatcccaaagagctataccc

SEQ ID NO: 63485 - DNA, 20 bp, synthetic construct
  misc_feature 1..20: note = Description of Artificial Sequence: Synthetic oligonucleotide
  misc_feature 1..20: note = Target: SCN10A; (+) strand; PAM type: YTN; PAM sequence: CTA
  source 1..20: mol_type = other DNA
tacccttcatgtaaggatga

SEQ ID NO: 63486 - DNA, 20 bp, synthetic construct
  misc_feature 1..20: note = Description of Artificial Sequence: Synthetic oligonucleotide
  misc_feature 1..20: note = Target: SCN10A; (+) strand; PAM type: YTN; PAM sequence: CTT
  source 1..20: mol_type = other DNA
catgtaaggatgaaccacaa

SEQ ID NO: 63487 - DNA, 20 bp, synthetic construct
  misc_feature 1..20: note = Description of Artificial Sequence: Synthetic oligonucleotide
  misc_feature 1..20: note = Target: SCN10A; (+) strand; PAM type: YTN; PAM sequence: TTC
  source 1..20: mol_type = other DNA
atgtaaggatgaaccacaaa

SEQ ID NO: 63488 - DNA, 20 bp, synthetic construct
  misc_feature 1..20: note = Description of Artificial Sequence: Synthetic oligonucleotide
  misc_feature 1..20: note = Target: SCN10A; (+) strand; PAM type: YTN; PAM sequence: TTG
  source 1..20: mol_type = other DNA
aatggctggtgttaggtacc

SEQ ID NO: 63489 - DNA, 20 bp, synthetic construct
  misc_feature 1..20: note = Description of Artificial Sequence: Synthetic oligonucleotide
  misc_feature 1..20: note = Target: SCN10A; (+) strand; PAM type: YTN; PAM sequence: CTG
  source 1..20: mol_type = other DNA
gtgttaggtaccagctacag

SEQ ID NO: 63490 - DNA, 20 bp, synthetic construct
  misc_feature 1..20: note = Description of Artificial Sequence: Synthetic oligonucleotide
  misc_feature 1..20: note = Target: SCN10A; (+) strand; PAM type: YTN; PAM sequence: TTA
  source 1..20: mol_type = other DNA
ggtaccagctacaggaggaa

SEQ ID NO: 63491 - DNA, 20 bp, synthetic construct
  misc_feature 1..20: note = Description of Artificial Sequence: Synthetic oligonucleotide
  misc_feature 1..20: note = Target: SCN10A; (+) strand; PAM type: YTN; PAM sequence: CTA
  source 1..20: mol_type = other DNA
caggaggaaaattgacgctg

SEQ ID NO: 63492 - DNA, 20 bp, synthetic construct
  misc_feature 1..20: note = Description of Artificial Sequence: Synthetic oligonucleotide
  misc_feature 1..20: note = Target: SCN10A; (+) strand; PAM type: YTN; PAM sequence: TTG
  source 1..20: mol_type = other DNA
acgctgagcatttgaaacaa

SEQ ID NO: 63493 - DNA, 20 bp, synthetic construct
  misc_feature 1..20: note = Description of Artificial Sequence: Synthetic oligonucleotide
  misc_feature 1..20: note = Target: SCN10A; (+) strand; PAM type: YTN; PAM sequence: CTG
  source 1..20: mol_type = other DNA
agcatttgaaacaacaaagt

SEQ ID NO: 63494 - DNA, 20 bp, synthetic construct
  misc_feature 1..20: note = Description of Artificial Sequence: Synthetic oligonucleotide
  misc_feature 1..20: note = Target: SCN10A; (+) strand; PAM type: YTN; PAM sequence: TTT
  source 1..20: mol_type = other DNA
gaaacaacaaagtggtgctc

SEQ ID NO: 63495 - DNA, 20 bp, synthetic construct
  misc_feature 1..20: note = Description of Artificial Sequence: Synthetic oligonucleotide
  misc_feature 1..20: note = Target: SCN10A; (+) strand; PAM type: YTN; PAM sequence: TTG
  source 1..20: mol_type = other DNA
aaacaacaaagtggtgctca

SEQ ID NO: 63496 - DNA, 20 bp, synthetic construct
  misc_feature 1..20: note = Description of Artificial Sequence: Synthetic oligonucleotide
  misc_feature 1..20: note = Target: SCN10A; (+) strand; PAM type: YTN; PAM sequence: CTC
  source 1..20: mol_type = other DNA
atataggattttatctggaa

SEQ ID NO: 63497 - DNA, 20 bp, synthetic construct
  misc_feature 1..20: note = Description of Artificial Sequence: Synthetic oligonucleotide
  misc_feature 1..20: note = Target: SCN10A; (+) strand; PAM type: YTN; PAM sequence: TTT
  source 1..20: mol_type = other DNA
tatctggaattcacactacc

SEQ ID NO: 63498 - DNA, 20 bp, synthetic construct
  misc_feature 1..20: note = Description of Artificial Sequence: Synthetic oligonucleotide
  misc_feature 1..20: note = Target: SCN10A; (+) strand; PAM type: YTN; PAM sequence: TTT
  source 1..20: mol_type = other DNA
atctggaattcacactacct

SEQ ID NO: 63499 - DNA, 20 bp, synthetic construct
  misc_feature 1..20: note = Description of Artificial Sequence: Synthetic oligonucleotide
  misc_feature 1..20: note = Target: SCN10A; (+) strand; PAM type: YTN; PAM sequence: TTA
  source 1..20: mol_type = other DNA
tctggaattcacactaccta

SEQ ID NO: 63500 - DNA, 20 bp, synthetic construct
  misc_feature 1..20: note = Description of Artificial Sequence: Synthetic oligonucleotide
  misc_feature 1..20: note = Target: SCN10A; (+) strand; PAM type: YTN; PAM sequence: CTG
  source 1..20: mol_type = other DNA
gaattcacactacctaggta

SEQ ID NO: 63501 - DNA, 20 bp, synthetic construct
  misc_feature 1..20: note = Description of Artificial Sequence: Synthetic oligonucleotide
  misc_feature 1..20: note = Target: SCN10A; (+) strand; PAM type: YTN; PAM sequence: TTC
  source 1..20: mol_type = other DNA
acactacctaggtattttaa

SEQ ID NO: 63502 - DNA, 20 bp, synthetic construct
  misc_feature 1..20: note = Description of Artificial Sequence: Synthetic oligonucleotide
  misc_feature 1..20: note = Target: SCN10A; (+) strand; PAM type: YTN; PAM sequence: CTA
  source 1..20: mol_type = other DNA
cctaggtattttaagttgag

SEQ ID NO: 63503 - DNA, 20 bp, synthetic construct
  misc_feature 1..20: note = Description of Artificial Sequence: Synthetic oligonucleotide
  misc_feature 1..20: note = Target: SCN10A; (+) strand; PAM type: YTN; PAM sequence: CTA
  source 1..20: mol_type = other DNA
ggtattttaagttgagaatt

SEQ ID NO: 63504 - DNA, 20 bp, synthetic construct
  misc_feature 1..20: note = Description of Artificial Sequence: Synthetic oligonucleotide
  misc_feature 1..20: note = Target: SCN10A; (+) strand; PAM type: YTN; PAM sequence: TTT
  source 1..20: mol_type = other DNA
taagttgagaatttaattta

SEQ ID NO: 63505 - DNA, 20 bp, synthetic construct
  misc_feature 1..20: note = Description of Artificial Sequence: Synthetic oligonucleotide
  misc_feature 1..20: note = Target: SCN10A; (+) strand; PAM type: YTN; PAM sequence: TTT
  source 1..20: mol_type = other DNA
aagttgagaatttaatttag

SEQ ID NO: 63506 - DNA, 20 bp, synthetic construct
  misc_feature 1..20: note = Description of Artificial Sequence: Synthetic oligonucleotide
  misc_feature 1..20: note = Target: SCN10A; (+) strand; PAM type: YTN; PAM sequence: TTA
  source 1..20: mol_type = other DNA
agttgagaatttaatttaga

SEQ ID NO: 63507 - DNA, 20 bp, synthetic construct
  misc_feature 1..20: note = Description of Artificial Sequence: Synthetic oligonucleotide
  misc_feature 1..20: note = Target: SCN10A; (+) strand; PAM type: YTN; PAM sequence: TTG
  source 1..20: mol_type = other DNA
agaatttaatttagagcaat

SEQ ID NO: 63508 - DNA, 20 bp, synthetic construct
  misc_feature 1..20: note = Description of Artificial Sequence: Synthetic oligonucleotide
  misc_feature 1..20: note = Target: SCN10A; (+) strand; PAM type: YTN; PAM sequence: TTT
  source 1..20: mol_type = other DNA
aatttagagcaattctacaa

SEQ ID NO: 63509 - DNA, 20 bp, synthetic construct
  misc_feature 1..20: note = Description of Artificial Sequence: Synthetic oligonucleotide
  misc_feature 1..20: note = Target: SCN10A; (+) strand; PAM type: YTN; PAM sequence: TTA
  source 1..20: mol_type = other DNA
atttagagcaattctacaaa

SEQ ID NO: 63510 - DNA, 20 bp, synthetic construct
  misc_feature 1..20: note = Description of Artificial Sequence: Synthetic oligonucleotide
  misc_feature 1..20: note = Target: SCN10A; (+) strand; PAM type: YTN; PAM sequence: TTT
  source 1..20: mol_type = other DNA
agagcaattctacaaagtgc

SEQ ID NO: 63511 - DNA, 20 bp, synthetic construct
  misc_feature 1..20: note = Description of Artificial Sequence: Synthetic oligonucleotide
  misc_feature 1..20: note = Target: SCN10A; (+) strand; PAM type: YTN; PAM sequence: TTA
  source 1..20: mol_type = other DNA
gagcaattctacaaagtgct

SEQ ID NO: 63512 - DNA, 20 bp, synthetic construct
  misc_feature 1..20: note = Description of Artificial Sequence: Synthetic oligonucleotide
  misc_feature 1..20: note = Target: SCN10A; (+) strand; PAM type: YTN; PAM sequence: TTC
  source 1..20: mol_type = other DNA
tacaaagtgctctgcagaat

SEQ ID NO: 63513 - DNA, 20 bp, synthetic construct
  misc_feature 1..20: note = Description of Artificial Sequence: Synthetic oligonucleotide
  misc_feature 1..20: note = Target: SCN10A; (+) strand; PAM type: YTN; PAM sequence: CTA
  source 1..20: mol_type = other DNA
caaagtgctctgcagaatta

SEQ ID NO: 63514 - DNA, 20 bp, synthetic construct
  misc_feature 1..20: note = Description of Artificial Sequence: Synthetic oligonucleotide
  misc_feature 1..20: note = Target: SCN10A; (+) strand; PAM type: YTN; PAM sequence: CTC
  source 1..20: mol_type = other DNA
tgcagaattaaatgcaaata

SEQ ID NO: 63515 - DNA, 20 bp, synthetic construct
  misc_feature 1..20: note = Description of Artificial Sequence: Synthetic oligonucleotide
  misc_feature 1..20: note = Target: SCN10A; (+) strand; PAM type: YTN; PAM sequence: CTG
  source 1..20: mol_type = other DNA
cagaattaaatgcaaatacc

SEQ ID NO: 63516 - DNA, 20 bp, synthetic construct
  misc_feature 1..20: note = Description of Artificial Sequence: Synthetic oligonucleotide
  misc_feature 1..20: note = Target: SCN10A; (+) strand; PAM type: YTN; PAM sequence: TTA
  source 1..20: mol_type = other DNA
aatgcaaatacctctggagg

SEQ ID NO: 63517 - DNA, 20 bp, synthetic construct
  misc_feature 1..20: note = Description of Artificial Sequence: Synthetic oligonucleotide
  misc_feature 1..20: note = Target: SCN10A; (+) strand; PAM type: YTN; PAM sequence: CTC
  source 1..20: mol_type = other DNA
tggaggaacctgcctttatc

SEQ ID NO: 63518 - DNA, 20 bp, synthetic construct
  misc_feature 1..20: note = Description of Artificial Sequence: Synthetic oligonucleotide
  misc_feature 1..20: note = Target: SCN10A; (+) strand; PAM type: YTN; PAM sequence: CTG
  source 1..20: mol_type = other DNA
gaggaacctgcctttatctc

SEQ ID NO: 63519 - DNA, 20 bp, synthetic construct
  misc_feature 1..20: note = Description of Artificial Sequence: Synthetic oligonucleotide
  misc_feature 1..20: note = Target: SCN10A; (+) strand; PAM type: YTN; PAM sequence: CTG
  source 1..20: mol_type = other DNA
cctttatctcaggtttcaaa

SEQ ID NO: 63520 - DNA, 20 bp, synthetic construct
  misc_feature 1..20: note = Description of Artificial Sequence: Synthetic oligonucleotide
  misc_feature 1..20: note = Target: SCN10A; (+) strand; PAM type: YTN; PAM sequence: CTT
  source 1..20: mol_type = other DNA
tatctcaggtttcaaactat

SEQ ID NO: 63521 - DNA, 20 bp, synthetic construct
  misc_feature 1..20: note = Description of Artificial Sequence: Synthetic oligonucleotide
  misc_feature 1..20: note = Target: SCN10A; (+) strand; PAM type: YTN; PAM sequence: TTT
  source 1..20: mol_type = other DNA
atctcaggtttcaaactatt

SEQ ID NO: 63522 - DNA, 20 bp, synthetic construct
  misc_feature 1..20: note = Description of Artificial Sequence: Synthetic oligonucleotide
  misc_feature 1..20: note = Target: SCN10A; (+) strand; PAM type: YTN; PAM sequence: TTA
  source 1..20: mol_type = other DNA
tctcaggtttcaaactattc

SEQ ID NO: 63523 - DNA, 20 bp, synthetic construct
  misc_feature 1..20: note = Description of Artificial Sequence: Synthetic oligonucleotide
  misc_feature 1..20: note = Target: SCN10A; (+) strand; PAM type: YTN; PAM sequence: CTC
  source 1..20: mol_type = other DNA
aggtttcaaactattccctc

SEQ ID NO: 63524 - DNA, 20 bp, synthetic construct
  misc_feature 1..20: note = Description of Artificial Sequence: Synthetic oligonucleotide
  misc_feature 1..20: note = Target: SCN10A; (+) strand; PAM type: YTN; PAM sequence: TTT
  source 1..20: mol_type = other DNA
caaactattccctcaaaaat

SEQ ID NO: 63525 - DNA, 20 bp, synthetic construct
  misc_feature 1..20: note = Description of Artificial Sequence: Synthetic oligonucleotide
  misc_feature 1..20: note = Target: SCN10A; (+) strand; PAM type: YTN; PAM sequence: TTC
  source 1..20: mol_type = other DNA
aaactattccctcaaaaatt

SEQ ID NO: 63526 - DNA, 20 bp, synthetic construct
  misc_feature 1..20: note = Description of Artificial Sequence: Synthetic oligonucleotide
  misc_feature 1..20: note = Target: SCN10A; (+) strand; PAM type: YTN; PAM sequence: CTA
  source 1..20: mol_type = other DNA
ttccctcaaaaattgtttaa

SEQ ID NO: 63527 - DNA, 20 bp, synthetic construct
  misc_feature 1..20: note = Description of Artificial Sequence: Synthetic oligonucleotide
  misc_feature 1..20: note = Target: SCN10A; (+) strand; PAM type: YTN; PAM sequence: TTC
  source 1..20: mol_type = other DNA
cctcaaaaattgtttaagag

SEQ ID NO: 63528 - DNA, 20 bp, synthetic construct
  misc_feature 1..20: note = Description of Artificial Sequence: Synthetic oligonucleotide
  misc_feature 1..20: note = Target: SCN10A; (+) strand; PAM type: YTN; PAM sequence: CTC
  source 1..20: mol_type = other DNA
aaaaattgtttaagagttgc

SEQ ID NO: 63529 - DNA, 20 bp, synthetic construct
  misc_feature 1..20: note = Description of Artificial Sequence: Synthetic oligonucleotide
  misc_feature 1..20: note = Target: SCN10A; (+) strand; PAM type: YTN; PAM sequence: TTG
  source 1..20: mol_type = other DNA
tttaagagttgcagtaaaaa

SEQ ID NO: 63530 - DNA, 20 bp, synthetic construct
  misc_feature 1..20: note = Description of Artificial Sequence: Synthetic oligonucleotide
  misc_feature 1..20: note = Target: SCN10A; (+) strand; PAM type: YTN; PAM sequence: TTT
  source 1..20: mol_type = other DNA
aagagttgcagtaaaaaaac

SEQ ID NO: 63531 - DNA, 20 bp, synthetic construct
  misc_feature 1..20: note = Description of Artificial Sequence: Synthetic oligonucleotide
  misc_feature 1..20: note = Target: SCN10A; (+) strand; PAM type: YTN; PAM sequence: TTA
  source 1..20: mol_type = other DNA
agagttgcagtaaaaaaaca

SEQ ID NO: 63532 - DNA, 20 bp, synthetic construct
  misc_feature 1..20: note = Description of Artificial Sequence: Synthetic oligonucleotide
  misc_feature 1..20: note = Target: SCN10A; (+) strand; PAM type: YTN; PAM sequence: TTG
  source 1..20: mol_type = other DNA
cagtaaaaaaacaaacaaaa

SEQ ID NO: 63533 - DNA, 20 bp, synthetic construct
  misc_feature 1..20: note = Description of Artificial Sequence: Synthetic oligonucleotide
  misc_feature 1..20: note = Target: SCN10A; (+) strand; PAM type: YTN; PAM sequence: CTT
  source 1..20: mol_type = other DNA
gaagaaaccacagatgtgga

SEQ ID NO: 63534 - DNA, 20 bp, synthetic construct
  misc_feature 1..20: note = Description of Artificial Sequence: Synthetic oligonucleotide
  misc_feature 1..20: note = Target: SCN10A; (+) strand; PAM type: YTN; PAM sequence: TTG
  source 1..20: mol_type = other DNA
aagaaaccacagatgtggaa

SEQ ID NO: 63535 - DNA, 20 bp, synthetic construct
  misc_feature 1..20: note = Description of Artificial Sequence: Synthetic oligonucleotide
  misc_feature 1..20: note = Target: SCN10A; (+) strand; PAM type: YTN; PAM sequence: TTC
  source 1..20: mol_type = other DNA
catttcttcagatgatagaa

SEQ ID NO: 63536 - DNA, 20 bp, synthetic construct
  misc_feature 1..20: note = Description of Artificial Sequence: Synthetic oligonucleotide
  misc_feature 1..20: note = Target: SCN10A; (+) strand; PAM type: YTN; PAM sequence: TTT
  source 1..20: mol_type = other DNA
cttcagatgatagaattatt

SEQ ID NO: 63537 - DNA, 20 bp, synthetic construct
  misc_feature 1..20: note = Description of Artificial Sequence: Synthetic oligonucleotide
  misc_feature 1..20: note = Target: SCN10A; (+) strand; PAM type: YTN; PAM sequence: TTC
  source 1..20: mol_type = other DNA
ttcagatgatagaattatta

SEQ ID NO: 63538 - DNA, 20 bp, synthetic construct
  misc_feature 1..20: note = Description of Artificial Sequence: Synthetic oligonucleotide
  misc_feature 1..20: note = Target: SCN10A; (+) strand; PAM type: YTN; PAM sequence: CTT
  source 1..20: mol_type = other DNA
cagatgatagaattattagt

SEQ ID NO: 63539 - DNA, 20 bp, synthetic construct
  misc_feature 1..20: note = Description of Artificial Sequence: Synthetic oligonucleotide
  misc_feature 1..20: note = Target: SCN10A; (+) strand; PAM type: YTN; PAM sequence: TTC
  source 1..20: mol_type = other DNA
agatgatagaattattagtc

SEQ ID NO: 63540 - DNA, 20 bp, synthetic construct
  misc_feature 1..20: note = Description of Artificial Sequence: Synthetic oligonucleotide
  misc_feature 1..20: note = Target: SCN10A; (+) strand; PAM type: YTN; PAM sequence: TTA
  source 1..20: mol_type = other DNA
ttagtcagagataacagtat

SEQ ID NO: 63541 - DNA, 20 bp, synthetic construct
  misc_feature 1..20: note = Description of Artificial Sequence: Synthetic oligonucleotide
  misc_feature 1..20: note = Target: SCN10A; (+) strand; PAM type: YTN; PAM sequence: TTA
  source 1..20: mol_type = other DNA
gtcagagataacagtataat

SEQ ID NO: 63542 - DNA, 20 bp, synthetic construct
  misc_feature 1..20: note = Description of Artificial Sequence: Synthetic oligonucleotide
  misc_feature 1..20: note = Target: SCN10A; (+) strand; PAM type: YTN; PAM sequence: TTA
  source 1..20: mol_type = other DNA
gatataatatgttaaagaaa

SEQ ID NO: 63543 - DNA, 20 bp, synthetic construct
  misc_feature 1..20: note = Description of Artificial Sequence: Synthetic oligonucleotide
  misc_feature 1..20: note = Target: SCN10A; (+) strand; PAM type: YTN; PAM sequence: TTA
  source 1..20: mol_type = other DNA
aagaaataaaataataactt

SEQ ID NO: 63544 - DNA, 20 bp, synthetic construct
  misc_feature 1..20: note = Description of Artificial Sequence: Synthetic oligonucleotide
  misc_feature 1..20: note = Target: SCN10A; (+) strand; PAM type: YTN; PAM sequence: CTT
  source 1..20: mol_type = other DNA
gaaactatgtgcagagaata

SEQ ID NO: 63545 - DNA, 20 bp, synthetic construct
  misc_feature 1..20: note = Description of Artificial Sequence: Synthetic oligonucleotide
  misc_feature 1..20: note = Target: SCN10A; (+) strand; PAM type: YTN; PAM sequence: TTG
  source 1..20: mol_type = other DNA
aaactatgtgcagagaataa

SEQ ID NO: 63546 - DNA, 20 bp, synthetic construct
  misc_feature 1..20: note = Description of Artificial Sequence: Synthetic oligonucleotide
  misc_feature 1..20: note = Target: SCN10A; (+) strand; PAM type: YTN; PAM sequence: CTA
  source 1..20: mol_type = other DNA
tgtgcagagaataaaaaaac

SEQ ID NO: 63547 - DNA, 20 bp, synthetic construct
  misc_feature 1..20: note = Description of Artificial Sequence: Synthetic oligonucleotide
  misc_feature 1..20: note = Target: SCN10A; (+) strand; PAM type: YTN; PAM sequence: CTA
  source 1..20: mol_type = other DNA
tagataacaataacaagttg

SEQ ID NO: 63548 - DNA, 20 bp, synthetic construct
  misc_feature 1..20: note = Description of Artificial Sequence: Synthetic oligonucleotide
  misc_feature 1..20: note = Target: SCN10A; (+) strand; PAM type: YTN; PAM sequence: TTG
  source 1..20: mol_type = other DNA
tgaaaaatacactcttagaa

SEQ ID NO: 63549 - DNA, 20 bp, synthetic construct
  misc_feature 1..20: note = Description of Artificial Sequence: Synthetic oligonucleotide
  misc_feature 1..20: note = Target: SCN10A; (+) strand; PAM type: YTN; PAM sequence: CTC
  source 1..20: mol_type = other DNA
ttagaaatgaaaaatataat

SEQ ID NO: 63550 - DNA, 20 bp, synthetic construct
  misc_feature 1..20: note = Description of Artificial Sequence: Synthetic oligonucleotide
  misc_feature 1..20: note = Target: SCN10A; (+) strand; PAM type: YTN; PAM sequence: CTT
  source 1..20: mol_type = other DNA
agaaatgaaaaatataatac

SEQ ID NO: 63551 - DNA, 20 bp, synthetic construct
  misc_feature 1..20: note = Description of Artificial Sequence: Synthetic oligonucleotide
  misc_feature 1..20: note = Target: SCN10A; (+) strand; PAM type: YTN; PAM sequence: TTA
  source 1..20: mol_type = other DNA
gaaatgaaaaatataatact

SEQ ID NO: 63552 - DNA, 20 bp, synthetic construct
  misc_feature 1..20: note = Description of Artificial Sequence: Synthetic oligonucleotide
  misc_feature 1..20: note = Target: SCN10A; (+) strand; PAM type: YTN; PAM sequence: CTT
  source 1..20: mol_type = other DNA
aaaattaaaaatattatgaa

SEQ ID NO: 63553 - DNA, 20 bp, synthetic construct
  misc_feature 1..20: note = Description of Artificial Sequence: Synthetic oligonucleotide
  misc_feature 1..20: note = Target: SCN10A; (+) strand; PAM type: YTN; PAM sequence: TTA
  source 1..20: mol_type = other DNA
aaattaaaaatattatgaag

SEQ ID NO: 63554 - DNA, 20 bp, synthetic construct
  misc_feature 1..20: note = Description of Artificial Sequence: Synthetic oligonucleotide
  misc_feature 1..20: note = Target: SCN10A; (+) strand; PAM type: YTN; PAM sequence: TTA
  source 1..20: mol_type = other DNA
aaaatattatgaagaaggtt

SEQ ID NO: 63555 - DNA, 20 bp, synthetic construct
  misc_feature 1..20: note = Description of Artificial Sequence: Synthetic oligonucleotide
  misc_feature 1..20: note = Target: SCN10A; (+) strand; PAM type: YTN; PAM sequence: TTA
  source 1..20: mol_type = other DNA
tgaagaaggtttgcatcaga

SEQ ID NO: 63556 - DNA, 20 bp, synthetic construct
  misc_feature 1..20: note = Description of Artificial Sequence: Synthetic oligonucleotide
  misc_feature 1..20: note = Target: SCN10A; (+) strand; PAM type: YTN; PAM sequence: TTT
  source 1..20: mol_type = other DNA
gcatcagatttgacacagtt

SEQ ID NO: 63557 - DNA, 20 bp, synthetic construct
  misc_feature 1..20: note = Description of Artificial Sequence: Synthetic oligonucleotide
  misc_feature 1..20: note = Target: SCN10A; (+) strand; PAM type: YTN; PAM sequence: TTG
  source 1..20: mol_type = other DNA
catcagatttgacacagttt

SEQ ID NO: 63558 - DNA, 20 bp, synthetic construct
  misc_feature 1..20: note = Description of Artificial Sequence: Synthetic oligonucleotide
  misc_feature 1..20: note = Target: SCN10A; (+) strand; PAM type: YTN; PAM sequence: TTT
  source 1..20: mol_type = other DNA
gacacagtttgggagagaat

SEQ ID NO: 63559 - DNA, 20 bp, synthetic construct
  misc_feature 1..20: note = Description of Artificial Sequence: Synthetic oligonucleotide
  misc_feature 1..20: note = Target: SCN10A; (+) strand; PAM type: YTN; PAM sequence: TTG
  source 1..20: mol_type = other DNA
acacagtttgggagagaatt

SEQ ID NO: 63560 - DNA, 20 bp, synthetic construct
  misc_feature 1..20: note = Description of Artificial Sequence: Synthetic oligonucleotide
  misc_feature 1..20: note = Target: SCN10A; (+) strand; PAM type: YTN; PAM sequence: TTT
  source 1..20: mol_type = other DNA
gggagagaattagtgaactg

SEQ ID NO: 63561 - DNA, 20 bp, synthetic construct
  misc_feature 1..20: note = Description of Artificial Sequence: Synthetic oligonucleotide
  misc_feature 1..20: note = Target: SCN10A; (+) strand; PAM type: YTN; PAM sequence: TTG
  source 1..20: mol_type = other DNA
ggagagaattagtgaactga

SEQ ID NO: 63562 - DNA, 20 bp, synthetic construct
  misc_feature 1..20: note = Description of Artificial Sequence: Synthetic oligonucleotide
  misc_feature 1..20: note = Target: SCN10A; (+) strand; PAM type: YTN; PAM sequence: TTA
  source 1..20: mol_type = other DNA
gtgaactgaggatatatcag

SEQ ID NO: 63563 - DNA, 20 bp, synthetic construct
  misc_feature 1..20: note = Description of Artificial Sequence: Synthetic oligonucleotide
  misc_feature 1..20: note = Target: SCN10A; (+) strand; PAM type: YTN; PAM sequence: CTG
  source 1..20: mol_type = other DNA
aggatatatcagaataaatt

SEQ ID NO: 63564 - DNA, 20 bp, synthetic construct
  misc_feature 1..20: note = Description of Artificial Sequence: Synthetic oligonucleotide
  misc_feature 1..20: note = Target: SCN10A; (+) strand; PAM type: YTN; PAM sequence: TTA
  source 1..20: mol_type = other DNA
ttcagaatgtaacctagaga

SEQ ID NO: 63565 - DNA, 20 bp, synthetic construct
  misc_feature 1..20: note = Description of Artificial Sequence: Synthetic oligonucleotide
  misc_feature 1..20: note = Target: SCN10A; (+) strand; PAM type: YTN; PAM sequence: TTC
  source 1..20: mol_type = other DNA
agaatgtaacctagagagac

SEQ ID NO: 63566 - DNA, 20 bp, synthetic construct
  misc_feature 1..20: note = Description of Artificial Sequence: Synthetic oligonucleotide
  misc_feature 1..20: note = Target: SCN10A; (+) strand; PAM type: YTN; PAM sequence: CTA
  source 1..20: mol_type = other DNA
gagagacataagatgaaaaa

SEQ ID NO: 63567 - DNA, 20 bp, synthetic construct
  misc_feature 1..20: note = Description of Artificial Sequence: Synthetic oligonucleotide
  misc_feature 1..20: note = Target: SCN10A; (+) strand; PAM type: YTN; PAM sequence: TTT
  source 1..20: mol_type = other DNA
aacatctatctaaccaaagt

SEQ ID NO: 63568 - DNA, 20 bp, synthetic construct
  misc_feature 1..20: note = Description of Artificial Sequence: Synthetic oligonucleotide
  misc_feature 1..20: note = Target: SCN10A; (+) strand; PAM type: YTN; PAM sequence: TTA
  source 1..20: mol_type = other DNA
acatctatctaaccaaagtc

SEQ ID NO: 63569 - DNA, 20 bp, synthetic construct
  misc_feature 1..20: note = Description of Artificial Sequence: Synthetic oligonucleotide
  misc_feature 1..20: note = Target: SCN10A; (+) strand; PAM type: YTN; PAM sequence: CTA
  source 1..20: mol_type = other DNA
tctaaccaaagtccagaagg

SEQ ID NO: 63570 - DNA, 20 bp, synthetic construct
  misc_feature 1..20: note = Description of Artificial Sequence: Synthetic oligonucleotide
  misc_feature 1..20: note = Target: SCN10A; (+) strand; PAM type: YTN; PAM sequence: CTA
  source 1..20: mol_type = other DNA
accaaagtccagaaggagaa

SEQ ID NO: 63571 - DNA, 20 bp, synthetic construct
  misc_feature 1..20: note = Description of Artificial Sequence: Synthetic oligonucleotide
  misc_feature 1..20: note = Target: SCN10A; (+) strand; PAM type: YTN; PAM sequence: CTA
  source 1..20: mol_type = other DNA
tgactgcccacatcatgtct

SEQ ID NO: 63572 - DNA, 20 bp, synthetic construct
  misc_feature 1..20: note = Description of Artificial Sequence: Synthetic oligonucleotide
  misc_feature 1..20: note = Target: SCN10A; (+) strand; PAM type: YTN; PAM sequence: CTG
  source 1..20: mol_type = other DNA
cccacatcatgtctgggaac

SEQ ID NO: 63573 - DNA, 20 bp, synthetic construct
  misc_feature 1..20: note = Description of Artificial Sequence: Synthetic oligonucleotide
  misc_feature 1..20: note = Target: SCN10A; (+) strand; PAM type: YTN; PAM sequence: CTG
  source 1..20: mol_type = other DNA
ggaactttccagaattgaag

SEQ ID NO: 63574 - DNA, 20 bp, synthetic construct
  misc_feature 1..20: note = Description of Artificial Sequence: Synthetic oligonucleotide
  misc_feature 1..20: note = Target: SCN10A; (+) strand; PAM type: YTN; PAM sequence: CTT
  source 1..20: mol_type = other DNA
tccagaattgaagaaaatta

SEQ ID NO: 63575 - DNA, 20 bp, synthetic construct
  misc_feature 1..20: note = Description of Artificial Sequence: Synthetic oligonucleotide
  misc_feature 1..20: note = Target: SCN10A; (+) strand; PAM type: YTN; PAM sequence: TTT
  source 1..20: mol_type = other DNA
ccagaattgaagaaaattac

SEQ ID NO: 63576 - DNA, 20 bp, synthetic construct
  misc_feature 1..20: note = Description of Artificial Sequence: Synthetic oligonucleotide
  misc_feature 1..20: note = Target: SCN10A; (+) strand; PAM type: YTN; PAM sequence: TTC
  source 1..20: mol_type = other DNA
cagaattgaagaaaattaca

SEQ ID NO: 63577 - DNA, 20 bp, synthetic construct
  misc_feature 1..20: note = Description of Artificial Sequence: Synthetic oligonucleotide
  misc_feature 1..20: note = Target: SCN10A; (+) strand; PAM type: YTN; PAM sequence: TTG
  source 1..20: mol_type = other DNA
aagaaaattacaaaactaaa

SEQ ID NO: 63578 - DNA, 20 bp, synthetic construct
  misc_feature 1..20: note = Description of Artificial Sequence: Synthetic oligonucleotide
  misc_feature 1..20: note = Target: SCN10A; (+) strand; PAM type: YTN; PAM sequence: TTA
  source 1..20: mol_type = other DNA
caaaactaaagattcaagaa

SEQ ID NO: 63579 - DNA, 20 bp, synthetic construct
  misc_feature 1..20: note = Description of Artificial Sequence: Synthetic oligonucleotide
  misc_feature 1..20: note = Target: SCN10A; (+) strand; PAM type: YTN; PAM sequence: CTA
  source 1..20: mol_type = other DNA
aagattcaagaagtcagtat

SEQ ID NO: 63580 - DNA, 20 bp, synthetic construct
  misc_feature 1..20: note = Description of Artificial Sequence: Synthetic oligonucleotide
  misc_feature 1..20: note = Target: SCN10A; (+) strand; PAM type: YTN; PAM sequence: TTC
  source 1..20: mol_type = other DNA
aagaagtcagtatatcttaa

SEQ ID NO: 63581 - DNA, 20 bp, synthetic construct
  misc_feature 1..20: note = Description of Artificial Sequence: Synthetic oligonucleotide
  misc_feature 1..20: note = Target: SCN10A; (+) strand; PAM type: YTN; PAM sequence: CTT
  source 1..20: mol_type = other DNA
aagcattataaatggaaaga

SEQ ID NO: 63582 - DNA, 20 bp, synthetic construct
  misc_feature 1..20: note = Description of Artificial Sequence: Synthetic oligonucleotide
  misc_feature 1..20: note = Target: SCN10A; (+) strand; PAM type: YTN; PAM sequence: TTA
  source 1..20: mol_type = other DNA
agcattataaatggaaagaa

SEQ ID NO: 63583 - DNA, 20 bp, synthetic construct
  misc_feature 1..20: note = Description of Artificial Sequence: Synthetic oligonucleotide
  misc_feature 1..20: note = Target: SCN10A; (+) strand; PAM type: YTN; PAM sequence: TTA
  source 1..20: mol_type = other DNA
taaatggaaagaagtccaca

SEQ ID NO: 63584 - DNA, 20 bp, synthetic construct
  misc_feature 1..20: note = Description of Artificial Sequence: Synthetic oligonucleotide
  misc_feature 1..20: note = Target: SCN10A; (+) strand; PAM type: YTN; PAM sequence: CTA
  source 1..20: mol_type = other DNA
gacatattacagtgaaactg

SEQ ID NO: 63585 - DNA, 20 bp, synthetic construct
  misc_feature 1..20: note = Description of Artificial Sequence: Synthetic oligonucleotide
  misc_feature 1..20: note = Target: SCN10A; (+) strand; PAM type: YTN; PAM sequence: TTA
  source 1..20: mol_type = other DNA
cagtgaaactgcagaacacc

SEQ ID NO: 63586 - DNA, 20 bp, synthetic construct
  misc_feature 1..20: note = Description of Artificial Sequence: Synthetic oligonucleotide
  misc_feature 1..20: note = Target: SCN10A; (+) strand; PAM type: YTN; PAM sequence: CTG
  source 1..20: mol_type = other DNA
cagaacaccaaagatggata

SEQ ID NO: 63587 - DNA, 20 bp, synthetic construct
  misc_feature 1..20: note = Description of Artificial Sequence: Synthetic oligonucleotide
  misc_feature 1..20: note = Target: SCN10A; (+) strand; PAM type: YTN; PAM sequence: TTT
  source 1..20: mol_type = other DNA
aaaaagcatccagaaaggaa

SEQ ID NO: 63588 - DNA, 20 bp, synthetic construct
  misc_feature 1..20: note = Description of Artificial Sequence: Synthetic oligonucleotide
  misc_feature 1..20: note = Target: SCN10A; (+) strand; PAM type: YTN; PAM sequence: TTA
  source 1..20: mol_type = other DNA
aaaagcatccagaaaggaag

SEQ ID NO: 63589 - DNA, 20 bp, synthetic construct
  misc_feature 1..20: note = Description of Artificial Sequence: Synthetic oligonucleotide
  misc_feature 1..20: note = Target: SCN10A; (+) strand; PAM type: YTN; PAM sequence: TTA
  source 1..20: mol_type = other DNA
aattgaaagctgactgctca

SEQ ID NO: 63590 - DNA, 20 bp, synthetic construct
  misc_feature 1..20: note = Description of Artificial Sequence: Synthetic oligonucleotide
  misc_feature 1..20: note = Target: SCN10A; (+) strand; PAM type: YTN; PAM sequence: TTG
  source 1..20: mol_type = other DNA
aaagctgactgctcattagc

SEQ ID NO: 63591 - DNA, 20 bp, synthetic construct
  misc_feature 1..20: note = Description of Artificial Sequence: Synthetic oligonucleotide
  misc_feature 1..20: note = Target: SCN10A; (+) strand; PAM type: YTN; PAM sequence: CTG
  source 1..20: mol_type = other DNA
actgctcattagcaacaatg

SEQ ID NO: 63592 - DNA, 20 bp, synthetic construct
  misc_feature 1..20: note = Description of Artificial Sequence: Synthetic oligonucleotide
  misc_feature 1..20: note = Target: SCN10A; (+) strand; PAM type: YTN; PAM sequence: CTG
  source 1..20: mol_type = other DNA
ctcattagcaacaatggagg

SEQ ID NO: 63593 - DNA, 20 bp, synthetic construct
  misc_feature 1..20: note = Description of Artificial Sequence: Synthetic oligonucleotide
  misc_feature 1..20: note = Target: SCN10A; (+) strand; PAM type: YTN; PAM sequence: CTC
  source 1..20: mol_type = other DNA
attagcaacaatggaggcta

SEQ ID NO: 63594 - DNA, 20 bp, synthetic construct
  misc_feature 1..20: note = Description of Artificial Sequence: Synthetic oligonucleotide
  misc_feature 1..20: note = Target: SCN10A; (+) strand; PAM type: YTN; PAM sequence: TTA
  source 1..20: mol_type = other DNA
gcaacaatggaggctaattg

SEQ ID NO: 63595 - DNA, 20 bp, synthetic construct
  misc_feature 1..20: note = Description of Artificial Sequence: Synthetic oligonucleotide
  misc_feature 1..20: note = Target: SCN10A; (+) strand; PAM type: YTN; PAM sequence: CTA
  source 1..20: mol_type = other DNA
attgttggaatactatcttc

SEQ ID NO: 63596 - DNA, 20 bp, synthetic construct
  misc_feature 1..20: note = Description of Artificial Sequence: Synthetic oligonucleotide
  misc_feature 1..20: note = Target: SCN10A; (+) strand; PAM type: YTN; PAM sequence: TTG
  source 1..20: mol_type = other DNA
ttggaatactatcttcactg

SEQ ID NO: 63597 - DNA, 20 bp, synthetic construct
  misc_feature 1..20: note = Description of Artificial Sequence: Synthetic oligonucleotide
  misc_feature 1..20: note = Target: SCN10A; (+) strand; PAM type: YTN; PAM sequence: TTG
  source 1..20: mol_type = other DNA
gaatactatcttcactgaag

SEQ ID NO: 63598 - DNA, 20 bp, synthetic construct
  misc_feature 1..20: note = Description of Artificial Sequence: Synthetic oligonucleotide
  misc_feature 1..20: note = Target: SCN10A; (+) strand; PAM type: YTN; PAM sequence: CTA
  source 1..20: mol_type = other DNA
tcttcactgaaggaagataa

SEQ ID NO: 63599 - DNA, 20 bp, synthetic construct
  misc_feature 1..20: note = Description of Artificial Sequence: Synthetic oligonucleotide
  misc_feature 1..20: note = Target: SCN10A; (+) strand; PAM type: YTN; PAM sequence: CTT
  source 1..20: mol_type = other DNA
cactgaaggaagataaagta

SEQ ID NO: 63600 - DNA, 20 bp, synthetic construct
  misc_feature 1..20: note = Description of Artificial Sequence: Synthetic oligonucleotide
  misc_feature 1..20: note = Target: SCN10A; (+) strand; PAM type: YTN; PAM sequence: TTC
  source 1..20: mol_type = other DNA
actgaaggaagataaagtat

SEQ ID NO: 63601 - DNA, 20 bp, synthetic construct
  misc_feature 1..20: note = Description of Artificial Sequence: Synthetic oligonucleotide
  misc_feature 1..20: note = Target: SCN10A; (+) strand; PAM type: YTN; PAM sequence: CTG
  source 1..20: mol_type = other DNA
aaggaagataaagtatcaac

SEQ ID NO: 63602 - DNA, 20 bp, synthetic construct
  misc_feature 1..20: note = Description of Artificial Sequence: Synthetic oligonucleotide
  misc_feature 1..20: note = Target: SCN10A; (+) strand; PAM type: YTN; PAM sequence: CTA
  source 1..20: mol_type = other DNA
gaattttacattcataagaa

SEQ ID NO: 63603 - DNA, 20 bp, synthetic construct
  misc_feature 1..20: note = Description of Artificial Sequence: Synthetic oligonucleotide
  misc_feature 1..20: note = Target: SCN10A; (+) strand; PAM type: YTN; PAM sequence: TTT
  source 1..20: mol_type = other DNA
tacattcataagaaatgtct

SEQ ID NO: 63604 - DNA, 20 bp, synthetic construct
  misc_feature 1..20: note = Description of Artificial Sequence: Synthetic oligonucleotide
  misc_feature 1..20: note = Target: SCN10A; (+) strand; PAM type: YTN; PAM sequence: TTT
  source 1..20: mol_type = other DNA
acattcataagaaatgtctc

SEQ ID NO: 63605 - DNA, 20 bp, synthetic construct
  misc_feature 1..20: note = Description of Artificial Sequence: Synthetic oligonucleotide
  misc_feature 1..20: note = Target: SCN10A; (+) strand; PAM type: YTN; PAM sequence: TTA
  source 1..20: mol_type = other DNA
cattcataagaaatgtctct

SEQ ID NO: 63606 - DNA, 20 bp, synthetic construct
  misc_feature 1..20: note = Description of Artificial Sequence: Synthetic oligonucleotide
  misc_feature 1..20: note = Target: SCN10A; (+) strand; PAM type: YTN; PAM sequence: TTC
  source 1..20: mol_type = other DNA
ataagaaatgtctctcaaag

SEQ ID NO: 63607 - DNA, 20 bp, synthetic construct
  misc_feature 1..20: note = Description of Artificial Sequence: Synthetic oligonucleotide
  misc_feature 1..20: note = Target: SCN10A; (+) strand; PAM type: YTN; PAM sequence: CTC
  source 1..20: mol_type = other DNA
tcaaagacacgggcaaactg

SEQ ID NO: 63608 - DNA, 20 bp, synthetic construct
  misc_feature 1..20: note = Description of Artificial Sequence: Synthetic oligonucleotide
  misc_feature 1..20: note = Target: SCN10A; (+) strand; PAM type: YTN; PAM sequence: CTC
  source 1..20: mol_type = other DNA
aaagacacgggcaaactgaa

SEQ ID NO: 63609 - DNA, 20 bp, synthetic construct
  misc_feature 1..20: note = Description of Artificial Sequence: Synthetic oligonucleotide
  misc_feature 1..20: note = Target: SCN10A; (+) strand; PAM type: YTN; PAM sequence: CTG
  source 1..20: mol_type = other DNA
aagagcaaatttcagataaa

SEQ ID NO: 63610 - DNA, 20 bp, synthetic construct
  misc_feature 1..20: note = Description of Artificial Sequence: Synthetic oligonucleotide
  misc_feature 1..20: note = Target: SCN10A; (+) strand; PAM type: YTN; PAM sequence: TTT
  source 1..20: mol_type = other DNA
cagataaacaaagaggttat

SEQ ID NO: 63611 - DNA, 20 bp, synthetic construct
  misc_feature 1..20: note = Description of Artificial Sequence: Synthetic oligonucleotide
  misc_feature 1..20: note = Target: SCN10A; (+) strand; PAM type: YTN; PAM sequence: TTC
  source 1..20: mol_type = other DNA
agataaacaaagaggttatg

SEQ ID NO: 63612 - DNA, 20 bp, synthetic construct
  misc_feature 1..20: note = Description of Artificial Sequence: Synthetic oligonucleotide
  misc_feature 1..20: note = Target: SCN10A; (+) strand; PAM type: YTN; PAM sequence: TTA
  source 1..20: mol_type = other DNA
tggccagaaggcacttacta

SEQ ID NO: 63613 - DNA, 20 bp, synthetic construct
  misc_feature 1..20: note = Description of Artificial Sequence: Synthetic oligonucleotide
  misc_feature 1..20: note = Target: SCN10A; (+) strand; PAM type: YTN; PAM sequence: CTT
  source 1..20: mol_type = other DNA
actaaaagaaattctaaagg

SEQ ID NO: 63614 - DNA, 20 bp, synthetic construct
  misc_feature 1..20: note = Description of Artificial Sequence: Synthetic oligonucleotide
  misc_feature 1..20: note = Target: SCN10A; (+) strand; PAM type: YTN; PAM sequence: TTA
  source 1..20: mol_type = other DNA
ctaaaagaaattctaaagga

SEQ ID NO: 63615 - DNA, 20 bp, synthetic construct
  misc_feature 1..20: note = Description of Artificial Sequence: Synthetic oligonucleotide
  misc_feature 1..20: note = Target: SCN10A; (+) strand; PAM type: YTN; PAM sequence: CTA
  source 1..20: mol_type = other DNA
aaagaaattctaaaggaggt

SEQ ID NO: 63616 - DNA, 20 bp, synthetic construct
  misc_feature 1..20: note = Description of Artificial Sequence: Synthetic oligonucleotide
  misc_feature 1..20: note = Target: SCN10A; (+) strand; PAM type: YTN; PAM sequence: TTC
  source 1..20: mol_type = other DNA
taaaggaggtacttcaggta

SEQ ID NO: 63617 - DNA, 20 bp, synthetic construct
  misc_feature 1..20: note = Description of Artificial Sequence: Synthetic oligonucleotide
  misc_feature 1..20: note = Target: SCN10A; (+) strand; PAM type: YTN; PAM sequence: CTA
  source 1..20: mol_type = other DNA
aaggaggtacttcaggtaga

SEQ ID NO: 63618 - DNA, 20 bp, synthetic construct
  misc_feature 1..20: note = Description of Artificial Sequence: Synthetic oligonucleotide
  misc_feature 1..20: note = Target: SCN10A; (+) strand; PAM type: YTN; PAM sequence: CTT
  source 1..20: mol_type = other DNA
caggtagatagaaagtgatc

SEQ ID NO: 63619 - DNA, 20 bp, synthetic construct
  misc_feature 1..20: note = Description of Artificial Sequence: Synthetic oligonucleotide
  misc_feature 1..20: note = Target: SCN10A; (+) strand; PAM type: YTN; PAM sequence: TTC
  source 1..20: mol_type = other DNA
aggtagatagaaagtgatcc

SEQ ID NO: 63620 - DNA, 20 bp, synthetic construct
  misc_feature 1..20: note = Description of Artificial Sequence: Synthetic oligonucleotide
  misc_feature 1..20: note = Target: SCN10A; (+) strand; PAM type: YTN; PAM sequence: CTG
  source 1..20: mol_type = other DNA
tgctccaaagggttgaagaa

SEQ ID NO: 63621 - DNA, 20 bp, synthetic construct
  misc_feature 1..20: note = Description of Artificial Sequence: Synthetic oligonucleotide
  misc_feature 1..20: note = Target: SCN10A; (+) strand; PAM type: YTN; PAM sequence: CTC
  source 1..20: mol_type = other DNA
caaagggttgaagaaatcaa

SEQ ID NO: 63622 - DNA, 20 bp, synthetic construct
  misc_feature 1..20: note = Description of Artificial Sequence: Synthetic oligonucleotide
  misc_feature 1..20: note = Target: SCN10A; (+) strand; PAM type: YTN; PAM sequence: TTG
  source 1..20: mol_type = other DNA
aagaaatcaataactaaatt

SEQ ID NO: 63623 - DNA, 20 bp, synthetic construct
  misc_feature 1..20: note = Description of Artificial Sequence: Synthetic oligonucleotide
  misc_feature 1..20: note = Target: SCN10A; (+) strand; PAM type: YTN; PAM sequence: CTA
  source 1..20: mol_type = other DNA
aatttttaggcttacaggat

SEQ ID NO: 63624 - DNA, 20 bp, synthetic construct
  misc_feature 1..20: note = Description of Artificial Sequence: Synthetic oligonucleotide
  misc_feature 1..20: note = Target: SCN10A; (+) strand; PAM type: YTN; PAM sequence: TTT
  source 1..20: mol_type = other DNA
ttaggcttacaggataccag

SEQ ID NO: 63625 - DNA, 20 bp, synthetic construct
  misc_feature 1..20: note = Description of Artificial Sequence: Synthetic oligonucleotide
  misc_feature 1..20: note = Target: SCN10A; (+) strand; PAM type: YTN; PAM sequence: TTT
  source 1..20: mol_type = other DNA
taggcttacaggataccaga

SEQ ID NO: 63626 - DNA, 20 bp, synthetic construct
  misc_feature 1..20: note = Description of Artificial Sequence: Synthetic oligonucleotide
  misc_feature 1..20: note = Target: SCN10A; (+) strand; PAM type: YTN; PAM sequence: TTT
  source 1..20: mol_type = other DNA
aggcttacaggataccagat

SEQ ID NO: 63627 - DNA, 20 bp, synthetic construct
  misc_feature 1..20: note = Description of Artificial Sequence: Synthetic oligonucleotide
  misc_feature 1..20: note = Target: SCN10A; (+) strand; PAM type: YTN; PAM sequence: TTA
  source 1..20: mol_type = other DNA
ggcttacaggataccagata

SEQ ID NO: 63628 - DNA, 20 bp, synthetic construct
  misc_feature 1..20: note = Description of Artificial Sequence: Synthetic oligonucleotide
  misc_feature 1..20: note = Target: SCN10A; (+) strand; PAM type: YTN; PAM sequence: CTT
  source 1..20: mol_type = other DNA
acaggataccagataagaaa

SEQ ID NO: 63629 - DNA, 20 bp, synthetic construct
  misc_feature 1..20: note = Description of Artificial Sequence: Synthetic oligonucleotide
  misc_feature 1..20: note = Target: SCN10A; (+) strand; PAM type: YTN; PAM sequence: TTA
  source 1..20: mol_type = other DNA
caggataccagataagaaat

SEQ ID NO: 63630 - DNA, 20 bp, synthetic construct
  misc_feature 1..20: note = Description of Artificial Sequence: Synthetic oligonucleotide
  misc_feature 1..20: note = Target: SCN10A; (+) strand; PAM type: YTN; PAM sequence: CTC
  source 1..20: mol_type = other DNA
actgaaaatctgaaactcaa

SEQ ID NO: 63631 - DNA, 20 bp, synthetic construct
  misc_feature 1..20: note = Description of Artificial Sequence: Synthetic oligonucleotide
  misc_feature 1..20: note = Target: SCN10A; (+) strand; PAM type: YTN; PAM sequence: CTG
  source 1..20: mol_type = other DNA
aaaatctgaaactcaaactg

SEQ ID NO: 63632 - DNA, 20 bp, synthetic construct
  misc_feature 1..20: note = Description of Artificial Sequence: Synthetic oligonucleotide
  misc_feature 1..20: note = Target: SCN10A; (+) strand; PAM type: YTN; PAM sequence: CTG
  source 1..20: mol_type = other DNA
aaactcaaactgtgttccaa

SEQ ID NO: 63633 - DNA, 20 bp, synthetic construct
  misc_feature 1..20: note = Description of Artificial Sequence: Synthetic oligonucleotide
  misc_feature 1..20: note = Target: SCN10A; (+) strand; PAM type: YTN; PAM sequence: CTC
  source 1..20: mol_type = other DNA
aaactgtgttccaaagagta

SEQ ID NO: 63634 - DNA, 20 bp, synthetic construct
  misc_feature 1..20: note = Description of Artificial Sequence: Synthetic oligonucleotide
  misc_feature 1..20: note = Target: SCN10A; (+) strand; PAM type: YTN; PAM sequence: CTG
  source 1..20: mol_type = other DNA
tgttccaaagagtaagaaat

SEQ ID NO: 63635 - DNA, 20 bp, synthetic construct
  misc_feature 1..20: note = Description of Artificial Sequence: Synthetic oligonucleotide
  misc_feature 1..20: note = Target: SCN10A; (+) strand; PAM type: YTN; PAM sequence: TTC
  source 1..20: mol_type = other DNA
caaagagtaagaaatcagta

SEQ ID NO: 63636 - DNA, 20 bp, synthetic construct
  misc_feature 1..20: note = Description of Artificial Sequence: Synthetic oligonucleotide
  misc_feature 1..20: note = Target: SCN10A; (+) strand; PAM type: YTN; PAM sequence: CTT
  source 1..20: mol_type = other DNA
acaaaaattcttgagttttt

SEQ ID NO: 63637 - DNA, 20 bp, synthetic construct
  misc_feature 1..20: note = Description of Artificial Sequence: Synthetic oligonucleotide
  misc_feature 1..20: note = Target: SCN10A; (+) strand; PAM type: YTN; PAM sequence: TTA
  source 1..20: mol_type = other DNA
caaaaattcttgagttttta

SEQ ID NO: 63638 - DNA, 20 bp, synthetic construct
  misc_feature 1..20: note = Description of Artificial Sequence: Synthetic oligonucleotide
  misc_feature 1..20: note = Target: SCN10A; (+) strand; PAM type: YTN; PAM sequence: TTC
  source 1..20: mol_type = other DNA
ttgagtttttaggatagcag

SEQ ID NO: 63639 - DNA, 20 bp, synthetic construct
  misc_feature 1..20: note = Description of Artificial Sequence: Synthetic oligonucleotide
  misc_feature 1..20: note = Target: SCN10A; (+) strand; PAM type: YTN; PAM sequence: CTT
  source 1..20: mol_type = other DNA
gagtttttaggatagcagat

SEQ ID NO: 63640 - DNA, 20 bp, synthetic construct
  misc_feature 1..20: note = Description of Artificial Sequence: Synthetic oligonucleotide
  misc_feature 1..20: note = Target: SCN10A; (+) strand; PAM type: YTN; PAM sequence: TTG
  source 1..20: mol_type = other DNA
agtttttaggatagcagata

SEQ ID NO: 63641 - DNA, 20 bp, synthetic construct
  misc_feature 1..20: note = Description of Artificial Sequence: Synthetic oligonucleotide
  misc_feature 1..20: note = Target: SCN10A; (+) strand; PAM type: YTN; PAM sequence: TTT
  source 1..20: mol_type = other DNA
ttaggatagcagataggtaa

SEQ ID NO: 63642 - DNA, 20 bp, synthetic construct
  misc_feature 1..20: note = Description of Artificial Sequence: Synthetic oligonucleotide
  misc_feature 1..20: note = Target: SCN10A; (+) strand; PAM type: YTN; PAM sequence: TTT
  source 1..20: mol_type = other DNA
taggatagcagataggtaaa

SEQ ID NO: 63643 - DNA, 20 bp, synthetic construct
  misc_feature 1..20: note = Description of Artificial Sequence: Synthetic oligonucleotide
  misc_feature 1..20: note = Target: SCN10A; (+) strand; PAM type: YTN; PAM sequence: TTT
  source 1..20: mol_type = other DNA
aggatagcagataggtaaag

SEQ ID NO: 63644 - DNA, 20 bp, synthetic construct
  misc_feature 1..20: note = Description of Artificial Sequence: Synthetic oligonucleotide
  misc_feature 1..20: note = Target: SCN10A; (+) strand; PAM type: YTN; PAM sequence: TTA
  source 1..20: mol_type = other DNA
ggatagcagataggtaaaga

SEQ ID NO: 63645 - DNA, 20 bp, synthetic construct
  misc_feature 1..20: note = Description of Artificial Sequence: Synthetic oligonucleotide
  misc_feature 1..20: note = Target: SCN10A; (+) strand; PAM type: YTN; PAM sequence: CTT
  source 1..20: mol_type = other DNA
gctgagacactgaaactccc

SEQ ID NO: 63646 - DNA, 20 bp, synthetic construct
  misc_feature 1..20: note = Description of Artificial Sequence: Synthetic oligonucleotide
  misc_feature 1..20: note = Target: SCN10A; (+) strand; PAM type: YTN; PAM sequence: TTG
  source 1..20: mol_type = other DNA
ctgagacactgaaactccct

SEQ ID NO: 63647 - DNA, 20 bp, synthetic construct
  misc_feature 1..20: note = Description of Artificial Sequence: Synthetic oligonucleotide
  misc_feature 1..20: note = Target: SCN10A; (+) strand; PAM type: YTN; PAM sequence: CTG
  source 1..20: mol_type = other DNA
agacactgaaactccctccc

SEQ ID NO: 63648 - DNA, 20 bp, synthetic construct
  misc_feature 1..20: note = Description of Artificial Sequence: Synthetic oligonucleotide
  misc_feature 1..20: note = Target: SCN10A; (+) strand; PAM type: YTN; PAM sequence: CTG
  source 1..20: mol_type = other DNA
aaactccctccccttgtgtg

SEQ ID NO: 63649 - DNA, 20 bp, synthetic construct
  misc_feature 1..20: note = Description of Artificial Sequence: Synthetic oligonucleotide
  misc_feature 1..20: note = Target: SCN10A; (+) strand; PAM type: YTN; PAM sequence: CTC
  source 1..20: mol_type = other DNA
cctccccttgtgtgatgatg

SEQ ID NO: 63650 - DNA, 20 bp, synthetic construct
  misc_feature 1..20: note = Description of Artificial Sequence: Synthetic oligonucleotide
  misc_feature 1..20: note = Target: SCN10A; (+) strand; PAM type: YTN; PAM sequence: CTC
  source 1..20: mol_type = other DNA
cccttgtgtgatgatgaaaa

SEQ ID NO: 63651 - DNA, 20 bp, synthetic construct
  misc_feature 1..20: note = Description of Artificial Sequence: Synthetic oligonucleotide
  misc_feature 1..20: note = Target: SCN10A; (+) strand; PAM type: YTN; PAM sequence: CTT
  source 1..20: mol_type = other DNA
gtgtgatgatgaaaaaacag

SEQ ID NO: 63652 - DNA, 20 bp, synthetic construct
  misc_feature 1..20: note = Description of Artificial Sequence: Synthetic oligonucleotide
  misc_feature 1..20: note = Target: SCN10A; (+) strand; PAM type: YTN; PAM sequence: TTG
  source 1..20: mol_type = other DNA
tgtgatgatgaaaaaacagg

SEQ ID NO: 63653 - DNA, 20 bp, synthetic construct
  misc_feature 1..20: note = Description of Artificial Sequence: Synthetic oligonucleotide
  misc_feature 1..20: note = Target: SCN10A; (+) strand; PAM type: YTN; PAM sequence: CTG
  source 1..20: mol_type = other DNA
aaatcaattggaaccaggat

SEQ ID NO: 63654 - DNA, 20 bp, synthetic construct
  misc_feature 1..20: note = Description of Artificial Sequence: Synthetic oligonucleotide
  misc_feature 1..20: note = Target: SCN10A; (+) strand; PAM type: YTN; PAM sequence: TTG
  source 1..20: mol_type = other DNA
gaaccaggatggccgactgg

SEQ ID NO: 63655 - DNA, 20 bp, synthetic construct
  misc_feature 1..20: note = Description of Artificial Sequence: Synthetic oligonucleotide
  misc_feature 1..20: note = Target: SCN10A; (+) strand; PAM type: YTN; PAM sequence: CTG
  source 1..20: mol_type = other DNA
gagtttgtgcagaatgagct

SEQ ID NO: 63656 - DNA, 20 bp, synthetic construct
  misc_feature 1..20: note = Description of Artificial Sequence: Synthetic oligonucleotide
  misc_feature 1..20: note = Target: SCN10A; (+) strand; PAM type: YTN; PAM sequence: TTT
  source 1..20: mol_type = other DNA
gtgcagaatgagcttgctga

SEQ ID NO: 63657 - DNA, 20 bp, synthetic construct
  misc_feature 1..20: note = Description of Artificial Sequence: Synthetic oligonucleotide
  misc_feature 1..20: note = Target: SCN10A; (+) strand; PAM type: YTN; PAM sequence: TTG
  source 1..20: mol_type = other DNA
tgcagaatgagcttgctgac

SEQ ID NO: 63658 - DNA, 20 bp, synthetic construct
  misc_feature 1..20: note = Description of Artificial Sequence: Synthetic oligonucleotide
  misc_feature 1..20: note = Target: SCN10A; (+) strand; PAM type: YTN; PAM sequence: CTT
  source 1..20: mol_type = other DNA
gctgacgtcatggactgaat

SEQ ID NO: 63659 - DNA, 20 bp, synthetic construct
  misc_feature 1..20: note = Description of Artificial Sequence: Synthetic oligonucleotide
  misc_feature 1..20: note = Target: SCN10A; (+) strand; PAM type: YTN; PAM sequence: TTG
  source 1..20: mol_type = other DNA
ctgacgtcatggactgaatt

SEQ ID NO: 63660 - DNA, 20 bp, synthetic construct
  misc_feature 1..20: note = Description of Artificial Sequence: Synthetic oligonucleotide
  misc_feature 1..20: note = Target: SCN10A; (+) strand; PAM type: YTN; PAM sequence: CTG
  source 1..20: mol_type = other DNA
acgtcatggactgaatttcc

SEQ ID NO: 63661 - DNA, 20 bp, synthetic construct
  misc_feature 1..20: note = Description of Artificial Sequence: Synthetic oligonucleotide
  misc_feature 1..20: note = Target: SCN10A; (+) strand; PAM type: YTN; PAM sequence: CTG
  source 1..20: mol_type = other DNA
aatttccacttcatattgca

SEQ ID NO: 63662 - DNA, 20 bp, synthetic construct
  misc_feature 1..20: note = Description of Artificial Sequence: Synthetic oligonucleotide
  misc_feature 1..20: note = Target: SCN10A; (+) strand; PAM type: YTN; PAM sequence: TTT
  source 1..20: mol_type = other DNA
ccacttcatattgcatacta

SEQ ID NO: 63663 - DNA, 20 bp, synthetic construct
  misc_feature 1..20: note = Description of Artificial Sequence: Synthetic oligonucleotide
  misc_feature 1..20: note = Target: SCN10A; (+) strand; PAM type: YTN; PAM sequence: TTC
  source 1..20: mol_type = other DNA
cacttcatattgcatactaa

SEQ ID NO: 63664 - DNA, 20 bp, synthetic construct
  misc_feature 1..20: note = Description of Artificial Sequence: Synthetic oligonucleotide
  misc_feature 1..20: note = Target: SCN10A; (+) strand; PAM type: YTN; PAM sequence: CTT
  source 1..20: mol_type = other DNA
catattgcatactaactccc

SEQ ID NO: 63665 - DNA, 20 bp, synthetic construct
  misc_feature 1..20: note = Description of Artificial Sequence: Synthetic oligonucleotide
  misc_feature 1..20: note = Target: SCN10A; (+) strand; PAM type: YTN; PAM sequence: TTC
  source 1..20: mol_type = other DNA
atattgcatactaactcccc

SEQ ID NO: 63666 - DNA, 20 bp, synthetic construct
  misc_feature 1..20: note = Description of Artificial Sequence: Synthetic oligonucleotide
  misc_feature 1..20: note = Target: SCN10A; (+) strand; PAM type: YTN; PAM sequence: TTG
  source 1..20: mol_type = other DNA
catactaactccccccagat

SEQ ID NO: 63667 - DNA, 20 bp, synthetic construct
  misc_feature 1..20: note = Description of Artificial Sequence: Synthetic oligonucleotide
  misc_feature 1..20: note = Target: SCN10A; (+) strand; PAM type: YTN; PAM sequence: CTA
  source 1..20: mol_type = other DNA
actccccccagatttgcata

SEQ ID NO: 63668 - DNA, 20 bp, synthetic construct
  misc_feature 1..20: note = Description of Artificial Sequence: Synthetic oligonucleotide
  misc_feature 1..20: note = Target: SCN10A; (+) strand; PAM type: YTN; PAM sequence: CTC
  source 1..20: mol_type = other DNA
cccccagatttgcatatgca

SEQ ID NO: 63669 - DNA, 20 bp, synthetic construct
  misc_feature 1..20: note = Description of Artificial Sequence: Synthetic oligonucleotide
  misc_feature 1..20: note = Target: SCN10A; (+) strand; PAM type: YTN; PAM sequence: TTT
  source 1..20: mol_type = other DNA
gcatatgcaacccatgagta

SEQ ID NO: 63670 - DNA, 20 bp, synthetic construct
  misc_feature 1..20: note = Description of Artificial Sequence: Synthetic oligonucleotide
  misc_feature 1..20: note = Target: SCN10A; (+) strand; PAM type: YTN; PAM sequence: TTG
  source 1..20: mol_type = other DNA
catatgcaacccatgagtaa

SEQ ID NO: 63671 - DNA, 20 bp, synthetic construct
  misc_feature 1..20: note = Description of Artificial Sequence: Synthetic oligonucleotide
  misc_feature 1..20: note = Target: SCN10A; (+) strand; PAM type: YTN; PAM sequence: CTG
  source 1..20: mol_type = other DNA
tgcaggcccatggactctcc

SEQ ID NO: 63672 - DNA, 20 bp, synthetic construct
  misc_feature 1..20: note = Description of Artificial Sequence: Synthetic oligonucleotide
  misc_feature 1..20: note = Target: SCN10A; (+) strand; PAM type: YTN; PAM sequence: CTC
  source 1..20: mol_type = other DNA
tccaaacctcccctttcctt

SEQ ID NO: 63673 - DNA, 20 bp, synthetic construct
  misc_feature 1..20: note = Description of Artificial Sequence: Synthetic oligonucleotide
  misc_feature 1..20: note = Target: SCN10A; (+) strand; PAM type: YTN; PAM sequence: CTC
  source 1..20: mol_type = other DNA
caaacctcccctttccttcc

SEQ ID NO: 63674 - DNA, 20 bp, synthetic construct
  misc_feature 1..20: note = Description of Artificial Sequence: Synthetic oligonucleotide
  misc_feature 1..20: note = Target: SCN10A; (+) strand; PAM type: YTN; PAM sequence: CTC
  source 1..20: mol_type = other DNA
ccctttccttccaccaatca

SEQ ID NO: 63675 - DNA, 20 bp, synthetic construct
  misc_feature 1..20: note = Description of Artificial Sequence: Synthetic oligonucleotide
  misc_feature 1..20: note = Target: SCN10A; (+) strand; PAM type: YTN; PAM sequence: CTT
  source 1..20: mol_type = other DNA
tccttccaccaatcacctgc

SEQ ID NO: 63676 - DNA, 20 bp, synthetic construct
  misc_feature 1..20: note = Description of Artificial Sequence: Synthetic oligonucleotide
  misc_feature 1..20: note = Target: SCN10A; (+) strand; PAM type: YTN; PAM sequence: TTT
  source 1..20: mol_type = other DNA
ccttccaccaatcacctgca

SEQ ID NO: 63677 - DNA, 20 bp, synthetic construct
  misc_feature 1..20: note = Description of Artificial Sequence: Synthetic oligonucleotide
  misc_feature 1..20: note = Target: SCN10A; (+) strand; PAM type: YTN; PAM sequence: TTC
  source 1..20: mol_type = other DNA
cttccaccaatcacctgcaa

SEQ ID NO: 63678 - DNA, 20 bp, synthetic construct
  misc_feature 1..20: note = Description of Artificial Sequence: Synthetic oligonucleotide
  misc_feature 1..20: note = Target: SCN10A; (+) strand; PAM type: YTN; PAM sequence: CTT
  source 1..20: mol_type = other DNA
ccaccaatcacctgcaaatc

SEQ ID NO: 63679 - DNA, 20 bp, synthetic construct
  misc_feature 1..20: note = Description of Artificial Sequence: Synthetic oligonucleotide
  misc_feature 1..20: note = Target: SCN10A; (+) strand; PAM type: YTN; PAM sequence: TTC
  source 1..20: mol_type = other DNA
caccaatcacctgcaaatcc

SEQ ID NO: 63680 - DNA, 20 bp, synthetic construct
  misc_feature 1..20: note = Description of Artificial Sequence: Synthetic oligonucleotide
  misc_feature 1..20: note = Target: SCN10A; (+) strand; PAM type: YTN; PAM sequence: CTG
  source 1..20: mol_type = other DNA
caaatcccggtatccaccca

SEQ ID NO: 63681 - DNA, 20 bp, synthetic construct
  misc_feature 1..20: note = Description of Artificial Sequence: Synthetic oligonucleotide
  misc_feature 1..20: note = Target: SCN10A; (+) strand; PAM type: YTN; PAM sequence: CTA
  source 1..20: mol_type = other DNA
aacattttctaataaaaata

SEQ ID NO: 63682 - DNA, 20 bp, synthetic construct
  misc_feature 1..20: note = Description of Artificial Sequence: Synthetic oligonucleotide
  misc_feature 1..20: note = Target: SCN10A; (+) strand; PAM type: YTN; PAM sequence: TTT
  source 1..20: mol_type = other DNA
tctaataaaaatactgcctt

SEQ ID NO: 63683 - DNA, 20 bp, synthetic construct
  misc_feature 1..20: note = Description of Artificial Sequence: Synthetic oligonucleotide
  misc_feature 1..20: note = Target: SCN10A; (+) strand; PAM type: YTN; PAM sequence: TTT
  source 1..20: mol_type = other DNA
ctaataaaaatactgccttg

SEQ ID NO: 63684 - DNA, 20 bp, synthetic construct
  misc_feature 1..20: note = Description of Artificial Sequence: Synthetic oligonucleotide
  misc_feature 1..20: note = Target: SCN10A; (+) strand; PAM type: YTN; PAM sequence: TTC
  source 1..20: mol_type = other DNA
taataaaaatactgccttga

SEQ ID NO: 63685 - DNA, 20 bp, synthetic construct
  misc_feature 1..20: note = Description of Artificial Sequence: Synthetic oligonucleotide
  misc_feature 1..20: note = Target: SCN10A; (+) strand; PAM type: YTN; PAM sequence: CTA
  source 1..20: mol_type = other DNA
ataaaaatactgccttgaag

SEQ ID NO: 63686 - DNA, 20 bp, synthetic construct
  misc_feature 1..20: note = Description of Artificial Sequence: Synthetic oligonucleotide
  misc_feature 1..20: note = Target: SCN10A; (+) strand; PAM type: YTN; PAM sequence: CTG
  source 1..20: mol_type = other DNA
ccttgaagacagcacaggga

SEQ ID NO: 63687 - DNA, 20 bp, synthetic construct
  misc_feature 1..20: note = Description of Artificial Sequence: Synthetic oligonucleotide
  misc_feature 1..20: note = Target: SCN10A; (+) strand; PAM type: YTN; PAM sequence: CTT
  source 1..20: mol_type = other DNA
gaagacagcacagggagaca

SEQ ID NO: 63688 - DNA, 20 bp, synthetic construct
  misc_feature 1..20: note = Description of Artificial Sequence: Synthetic oligonucleotide
  misc_feature 1..20: note = Target: SCN10A; (+) strand; PAM type: YTN; PAM sequence: TTG
  source 1..20: mol_type = other DNA
aagacagcacagggagacag

SEQ ID NO: 63689 - DNA, 20 bp, synthetic construct
  misc_feature 1..20: note = Description of Artificial Sequence: Synthetic oligonucleotide
  misc_feature 1..20: note = Target: SCN10A; (+) strand; PAM type: YTN; PAM sequence: CTG
  source 1..20: mol_type = other DNA
agcttgacctcctgtcttct

SEQ ID NO: 63690 - DNA, 20 bp, synthetic construct
  misc_feature 1..20: note = Description of Artificial Sequence: Synthetic oligonucleotide
  misc_feature 1..20: note = Target: SCN10A; (+) strand; PAM type: YTN; PAM sequence: CTT
  source 1..20: mol_type = other DNA
gacctcctgtcttcttgcca

SEQ ID NO: 63691 - DNA, 20 bp, synthetic construct
  misc_feature 1..20: note = Description of Artificial Sequence: Synthetic oligonucleotide
  misc_feature 1..20: note = Target: SCN10A; (+) strand; PAM type: YTN; PAM sequence: TTG
  source 1..20: mol_type = other DNA
acctcctgtcttcttgccag

SEQ ID NO: 63692 - DNA, 20 bp, synthetic construct
  misc_feature 1..20: note = Description of Artificial Sequence: Synthetic oligonucleotide
  misc_feature 1..20: note = Target: SCN10A; (+) strand; PAM type: YTN; PAM sequence: CTC
  source 1..20: mol_type = other DNA
ctgtcttcttgccagccagc

SEQ ID NO: 63693 - DNA, 20 bp, synthetic construct
  misc_feature 1..20: note = Description of Artificial Sequence: Synthetic oligonucleotide
  misc_feature 1..20: note = Target: SCN10A; (+) strand; PAM type: YTN; PAM sequence: CTG
  source 1..20: mol_type = other DNA
tcttcttgccagccagcttg

SEQ ID NO: 63694 - DNA, 20 bp, synthetic construct
  misc_feature 1..20: note = Description of Artificial Sequence: Synthetic oligonucleotide
  misc_feature 1..20: note = Target: SCN10A; (+) strand; PAM type: YTN; PAM sequence: CTT
  source 1..20: mol_type = other DNA
cttgccagccagcttgcagt

SEQ ID NO: 63695 - DNA, 20 bp, synthetic construct
  misc_feature 1..20: note = Description of Artificial Sequence: Synthetic oligonucleotide
  misc_feature 1..20: note = Target: SCN10A; (+) strand; PAM type: YTN; PAM sequence: TTC
  source 1..20: mol_type = other DNA
ttgccagccagcttgcagta

SEQ ID NO: 63696 - DNA, 20 bp, synthetic construct
  misc_feature 1..20: note = Description of Artificial Sequence: Synthetic oligonucleotide
  misc_feature 1..20: note = Target: SCN10A; (+) strand; PAM type: YTN; PAM sequence: CTT
  source 1..20: mol_type = other DNA
gccagccagcttgcagtatt

SEQ ID NO: 63697 - DNA, 20 bp, synthetic construct
  misc_feature 1..20: note = Description of Artificial Sequence: Synthetic oligonucleotide
  misc_feature 1..20: note = Target: SCN10A; (+) strand; PAM type: YTN; PAM sequence: TTG
  source 1..20: mol_type = other DNA
ccagccagcttgcagtatta

SEQ ID NO: 63698 - DNA, 20 bp, synthetic construct
  misc_feature 1..20: note = Description of Artificial Sequence: Synthetic oligonucleotide
  misc_feature 1..20: note = Target: SCN10A; (+) strand; PAM type: YTN; PAM sequence: CTT
  source 1..20: mol_type = other DNA
gcagtattaagcttttcttt

SEQ ID NO: 63699 - DNA, 20 bp, synthetic construct
  misc_feature 1..20: note = Description of Artificial Sequence: Synthetic oligonucleotide
  misc_feature 1..20: note = Target: SCN10A; (+) strand; PAM type: YTN; PAM sequence: TTG
  source 1..20: mol_type = other DNA
cagtattaagcttttctttt

SEQ ID NO: 63700 - DNA, 20 bp, synthetic construct
  misc_feature 1..20: note = Description of Artificial Sequence: Synthetic oligonucleotide
  misc_feature 1..20: note = Target: SCN10A; (+) strand; PAM type: YTN; PAM sequence: TTA
  source 1..20: mol_type = other DNA
agcttttcttttctcaaaag

SEQ ID NO: 63701 - DNA, 20 bp, synthetic construct
  misc_feature 1..20: note = Description of Artificial Sequence: Synthetic oligonucleotide
  misc_feature 1..20: note = Target: SCN10A; (+) strand; PAM type: YTN; PAM sequence: CTT
  source 1..20: mol_type = other DNA
ttcttttctcaaaagcctgg

SEQ ID NO: 63702 - DNA, 20 bp, synthetic construct
  misc_feature 1..20: note = Description of Artificial Sequence: Synthetic oligonucleotide
  misc_feature 1..20: note = Target: SCN10A; (+) strand; PAM type: YTN; PAM sequence: TTT
  source 1..20: mol_type = other DNA
tcttttctcaaaagcctggt

SEQ ID NO: 63703 - DNA, 20 bp, synthetic construct
  misc_feature 1..20: note = Description of Artificial Sequence: Synthetic oligonucleotide
  misc_feature 1..20: note = Target: SCN10A; (+) strand; PAM type: YTN; PAM sequence: TTT
  source 1..20: mol_type = other DNA
cttttctcaaaagcctggtg

SEQ ID NO: 63704 - DNA, 20 bp, synthetic construct
  misc_feature 1..20: note = Description of Artificial Sequence: Synthetic oligonucleotide
  misc_feature 1..20: note = Target: SCN10A; (+) strand; PAM type: YTN; PAM sequence: TTC
  source 1..20: mol_type = other DNA
ttttctcaaaagcctggtgt

SEQ ID NO: 63705 - DNA, 20 bp, synthetic construct
  misc_feature 1..20: note = Description of Artificial Sequence: Synthetic oligonucleotide
  misc_feature 1..20: note = Target: SCN10A; (+) strand; PAM type: YTN; PAM sequence: CTT
  source 1..20: mol_type = other DNA
ttctcaaaagcctggtgtcc

SEQ ID NO: 63706 - DNA, 20 bp, synthetic construct
  misc_feature 1..20: note = Description of Artificial Sequence: Synthetic oligonucleotide
  misc_feature 1..20: note = Target: SCN10A; (+) strand; PAM type: YTN; PAM sequence: TTT
  source 1..20: mol_type = other DNA
tctcaaaagcctggtgtcct

SEQ ID NO: 63707 - DNA, 20 bp, synthetic construct
  misc_feature 1..20: note = Description of Artificial Sequence: Synthetic oligonucleotide
  misc_feature 1..20: note = Target: SCN10A; (+) strand; PAM type: YTN; PAM sequence: TTT
  source 1..20: mol_type = other DNA
ctcaaaagcctggtgtcctc

SEQ ID NO: 63708 - DNA, 20 bp, synthetic construct
  misc_feature 1..20: note = Description of Artificial Sequence: Synthetic oligonucleotide
  misc_feature 1..20: note = Target: SCN10A; (+) strand; PAM type: YTN; PAM sequence: TTC
  source 1..20: mol_type = other DNA
tcaaaagcctggtgtcctcg

SEQ ID NO: 63709 - DNA, 20 bp, synthetic construct
  misc_feature 1..20: note = Description of Artificial Sequence: Synthetic oligonucleotide
  misc_feature 1..20: note = Target: SCN10A; (+) strand; PAM type: YTN; PAM sequence: CTC
  source 1..20: mol_type = other DNA
aaaagcctggtgtcctcgtc

SEQ ID NO: 63710 - DNA, 20 bp, synthetic construct
  misc_feature 1..20: note = Description of Artificial Sequence: Synthetic oligonucleotide
  misc_feature 1..20: note = Target: SCN10A; (+) strand; PAM type: YTN; PAM sequence: CTG
  source 1..20: mol_type = other DNA
gtgtcctcgtcttggcttcc

SEQ ID NO: 63711 - DNA, 20 bp, synthetic construct
  misc_feature 1..20: note = Description of Artificial Sequence: Synthetic oligonucleotide
  misc_feature 1..20: note = Target: SCN10A; (+) strand; PAM type: YTN; PAM sequence: CTC
  source 1..20: mol_type = other DNA
gtcttggcttccaaagtcat

SEQ ID NO: 63712 - DNA, 20 bp, synthetic construct
  misc_feature 1..20: note = Description of Artificial Sequence: Synthetic oligonucleotide
  misc_feature 1..20: note = Target: SCN10A; (+) strand; PAM type: YTN; PAM sequence: CTT
  source 1..20: mol_type = other DNA
ggcttccaaagtcatagtat

SEQ ID NO: 63713 - DNA, 20 bp, synthetic construct
  misc_feature 1..20: note = Description of Artificial Sequence: Synthetic oligonucleotide
  misc_feature 1..20: note = Target: SCN10A; (+) strand; PAM type: YTN; PAM sequence: TTG
  source 1..20: mol_type = other DNA
gcttccaaagtcatagtatt

SEQ ID NO: 63714 - DNA, 20 bp, synthetic construct
  misc_feature 1..20: note = Description of Artificial Sequence: Synthetic oligonucleotide
  misc_feature 1..20: note = Target: SCN10A; (+) strand; PAM type: YTN; PAM sequence: CTT
  source 1..20: mol_type = other DNA
ccaaagtcatagtattggct

SEQ ID NO: 63715 - DNA, 20 bp, synthetic construct
  misc_feature 1..20: note = Description of Artificial Sequence: Synthetic oligonucleotide
  misc_feature 1..20: note = Target: SCN10A; (+) strand; PAM type: YTN; PAM sequence: TTC
  source 1..20: mol_type = other DNA
caaagtcatagtattggctt

SEQ ID NO: 63716 - DNA, 20 bp, synthetic construct
  misc_feature 1..20: note = Description of Artificial Sequence: Synthetic oligonucleotide
  misc_feature 1..20: note = Target: SCN10A; (+) strand; PAM type: YTN; PAM sequence: TTG
  source 1..20: mol_type = other DNA
gcttctagagcattgggcag

SEQ ID NO: 63717 - DNA, 20 bp, synthetic construct
  misc_feature 1..20: note = Description of Artificial Sequence: Synthetic oligonucleotide
  misc_feature 1..20: note = Target: SCN10A; (+) strand; PAM type: YTN; PAM sequence: CTT
  source 1..20: mol_type = other DNA
ctagagcattgggcagtgag

SEQ ID NO: 63718 - DNA, 20 bp, synthetic construct
  misc_feature 1..20: note = Description of Artificial Sequence: Synthetic oligonucleotide
  misc_feature 1..20: note = Target: SCN10A; (+) strand; PAM type: YTN; PAM sequence: TTC
  source 1..20: mol_type = other DNA
tagagcattgggcagtgagc

SEQ ID NO: 63719 - DNA, 20 bp, synthetic construct
  misc_feature 1..20: note = Description of Artificial Sequence: Synthetic oligonucleotide
  misc_feature 1..20: note = Target: SCN10A; (+) strand; PAM type: YTN; PAM sequence: CTA
  source 1..20: mol_type = other DNA
gagcattgggcagtgagccc

SEQ ID NO: 63720 - DNA, 20 bp, synthetic construct
  misc_feature 1..20: note = Description of Artificial Sequence: Synthetic oligonucleotide
  misc_feature 1..20: note = Target: SCN10A; (+) strand; PAM type: YTN; PAM sequence: TTG
  source 1..20: mol_type = other DNA
ggcagtgagcccccactggc

SEQ ID NO: 63721 - DNA, 20 bp, synthetic construct
  misc_feature 1..20: note = Description of Artificial Sequence: Synthetic oligonucleotide
  misc_feature 1..20: note = Target: SCN10A; (+) strand; PAM type: YTN; PAM sequence: CTG
  source 1..20: mol_type = other DNA
gctctataacaaaggtataa

SEQ ID NO: 63722 - DNA, 20 bp, synthetic construct
  misc_feature 1..20: note = Description of Artificial Sequence: Synthetic oligonucleotide
  misc_feature 1..20: note = Target: SCN10A; (+) strand; PAM type: YTN; PAM sequence: CTC
  source 1..20: mol_type = other DNA
tataacaaaggtataaagag

SEQ ID NO: 63723 - DNA, 20 bp, synthetic construct
  misc_feature 1..20: note = Description of Artificial Sequence: Synthetic oligonucleotide
  misc_feature 1..20: note = Target: SCN10A; (+) strand; PAM type: YTN; PAM sequence: CTA
  source 1..20: mol_type = other DNA
taacaaaggtataaagagca

SEQ ID NO: 63724 - DNA, 20 bp, synthetic construct
  misc_feature 1..20: note = Description of Artificial Sequence: Synthetic oligonucleotide
  misc_feature 1..20: note = Target: SCN10A; (+) strand; PAM type: YTN; PAM sequence: CTA
  source 1..20: mol_type = other DNA
agcatgagagtgaatctaaa

SEQ ID NO: 63725 - DNA, 20 bp, synthetic construct
  misc_feature 1..20: note = Description of Artificial Sequence: Synthetic oligonucleotide
  misc_feature 1..20: note = Target: SCN10A; (+) strand; PAM type: YTN; PAM sequence: CTA
  source 1..20: mol_type = other DNA
aataaacattgagtggacac

SEQ ID NO: 63726 - DNA, 20 bp, synthetic construct
  misc_feature 1..20: note = Description of Artificial Sequence: Synthetic oligonucleotide
  misc_feature 1..20: note = Target: SCN10A; (+) strand; PAM type: YTN; PAM sequence: TTG
  source 1..20: mol_type = other DNA
agtggacacaacaacaatgt

SEQ ID NO: 63727 - DNA, 20 bp, synthetic construct
  misc_feature 1..20: note = Description of Artificial Sequence: Synthetic oligonucleotide
  misc_feature 1..20: note = Target: SCN10A; (+) strand; PAM type: YTN; PAM sequence: CTT
  source 1..20: mol_type = other DNA
gtgagatgtggaagagactg

SEQ ID NO: 63728 - DNA, 20 bp, synthetic construct
  misc_feature 1..20: note = Description of Artificial Sequence: Synthetic oligonucleotide
  misc_feature 1..20: note = Target: SCN10A; (+) strand; PAM type: YTN; PAM sequence: TTG
  source 1..20: mol_type = other DNA
tgagatgtggaagagactgg

SEQ ID NO: 63729 - DNA, 20 bp, synthetic construct
  misc_feature 1..20: note = Description of Artificial Sequence: Synthetic oligonucleotide
  misc_feature 1..20: note = Target: SCN10A; (+) strand; PAM type: YTN; PAM sequence: CTG
  source 1..20: mol_type = other DNA
gtcatatagtctccattcac

SEQ ID NO: 63730 - DNA, 20 bp, synthetic construct
  misc_feature 1..20: note = Description of Artificial Sequence: Synthetic oligonucleotide
  misc_feature 1..20: note = Target: SCN10A; (+) strand; PAM type: YTN; PAM sequence: CTC
  source 1..20: mol_type = other DNA
cattcacttttctcctccca

SEQ ID NO: 63731 - DNA, 20 bp, synthetic construct
  misc_feature 1..20: note = Description of Artificial Sequence: Synthetic oligonucleotide
  misc_feature 1..20: note = Target: SCN10A; (+) strand; PAM type: YTN; PAM sequence: TTC
  source 1..20: mol_type = other DNA
acttttctcctcccagacac

SEQ ID NO: 63732 - DNA, 20 bp, synthetic construct
  misc_feature 1..20: note = Description of Artificial Sequence: Synthetic oligonucleotide
  misc_feature 1..20: note = Target: SCN10A; (+) strand; PAM type: YTN; PAM sequence: CTT
  source 1..20: mol_type = other DNA
ttctcctcccagacacaacg

SEQ ID NO: 63733 - DNA, 20 bp, synthetic construct
  misc_feature 1..20: note = Description of Artificial Sequence: Synthetic oligonucleotide
  misc_feature 1..20: note = Target: SCN10A; (+) strand; PAM type: YTN; PAM sequence: TTT
  source 1..20: mol_type = other DNA
tctcctcccagacacaacgg

SEQ ID NO: 63734 - DNA, 20 bp, synthetic construct
  misc_feature 1..20: note = Description of Artificial Sequence: Synthetic oligonucleotide
  misc_feature 1..20: note = Target: SCN10A; (+) strand; PAM type: YTN; PAM sequence: TTT
  source 1..20: mol_type = other DNA
ctcctcccagacacaacgga

SEQ ID NO: 63735 - DNA, 20 bp, synthetic construct
  misc_feature 1..20: note = Description of Artificial Sequence: Synthetic oligonucleotide
  misc_feature 1..20: note = Target: SCN10A; (+) strand; PAM type: YTN; PAM sequence: TTC
  source 1..20: mol_type = other DNA
tcctcccagacacaacggaa

SEQ ID NO: 63736 - DNA, 20 bp, synthetic construct
  misc_feature 1..20: note = Description of Artificial Sequence: Synthetic oligonucleotide
  misc_feature 1..20: note = Target: SCN10A; (+) strand; PAM type: YTN; PAM sequence: CTC
  source 1..20: mol_type = other DNA
ctcccagacacaacggaaga

SEQ ID NO: 63737 - DNA, 20 bp, synthetic construct
  misc_feature 1..20: note = Description of Artificial Sequence: Synthetic oligonucleotide
  misc_feature 1..20: note = Target: SCN10A; (+) strand; PAM type: YTN; PAM sequence: CTC
  source 1..20: mol_type = other DNA
ccagacacaacggaagactg

SEQ ID NO: 63738 - DNA, 20 bp, synthetic construct
  misc_feature 1..20: note = Description of Artificial Sequence: Synthetic oligonucleotide
  misc_feature 1..20: note = Target: SCN10A; (+) strand; PAM type: YTN; PAM sequence: CTG
  source 1..20: mol_type = other DNA
ttttccagttttgcttgcaa

SEQ ID NO: 63739 - DNA, 20 bp, synthetic construct
  misc_feature 1..20: note = Description of Artificial Sequence: Synthetic oligonucleotide
  misc_feature 1..20: note = Target: SCN10A; (+) strand; PAM type: YTN; PAM sequence: TTT
  source 1..20: mol_type = other DNA
tccagttttgcttgcaaata

SEQ ID NO: 63740 - DNA, 20 bp, synthetic construct
  misc_feature 1..20: note = Description of Artificial Sequence: Synthetic oligonucleotide
  misc_feature 1..20: note = Target: SCN10A; (+) strand; PAM type: YTN; PAM sequence: TTT
  source 1..20: mol_type = other DNA
ccagttttgcttgcaaatag

SEQ ID NO: 63741 - DNA, 20 bp, synthetic construct
  misc_feature 1..20: note = Description of Artificial Sequence: Synthetic oligonucleotide
  misc_feature 1..20: note = Target: SCN10A; (+) strand; PAM type: YTN; PAM sequence: TTC
  source 1..20: mol_type = other DNA
cagttttgcttgcaaatagt

SEQ ID NO: 63742 - DNA, 20 bp, synthetic construct
  misc_feature 1..20: note = Description of Artificial Sequence: Synthetic oligonucleotide
  misc_feature 1..20: note = Target: SCN10A; (+) strand; PAM type: YTN; PAM sequence: TTT
  source 1..20: mol_type = other DNA
tgcttgcaaatagttggggt

SEQ ID NO: 63743 - DNA, 20 bp, synthetic construct
  misc_feature 1..20: note = Description of Artificial Sequence: Synthetic oligonucleotide
  misc_feature 1..20: note = Target: SCN10A; (+) strand; PAM type: YTN; PAM sequence: TTT
  source 1..20: mol_type = other DNA
gcttgcaaatagttggggtc

SEQ ID NO: 63744 - DNA, 20 bp, synthetic construct
  misc_feature 1..20: note = Description of Artificial Sequence: Synthetic oligonucleotide
  misc_feature 1..20: note = Target: SCN10A; (+) strand; PAM type: YTN; PAM sequence: TTG
  source 1..20: mol_type = other DNA
cttgcaaatagttggggtca

SEQ ID NO: 63745 - DNA, 20 bp, synthetic construct
  misc_feature 1..20: note = Description of Artificial Sequence: Synthetic oligonucleotide
  misc_feature 1..20: note = Target: SCN10A; (+) strand; PAM type: YTN; PAM sequence: CTT
  source 1..20: mol_type = other DNA
gcaaatagttggggtcatgt

SEQ ID NO: 63746 - DNA, 20 bp, synthetic construct
  misc_feature 1..20: note = Description of Artificial Sequence: Synthetic oligonucleotide
  misc_feature 1..20: note = Target: SCN10A; (+) strand; PAM type: YTN; PAM sequence: TTG
  source 1..20: mol_type = other DNA
caaatagttggggtcatgtt

SEQ ID NO: 63747 - DNA, 20 bp, synthetic construct
  misc_feature 1..20: note = Description of Artificial Sequence: Synthetic oligonucleotide
  misc_feature 1..20: note = Target: SCN10A; (+) strand; PAM type: YTN; PAM sequence: TTG
  source 1..20: mol_type = other DNA
gggtcatgttagtgggttct

SEQ ID NO: 63748 - DNA, 20 bp, synthetic construct
  misc_feature 1..20: note = Description of Artificial Sequence: Synthetic oligonucleotide
  misc_feature 1..20: note = Target: SCN10A; (+) strand; PAM type: YTN; PAM sequence: TTA
  source 1..20: mol_type = other DNA
gtgggttctgtctggtggaa

SEQ ID NO: 63749 - DNA, 20 bp, synthetic construct
  misc_feature 1..20: note = Description of Artificial Sequence: Synthetic oligonucleotide
  misc_feature 1..20: note = Target: SCN10A; (+) strand; PAM type: YTN; PAM sequence: TTC
  source 1..20: mol_type = other DNA
tgtctggtggaatggagatg

SEQ ID NO: 63750 - DNA, 20 bp, synthetic construct
  misc_feature 1..20: note = Description of Artificial Sequence: Synthetic oligonucleotide
  misc_feature 1..20: note = Target: SCN10A; (+) strand; PAM type: YTN; PAM sequence: CTG
  source 1..20: mol_type = other DNA
tctggtggaatggagatgga

SEQ ID NO: 63751 - DNA, 20 bp, synthetic construct
  misc_feature 1..20: note = Description of Artificial Sequence: Synthetic oligonucleotide
  misc_feature 1..20: note = Target: SCN10A; (+) strand; PAM type: YTN; PAM sequence: CTG
  source 1..20: mol_type = other DNA
gtggaatggagatggagaca

SEQ ID NO: 63752 - DNA, 20 bp, synthetic construct
  misc_feature 1..20: note = Description of Artificial Sequence: Synthetic oligonucleotide
  misc_feature 1..20: note = Target: SCN10A; (+) strand; PAM type: YTN; PAM sequence: CTT
  source 1..20: mol_type = other DNA
ttaggcatagccttaaaccc

SEQ ID NO: 63753 - DNA, 20 bp, synthetic construct
  misc_feature 1..20: note = Description of Artificial Sequence: Synthetic oligonucleotide
  misc_feature 1..20: note = Target: SCN10A; (+) strand; PAM type: YTN; PAM sequence: TTT
  source 1..20: mol_type = other DNA
taggcatagccttaaacccc

SEQ ID NO: 63754 - DNA, 20 bp, synthetic construct
  misc_feature 1..20: note = Description of Artificial Sequence: Synthetic oligonucleotide
  misc_feature 1..20: note = Target: SCN10A; (+) strand; PAM type: YTN; PAM sequence: TTT
  source 1..20: mol_type = other DNA
aggcatagccttaaaccccc

SEQ ID NO: 63755 - DNA, 20 bp, synthetic construct
  misc_feature 1..20: note = Description of Artificial Sequence: Synthetic oligonucleotide
  misc_feature 1..20: note = Target: SCN10A; (+) strand; PAM type: YTN; PAM sequence: TTA
  source 1..20: mol_type = other DNA
ggcatagccttaaaccccct

SEQ ID NO: 63756 - DNA, 20 bp, synthetic construct
  misc_feature 1..20: note = Description of Artificial Sequence: Synthetic oligonucleotide
  misc_feature 1..20: note = Target: SCN10A; (+) strand; PAM type: YTN; PAM sequence: CTT
  source 1..20: mol_type = other DNA
aaaccccctgaactttttct

SEQ ID NO: 63757 - DNA, 20 bp, synthetic construct
  misc_feature 1..20: note = Description of Artificial Sequence: Synthetic oligonucleotide
  misc_feature 1..20: note = Target: SCN10A; (+) strand; PAM type: YTN; PAM sequence: TTA
  source 1..20: mol_type = other DNA
aaccccctgaactttttctt

SEQ ID NO: 63758 - DNA, 20 bp, synthetic construct
  misc_feature 1..20: note = Description of Artificial Sequence: Synthetic oligonucleotide
  misc_feature 1..20: note = Target: SCN10A; (+) strand; PAM type: YTN; PAM sequence: CTG
  source 1..20: mol_type = other DNA
aactttttctttccctttca

SEQ ID NO: 63759 - DNA, 20 bp, synthetic construct
  misc_feature 1..20: note = Description of Artificial Sequence: Synthetic oligonucleotide
  misc_feature 1..20: note = Target: SCN10A; (+) strand; PAM type: YTN; PAM sequence: CTT
  source 1..20: mol_type = other DNA
tttctttccctttcatgttc

SEQ ID NO: 63760 - DNA, 20 bp, synthetic construct
  misc_feature 1..20: note = Description of Artificial Sequence: Synthetic oligonucleotide
  misc_feature 1..20: note = Target: SCN10A; (+) strand; PAM type: YTN; PAM sequence: TTT
  source 1..20: mol_type = other DNA
ttctttccctttcatgttca

SEQ ID NO: 63761 - DNA, 20 bp, synthetic construct
  misc_feature 1..20: note = Description of Artificial Sequence: Synthetic oligonucleotide
  misc_feature 1..20: note = Target: SCN10A; (+) strand; PAM type: YTN; PAM sequence: TTT
  source 1..20: mol_type = other DNA
tctttccctttcatgttcac

SEQ ID NO: 63762 - DNA, 20 bp, synthetic construct
  misc_feature 1..20: note = Description of Artificial Sequence: Synthetic oligonucleotide
  misc_feature 1..20: note = Target: SCN10A; (+) strand; PAM type: YTN; PAM sequence: TTT
  source 1..20: mol_type = other DNA
ctttccctttcatgttcacc

SEQ ID NO: 63763 - DNA, 20 bp, synthetic construct
  misc_feature 1..20: note = Description of Artificial Sequence: Synthetic oligonucleotide
  misc_feature 1..20: note = Target: SCN10A; (+) strand; PAM type: YTN; PAM sequence: TTC
  source 1..20: mol_type = other DNA
tttccctttcatgttcacca

SEQ ID NO: 63764 - DNA, 20 bp, synthetic construct
  misc_feature 1..20: note = Description of Artificial Sequence: Synthetic oligonucleotide
  misc_feature 1..20: note = Target: SCN10A; (+) strand; PAM type: YTN; PAM sequence: CTT
  source 1..20: mol_type = other DNA
tccctttcatgttcaccata

SEQ ID NO: 63765 - DNA, 20 bp, synthetic construct
  misc_feature 1..20: note = Description of Artificial Sequence: Synthetic oligonucleotide
  misc_feature 1..20: note = Target: SCN10A; (+) strand; PAM type: YTN; PAM sequence: TTT
  source 1..20: mol_type = other DNA
ccctttcatgttcaccataa

SEQ ID NO: 63766 - DNA, 20 bp, synthetic construct
  misc_feature 1..20: note = Description of Artificial Sequence: Synthetic oligonucleotide
  misc_feature 1..20: note = Target: SCN10A; (+) strand; PAM type: YTN; PAM sequence: TTC
  source 1..20: mol_type = other DNA
cctttcatgttcaccataaa

SEQ ID NO: 63767 - DNA, 20 bp, synthetic construct
  misc_feature 1..20: note = Description of Artificial Sequence: Synthetic oligonucleotide
  misc_feature 1..20: note = Target: SCN10A; (+) strand; PAM type: YTN; PAM sequence: CTT
  source 1..20: mol_type = other DNA
tcatgttcaccataaaggtc

SEQ ID NO: 63768 - DNA, 20 bp, synthetic construct
  misc_feature 1..20: note = Description of Artificial Sequence: Synthetic oligonucleotide
  misc_feature 1..20: note = Target: SCN10A; (+) strand; PAM type: YTN; PAM sequence: TTT
  source 1..20: mol_type = other DNA
catgttcaccataaaggtca

SEQ ID NO: 63769 - DNA, 20 bp, synthetic construct
  misc_feature 1..20: note = Description of Artificial Sequence: Synthetic oligonucleotide
  misc_feature 1..20: note = Target: SCN10A; (+) strand; PAM type: YTN; PAM sequence: TTC
  source 1..20: mol_type = other DNA
atgttcaccataaaggtcac

SEQ ID NO: 63770 - DNA, 20 bp, synthetic construct
  misc_feature 1..20: note = Description of Artificial Sequence: Synthetic oligonucleotide
  misc_feature 1..20: note = Target: SCN10A; (+) strand; PAM type: YTN; PAM sequence: TTC
  source 1..20: mol_type = other DNA
accataaaggtcactaactg

SEQ ID NO: 63771 - DNA, 20 bp, synthetic construct
  misc_feature 1..20: note = Description of Artificial Sequence: Synthetic oligonucleotide
  misc_feature 1..20: note = Target: SCN10A; (+) strand; PAM type: YTN; PAM sequence: CTA
  source 1..20: mol_type = other DNA
actgaagatggtgacatcac

SEQ ID NO: 63772 - DNA, 20 bp, synthetic construct
  misc_feature 1..20: note = Description of Artificial Sequence: Synthetic oligonucleotide
  misc_feature 1..20: note = Target: SCN10A; (+) strand; PAM type: YTN; PAM sequence: CTG
  source 1..20: mol_type = other DNA
aagatggtgacatcacgata

SEQ ID NO: 63773 - DNA, 20 bp, synthetic construct
  misc_feature 1..20: note = Description of Artificial Sequence: Synthetic oligonucleotide
  misc_feature 1..20: note = Target: SCN10A; (+) strand; PAM type: YTN; PAM sequence: CTA
  source 1..20: mol_type = other DNA
gatccttgaggcgctacttg

SEQ ID NO: 63774 - DNA, 20 bp, synthetic construct
  misc_feature 1..20: note = Description of Artificial Sequence: Synthetic oligonucleotide
  misc_feature 1..20: note = Target: SCN10A; (+) strand; PAM type: YTN; PAM sequence: CTT
  source 1..20: mol_type = other DNA
gaggcgctacttgaagtaga

SEQ ID NO: 63775 - DNA, 20 bp, synthetic construct
  misc_feature 1..20: note = Description of Artificial Sequence: Synthetic oligonucleotide
  misc_feature 1..20: note = Target: SCN10A; (+) strand; PAM type: YTN; PAM sequence: TTG
  source 1..20: mol_type = other DNA
aggcgctacttgaagtagac

SEQ ID NO: 63776 - DNA, 20 bp, synthetic construct
  misc_feature 1..20: note = Description of Artificial Sequence: Synthetic oligonucleotide
  misc_feature 1..20: note = Target: SCN10A; (+) strand; PAM type: YTN; PAM sequence: CTA
  source 1..20: mol_type = other DNA
cttgaagtagacactcccag

SEQ ID NO: 63777 - DNA, 20 bp, synthetic construct
  misc_feature 1..20: note = Description of Artificial Sequence: Synthetic oligonucleotide
  misc_feature 1..20: note = Target: SCN10A; (+) strand; PAM type: YTN; PAM sequence: CTT
  source 1..20: mol_type = other DNA
gaagtagacactcccaggag

SEQ ID NO: 63778 - DNA, 20 bp, synthetic construct
  misc_feature 1..20: note = Description of Artificial Sequence: Synthetic oligonucleotide
  misc_feature 1..20: note = Target: SCN10A; (+) strand; PAM type: YTN; PAM sequence: TTG
  source 1..20: mol_type = other DNA
aagtagacactcccaggaga

SEQ ID NO: 63779 - DNA, 20 bp, synthetic construct
  misc_feature 1..20: note = Description of Artificial Sequence: Synthetic oligonucleotide
  misc_feature 1..20: note = Target: SCN10A; (+) strand; PAM type: YTN; PAM sequence: CTC
  source 1..20: mol_type = other DNA
ccaggagagcttcccaacaa

SEQ ID NO: 63780 - DNA, 20 bp, synthetic construct
  misc_feature 1..20: note = Description of Artificial Sequence: Synthetic oligonucleotide
  misc_feature 1..20: note = Target: SCN10A; (+) strand; PAM type: YTN; PAM sequence: CTT
  source 1..20: mol_type = other DNA
cccaacaagcactgaatgtg

SEQ ID NO: 63781 - DNA, 20 bp, synthetic construct
  misc_feature 1..20: note = Description of Artificial Sequence: Synthetic oligonucleotide
  misc_feature 1..20: note = Target: SCN10A; (+) strand; PAM type: YTN; PAM sequence: TTC
  source 1..20: mol_type = other DNA
ccaacaagcactgaatgtgc

SEQ ID NO: 63782 - DNA, 20 bp, synthetic construct
  misc_feature 1..20: note = Description of Artificial Sequence: Synthetic oligonucleotide
  misc_feature 1..20: note = Target: SCN10A; (+) strand; PAM type: YTN; PAM sequence: CTG
  source 1..20: mol_type = other DNA
aatgtgctgtgagacataca

SEQ ID NO: 63783 - DNA, 20 bp, synthetic construct
  misc_feature 1..20: note = Description of Artificial Sequence: Synthetic oligonucleotide
  misc_feature 1..20: note = Target: SCN10A; (+) strand; PAM type: YTN; PAM sequence: CTG
  source 1..20: mol_type = other DNA
tgagacatacatctctatta

SEQ ID NO: 63784 - DNA, 20 bp, synthetic construct
  misc_feature 1..20: note = Description of Artificial Sequence: Synthetic oligonucleotide
  misc_feature 1..20: note = Target: SCN10A; (+) strand; PAM type: YTN; PAM sequence: CTC
  source 1..20: mol_type = other DNA
tattatgttaactcacagat

SEQ ID NO: 63785 - DNA, 20 bp, synthetic construct
  misc_feature 1..20: note = Description of Artificial Sequence: Synthetic oligonucleotide
  misc_feature 1..20: note = Target: SCN10A; (+) strand; PAM type: YTN; PAM sequence: CTA
  source 1..20: mol_type = other DNA
ttatgttaactcacagattt

SEQ ID NO: 63786 - DNA, 20 bp, synthetic construct
  misc_feature 1..20: note = Description of Artificial Sequence: Synthetic oligonucleotide
  misc_feature 1..20: note = Target: SCN10A; (+) strand; PAM type: YTN; PAM sequence: TTA
  source 1..20: mol_type = other DNA
tgttaactcacagatttaga

SEQ ID NO: 63787 - DNA, 20 bp, synthetic construct
  misc_feature 1..20: note = Description of Artificial Sequence: Synthetic oligonucleotide
  misc_feature 1..20: note = Target: SCN10A; (+) strand; PAM type: YTN; PAM sequence: TTA
  source 1..20: mol_type = other DNA
actcacagatttagagggta

SEQ ID NO: 63788 - DNA, 20 bp, synthetic construct
  misc_feature 1..20: note = Description of Artificial Sequence: Synthetic oligonucleotide
  misc_feature 1..20: note = Target: SCN10A; (+) strand; PAM type: YTN; PAM sequence: CTC
  source 1..20: mol_type = other DNA
acagatttagagggtatcac

SEQ ID NO: 63789 - DNA, 20 bp, synthetic construct
  misc_feature 1..20: note = Description of Artificial Sequence: Synthetic oligonucleotide
  misc_feature 1..20: note = Target: SCN10A; (+) strand; PAM type: YTN; PAM sequence: TTT
  source 1..20: mol_type = other DNA
agagggtatcactgcagcta

SEQ ID NO: 63790 - DNA, 20 bp, synthetic construct
  misc_feature 1..20: note = Description of Artificial Sequence: Synthetic oligonucleotide
  misc_feature 1..20: note = Target: SCN10A; (+) strand; PAM type: YTN; PAM sequence: TTA
  source 1..20: mol_type = other DNA
gagggtatcactgcagctag

SEQ ID NO: 63791 - DNA, 20 bp, synthetic construct
  misc_feature 1..20: note = Description of Artificial Sequence: Synthetic oligonucleotide
  misc_feature 1..20: note = Target: SCN10A; (+) strand; PAM type: YTN; PAM sequence: CTG
  source 1..20: mol_type = other DNA
cagctagttgtacttatctt

SEQ ID NO: 63792 - DNA, 20 bp, synthetic construct
  misc_feature 1..20: note = Description of Artificial Sequence: Synthetic oligonucleotide
  misc_feature 1..20: note = Target: SCN10A; (+) strand; PAM type: YTN; PAM sequence: CTA
  source 1..20: mol_type = other DNA
gttgtacttatcttgagtaa

SEQ ID NO: 63793 - DNA, 20 bp, synthetic construct
  misc_feature 1..20: note = Description of Artificial Sequence: Synthetic oligonucleotide
  misc_feature 1..20: note = Target: SCN10A; (+) strand; PAM type: YTN; PAM sequence: TTG
  source 1..20: mol_type = other DNA
tacttatcttgagtaatgga

SEQ ID NO: 63794 - DNA, 20 bp, synthetic construct
  misc_feature 1..20: note = Description of Artificial Sequence: Synthetic oligonucleotide
  misc_feature 1..20: note = Target: SCN10A; (+) strand; PAM type: YTN; PAM sequence: CTT
  source 1..20: mol_type = other DNA
atcttgagtaatggagaaat

SEQ ID NO: 63795 - DNA, 20 bp, synthetic construct
  misc_feature 1..20: note = Description of Artificial Sequence: Synthetic oligonucleotide
  misc_feature 1..20: note = Target: SCN10A; (+) strand; PAM type: YTN; PAM sequence: TTA
  source 1..20: mol_type = other DNA
tcttgagtaatggagaaatt

SEQ ID NO: 63796 - DNA, 20 bp, synthetic construct
  misc_feature 1..20: note = Description of Artificial Sequence: Synthetic oligonucleotide
  misc_feature 1..20: note = Target: SCN10A; (+) strand; PAM type: YTN; PAM sequence: CTT
  source 1..20: mol_type = other DNA
gagtaatggagaaattgctt

SEQ ID NO: 63797 - DNA, 20 bp, synthetic construct
  misc_feature 1..20: note = Description of Artificial Sequence: Synthetic oligonucleotide
  misc_feature 1..20: note = Target: SCN10A; (+) strand; PAM type: YTN; PAM sequence: TTG
  source 1..20: mol_type = other DNA
agtaatggagaaattgcttc

SEQ ID NO: 63798 - DNA, 20 bp, synthetic construct
  misc_feature 1..20: note = Description of Artificial Sequence: Synthetic oligonucleotide
  misc_feature 1..20: note = Target: SCN10A; (+) strand; PAM type: YTN; PAM sequence: TTG
  source 1..20: mol_type = other DNA
cttcattgaaaaaaggtatt

SEQ ID NO: 63799 - DNA, 20 bp, synthetic construct
  misc_feature 1..20: note = Description of Artificial Sequence: Synthetic oligonucleotide
  misc_feature 1..20: note = Target: SCN10A; (+) strand; PAM type: YTN; PAM sequence: CTT
  source 1..20: mol_type = other DNA
cattgaaaaaaggtattgcc

SEQ ID NO: 63800 - DNA, 20 bp, synthetic construct
  misc_feature 1..20: note = Description of Artificial Sequence: Synthetic oligonucleotide
  misc_feature 1..20: note = Target: SCN10A; (+) strand; PAM type: YTN; PAM sequence: TTC
  source 1..20: mol_type = other DNA
attgaaaaaaggtattgcct

SEQ ID NO: 63801 - DNA, 20 bp, synthetic construct
  misc_feature 1..20: note = Description of Artificial Sequence: Synthetic oligonucleotide
  misc_feature 1..20: note = Target: SCN10A; (+) strand; PAM type: YTN; PAM sequence: TTG
  source 1..20: mol_type = other DNA
aaaaaaggtattgccttttc

SEQ ID NO: 63802 - DNA, 20 bp, synthetic construct
  misc_feature 1..20: note = Description of Artificial Sequence: Synthetic oligonucleotide
  misc_feature 1..20: note = Target: SCN10A; (+) strand; PAM type: YTN; PAM sequence: TTG
  source 1..20: mol_type = other DNA
ccttttcaaaagcatcaact

SEQ ID NO: 63803 - DNA, 20 bp, synthetic construct
  misc_feature 1..20: note = Description of Artificial Sequence: Synthetic oligonucleotide
  misc_feature 1..20: note = Target: SCN10A; (+) strand; PAM type: YTN; PAM sequence: CTT
  source 1..20: mol_type = other DNA
ttcaaaagcatcaactatgt

SEQ ID NO: 63804 - DNA, 20 bp, synthetic construct
  misc_feature 1..20: note = Description of Artificial Sequence: Synthetic oligonucleotide
  misc_feature 1..20: note = Target: SCN10A; (+) strand; PAM type: YTN; PAM sequence: TTT
  source 1..20: mol_type = other DNA
tcaaaagcatcaactatgtg

SEQ ID NO: 63805 - DNA, 20 bp, synthetic construct
  misc_feature 1..20: note = Description of Artificial Sequence: Synthetic oligonucleotide
  misc_feature 1..20: note = Target: SCN10A; (+) strand; PAM type: YTN; PAM sequence: TTT
  source 1..20: mol_type = other DNA
caaaagcatcaactatgtgg

SEQ ID NO: 63806 - DNA, 20 bp, synthetic construct
  misc_feature 1..20: note = Description of Artificial Sequence: Synthetic oligonucleotide
  misc_feature 1..20: note = Target: SCN10A; (+) strand; PAM type: YTN; PAM sequence: TTC
  source 1..20: mol_type = other DNA
aaaagcatcaactatgtggc

SEQ ID NO: 63807 - DNA, 20 bp, synthetic construct
  misc_feature 1..20: note = Description of Artificial Sequence: Synthetic oligonucleotide
  misc_feature 1..20: note = Target: SCN10A; (+) strand; PAM type: YTN; PAM sequence: CTA
  source 1..20: mol_type = other DNA
tgtggcactggcttaatgat

SEQ ID NO: 63808 - DNA, 20 bp, synthetic construct
  misc_feature 1..20: note = Description of Artificial Sequence: Synthetic oligonucleotide
  misc_feature 1..20: note = Target: SCN10A; (+) strand; PAM type: YTN; PAM sequence: CTG
  source 1..20: mol_type = other DNA
gcttaatgatcatgtggtgg

SEQ ID NO: 63809 - DNA, 20 bp, synthetic construct
  misc_feature 1..20: note = Description of Artificial Sequence: Synthetic oligonucleotide
  misc_feature 1..20: note = Target: SCN10A; (+) strand; PAM type: YTN; PAM sequence: CTT
  source 1..20: mol_type = other DNA
aatgatcatgtggtgggcaa

SEQ ID NO: 63810 - DNA, 20 bp, synthetic construct
  misc_feature 1..20: note = Description of Artificial Sequence: Synthetic oligonucleotide
  misc_feature 1..20: note = Target: SCN10A; (+) strand; PAM type: YTN; PAM sequence: TTA
  source 1..20: mol_type = other DNA
atgatcatgtggtgggcaac

SEQ ID NO: 63811 - DNA, 20 bp, synthetic construct
  misc_feature 1..20: note = Description of Artificial Sequence: Synthetic oligonucleotide
  misc_feature 1..20: note = Target: SCN10A; (+) strand; PAM type: YTN; PAM sequence: CTG
  source 1..20: mol_type = other DNA
ataggagaaggcttggaatg

SEQ ID NO: 63812 - DNA, 20 bp, synthetic construct
  misc_feature 1..20: note = Description of Artificial Sequence: Synthetic oligonucleotide
  misc_feature 1..20: note = Target: SCN10A; (+) strand; PAM type: YTN; PAM sequence: CTT
  source 1..20: mol_type = other DNA
ggaatgtcaatctatgttat

SEQ ID NO: 63813 - DNA, 20 bp, synthetic construct
  misc_feature 1..20: note = Description of Artificial Sequence: Synthetic oligonucleotide
  misc_feature 1..20: note = Target: SCN10A; (+) strand; PAM type: YTN; PAM sequence: TTG
  source 1..20: mol_type = other DNA
gaatgtcaatctatgttatt

SEQ ID NO: 63814 - DNA, 20 bp, synthetic construct
  misc_feature 1..20: note = Description of Artificial Sequence: Synthetic oligonucleotide
  misc_feature 1..20: note = Target: SCN10A; (+) strand; PAM type: YTN; PAM sequence: CTA
  source 1..20: mol_type = other DNA
tgttattcagtgacaaaaat

SEQ ID NO: 63815 - DNA, 20 bp, synthetic construct
  misc_feature 1..20: note = Description of Artificial Sequence: Synthetic oligonucleotide
  misc_feature 1..20: note = Target: SCN10A; (+) strand; PAM type: YTN; PAM sequence: TTA
  source 1..20: mol_type = other DNA
ttcagtgacaaaaatattgc

SEQ ID NO: 63816 - DNA, 20 bp, synthetic construct
  misc_feature 1..20: note = Description of Artificial Sequence: Synthetic oligonucleotide
  misc_feature 1..20: note = Target: SCN10A; (+) strand; PAM type: YTN; PAM sequence: TTC
  source 1..20: mol_type = other DNA
agtgacaaaaatattgctgg

SEQ ID NO: 63817 - DNA, 20 bp, synthetic construct
  misc_feature 1..20: note = Description of Artificial Sequence: Synthetic oligonucleotide
  misc_feature 1..20: note = Target: SCN10A; (+) strand; PAM type: YTN; PAM sequence: TTG
  source 1..20: mol_type = other DNA
ctggcaaaaattttgaggca

SEQ ID NO: 63818 - DNA, 20 bp, synthetic construct
  misc_feature 1..20: note = Description of Artificial Sequence: Synthetic oligonucleotide
  misc_feature 1..20: note = Target: SCN10A; (+) strand; PAM type: YTN; PAM sequence: CTG
  source 1..20: mol_type = other DNA
gcaaaaattttgaggcagag

SEQ ID NO: 63819 - DNA, 20 bp, synthetic construct
  misc_feature 1..20: note = Description of Artificial Sequence: Synthetic oligonucleotide
  misc_feature 1..20: note = Target: SCN10A; (+) strand; PAM type: YTN; PAM sequence: TTT
  source 1..20: mol_type = other DNA
tgaggcagagcacgagcctc

SEQ ID NO: 63820 - DNA, 20 bp, synthetic construct
  misc_feature 1..20: note = Description of Artificial Sequence: Synthetic oligonucleotide
  misc_feature 1..20: note = Target: SCN10A; (+) strand; PAM type: YTN; PAM sequence: TTT
  source 1..20: mol_type = other DNA
gaggcagagcacgagcctca

SEQ ID NO: 63821 - DNA, 20 bp, synthetic construct
  misc_feature 1..20: note = Description of Artificial Sequence: Synthetic oligonucleotide
  misc_feature 1..20: note = Target: SCN10A; (+) strand; PAM type: YTN; PAM sequence: TTG
  source 1..20: mol_type = other DNA
aggcagagcacgagcctcat

SEQ ID NO: 63822 - DNA, 20 bp, synthetic construct
  misc_feature 1..20: note = Description of Artificial Sequence: Synthetic oligonucleotide
  misc_feature 1..20: note = Target: SCN10A; (+) strand; PAM type: YTN; PAM sequence: CTC
  source 1..20: mol_type = other DNA
atgaaccagcaaccctaggg

SEQ ID NO: 63823 - DNA, 20 bp, synthetic construct
  misc_feature 1..20: note = Description of Artificial Sequence: Synthetic oligonucleotide
  misc_feature 1..20: note = Target: SCN10A; (+) strand; PAM type: YTN; PAM sequence: CTA
  source 1..20: mol_type = other DNA
ggggaagggtttattaaacc

SEQ ID NO: 63824 - DNA, 20 bp, synthetic construct
  misc_feature 1..20: note = Description of Artificial Sequence: Synthetic oligonucleotide
  misc_feature 1..20: note = Target: SCN10A; (+) strand; PAM type: YTN; PAM sequence: TTT
  source 1..20: mol_type = other DNA
attaaaccttagtattgtgg

SEQ ID NO: 63825 - DNA, 20 bp, synthetic construct
  misc_feature 1..20: note = Description of Artificial Sequence: Synthetic oligonucleotide
  misc_feature 1..20: note = Target: SCN10A; (+) strand; PAM type: YTN; PAM sequence: TTA
  source 1..20: mol_type = other DNA
ttaaaccttagtattgtggg

SEQ ID NO: 63826 - DNA, 20 bp, synthetic construct
  misc_feature 1..20: note = Description of Artificial Sequence: Synthetic oligonucleotide
  misc_feature 1..20: note = Target: SCN10A; (+) strand; PAM type: YTN; PAM sequence: TTA
  source 1..20: mol_type = other DNA
aaccttagtattgtgggtca

SEQ ID NO: 63827 - DNA, 20 bp, synthetic construct
  misc_feature 1..20: note = Description of Artificial Sequence: Synthetic oligonucleotide
  misc_feature 1..20: note = Target: SCN10A; (+) strand; PAM type: YTN; PAM sequence: CTT
  source 1..20: mol_type = other DNA
agtattgtgggtcagttgta

SEQ ID NO: 63828 - DNA, 20 bp, synthetic construct
  misc_feature 1..20: note = Description of Artificial Sequence: Synthetic oligonucleotide
  misc_feature 1..20: note = Target: SCN10A; (+) strand; PAM type: YTN; PAM sequence: TTA
  source 1..20: mol_type = other DNA
gtattgtgggtcagttgtaa

SEQ ID NO: 63829 - DNA, 20 bp, synthetic construct
  misc_feature 1..20: note = Description of Artificial Sequence: Synthetic oligonucleotide
  misc_feature 1..20: note = Target: SCN10A; (+) strand; PAM type: YTN; PAM sequence: TTG
  source 1..20: mol_type = other DNA
tgggtcagttgtaattggct

SEQ ID NO: 63830 - DNA, 20 bp, synthetic construct
  misc_feature 1..20: note = Description of Artificial Sequence: Synthetic oligonucleotide
  misc_feature 1..20: note = Target: SCN10A; (+) strand; PAM type: YTN; PAM sequence: TTG
  source 1..20: mol_type = other DNA
taattggctatgttggtcaa

SEQ ID NO: 63831 - DNA, 20 bp, synthetic construct
  misc_feature 1..20: note = Description of Artificial Sequence: Synthetic oligonucleotide
  misc_feature 1..20: note = Target: SCN10A; (+) strand; PAM type: YTN; PAM sequence: TTG
  source 1..20: mol_type = other DNA
gctatgttggtcaagacagt

SEQ ID NO: 63832 - DNA, 20 bp, synthetic construct
  misc_feature 1..20: note = Description of Artificial Sequence: Synthetic oligonucleotide
  misc_feature 1..20: note = Target: SCN10A; (+) strand; PAM type: YTN; PAM sequence: CTA
  source 1..20: mol_type = other DNA
tgttggtcaagacagtacaa

SEQ ID NO: 63833 - DNA, 20 bp, synthetic construct
  misc_feature 1..20: note = Description of Artificial Sequence: Synthetic oligonucleotide
  misc_feature 1..20: note = Target: SCN10A; (+) strand; PAM type: YTN; PAM sequence: TTG
  source 1..20: mol_type = other DNA
gtcaagacagtacaagaaag

SEQ ID NO: 63834 - DNA, 20 bp, synthetic construct
  misc_feature 1..20: note = Description of Artificial Sequence: Synthetic oligonucleotide
  misc_feature 1..20: note = Target: SCN10A; (+) strand; PAM type: YTN; PAM sequence: TTA
  source 1..20: mol_type = other DNA
gctcaggaaagatttagctg

SEQ ID NO: 63835 - DNA, 20 bp, synthetic construct
  misc_feature 1..20: note = Description of Artificial Sequence: Synthetic oligonucleotide
  misc_feature 1..20: note = Target: SCN10A; (+) strand; PAM type: YTN; PAM sequence: CTC
  source 1..20: mol_type = other DNA
aggaaagatttagctggttt

SEQ ID NO: 63836 - DNA, 20 bp, synthetic construct
  misc_feature 1..20: note = Description of Artificial Sequence: Synthetic oligonucleotide
  misc_feature 1..20: note = Target: SCN10A; (+) strand; PAM type: YTN; PAM sequence: TTT
  source 1..20: mol_type = other DNA
agctggtttataagaataaa

SEQ ID NO: 63837 - DNA, 20 bp, synthetic construct
  misc_feature 1..20: note = Description of Artificial Sequence: Synthetic oligonucleotide
  misc_feature 1..20: note = Target: SCN10A; (+) strand; PAM type: YTN; PAM sequence: TTA
  source 1..20: mol_type = other DNA
gctggtttataagaataaaa

SEQ ID NO: 63838 - DNA, 20 bp, synthetic construct
  misc_feature 1..20: note = Description of Artificial Sequence: Synthetic oligonucleotide
  misc_feature 1..20: note = Target: SCN10A; (+) strand; PAM type: YTN; PAM sequence: CTG
  source 1..20: mol_type = other DNA
gtttataagaataaaagaaa

SEQ ID NO: 63839 - DNA, 20 bp, synthetic construct
  misc_feature 1..20: note = Description of Artificial Sequence: Synthetic oligonucleotide
  misc_feature 1..20: note = Target: SCN10A; (+) strand; PAM type: YTN; PAM sequence: TTT
  source 1..20: mol_type = other DNA
ataagaataaaagaaaatat

SEQ ID NO: 63840 - DNA, 20 bp, synthetic construct
  misc_feature 1..20: note = Description of Artificial Sequence: Synthetic oligonucleotide
  misc_feature 1..20: note = Target: SCN10A; (+) strand; PAM type: YTN; PAM sequence: TTA
  source 1..20: mol_type = other DNA
taagaataaaagaaaatata

SEQ ID NO: 63841 - DNA, 20 bp, synthetic construct
  misc_feature 1..20: note = Description of Artificial Sequence: Synthetic oligonucleotide
  misc_feature 1..20: note = Target: SCN10A; (+) strand; PAM type: YTN; PAM sequence: TTT
  source 1..20: mol_type = other DNA
agagccttgacgatttaggg

SEQ ID NO: 63842 - DNA, 20 bp, synthetic construct
  misc_feature 1..20: note = Description of Artificial Sequence: Synthetic oligonucleotide
  misc_feature 1..20: note = Target: SCN10A; (+) strand; PAM type: YTN; PAM sequence: TTA
  source 1..20: mol_type = other DNA
gagccttgacgatttaggga

SEQ ID NO: 63843 - DNA, 20 bp, synthetic construct
  misc_feature 1..20: note = Description of Artificial Sequence: Synthetic oligonucleotide
  misc_feature 1..20: note = Target: SCN10A; (+) strand; PAM type: YTN; PAM sequence: CTT
  source 1..20: mol_type = other DNA
gacgatttagggaactgtac

SEQ ID NO: 63844 - DNA, 20 bp, synthetic construct
  misc_feature 1..20: note = Description of Artificial Sequence: Synthetic oligonucleotide
  misc_feature 1..20: note = Target: SCN10A; (+) strand; PAM type: YTN; PAM sequence: TTG
  source 1..20: mol_type = other DNA
acgatttagggaactgtact

SEQ ID NO: 63845 - DNA, 20 bp, synthetic construct
  misc_feature 1..20: note = Description of Artificial Sequence: Synthetic oligonucleotide
  misc_feature 1..20: note = Target: SCN10A; (+) strand; PAM type: YTN; PAM sequence: TTT
  source 1..20: mol_type = other DNA
agggaactgtactgcttcta

SEQ ID NO: 63846 - DNA, 20 bp, synthetic construct
  misc_feature 1..20: note = Description of Artificial Sequence: Synthetic oligonucleotide
  misc_feature 1..20: note = Target: SCN10A; (+) strand; PAM type: YTN; PAM sequence: TTA
  source 1..20: mol_type = other DNA
gggaactgtactgcttctag

SEQ ID NO: 63847 - DNA, 20 bp, synthetic construct
  misc_feature 1..20: note = Description of Artificial Sequence: Synthetic oligonucleotide
  misc_feature 1..20: note = Target: SCN10A; (+) strand; PAM type: YTN; PAM sequence: CTG
  source 1..20: mol_type = other DNA
tactgcttctagattccagg

SEQ ID NO: 63848 - DNA, 20 bp, synthetic construct
  misc_feature 1..20: note = Description of Artificial Sequence: Synthetic oligonucleotide
  misc_feature 1..20: note = Target: SCN10A; (+) strand; PAM type: YTN; PAM sequence: CTG
  source 1..20: mol_type = other DNA
cttctagattccaggcagtg

SEQ ID NO: 63849 - DNA, 20 bp, synthetic construct
  misc_feature 1..20: note = Description of Artificial Sequence: Synthetic oligonucleotide
  misc_feature 1..20: note = Target: SCN10A; (+) strand; PAM type: YTN; PAM sequence: CTT
  source 1..20: mol_type = other DNA
ctagattccaggcagtgagc

SEQ ID NO: 63850 - DNA, 20 bp, synthetic construct
  misc_feature 1..20: note = Description of Artificial Sequence: Synthetic oligonucleotide
  misc_feature 1..20: note = Target: SCN10A; (+) strand; PAM type: YTN; PAM sequence: TTC
  source 1..20: mol_type = other DNA
tagattccaggcagtgagca

SEQ ID NO: 63851 - DNA, 20 bp, synthetic construct
  misc_feature 1..20: note = Description of Artificial Sequence: Synthetic oligonucleotide
  misc_feature 1..20: note = Target: SCN10A; (+) strand; PAM type: YTN; PAM sequence: CTA
  source 1..20: mol_type = other DNA
gattccaggcagtgagcaat

SEQ ID NO: 63852 - DNA, 20 bp, synthetic construct
  misc_feature 1..20: note = Description of Artificial Sequence: Synthetic oligonucleotide
  misc_feature 1..20: note = Target: SCN10A; (+) strand; PAM type: YTN; PAM sequence: TTC
  source 1..20: mol_type = other DNA
caggcagtgagcaatgggat

SEQ ID NO: 63853 - DNA, 20 bp, synthetic construct
  misc_feature 1..20: note = Description of Artificial Sequence: Synthetic oligonucleotide
  misc_feature 1..20: note = Target: SCN10A; (+) strand; PAM type: YTN; PAM sequence: TTA
  source 1..20: mol_type = other DNA
agtcttcaaatgttgaagac

SEQ ID NO: 63854 - DNA, 20 bp, synthetic construct
  misc_feature 1..20: note = Description of Artificial Sequence: Synthetic oligonucleotide
  misc_feature 1..20: note = Target: SCN10A; (+) strand; PAM type: YTN; PAM sequence: CTT
  source 1..20: mol_type = other DNA
caaatgttgaagactagtta

SEQ ID NO: 63855 - DNA, 20 bp, synthetic construct
  misc_feature 1..20: note = Description of Artificial Sequence: Synthetic oligonucleotide
  misc_feature 1..20: note = Target: SCN10A; (+) strand; PAM type: YTN; PAM sequence: TTC
  source 1..20: mol_type = other DNA
aaatgttgaagactagttaa

SEQ ID NO: 63856 - DNA, 20 bp, synthetic construct
  misc_feature 1..20: note = Description of Artificial Sequence: Synthetic oligonucleotide
  misc_feature 1..20: note = Target: SCN10A; (+) strand; PAM type: YTN; PAM sequence: TTG
  source 1..20: mol_type = other DNA
aagactagttaaattttcca

SEQ ID NO: 63857 - DNA, 20 bp, synthetic construct
  misc_feature 1..20: note = Description of Artificial Sequence: Synthetic oligonucleotide
  misc_feature 1..20: note = Target: SCN10A; (+) strand; PAM type: YTN; PAM sequence: CTA
  source 1..20: mol_type = other DNA
gttaaattttccaattaaat

SEQ ID NO: 63858 - DNA, 20 bp, synthetic construct
  misc_feature 1..20: note = Description of Artificial Sequence: Synthetic oligonucleotide
  misc_feature 1..20: note = Target: SCN10A; (+) strand; PAM type: YTN; PAM sequence: TTA
  source 1..20: mol_type = other DNA
aattttccaattaaatgaaa

SEQ ID NO: 63859 - DNA, 20 bp, synthetic construct
  misc_feature 1..20: note = Description of Artificial Sequence: Synthetic oligonucleotide
  misc_feature 1..20: note = Target: SCN10A; (+) strand; PAM type: YTN; PAM sequence: TTT
  source 1..20: mol_type = other DNA
tccaattaaatgaaacaact

SEQ ID NO: 63860 - DNA, 20 bp, synthetic construct
  misc_feature 1..20: note = Description of Artificial Sequence: Synthetic oligonucleotide
  misc_feature 1..20: note = Target: SCN10A; (+) strand; PAM type: YTN; PAM sequence: TTT
  source 1..20: mol_type = other DNA
ccaattaaatgaaacaactc

SEQ ID NO: 63861 - DNA, 20 bp, synthetic construct
  misc_feature 1..20: note = Description of Artificial Sequence: Synthetic oligonucleotide
  misc_feature 1..20: note = Target: SCN10A; (+) strand; PAM type: YTN; PAM sequence: TTC
  source 1..20: mol_type = other DNA
caattaaatgaaacaactct

SEQ ID NO: 63862 - DNA, 20 bp, synthetic construct
  misc_feature 1..20: note = Description of Artificial Sequence: Synthetic oligonucleotide
  misc_feature 1..20: note = Target: SCN10A; (+) strand; PAM type: YTN; PAM sequence: TTA
  source 1..20: mol_type = other DNA
aatgaaacaactcttagcaa

SEQ ID NO: 63863 - DNA, 20 bp, synthetic construct
  misc_feature 1..20: note = Description of Artificial Sequence: Synthetic oligonucleotide
  misc_feature 1..20: note = Target: SCN10A; (+) strand; PAM type: YTN; PAM sequence: CTC
  source 1..20: mol_type = other DNA
ttagcaaagcttgtagtaat

SEQ ID NO: 63864 - DNA, 20 bp, synthetic construct
  misc_feature 1..20: note = Description of Artificial Sequence: Synthetic oligonucleotide
  misc_feature 1..20: note = Target: SCN10A; (+) strand; PAM type: YTN; PAM sequence: CTT
  source 1..20: mol_type = other DNA
agcaaagcttgtagtaatgg

SEQ ID NO: 63865 - DNA, 20 bp, synthetic construct
  misc_feature 1..20: note = Description of Artificial Sequence: Synthetic oligonucleotide
  misc_feature 1..20: note = Target: SCN10A; (+) strand; PAM type: YTN; PAM sequence: TTA
  source 1..20: mol_type = other DNA
gcaaagcttgtagtaatggt

SEQ ID NO: 63866 - DNA, 20 bp, synthetic construct
  misc_feature 1..20: note = Description of Artificial Sequence: Synthetic oligonucleotide
  misc_feature 1..20: note = Target: SCN10A; (+) strand; PAM type: YTN; PAM sequence: CTT
  source 1..20: mol_type = other DNA
gtagtaatggtgtagccact

SEQ ID NO: 63867 - DNA, 20 bp, synthetic construct
  misc_feature 1..20: note = Description of Artificial Sequence: Synthetic oligonucleotide
  misc_feature 1..20: note = Target: SCN10A; (+) strand; PAM type: YTN; PAM sequence: TTG
  source 1..20: mol_type = other DNA
tagtaatggtgtagccactg

SEQ ID NO: 63868 - DNA, 20 bp, synthetic construct
  misc_feature 1..20: note = Description of Artificial Sequence: Synthetic oligonucleotide
  misc_feature 1..20: note = Target: SCN10A; (+) strand; PAM type: YTN; PAM sequence: CTG
  source 1..20: mol_type = other DNA
tttcttgtgcaagagaaagg

SEQ ID NO: 63869 - DNA, 20 bp, synthetic construct
  misc_feature 1..20: note = Description of Artificial Sequence: Synthetic oligonucleotide
  misc_feature 1..20: note = Target: SCN10A; (+) strand; PAM type: YTN; PAM sequence: TTT
  source 1..20: mol_type = other DNA
cttgtgcaagagaaaggcat

SEQ ID NO: 63870 - DNA, 20 bp, synthetic construct
  misc_feature 1..20: note = Description of Artificial Sequence: Synthetic oligonucleotide
  misc_feature 1..20: note = Target: SCN10A; (+) strand; PAM type: YTN; PAM sequence: TTC
  source 1..20: mol_type = other DNA
ttgtgcaagagaaaggcatg

SEQ ID NO: 63871 - DNA, 20 bp, synthetic construct
  misc_feature 1..20: note = Description of Artificial Sequence: Synthetic oligonucleotide
  misc_feature 1..20: note = Target: SCN10A; (+) strand; PAM type: YTN; PAM sequence: CTT
  source 1..20: mol_type = other DNA
gtgcaagagaaaggcatggg

SEQ ID NO: 63872 - DNA, 20 bp, synthetic construct
  misc_feature 1..20: note = Description of Artificial Sequence: Synthetic oligonucleotide
  misc_feature 1..20: note = Target: SCN10A; (+) strand; PAM type: YTN; PAM sequence: TTG
  source 1..20: mol_type = other DNA
tgcaagagaaaggcatgggg

SEQ ID NO: 63873 - DNA, 20 bp, synthetic construct
  misc_feature 1..20: note = Description of Artificial Sequence: Synthetic oligonucleotide
  misc_feature 1..20: note = Target: SCN10A; (+) strand; PAM type: YTN; PAM sequence: TTG
  source 1..20: mol_type = other DNA
agaactttgtcaaagaaagc

SEQ ID NO: 63874 - DNA, 20 bp, synthetic construct
  misc_feature 1..20: note = Description of Artificial Sequence: Synthetic oligonucleotide
  misc_feature 1..20: note = Target: SCN10A; (+) strand; PAM type: YTN; PAM sequence: CTT
  source 1..20: mol_type = other DNA
tgtcaaagaaagcactttgt

SEQ ID NO: 63875 - DNA, 20 bp, synthetic construct
  misc_feature 1..20: note = Description of Artificial Sequence: Synthetic oligonucleotide
  misc_feature 1..20: note = Target: SCN10A; (+) strand; PAM type: YTN; PAM sequence: TTT
  source 1..20: mol_type = other DNA
gtcaaagaaagcactttgtg

SEQ ID NO: 63876 - DNA, 20 bp, synthetic construct
  misc_feature 1..20: note = Description of Artificial Sequence: Synthetic oligonucleotide
  misc_feature 1..20: note = Target: SCN10A; (+) strand; PAM type: YTN; PAM sequence: TTG
  source 1..20: mol_type = other DNA
tcaaagaaagcactttgtgt

SEQ ID NO: 63877 - DNA, 20 bp, synthetic construct
  misc_feature 1..20: note = Description of Artificial Sequence: Synthetic oligonucleotide
  misc_feature 1..20: note = Target: SCN10A; (+) strand; PAM type: YTN; PAM sequence: CTT
  source 1..20: mol_type = other DNA
tgtgtggcaatgagaggtct

SEQ ID NO: 63878 - DNA, 20 bp, synthetic construct
  misc_feature 1..20: note = Description of Artificial Sequence: Synthetic oligonucleotide
  misc_feature 1..20: note = Target: SCN10A; (+) strand; PAM type: YTN; PAM sequence: TTT
  source 1..20: mol_type = other DNA
gtgtggcaatgagaggtctg

SEQ ID NO: 63879 - DNA, 20 bp, synthetic construct
  misc_feature 1..20: note = Description of Artificial Sequence: Synthetic oligonucleotide
  misc_feature 1..20: note = Target: SCN10A; (+) strand; PAM type: YTN; PAM sequence: TTG
  source 1..20: mol_type = other DNA
tgtggcaatgagaggtctga

SEQ ID NO: 63880 - DNA, 20 bp, synthetic construct
  misc_feature 1..20: note = Description of Artificial Sequence: Synthetic oligonucleotide
  misc_feature 1..20: note = Target: SCN10A; (+) strand; PAM type: YTN; PAM sequence: CTG
  source 1..20: mol_type = other DNA
aagccatctaagtttttgaa

SEQ ID NO: 63881 - DNA, 20 bp, synthetic construct
  misc_feature 1..20: note = Description of Artificial Sequence: Synthetic oligonucleotide
  misc_feature 1..20: note = Target: SCN10A; (+) strand; PAM type: YTN; PAM sequence: CTA
  source 1..20: mol_type = other DNA
agtttttgaagtaattgtat

SEQ ID NO: 63882 - DNA, 20 bp, synthetic construct
  misc_feature 1..20: note = Description of Artificial Sequence: Synthetic oligonucleotide
  misc_feature 1..20: note = Target: SCN10A; (+) strand; PAM type: YTN; PAM sequence: TTT
  source 1..20: mol_type = other DNA
ttgaagtaattgtattgtga

SEQ ID NO: 63883 - DNA, 20 bp, synthetic construct
  misc_feature 1..20: note = Description of Artificial Sequence: Synthetic oligonucleotide
  misc_feature 1..20: note = Target: SCN10A; (+) strand; PAM type: YTN; PAM sequence: TTT
  source 1..20: mol_type = other DNA
tgaagtaattgtattgtgaa

SEQ ID NO: 63884 - DNA, 20 bp, synthetic construct
  misc_feature 1..20: note = Description of Artificial Sequence: Synthetic oligonucleotide
  misc_feature 1..20: note = Target: SCN10A; (+) strand; PAM type: YTN; PAM sequence: TTT
  source 1..20: mol_type = other DNA
gaagtaattgtattgtgaaa

SEQ ID NO: 63885 - DNA, 20 bp, synthetic construct
  misc_feature 1..20: note = Description of Artificial Sequence: Synthetic oligonucleotide
  misc_feature 1..20: note = Target: SCN10A; (+) strand; PAM type: YTN; PAM sequence: TTG
  source 1..20: mol_type = other DNA
aagtaattgtattgtgaaat

SEQ ID NO: 63886 - DNA, 20 bp, synthetic construct
  misc_feature 1..20: note = Description of Artificial Sequence: Synthetic oligonucleotide
  misc_feature 1..20: note = Target: SCN10A; (+) strand; PAM type: YTN; PAM sequence: TTG
  source 1..20: mol_type = other DNA
tattgtgaaataaatcaaaa

SEQ ID NO: 63887 - DNA, 20 bp, synthetic construct
  misc_feature 1..20: note = Description of Artificial Sequence: Synthetic oligonucleotide
  misc_feature 1..20: note = Target: SCN10A; (+) strand; PAM type: YTN; PAM sequence: TTG
  source 1..20: mol_type = other DNA
tgaaataaatcaaaatccct

SEQ ID NO: 63888 - DNA, 20 bp, synthetic construct
  misc_feature 1..20: note = Description of Artificial Sequence: Synthetic oligonucleotide
  misc_feature 1..20: note = Target: SCN10A; (+) strand; PAM type: YTN; PAM sequence: CTG
  source 1..20: mol_type = other DNA
actgaaaaagcctttcactg

SEQ ID NO: 63889 - DNA, 20 bp, synthetic construct
  misc_feature 1..20: note = Description of Artificial Sequence: Synthetic oligonucleotide
  misc_feature 1..20: note = Target: SCN10A; (+) strand; PAM type: YTN; PAM sequence: CTG
  source 1..20: mol_type = other DNA
aaaaagcctttcactgttta

SEQ ID NO: 63890 - DNA, 20 bp, synthetic construct
  misc_feature 1..20: note = Description of Artificial Sequence: Synthetic oligonucleotide
  misc_feature 1..20: note = Target: SCN10A; (+) strand; PAM type: YTN; PAM sequence: CTT
  source 1..20: mol_type = other DNA
tcactgtttaaaccttaaaa

SEQ ID NO: 63891 - DNA, 20 bp, synthetic construct
  misc_feature 1..20: note = Description of Artificial Sequence: Synthetic oligonucleotide
  misc_feature 1..20: note = Target: SCN10A; (+) strand; PAM type: YTN; PAM sequence: TTT
  source 1..20: mol_type = other DNA
cactgtttaaaccttaaaac

SEQ ID NO: 63892 - DNA, 20 bp, synthetic construct
  misc_feature 1..20: note = Description of Artificial Sequence: Synthetic oligonucleotide
  misc_feature 1..20: note = Target: SCN10A; (+) strand; PAM type: YTN; PAM sequence: TTC
  source 1..20: mol_type = other DNA
actgtttaaaccttaaaaca

SEQ ID NO: 63893 - DNA, 20 bp, synthetic construct
  misc_feature 1..20: note = Description of Artificial Sequence: Synthetic oligonucleotide
  misc_feature 1..20: note = Target: SCN10A; (+) strand; PAM type: YTN; PAM sequence: CTG
  source 1..20: mol_type = other DNA
tttaaaccttaaaacaaacc

SEQ ID NO: 63894 - DNA, 20 bp, synthetic construct
  misc_feature 1..20: note = Description of Artificial Sequence: Synthetic oligonucleotide
  misc_feature 1..20: note = Target: SCN10A; (+) strand; PAM type: YTN; PAM sequence: TTT
  source 1..20: mol_type = other DNA
aaaccttaaaacaaaccttg

SEQ ID NO: 63895 - DNA, 20 bp, synthetic construct
  misc_feature 1..20: note = Description of Artificial Sequence: Synthetic oligonucleotide
  misc_feature 1..20: note = Target: SCN10A; (+) strand; PAM type: YTN; PAM sequence: TTA
  source 1..20: mol_type = other DNA
aaccttaaaacaaaccttgg

SEQ ID NO: 63896 - DNA, 20 bp, synthetic construct
  misc_feature 1..20: note = Description of Artificial Sequence: Synthetic oligonucleotide
  misc_feature 1..20: note = Target: SCN10A; (+) strand; PAM type: YTN; PAM sequence: CTT
  source 1..20: mol_type = other DNA
aaaacaaaccttggctttcc

SEQ ID NO: 63897 - DNA, 20 bp, synthetic construct
  misc_feature 1..20: note = Description of Artificial Sequence: Synthetic oligonucleotide
  misc_feature 1..20: note = Target: SCN10A; (+) strand; PAM type: YTN; PAM sequence: TTA
  source 1..20: mol_type = other DNA
aaacaaaccttggctttcca

SEQ ID NO: 63898 - DNA, 20 bp, synthetic construct
  misc_feature 1..20: note = Description of Artificial Sequence: Synthetic oligonucleotide
  misc_feature 1..20: note = Target: SCN10A; (+) strand; PAM type: YTN; PAM sequence: CTT
  source 1..20: mol_type = other DNA
ggctttccattttcccacaa

SEQ ID NO: 63899 - DNA, 20 bp, synthetic construct
  misc_feature 1..20: note = Description of Artificial Sequence: Synthetic oligonucleotide
  misc_feature 1..20: note = Target: SCN10A; (+) strand; PAM type: YTN; PAM sequence: TTG
  source 1..20: mol_type = other DNA
gctttccattttcccacaag

SEQ ID NO: 63900 - DNA, 20 bp, synthetic construct
  misc_feature 1..20: note = Description of Artificial Sequence: Synthetic oligonucleotide
  misc_feature 1..20: note = Target: SCN10A; (+) strand; PAM type: YTN; PAM sequence: CTT
  source 1..20: mol_type = other DNA
tccattttcccacaagcagg

SEQ ID NO: 63901 - DNA, 20 bp, synthetic construct
  misc_feature 1..20: note = Description of Artificial Sequence: Synthetic oligonucleotide
  misc_feature 1..20: note = Target: SCN10A; (+) strand; PAM type: YTN; PAM sequence: TTT
  source 1..20: mol_type = other DNA
ccattttcccacaagcagga

SEQ ID NO: 63902 - DNA, 20 bp, synthetic construct
  misc_feature 1..20: note = Description of Artificial Sequence: Synthetic oligonucleotide
  misc_feature 1..20: note = Target: SCN10A; (+) strand; PAM type: YTN; PAM sequence: TTC
  source 1..20: mol_type = other DNA
cattttcccacaagcaggag

SEQ ID NO: 63903 - DNA, 20 bp, synthetic construct
  misc_feature 1..20: note = Description of Artificial Sequence: Synthetic oligonucleotide
  misc_feature 1..20: note = Target: SCN10A; (+) strand; PAM type: YTN; PAM sequence: TTT
  source 1..20: mol_type = other DNA
tcccacaagcaggaggcaaa

SEQ ID NO: 63904 - DNA, 20 bp, synthetic construct
  misc_feature 1..20: note = Description of Artificial Sequence: Synthetic oligonucleotide
  misc_feature 1..20: note = Target: SCN10A; (+) strand; PAM type: YTN; PAM sequence: TTT
  source 1..20: mol_type = other DNA
cccacaagcaggaggcaaac

SEQ ID NO: 63905 - DNA, 20 bp, synthetic construct
  misc_feature 1..20: note = Description of Artificial Sequence: Synthetic oligonucleotide
  misc_feature 1..20: note = Target: SCN10A; (+) strand; PAM type: YTN; PAM sequence: TTC
  source 1..20: mol_type = other DNA
ccacaagcaggaggcaaact

SEQ ID NO: 63906 - DNA, 20 bp, synthetic construct
  misc_feature 1..20: note = Description of Artificial Sequence: Synthetic oligonucleotide
  misc_feature 1..20: note = Target: SCN10A; (+) strand; PAM type: YTN; PAM sequence: CTT
  source 1..20: mol_type = other DNA
tgaagttatattggcctcct

SEQ ID NO: 63907 - DNA, 20 bp, synthetic construct
  misc_feature 1..20: note = Description of Artificial Sequence: Synthetic oligonucleotide
  misc_feature 1..20: note = Target: SCN10A; (+) strand; PAM type: YTN; PAM sequence: TTT
  source 1..20: mol_type = other DNA
gaagttatattggcctcctt

SEQ ID NO: 63908 - DNA, 20 bp, synthetic construct
  misc_feature 1..20: note = Description of Artificial Sequence: Synthetic oligonucleotide
  misc_feature 1..20: note = Target: SCN10A; (+) strand; PAM type: YTN; PAM sequence: TTG
  source 1..20: mol_type = other DNA
aagttatattggcctccttc

SEQ ID NO: 63909 - DNA, 20 bp, synthetic construct
  misc_feature 1..20: note = Description of Artificial Sequence: Synthetic oligonucleotide
  misc_feature 1..20: note = Target: SCN10A; (+) strand; PAM type: YTN; PAM sequence: TTA
  source 1..20: mol_type = other DNA
tattggcctccttcaggcat

SEQ ID NO: 63910 - DNA, 20 bp, synthetic construct
  misc_feature 1..20: note = Description of Artificial Sequence: Synthetic oligonucleotide
  misc_feature 1..20: note = Target: SCN10A; (+) strand; PAM type: YTN; PAM sequence: TTG
  source 1..20: mol_type = other DNA
gcctccttcaggcatggcaa

SEQ ID NO: 63911 - DNA, 20 bp, synthetic construct
  misc_feature 1..20: note = Description of Artificial Sequence: Synthetic oligonucleotide
  misc_feature 1..20: note = Target: SCN10A; (+) strand; PAM type: YTN; PAM sequence: CTC
  source 1..20: mol_type = other DNA
cttcaggcatggcaaagtca

SEQ ID NO: 63912 - DNA, 20 bp, synthetic construct
  misc_feature 1..20: note = Description of Artificial Sequence: Synthetic oligonucleotide
  misc_feature 1..20: note = Target: SCN10A; (+) strand; PAM type: YTN; PAM sequence: CTT
  source 1..20: mol_type = other DNA
caggcatggcaaagtcactt

SEQ ID NO: 63913 - DNA, 20 bp, synthetic construct
  misc_feature 1..20: note = Description of Artificial Sequence: Synthetic oligonucleotide
  misc_feature 1..20: note = Target: SCN10A; (+) strand; PAM type: YTN; PAM sequence: TTC
  source 1..20: mol_type = other DNA
aggcatggcaaagtcacttc

SEQ ID NO: 63914 - DNA, 20 bp, synthetic construct
  misc_feature 1..20: note = Description of Artificial Sequence: Synthetic oligonucleotide
  misc_feature 1..20: note = Target: SCN10A; (+) strand; PAM type: YTN; PAM sequence: CTT
  source 1..20: mol_type = other DNA
cttggagtcccacctagagc

SEQ ID NO: 63915 - DNA, 20 bp, synthetic construct
  misc_feature 1..20: note = Description of Artificial Sequence: Synthetic oligonucleotide
  misc_feature 1..20: note = Target: SCN10A; (+) strand; PAM type: YTN; PAM sequence: TTC
  source 1..20: mol_type = other DNA
ttggagtcccacctagagct

SEQ ID NO: 63916 - DNA, 20 bp, synthetic construct
  misc_feature 1..20: note = Description of Artificial Sequence: Synthetic oligonucleotide
  misc_feature 1..20: note = Target: SCN10A; (+) strand; PAM type: YTN; PAM sequence: CTT
  source 1..20: mol_type = other DNA
ggagtcccacctagagctgt

SEQ ID NO: 63917 - DNA, 20 bp, synthetic construct
  misc_feature 1..20: note = Description of Artificial Sequence: Synthetic oligonucleotide
  misc_feature 1..20: note = Target: SCN10A; (+) strand; PAM type: YTN; PAM sequence: TTG
  source 1..20: mol_type = other DNA
gagtcccacctagagctgtc

SEQ ID NO: 63918 - DNA, 20 bp, synthetic construct
  misc_feature 1..20: note = Description of Artificial Sequence: Synthetic oligonucleotide
  misc_feature 1..20: note = Target: SCN10A; (+) strand; PAM type: YTN; PAM sequence: CTA
  source 1..20: mol_type = other DNA
gagctgtctggcttgcatta

SEQ ID NO: 63919 - DNA, 20 bp, synthetic construct
  misc_feature 1..20: note = Description of Artificial Sequence: Synthetic oligonucleotide
  misc_feature 1..20: note = Target: SCN10A; (+) strand; PAM type: YTN; PAM sequence: CTG
  source 1..20: mol_type = other DNA
tctggcttgcattaggctat

SEQ ID NO: 63920 - DNA, 20 bp, synthetic construct
  misc_feature 1..20: note = Description of Artificial Sequence: Synthetic oligonucleotide
  misc_feature 1..20: note = Target: SCN10A; (+) strand; PAM type: YTN; PAM sequence: CTG
  source 1..20: mol_type = other DNA
gcttgcattaggctatgata

SEQ ID NO: 63921 - DNA, 20 bp, synthetic construct
  misc_feature 1..20: note = Description of Artificial Sequence: Synthetic oligonucleotide
  misc_feature 1..20: note = Target: SCN10A; (+) strand; PAM type: YTN; PAM sequence: CTT
  source 1..20: mol_type = other DNA
gcattaggctatgatacgag

SEQ ID NO: 63922 - DNA, 20 bp, synthetic construct
  misc_feature 1..20: note = Description of Artificial Sequence: Synthetic oligonucleotide
  misc_feature 1..20: note = Target: SCN10A; (+) strand; PAM type: YTN; PAM sequence: TTG
  source 1..20: mol_type = other DNA
cattaggctatgatacgagt

SEQ ID NO: 63923 - DNA, 20 bp, synthetic construct
  misc_feature 1..20: note = Description of Artificial Sequence: Synthetic oligonucleotide
  misc_feature 1..20: note = Target: SCN10A; (+) strand; PAM type: YTN; PAM sequence: TTA
  source 1..20: mol_type = other DNA
ggctatgatacgagtgagaa

SEQ ID NO: 63924 - DNA, 20 bp, synthetic construct
  misc_feature 1..20: note = Description of Artificial Sequence: Synthetic oligonucleotide
  misc_feature 1..20: note = Target: SCN10A; (+) strand; PAM type: YTN; PAM sequence: CTA
  source 1..20: mol_type = other DNA
tgatacgagtgagaaataaa

SEQ ID NO: 63925 - DNA, 20 bp, synthetic construct
  misc_feature 1..20: note = Description of Artificial Sequence: Synthetic oligonucleotide
  misc_feature 1..20: note = Target: SCN10A; (+) strand; PAM type: YTN; PAM sequence: CTT
  source 1..20: mol_type = other DNA
tattggggtcagttactcag

SEQ ID NO: 63926 - DNA, 20 bp, synthetic construct
  misc_feature 1..20: note = Description of Artificial Sequence: Synthetic oligonucleotide
  misc_feature 1..20: note = Target: SCN10A; (+) strand; PAM type: YTN; PAM sequence: TTT
  source 1..20: mol_type = other DNA
attggggtcagttactcagt

SEQ ID NO: 63927 - DNA, 20 bp, synthetic construct
  misc_feature 1..20: note = Description of Artificial Sequence: Synthetic oligonucleotide
  misc_feature 1..20: note = Target: SCN10A; (+) strand; PAM type: YTN; PAM sequence: TTA
  source 1..20: mol_type = other DNA
ttggggtcagttactcagtt

SEQ ID NO: 63928 - DNA, 20 bp, synthetic construct
  misc_feature 1..20: note = Description of Artificial Sequence: Synthetic oligonucleotide
  misc_feature 1..20: note = Target: SCN10A; (+) strand; PAM type: YTN; PAM sequence: TTG
  source 1..20: mol_type = other DNA
gggtcagttactcagtttta

SEQ ID NO: 63929 - DNA, 20 bp, synthetic construct
  misc_feature 1..20: note = Description of Artificial Sequence: Synthetic oligonucleotide
  misc_feature 1..20: note = Target: SCN10A; (+) strand; PAM type: YTN; PAM sequence: TTA
  source 1..20: mol_type = other DNA
ctcagttttagagattgtct

SEQ ID NO: 63930 - DNA, 20 bp, synthetic construct
  misc_feature 1..20: note = Description of Artificial Sequence: Synthetic oligonucleotide
  misc_feature 1..20: note = Target: SCN10A; (+) strand; PAM type: YTN; PAM sequence: CTC
  source 1..20: mol_type = other DNA
agttttagagattgtctgta

SEQ ID NO: 63931 - DNA, 20 bp, synthetic construct
  misc_feature 1..20: note = Description of Artificial Sequence: Synthetic oligonucleotide
  misc_feature 1..20: note = Target: SCN10A; (+) strand; PAM type: YTN; PAM sequence: TTT
  source 1..20: mol_type = other DNA
tagagattgtctgtataata

SEQ ID NO: 63932 - DNA, 20 bp, synthetic construct
  misc_feature 1..20: note = Description of Artificial Sequence: Synthetic oligonucleotide
  misc_feature 1..20: note = Target: SCN10A; (+) strand; PAM type: YTN; PAM sequence: TTT
  source 1..20: mol_type = other DNA
agagattgtctgtataatag

SEQ ID NO: 63933 - DNA, 20 bp, synthetic construct
  misc_feature 1..20: note = Description of Artificial Sequence: Synthetic oligonucleotide
  misc_feature 1..20: note = Target: SCN10A; (+) strand; PAM type: YTN; PAM sequence: TTA
  source 1..20: mol_type = other DNA
gagattgtctgtataatagg

SEQ ID NO: 63934 - DNA, 20 bp, synthetic construct
  misc_feature 1..20: note = Description of Artificial Sequence: Synthetic oligonucleotide
  misc_feature 1..20: note = Target: SCN10A; (+) strand; PAM type: YTN; PAM sequence: TTG
  source 1..20: mol_type = other DNA
tctgtataataggtagcttt

SEQ ID NO: 63935 - DNA, 20 bp, synthetic construct
  misc_feature 1..20: note = Description of Artificial Sequence: Synthetic oligonucleotide
  misc_feature 1..20: note = Target: SCN10A; (+) strand; PAM type: YTN; PAM sequence: CTG
  source 1..20: mol_type = other DNA
tataataggtagctttattt

SEQ ID NO: 63936 - DNA, 20 bp, synthetic construct
  misc_feature 1..20: note = Description of Artificial Sequence: Synthetic oligonucleotide
  misc_feature 1..20: note = Target: SCN10A; (+) strand; PAM type: YTN; PAM sequence: CTT
  source 1..20: mol_type = other DNA
tatttttcattgattaataa

SEQ ID NO: 63937 - DNA, 20 bp, synthetic construct
  misc_feature 1..20: note = Description of Artificial Sequence: Synthetic oligonucleotide
  misc_feature 1..20: note = Target: SCN10A; (+) strand; PAM type: YTN; PAM sequence: TTT
  source 1..20: mol_type = other DNA
atttttcattgattaataaa

SEQ ID NO: 63938 - DNA, 20 bp, synthetic construct
  misc_feature 1..20: note = Description of Artificial Sequence: Synthetic oligonucleotide
  misc_feature 1..20: note = Target: SCN10A; (+) strand; PAM type: YTN; PAM sequence: TTA
  source 1..20: mol_type = other DNA
tttttcattgattaataaaa

SEQ ID NO: 63939 - DNA, 20 bp, synthetic construct
  misc_feature 1..20: note = Description of Artificial Sequence: Synthetic oligonucleotide
  misc_feature 1..20: note = Target: SCN10A; (+) strand; PAM type: YTN; PAM sequence: TTT
  source 1..20: mol_type = other DNA
ttcattgattaataaaaatt

SEQ ID NO: 63940 - DNA, 20 bp, synthetic construct
  misc_feature 1..20: note = Description of Artificial Sequence: Synthetic oligonucleotide
  misc_feature 1..20: note = Target: SCN10A; (+) strand; PAM type: YTN; PAM sequence: TTT
  source 1..20: mol_type = other DNA
tcattgattaataaaaattt

SEQ ID NO: 63941 - DNA, 20 bp, synthetic construct
  misc_feature 1..20: note = Description of Artificial Sequence: Synthetic oligonucleotide
  misc_feature 1..20: note = Target: SCN10A; (+) strand; PAM type: YTN; PAM sequence: TTT
  source 1..20: mol_type = other DNA
cattgattaataaaaatttt

SEQ ID NO: 63942 - DNA, 20 bp, synthetic construct
  misc_feature 1..20: note = Description of Artificial Sequence: Synthetic oligonucleotide
  misc_feature 1..20: note = Target: SCN10A; (+) strand; PAM type: YTN; PAM sequence: TTC
  source 1..20: mol_type = other DNA
attgattaataaaaattttt

SEQ ID NO: 63943 - DNA, 20 bp, synthetic construct
  misc_feature 1..20: note = Description of Artificial Sequence: Synthetic oligonucleotide
  misc_feature 1..20: note = Target: SCN10A; (+) strand; PAM type: YTN; PAM sequence: TTG
  source 1..20: mol_type = other DNA
attaataaaaatttttataa

SEQ ID NO: 63944 - DNA, 20 bp, synthetic construct
  misc_feature 1..20: note = Description of Artificial Sequence: Synthetic oligonucleotide
  misc_feature 1..20: note = Target: SCN10A; (+) strand; PAM type: YTN; PAM sequence: TTA
  source 1..20: mol_type = other DNA
ataaaaatttttataaacaa

SEQ ID NO: 63945 - DNA, 20 bp, synthetic construct
  misc_feature 1..20: note = Description of Artificial Sequence: Synthetic oligonucleotide
  misc_feature 1..20: note = Target: SCN10A; (+) strand; PAM type: YTN; PAM sequence: TTT
  source 1..20: mol_type = other DNA
ttataaacaagataaaatta

SEQ ID NO: 63946 - DNA, 20 bp, synthetic construct
  misc_feature 1..20: note = Description of Artificial Sequence: Synthetic oligonucleotide
  misc_feature 1..20: note = Target: SCN10A; (+) strand; PAM type: YTN; PAM sequence: TTT
  source 1..20: mol_type = other DNA
tataaacaagataaaattaa

SEQ ID NO: 63947 - DNA, 20 bp, synthetic construct
  misc_feature 1..20: note = Description of Artificial Sequence: Synthetic oligonucleotide
  misc_feature 1..20: note = Target: SCN10A; (+) strand; PAM type: YTN; PAM sequence: TTT
  source 1..20: mol_type = other DNA
ataaacaagataaaattaaa

SEQ ID NO: 63948 - DNA, 20 bp, synthetic construct
  misc_feature 1..20: note = Description of Artificial Sequence: Synthetic oligonucleotide
  misc_feature 1..20: note = Target: SCN10A; (+) strand; PAM type: YTN; PAM sequence: TTA
  source 1..20: mol_type = other DNA
taaacaagataaaattaaaa

SEQ ID NO: 63949 - DNA, 20 bp, synthetic construct
  misc_feature 1..20: note = Description of Artificial Sequence: Synthetic oligonucleotide
  misc_feature 1..20: note = Target: SCN10A; (+) strand; PAM type: YTN; PAM sequence: TTA
  source 1..20: mol_type = other DNA
aaatacttatcattacaata

SEQ ID NO: 63950 - DNA, 20 bp, synthetic construct
  misc_feature 1..20: note = Description of Artificial Sequence: Synthetic oligonucleotide
  misc_feature 1..20: note = Target: SCN10A; (+) strand; PAM type: YTN; PAM sequence: CTT
  source 1..20: mol_type = other DNA
atcattacaataaattggga

SEQ ID NO: 63951 - DNA, 20 bp, synthetic construct
  misc_feature 1..20: note = Description of Artificial Sequence: Synthetic oligonucleotide
  misc_feature 1..20: note = Target: SCN10A; (+) strand; PAM type: YTN; PAM sequence: TTA
  source 1..20: mol_type = other DNA
tcattacaataaattgggaa

SEQ ID NO: 63952 - DNA, 20 bp, synthetic construct
  misc_feature 1..20: note = Description of Artificial Sequence: Synthetic oligonucleotide
  misc_feature 1..20: note = Target: SCN10A; (+) strand; PAM type: YTN; PAM sequence: TTA
  source 1..20: mol_type = other DNA
caataaattgggaaaggata

SEQ ID NO: 63953 - DNA, 20 bp, synthetic construct
  misc_feature 1..20: note = Description of Artificial Sequence: Synthetic oligonucleotide
  misc_feature 1..20: note = Target: SCN10A; (+) strand; PAM type: YTN; PAM sequence: TTG
  source 1..20: mol_type = other DNA
ggaaaggatatctggaatga

SEQ ID NO: 63954 - DNA, 20 bp, synthetic construct
  misc_feature 1..20: note = Description of Artificial Sequence: Synthetic oligonucleotide
  misc_feature 1..20: note = Target: SCN10A; (+) strand; PAM type: YTN; PAM sequence: CTG
  source 1..20: mol_type = other DNA
gaatgaaaagttgtcttgga

SEQ ID NO: 63955 - DNA, 20 bp, synthetic construct
  misc_feature 1..20: note = Description of Artificial Sequence: Synthetic oligonucleotide
  misc_feature 1..20: note = Target: SCN10A; (+) strand; PAM type: YTN; PAM sequence: TTG
  source 1..20: mol_type = other DNA
tcttggaggaaggttaaaga

SEQ ID NO: 63956 - DNA, 20 bp, synthetic construct
  misc_feature 1..20: note = Description of Artificial Sequence: Synthetic oligonucleotide
  misc_feature 1..20: note = Target: SCN10A; (+) strand; PAM type: YTN; PAM sequence: CTT
  source 1..20: mol_type = other DNA
ggaggaaggttaaagatttt

SEQ ID NO: 63957 - DNA, 20 bp, synthetic construct
  misc_feature 1..20: note = Description of Artificial Sequence: Synthetic oligonucleotide
  misc_feature 1..20: note = Target: SCN10A; (+) strand; PAM type: YTN; PAM sequence: TTG
  source 1..20: mol_type = other DNA
gaggaaggttaaagatttta

SEQ ID NO: 63958 - DNA, 20 bp, synthetic construct
  misc_feature 1..20: note = Description of Artificial Sequence: Synthetic oligonucleotide
  misc_feature 1..20: note = Target: SCN10A; (+) strand; PAM type: YTN; PAM sequence: TTA
  source 1..20: mol_type = other DNA
aagattttagctaacttttg

SEQ ID NO: 63959 - DNA, 20 bp, synthetic construct
  misc_feature 1..20: note = Description of Artificial Sequence: Synthetic oligonucleotide
  misc_feature 1..20: note = Target: SCN10A; (+) strand; PAM type: YTN; PAM sequence: TTT
  source 1..20: mol_type = other DNA
tagctaacttttggctttga

SEQ ID NO: 63960 - DNA, 20 bp, synthetic construct
  misc_feature 1..20: note = Description of Artificial Sequence: Synthetic oligonucleotide
  misc_feature 1..20: note = Target: SCN10A; (+) strand; PAM type: YTN; PAM sequence: TTT
  source 1..20: mol_type = other DNA
agctaacttttggctttgat

SEQ ID NO: 63961 - DNA, 20 bp, synthetic construct
  misc_feature 1..20: note = Description of Artificial Sequence: Synthetic oligonucleotide
  misc_feature 1..20: note = Target: SCN10A; (+) strand; PAM type: YTN; PAM sequence: TTA
  source 1..20: mol_type = other DNA
gctaacttttggctttgatt

SEQ ID NO: 63962 - DNA, 20 bp, synthetic construct
  misc_feature 1..20: note = Description of Artificial Sequence: Synthetic oligonucleotide
  misc_feature 1..20: note = Target: SCN10A; (+) strand; PAM type: YTN; PAM sequence: CTA
  source 1..20: mol_type = other DNA
acttttggctttgattaagt

SEQ ID NO: 63963 - DNA, 20 bp, synthetic construct
  misc_feature 1..20: note = Description of Artificial Sequence: Synthetic oligonucleotide
  misc_feature 1..20: note = Target: SCN10A; (+) strand; PAM type: YTN; PAM sequence: CTT
  source 1..20: mol_type = other DNA
ttggctttgattaagttaac

SEQ ID NO: 63964 - DNA, 20 bp, synthetic construct
  misc_feature 1..20: note = Description of Artificial Sequence: Synthetic oligonucleotide
  misc_feature 1..20: note = Target: SCN10A; (+) strand; PAM type: YTN; PAM sequence: TTT
  source 1..20: mol_type = other DNA
tggctttgattaagttaact

SEQ ID NO: 63965 - DNA, 20 bp, synthetic construct
  misc_feature 1..20: note = Description of Artificial Sequence: Synthetic oligonucleotide
  misc_feature 1..20: note = Target: SCN10A; (+) strand; PAM type: YTN; PAM sequence: TTT
  source 1..20: mol_type = other DNA
ggctttgattaagttaacta

SEQ ID NO: 63966 - DNA, 20 bp, synthetic construct
  misc_feature 1..20: note = Description of Artificial Sequence: Synthetic oligonucleotide
  misc_feature 1..20: note = Target: SCN10A; (+) strand; PAM type: YTN; PAM sequence: TTG
  source 1..20: mol_type = other DNA
gctttgattaagttaactaa

SEQ ID NO: 63967 - DNA, 20 bp, synthetic construct
  misc_feature 1..20: note = Description of Artificial Sequence: Synthetic oligonucleotide
  misc_feature 1..20: note = Target: SCN10A; (+) strand; PAM type: YTN; PAM sequence: CTT
  source 1..20: mol_type = other DNA
tgattaagttaactaatgga

SEQ ID NO: 63968 - DNA, 20 bp, synthetic construct
  misc_feature 1..20: note = Description of Artificial Sequence: Synthetic oligonucleotide
  misc_feature 1..20: note = Target: SCN10A; (+) strand; PAM type: YTN; PAM sequence: TTT
  source 1..20: mol_type = other DNA
gattaagttaactaatggag

SEQ ID NO: 63969 - DNA, 20 bp, synthetic construct
  misc_feature 1..20: note = Description of Artificial Sequence: Synthetic oligonucleotide
  misc_feature 1..20: note = Target: SCN10A; (+) strand; PAM type: YTN; PAM sequence: TTG
  source 1..20: mol_type = other DNA
attaagttaactaatggaga

SEQ ID NO: 63970 - DNA, 20 bp, synthetic construct
  misc_feature 1..20: note = Description of Artificial Sequence: Synthetic oligonucleotide
  misc_feature 1..20: note = Target: SCN10A; (+) strand; PAM type: YTN; PAM sequence: TTA
  source 1..20: mol_type = other DNA
agttaactaatggagagtta

SEQ ID NO: 63971 - DNA, 20 bp, synthetic construct
  misc_feature 1..20: note = Description of Artificial Sequence: Synthetic oligonucleotide
  misc_feature 1..20: note = Target: SCN10A; (+) strand; PAM type: YTN; PAM sequence: TTA
  source 1..20: mol_type = other DNA
actaatggagagttaattta

SEQ ID NO: 63972 - DNA, 20 bp, synthetic construct
  misc_feature 1..20: note = Description of Artificial Sequence: Synthetic oligonucleotide
  misc_feature 1..20: note = Target: SCN10A; (+) strand; PAM type: YTN; PAM sequence: CTA
  source 1..20: mol_type = other DNA
atggagagttaatttatgct

SEQ ID NO: 63973 - DNA, 20 bp, synthetic construct
  misc_feature 1..20: note = Description of Artificial Sequence: Synthetic oligonucleotide
  misc_feature 1..20: note = Target: SCN10A; (+) strand; PAM type: YTN; PAM sequence: TTA
  source 1..20: mol_type = other DNA
atttatgctgtaatttctgc

SEQ ID NO: 63974 - DNA, 20 bp, synthetic construct
  misc_feature 1..20: note = Description of Artificial Sequence: Synthetic oligonucleotide
  misc_feature 1..20: note = Target: SCN10A; (+) strand; PAM type: YTN; PAM sequence: TTT
  source 1..20: mol_type = other DNA
atgctgtaatttctgcagcc

SEQ ID NO: 63975 - DNA, 20 bp, synthetic construct
  misc_feature 1..20: note = Description of Artificial Sequence: Synthetic oligonucleotide
  misc_feature 1..20: note = Target: SCN10A; (+) strand; PAM type: YTN; PAM sequence: TTA
  source 1..20: mol_type = other DNA
tgctgtaatttctgcagcca

SEQ ID NO: 63976 - DNA, 20 bp, synthetic construct
  misc_feature 1..20: note = Description of Artificial Sequence: Synthetic oligonucleotide
  misc_feature 1..20: note = Target: SCN10A; (+) strand; PAM type: YTN; PAM sequence: CTG
  source 1..20: mol_type = other DNA
taatttctgcagccacgacc

SEQ ID NO: 63977 - DNA, 20 bp, synthetic construct
  misc_feature 1..20: note = Description of Artificial Sequence: Synthetic oligonucleotide
  misc_feature 1..20: note = Target: SCN10A; (+) strand; PAM type: YTN; PAM sequence: TTT
  source 1..20: mol_type = other DNA
ctgcagccacgacctcctgg

SEQ ID NO: 63978 - DNA, 20 bp, synthetic construct
  misc_feature 1..20: note = Description of Artificial Sequence: Synthetic oligonucleotide
  misc_feature 1..20: note = Target: SCN10A; (+) strand; PAM type: YTN; PAM sequence: TTC
  source 1..20: mol_type = other DNA
tgcagccacgacctcctggg

SEQ ID NO: 63979 - DNA, 20 bp, synthetic construct
  misc_feature 1..20: note = Description of Artificial Sequence: Synthetic oligonucleotide
  misc_feature 1..20: note = Target: SCN10A; (+) strand; PAM type: YTN; PAM sequence: CTG
  source 1..20: mol_type = other DNA
cagccacgacctcctgggct

SEQ ID NO: 63980 - DNA, 20 bp, synthetic construct
  misc_feature 1..20: note = Description of Artificial Sequence: Synthetic oligonucleotide
  misc_feature 1..20: note = Target: SCN10A; (+) strand; PAM type: YTN; PAM sequence: CTC
  source 1..20: mol_type = other DNA
ctgggctcaagtcatcctcc

SEQ ID NO: 63981 - DNA, 20 bp, synthetic construct
  misc_feature 1..20: note = Description of Artificial Sequence: Synthetic oligonucleotide
  misc_feature 1..20: note = Target: SCN10A; (+) strand; PAM type: YTN; PAM sequence: CTG
  source 1..20: mol_type = other DNA
ggctcaagtcatcctcccac

SEQ ID NO: 63982 - DNA, 20 bp, synthetic construct
  misc_feature 1..20: note = Description of Artificial Sequence: Synthetic oligonucleotide
  misc_feature 1..20: note = Target: SCN10A; (+) strand; PAM type: YTN; PAM sequence: CTC
  source 1..20: mol_type = other DNA
aagtcatcctcccacctcag

SEQ ID NO: 63983 - DNA, 20 bp, synthetic construct
  misc_feature 1..20: note = Description of Artificial Sequence: Synthetic oligonucleotide
  misc_feature 1..20: note = Target: SCN10A; (+) strand; PAM type: YTN; PAM sequence: CTC
  source 1..20: mol_type = other DNA
ccacctcagcctcccaaata

SEQ ID NO: 63984 - DNA, 20 bp, synthetic construct
  misc_feature 1..20: note = Description of Artificial Sequence: Synthetic oligonucleotide
  misc_feature 1..20: note = Target: SCN10A; (+) strand; PAM type: YTN; PAM sequence: CTC
  source 1..20: mol_type = other DNA
agcctcccaaatagctgaga

SEQ ID NO: 63985 - DNA, 20 bp, synthetic construct
  misc_feature 1..20: note = Description of Artificial Sequence: Synthetic oligonucleotide
  misc_feature 1..20: note = Target: SCN10A; (+) strand; PAM type: YTN; PAM sequence: CTC
  source 1..20: mol_type = other DNA
ccaaatagctgagactacag

SEQ ID NO: 63986 - DNA, 20 bp, synthetic construct
  misc_feature 1..20: note = Description of Artificial Sequence: Synthetic oligonucleotide
  misc_feature 1..20: note = Target: SCN10A; (+) strand; PAM type: YTN; PAM sequence: CTG
  source 1..20: mol_type = other DNA
agactacagacacgtgccat

SEQ ID NO: 63987 - DNA, 20 bp, synthetic construct
  misc_feature 1..20: note = Description of Artificial Sequence: Synthetic oligonucleotide
  misc_feature 1..20: note = Target: SCN10A; (+) strand; PAM type: YTN; PAM sequence: CTA
  source 1..20: mol_type = other DNA
cagacacgtgccatcatgcc

SEQ ID NO: 63988 - DNA, 20 bp, synthetic construct
  misc_feature 1..20: note = Description of Artificial Sequence: Synthetic oligonucleotide
  misc_feature 1..20: note = Target: SCN10A; (+) strand; PAM type: YTN; PAM sequence: CTA
  source 1..20: mol_type = other DNA
atttctttccttttcttttt

SEQ ID NO: 63989 - DNA, 20 bp, synthetic construct
  misc_feature 1..20: note = Description of Artificial Sequence: Synthetic oligonucleotide
  misc_feature 1..20: note = Target: SCN10A; (+) strand; PAM type: YTN; PAM sequence: TTT
  source 1..20: mol_type = other DNA
ctttccttttcttttttaaa

SEQ ID NO: 63990 - DNA, 20 bp, synthetic construct
  misc_feature 1..20: note = Description of Artificial Sequence: Synthetic oligonucleotide
  misc_feature 1..20: note = Target: SCN10A; (+) strand; PAM type: YTN; PAM sequence: TTC
  source 1..20: mol_type = other DNA
tttccttttcttttttaaat

SEQ ID NO: 63991 - DNA, 20 bp, synthetic construct
  misc_feature 1..20: note = Description of Artificial Sequence: Synthetic oligonucleotide
  misc_feature 1..20: note = Target: SCN10A; (+) strand; PAM type: YTN; PAM sequence: CTT
  source 1..20: mol_type = other DNA
tccttttcttttttaaattt

SEQ ID NO: 63992 - DNA, 20 bp, synthetic construct
  misc_feature 1..20: note = Description of Artificial Sequence: Synthetic oligonucleotide
  misc_feature 1..20: note = Target: SCN10A; (+) strand; PAM type: YTN; PAM sequence: TTT
  source 1..20: mol_type = other DNA
ccttttcttttttaaattta

SEQ ID NO: 63993 - DNA, 20 bp, synthetic construct
  misc_feature 1..20: note = Description of Artificial Sequence: Synthetic oligonucleotide
  misc_feature 1..20: note = Target: SCN10A; (+) strand; PAM type: YTN; PAM sequence: TTC
  source 1..20: mol_type = other DNA
cttttcttttttaaatttaa

SEQ ID NO: 63994 - DNA, 20 bp, synthetic construct
  misc_feature 1..20: note = Description of Artificial Sequence: Synthetic oligonucleotide
  misc_feature 1..20: note = Target: SCN10A; (+) strand; PAM type: YTN; PAM sequence: CTT
  source 1..20: mol_type = other DNA
ttcttttttaaatttaaaat

SEQ ID NO: 63995 - DNA, 20 bp, synthetic construct
  misc_feature 1..20: note = Description of Artificial Sequence: Synthetic oligonucleotide
  misc_feature 1..20: note = Target: SCN10A; (+) strand; PAM type: YTN; PAM sequence: TTT
  source 1..20: mol_type = other DNA
tcttttttaaatttaaaatt

SEQ ID NO: 63996 - DNA, 20 bp, synthetic construct
  misc_feature 1..20: note = Description of Artificial Sequence: Synthetic oligonucleotide
  misc_feature 1..20: note = Target: SCN10A; (+) strand; PAM type: YTN; PAM sequence: TTT
  source 1..20: mol_type = other DNA
cttttttaaatttaaaattt

SEQ ID NO: 63997 - DNA, 20 bp, synthetic construct
  misc_feature 1..20: note = Description of Artificial Sequence: Synthetic oligonucleotide
  misc_feature 1..20: note = Target: SCN10A; (+) strand; PAM type: YTN; PAM sequence: TTC
  source 1..20: mol_type = other DNA
ttttttaaatttaaaattta

SEQ ID NO: 63998 - DNA, 20 bp, synthetic construct
  misc_feature 1..20: note = Description of Artificial Sequence: Synthetic oligonucleotide
  misc_feature 1..20: note = Target: SCN10A; (+) strand; PAM type: YTN; PAM sequence: CTT
  source 1..20: mol_type = other DNA
ttttaaatttaaaatttatt

SEQ ID NO: 63999 - DNA, 20 bp, synthetic construct
  misc_feature 1..20: note = Description of Artificial Sequence: Synthetic oligonucleotide
  misc_feature 1..20: note = Target: SCN10A; (+) strand; PAM type: YTN; PAM sequence: TTT
  source 1..20: mol_type = other DNA
tttaaatttaaaatttattt

SEQ ID NO: 64000 - DNA, 20 bp, synthetic construct
  misc_feature 1..20: note = Description of Artificial Sequence: Synthetic oligonucleotide
  misc_feature 1..20: note = Target: SCN10A; (+) strand; PAM type: YTN; PAM sequence: TTT
  source 1..20: mol_type = other DNA
ttaaatttaaaatttattta

SEQ ID NO: 64001 - DNA, 20 bp, synthetic construct
  misc_feature 1..20: note = Description of Artificial Sequence: Synthetic oligonucleotide
  misc_feature 1..20: note = Target: SCN10A; (+) strand; PAM type: YTN; PAM sequence: TTT
  source 1..20: mol_type = other DNA
taaatttaaaatttatttat

SEQ ID NO: 64002 - DNA, 20 bp, synthetic construct
  misc_feature 1..20: note = Description of Artificial Sequence: Synthetic oligonucleotide
  misc_feature 1..20: note = Target: SCN10A; (+) strand; PAM type: YTN; PAM sequence: TTT
  source 1..20: mol_type = other DNA
aaatttaaaatttatttatt

SEQ ID NO: 64003 - DNA, 20 bp, synthetic construct
  misc_feature 1..20: note = Description of Artificial Sequence: Synthetic oligonucleotide
  misc_feature 1..20: note = Target: SCN10A; (+) strand; PAM type: YTN; PAM sequence: TTA
  source 1..20: mol_type = other DNA
aatttaaaatttatttattt

SEQ ID NO: 64004 - DNA, 20 bp, synthetic construct
  misc_feature 1..20: note = Description of Artificial Sequence: Synthetic oligonucleotide
  misc_feature 1..20: note = Target: SCN10A; (+) strand; PAM type: YTN; PAM sequence: TTT
  source 1..20: mol_type = other DNA
aaaatttatttatttattta

SEQ ID NO: 64005 - DNA, 20 bp, synthetic construct
  misc_feature 1..20: note = Description of Artificial Sequence: Synthetic oligonucleotide
  misc_feature 1..20: note = Target: SCN10A; (+) strand; PAM type: YTN; PAM sequence: TTA
  source 1..20: mol_type = other DNA
aaatttatttatttatttat

SEQ ID NO: 64006 - DNA, 20 bp, synthetic construct
  misc_feature 1..20: note = Description of Artificial Sequence: Synthetic oligonucleotide
  misc_feature 1..20: note = Target: SCN10A; (+) strand; PAM type: YTN; PAM sequence: TTT
  source 1..20: mol_type = other DNA
atttatttatttatttattt

SEQ ID NO: 64007 - DNA, 20 bp, synthetic construct
  misc_feature 1..20: note = Description of Artificial Sequence: Synthetic oligonucleotide
  misc_feature 1..20: note = Target: SCN10A; (+) strand; PAM type: YTN; PAM sequence: TTA
  source 1..20: mol_type = other DNA
tttatttatttatttatttt

SEQ ID NO: 64008 - DNA, 20 bp, synthetic construct
  misc_feature 1..20: note = Description of Artificial Sequence: Synthetic oligonucleotide
  misc_feature 1..20: note = Target: SCN10A; (+) strand; PAM type: YTN; PAM sequence: TTT
  source 1..20: mol_type = other DNA
atttatttatttatttttga

SEQ ID NO: 64009 - DNA, 20 bp, synthetic construct
  misc_feature 1..20: note = Description of Artificial Sequence: Synthetic oligonucleotide
  misc_feature 1..20: note = Target: SCN10A; (+) strand; PAM type: YTN; PAM sequence: TTA
  source 1..20: mol_type = other DNA
tttatttatttatttttgag

SEQ ID NO: 64010 - DNA, 20 bp, synthetic construct
  misc_feature 1..20: note = Description of Artificial Sequence: Synthetic oligonucleotide
  misc_feature 1..20: note = Target: SCN10A; (+) strand; PAM type: YTN; PAM sequence: TTT
  source 1..20: mol_type = other DNA
atttatttatttttgagatg

SEQ ID NO: 64011 - DNA, 20 bp, synthetic construct
  misc_feature 1..20: note = Description of Artificial Sequence: Synthetic oligonucleotide
  misc_feature 1..20: note = Target: SCN10A; (+) strand; PAM type: YTN; PAM sequence: TTA
  source 1..20: mol_type = other DNA
tttatttatttttgagatgg

SEQ ID NO: 64012 - DNA, 20 bp, synthetic construct
  misc_feature 1..20: note = Description of Artificial Sequence: Synthetic oligonucleotide
  misc_feature 1..20: note = Target: SCN10A; (+) strand; PAM type: YTN; PAM sequence: TTT
  source 1..20: mol_type = other DNA
atttatttttgagatggagt

SEQ ID NO: 64013 - DNA, 20 bp, synthetic construct
  misc_feature 1..20: note = Description of Artificial Sequence: Synthetic oligonucleotide
  misc_feature 1..20: note = Target: SCN10A; (+) strand; PAM type: YTN; PAM sequence: TTA
  source 1..20: mol_type = other DNA
tttatttttgagatggagtt

SEQ ID NO: 64014 - DNA, 20 bp, synthetic construct
  misc_feature 1..20: note = Description of Artificial Sequence: Synthetic oligonucleotide
  misc_feature 1..20: note = Target: SCN10A; (+) strand; PAM type: YTN; PAM sequence: TTT
  source 1..20: mol_type = other DNA
atttttgagatggagttttg

SEQ ID NO: 64015 - DNA, 20 bp, synthetic construct
  misc_feature 1..20: note = Description of Artificial Sequence: Synthetic oligonucleotide
  misc_feature 1..20: note = Target: SCN10A; (+) strand; PAM type: YTN; PAM sequence: TTA
  source 1..20: mol_type = other DNA
tttttgagatggagttttgc

SEQ ID NO: 64016 - DNA, 20 bp, synthetic construct
  misc_feature 1..20: note = Description of Artificial Sequence: Synthetic oligonucleotide
  misc_feature 1..20: note = Target: SCN10A; (+) strand; PAM type: YTN; PAM sequence: TTT
  source 1..20: mol_type = other DNA
ttgagatggagttttgccct

SEQ ID NO: 64017 - DNA, 20 bp, synthetic construct
  misc_feature 1..20: note = Description of Artificial Sequence: Synthetic oligonucleotide
  misc_feature 1..20: note = Target: SCN10A; (+) strand; PAM type: YTN; PAM sequence: TTT
  source 1..20: mol_type = other DNA
tgagatggagttttgccctt

SEQ ID NO: 64018 - DNA, 20 bp, synthetic construct
  misc_feature 1..20: note = Description of Artificial Sequence: Synthetic oligonucleotide
  misc_feature 1..20: note = Target: SCN10A; (+) strand; PAM type: YTN; PAM sequence: TTT
  source 1..20: mol_type = other DNA
gagatggagttttgcccttg

SEQ ID NO: 64019 - DNA, 20 bp, synthetic construct
  misc_feature 1..20: note = Description of Artificial Sequence: Synthetic oligonucleotide
  misc_feature 1..20: note = Target: SCN10A; (+) strand; PAM type: YTN; PAM sequence: TTG
  source 1..20: mol_type = other DNA
agatggagttttgcccttgt

SEQ ID NO: 64020 - DNA, 20 bp, synthetic construct
  misc_feature 1..20: note = Description of Artificial Sequence: Synthetic oligonucleotide
  misc_feature 1..20: note = Target: SCN10A; (+) strand; PAM type: YTN; PAM sequence: TTT
  source 1..20: mol_type = other DNA
tgcccttgttgcccaggctg

SEQ ID NO: 64021 - DNA, 20 bp, synthetic construct
  misc_feature 1..20: note = Description of Artificial Sequence: Synthetic oligonucleotide
  misc_feature 1..20: note = Target: SCN10A; (+) strand; PAM type: YTN; PAM sequence: TTT
  source 1..20: mol_type = other DNA
gcccttgttgcccaggctgg

SEQ ID NO: 64022 - DNA, 20 bp, synthetic construct
  misc_feature 1..20: note = Description of Artificial Sequence: Synthetic oligonucleotide
  misc_feature 1..20: note = Target: SCN10A; (+) strand; PAM type: YTN; PAM sequence: TTG
  source 1..20: mol_type = other DNA
cccttgttgcccaggctgga

SEQ ID NO: 64023 - DNA, 20 bp, synthetic construct
  misc_feature 1..20: note = Description of Artificial Sequence: Synthetic oligonucleotide
  misc_feature 1..20: note = Target: SCN10A; (+) strand; PAM type: YTN; PAM sequence: CTT
  source 1..20: mol_type = other DNA
gttgcccaggctggagtgca

SEQ ID NO: 64024 - DNA, 20 bp, synthetic construct
  misc_feature 1..20: note = Description of Artificial Sequence: Synthetic oligonucleotide
  misc_feature 1..20: note = Target: SCN10A; (+) strand; PAM type: YTN; PAM sequence: TTG
  source 1..20: mol_type = other DNA
ttgcccaggctggagtgcaa

SEQ ID NO: 64025 - DNA, 20 bp, synthetic construct
  misc_feature 1..20: note = Description of Artificial Sequence: Synthetic oligonucleotide
  misc_feature 1..20: note = Target: SCN10A; (+) strand; PAM type: YTN; PAM sequence: TTG
  source 1..20: mol_type = other DNA
cccaggctggagtgcaatgg

SEQ ID NO: 64026 - DNA, 20 bp, synthetic construct
  misc_feature 1..20: note = Description of Artificial Sequence: Synthetic oligonucleotide
  misc_feature 1..20: note = Target: SCN10A; (+) strand; PAM type: YTN; PAM sequence: CTG
  source 1..20: mol_type = other DNA
gagtgcaatggtgcaatctc

SEQ ID NO: 64027 - DNA, 20 bp, synthetic construct
  misc_feature 1..20: note = Description of Artificial Sequence: Synthetic oligonucleotide
  misc_feature 1..20: note = Target: SCN10A; (+) strand; PAM type: YTN; PAM sequence: CTC
  source 1..20: mol_type = other DNA
agctcaccgcaacctccgcc

SEQ ID NO: 64028 - DNA, 20 bp, synthetic construct
  misc_feature 1..20: note = Description of Artificial Sequence: Synthetic oligonucleotide
  misc_feature 1..20: note = Target: SCN10A; (+) strand; PAM type: YTN; PAM sequence: CTC
  source 1..20: mol_type = other DNA
accgcaacctccgcctcccg

SEQ ID NO: 64029 - DNA, 20 bp, synthetic construct
  misc_feature 1..20: note = Description of Artificial Sequence: Synthetic oligonucleotide
  misc_feature 1..20: note = Target: SCN10A; (+) strand; PAM type: YTN; PAM sequence: CTC
  source 1..20: mol_type = other DNA
cgcctcccgggttcaagcaa

SEQ ID NO: 64030 - DNA, 20 bp, synthetic construct
  misc_feature 1..20: note = Description of Artificial Sequence: Synthetic oligonucleotide
  misc_feature 1..20: note = Target: SCN10A; (+) strand; PAM type: YTN; PAM sequence: CTC
  source 1..20: mol_type = other DNA
ccgggttcaagcaattctcc

SEQ ID NO: 64031 - DNA, 20 bp, synthetic construct
  misc_feature 1..20: note = Description of Artificial Sequence: Synthetic oligonucleotide
  misc_feature 1..20: note = Target: SCN10A; (+) strand; PAM type: YTN; PAM sequence: TTC
  source 1..20: mol_type = other DNA
aagcaattctcctccctcag

SEQ ID NO: 64032 - DNA, 20 bp, synthetic construct
  misc_feature 1..20: note = Description of Artificial Sequence: Synthetic oligonucleotide
  misc_feature 1..20: note = Target: SCN10A; (+) strand; PAM type: YTN; PAM sequence: TTC
  source 1..20: mol_type = other DNA
tcctccctcagcctcccaag

SEQ ID NO: 64033 - DNA, 20 bp, synthetic construct
  misc_feature 1..20: note = Description of Artificial Sequence: Synthetic oligonucleotide
  misc_feature 1..20: note = Target: SCN10A; (+) strand; PAM type: YTN; PAM sequence: CTC
  source 1..20: mol_type = other DNA
ctccctcagcctcccaagta

SEQ ID NO: 64034 - DNA, 20 bp, synthetic construct
  misc_feature 1..20: note = Description of Artificial Sequence: Synthetic oligonucleotide
  misc_feature 1..20: note = Target: SCN10A; (+) strand; PAM type: YTN; PAM sequence: CTC
  source 1..20: mol_type = other DNA
cctcagcctcccaagtagct

SEQ ID NO: 64035 - DNA, 20 bp, synthetic construct
  misc_feature 1..20: note = Description of Artificial Sequence: Synthetic oligonucleotide
  misc_feature 1..20: note = Target: SCN10A; (+) strand; PAM type: YTN; PAM sequence: CTC
  source 1..20: mol_type = other DNA
agcctcccaagtagctggga

SEQ ID NO: 64036 - DNA, 20 bp, synthetic construct
  misc_feature 1..20: note = Description of Artificial Sequence: Synthetic oligonucleotide
  misc_feature 1..20: note = Target: SCN10A; (+) strand; PAM type: YTN; PAM sequence: CTC
  source 1..20: mol_type = other DNA
ccaagtagctgggattaaaa

SEQ ID NO: 64037 - DNA, 20 bp, synthetic construct
  misc_feature 1..20: note = Description of Artificial Sequence: Synthetic oligonucleotide
  misc_feature 1..20: note = Target: SCN10A; (+) strand; PAM type: YTN; PAM sequence: CTG
  source 1..20: mol_type = other DNA
ggattaaaagtatgcaccat

SEQ ID NO: 64038 - DNA, 20 bp, synthetic construct
  misc_feature 1..20: note = Description of Artificial Sequence: Synthetic oligonucleotide
  misc_feature 1..20: note = Target: SCN10A; (+) strand; PAM type: YTN; PAM sequence: TTA
  source 1..20: mol_type = other DNA
aaagtatgcaccatcacacc

SEQ ID NO: 64039 - DNA, 20 bp, synthetic construct
  misc_feature 1..20: note = Description of Artificial Sequence: Synthetic oligonucleotide
  misc_feature 1..20: note = Target: SCN10A; (+) strand; PAM type: YTN; PAM sequence: CTG
  source 1..20: mol_type = other DNA
gctaattttgtatttttggt

SEQ ID NO: 64040 - DNA, 20 bp, synthetic construct
  misc_feature 1..20: note = Description of Artificial Sequence: Synthetic oligonucleotide
  misc_feature 1..20: note = Target: SCN10A; (+) strand; PAM type: YTN; PAM sequence: CTA
  source 1..20: mol_type = other DNA
attttgtatttttggtagag

SEQ ID NO: 64041 - DNA, 20 bp, synthetic construct
  misc_feature 1..20: note = Description of Artificial Sequence: Synthetic oligonucleotide
  misc_feature 1..20: note = Target: SCN10A; (+) strand; PAM type: YTN; PAM sequence: TTT
  source 1..20: mol_type = other DNA
tgtatttttggtagagatgg

SEQ ID NO: 64042 - DNA, 20 bp, synthetic construct
  misc_feature 1..20: note = Description of Artificial Sequence: Synthetic oligonucleotide
  misc_feature 1..20: note = Target: SCN10A; (+) strand; PAM type: YTN; PAM sequence: TTT
  source 1..20: mol_type = other DNA
gtatttttggtagagatggg

SEQ ID NO: 64043 - DNA, 20 bp, synthetic construct
  misc_feature 1..20: note = Description of Artificial Sequence: Synthetic oligonucleotide
  misc_feature 1..20: note = Target: SCN10A; (+) strand; PAM type: YTN; PAM sequence: TTG
  source 1..20: mol_type = other DNA
tatttttggtagagatgggt

SEQ ID NO: 64044 - DNA, 20 bp, synthetic construct
  misc_feature 1..20: note = Description of Artificial Sequence: Synthetic oligonucleotide
  misc_feature 1..20: note = Target: SCN10A; (+) strand; PAM type: YTN; PAM sequence: TTT
  source 1..20: mol_type = other DNA
ttggtagagatgggtcttct

SEQ ID NO: 64045 - DNA, 20 bp, synthetic construct
  misc_feature 1..20: note = Description of Artificial Sequence: Synthetic oligonucleotide
  misc_feature 1..20: note = Target: SCN10A; (+) strand; PAM type: YTN; PAM sequence: TTT
  source 1..20: mol_type = other DNA
tggtagagatgggtcttctc

SEQ ID NO: 64046 - DNA, 20 bp, synthetic construct
  misc_feature 1..20: note = Description of Artificial Sequence: Synthetic oligonucleotide
  misc_feature 1..20: note = Target: SCN10A; (+) strand; PAM type: YTN; PAM sequence: TTT
  source 1..20: mol_type = other DNA
ggtagagatgggtcttctcc

SEQ ID NO: 64047 - DNA, 20 bp, synthetic construct
  misc_feature 1..20: note = Description of Artificial Sequence: Synthetic oligonucleotide
  misc_feature 1..20: note = Target: SCN10A; (+) strand; PAM type: YTN; PAM sequence: TTG
  source 1..20: mol_type = other DNA
gtagagatgggtcttctcca

SEQ ID NO: 64048 - DNA, 20 bp, synthetic construct
  misc_feature 1..20: note = Description of Artificial Sequence: Synthetic oligonucleotide
  misc_feature 1..20: note = Target: SCN10A; (+) strand; PAM type: YTN; PAM sequence: CTT
  source 1..20: mol_type = other DNA
ctccatgttggtcaggctgg

SEQ ID NO: 64049 - DNA, 20 bp, synthetic construct
  misc_feature 1..20: note = Description of Artificial Sequence: Synthetic oligonucleotide
  misc_feature 1..20: note = Target: SCN10A; (+) strand; PAM type: YTN; PAM sequence: TTC
  source 1..20: mol_type = other DNA
tccatgttggtcaggctggt

SEQ ID NO: 64050 - DNA, 20 bp, synthetic construct
  misc_feature 1..20: note = Description of Artificial Sequence: Synthetic oligonucleotide
  misc_feature 1..20: note = Target: SCN10A; (+) strand; PAM type: YTN; PAM sequence: CTC
  source 1..20: mol_type = other DNA
catgttggtcaggctggtct

SEQ ID NO: 64051 - DNA, 20 bp, synthetic construct
  misc_feature 1..20: note = Description of Artificial Sequence: Synthetic oligonucleotide
  misc_feature 1..20: note = Target: SCN10A; (+) strand; PAM type: YTN; PAM sequence: TTG
  source 1..20: mol_type = other DNA
gtcaggctggtctcgaactc

SEQ ID NO: 64052 - DNA, 20 bp, synthetic construct
  misc_feature 1..20: note = Description of Artificial Sequence: Synthetic oligonucleotide
  misc_feature 1..20: note = Target: SCN10A; (+) strand; PAM type: YTN; PAM sequence: CTG
  source 1..20: mol_type = other DNA
gtctcgaactcccgacctca

SEQ ID NO: 64053 - DNA, 20 bp, synthetic construct
  misc_feature 1..20: note = Description of Artificial Sequence: Synthetic oligonucleotide
  misc_feature 1..20: note = Target: SCN10A; (+) strand; PAM type: YTN; PAM sequence: CTC
  source 1..20: mol_type = other DNA
gaactcccgacctcaggtga

SEQ ID NO: 64054 - DNA, 20 bp, synthetic construct
  misc_feature 1..20: note = Description of Artificial Sequence: Synthetic oligonucleotide
  misc_feature 1..20: note = Target: SCN10A; (+) strand; PAM type: YTN; PAM sequence: CTC
  source 1..20: mol_type = other DNA
ccgacctcaggtgatccgcc

SEQ ID NO: 64055 - DNA, 20 bp, synthetic construct
  misc_feature 1..20: note = Description of Artificial Sequence: Synthetic oligonucleotide
  misc_feature 1..20: note = Target: SCN10A; (+) strand; PAM type: YTN; PAM sequence: CTC
  source 1..20: mol_type = other DNA
aggtgatccgcctgcctgcg

SEQ ID NO: 64056 - DNA, 20 bp, synthetic construct
  misc_feature 1..20: note = Description of Artificial Sequence: Synthetic oligonucleotide
  misc_feature 1..20: note = Target: SCN10A; (+) strand; PAM type: YTN; PAM sequence: CTG
  source 1..20: mol_type = other DNA
cctgcgcctccaacagtgct

SEQ ID NO: 64057 - DNA, 20 bp, synthetic construct
  misc_feature 1..20: note = Description of Artificial Sequence: Synthetic oligonucleotide
  misc_feature 1..20: note = Target: SCN10A; (+) strand; PAM type: YTN; PAM sequence: CTG
  source 1..20: mol_type = other DNA
cgcctccaacagtgctggga

SEQ ID NO: 64058 - DNA, 20 bp, synthetic construct
  misc_feature 1..20: note = Description of Artificial Sequence: Synthetic oligonucleotide
  misc_feature 1..20: note = Target: SCN10A; (+) strand; PAM type: YTN; PAM sequence: CTC
  source 1..20: mol_type = other DNA
caacagtgctgggattacag

SEQ ID NO: 64059 - DNA, 20 bp, synthetic construct
  misc_feature 1..20: note = Description of Artificial Sequence: Synthetic oligonucleotide
  misc_feature 1..20: note = Target: SCN10A; (+) strand; PAM type: YTN; PAM sequence: CTG
  source 1..20: mol_type = other DNA
ggattacaggcattaaccac

SEQ ID NO: 64060 - DNA, 20 bp, synthetic construct
  misc_feature 1..20: note = Description of Artificial Sequence: Synthetic oligonucleotide
  misc_feature 1..20: note = Target: SCN10A; (+) strand; PAM type: YTN; PAM sequence: TTA
  source 1..20: mol_type = other DNA
caggcattaaccactgcccc

SEQ ID NO: 64061 - DNA, 20 bp, synthetic construct
  misc_feature 1..20: note = Description of Artificial Sequence: Synthetic oligonucleotide
  misc_feature 1..20: note = Target: SCN10A; (+) strand; PAM type: YTN; PAM sequence: TTA
  source 1..20: mol_type = other DNA
accactgcccctggccttct

SEQ ID NO: 64062 - DNA, 20 bp, synthetic construct
  misc_feature 1..20: note = Description of Artificial Sequence: Synthetic oligonucleotide
  misc_feature 1..20: note = Target: SCN10A; (+) strand; PAM type: YTN; PAM sequence: CTG
  source 1..20: mol_type = other DNA
cccctggccttctttttatt

SEQ ID NO: 64063 - DNA, 20 bp, synthetic construct
  misc_feature 1..20: note = Description of Artificial Sequence: Synthetic oligonucleotide
  misc_feature 1..20: note = Target: SCN10A; (+) strand; PAM type: YTN; PAM sequence: CTG
  source 1..20: mol_type = other DNA
gccttctttttattgttttc

SEQ ID NO: 64064 - DNA, 20 bp, synthetic construct
  misc_feature 1..20: note = Description of Artificial Sequence: Synthetic oligonucleotide
  misc_feature 1..20: note = Target: SCN10A; (+) strand; PAM type: YTN; PAM sequence: CTT
  source 1..20: mol_type = other DNA
ctttttattgttttcaatga

SEQ ID NO: 64065 - DNA, 20 bp, synthetic construct
  misc_feature 1..20: note = Description of Artificial Sequence: Synthetic oligonucleotide
  misc_feature 1..20: note = Target: SCN10A; (+) strand; PAM type: YTN; PAM sequence: TTC
  source 1..20: mol_type = other DNA
tttttattgttttcaatgag

SEQ ID NO: 64066 - DNA, 20 bp, synthetic construct
  misc_feature 1..20: note = Description of Artificial Sequence: Synthetic oligonucleotide
  misc_feature 1..20: note = Target: SCN10A; (+) strand; PAM type: YTN; PAM sequence: CTT
  source 1..20: mol_type = other DNA
tttattgttttcaatgagac

SEQ ID NO: 64067 - DNA, 20 bp, synthetic construct
  misc_feature 1..20: note = Description of Artificial Sequence: Synthetic oligonucleotide
  misc_feature 1..20: note = Target: SCN10A; (+) strand; PAM type: YTN; PAM sequence: TTT
  source 1..20: mol_type = other DNA
ttattgttttcaatgagacg

SEQ ID NO: 64068 - DNA, 20 bp, synthetic construct
  misc_feature 1..20: note = Description of Artificial Sequence: Synthetic oligonucleotide
  misc_feature 1..20: note = Target: SCN10A; (+) strand; PAM type: YTN; PAM sequence: TTT
  source 1..20: mol_type = other DNA
tattgttttcaatgagacgg

SEQ ID NO: 64069 - DNA, 20 bp, synthetic construct
  misc_feature 1..20: note = Description of Artificial Sequence: Synthetic oligonucleotide
  misc_feature 1..20: note = Target: SCN10A; (+) strand; PAM type: YTN; PAM sequence: TTT
  source 1..20: mol_type = other DNA
attgttttcaatgagacgga

SEQ ID NO: 64070 - DNA, 20 bp, synthetic construct
  misc_feature 1..20: note = Description of Artificial Sequence: Synthetic oligonucleotide
  misc_feature 1..20: note = Target: SCN10A; (+) strand; PAM type: YTN; PAM sequence: TTA
  source 1..20: mol_type = other DNA
ttgttttcaatgagacggag

SEQ ID NO: 64071 - DNA, 20 bp, synthetic construct
  misc_feature 1..20: note = Description of Artificial Sequence: Synthetic oligonucleotide
  misc_feature 1..20: note = Target: SCN10A; (+) strand; PAM type: YTN; PAM sequence: TTG
  source 1..20: mol_type = other DNA
ttttcaatgagacggagtct

SEQ ID NO: 64072 - DNA, 20 bp, synthetic construct
  misc_feature 1..20: note = Description of Artificial Sequence: Synthetic oligonucleotide
  misc_feature 1..20: note = Target: SCN10A; (+) strand; PAM type: YTN; PAM sequence: TTT
  source 1..20: mol_type = other DNA
tcaatgagacggagtctcgc

SEQ ID NO: 64073 - DNA, 20 bp, synthetic construct
  misc_feature 1..20: note = Description of Artificial Sequence: Synthetic oligonucleotide
  misc_feature 1..20: note = Target: SCN10A; (+) strand; PAM type: YTN; PAM sequence: TTT
  source 1..20: mol_type = other DNA
caatgagacggagtctcgct

SEQ ID NO: 64074 - DNA, 20 bp, synthetic construct
  misc_feature 1..20: note = Description of Artificial Sequence: Synthetic oligonucleotide
  misc_feature 1..20: note = Target: SCN10A; (+) strand; PAM type: YTN; PAM sequence: TTC
  source 1..20: mol_type = other DNA
aatgagacggagtctcgctc

SEQ ID NO: 64075 - DNA, 20 bp, synthetic construct
  misc_feature 1..20: note = Description of Artificial Sequence: Synthetic oligonucleotide
  misc_feature 1..20: note = Target: SCN10A; (+) strand; PAM type: YTN; PAM sequence: CTC
  source 1..20: mol_type = other DNA
gctctgttgcccaggctgga

SEQ ID NO: 64076 - DNA, 20 bp, synthetic construct
  misc_feature 1..20: note = Description of Artificial Sequence: Synthetic oligonucleotide
  misc_feature 1..20: note = Target: SCN10A; (+) strand; PAM type: YTN; PAM sequence: CTC
  source 1..20: mol_type = other DNA
tgttgcccaggctggagtgc

SEQ ID NO: 64077 - DNA, 20 bp, synthetic construct
  misc_feature 1..20: note = Description of Artificial Sequence: Synthetic oligonucleotide
  misc_feature 1..20: note = Target: SCN10A; (+) strand; PAM type: YTN; PAM sequence: CTG
  source 1..20: mol_type = other DNA
ttgcccaggctggagtgcag

SEQ ID NO: 64078 - DNA, 20 bp, synthetic construct
  misc_feature 1..20: note = Description of Artificial Sequence: Synthetic oligonucleotide
  misc_feature 1..20: note = Target: SCN10A; (+) strand; PAM type: YTN; PAM sequence: TTG
  source 1..20: mol_type = other DNA
cccaggctggagtgcagtgg

SEQ ID NO: 64079 - DNA, 20 bp, synthetic construct
  misc_feature 1..20: note = Description of Artificial Sequence: Synthetic oligonucleotide
  misc_feature 1..20: note = Target: SCN10A; (+) strand; PAM type: YTN; PAM sequence: CTG
  source 1..20: mol_type = other DNA
gagtgcagtggcatgatctc

SEQ ID NO: 64080 - DNA, 20 bp, synthetic construct
  misc_feature 1..20: note = Description of Artificial Sequence: Synthetic oligonucleotide
  misc_feature 1..20: note = Target: SCN10A; (+) strand; PAM type: YTN; PAM sequence: CTC
  source 1..20: mol_type = other DNA
agctcactgcaacctctgtc

SEQ ID NO: 64081 - DNA, 20 bp, synthetic construct
  misc_feature 1..20: note = Description of Artificial Sequence: Synthetic oligonucleotide
  misc_feature 1..20: note = Target: SCN10A; (+) strand; PAM type: YTN; PAM sequence: CTC
  source 1..20: mol_type = other DNA
actgcaacctctgtctctgg

SEQ ID NO: 64082 - DNA, 20 bp, synthetic construct
  misc_feature 1..20: note = Description of Artificial Sequence: Synthetic oligonucleotide
  misc_feature 1..20: note = Target: SCN10A; (+) strand; PAM type: YTN; PAM sequence: CTG
  source 1..20: mol_type = other DNA
caacctctgtctctgggatt

SEQ ID NO: 64083 - DNA, 20 bp, synthetic construct
  misc_feature 1..20: note = Description of Artificial Sequence: Synthetic oligonucleotide
  misc_feature 1..20: note = Target: SCN10A; (+) strand; PAM type: YTN; PAM sequence: CTC
  source 1..20: mol_type = other DNA
tgtctctgggattcaagcaa

SEQ ID NO: 64084 - DNA, 20 bp, synthetic construct
  misc_feature 1..20: note = Description of Artificial Sequence: Synthetic oligonucleotide
  misc_feature 1..20: note = Target: SCN10A; (+) strand; PAM type: YTN; PAM sequence: CTG
  source 1..20: mol_type = other DNA
tctctgggattcaagcaatt

SEQ ID NO: 64085 - DNA, 20 bp, synthetic construct
  misc_feature 1..20: note = Description of Artificial Sequence: Synthetic oligonucleotide
  misc_feature 1..20: note = Target: SCN10A; (+) strand; PAM type: YTN; PAM sequence: CTC
  source 1..20: mol_type = other DNA
tgggattcaagcaattctca

SEQ ID NO: 64086 - DNA, 20 bp, synthetic construct
  misc_feature 1..20: note = Description of Artificial Sequence: Synthetic oligonucleotide
  misc_feature 1..20: note = Target: SCN10A; (+) strand; PAM type: YTN; PAM sequence: CTG
  source 1..20: mol_type = other DNA
ggattcaagcaattctcatg

SEQ ID NO: 64087 - DNA, 20 bp, synthetic construct
  misc_feature 1..20: note = Description of Artificial Sequence: Synthetic oligonucleotide
  misc_feature 1..20: note = Target: SCN10A; (+) strand; PAM type: YTN; PAM sequence: TTC
  source 1..20: mol_type = other DNA
aagcaattctcatgcctcac

SEQ ID NO: 64088 - DNA, 20 bp, synthetic construct
  misc_feature 1..20: note = Description of Artificial Sequence: Synthetic oligonucleotide
  misc_feature 1..20: note = Target: SCN10A; (+) strand; PAM type: YTN; PAM sequence: TTC
  source 1..20: mol_type = other DNA
tcatgcctcaccctcctgag

SEQ ID NO: 64089 - DNA, 20 bp, synthetic construct
  misc_feature 1..20: note = Description of Artificial Sequence: Synthetic oligonucleotide
  misc_feature 1..20: note = Target: SCN10A; (+) strand; PAM type: YTN; PAM sequence: CTC
  source 1..20: mol_type = other DNA
atgcctcaccctcctgagta

SEQ ID NO: 64090 - DNA, 20 bp, synthetic construct
  misc_feature 1..20: note = Description of Artificial Sequence: Synthetic oligonucleotide
  misc_feature 1..20: note = Target: SCN10A; (+) strand; PAM type: YTN; PAM sequence: CTC
  source 1..20: mol_type = other DNA
accctcctgagtagctggga

SEQ ID NO: 64091 - DNA, 20 bp, synthetic construct
  misc_feature 1..20: note = Description of Artificial Sequence: Synthetic oligonucleotide
  misc_feature 1..20: note = Target: SCN10A; (+) strand; PAM type: YTN; PAM sequence: CTC
  source 1..20: mol_type = other DNA
ctgagtagctgggattacag

SEQ ID NO: 64092 - DNA, 20 bp, synthetic construct
  misc_feature 1..20: note = Description of Artificial Sequence: Synthetic oligonucleotide
  misc_feature 1..20: note = Target: SCN10A; (+) strand; PAM type: YTN; PAM sequence: CTG
  source 1..20: mol_type = other DNA
agtagctgggattacaggtg

SEQ ID NO: 64093 - DNA, 20 bp, synthetic construct
  misc_feature 1..20: note = Description of Artificial Sequence: Synthetic oligonucleotide
  misc_feature 1..20: note = Target: SCN10A; (+) strand; PAM type: YTN; PAM sequence: CTG
  source 1..20: mol_type = other DNA
ggattacaggtgtgtgccac

SEQ ID NO: 64094 - DNA, 20 bp, synthetic construct
  misc_feature 1..20: note = Description of Artificial Sequence: Synthetic oligonucleotide
  misc_feature 1..20: note = Target: SCN10A; (+) strand; PAM type: YTN; PAM sequence: TTA
  source 1..20: mol_type = other DNA
caggtgtgtgccaccacacc

SEQ ID NO: 64095 - DNA, 20 bp, synthetic construct
  misc_feature 1..20: note = Description of Artificial Sequence: Synthetic oligonucleotide
  misc_feature 1..20: note = Target: SCN10A; (+) strand; PAM type: YTN; PAM sequence: CTA
  source 1..20: mol_type = other DNA
atttatatatttttagtaga

SEQ ID NO: 64096 - DNA, 20 bp, synthetic construct
  misc_feature 1..20: note = Description of Artificial Sequence: Synthetic oligonucleotide
  misc_feature 1..20: note = Target: SCN10A; (+) strand; PAM type: YTN; PAM sequence: TTT
  source 1..20: mol_type = other DNA
atatatttttagtagagatg

SEQ ID NO: 64097 - DNA, 20 bp, synthetic construct
  misc_feature 1..20: note = Description of Artificial Sequence: Synthetic oligonucleotide
  misc_feature 1..20: note = Target: SCN10A; (+) strand; PAM type: YTN; PAM sequence: TTA
  source 1..20: mol_type = other DNA
tatatttttagtagagatgg

SEQ ID NO: 64098 - DNA, 20 bp, synthetic construct
  misc_feature 1..20: note = Description of Artificial Sequence: Synthetic oligonucleotide
  misc_feature 1..20: note = Target: SCN10A; (+) strand; PAM type: YTN; PAM sequence: TTT
  source 1..20: mol_type = other DNA
ttagtagagatggggttttc

SEQ ID NO: 64099 - DNA, 20 bp, synthetic construct
  misc_feature 1..20: note = Description of Artificial Sequence: Synthetic oligonucleotide
  misc_feature 1..20: note = Target: SCN10A; (+) strand; PAM type: YTN; PAM sequence: TTT
  source 1..20: mol_type = other DNA
tagtagagatggggttttct

SEQ ID NO: 64100 - DNA, 20 bp, synthetic construct
  misc_feature 1..20: note = Description of Artificial Sequence: Synthetic oligonucleotide
  misc_feature 1..20: note = Target: SCN10A; (+) strand; PAM type: YTN; PAM sequence: TTT
  source 1..20: mol_type = other DNA
agtagagatggggttttctc

SEQ ID NO: 64101 - DNA, 20 bp, synthetic construct
  misc_feature 1..20: note = Description of Artificial Sequence: Synthetic oligonucleotide
  misc_feature 1..20: note = Target: SCN10A; (+) strand; PAM type: YTN; PAM sequence: TTA
  source 1..20: mol_type = other DNA
gtagagatggggttttctcc

SEQ ID NO: 64102 - DNA, 20 bp, synthetic construct
  misc_feature 1..20: note = Description of Artificial Sequence: Synthetic oligonucleotide
  misc_feature 1..20: note = Target: SCN10A; (+) strand; PAM type: YTN; PAM sequence: TTT
  source 1..20: mol_type = other DNA
tctcctgttggccaggctgg

SEQ ID NO: 64103 - DNA, 20 bp, synthetic construct
  misc_feature 1..20: note = Description of Artificial Sequence: Synthetic oligonucleotide
  misc_feature 1..20: note = Target: SCN10A; (+) strand; PAM type: YTN; PAM sequence: TTT
  source 1..20: mol_type = other DNA
ctcctgttggccaggctggt

SEQ ID NO: 64104 - DNA, 20 bp, synthetic construct
  misc_feature 1..20: note = Description of Artificial Sequence: Synthetic oligonucleotide
  misc_feature 1..20: note = Target: SCN10A; (+) strand; PAM type: YTN; PAM sequence: TTC
  source 1..20: mol_type = other DNA
tcctgttggccaggctggtc

SEQ ID NO: 64105 - DNA, 20 bp, synthetic construct
  misc_feature 1..20: note = Description of Artificial Sequence: Synthetic oligonucleotide
  misc_feature 1..20: note = Target: SCN10A; (+) strand; PAM type: YTN; PAM sequence: CTC
  source 1..20: mol_type = other DNA
ctgttggccaggctggtctc

SEQ ID NO: 64106 - DNA, 20 bp, synthetic construct
  misc_feature 1..20: note = Description of Artificial Sequence: Synthetic oligonucleotide
  misc_feature 1..20: note = Target: SCN10A; (+) strand; PAM type: YTN; PAM sequence: CTG
  source 1..20: mol_type = other DNA
ttggccaggctggtctccaa

SEQ ID NO: 64107 - DNA, 20 bp, synthetic construct
  misc_feature 1..20: note = Description of Artificial Sequence: Synthetic oligonucleotide
  misc_feature 1..20: note = Target: SCN10A; (+) strand; PAM type: YTN; PAM sequence: TTG
  source 1..20: mol_type = other DNA
gccaggctggtctccaactc

SEQ ID NO: 64108 - DNA, 20 bp, synthetic construct
  misc_feature 1..20: note = Description of Artificial Sequence: Synthetic oligonucleotide
  misc_feature 1..20: note = Target: SCN10A; (+) strand; PAM type: YTN; PAM sequence: CTG
  source 1..20: mol_type = other DNA
gtctccaactcctgtcctca

SEQ ID NO: 64109 - DNA, 20 bp, synthetic construct
  misc_feature 1..20: note = Description of Artificial Sequence: Synthetic oligonucleotide
  misc_feature 1..20: note = Target: SCN10A; (+) strand; PAM type: YTN; PAM sequence: CTC
  source 1..20: mol_type = other DNA
caactcctgtcctcaagcaa

SEQ ID NO: 64110 - DNA, 20 bp, synthetic construct
  misc_feature 1..20: note = Description of Artificial Sequence: Synthetic oligonucleotide
  misc_feature 1..20: note = Target: SCN10A; (+) strand; PAM type: YTN; PAM sequence: CTC
  source 1..20: mol_type = other DNA
ctgtcctcaagcaatcctcc

SEQ ID NO: 64111 - DNA, 20 bp, synthetic construct
  misc_feature 1..20: note = Description of Artificial Sequence: Synthetic oligonucleotide
  misc_feature 1..20: note = Target: SCN10A; (+) strand; PAM type: YTN; PAM sequence: CTG
  source 1..20: mol_type = other DNA
tcctcaagcaatcctcccac

SEQ ID NO: 64112 - DNA, 20 bp, synthetic construct
  misc_feature 1..20: note = Description of Artificial Sequence: Synthetic oligonucleotide
  misc_feature 1..20: note = Target: SCN10A; (+) strand; PAM type: YTN; PAM sequence: CTC
  source 1..20: mol_type = other DNA
aagcaatcctcccaccttgg

SEQ ID NO: 64113 - DNA, 20 bp, synthetic construct
  misc_feature 1..20: note = Description of Artificial Sequence: Synthetic oligonucleotide
  misc_feature 1..20: note = Target: SCN10A; (+) strand; PAM type: YTN; PAM sequence: CTC
  source 1..20: mol_type = other DNA
ccaccttggcctcccaaaat

SEQ ID NO: 64114 - DNA, 20 bp, synthetic construct
  misc_feature 1..20: note = Description of Artificial Sequence: Synthetic oligonucleotide
  misc_feature 1..20: note = Target: SCN10A; (+) strand; PAM type: YTN; PAM sequence: CTT
  source 1..20: mol_type = other DNA
ggcctcccaaaattctggga

SEQ ID NO: 64115 - DNA, 20 bp, synthetic construct
  misc_feature 1..20: note = Description of Artificial Sequence: Synthetic oligonucleotide
  misc_feature 1..20: note = Target: SCN10A; (+) strand; PAM type: YTN; PAM sequence: TTG
  source 1..20: mol_type = other DNA
gcctcccaaaattctgggat

SEQ ID NO: 64116 - DNA, 20 bp, synthetic construct
  misc_feature 1..20: note = Description of Artificial Sequence: Synthetic oligonucleotide
  misc_feature 1..20: note = Target: SCN10A; (+) strand; PAM type: YTN; PAM sequence: CTC
  source 1..20: mol_type = other DNA
ccaaaattctgggattacag

SEQ ID NO: 64117 - DNA, 20 bp, synthetic construct
  misc_feature 1..20: note = Description of Artificial Sequence: Synthetic oligonucleotide
  misc_feature 1..20: note = Target: SCN10A; (+) strand; PAM type: YTN; PAM sequence: TTC
  source 1..20: mol_type = other DNA
tgggattacaggcgtgagcc

SEQ ID NO: 64118 - DNA, 20 bp, synthetic construct
  misc_feature 1..20: note = Description of Artificial Sequence: Synthetic oligonucleotide
  misc_feature 1..20: note = Target: SCN10A; (+) strand; PAM type: YTN; PAM sequence: CTG
  source 1..20: mol_type = other DNA
ggattacaggcgtgagccac

SEQ ID NO: 64119 - DNA, 20 bp, synthetic construct
  misc_feature 1..20: note = Description of Artificial Sequence: Synthetic oligonucleotide
  misc_feature 1..20: note = Target: SCN10A; (+) strand; PAM type: YTN; PAM sequence: TTA
  source 1..20: mol_type = other DNA
caggcgtgagccaccccacc

SEQ ID NO: 64120 - DNA, 20 bp, synthetic construct
  misc_feature 1..20: note = Description of Artificial Sequence: Synthetic oligonucleotide
  misc_feature 1..20: note = Target: SCN10A; (+) strand; PAM type: YTN; PAM sequence: CTG
  source 1..20: mol_type = other DNA
gcccccttggctttaaaaaa

SEQ ID NO: 64121 - DNA, 20 bp, synthetic construct
  misc_feature 1..20: note = Description of Artificial Sequence: Synthetic oligonucleotide
  misc_feature 1..20: note = Target: SCN10A; (+) strand; PAM type: YTN; PAM sequence: CTT
  source 1..20: mol_type = other DNA
ggctttaaaaaaaaaatggc

SEQ ID NO: 64122 - DNA, 20 bp, synthetic construct
  misc_feature 1..20: note = Description of Artificial Sequence: Synthetic oligonucleotide
  misc_feature 1..20: note = Target: SCN10A; (+) strand; PAM type: YTN; PAM sequence: TTG
  source 1..20: mol_type = other DNA
gctttaaaaaaaaaatggca

SEQ ID NO: 64123 - DNA, 20 bp, synthetic construct
  misc_feature 1..20: note = Description of Artificial Sequence: Synthetic oligonucleotide
  misc_feature 1..20: note = Target: SCN10A; (+) strand; PAM type: YTN; PAM sequence: CTT
  source 1..20: mol_type = other DNA
taaaaaaaaaatggcataat

SEQ ID NO: 64124 - DNA, 20 bp, synthetic construct
  misc_feature 1..20: note = Description of Artificial Sequence: Synthetic oligonucleotide
  misc_feature 1..20: note = Target: SCN10A; (+) strand; PAM type: YTN; PAM sequence: TTT
  source 1..20: mol_type = other DNA
aaaaaaaaaatggcataatc

SEQ ID NO: 64125 - DNA, 20 bp, synthetic construct
  misc_feature 1..20: note = Description of Artificial Sequence: Synthetic oligonucleotide
  misc_feature 1..20: note = Target: SCN10A; (+) strand; PAM type: YTN; PAM sequence: TTA
  source 1..20: mol_type = other DNA
aaaaaaaaatggcataatct

SEQ ID NO: 64126 - DNA, 20 bp, synthetic construct
  misc_feature 1..20: note = Description of Artificial Sequence: Synthetic oligonucleotide
  misc_feature 1..20: note = Target: SCN10A; (+) strand; PAM type: YTN; PAM sequence: CTT
  source 1..20: mol_type = other DNA
ggaaccttgataccaaaacc

SEQ ID NO: 64127 - DNA, 20 bp, synthetic construct
  misc_feature 1..20: note = Description of Artificial Sequence: Synthetic oligonucleotide
  misc_feature 1..20: note = Target: SCN10A; (+) strand; PAM type: YTN; PAM sequence: TTG
  source 1..20: mol_type = other DNA
gaaccttgataccaaaacct

SEQ ID NO: 64128 - DNA, 20 bp, synthetic construct
  misc_feature 1..20: note = Description of Artificial Sequence: Synthetic oligonucleotide
  misc_feature 1..20: note = Target: SCN10A; (+) strand; PAM type: YTN; PAM sequence: CTT
  source 1..20: mol_type = other DNA
gataccaaaacctggcaagg

SEQ ID NO: 64129 - DNA, 20 bp, synthetic construct
  misc_feature 1..20: note = Description of Artificial Sequence: Synthetic oligonucleotide
  misc_feature 1..20: note = Target: SCN10A; (+) strand; PAM type: YTN; PAM sequence: TTG
  source 1..20: mol_type = other DNA
ataccaaaacctggcaagga

SEQ ID NO: 64130 - DNA, 20 bp, synthetic construct
  misc_feature 1..20: note = Description of Artificial Sequence: Synthetic oligonucleotide
  misc_feature 1..20: note = Target: SCN10A; (+) strand; PAM type: YTN; PAM sequence: CTG
  source 1..20: mol_type = other DNA
gcaaggacaatgaaagtcag

SEQ ID NO: 64131 - DNA, 20 bp, synthetic construct
  misc_feature 1..20: note = Description of Artificial Sequence: Synthetic oligonucleotide
  misc_feature 1..20: note = Target: SCN10A; (+) strand; PAM type: YTN; PAM sequence: TTA
  source 1..20: mol_type = other DNA
tagatcaaatattactcatt

SEQ ID NO: 64132 - DNA, 20 bp, synthetic construct
  misc_feature 1..20: note = Description of Artificial Sequence: Synthetic oligonucleotide
  misc_feature 1..20: note = Target: SCN10A; (+) strand; PAM type: YTN; PAM sequence: TTA
  source 1..20: mol_type = other DNA
ctcattgatatggataaaaa

SEQ ID NO: 64133 - DNA, 20 bp, synthetic construct
  misc_feature 1..20: note = Description of Artificial Sequence: Synthetic oligonucleotide
  misc_feature 1..20: note = Target: SCN10A; (+) strand; PAM type: YTN; PAM sequence: CTC
  source 1..20: mol_type = other DNA
attgatatggataaaaaaat

SEQ ID NO: 64134 - DNA, 20 bp, synthetic construct
  misc_feature 1..20: note = Description of Artificial Sequence: Synthetic oligonucleotide
  misc_feature 1..20: note = Target: SCN10A; (+) strand; PAM type: YTN; PAM sequence: TTG
  source 1..20: mol_type = other DNA
atatggataaaaaaatctta

SEQ ID NO: 64135 - DNA, 20 bp, synthetic construct
  misc_feature 1..20: note = Description of Artificial Sequence: Synthetic oligonucleotide
  misc_feature 1..20: note = Target: SCN10A; (+) strand; PAM type: YTN; PAM sequence: CTT
  source 1..20: mol_type = other DNA
aagcaaatttttagcaaact

SEQ ID NO: 64136 - DNA, 20 bp, synthetic construct
  misc_feature 1..20: note = Description of Artificial Sequence: Synthetic oligonucleotide
  misc_feature 1..20: note = Target: SCN10A; (+) strand; PAM type: YTN; PAM sequence: TTA
  source 1..20: mol_type = other DNA
agcaaatttttagcaaacta

SEQ ID NO: 64137 - DNA, 20 bp, synthetic construct
  misc_feature 1..20: note = Description of Artificial Sequence: Synthetic oligonucleotide
  misc_feature 1..20: note = Target: SCN10A; (+) strand; PAM type: YTN; PAM sequence: TTT
  source 1..20: mol_type = other DNA
ttagcaaactaaatcttcca

SEQ ID NO: 64138 - DNA, 20 bp, synthetic construct
  misc_feature 1..20: note = Description of Artificial Sequence: Synthetic oligonucleotide
  misc_feature 1..20: note = Target: SCN10A; (+) strand; PAM type: YTN; PAM sequence: TTT
  source 1..20: mol_type = other DNA
tagcaaactaaatcttccaa

SEQ ID NO: 64139 - DNA, 20 bp, synthetic construct
  misc_feature 1..20: note = Description of Artificial Sequence: Synthetic oligonucleotide
  misc_feature 1..20: note = Target: SCN10A; (+) strand; PAM type: YTN; PAM sequence: TTT
  source 1..20: mol_type = other DNA
agcaaactaaatcttccaat

SEQ ID NO: 64140 - DNA, 20 bp, synthetic construct
  misc_feature 1..20: note = Description of Artificial Sequence: Synthetic oligonucleotide
  misc_feature 1..20: note = Target: SCN10A; (+) strand; PAM type: YTN; PAM sequence: TTA
  source 1..20: mol_type = other DNA
gcaaactaaatcttccaatg

SEQ ID NO: 64141 - DNA, 20 bp, synthetic construct
  misc_feature 1..20: note = Description of Artificial Sequence: Synthetic oligonucleotide
  misc_feature 1..20: note = Target: SCN10A; (+) strand; PAM type: YTN; PAM sequence: CTA
  source 1..20: mol_type = other DNA
aatcttccaatgtattaaaa

SEQ ID NO: 64142 - DNA, 20 bp, synthetic construct
  misc_feature 1..20: note = Description of Artificial Sequence: Synthetic oligonucleotide
  misc_feature 1..20: note = Target: SCN10A; (+) strand; PAM type: YTN; PAM sequence: CTT
  source 1..20: mol_type = other DNA
ccaatgtattaaaaaatgca

SEQ ID NO: 64143 - DNA, 20 bp, synthetic construct
  misc_feature 1..20: note = Description of Artificial Sequence: Synthetic oligonucleotide
  misc_feature 1..20: note = Target: SCN10A; (+) strand; PAM type: YTN; PAM sequence: TTC
  source 1..20: mol_type = other DNA
caatgtattaaaaaatgcat

SEQ ID NO: 64144 - DNA, 20 bp, synthetic construct
  misc_feature 1..20: note = Description of Artificial Sequence: Synthetic oligonucleotide
  misc_feature 1..20: note = Target: SCN10A; (+) strand; PAM type: YTN; PAM sequence: TTA
  source 1..20: mol_type = other DNA
aaaaatgcatcacgatcaag

SEQ ID NO: 64145 - DNA, 20 bp, synthetic construct
  misc_feature 1..20: note = Description of Artificial Sequence: Synthetic oligonucleotide
  misc_feature 1..20: note = Target: SCN10A; (+) strand; PAM type: YTN; PAM sequence: CTA
  source 1..20: mol_type = other DNA
ggtttgagctgggaatgtaa

SEQ ID NO: 64146 - DNA, 20 bp, synthetic construct
  misc_feature 1..20: note = Description of Artificial Sequence: Synthetic oligonucleotide
  misc_feature 1..20: note = Target: SCN10A; (+) strand; PAM type: YTN; PAM sequence: TTT
  source 1..20: mol_type = other DNA
gagctgggaatgtaaagttg

SEQ ID NO: 64147 - DNA, 20 bp, synthetic construct
  misc_feature 1..20: note = Description of Artificial Sequence: Synthetic oligonucleotide
  misc_feature 1..20: note = Target: SCN10A; (+) strand; PAM type: YTN; PAM sequence: TTG
  source 1..20: mol_type = other DNA
agctgggaatgtaaagttga

SEQ ID NO: 64148 - DNA, 20 bp, synthetic construct
  misc_feature 1..20: note = Description of Artificial Sequence: Synthetic oligonucleotide
  misc_feature 1..20: note = Target: SCN10A; (+) strand; PAM type: YTN; PAM sequence: CTG
  source 1..20: mol_type = other DNA
ggaatgtaaagttgatttaa

SEQ ID NO: 64149 - DNA, 20 bp, synthetic construct
  misc_feature 1..20: note = Description of Artificial Sequence: Synthetic oligonucleotide
  misc_feature 1..20: note = Target: SCN10A; (+) strand; PAM type: YTN; PAM sequence: TTG
  source 1..20: mol_type = other DNA
atttaacattagaaaatcaa

SEQ ID NO: 64150 - DNA, 20 bp, synthetic construct
  misc_feature 1..20: note = Description of Artificial Sequence: Synthetic oligonucleotide
  misc_feature 1..20: note = Target: SCN10A; (+) strand; PAM type: YTN; PAM sequence: TTT
  source 1..20: mol_type = other DNA
aacattagaaaatcaattaa

SEQ ID NO: 64151 - DNA, 20 bp, synthetic construct
  misc_feature 1..20: note = Description of Artificial Sequence: Synthetic oligonucleotide
  misc_feature 1..20: note = Target: SCN10A; (+) strand; PAM type: YTN; PAM sequence: TTA
  source 1..20: mol_type = other DNA
acattagaaaatcaattaat

SEQ ID NO: 64152 - DNA, 20 bp, synthetic construct
  misc_feature 1..20: note = Description of Artificial Sequence: Synthetic oligonucleotide
  misc_feature 1..20: note = Target: SCN10A; (+) strand; PAM type: YTN; PAM sequence: TTA
  source 1..20: mol_type = other DNA
gaaaatcaattaatataatt

SEQ ID NO: 64153 - DNA, 20 bp, synthetic construct
  misc_feature 1..20: note = Description of Artificial Sequence: Synthetic oligonucleotide
  misc_feature 1..20: note = Target: SCN10A; (+) strand; PAM type: YTN; PAM sequence: TTA
  source 1..20: mol_type = other DNA
atataattcaccactttaac

SEQ ID NO: 64154 - DNA, 20 bp, synthetic construct
  misc_feature 1..20: note = Description of Artificial Sequence: Synthetic oligonucleotide
  misc_feature 1..20: note = Target: SCN10A; (+) strand; PAM type: YTN; PAM sequence: TTC
  source 1..20: mol_type = other DNA
accactttaacagattgaag

SEQ ID NO: 64155 - DNA, 20 bp, synthetic construct
  misc_feature 1..20: note = Description of Artificial Sequence: Synthetic oligonucleotide
  misc_feature 1..20: note = Target: SCN10A; (+) strand; PAM type: YTN; PAM sequence: CTT
  source 1..20: mol_type = other DNA
taacagattgaaggagaaaa

SEQ ID NO: 64156 - DNA, 20 bp, synthetic construct
  misc_feature 1..20: note = Description of Artificial Sequence: Synthetic oligonucleotide
  misc_feature 1..20: note = Target: SCN10A; (+) strand; PAM type: YTN; PAM sequence: TTT
  source 1..20: mol_type = other DNA
aacagattgaaggagaaaat

SEQ ID NO: 64157 - DNA, 20 bp, synthetic construct
  misc_feature 1..20: note = Description of Artificial Sequence: Synthetic oligonucleotide
  misc_feature 1..20: note = Target: SCN10A; (+) strand; PAM type: YTN; PAM sequence: TTA
  source 1..20: mol_type = other DNA
acagattgaaggagaaaata

SEQ ID NO: 64158 - DNA, 20 bp, synthetic construct
  misc_feature 1..20: note = Description of Artificial Sequence: Synthetic oligonucleotide
  misc_feature 1..20: note = Target: SCN10A; (+) strand; PAM type: YTN; PAM sequence: TTG
  source 1..20: mol_type = other DNA
aaggagaaaatacatgatta

SEQ ID NO: 64159 - DNA, 20 bp, synthetic construct
  misc_feature 1..20: note = Description of Artificial Sequence: Synthetic oligonucleotide
  misc_feature 1..20: note = Target: SCN10A; (+) strand; PAM type: YTN; PAM sequence: TTA
  source 1..20: mol_type = other DNA
tctcaatacatgtagaataa

SEQ ID NO: 64160 - DNA, 20 bp, synthetic construct
  misc_feature 1..20: note = Description of Artificial Sequence: Synthetic oligonucleotide
  misc_feature 1..20: note = Target: SCN10A; (+) strand; PAM type: YTN; PAM sequence: CTC
  source 1..20: mol_type = other DNA
aatacatgtagaataattgt

SEQ ID NO: 64161 - DNA, 20 bp, synthetic construct
  misc_feature 1..20: note = Description of Artificial Sequence: Synthetic oligonucleotide
  misc_feature 1..20: note = Target: SCN10A; (+) strand; PAM type: YTN; PAM sequence: TTG
  source 1..20: mol_type = other DNA
tctgataaaattaaacatcc

SEQ ID NO: 64162 - DNA, 20 bp, synthetic construct
  misc_feature 1..20: note = Description of Artificial Sequence: Synthetic oligonucleotide
  misc_feature 1..20: note = Target: SCN10A; (+) strand; PAM type: YTN; PAM sequence: CTG
  source 1..20: mol_type = other DNA
ataaaattaaacatccattc

SEQ ID NO: 64163 - DNA, 20 bp, synthetic construct
  misc_feature 1..20: note = Description of Artificial Sequence: Synthetic oligonucleotide
  misc_feature 1..20: note = Target: SCN10A; (+) strand; PAM type: YTN; PAM sequence: TTA
  source 1..20: mol_type = other DNA
aacatccattcatgataaat

SEQ ID NO: 64164 - DNA, 20 bp, synthetic construct
  misc_feature 1..20: note = Description of Artificial Sequence: Synthetic oligonucleotide
  misc_feature 1..20: note = Target: SCN10A; (+) strand; PAM type: YTN; PAM sequence: TTC
  source 1..20: mol_type = other DNA
atgataaatattcttgataa

SEQ ID NO: 64165 - DNA, 20 bp, synthetic construct
  misc_feature 1..20: note = Description of Artificial Sequence: Synthetic oligonucleotide
  misc_feature 1..20: note = Target: SCN10A; (+) strand; PAM type: YTN; PAM sequence: TTC
  source 1..20: mol_type = other DNA
ttgataaaagagaacttcct

SEQ ID NO: 64166 - DNA, 20 bp, synthetic construct
  misc_feature 1..20: note = Description of Artificial Sequence: Synthetic oligonucleotide
  misc_feature 1..20: note = Target: SCN10A; (+) strand; PAM type: YTN; PAM sequence: CTT
  source 1..20: mol_type = other DNA
gataaaagagaacttcctga

SEQ ID NO: 64167 - DNA, 20 bp, synthetic construct
  misc_feature 1..20: note = Description of Artificial Sequence: Synthetic oligonucleotide
  misc_feature 1..20: note = Target: SCN10A; (+) strand; PAM type: YTN; PAM sequence: TTG
  source 1..20: mol_type = other DNA
ataaaagagaacttcctgaa

SEQ ID NO: 64168 - DNA, 20 bp, synthetic construct
  misc_feature 1..20: note = Description of Artificial Sequence: Synthetic oligonucleotide
  misc_feature 1..20: note = Target: SCN10A; (+) strand; PAM type: YTN; PAM sequence: CTT
  source 1..20: mol_type = other DNA
cctgaactgataaagatttc

SEQ ID NO: 64169 - DNA, 20 bp, synthetic construct
  misc_feature 1..20: note = Description of Artificial Sequence: Synthetic oligonucleotide
  misc_feature 1..20: note = Target: SCN10A; (+) strand; PAM type: YTN; PAM sequence: TTC
  source 1..20: mol_type = other DNA
ctgaactgataaagatttct

SEQ ID NO: 64170 - DNA, 20 bp, synthetic construct
  misc_feature 1..20: note = Description of Artificial Sequence: Synthetic oligonucleotide
  misc_feature 1..20: note = Target: SCN10A; (+) strand; PAM type: YTN; PAM sequence: CTG
  source 1..20: mol_type = other DNA
aactgataaagatttcttat

SEQ ID NO: 64171 - DNA, 20 bp, synthetic construct
  misc_feature 1..20: note = Description of Artificial Sequence: Synthetic oligonucleotide
  misc_feature 1..20: note = Target: SCN10A; (+) strand; PAM type: YTN; PAM sequence: CTG
  source 1..20: mol_type = other DNA
ataaagatttcttatcttta

SEQ ID NO: 64172 - DNA, 20 bp, synthetic construct
  misc_feature 1..20: note = Description of Artificial Sequence: Synthetic oligonucleotide
  misc_feature 1..20: note = Target: SCN10A; (+) strand; PAM type: YTN; PAM sequence: TTT
  source 1..20: mol_type = other DNA
cttatctttaaaaaaagcct

SEQ ID NO: 64173 - DNA, 20 bp, synthetic construct
  misc_feature 1..20: note = Description of Artificial Sequence: Synthetic oligonucleotide
  misc_feature 1..20: note = Target: SCN10A; (+) strand; PAM type: YTN; PAM sequence: TTC
  source 1..20: mol_type = other DNA
ttatctttaaaaaaagcctg

SEQ ID NO: 64174 - DNA, 20 bp, synthetic construct
  misc_feature 1..20: note = Description of Artificial Sequence: Synthetic oligonucleotide
  misc_feature 1..20: note = Target: SCN10A; (+) strand; PAM type: YTN; PAM sequence: CTT
  source 1..20: mol_type = other DNA
atctttaaaaaaagcctgcc

SEQ ID NO: 64175 - DNA, 20 bp, synthetic construct
  misc_feature 1..20: note = Description of Artificial Sequence: Synthetic oligonucleotide
  misc_feature 1..20: note = Target: SCN10A; (+) strand; PAM type: YTN; PAM sequence: TTA
  source 1..20: mol_type = other DNA
tctttaaaaaaagcctgcca

SEQ ID NO: 64176 - DNA, 20 bp, synthetic construct
  misc_feature 1..20: note = Description of Artificial Sequence: Synthetic oligonucleotide
  misc_feature 1..20: note = Target: SCN10A; (+) strand; PAM type: YTN; PAM sequence: CTT
  source 1..20: mol_type = other DNA
taaaaaaagcctgccacaat

SEQ ID NO: 64177 - DNA, 20 bp, synthetic construct
  misc_feature 1..20: note = Description of Artificial Sequence: Synthetic oligonucleotide
  misc_feature 1..20: note = Target: SCN10A; (+) strand; PAM type: YTN; PAM sequence: TTT
  source 1..20: mol_type = other DNA
aaaaaaagcctgccacaatt

SEQ ID NO: 64178 - DNA, 20 bp, synthetic construct
  misc_feature 1..20: note = Description of Artificial Sequence: Synthetic oligonucleotide
  misc_feature 1..20: note = Target: SCN10A; (+) strand; PAM type: YTN; PAM sequence: TTA
  source 1..20: mol_type = other DNA
aaaaaagcctgccacaattg

SEQ ID NO: 64179 - DNA, 20 bp, synthetic construct
  misc_feature 1..20: note = Description of Artificial Sequence: Synthetic oligonucleotide
  misc_feature 1..20: note = Target: SCN10A; (+) strand; PAM type: YTN; PAM sequence: CTG
  source 1..20: mol_type = other DNA
ccacaattgttagaggtggt

SEQ ID NO: 64180 - DNA, 20 bp, synthetic construct
  misc_feature 1..20: note = Description of Artificial Sequence: Synthetic oligonucleotide
  misc_feature 1..20: note = Target: SCN10A; (+) strand; PAM type: YTN; PAM sequence: TTG
  source 1..20: mol_type = other DNA
ttagaggtggtgaaatattg

SEQ ID NO: 64181 - DNA, 20 bp, synthetic construct
  misc_feature 1..20: note = Description of Artificial Sequence: Synthetic oligonucleotide
  misc_feature 1..20: note = Target: SCN10A; (+) strand; PAM type: YTN; PAM sequence: TTA
  source 1..20: mol_type = other DNA
gaggtggtgaaatattgaaa

SEQ ID NO: 64182 - DNA, 20 bp, synthetic construct
  misc_feature 1..20: note = Description of Artificial Sequence: Synthetic oligonucleotide
  misc_feature 1..20: note = Target: SCN10A; (+) strand; PAM type: YTN; PAM sequence: TTG
  source 1..20: mol_type = other DNA
aaaggattctttttgggatc

SEQ ID NO: 64183 - DNA, 20 bp, synthetic construct
  misc_feature 1..20: note = Description of Artificial Sequence: Synthetic oligonucleotide
  misc_feature 1..20: note = Target: SCN10A; (+) strand; PAM type: YTN; PAM sequence: TTC
  source 1..20: mol_type = other DNA
tttttgggatcagaaaattg

SEQ ID NO: 64184 - DNA, 20 bp, synthetic construct
  misc_feature 1..20: note = Description of Artificial Sequence: Synthetic oligonucleotide
  misc_feature 1..20: note = Target: SCN10A; (+) strand; PAM type: YTN; PAM sequence: CTT
  source 1..20: mol_type = other DNA
tttgggatcagaaaattgat

SEQ ID NO: 64185 - DNA, 20 bp, synthetic construct
  misc_feature 1..20: note = Description of Artificial Sequence: Synthetic oligonucleotide
  misc_feature 1..20: note = Target: SCN10A; (+) strand; PAM type: YTN; PAM sequence: TTT
  source 1..20: mol_type = other DNA
ttgggatcagaaaattgata

SEQ ID NO: 64186 - DNA, 20 bp, synthetic construct
  misc_feature 1..20: note = Description of Artificial Sequence: Synthetic oligonucleotide
  misc_feature 1..20: note = Target: SCN10A; (+) strand; PAM type: YTN; PAM sequence: TTT
  source 1..20: mol_type = other DNA
tgggatcagaaaattgataa

SEQ ID NO: 64187 - DNA, 20 bp, synthetic construct
  misc_feature 1..20: note = Description of Artificial Sequence: Synthetic oligonucleotide
  misc_feature 1..20: note = Target: SCN10A; (+) strand; PAM type: YTN; PAM sequence: TTT
  source 1..20: mol_type = other DNA
gggatcagaaaattgataaa

SEQ ID NO: 64188 - DNA, 20 bp, synthetic construct
  misc_feature 1..20: note = Description of Artificial Sequence: Synthetic oligonucleotide
  misc_feature 1..20: note = Target: SCN10A; (+) strand; PAM type: YTN; PAM sequence: TTG
  source 1..20: mol_type = other DNA
ggatcagaaaattgataaag

SEQ ID NO: 64189 - DNA, 20 bp, synthetic construct
  misc_feature 1..20: note = Description of Artificial Sequence: Synthetic oligonucleotide
  misc_feature 1..20: note = Target: SCN10A; (+) strand; PAM type: YTN; PAM sequence: TTG
  source 1..20: mol_type = other DNA
ataaagatacctgttattaa

SEQ ID NO: 64190 - DNA, 20 bp, synthetic construct
  misc_feature 1..20: note = Description of Artificial Sequence: Synthetic oligonucleotide
  misc_feature 1..20: note = Target: SCN10A; (+) strand; PAM type: YTN; PAM sequence: CTG
  source 1..20: mol_type = other DNA
ttattaacacttcttttcaa

SEQ ID NO: 64191 - DNA, 20 bp, synthetic construct
  misc_feature 1..20: note = Description of Artificial Sequence: Synthetic oligonucleotide
  misc_feature 1..20: note = Target: SCN10A; (+) strand; PAM type: YTN; PAM sequence: TTA
  source 1..20: mol_type = other DNA
ttaacacttcttttcaacag

SEQ ID NO: 64192 - DNA, 20 bp, synthetic construct
  misc_feature 1..20: note = Description of Artificial Sequence: Synthetic oligonucleotide
  misc_feature 1..20: note = Target: SCN10A; (+) strand; PAM type: YTN; PAM sequence: TTA
  source 1..20: mol_type = other DNA
acacttcttttcaacagtgt

SEQ ID NO: 64193 - DNA, 20 bp, synthetic construct
  misc_feature 1..20: note = Description of Artificial Sequence: Synthetic oligonucleotide
  misc_feature 1..20: note = Target: SCN10A; (+) strand; PAM type: YTN; PAM sequence: CTT
  source 1..20: mol_type = other DNA
cttttcaacagtgtactgga

SEQ ID NO: 64194 - DNA, 20 bp, synthetic construct
  misc_feature 1..20: note = Description of Artificial Sequence: Synthetic oligonucleotide
  misc_feature 1..20: note = Target: SCN10A; (+) strand; PAM type: YTN; PAM sequence: TTC
  source 1..20: mol_type = other DNA
ttttcaacagtgtactggat

SEQ ID NO: 64195 - DNA, 20 bp, synthetic construct
  misc_feature 1..20: note = Description of Artificial Sequence: Synthetic oligonucleotide
  misc_feature 1..20: note = Target: SCN10A; (+) strand; PAM type: YTN; PAM sequence: CTT
  source 1..20: mol_type = other DNA
ttcaacagtgtactggatgt

SEQ ID NO: 64196 - DNA, 20 bp, synthetic construct
  misc_feature 1..20: note = Description of Artificial Sequence: Synthetic oligonucleotide
  misc_feature 1..20: note = Target: SCN10A; (+) strand; PAM type: YTN; PAM sequence: TTT
  source 1..20: mol_type = other DNA
tcaacagtgtactggatgtc

SEQ ID NO: 64197 - DNA, 20 bp, synthetic construct
  misc_feature 1..20: note = Description of Artificial Sequence: Synthetic oligonucleotide
  misc_feature 1..20: note = Target: SCN10A; (+) strand; PAM type: YTN; PAM sequence: TTT
  source 1..20: mol_type = other DNA
caacagtgtactggatgtcc

SEQ ID NO: 64198 - DNA, 20 bp, synthetic construct
  misc_feature 1..20: note = Description of Artificial Sequence: Synthetic oligonucleotide
  misc_feature 1..20: note = Target: SCN10A; (+) strand; PAM type: YTN; PAM sequence: TTC
  source 1..20: mol_type = other DNA
aacagtgtactggatgtcct

SEQ ID NO: 64199 - DNA, 20 bp, synthetic construct
  misc_feature 1..20: note = Description of Artificial Sequence: Synthetic oligonucleotide
  misc_feature 1..20: note = Target: SCN10A; (+) strand; PAM type: YTN; PAM sequence: CTG
  source 1..20: mol_type = other DNA
gatgtcctaactagcacagt

SEQ ID NO: 64200 - DNA, 20 bp, synthetic construct
  misc_feature 1..20: note = Description of Artificial Sequence: Synthetic oligonucleotide
  misc_feature 1..20: note = Target: SCN10A; (+) strand; PAM type: YTN; PAM sequence: CTA
  source 1..20: mol_type = other DNA
actagcacagtgatctagta

SEQ ID NO: 64201 - DNA, 20 bp, synthetic construct
  misc_feature 1..20: note = Description of Artificial Sequence: Synthetic oligonucleotide
  misc_feature 1..20: note = Target: SCN10A; (+) strand; PAM type: YTN; PAM sequence: CTA
  source 1..20: mol_type = other DNA
gcacagtgatctagtaaaaa

SEQ ID NO: 64202 - DNA, 20 bp, synthetic construct
  misc_feature 1..20: note = Description of Artificial Sequence: Synthetic oligonucleotide
  misc_feature 1..20: note = Target: SCN10A; (+) strand; PAM type: YTN; PAM sequence: CTA
  source 1..20: mol_type = other DNA
gtaaaaagaacctaatggca

SEQ ID NO: 64203 - DNA, 20 bp, synthetic construct
  misc_feature 1..20: note = Description of Artificial Sequence: Synthetic oligonucleotide
  misc_feature 1..20: note = Target: SCN10A; (+) strand; PAM type: YTN; PAM sequence: CTA
  source 1..20: mol_type = other DNA
atggcataaggattagaaaa

SEQ ID NO: 64204 - DNA, 20 bp, synthetic construct
  misc_feature 1..20: note = Description of Artificial Sequence: Synthetic oligonucleotide
  misc_feature 1..20: note = Target: SCN10A; (+) strand; PAM type: YTN; PAM sequence: TTA
  source 1..20: mol_type = other DNA
gaaaagaagaaattaggctg

SEQ ID NO: 64205 - DNA, 20 bp, synthetic construct
  misc_feature 1..20: note = Description of Artificial Sequence: Synthetic oligonucleotide
  misc_feature 1..20: note = Target: SCN10A; (+) strand; PAM type: YTN; PAM sequence: TTA
  source 1..20: mol_type = other DNA
ggctgggcgtgggtggctca

SEQ ID NO: 64206 - DNA, 20 bp, synthetic construct
  misc_feature 1..20: note = Description of Artificial Sequence: Synthetic oligonucleotide
  misc_feature 1..20: note = Target: SCN10A; (+) strand; PAM type: YTN; PAM sequence: CTG
  source 1..20: mol_type = other DNA
ggcgtgggtggctcatgcct

SEQ ID NO: 64207 - DNA, 20 bp, synthetic construct
  misc_feature 1..20: note = Description of Artificial Sequence: Synthetic oligonucleotide
  misc_feature 1..20: note = Target: SCN10A; (+) strand; PAM type: YTN; PAM sequence: CTC
  source 1..20: mol_type = other DNA
atgcctgtaatcccagcact

SEQ ID NO: 64208 - DNA, 20 bp, synthetic construct
  misc_feature 1..20: note = Description of Artificial Sequence: Synthetic oligonucleotide
  misc_feature 1..20: note = Target: SCN10A; (+) strand; PAM type: YTN; PAM sequence: CTG
  source 1..20: mol_type = other DNA
taatcccagcactttaggag

SEQ ID NO: 64209 - DNA, 20 bp, synthetic construct
  misc_feature 1..20: note = Description of Artificial Sequence: Synthetic oligonucleotide
  misc_feature 1..20: note = Target: SCN10A; (+) strand; PAM type: YTN; PAM sequence: CTT
  source 1..20: mol_type = other DNA
taggaggccaaggcaggcag

SEQ ID NO: 64210 - DNA, 20 bp, synthetic construct
  misc_feature 1..20: note = Description of Artificial Sequence: Synthetic oligonucleotide
  misc_feature 1..20: note = Target: SCN10A; (+) strand; PAM type: YTN; PAM sequence: TTT
  source 1..20: mol_type = other DNA
aggaggccaaggcaggcaga

SEQ ID NO: 64211 - DNA, 20 bp, synthetic construct
  misc_feature 1..20: note = Description of Artificial Sequence: Synthetic oligonucleotide
  misc_feature 1..20: note = Target: SCN10A; (+) strand; PAM type: YTN; PAM sequence: TTA
  source 1..20: mol_type = other DNA
ggaggccaaggcaggcagat

SEQ ID NO: 64212 - DNA, 20 bp, synthetic construct
  misc_feature 1..20: note = Description of Artificial Sequence: Synthetic oligonucleotide
  misc_feature 1..20: note = Target: SCN10A; (+) strand; PAM type: YTN; PAM sequence: CTG
  source 1..20: mol_type = other DNA
gctaacacggtgaaaccccg

SEQ ID NO: 64213 - DNA, 20 bp, synthetic construct
  misc_feature 1..20: note = Description of Artificial Sequence: Synthetic oligonucleotide
  misc_feature 1..20: note = Target: SCN10A; (+) strand; PAM type: YTN; PAM sequence: CTA
  source 1..20: mol_type = other DNA
acacggtgaaaccccgtctc

SEQ ID NO: 64214 - DNA, 20 bp, synthetic construct
  misc_feature 1..20: note = Description of Artificial Sequence: Synthetic oligonucleotide
  misc_feature 1..20: note = Target: SCN10A; (+) strand; PAM type: YTN; PAM sequence: CTC
  source 1..20: mol_type = other DNA
tactaaaaatacaaagaatt

SEQ ID NO: 64215 - DNA, 20 bp, synthetic construct
  misc_feature 1..20: note = Description of Artificial Sequence: Synthetic oligonucleotide
  misc_feature 1..20: note = Target: SCN10A; (+) strand; PAM type: YTN; PAM sequence: CTA
  source 1..20: mol_type = other DNA
ctaaaaatacaaagaattag

SEQ ID NO: 64216 - DNA, 20 bp, synthetic construct
  misc_feature 1..20: note = Description of Artificial Sequence: Synthetic oligonucleotide
  misc_feature 1..20: note = Target: SCN10A; (+) strand; PAM type: YTN; PAM sequence: CTA
  source 1..20: mol_type = other DNA
aaaatacaaagaattagcca

SEQ ID NO: 64217 - DNA, 20 bp, synthetic construct
  misc_feature 1..20: note = Description of Artificial Sequence: Synthetic oligonucleotide
  misc_feature 1..20: note = Target: SCN10A; (+) strand; PAM type: YTN; PAM sequence: TTA
  source 1..20: mol_type = other DNA
gccaggcatggtggtgggtg

SEQ ID NO: 64218 - DNA, 20 bp, synthetic construct
  misc_feature 1..20: note = Description of Artificial Sequence: Synthetic oligonucleotide
  misc_feature 1..20: note = Target: SCN10A; (+) strand; PAM type: YTN; PAM sequence: CTG
  source 1..20: mol_type = other DNA
tagtcccagctactcaggag

SEQ ID NO: 64219 - DNA, 20 bp, synthetic construct
  misc_feature 1..20: note = Description of Artificial Sequence: Synthetic oligonucleotide
  misc_feature 1..20: note = Target: SCN10A; (+) strand; PAM type: YTN; PAM sequence: CTA
  source 1..20: mol_type = other DNA
ctcaggaggctgaggcagga

SEQ ID NO: 64220 - DNA, 20 bp, synthetic construct
  misc_feature 1..20: note = Description of Artificial Sequence: Synthetic oligonucleotide
  misc_feature 1..20: note = Target: SCN10A; (+) strand; PAM type: YTN; PAM sequence: CTC
  source 1..20: mol_type = other DNA
aggaggctgaggcaggagaa

SEQ ID NO: 64221 - DNA, 20 bp, synthetic construct
  misc_feature 1..20: note = Description of Artificial Sequence: Synthetic oligonucleotide
  misc_feature 1..20: note = Target: SCN10A; (+) strand; PAM type: YTN; PAM sequence: CTG
  source 1..20: mol_type = other DNA
aggcaggagaatggcgtgaa

SEQ ID NO: 64222 - DNA, 20 bp, synthetic construct
  misc_feature 1..20: note = Description of Artificial Sequence: Synthetic oligonucleotide
  misc_feature 1..20: note = Target: SCN10A; (+) strand; PAM type: YTN; PAM sequence: CTG
  source 1..20: mol_type = other DNA
gcaatgagccgagatcacgc

SEQ ID NO: 64223 - DNA, 20 bp, synthetic construct
  misc_feature 1..20: note = Description of Artificial Sequence: Synthetic oligonucleotide
  misc_feature 1..20: note = Target: SCN10A; (+) strand; PAM type: YTN; PAM sequence: CTG
  source 1..20: mol_type = other DNA
cactctagcctgggtgacag

SEQ ID NO: 64224 - DNA, 20 bp, synthetic construct
  misc_feature 1..20: note = Description of Artificial Sequence: Synthetic oligonucleotide
  misc_feature 1..20: note = Target: SCN10A; (+) strand; PAM type: YTN; PAM sequence: CTC
  source 1..20: mol_type = other DNA
tagcctgggtgacagagcga

SEQ ID NO: 64225 - DNA, 20 bp, synthetic construct
  misc_feature 1..20: note = Description of Artificial Sequence: Synthetic oligonucleotide
  misc_feature 1..20: note = Target: SCN10A; (+) strand; PAM type: YTN; PAM sequence: CTA
  source 1..20: mol_type = other DNA
gcctgggtgacagagcgaga

SEQ ID NO: 64226 - DNA, 20 bp, synthetic construct
  misc_feature 1..20: note = Description of Artificial Sequence: Synthetic oligonucleotide
  misc_feature 1..20: note = Target: SCN10A; (+) strand; PAM type: YTN; PAM sequence: CTG
  source 1..20: mol_type = other DNA
ggtgacagagcgagactctg

SEQ ID NO: 64227 - DNA, 20 bp, synthetic construct
  misc_feature 1..20: note = Description of Artificial Sequence: Synthetic oligonucleotide
  misc_feature 1..20: note = Target: SCN10A; (+) strand; PAM type: YTN; PAM sequence: CTC
  source 1..20: mol_type = other DNA
tgtctcaaaaaaaaaaaaaa

SEQ ID NO: 64228 - DNA, 20 bp, synthetic construct
  misc_feature 1..20: note = Description of Artificial Sequence: Synthetic oligonucleotide
  misc_feature 1..20: note = Target: SCN10A; (+) strand; PAM type: YTN; PAM sequence: CTG
  source 1..20: mol_type = other DNA
tctcaaaaaaaaaaaaaaaa

SEQ ID NO: 64229 - DNA, 20 bp, synthetic construct
  misc_feature 1..20: note = Description of Artificial Sequence: Synthetic oligonucleotide
  misc_feature 1..20: note = Target: SCN10A; (+) strand; PAM type: YTN; PAM sequence: CTC
  source 1..20: mol_type = other DNA
aaaaaaaaaaaaaaaaaaaa

SEQ ID NO: 64230 - DNA, 20 bp, synthetic construct
  misc_feature 1..20: note = Description of Artificial Sequence: Synthetic oligonucleotide
  misc_feature 1..20: note = Target: SCN10A; (+) strand; PAM type: YTN; PAM sequence: TTA
  source 1..20: mol_type = other DNA
aactcattgttattttcaca

SEQ ID NO: 64231 - DNA, 20 bp, synthetic construct
  misc_feature 1..20: note = Description of Artificial Sequence: Synthetic oligonucleotide
  misc_feature 1..20: note = Target: SCN10A; (+) strand; PAM type: YTN; PAM sequence: CTC
  source 1..20: mol_type = other DNA
attgttattttcacatgatg

SEQ ID NO: 64232 - DNA, 20 bp, synthetic construct
  misc_feature 1..20: note = Description of Artificial Sequence: Synthetic oligonucleotide
  misc_feature 1..20: note = Target: SCN10A; (+) strand; PAM type: YTN; PAM sequence: TTG
  source 1..20: mol_type = other DNA
ttattttcacatgatgtgat

SEQ ID NO: 64233 - DNA, 20 bp, synthetic construct
  misc_feature 1..20: note = Description of Artificial Sequence: Synthetic oligonucleotide
  misc_feature 1..20: note = Target: SCN10A; (+) strand; PAM type: YTN; PAM sequence: TTA
  source 1..20: mol_type = other DNA
ttttcacatgatgtgattat

SEQ ID NO: 64234 - DNA, 20 bp, synthetic construct
  misc_feature 1..20: note = Description of Artificial Sequence: Synthetic oligonucleotide
  misc_feature 1..20: note = Target: SCN10A; (+) strand; PAM type: YTN; PAM sequence: TTT
  source 1..20: mol_type = other DNA
tcacatgatgtgattatgtt

SEQ ID NO: 64235 - DNA, 20 bp, synthetic construct
  misc_feature 1..20: note = Description of Artificial Sequence: Synthetic oligonucleotide
  misc_feature 1..20: note = Target: SCN10A; (+) strand; PAM type: YTN; PAM sequence: TTT
  source 1..20: mol_type = other DNA
cacatgatgtgattatgtta

SEQ ID NO: 64236 - DNA, 20 bp, synthetic construct
  misc_feature 1..20: note = Description of Artificial Sequence: Synthetic oligonucleotide
  misc_feature 1..20: note = Target: SCN10A; (+) strand; PAM type: YTN; PAM sequence: TTC
  source 1..20: mol_type = other DNA
acatgatgtgattatgttag

SEQ ID NO: 64237 - DNA, 20 bp, synthetic construct
  misc_feature 1..20: note = Description of Artificial Sequence: Synthetic oligonucleotide
  misc_feature 1..20: note = Target: SCN10A; (+) strand; PAM type: YTN; PAM sequence: TTA
  source 1..20: mol_type = other DNA
tgttagaaaatttaaaacat

SEQ ID NO: 64238 - DNA, 20 bp, synthetic construct
  misc_feature 1..20: note = Description of Artificial Sequence: Synthetic oligonucleotide
  misc_feature 1..20: note = Target: SCN10A; (+) strand; PAM type: YTN; PAM sequence: TTA
  source 1..20: mol_type = other DNA
gaaaatttaaaacattgtat

SEQ ID NO: 64239 - DNA, 20 bp, synthetic construct
  misc_feature 1..20: note = Description of Artificial Sequence: Synthetic oligonucleotide
  misc_feature 1..20: note = Target: SCN10A; (+) strand; PAM type: YTN; PAM sequence: TTT
  source 1..20: mol_type = other DNA
aaaacattgtatagataaat

SEQ ID NO: 64240 - DNA, 20 bp, synthetic construct
  misc_feature 1..20: note = Description of Artificial Sequence: Synthetic oligonucleotide
  misc_feature 1..20: note = Target: SCN10A; (+) strand; PAM type: YTN; PAM sequence: TTA
  source 1..20: mol_type = other DNA
aaacattgtatagataaatt

SEQ ID NO: 64241 - DNA, 20 bp, synthetic construct
  misc_feature 1..20: note = Description of Artificial Sequence: Synthetic oligonucleotide
  misc_feature 1..20: note = Target: SCN10A; (+) strand; PAM type: YTN; PAM sequence: TTG
  source 1..20: mol_type = other DNA
tatagataaattattagaat

SEQ ID NO: 64242 - DNA, 20 bp, synthetic construct
  misc_feature 1..20: note = Description of Artificial Sequence: Synthetic oligonucleotide
  misc_feature 1..20: note = Target: SCN10A; (+) strand; PAM type: YTN; PAM sequence: TTA
  source 1..20: mol_type = other DNA
ttagaattaataagagacat

SEQ ID NO: 64243 - DNA, 20 bp, synthetic construct
  misc_feature 1..20: note = Description of Artificial Sequence: Synthetic oligonucleotide
  misc_feature 1..20: note = Target: SCN10A; (+) strand; PAM type: YTN; PAM sequence: TTA
  source 1..20: mol_type = other DNA
gaattaataagagacatttc

SEQ ID NO: 64244 - DNA, 20 bp, synthetic construct
  misc_feature 1..20: note = Description of Artificial Sequence: Synthetic oligonucleotide
  misc_feature 1..20: note = Target: SCN10A; (+) strand; PAM type: YTN; PAM sequence: TTA
  source 1..20: mol_type = other DNA
ataagagacatttctagata

SEQ ID NO: 64245 - DNA, 20 bp, synthetic construct
  misc_feature 1..20: note = Description of Artificial Sequence: Synthetic oligonucleotide
  misc_feature 1..20: note = Target: SCN10A; (+) strand; PAM type: YTN; PAM sequence: TTT
  source 1..20: mol_type = other DNA
ctagatacaaaaatgttaaa

SEQ ID NO: 64246 - DNA, 20 bp, synthetic construct
  misc_feature 1..20: note = Description of Artificial Sequence: Synthetic oligonucleotide
  misc_feature 1..20: note = Target: SCN10A; (+) strand; PAM type: YTN; PAM sequence: TTC
  source 1..20: mol_type = other DNA
tagatacaaaaatgttaaat

SEQ ID NO: 64247 - DNA, 20 bp, synthetic construct
  misc_feature 1..20: note = Description of Artificial Sequence: Synthetic oligonucleotide
  misc_feature 1..20: note = Target: SCN10A; (+) strand; PAM type: YTN; PAM sequence: CTA
  source 1..20: mol_type = other DNA
gatacaaaaatgttaaatat

SEQ ID NO: 64248 - DNA, 20 bp, synthetic construct
  misc_feature 1..20: note = Description of Artificial Sequence: Synthetic oligonucleotide
  misc_feature 1..20: note = Target: SCN10A; (+) strand; PAM type: YTN; PAM sequence: TTA
  source 1..20: mol_type = other DNA
aatatcaaaatgctagccaa

SEQ ID NO: 64249 - DNA, 20 bp, synthetic construct
  misc_feature 1..20: note = Description of Artificial Sequence: Synthetic oligonucleotide
  misc_feature 1..20: note = Target: SCN10A; (+) strand; PAM type: YTN; PAM sequence: CTA
  source 1..20: mol_type = other DNA
gccaaaaatgccagaaaaga

SEQ ID NO: 64250 - DNA, 20 bp, synthetic construct
  misc_feature 1..20: note = Description of Artificial Sequence: Synthetic oligonucleotide
  misc_feature 1..20: note = Target: SCN10A; (+) strand; PAM type: YTN; PAM sequence: TTT
  source 1..20: mol_type = other DNA
aagaagatatgcaagatcct

SEQ ID NO: 64251 - DNA, 20 bp, synthetic construct
  misc_feature 1..20: note = Description of Artificial Sequence: Synthetic oligonucleotide
  misc_feature 1..20: note = Target: SCN10A; (+) strand; PAM type: YTN; PAM sequence: TTA
  source 1..20: mol_type = other DNA
agaagatatgcaagatccta

SEQ ID NO: 64252 - DNA, 20 bp, synthetic construct
  misc_feature 1..20: note = Description of Artificial Sequence: Synthetic oligonucleotide
  misc_feature 1..20: note = Target: SCN10A; (+) strand; PAM type: YTN; PAM sequence: CTA
  source 1..20: mol_type = other DNA
tggagaaaattataaaaacc

SEQ ID NO: 64253 - DNA, 20 bp, synthetic construct
  misc_feature 1..20: note = Description of Artificial Sequence: Synthetic oligonucleotide
  misc_feature 1..20: note = Target: SCN10A; (+) strand; PAM type: YTN; PAM sequence: TTA
  source 1..20: mol_type = other DNA
taaaaacctcatggaaacat

SEQ ID NO: 64254 - DNA, 20 bp, synthetic construct
  misc_feature 1..20: note = Description of Artificial Sequence: Synthetic oligonucleotide
  misc_feature 1..20: note = Target: SCN10A; (+) strand; PAM type: YTN; PAM sequence: CTC
  source 1..20: mol_type = other DNA
atggaaacatttttaaactt

SEQ ID NO: 64255 - DNA, 20 bp, synthetic construct
  misc_feature 1..20: note = Description of Artificial Sequence: Synthetic oligonucleotide
  misc_feature 1..20: note = Target: SCN10A; (+) strand; PAM type: YTN; PAM sequence: TTT
  source 1..20: mol_type = other DNA
ttaaactttattgaaagact

SEQ ID NO: 64256 - DNA, 20 bp, synthetic construct
  misc_feature 1..20: note = Description of Artificial Sequence: Synthetic oligonucleotide
  misc_feature 1..20: note = Target: SCN10A; (+) strand; PAM type: YTN; PAM sequence: TTT
  source 1..20: mol_type = other DNA
taaactttattgaaagactg

SEQ ID NO: 64257 - DNA, 20 bp, synthetic construct
  misc_feature 1..20: note = Description of Artificial Sequence: Synthetic oligonucleotide
  misc_feature 1..20: note = Target: SCN10A; (+) strand; PAM type: YTN; PAM sequence: TTT
  source 1..20: mol_type = other DNA
aaactttattgaaagactgg

SEQ ID NO: 64258 - DNA, 20 bp, synthetic construct
  misc_feature 1..20: note = Description of Artificial Sequence: Synthetic oligonucleotide
  misc_feature 1..20: note = Target: SCN10A; (+) strand; PAM type: YTN; PAM sequence: TTA
  source 1..20: mol_type = other DNA
aactttattgaaagactggt

SEQ ID NO: 64259 - DNA, 20 bp, synthetic construct
  misc_feature 1..20: note = Description of Artificial Sequence: Synthetic oligonucleotide
  misc_feature 1..20: note = Target: SCN10A; (+) strand; PAM type: YTN; PAM sequence: CTT
  source 1..20: mol_type = other DNA
tattgaaagactggtataca

SEQ ID NO: 64260 - DNA, 20 bp, synthetic construct
  misc_feature 1..20: note = Description of Artificial Sequence: Synthetic oligonucleotide
  misc_feature 1..20: note = Target: SCN10A; (+) strand; PAM type: YTN; PAM sequence: TTT
  source 1..20: mol_type = other DNA
attgaaagactggtatacag

SEQ ID NO: 64261 - DNA, 20 bp, synthetic construct
  misc_feature 1..20: note = Description of Artificial Sequence: Synthetic oligonucleotide
  misc_feature 1..20: note = Target: SCN10A; (+) strand; PAM type: YTN; PAM sequence: TTA
  source 1..20: mol_type = other DNA
ttgaaagactggtatacagc

SEQ ID NO: 64262 - DNA, 20 bp, synthetic construct
  misc_feature 1..20: note = Description of Artificial Sequence: Synthetic oligonucleotide
  misc_feature 1..20: note = Target: SCN10A; (+) strand; PAM type: YTN; PAM sequence: TTG
  source 1..20: mol_type = other DNA
aaagactggtatacagcgta

SEQ ID NO: 64263 - DNA, 20 bp, synthetic construct
  misc_feature 1..20: note = Description of Artificial Sequence: Synthetic oligonucleotide
  misc_feature 1..20: note = Target: SCN10A; (+) strand; PAM type: YTN; PAM sequence: CTG
  source 1..20: mol_type = other DNA
gtatacagcgtatactatct

SEQ ID NO: 64264 - DNA, 20 bp, synthetic construct
  misc_feature 1..20: note = Description of Artificial Sequence: Synthetic oligonucleotide
  misc_feature 1..20: note = Target: SCN10A; (+) strand; PAM type: YTN; PAM sequence: CTA
  source 1..20: mol_type = other DNA
tcttcatagatcagaagact

SEQ ID NO: 64265 - DNA, 20 bp, synthetic construct
  misc_feature 1..20: note = Description of Artificial Sequence: Synthetic oligonucleotide
  misc_feature 1..20: note = Target: SCN10A; (+) strand; PAM type: YTN; PAM sequence: CTT
  source 1..20: mol_type = other DNA
catagatcagaagactgaat

SEQ ID NO: 64266 - DNA, 20 bp, synthetic construct
  misc_feature 1..20: note = Description of Artificial Sequence: Synthetic oligonucleotide
  misc_feature 1..20: note = Target: SCN10A; (+) strand; PAM type: YTN; PAM sequence: TTC
  source 1..20: mol_type = other DNA
atagatcagaagactgaatt

SEQ ID NO: 64267 - DNA, 20 bp, synthetic construct
  misc_feature 1..20: note = Description of Artificial Sequence: Synthetic oligonucleotide
  misc_feature 1..20: note = Target: SCN10A; (+) strand; PAM type: YTN; PAM sequence: CTG
  source 1..20: mol_type = other DNA
aattatgtaaagattataag

SEQ ID NO: 64268 - DNA, 20 bp, synthetic construct
  misc_feature 1..20: note = Description of Artificial Sequence: Synthetic oligonucleotide
  misc_feature 1..20: note = Target: SCN10A; (+) strand; PAM type: YTN; PAM sequence: TTA
  source 1..20: mol_type = other DNA
tgtaaagattataagtcttc

SEQ ID NO: 64269 - DNA, 20 bp, synthetic construct
  misc_feature 1..20: note = Description of Artificial Sequence: Synthetic oligonucleotide
  misc_feature 1..20: note = Target: SCN10A; (+) strand; PAM type: YTN; PAM sequence: TTA
  source 1..20: mol_type = other DNA
taagtcttcccaaattgacc

SEQ ID NO: 64270 - DNA, 20 bp, synthetic construct
  misc_feature 1..20: note = Description of Artificial Sequence: Synthetic oligonucleotide
  misc_feature 1..20: note = Target: SCN10A; (+) strand; PAM type: YTN; PAM sequence: CTT
  source 1..20: mol_type = other DNA
cccaaattgacctatcaatt

SEQ ID NO: 64271 - DNA, 20 bp, synthetic construct
  misc_feature 1..20: note = Description of Artificial Sequence: Synthetic oligonucleotide
  misc_feature 1..20: note = Target: SCN10A; (+) strand; PAM type: YTN; PAM sequence: TTC
  source 1..20: mol_type = other DNA
ccaaattgacctatcaatta

SEQ ID NO: 64272 - DNA, 20 bp, synthetic construct
  misc_feature 1..20: note = Description of Artificial Sequence: Synthetic oligonucleotide
  misc_feature 1..20: note = Target: SCN10A; (+) strand; PAM type: YTN; PAM sequence: TTG
  source 1..20: mol_type = other DNA
acctatcaattacagcagtc

SEQ ID NO: 64273 - DNA, 20 bp, synthetic construct
  misc_feature 1..20: note = Description of Artificial Sequence: Synthetic oligonucleotide
  misc_feature 1..20: note = Target: SCN10A; (+) strand; PAM type: YTN; PAM sequence: CTA
  source 1..20: mol_type = other DNA
tcaattacagcagtccctaa

SEQ ID NO: 64274 - DNA, 20 bp, synthetic construct
  misc_feature 1..20: note = Description of Artificial Sequence: Synthetic oligonucleotide
  misc_feature 1..20: note = Target: SCN10A; (+) strand; PAM type: YTN; PAM sequence: TTA
  source 1..20: mol_type = other DNA
cagcagtccctaatgggaaa

SEQ ID NO: 64275 - DNA, 20 bp, synthetic construct
  misc_feature 1..20: note = Description of Artificial Sequence: Synthetic oligonucleotide
  misc_feature 1..20: note = Target: SCN10A; (+) strand; PAM type: YTN; PAM sequence: CTA
  source 1..20: mol_type = other DNA
atgggaaaaacaatagcagt

SEQ ID NO: 64276 - DNA, 20 bp, synthetic construct
  misc_feature 1..20: note = Description of Artificial Sequence: Synthetic oligonucleotide
  misc_feature 1..20: note = Target: SCN10A; (+) strand; PAM type: YTN; PAM sequence: TTT
  source 1..20: mol_type = other DNA
tgtgtgtatgtgggtatgta

SEQ ID NO: 64277 - DNA, 20 bp, synthetic construct
  misc_feature 1..20: note = Description of Artificial Sequence: Synthetic oligonucleotide
  misc_feature 1..20: note = Target: SCN10A; (+) strand; PAM type: YTN; PAM sequence: TTT
  source 1..20: mol_type = other DNA
gtgtgtatgtgggtatgtaa

SEQ ID NO: 64278 - DNA, 20 bp, synthetic construct
  misc_feature 1..20: note = Description of Artificial Sequence: Synthetic oligonucleotide
  misc_feature 1..20: note = Target: SCN10A; (+) strand; PAM type: YTN; PAM sequence: TTG
  source 1..20: mol_type = other DNA
tgtgtatgtgggtatgtaac

SEQ ID NO: 64279 - DNA, 20 bp, synthetic construct
  misc_feature 1..20: note = Description of Artificial Sequence: Synthetic oligonucleotide
  misc_feature 1..20: note = Target: SCN10A; (+) strand; PAM type: YTN; PAM sequence: CTT
  source 1..20: mol_type = other DNA
ggcaagataattctaaagtg

SEQ ID NO: 64280 - DNA, 20 bp, synthetic construct
  misc_feature 1..20: note = Description of Artificial Sequence: Synthetic oligonucleotide
  misc_feature 1..20: note = Target: SCN10A; (+) strand; PAM type: YTN; PAM sequence: TTG
  source 1..20: mol_type = other DNA
gcaagataattctaaagtga

SEQ ID NO: 64281 - DNA, 20 bp, synthetic construct
  misc_feature 1..20: note = Description of Artificial Sequence: Synthetic oligonucleotide
  misc_feature 1..20: note = Target: SCN10A; (+) strand; PAM type: YTN; PAM sequence: TTC
  source 1..20: mol_type = other DNA
taaagtgaatatgaaagtgt

SEQ ID NO: 64282 - DNA, 20 bp, synthetic construct
  misc_feature 1..20: note = Description of Artificial Sequence: Synthetic oligonucleotide
  misc_feature 1..20: note = Target: SCN10A; (+) strand; PAM type: YTN; PAM sequence: CTA
  source 1..20: mol_type = other DNA
aagtgaatatgaaagtgtgc

SEQ ID NO: 64283 - DNA, 20 bp, synthetic construct
  misc_feature 1..20: note = Description of Artificial Sequence: Synthetic oligonucleotide
  misc_feature 1..20: note = Target: SCN10A; (+) strand; PAM type: YTN; PAM sequence: TTC
  source 1..20: mol_type = other DNA
ttgaagtaaattaggtggat

SEQ ID NO: 64284 - DNA, 20 bp, synthetic construct
  misc_feature 1..20: note = Description of Artificial Sequence: Synthetic oligonucleotide
  misc_feature 1..20: note = Target: SCN10A; (+) strand; PAM type: YTN; PAM sequence: CTT
  source 1..20: mol_type = other DNA
gaagtaaattaggtggatta

SEQ ID NO: 64285 - DNA, 20 bp, synthetic construct
  misc_feature 1..20: note = Description of Artificial Sequence: Synthetic oligonucleotide
  misc_feature 1..20: note = Target: SCN10A; (+) strand; PAM type: YTN; PAM sequence: TTG
  source 1..20: mol_type = other DNA
aagtaaattaggtggattac

SEQ ID NO: 64286 - DNA, 20 bp, synthetic construct
  misc_feature 1..20: note = Description of Artificial Sequence: Synthetic oligonucleotide
  misc_feature 1..20: note = Target: SCN10A; (+) strand; PAM type: YTN; PAM sequence: TTA
  source 1..20: mol_type = other DNA
ggtggattacttgatttaca

SEQ ID NO: 64287 - DNA, 20 bp, synthetic construct
  misc_feature 1..20: note = Description of Artificial Sequence: Synthetic oligonucleotide
  misc_feature 1..20: note = Target: SCN10A; (+) strand; PAM type: YTN; PAM sequence: TTA
  source 1..20: mol_type = other DNA
cttgatttacagacacagat

SEQ ID NO: 64288 - DNA, 20 bp, synthetic construct
  misc_feature 1..20: note = Description of Artificial Sequence: Synthetic oligonucleotide
  misc_feature 1..20: note = Target: SCN10A; (+) strand; PAM type: YTN; PAM sequence: CTT
  source 1..20: mol_type = other DNA
gatttacagacacagatata

SEQ ID NO: 64289 - DNA, 20 bp, synthetic construct
  misc_feature 1..20: note = Description of Artificial Sequence: Synthetic oligonucleotide
  misc_feature 1..20: note = Target: SCN10A; (+) strand; PAM type: YTN; PAM sequence: TTG
  source 1..20: mol_type = other DNA
atttacagacacagatatat

SEQ ID NO: 64290 - DNA, 20 bp, synthetic construct
  misc_feature 1..20: note = Description of Artificial Sequence: Synthetic oligonucleotide
  misc_feature 1..20: note = Target: SCN10A; (+) strand; PAM type: YTN; PAM sequence: TTT
  source 1..20: mol_type = other DNA
acagacacagatatatttaa

SEQ ID NO: 64291 - DNA, 20 bp, synthetic construct
  misc_feature 1..20: note = Description of Artificial Sequence: Synthetic oligonucleotide
  misc_feature 1..20: note = Target: SCN10A; (+) strand; PAM type: YTN; PAM sequence: TTA
  source 1..20: mol_type = other DNA
cagacacagatatatttaaa

SEQ ID NO: 64292 - DNA, 20 bp, synthetic construct
  misc_feature 1..20: note = Description of Artificial Sequence: Synthetic oligonucleotide
  misc_feature 1..20: note = Target: SCN10A; (+) strand; PAM type: YTN; PAM sequence: TTT
  source 1..20: mol_type = other DNA
aaagctgccataattaagac

SEQ ID NO: 64293 - DNA, 20 bp, synthetic construct
  misc_feature 1..20: note = Description of Artificial Sequence: Synthetic oligonucleotide
  misc_feature 1..20: note = Target: SCN10A; (+) strand; PAM type: YTN; PAM sequence: TTA
  source 1..20: mol_type = other DNA
aagctgccataattaagact

SEQ ID NO: 64294 - DNA, 20 bp, synthetic construct
  misc_feature 1..20: note = Description of Artificial Sequence: Synthetic oligonucleotide
  misc_feature 1..20: note = Target: SCN10A; (+) strand; PAM type: YTN; PAM sequence: CTG
  source 1..20: mol_type = other DNA
ccataattaagactgatatt

SEQ ID NO: 64295 - DNA, 20 bp, synthetic construct
  misc_feature 1..20: note = Description of Artificial Sequence: Synthetic oligonucleotide
  misc_feature 1..20: note = Target: SCN10A; (+) strand; PAM type: YTN; PAM sequence: TTA
  source 1..20: mol_type = other DNA
agactgatattggtgccagg

SEQ ID NO: 64296 - DNA, 20 bp, synthetic construct
  misc_feature 1..20: note = Description of Artificial Sequence: Synthetic oligonucleotide
  misc_feature 1..20: note = Target: SCN10A; (+) strand; PAM type: YTN; PAM sequence: CTG
  source 1..20: mol_type = other DNA
atattggtgccaggatagac

SEQ ID NO: 64297 - DNA, 20 bp, synthetic construct
  misc_feature 1..20: note = Description of Artificial Sequence: Synthetic oligonucleotide
  misc_feature 1..20: note = Target: SCN10A; (+) strand; PAM type: YTN; PAM sequence: TTG
  source 1..20: mol_type = other DNA
gtgccaggatagaccaatgg

SEQ ID NO: 64298 - DNA, 20 bp, synthetic construct
  misc_feature 1..20: note = Description of Artificial Sequence: Synthetic oligonucleotide
  misc_feature 1..20: note = Target: SCN10A; (+) strand; PAM type: YTN; PAM sequence: CTA
  source 1..20: mol_type = other DNA
acagagcaaatggagcaagg

SEQ ID NO: 64299 - DNA, 20 bp, synthetic construct
  misc_feature 1..20: note = Description of Artificial Sequence: Synthetic oligonucleotide
  misc_feature 1..20: note = Target: SCN10A; (+) strand; PAM type: YTN; PAM sequence: CTT
  source 1..20: mol_type = other DNA
taagtgacgggaggagaagc

SEQ ID NO: 64300 - DNA, 20 bp, synthetic construct
  misc_feature 1..20: note = Description of Artificial Sequence: Synthetic oligonucleotide
  misc_feature 1..20: note = Target: SCN10A; (+) strand; PAM type: YTN; PAM sequence: TTT
  source 1..20: mol_type = other DNA
aagtgacgggaggagaagca

SEQ ID NO: 64301 - DNA, 20 bp, synthetic construct
  misc_feature 1..20: note = Description of Artificial Sequence: Synthetic oligonucleotide
  misc_feature 1..20: note = Target: SCN10A; (+) strand; PAM type: YTN; PAM sequence: TTA
  source 1..20: mol_type = other DNA
agtgacgggaggagaagcaa

SEQ ID NO: 64302 - DNA, 20 bp, synthetic construct
  misc_feature 1..20: note = Description of Artificial Sequence: Synthetic oligonucleotide
  misc_feature 1..20: note = Target: SCN10A; (+) strand; PAM type: YTN; PAM sequence: CTA
  source 1..20: mol_type = other DNA
ttttgggagagaaggaagac

SEQ ID NO: 64303 - DNA, 20 bp, synthetic construct
  misc_feature 1..20: note = Description of Artificial Sequence: Synthetic oligonucleotide
  misc_feature 1..20: note = Target: SCN10A; (+) strand; PAM type: YTN; PAM sequence: TTT
  source 1..20: mol_type = other DNA
tgggagagaaggaagacaga

SEQ ID NO: 64304 - DNA, 20 bp, synthetic construct
  misc_feature 1..20: note = Description of Artificial Sequence: Synthetic oligonucleotide
  misc_feature 1..20: note = Target: SCN10A; (+) strand; PAM type: YTN; PAM sequence: TTT
  source 1..20: mol_type = other DNA
gggagagaaggaagacagac

SEQ ID NO: 64305 - DNA, 20 bp, synthetic construct
  misc_feature 1..20: note = Description of Artificial Sequence: Synthetic oligonucleotide
  misc_feature 1..20: note = Target: SCN10A; (+) strand; PAM type: YTN; PAM sequence: TTG
  source 1..20: mol_type = other DNA
ggagagaaggaagacagact

SEQ ID NO: 64306 - DNA, 20 bp, synthetic construct
  misc_feature 1..20: note = Description of Artificial Sequence: Synthetic oligonucleotide
  misc_feature 1..20: note = Target: SCN10A; (+) strand; PAM type: YTN; PAM sequence: CTT
  source 1..20: mol_type = other DNA
tttatttcttcctttttccc

SEQ ID NO: 64307 - DNA, 20 bp, synthetic construct
  misc_feature 1..20: note = Description of Artificial Sequence: Synthetic oligonucleotide
  misc_feature 1..20: note = Target: SCN10A; (+) strand; PAM type: YTN; PAM sequence: TTT
  source 1..20: mol_type = other DNA
ttatttcttcctttttccct

SEQ ID NO: 64308 - DNA, 20 bp, synthetic construct
  misc_feature 1..20: note = Description of Artificial Sequence: Synthetic oligonucleotide
  misc_feature 1..20: note = Target: SCN10A; (+) strand; PAM type: YTN; PAM sequence: TTT
  source 1..20: mol_type = other DNA
tatttcttcctttttccctc

SEQ ID NO: 64309 - DNA, 20 bp, synthetic construct
  misc_feature 1..20: note = Description of Artificial Sequence: Synthetic oligonucleotide
  misc_feature 1..20: note = Target: SCN10A; (+) strand; PAM type: YTN; PAM sequence: TTT
  source 1..20: mol_type = other DNA
atttcttcctttttccctcc

SEQ ID NO: 64310 - DNA, 20 bp, synthetic construct
  misc_feature 1..20: note = Description of Artificial Sequence: Synthetic oligonucleotide
  misc_feature 1..20: note = Target: SCN10A; (+) strand; PAM type: YTN; PAM sequence: TTA
  source 1..20: mol_type = other DNA
tttcttcctttttccctcca

SEQ ID NO: 64311 - DNA, 20 bp, synthetic construct
  misc_feature 1..20: note = Description of Artificial Sequence: Synthetic oligonucleotide
  misc_feature 1..20: note = Target: SCN10A; (+) strand; PAM type: YTN; PAM sequence: TTT
  source 1..20: mol_type = other DNA
cttcctttttccctccacct

SEQ ID NO: 64312 - DNA, 20 bp, synthetic construct
  misc_feature 1..20: note = Description of Artificial Sequence: Synthetic oligonucleotide
  misc_feature 1..20: note = Target: SCN10A; (+) strand; PAM type: YTN; PAM sequence: TTC
  source 1..20: mol_type = other DNA
ttcctttttccctccacctt

SEQ ID NO: 64313 - DNA, 20 bp, synthetic construct
  misc_feature 1..20: note = Description of Artificial Sequence: Synthetic oligonucleotide
  misc_feature 1..20: note = Target: SCN10A; (+) strand; PAM type: YTN; PAM sequence: CTT
  source 1..20: mol_type = other DNA
cctttttccctccaccttcc

SEQ ID NO: 64314 - DNA, 20 bp, synthetic construct
  misc_feature 1..20: note = Description of Artificial Sequence: Synthetic oligonucleotide
  misc_feature 1..20: note = Target: SCN10A; (+) strand; PAM type: YTN; PAM sequence: TTC
  source 1..20: mol_type = other DNA
ctttttccctccaccttcct

SEQ ID NO: 64315 - DNA, 20 bp, synthetic construct
  misc_feature 1..20: note = Description of Artificial Sequence: Synthetic oligonucleotide
  misc_feature 1..20: note = Target: SCN10A; (+) strand; PAM type: YTN; PAM sequence: CTT
  source 1..20: mol_type = other DNA
tttccctccaccttcctctc

SEQ ID NO: 64316 - DNA, 20 bp, synthetic construct
  misc_feature 1..20: note = Description of Artificial Sequence: Synthetic oligonucleotide
  misc_feature 1..20: note = Target: SCN10A; (+) strand; PAM type: YTN; PAM sequence: TTT
  source 1..20: mol_type = other DNA
ttccctccaccttcctctct

SEQ ID NO: 64317 - DNA, 20 bp, synthetic construct
  misc_feature 1..20: note = Description of Artificial Sequence: Synthetic oligonucleotide
  misc_feature 1..20: note = Target: SCN10A; (+) strand; PAM type: YTN; PAM sequence: TTT
  source 1..20: mol_type = other DNA
tccctccaccttcctctctt

SEQ ID NO: 64318 - DNA, 20 bp, synthetic construct
  misc_feature 1..20: note = Description of Artificial Sequence: Synthetic oligonucleotide
  misc_feature 1..20: note = Target: SCN10A; (+) strand; PAM type: YTN; PAM sequence: TTT
  source 1..20: mol_type = other DNA
ccctccaccttcctctcttt

SEQ ID NO: 64319 - DNA, 20 bp, synthetic construct
  misc_feature 1..20: note = Description of Artificial Sequence: Synthetic oligonucleotide
  misc_feature 1..20: note = Target: SCN10A; (+) strand; PAM type: YTN; PAM sequence: TTC
  source 1..20: mol_type = other DNA
cctccaccttcctctctttc

SEQ ID NO: 64320 - DNA, 20 bp, synthetic construct
  misc_feature 1..20: note = Description of Artificial Sequence: Synthetic oligonucleotide
  misc_feature 1..20: note = Target: SCN10A; (+) strand; PAM type: YTN; PAM sequence: CTC
  source 1..20: mol_type = other DNA
caccttcctctctttctttc

SEQ ID NO: 64321 - DNA, 20 bp, synthetic construct
  misc_feature 1..20: note = Description of Artificial Sequence: Synthetic oligonucleotide
  misc_feature 1..20: note = Target: SCN10A; (+) strand; PAM type: YTN; PAM sequence: CTT
  source 1..20: mol_type = other DNA
cctctctttctttccttcct

SEQ ID NO: 64322 - DNA, 20 bp, synthetic construct
  misc_feature 1..20: note = Description of Artificial Sequence: Synthetic oligonucleotide
  misc_feature 1..20: note = Target: SCN10A; (+) strand; PAM type: YTN; PAM sequence: TTC
  source 1..20: mol_type = other DNA
ctctctttctttccttcctt

SEQ ID NO: 64323 - DNA, 20 bp, synthetic construct
  misc_feature 1..20: note = Description of Artificial Sequence: Synthetic oligonucleotide
  misc_feature 1..20: note = Target: SCN10A; (+) strand; PAM type: YTN; PAM sequence: CTC
  source 1..20: mol_type = other DNA
tctttctttccttccttcaa

SEQ ID NO: 64324 - DNA, 20 bp, synthetic construct
  misc_feature 1..20: note = Description of Artificial Sequence: Synthetic oligonucleotide
  misc_feature 1..20: note = Target: SCN10A; (+) strand; PAM type: YTN; PAM sequence: CTC
  source 1..20: mol_type = other DNA
tttctttccttccttcaatc

SEQ ID NO: 64325 - DNA, 20 bp, synthetic construct
  misc_feature 1..20: note = Description of Artificial Sequence: Synthetic oligonucleotide
  misc_feature 1..20: note = Target: SCN10A; (+) strand; PAM type: YTN; PAM sequence: CTT
  source 1..20: mol_type = other DNA
tctttccttccttcaatcaa

SEQ ID NO: 64326 - DNA, 20 bp, synthetic construct
  misc_feature 1..20: note = Description of Artificial Sequence: Synthetic oligonucleotide
  misc_feature 1..20: note = Target: SCN10A; (+) strand; PAM type: YTN; PAM sequence: TTT
  source 1..20: mol_type = other DNA
ctttccttccttcaatcaat

SEQ ID NO: 64327 - DNA, 20 bp, synthetic construct
  misc_feature 1..20: note = Description of Artificial Sequence: Synthetic oligonucleotide
  misc_feature 1..20: note = Target: SCN10A; (+) strand; PAM type: YTN; PAM sequence: TTC
  source 1..20: mol_type = other DNA
tttccttccttcaatcaatc

SEQ ID NO: 64328 - DNA, 20 bp, synthetic construct
  misc_feature 1..20: note = Description of Artificial Sequence: Synthetic oligonucleotide
  misc_feature 1..20: note = Target: SCN10A; (+) strand; PAM type: YTN; PAM sequence: CTT
  source 1..20: mol_type = other DNA
tccttccttcaatcaatcaa

SEQ ID NO: 64329 - DNA, 20 bp, synthetic construct
  misc_feature 1..20: note = Description of Artificial Sequence: Synthetic oligonucleotide
  misc_feature 1..20: note = Target: SCN10A; (+) strand; PAM type: YTN; PAM sequence: TTT
  source 1..20: mol_type = other DNA
ccttccttcaatcaatcaac

SEQ ID NO: 64330 - DNA, 20 bp, synthetic construct
  misc_feature 1..20: note = Description of Artificial Sequence: Synthetic oligonucleotide
  misc_feature 1..20: note = Target: SCN10A; (+) strand; PAM type: YTN; PAM sequence: TTC
  source 1..20: mol_type = other DNA
cttccttcaatcaatcaaca

SEQ ID NO: 64331 - DNA, 20 bp, synthetic construct
  misc_feature 1..20: note = Description of Artificial Sequence: Synthetic oligonucleotide
  misc_feature 1..20: note = Target: SCN10A; (+) strand; PAM type: YTN; PAM sequence: CTT
  source 1..20: mol_type = other DNA
ccttcaatcaatcaacaggt

SEQ ID NO: 64332 - DNA, 20 bp, synthetic construct
  misc_feature 1..20: note = Description of Artificial Sequence: Synthetic oligonucleotide
  misc_feature 1..20: note = Target: SCN10A; (+) strand; PAM type: YTN; PAM sequence: TTC
  source 1..20: mol_type = other DNA
cttcaatcaatcaacaggtg

SEQ ID NO: 64333 - DNA, 20 bp, synthetic construct
  misc_feature 1..20: note = Description of Artificial Sequence: Synthetic oligonucleotide
  misc_feature 1..20: note = Target: SCN10A; (+) strand; PAM type: YTN; PAM sequence: CTT
  source 1..20: mol_type = other DNA
caatcaatcaacaggtgttt

SEQ ID NO: 64334 - DNA, 20 bp, synthetic construct
  misc_feature 1..20: note = Description of Artificial Sequence: Synthetic oligonucleotide
  misc_feature 1..20: note = Target: SCN10A; (+) strand; PAM type: YTN; PAM sequence: TTC
  source 1..20: mol_type = other DNA
aatcaatcaacaggtgttta

SEQ ID NO: 64335 - DNA, 20 bp, synthetic construct
  misc_feature 1..20: note = Description of Artificial Sequence: Synthetic oligonucleotide
  misc_feature 1..20: note = Target: SCN10A; (+) strand; PAM type: YTN; PAM sequence: TTT
  source 1..20: mol_type = other DNA
attgagttcctatgtatgtg

SEQ ID NO: 64336 - DNA, 20 bp, synthetic construct
  misc_feature 1..20: note = Description of Artificial Sequence: Synthetic oligonucleotide
  misc_feature 1..20: note = Target: SCN10A; (+) strand; PAM type: YTN; PAM sequence: TTA
  source 1..20: mol_type = other DNA
ttgagttcctatgtatgtgc

SEQ ID NO: 64337 - DNA, 20 bp, synthetic construct
  misc_feature 1..20: note = Description of Artificial Sequence: Synthetic oligonucleotide
  misc_feature 1..20: note = Target: SCN10A; (+) strand; PAM type: YTN; PAM sequence: TTG
  source 1..20: mol_type = other DNA
agttcctatgtatgtgctgg

SEQ ID NO: 64338 - DNA, 20 bp, synthetic construct
  misc_feature 1..20: note = Description of Artificial Sequence: Synthetic oligonucleotide
  misc_feature 1..20: note = Target: SCN10A; (+) strand; PAM type: YTN; PAM sequence: TTC
  source 1..20: mol_type = other DNA
ctatgtatgtgctgggcctt

SEQ ID NO: 64339 - DNA, 20 bp, synthetic construct
  misc_feature 1..20: note = Description of Artificial Sequence: Synthetic oligonucleotide
  misc_feature 1..20: note = Target: SCN10A; (+) strand; PAM type: YTN; PAM sequence: CTA
  source 1..20: mol_type = other DNA
tgtatgtgctgggccttgtg

SEQ ID NO: 64340 - DNA, 20 bp, synthetic construct
  misc_feature 1..20: note = Description of Artificial Sequence: Synthetic oligonucleotide
  misc_feature 1..20: note = Target: SCN10A; (+) strand; PAM type: YTN; PAM sequence: CTG
  source 1..20: mol_type = other DNA
ggccttgtgctaggcccttg

SEQ ID NO: 64341 - DNA, 20 bp, synthetic construct
  misc_feature 1..20: note = Description of Artificial Sequence: Synthetic oligonucleotide
  misc_feature 1..20: note = Target: SCN10A; (+) strand; PAM type: YTN; PAM sequence: CTT
  source 1..20: mol_type = other DNA
gtgctaggcccttgggataa

SEQ ID NO: 64342 - DNA, 20 bp, synthetic construct
  misc_feature 1..20: note = Description of Artificial Sequence: Synthetic oligonucleotide
  misc_feature 1..20: note = Target: SCN10A; (+) strand; PAM type: YTN; PAM sequence: TTG
  source 1..20: mol_type = other DNA
tgctaggcccttgggataaa

SEQ ID NO: 64343 - DNA, 20 bp, synthetic construct
  misc_feature 1..20: note = Description of Artificial Sequence: Synthetic oligonucleotide
  misc_feature 1..20: note = Target: SCN10A; (+) strand; PAM type: YTN; PAM sequence: CTA
  source 1..20: mol_type = other DNA
ggcccttgggataaaacggt

SEQ ID NO: 64344 - DNA, 20 bp, synthetic construct
  misc_feature 1..20: note = Description of Artificial Sequence: Synthetic oligonucleotide
  misc_feature 1..20: note = Target: SCN10A; (+) strand; PAM type: YTN; PAM sequence: CTT
  source 1..20: mol_type = other DNA
gggataaaacggtagacaag

SEQ ID NO: 64345 - DNA, 20 bp, synthetic construct
  misc_feature 1..20: note = Description of Artificial Sequence: Synthetic oligonucleotide
  misc_feature 1..20: note = Target: SCN10A; (+) strand; PAM type: YTN; PAM sequence: TTG
  source 1..20: mol_type = other DNA
ggataaaacggtagacaaga

SEQ ID NO: 64346 - DNA, 20 bp, synthetic construct
  misc_feature 1..20: note = Description of Artificial Sequence: Synthetic oligonucleotide
  misc_feature 1..20: note = Target: SCN10A; (+) strand; PAM type: YTN; PAM sequence: CTC
  source 1..20: mol_type = other DNA
tggtttttgcctcatgggat

SEQ ID NO: 64347 - DNA, 20 bp, synthetic construct
  misc_feature 1..20: note = Description of Artificial Sequence: Synthetic oligonucleotide
  misc_feature 1..20: note = Target: SCN10A; (+) strand; PAM type: YTN; PAM sequence: CTG
  source 1..20: mol_type = other DNA
gtttttgcctcatgggatag

SEQ ID NO: 64348 - DNA, 20 bp, synthetic construct
  misc_feature 1..20: note = Description of Artificial Sequence: Synthetic oligonucleotide
  misc_feature 1..20: note = Target: SCN10A; (+) strand; PAM type: YTN; PAM sequence: TTT
  source 1..20: mol_type = other DNA
ttgcctcatgggatagcagg

SEQ ID NO: 64349 - DNA, 20 bp, synthetic construct
  misc_feature 1..20: note = Description of Artificial Sequence: Synthetic oligonucleotide
  misc_feature 1..20: note = Target: SCN10A; (+) strand; PAM type: YTN; PAM sequence: TTT
  source 1..20: mol_type = other DNA
tgcctcatgggatagcagga

SEQ ID NO: 64350 - DNA, 20 bp, synthetic construct
  misc_feature 1..20: note = Description of Artificial Sequence: Synthetic oligonucleotide
  misc_feature 1..20: note = Target: SCN10A; (+) strand; PAM type: YTN; PAM sequence: TTT
  source 1..20: mol_type = other DNA
gcctcatgggatagcaggac

SEQ ID NO: 64351 - DNA, 20 bp, synthetic construct
  misc_feature 1..20: note = Description of Artificial Sequence: Synthetic oligonucleotide
  misc_feature 1..20: note = Target: SCN10A; (+) strand; PAM type: YTN; PAM sequence: TTG
  source 1..20: mol_type = other DNA
cctcatgggatagcaggaca

SEQ ID NO: 64352 - DNA, 20 bp, synthetic construct
  misc_feature 1..20: note = Description of Artificial Sequence: Synthetic oligonucleotide
  misc_feature 1..20: note = Target: SCN10A; (+) strand; PAM type: YTN; PAM sequence: CTC
  source 1..20: mol_type = other DNA
atgggatagcaggacaattg

SEQ ID NO: 64353 - DNA, 20 bp, synthetic construct
  misc_feature 1..20: note = Description of Artificial Sequence: Synthetic oligonucleotide
  misc_feature 1..20: note = Target: SCN10A; (+) strand; PAM type: YTN; PAM sequence: TTG
  source 1..20: mol_type = other DNA
taaatgccaggttaatttga

SEQ ID NO: 64354 - DNA, 20 bp, synthetic construct
  misc_feature 1..20: note = Description of Artificial Sequence: Synthetic oligonucleotide
  misc_feature 1..20: note = Target: SCN10A; (+) strand; PAM type: YTN; PAM sequence: TTA
  source 1..20: mol_type = other DNA
atttgatgaaggaatccaac

SEQ ID NO: 64355 - DNA, 20 bp, synthetic construct
  misc_feature 1..20: note = Description of Artificial Sequence: Synthetic oligonucleotide
  misc_feature 1..20: note = Target: SCN10A; (+) strand; PAM type: YTN; PAM sequence: TTT
  source 1..20: mol_type = other DNA
gatgaaggaatccaacttta

SEQ ID NO: 64356 - DNA, 20 bp, synthetic construct
  misc_feature 1..20: note = Description of Artificial Sequence: Synthetic oligonucleotide
  misc_feature 1..20: note = Target: SCN10A; (+) strand; PAM type: YTN; PAM sequence: TTG
  source 1..20: mol_type = other DNA
atgaaggaatccaactttag

SEQ ID NO: 64357 - DNA, 20 bp, synthetic construct
  misc_feature 1..20: note = Description of Artificial Sequence: Synthetic oligonucleotide
  misc_feature 1..20: note = Target: SCN10A; (+) strand; PAM type: YTN; PAM sequence: CTT
  source 1..20: mol_type = other DNA
tagatagtgtggttggggag

SEQ ID NO: 64358 - DNA, 20 bp, synthetic construct
  misc_feature 1..20: note = Description of Artificial Sequence: Synthetic oligonucleotide
  misc_feature 1..20: note = Target: SCN10A; (+) strand; PAM type: YTN; PAM sequence: TTT
  source 1..20: mol_type = other DNA
agatagtgtggttggggagg

SEQ ID NO: 64359 - DNA, 20 bp, synthetic construct
  misc_feature 1..20: note = Description of Artificial Sequence: Synthetic oligonucleotide
  misc_feature 1..20: note = Target: SCN10A; (+) strand; PAM type: YTN; PAM sequence: TTA
  source 1..20: mol_type = other DNA
gatagtgtggttggggaggt

SEQ ID NO: 64360 - DNA, 20 bp, synthetic construct
  misc_feature 1..20: note = Description of Artificial Sequence: Synthetic oligonucleotide
  misc_feature 1..20: note = Target: SCN10A; (+) strand; PAM type: YTN; PAM sequence: TTG
  source 1..20: mol_type = other DNA
gggaggtcccctctaaggag

SEQ ID NO: 64361 - DNA, 20 bp, synthetic construct
  misc_feature 1..20: note = Description of Artificial Sequence: Synthetic oligonucleotide
  misc_feature 1..20: note = Target: SCN10A; (+) strand; PAM type: YTN; PAM sequence: CTC
  source 1..20: mol_type = other DNA
taaggaggtgacaagtgcat

SEQ ID NO: 64362 - DNA, 20 bp, synthetic construct
  misc_feature 1..20: note = Description of Artificial Sequence: Synthetic oligonucleotide
  misc_feature 1..20: note = Target: SCN10A; (+) strand; PAM type: YTN; PAM sequence: CTA
  source 1..20: mol_type = other DNA
aggaggtgacaagtgcattg

SEQ ID NO: 64363 - DNA, 20 bp, synthetic construct
  misc_feature 1..20: note = Description of Artificial Sequence: Synthetic oligonucleotide
  misc_feature 1..20: note = Target: SCN10A; (+) strand; PAM type: YTN; PAM sequence: TTG
  source 1..20: mol_type = other DNA
aacacagagtttgagaataa

SEQ ID NO: 64364 - DNA, 20 bp, synthetic construct
  misc_feature 1..20: note = Description of Artificial Sequence: Synthetic oligonucleotide
  misc_feature 1..20: note = Target: SCN10A; (+) strand; PAM type: YTN; PAM sequence: TTT
  source 1..20: mol_type = other DNA
gagaataagtgagctaagtg

SEQ ID NO: 64365 - DNA, 20 bp, synthetic construct
  misc_feature 1..20: note = Description of Artificial Sequence: Synthetic oligonucleotide
  misc_feature 1..20: note = Target: SCN10A; (+) strand; PAM type: YTN; PAM sequence: TTG
  source 1..20: mol_type = other DNA
agaataagtgagctaagtga

SEQ ID NO: 64366 - DNA, 20 bp, synthetic construct
  misc_feature 1..20: note = Description of Artificial Sequence: Synthetic oligonucleotide
  misc_feature 1..20: note = Target: SCN10A; (+) strand; PAM type: YTN; PAM sequence: CTA
  source 1..20: mol_type = other DNA
agtgaagactaaaggaaaag

SEQ ID NO: 64367 - DNA, 20 bp, synthetic construct
  misc_feature 1..20: note = Description of Artificial Sequence: Synthetic oligonucleotide
  misc_feature 1..20: note = Target: SCN10A; (+) strand; PAM type: YTN; PAM sequence: CTA
  source 1..20: mol_type = other DNA
aaggaaaagtattccaggca

SEQ ID NO: 64368 - DNA, 20 bp, synthetic construct
  misc_feature 1..20: note = Description of Artificial Sequence: Synthetic oligonucleotide
  misc_feature 1..20: note = Target: SCN10A; (+) strand; PAM type: YTN; PAM sequence: TTC
  source 1..20: mol_type = other DNA
caggcacagcgaaaaaaact

SEQ ID NO: 64369 - DNA, 20 bp, synthetic construct
  misc_feature 1..20: note = Description of Artificial Sequence: Synthetic oligonucleotide
  misc_feature 1..20: note = Target: SCN10A; (+) strand; PAM type: YTN; PAM sequence: CTT
  source 1..20: mol_type = other DNA
caaaggcccaaagccaagaa

SEQ ID NO: 64370 - DNA, 20 bp, synthetic construct
  misc_feature 1..20: note = Description of Artificial Sequence: Synthetic oligonucleotide
  misc_feature 1..20: note = Target: SCN10A; (+) strand; PAM type: YTN; PAM sequence: TTC
  source 1..20: mol_type = other DNA
aaaggcccaaagccaagaag

SEQ ID NO: 64371 - DNA, 20 bp, synthetic construct
  misc_feature 1..20: note = Description of Artificial Sequence: Synthetic oligonucleotide
  misc_feature 1..20: note = Target: SCN10A; (+) strand; PAM type: YTN; PAM sequence: TTC
  source 1..20: mol_type = other DNA
tctgttatgtgtgaagaaga

SEQ ID NO: 64372 - DNA, 20 bp, synthetic construct
  misc_feature 1..20: note = Description of Artificial Sequence: Synthetic oligonucleotide
  misc_feature 1..20: note = Target: SCN10A; (+) strand; PAM type: YTN; PAM sequence: CTC
  source 1..20: mol_type = other DNA
tgttatgtgtgaagaagaga

SEQ ID NO: 64373 - DNA, 20 bp, synthetic construct
  misc_feature 1..20: note = Description of Artificial Sequence: Synthetic oligonucleotide
  misc_feature 1..20: note = Target: SCN10A; (+) strand; PAM type: YTN; PAM sequence: CTG
  source 1..20: mol_type = other DNA
ttatgtgtgaagaagagaga

SEQ ID NO: 64374 - DNA, 20 bp, synthetic construct
  misc_feature 1..20: note = Description of Artificial Sequence: Synthetic oligonucleotide
  misc_feature 1..20: note = Target: SCN10A; (+) strand; PAM type: YTN; PAM sequence: TTA
  source 1..20: mol_type = other DNA
tgtgtgaagaagagagagta

SEQ ID NO: 64375 - DNA, 20 bp, synthetic construct
  misc_feature 1..20: note = Description of Artificial Sequence: Synthetic oligonucleotide
  misc_feature 1..20: note = Target: SCN10A; (+) strand; PAM type: YTN; PAM sequence: CTT
  source 1..20: mol_type = other DNA
tttggctggagcaaagtggg

SEQ ID NO: 64376 - DNA, 20 bp, synthetic construct
  misc_feature 1..20: note = Description of Artificial Sequence: Synthetic oligonucleotide
  misc_feature 1..20: note = Target: SCN10A; (+) strand; PAM type: YTN; PAM sequence: TTT
  source 1..20: mol_type = other DNA
ttggctggagcaaagtgggc

SEQ ID NO: 64377 - DNA, 20 bp, synthetic construct
  misc_feature 1..20: note = Description of Artificial Sequence: Synthetic oligonucleotide
  misc_feature 1..20: note = Target: SCN10A; (+) strand; PAM type: YTN; PAM sequence: TTT
  source 1..20: mol_type = other DNA
tggctggagcaaagtgggca

SEQ ID NO: 64378 - DNA, 20 bp, synthetic construct
  misc_feature 1..20: note = Description of Artificial Sequence: Synthetic oligonucleotide
  misc_feature 1..20: note = Target: SCN10A; (+) strand; PAM type: YTN; PAM sequence: TTT
  source 1..20: mol_type = other DNA
ggctggagcaaagtgggcaa

SEQ ID NO: 64379 - DNA, 20 bp, synthetic construct
  misc_feature 1..20: note = Description of Artificial Sequence: Synthetic oligonucleotide
  misc_feature 1..20: note = Target: SCN10A; (+) strand; PAM type: YTN; PAM sequence: TTG
  source 1..20: mol_type = other DNA
gctggagcaaagtgggcaag

SEQ ID NO: 64380 - DNA, 20 bp, synthetic construct
  misc_feature 1..20: note = Description of Artificial Sequence: Synthetic oligonucleotide
  misc_feature 1..20: note = Target: SCN10A; (+) strand; PAM type: YTN; PAM sequence: CTG
  source 1..20: mol_type = other DNA
gagcaaagtgggcaagacgg

SEQ ID NO: 64381 - DNA, 20 bp, synthetic construct
  misc_feature 1..20: note = Description of Artificial Sequence: Synthetic oligonucleotide
  misc_feature 1..20: note = Target: SCN10A; (+) strand; PAM type: YTN; PAM sequence: CTG
  source 1..20: mol_type = other DNA
gtgaactggcaggtcctgat

SEQ ID NO: 64382 - DNA, 20 bp, synthetic construct
  misc_feature 1..20: note = Description of Artificial Sequence: Synthetic oligonucleotide
  misc_feature 1..20: note = Target: SCN10A; (+) strand; PAM type: YTN; PAM sequence: CTG
  source 1..20: mol_type = other DNA
gcaggtcctgattatgcaga

SEQ ID NO: 64383 - DNA, 20 bp, synthetic construct
  misc_feature 1..20: note = Description of Artificial Sequence: Synthetic oligonucleotide
  misc_feature 1..20: note = Target: SCN10A; (+) strand; PAM type: YTN; PAM sequence: CTG
  source 1..20: mol_type = other DNA
attatgcagaactttgtaca

SEQ ID NO: 64384 - DNA, 20 bp, synthetic construct
  misc_feature 1..20: note = Description of Artificial Sequence: Synthetic oligonucleotide
  misc_feature 1..20: note = Target: SCN10A; (+) strand; PAM type: YTN; PAM sequence: TTA
  source 1..20: mol_type = other DNA
tgcagaactttgtacaccat

SEQ ID NO: 64385 - DNA, 20 bp, synthetic construct
  misc_feature 1..20: note = Description of Artificial Sequence: Synthetic oligonucleotide
  misc_feature 1..20: note = Target: SCN10A; (+) strand; PAM type: YTN; PAM sequence: CTT
  source 1..20: mol_type = other DNA
tgtacaccatcatgaggagt

SEQ ID NO: 64386 - DNA, 20 bp, synthetic construct
  misc_feature 1..20: note = Description of Artificial Sequence: Synthetic oligonucleotide
  misc_feature 1..20: note = Target: SCN10A; (+) strand; PAM type: YTN; PAM sequence: TTT
  source 1..20: mol_type = other DNA
gtacaccatcatgaggagtc

SEQ ID NO: 64387 - DNA, 20 bp, synthetic construct
  misc_feature 1..20: note = Description of Artificial Sequence: Synthetic oligonucleotide
  misc_feature 1..20: note = Target: SCN10A; (+) strand; PAM type: YTN; PAM sequence: TTG
  source 1..20: mol_type = other DNA
tacaccatcatgaggagtct

SEQ ID NO: 64388 - DNA, 20 bp, synthetic construct
  misc_feature 1..20: note = Description of Artificial Sequence: Synthetic oligonucleotide
  misc_feature 1..20: note = Target: SCN10A; (+) strand; PAM type: YTN; PAM sequence: CTG
  source 1..20: mol_type = other DNA
gattttattctcagagcaat

SEQ ID NO: 64389 - DNA, 20 bp, synthetic construct
  misc_feature 1..20: note = Description of Artificial Sequence: Synthetic oligonucleotide
  misc_feature 1..20: note = Target: SCN10A; (+) strand; PAM type: YTN; PAM sequence: TTT
  source 1..20: mol_type = other DNA
tattctcagagcaatgggaa

SEQ ID NO: 64390 - DNA, 20 bp, synthetic construct
  misc_feature 1..20: note = Description of Artificial Sequence: Synthetic oligonucleotide
  misc_feature 1..20: note = Target: SCN10A; (+) strand; PAM type: YTN; PAM sequence: TTT
  source 1..20: mol_type = other DNA
attctcagagcaatgggaaa

SEQ ID NO: 64391 - DNA, 20 bp, synthetic construct
  misc_feature 1..20: note = Description of Artificial Sequence: Synthetic oligonucleotide
  misc_feature 1..20: note = Target: SCN10A; (+) strand; PAM type: YTN; PAM sequence: TTA
  source 1..20: mol_type = other DNA
ttctcagagcaatgggaaac

SEQ ID NO: 64392 - DNA, 20 bp, synthetic construct
  misc_feature 1..20: note = Description of Artificial Sequence: Synthetic oligonucleotide
  misc_feature 1..20: note = Target: SCN10A; (+) strand; PAM type: YTN; PAM sequence: TTC
  source 1..20: mol_type = other DNA
tcagagcaatgggaaaccag

SEQ ID NO: 64393 - DNA, 20 bp, synthetic construct
  misc_feature 1..20: note = Description of Artificial Sequence: Synthetic oligonucleotide
  misc_feature 1..20: note = Target: SCN10A; (+) strand; PAM type: YTN; PAM sequence: CTC
  source 1..20: mol_type = other DNA
agagcaatgggaaaccagtg

SEQ ID NO: 64394 - DNA, 20 bp, synthetic construct
  misc_feature 1..20: note = Description of Artificial Sequence: Synthetic oligonucleotide
  misc_feature 1..20: note = Target: SCN10A; (+) strand; PAM type: YTN; PAM sequence: TTA
  source 1..20: mol_type = other DNA
tttgtaacaaatgtaggtac

SEQ ID NO: 64395 - DNA, 20 bp, synthetic construct
  misc_feature 1..20: note = Description of Artificial Sequence: Synthetic oligonucleotide
  misc_feature 1..20: note = Target: SCN10A; (+) strand; PAM type: YTN; PAM sequence: TTT
  source 1..20: mol_type = other DNA
gtaacaaatgtaggtactaa

SEQ ID NO: 64396 - DNA, 20 bp, synthetic construct
  misc_feature 1..20: note = Description of Artificial Sequence: Synthetic oligonucleotide
  misc_feature 1..20: note = Target: SCN10A; (+) strand; PAM type: YTN; PAM sequence: TTG
  source 1..20: mol_type = other DNA
taacaaatgtaggtactaac

SEQ ID NO: 64397 - DNA, 20 bp, synthetic construct
  misc_feature 1..20: note = Description of Artificial Sequence: Synthetic oligonucleotide
  misc_feature 1..20: note = Target: SCN10A; (+) strand; PAM type: YTN; PAM sequence: CTA
  source 1..20: mol_type = other DNA
acataagatgttggtaatag

SEQ ID NO: 64398 - DNA, 20 bp, synthetic construct
  misc_feature 1..20: note = Description of Artificial Sequence: Synthetic oligonucleotide
  misc_feature 1..20: note = Target: SCN10A; (+) strand; PAM type: YTN; PAM sequence: TTG
  source 1..20: mol_type = other DNA
gtaatagggaaactctgtgt

SEQ ID NO: 64399 - DNA, 20 bp, synthetic construct
  misc_feature 1..20: note = Description of Artificial Sequence: Synthetic oligonucleotide
  misc_feature 1..20: note = Target: SCN10A; (+) strand; PAM type: YTN; PAM sequence: CTC
  source 1..20: mol_type = other DNA
tgtgtgtgtgtgtgtgtgtg

SEQ ID NO: 64400 - DNA, 20 bp, synthetic construct
  misc_feature 1..20: note = Description of Artificial Sequence: Synthetic oligonucleotide
  misc_feature 1..20: note = Target: SCN10A; (+) strand; PAM type: YTN; PAM sequence: CTG
  source 1..20: mol_type = other DNA
tgtgtgtgtgtgtgtgtgtg

SEQ ID NO: 64401 - DNA, 20 bp, synthetic construct
  misc_feature 1..20: note = Description of Artificial Sequence: Synthetic oligonucleotide
  misc_feature 1..20: note = Target: SCN10A; (+) strand; PAM type: YTN; PAM sequence: TTG
  source 1..20: mol_type = other DNA
tgggattgatggtatatgaa

SEQ ID NO: 64402 - DNA, 20 bp, synthetic construct
  misc_feature 1..20: note = Description of Artificial Sequence: Synthetic oligonucleotide
  misc_feature 1..20: note = Target: SCN10A; (+) strand; PAM type: YTN; PAM sequence: TTG
  source 1..20: mol_type = other DNA
atggtatatgaaagctttct

SEQ ID NO: 64403 - DNA, 20 bp, synthetic construct
  misc_feature 1..20: note = Description of Artificial Sequence: Synthetic oligonucleotide
  misc_feature 1..20: note = Target: SCN10A; (+) strand; PAM type: YTN; PAM sequence: CTT
  source 1..20: mol_type = other DNA
tctgttcaatctgctccagt

SEQ ID NO: 64404 - DNA, 20 bp, synthetic construct
  misc_feature 1..20: note = Description of Artificial Sequence: Synthetic oligonucleotide
  misc_feature 1..20: note = Target: SCN10A; (+) strand; PAM type: YTN; PAM sequence: TTT
  source 1..20: mol_type = other DNA
ctgttcaatctgctccagtt

SEQ ID NO: 64405 - DNA, 20 bp, synthetic construct
  misc_feature 1..20: note = Description of Artificial Sequence: Synthetic oligonucleotide
  misc_feature 1..20: note = Target: SCN10A; (+) strand; PAM type: YTN; PAM sequence: TTC
  source 1..20: mol_type = other DNA
tgttcaatctgctccagttt

SEQ ID NO: 64406 - DNA, 20 bp, synthetic construct
  misc_feature 1..20: note = Description of Artificial Sequence: Synthetic oligonucleotide
  misc_feature 1..20: note = Target: SCN10A; (+) strand; PAM type: YTN; PAM sequence: CTG
  source 1..20: mol_type = other DNA
ttcaatctgctccagttttc

SEQ ID NO: 64407 - DNA, 20 bp, synthetic construct
  misc_feature 1..20: note = Description of Artificial Sequence: Synthetic oligonucleotide
  misc_feature 1..20: note = Target: SCN10A; (+) strand; PAM type: YTN; PAM sequence: TTC
  source 1..20: mol_type = other DNA
aatctgctccagttttctga

SEQ ID NO: 64408 - DNA, 20 bp, synthetic construct
  misc_feature 1..20: note = Description of Artificial Sequence: Synthetic oligonucleotide
  misc_feature 1..20: note = Target: SCN10A; (+) strand; PAM type: YTN; PAM sequence: CTG
  source 1..20: mol_type = other DNA
ctccagttttctgaaaactg

SEQ ID NO: 64409 - DNA, 20 bp, synthetic construct
  misc_feature 1..20: note = Description of Artificial Sequence: Synthetic oligonucleotide
  misc_feature 1..20: note = Target: SCN10A; (+) strand; PAM type: YTN; PAM sequence: CTC
  source 1..20: mol_type = other DNA
cagttttctgaaaactgaaa

SEQ ID NO: 64410 - DNA, 20 bp, synthetic construct
  misc_feature 1..20: note = Description of Artificial Sequence: Synthetic oligonucleotide
  misc_feature 1..20: note = Target: SCN10A; (+) strand; PAM type: YTN; PAM sequence: TTT
  source 1..20: mol_type = other DNA
tctgaaaactgaaaactgtc

SEQ ID NO: 64411 - DNA, 20 bp, synthetic construct
  misc_feature 1..20: note = Description of Artificial Sequence: Synthetic oligonucleotide
  misc_feature 1..20: note = Target: SCN10A; (+) strand; PAM type: YTN; PAM sequence: TTT
  source 1..20: mol_type = other DNA
ctgaaaactgaaaactgtcc

SEQ ID NO: 64412 - DNA, 20 bp, synthetic construct
  misc_feature 1..20: note = Description of Artificial Sequence: Synthetic oligonucleotide
  misc_feature 1..20: note = Target: SCN10A; (+) strand; PAM type: YTN; PAM sequence: TTC
  source 1..20: mol_type = other DNA
tgaaaactgaaaactgtcct

SEQ ID NO: 64413 - DNA, 20 bp, synthetic construct
  misc_feature 1..20: note = Description of Artificial Sequence: Synthetic oligonucleotide
  misc_feature 1..20: note = Target: SCN10A; (+) strand; PAM type: YTN; PAM sequence: CTG
  source 1..20: mol_type = other DNA
aaaactgaaaactgtcctga

SEQ ID NO: 64414 - DNA, 20 bp, synthetic construct
  misc_feature 1..20: note = Description of Artificial Sequence: Synthetic oligonucleotide
  misc_feature 1..20: note = Target: SCN10A; (+) strand; PAM type: YTN; PAM sequence: CTG
  source 1..20: mol_type = other DNA
aaaactgtcctgaaaataaa

SEQ ID NO: 64415 - DNA, 20 bp, synthetic construct
  misc_feature 1..20: note = Description of Artificial Sequence: Synthetic oligonucleotide
  misc_feature 1..20: note = Target: SCN10A; (+) strand; PAM type: YTN; PAM sequence: CTG
  source 1..20: mol_type = other DNA
tcctgaaaataaagtctatt

SEQ ID NO: 64416 - DNA, 20 bp, synthetic construct
  misc_feature 1..20: note = Description of Artificial Sequence: Synthetic oligonucleotide
  misc_feature 1..20: note = Target: SCN10A; (+) strand; PAM type: YTN; PAM sequence: CTG
  source 1..20: mol_type = other DNA
aaaataaagtctattaatta

SEQ ID NO: 64417 - DNA, 20 bp, synthetic construct
  misc_feature 1..20: note = Description of Artificial Sequence: Synthetic oligonucleotide
  misc_feature 1..20: note = Target: SCN10A; (+) strand; PAM type: YTN; PAM sequence: CTA
  source 1..20: mol_type = other DNA
ttaattaaaaccaggaaact

SEQ ID NO: 64418 - DNA, 20 bp, synthetic construct
  misc_feature 1..20: note = Description of Artificial Sequence: Synthetic oligonucleotide
  misc_feature 1..20: note = Target: SCN10A; (+) strand; PAM type: YTN; PAM sequence: TTA
  source 1..20: mol_type = other DNA
attaaaaccaggaaactgac

SEQ ID NO: 64419 - DNA, 20 bp, synthetic construct
  misc_feature 1..20: note = Description of Artificial Sequence: Synthetic oligonucleotide
  misc_feature 1..20: note = Target: SCN10A; (+) strand; PAM type: YTN; PAM sequence: TTA
  source 1..20: mol_type = other DNA
aaaccaggaaactgaccagc

SEQ ID NO: 64420 - DNA, 20 bp, synthetic construct
  misc_feature 1..20: note = Description of Artificial Sequence: Synthetic oligonucleotide
  misc_feature 1..20: note = Target: SCN10A; (+) strand; PAM type: YTN; PAM sequence: CTG
  source 1..20: mol_type = other DNA
accagctggcggtgattttt

SEQ ID NO: 64421 - DNA, 20 bp, synthetic construct
  misc_feature 1..20: note = Description of Artificial Sequence: Synthetic oligonucleotide
  misc_feature 1..20: note = Target: SCN10A; (+) strand; PAM type: YTN; PAM sequence: CTG
  source 1..20: mol_type = other DNA
gcggtgatttttctccagca

SEQ ID NO: 64422 - DNA, 20 bp, synthetic construct
  misc_feature 1..20: note = Description of Artificial Sequence: Synthetic oligonucleotide
  misc_feature 1..20: note = Target: SCN10A; (+) strand; PAM type: YTN; PAM sequence: TTT
  source 1..20: mol_type = other DNA
ttctccagcatttctcacag

SEQ ID NO: 64423 - DNA, 20 bp, synthetic construct
  misc_feature 1..20: note = Description of Artificial Sequence: Synthetic oligonucleotide
  misc_feature 1..20: note = Target: SCN10A; (+) strand; PAM type: YTN; PAM sequence: TTT
  source 1..20: mol_type = other DNA
tctccagcatttctcacagc

SEQ ID NO: 64424 - DNA, 20 bp, synthetic construct
  misc_feature 1..20: note = Description of Artificial Sequence: Synthetic oligonucleotide
  misc_feature 1..20: note = Target: SCN10A; (+) strand; PAM type: YTN; PAM sequence: TTT
  source 1..20: mol_type = other DNA
ctccagcatttctcacagct

SEQ ID NO: 64425 - DNA, 20 bp, synthetic construct
  misc_feature 1..20: note = Description of Artificial Sequence: Synthetic oligonucleotide
  misc_feature 1..20: note = Target: SCN10A; (+) strand; PAM type: YTN; PAM sequence: TTC
  source 1..20: mol_type = other DNA
tccagcatttctcacagctc

SEQ ID NO: 64426 - DNA, 20 bp, synthetic construct
  misc_feature 1..20: note = Description of Artificial Sequence: Synthetic oligonucleotide
  misc_feature 1..20: note = Target: SCN10A; (+) strand; PAM type: YTN; PAM sequence: CTC
  source 1..20: mol_type = other DNA
cagcatttctcacagctcag

SEQ ID NO: 64427 - DNA, 20 bp, synthetic construct
  misc_feature 1..20: note = Description of Artificial Sequence: Synthetic oligonucleotide
  misc_feature 1..20: note = Target: SCN10A; (+) strand; PAM type: YTN; PAM sequence: TTT
  source 1..20: mol_type = other DNA
ctcacagctcaggtgcagac

SEQ ID NO: 64428 - DNA, 20 bp, synthetic construct
  misc_feature 1..20: note = Description of Artificial Sequence: Synthetic oligonucleotide
  misc_feature 1..20: note = Target: SCN10A; (+) strand; PAM type: YTN; PAM sequence: TTC
  source 1..20: mol_type = other DNA
tcacagctcaggtgcagaca

SEQ ID NO: 64429 - DNA, 20 bp, synthetic construct
  misc_feature 1..20: note = Description of Artificial Sequence: Synthetic oligonucleotide
  misc_feature 1..20: note = Target: SCN10A; (+) strand; PAM type: YTN; PAM sequence: CTC
  source 1..20: mol_type = other DNA
acagctcaggtgcagacaag

SEQ ID NO: 64430 - DNA, 20 bp, synthetic construct
  misc_feature 1..20: note = Description of Artificial Sequence: Synthetic oligonucleotide
  misc_feature 1..20: note = Target: SCN10A; (+) strand; PAM type: YTN; PAM sequence: CTC
  source 1..20: mol_type = other DNA
aggtgcagacaaggtggaga

SEQ ID NO: 64431 - DNA, 20 bp, synthetic construct
  misc_feature 1..20: note = Description of Artificial Sequence: Synthetic oligonucleotide
  misc_feature 1..20: note = Target: SCN10A; (+) strand; PAM type: YTN; PAM sequence: TTT
  source 1..20: mol_type = other DNA
gacttagactctccggtgag

SEQ ID NO: 64432 - DNA, 20 bp, synthetic construct
  misc_feature 1..20: note = Description of Artificial Sequence: Synthetic oligonucleotide
  misc_feature 1..20: note = Target: SCN10A; (+) strand; PAM type: YTN; PAM sequence: TTG
  source 1..20: mol_type = other DNA
acttagactctccggtgagg

SEQ ID NO: 64433 - DNA, 20 bp, synthetic construct
  misc_feature 1..20: note = Description of Artificial Sequence: Synthetic oligonucleotide
  misc_feature 1..20: note = Target: SCN10A; (+) strand; PAM type: YTN; PAM sequence: CTT
  source 1..20: mol_type = other DNA
agactctccggtgaggtttt

SEQ ID NO: 64434 - DNA, 20 bp, synthetic construct
  misc_feature 1..20: note = Description of Artificial Sequence: Synthetic oligonucleotide
  misc_feature 1..20: note = Target: SCN10A; (+) strand; PAM type: YTN; PAM sequence: TTA
  source 1..20: mol_type = other DNA
gactctccggtgaggttttg

SEQ ID NO: 64435 - DNA, 20 bp, synthetic construct
  misc_feature 1..20: note = Description of Artificial Sequence: Synthetic oligonucleotide
  misc_feature 1..20: note = Target: SCN10A; (+) strand; PAM type: YTN; PAM sequence: CTC
  source 1..20: mol_type = other DNA
tccggtgaggttttggcaaa

SEQ ID NO: 64436 - DNA, 20 bp, synthetic construct
  misc_feature 1..20: note = Description of Artificial Sequence: Synthetic oligonucleotide
  misc_feature 1..20: note = Target: SCN10A; (+) strand; PAM type: YTN; PAM sequence: CTC
  source 1..20: mol_type = other DNA
cggtgaggttttggcaaaca

SEQ ID NO: 64437 - DNA, 20 bp, synthetic construct
  misc_feature 1..20: note = Description of Artificial Sequence: Synthetic oligonucleotide
  misc_feature 1..20: note = Target: SCN10A; (+) strand; PAM type: YTN; PAM sequence: TTT
  source 1..20: mol_type = other DNA
tggcaaacacaaaaacgcaa

SEQ ID NO: 64438 - DNA, 20 bp, synthetic construct
  misc_feature 1..20: note = Description of Artificial Sequence: Synthetic oligonucleotide
  misc_feature 1..20: note = Target: SCN10A; (+) strand; PAM type: YTN; PAM sequence: TTT
  source 1..20: mol_type = other DNA
ggcaaacacaaaaacgcaaa

SEQ ID NO: 64439 - DNA, 20 bp, synthetic construct
  misc_feature 1..20: note = Description of Artificial Sequence: Synthetic oligonucleotide
  misc_feature 1..20: note = Target: SCN10A; (+) strand; PAM type: YTN; PAM sequence: TTG
  source 1..20: mol_type = other DNA
gcaaacacaaaaacgcaaag

SEQ ID NO: 64440 - DNA, 20 bp, synthetic construct
  misc_feature 1..20: note = Description of Artificial Sequence: Synthetic oligonucleotide
  misc_feature 1..20: note = Target: SCN10A; (+) strand; PAM type: YTN; PAM sequence: TTG
  source 1..20: mol_type = other DNA
agtttgttttcaagggcata

SEQ ID NO: 64441 - DNA, 20 bp, synthetic construct
  misc_feature 1..20: note = Description of Artificial Sequence: Synthetic oligonucleotide
  misc_feature 1..20: note = Target: SCN10A; (+) strand; PAM type: YTN; PAM sequence: TTT
  source 1..20: mol_type = other DNA
gttttcaagggcataataat

SEQ ID NO: 64442 - DNA, 20 bp, synthetic construct
  misc_feature 1..20: note = Description of Artificial Sequence: Synthetic oligonucleotide
  misc_feature 1..20: note = Target: SCN10A; (+) strand; PAM type: YTN; PAM sequence: TTG
  source 1..20: mol_type = other DNA
ttttcaagggcataataata

SEQ ID NO: 64443 - DNA, 20 bp, synthetic construct
  misc_feature 1..20: note = Description of Artificial Sequence: Synthetic oligonucleotide
  misc_feature 1..20: note = Target: SCN10A; (+) strand; PAM type: YTN; PAM sequence: TTT
  source 1..20: mol_type = other DNA
tcaagggcataataatattg

SEQ ID NO: 64444 - DNA, 20 bp, synthetic construct
  misc_feature 1..20: note = Description of Artificial Sequence: Synthetic oligonucleotide
  misc_feature 1..20: note = Target: SCN10A; (+) strand; PAM type: YTN; PAM sequence: TTT
  source 1..20: mol_type = other DNA
caagggcataataatattgg

SEQ ID NO: 64445 - DNA, 20 bp, synthetic construct
  misc_feature 1..20: note = Description of Artificial Sequence: Synthetic oligonucleotide
  misc_feature 1..20: note = Target: SCN10A; (+) strand; PAM type: YTN; PAM sequence: TTC
  source 1..20: mol_type = other DNA
aagggcataataatattggt

SEQ ID NO: 64446 - DNA, 20 bp, synthetic construct
  misc_feature 1..20: note = Description of Artificial Sequence: Synthetic oligonucleotide
  misc_feature 1..20: note = Target: SCN10A; (+) strand; PAM type: YTN; PAM sequence: TTG
  source 1..20: mol_type = other DNA
gtgggctgtgaaatctaagc

SEQ ID NO: 64447 - DNA, 20 bp, synthetic construct
  misc_feature 1..20: note = Description of Artificial Sequence: Synthetic oligonucleotide
  misc_feature 1..20: note = Target: SCN10A; (+) strand; PAM type: YTN; PAM sequence: CTG
  source 1..20: mol_type = other DNA
tgaaatctaagctaggtcat

SEQ ID NO: 64448 - DNA, 20 bp, synthetic construct
  misc_feature 1..20: note = Description of Artificial Sequence: Synthetic oligonucleotide
  misc_feature 1..20: note = Target: SCN10A; (+) strand; PAM type: YTN; PAM sequence: CTA
  source 1..20: mol_type = other DNA
agctaggtcatgagggaagt

SEQ ID NO: 64449 - DNA, 20 bp, synthetic construct
  misc_feature 1..20: note = Description of Artificial Sequence: Synthetic oligonucleotide
  misc_feature 1..20: note = Target: SCN10A; (+) strand; PAM type: YTN; PAM sequence: CTA
  source 1..20: mol_type = other DNA
ggtcatgagggaagtggaat

SEQ ID NO: 64450 - DNA, 20 bp, synthetic construct
  misc_feature 1..20: note = Description of Artificial Sequence: Synthetic oligonucleotide
  misc_feature 1..20: note = Target: SCN10A; (+) strand; PAM type: YTN; PAM sequence: TTG
  source 1..20: mol_type = other DNA
gtgggtgtggttagggaatt

SEQ ID NO: 64451 - DNA, 20 bp, synthetic construct
  misc_feature 1..20: note = Description of Artificial Sequence: Synthetic oligonucleotide
  misc_feature 1..20: note = Target: SCN10A; (+) strand; PAM type: YTN; PAM sequence: TTA
  source 1..20: mol_type = other DNA
gggaattgagcactgatcag

SEQ ID NO: 64452 - DNA, 20 bp, synthetic construct
  misc_feature 1..20: note = Description of Artificial Sequence: Synthetic oligonucleotide
  misc_feature 1..20: note = Target: SCN10A; (+) strand; PAM type: YTN; PAM sequence: TTG
  source 1..20: mol_type = other DNA
agcactgatcagcatgttaa

SEQ ID NO: 64453 - DNA, 20 bp, synthetic construct
  misc_feature 1..20: note = Description of Artificial Sequence: Synthetic oligonucleotide
  misc_feature 1..20: note = Target: SCN10A; (+) strand; PAM type: YTN; PAM sequence: CTG
  source 1..20: mol_type = other DNA
atcagcatgttaaatcagcg

SEQ ID NO: 64454 - DNA, 20 bp, synthetic construct
  misc_feature 1..20: note = Description of Artificial Sequence: Synthetic oligonucleotide
  misc_feature 1..20: note = Target: SCN10A; (+) strand; PAM type: YTN; PAM sequence: TTA
  source 1..20: mol_type = other DNA
aatcagcgaggtggggacag

SEQ ID NO: 64455 - DNA, 20 bp, synthetic construct
  misc_feature 1..20: note = Description of Artificial Sequence: Synthetic oligonucleotide
  misc_feature 1..20: note = Target: SCN10A; (+) strand; PAM type: YTN; PAM sequence: TTC
  source 1..20: mol_type = other DNA
ccctgcagaatcctgtaggg

SEQ ID NO: 64456 - DNA, 20 bp, synthetic construct
  misc_feature 1..20: note = Description of Artificial Sequence: Synthetic oligonucleotide
  misc_feature 1..20: note = Target: SCN10A; (+) strand; PAM type: YTN; PAM sequence: CTG
  source 1..20: mol_type = other DNA
cagaatcctgtaggggcaga

SEQ ID NO: 64457 - DNA, 20 bp, synthetic construct
  misc_feature 1..20: note = Description of Artificial Sequence: Synthetic oligonucleotide
  misc_feature 1..20: note = Target: SCN10A; (+) strand; PAM type: YTN; PAM sequence: CTG
  source 1..20: mol_type = other DNA
taggggcagactgtgaagta

SEQ ID NO: 64458 - DNA, 20 bp, synthetic construct
  misc_feature 1..20: note = Description of Artificial Sequence: Synthetic oligonucleotide
  misc_feature 1..20: note = Target: SCN10A; (+) strand; PAM type: YTN; PAM sequence: CTG
  source 1..20: mol_type = other DNA
tgaagtaaacttgcctattt

SEQ ID NO: 64459 - DNA, 20 bp, synthetic construct
  misc_feature 1..20: note = Description of Artificial Sequence: Synthetic oligonucleotide
  misc_feature 1..20: note = Target: SCN10A; (+) strand; PAM type: YTN; PAM sequence: CTT
  source 1..20: mol_type = other DNA
gcctatttttggttgtttgg

SEQ ID NO: 64460 - DNA, 20 bp, synthetic construct
  misc_feature 1..20: note = Description of Artificial Sequence: Synthetic oligonucleotide
  misc_feature 1..20: note = Target: SCN10A; (+) strand; PAM type: YTN; PAM sequence: TTG
  source 1..20: mol_type = other DNA
cctatttttggttgtttggg

SEQ ID NO: 64461 - DNA, 20 bp, synthetic construct
  misc_feature 1..20: note = Description of Artificial Sequence: Synthetic oligonucleotide
  misc_feature 1..20: note = Target: SCN10A; (+) strand; PAM type: YTN; PAM sequence: CTA
  source 1..20: mol_type = other DNA
tttttggttgtttgggactt

SEQ ID NO: 64462 - DNA, 20 bp, synthetic construct
  misc_feature 1..20: note = Description of Artificial Sequence: Synthetic oligonucleotide
  misc_feature 1..20: note = Target: SCN10A; (+) strand; PAM type: YTN; PAM sequence: TTT
  source 1..20: mol_type = other DNA
ttggttgtttgggactttag

SEQ ID NO: 64463 - DNA, 20 bp, synthetic construct
  misc_feature 1..20: note = Description of Artificial Sequence: Synthetic oligonucleotide
  misc_feature 1..20: note = Target: SCN10A; (+) strand; PAM type: YTN; PAM sequence: TTT
  source 1..20: mol_type = other DNA
tggttgtttgggactttaga

SEQ ID NO: 64464 - DNA, 20 bp, synthetic construct
  misc_feature 1..20: note = Description of Artificial Sequence: Synthetic oligonucleotide
  misc_feature 1..20: note = Target: SCN10A; (+) strand; PAM type: YTN; PAM sequence: TTT
  source 1..20: mol_type = other DNA
ggttgtttgggactttagac

SEQ ID NO: 64465 - DNA, 20 bp, synthetic construct
  misc_feature 1..20: note = Description of Artificial Sequence: Synthetic oligonucleotide
  misc_feature 1..20: note = Target: SCN10A; (+) strand; PAM type: YTN; PAM sequence: TTG
  source 1..20: mol_type = other DNA
gttgtttgggactttagact

SEQ ID NO: 64466 - DNA, 20 bp, synthetic construct
  misc_feature 1..20: note = Description of Artificial Sequence: Synthetic oligonucleotide
  misc_feature 1..20: note = Target: SCN10A; (+) strand; PAM type: YTN; PAM sequence: TTG
  source 1..20: mol_type = other DNA
tttgggactttagactgtgg

SEQ ID NO: 64467 - DNA, 20 bp, synthetic construct
  misc_feature 1..20: note = Description of Artificial Sequence: Synthetic oligonucleotide
  misc_feature 1..20: note = Target: SCN10A; (+) strand; PAM type: YTN; PAM sequence: TTT
  source 1..20: mol_type = other DNA
gggactttagactgtgggat

SEQ ID NO: 64468 - DNA, 20 bp, synthetic construct
  misc_feature 1..20: note = Description of Artificial Sequence: Synthetic oligonucleotide
  misc_feature 1..20: note = Target: SCN10A; (+) strand; PAM type: YTN; PAM sequence: TTG
  source 1..20: mol_type = other DNA
ggactttagactgtgggatc

SEQ ID NO: 64469 - DNA, 20 bp, synthetic construct
  misc_feature 1..20: note = Description of Artificial Sequence: Synthetic oligonucleotide
  misc_feature 1..20: note = Target: SCN10A; (+) strand; PAM type: YTN; PAM sequence: CTT
  source 1..20: mol_type = other DNA
tagactgtgggatcagaaca

SEQ ID NO: 64470 - DNA, 20 bp, synthetic construct
  misc_feature 1..20: note = Description of Artificial Sequence: Synthetic oligonucleotide
  misc_feature 1..20: note = Target: SCN10A; (+) strand; PAM type: YTN; PAM sequence: TTT
  source 1..20: mol_type = other DNA
agactgtgggatcagaacaa

SEQ ID NO: 64471 - DNA, 20 bp, synthetic construct
  misc_feature 1..20: note = Description of Artificial Sequence: Synthetic oligonucleotide
  misc_feature 1..20: note = Target: SCN10A; (+) strand; PAM type: YTN; PAM sequence: TTA
  source 1..20: mol_type = other DNA
gactgtgggatcagaacaaa

SEQ ID NO: 64472 - DNA, 20 bp, synthetic construct
  misc_feature 1..20: note = Description of Artificial Sequence: Synthetic oligonucleotide
  misc_feature 1..20: note = Target: SCN10A; (+) strand; PAM type: YTN; PAM sequence: CTG
  source 1..20: mol_type = other DNA
tgggatcagaacaaaagtag

SEQ ID NO: 64473 - DNA, 20 bp, synthetic construct
  misc_feature 1..20: note = Description of Artificial Sequence: Synthetic oligonucleotide
  misc_feature 1..20: note = Target: SCN10A; (+) strand; PAM type: YTN; PAM sequence: CTT
  source 1..20: mol_type = other DNA
aaaacactaagcttctgctt

SEQ ID NO: 64474 - DNA, 20 bp, synthetic construct
  misc_feature 1..20: note = Description of Artificial Sequence: Synthetic oligonucleotide
  misc_feature 1..20: note = Target: SCN10A; (+) strand; PAM type: YTN; PAM sequence: TTA
  source 1..20: mol_type = other DNA
aaacactaagcttctgcttc

SEQ ID NO: 64475 - DNA, 20 bp, synthetic construct
  misc_feature 1..20: note = Description of Artificial Sequence: Synthetic oligonucleotide
  misc_feature 1..20: note = Target: SCN10A; (+) strand; PAM type: YTN; PAM sequence: CTA
  source 1..20: mol_type = other DNA
agcttctgcttccccaagtg

SEQ ID NO: 64476 - DNA, 20 bp, synthetic construct
  misc_feature 1..20: note = Description of Artificial Sequence: Synthetic oligonucleotide
  misc_feature 1..20: note = Target: SCN10A; (+) strand; PAM type: YTN; PAM sequence: CTT
  source 1..20: mol_type = other DNA
ctgcttccccaagtgtagca

SEQ ID NO: 64477 - DNA, 20 bp, synthetic construct
  misc_feature 1..20: note = Description of Artificial Sequence: Synthetic oligonucleotide
  misc_feature 1..20: note = Target: SCN10A; (+) strand; PAM type: YTN; PAM sequence: TTC
  source 1..20: mol_type = other DNA
tgcttccccaagtgtagcag

SEQ ID NO: 64478 - DNA, 20 bp, synthetic construct
  misc_feature 1..20: note = Description of Artificial Sequence: Synthetic oligonucleotide
  misc_feature 1..20: note = Target: SCN10A; (+) strand; PAM type: YTN; PAM sequence: CTG
  source 1..20: mol_type = other DNA
cttccccaagtgtagcagaa

SEQ ID NO: 64479 - DNA, 20 bp, synthetic construct
  misc_feature 1..20: note = Description of Artificial Sequence: Synthetic oligonucleotide
  misc_feature 1..20: note = Target: SCN10A; (+) strand; PAM type: YTN; PAM sequence: CTT
  source 1..20: mol_type = other DNA
ccccaagtgtagcagaaatg

SEQ ID NO: 64480 - DNA, 20 bp, synthetic construct
  misc_feature 1..20: note = Description of Artificial Sequence: Synthetic oligonucleotide
  misc_feature 1..20: note = Target: SCN10A; (+) strand; PAM type: YTN; PAM sequence: TTC
  source 1..20: mol_type = other DNA
cccaagtgtagcagaaatgt

SEQ ID NO: 64481 - DNA, 20 bp, synthetic construct
  misc_feature 1..20: note = Description of Artificial Sequence: Synthetic oligonucleotide
  misc_feature 1..20: note = Target: SCN10A; (+) strand; PAM type: YTN; PAM sequence: TTC
  source 1..20: mol_type = other DNA
gttttttttttttttttttt

SEQ ID NO: 64482 - DNA, 20 bp, synthetic construct
  misc_feature 1..20: note = Description of Artificial Sequence: Synthetic oligonucleotide
  misc_feature 1..20: note = Target: SCN10A; (+) strand; PAM type: YTN; PAM sequence: TTT
  source 1..20: mol_type = other DNA
tttttttttttttttttttt

SEQ ID NO: 64483 - DNA, 20 bp, synthetic construct
  misc_feature 1..20: note = Description of Artificial Sequence: Synthetic oligonucleotide
  misc_feature 1..20: note = Target: SCN10A; (+) strand; PAM type: YTN; PAM sequence: TTT
  source 1..20: mol_type = other DNA
tttttttttttttttttttt

SEQ ID NO: 64484 - DNA, 20 bp, synthetic construct
  misc_feature 1..20: note = Description of Artificial Sequence: Synthetic oligonucleotide
  misc_feature 1..20: note = Target: SCN10A; (+) strand; PAM type: YTN; PAM sequence: TTT
  source 1..20: mol_type = other DNA
tttttttttttttttttttt

SEQ ID NO: 64485 - DNA, 20 bp, synthetic construct
  misc_feature 1..20: note = Description of Artificial Sequence: Synthetic oligonucleotide
  misc_feature 1..20: note = Target: SCN10A; (+) strand; PAM type: YTN; PAM sequence: TTT
  source 1..20: mol_type = other DNA
tttttttttttttttttttg

SEQ ID NO: 64486 - DNA, 20 bp, synthetic construct
  misc_feature 1..20: note = Description of Artificial Sequence: Synthetic oligonucleotide
  misc_feature 1..20: note = Target: SCN10A; (+) strand; PAM type: YTN; PAM sequence: TTT
  source 1..20: mol_type = other DNA
ttttttttttttttttttga

SEQ ID NO: 64487 - DNA, 20 bp, synthetic construct
  misc_feature 1..20: note = Description of Artificial Sequence: Synthetic oligonucleotide
  misc_feature 1..20: note = Target: SCN10A; (+) strand; PAM type: YTN; PAM sequence: TTT
  source 1..20: mol_type = other DNA
tttttttttttttttttgag

SEQ ID NO: 64488 - DNA, 20 bp, synthetic construct
  misc_feature 1..20: note = Description of Artificial Sequence: Synthetic oligonucleotide
  misc_feature 1..20: note = Target: SCN10A; (+) strand; PAM type: YTN; PAM sequence: TTT
  source 1..20: mol_type = other DNA
ttttttttttttttttgaga

SEQ ID NO: 64489 - DNA, 20 bp, synthetic construct
  misc_feature 1..20: note = Description of Artificial Sequence: Synthetic oligonucleotide
  misc_feature 1..20: note = Target: SCN10A; (+) strand; PAM type: YTN; PAM sequence: TTT
  source 1..20: mol_type = other DNA
tttttttttttttttgagac

SEQ ID NO: 64490 - DNA, 20 bp, synthetic construct
  misc_feature 1..20: note = Description of Artificial Sequence: Synthetic oligonucleotide
  misc_feature 1..20: note = Target: SCN10A; (+) strand; PAM type: YTN; PAM sequence: TTT
  source 1..20: mol_type = other DNA
ttttttttttttttgagacg

SEQ ID NO: 64491 - DNA, 20 bp, synthetic construct
  misc_feature 1..20: note = Description of Artificial Sequence: Synthetic oligonucleotide
  misc_feature 1..20: note = Target: SCN10A; (+) strand; PAM type: YTN; PAM sequence: TTT
  source 1..20: mol_type = other DNA
tttttttttttttgagacgg

SEQ ID NO: 64492 - DNA, 20 bp, synthetic construct
  misc_feature 1..20: note = Description of Artificial Sequence: Synthetic oligonucleotide
  misc_feature 1..20: note = Target: SCN10A; (+) strand; PAM type: YTN; PAM sequence: TTT
  source 1..20: mol_type = other DNA
ttttttttttttgagacgga

SEQ ID NO: 64493 - DNA, 20 bp, synthetic construct
  misc_feature 1..20: note = Description of Artificial Sequence: Synthetic oligonucleotide
  misc_feature 1..20: note = Target: SCN10A; (+) strand; PAM type: YTN; PAM sequence: TTT
  source 1..20: mol_type = other DNA
tttttttttttgagacggag

SEQ ID NO: 64494 - DNA, 20 bp, synthetic construct
  misc_feature 1..20: note = Description of Artificial Sequence: Synthetic oligonucleotide
  misc_feature 1..20: note = Target: SCN10A; (+) strand; PAM type: YTN; PAM sequence: TTT
  source 1..20: mol_type = other DNA
ttttttttttgagacggagt

SEQ ID NO: 64495 - DNA, 20 bp, synthetic construct
  misc_feature 1..20: note = Description of Artificial Sequence: Synthetic oligonucleotide
  misc_feature 1..20: note = Target: SCN10A; (+) strand; PAM type: YTN; PAM sequence: TTT
  source 1..20: mol_type = other DNA
tttttttttgagacggagtc

SEQ ID NO: 64496 - DNA, 20 bp, synthetic construct
  misc_feature 1..20: note = Description of Artificial Sequence: Synthetic oligonucleotide
  misc_feature 1..20: note = Target: SCN10A; (+) strand; PAM type: YTN; PAM sequence: TTT
  source 1..20: mol_type = other DNA
ttttttttgagacggagtcc

SEQ ID NO: 64497 - DNA, 20 bp, synthetic construct
  misc_feature 1..20: note = Description of Artificial Sequence: Synthetic oligonucleotide
  misc_feature 1..20: note = Target: SCN10A; (+) strand; PAM type: YTN; PAM sequence: TTT
  source 1..20: mol_type = other DNA
tttttttgagacggagtccc

SEQ ID NO: 64498 - DNA, 20 bp, synthetic construct
  misc_feature 1..20: note = Description of Artificial Sequence: Synthetic oligonucleotide
  misc_feature 1..20: note = Target: SCN10A; (+) strand; PAM type: YTN; PAM sequence: TTT
  source 1..20: mol_type = other DNA
ttttttgagacggagtcccg

SEQ ID NO: 64499 - DNA, 20 bp, synthetic construct
  misc_feature 1..20: note = Description of Artificial Sequence: Synthetic oligonucleotide
  misc_feature 1..20: note = Target: SCN10A; (+) strand; PAM type: YTN; PAM sequence: TTT
  source 1..20: mol_type = other DNA
tttttgagacggagtcccgc

SEQ ID NO: 64500 - DNA, 20 bp, synthetic construct
  misc_feature 1..20: note = Description of Artificial Sequence: Synthetic oligonucleotide
  misc_feature 1..20: note = Target: SCN10A; (+) strand; PAM type: YTN; PAM sequence: TTT
  source 1..20: mol_type = other DNA
ttttgagacggagtcccgct

SEQ ID NO: 64501 - DNA, 20 bp, synthetic construct
  misc_feature 1..20: note = Description of Artificial Sequence: Synthetic oligonucleotide
  misc_feature 1..20: note = Target: SCN10A; (+) strand; PAM type: YTN; PAM sequence: TTT
  source 1..20: mol_type = other DNA
tttgagacggagtcccgctg

SEQ ID NO: 64502 - DNA, 20 bp, synthetic construct
  misc_feature 1..20: note = Description of Artificial Sequence: Synthetic oligonucleotide
  misc_feature 1..20: note = Target: SCN10A; (+) strand; PAM type: YTN; PAM sequence: TTT
  source 1..20: mol_type = other DNA
ttgagacggagtcccgctgt

SEQ ID NO: 64503 - DNA, 20 bp, synthetic construct
  misc_feature 1..20: note = Description of Artificial Sequence: Synthetic oligonucleotide
  misc_feature 1..20: note = Target: SCN10A; (+) strand; PAM type: YTN; PAM sequence: TTT
  source 1..20: mol_type = other DNA
tgagacggagtcccgctgtt

SEQ ID NO: 64504 - DNA, 20 bp, synthetic construct
  misc_feature 1..20: note = Description of Artificial Sequence: Synthetic oligonucleotide
  misc_feature 1..20: note = Target: SCN10A; (+) strand; PAM type: YTN; PAM sequence: TTT
  source 1..20: mol_type = other DNA
gagacggagtcccgctgttt

SEQ ID NO: 64505 - DNA, 20 bp, synthetic construct
  misc_feature 1..20: note = Description of Artificial Sequence: Synthetic oligonucleotide
  misc_feature 1..20: note = Target: SCN10A; (+) strand; PAM type: YTN; PAM sequence: TTG
  source 1..20: mol_type = other DNA
agacggagtcccgctgttta

SEQ ID NO: 64506 - DNA, 20 bp, synthetic construct
  misc_feature 1..20: note = Description of Artificial Sequence: Synthetic oligonucleotide
  misc_feature 1..20: note = Target: SCN10A; (+) strand; PAM type: YTN; PAM sequence: CTG
  source 1..20: mol_type = other DNA
tttagcccaggccggattgc

SEQ ID NO: 64507 - DNA, 20 bp, synthetic construct
  misc_feature 1..20: note = Description of Artificial Sequence: Synthetic oligonucleotide
  misc_feature 1..20: note = Target: SCN10A; (+) strand; PAM type: YTN; PAM sequence: TTT
  source 1..20: mol_type = other DNA
agcccaggccggattgcagt

SEQ ID NO: 64508 - DNA, 20 bp, synthetic construct
  misc_feature 1..20: note = Description of Artificial Sequence: Synthetic oligonucleotide
  misc_feature 1..20: note = Target: SCN10A; (+) strand; PAM type: YTN; PAM sequence: TTA
  source 1..20: mol_type = other DNA
gcccaggccggattgcagtg

SEQ ID NO: 64509 - DNA, 20 bp, synthetic construct
  misc_feature 1..20: note = Description of Artificial Sequence: Synthetic oligonucleotide
  misc_feature 1..20: note = Target: SCN10A; (+) strand; PAM type: YTN; PAM sequence: TTG
  source 1..20: mol_type = other DNA
cagtggcgcaatctcggctc

SEQ ID NO: 64510 - DNA, 20 bp, synthetic construct
  misc_feature 1..20: note = Description of Artificial Sequence: Synthetic oligonucleotide
  misc_feature 1..20: note = Target: SCN10A; (+) strand; PAM type: YTN; PAM sequence: CTC
  source 1..20: mol_type = other DNA
ggctcactgtaagctccgcc

SEQ ID NO: 64511 - DNA, 20 bp, synthetic construct
  misc_feature 1..20: note = Description of Artificial Sequence: Synthetic oligonucleotide
  misc_feature 1..20: note = Target: SCN10A; (+) strand; PAM type: YTN; PAM sequence: CTC
  source 1..20: mol_type = other DNA
actgtaagctccgcctccca

SEQ ID NO: 64512 - DNA, 20 bp, synthetic construct
  misc_feature 1..20: note = Description of Artificial Sequence: Synthetic oligonucleotide
  misc_feature 1..20: note = Target: SCN10A; (+) strand; PAM type: YTN; PAM sequence: CTG
  source 1..20: mol_type = other DNA
taagctccgcctcccaggtt

SEQ ID NO: 64513 - DNA, 20 bp, synthetic construct
  misc_feature 1..20: note = Description of Artificial Sequence: Synthetic oligonucleotide
  misc_feature 1..20: note = Target: SCN10A; (+) strand; PAM type: YTN; PAM sequence: CTC
  source 1..20: mol_type = other DNA
cgcctcccaggttcacgcca

SEQ ID NO: 64514 - DNA, 20 bp, synthetic construct
  misc_feature 1..20: note = Description of Artificial Sequence: Synthetic oligonucleotide
  misc_feature 1..20: note = Target: SCN10A; (+) strand; PAM type: YTN; PAM sequence: CTC
  source 1..20: mol_type = other DNA
ccaggttcacgccattctcc

SEQ ID NO: 64515 - DNA, 20 bp, synthetic construct
  misc_feature 1..20: note = Description of Artificial Sequence: Synthetic oligonucleotide
  misc_feature 1..20: note = Target: SCN10A; (+) strand; PAM type: YTN; PAM sequence: TTC
  source 1..20: mol_type = other DNA
acgccattctcctgcctcag

SEQ ID NO: 64516 - DNA, 20 bp, synthetic construct
  misc_feature 1..20: note = Description of Artificial Sequence: Synthetic oligonucleotide
  misc_feature 1..20: note = Target: SCN10A; (+) strand; PAM type: YTN; PAM sequence: TTC
  source 1..20: mol_type = other DNA
tcctgcctcagcctcccgag

SEQ ID NO: 64517 - DNA, 20 bp, synthetic construct
  misc_feature 1..20: note = Description of Artificial Sequence: Synthetic oligonucleotide
  misc_feature 1..20: note = Target: SCN10A; (+) strand; PAM type: YTN; PAM sequence: CTC
  source 1..20: mol_type = other DNA
ctgcctcagcctcccgagta

SEQ ID NO: 64518 - DNA, 20 bp, synthetic construct
  misc_feature 1..20: note = Description of Artificial Sequence: Synthetic oligonucleotide
  misc_feature 1..20: note = Target: SCN10A; (+) strand; PAM type: YTN; PAM sequence: CTG
  source 1..20: mol_type = other DNA
cctcagcctcccgagtagct

SEQ ID NO: 64519 - DNA, 20 bp, synthetic construct
  misc_feature 1..20: note = Description of Artificial Sequence: Synthetic oligonucleotide
  misc_feature 1..20: note = Target: SCN10A; (+) strand; PAM type: YTN; PAM sequence: CTC
  source 1..20: mol_type = other DNA
agcctcccgagtagctggga

SEQ ID NO: 64520 - DNA, 20 bp, synthetic construct
  misc_feature 1..20: note = Description of Artificial Sequence: Synthetic oligonucleotide
  misc_feature 1..20: note = Target: SCN10A; (+) strand; PAM type: YTN; PAM sequence: CTC
  source 1..20: mol_type = other DNA
ccgagtagctgggactacag

SEQ ID NO: 64521 - DNA, 20 bp, synthetic construct
  misc_feature 1..20: note = Description of Artificial Sequence: Synthetic oligonucleotide
  misc_feature 1..20: note = Target: SCN10A; (+) strand; PAM type: YTN; PAM sequence: CTG
  source 1..20: mol_type = other DNA
ggactacaggcgcccgccac

SEQ ID NO: 64522 - DNA, 20 bp, synthetic construct
  misc_feature 1..20: note = Description of Artificial Sequence: Synthetic oligonucleotide
  misc_feature 1..20: note = Target: SCN10A; (+) strand; PAM type: YTN; PAM sequence: CTA
  source 1..20: mol_type = other DNA
caggcgcccgccaccgtgcc

SEQ ID NO: 64523 - DNA, 20 bp, synthetic construct
  misc_feature 1..20: note = Description of Artificial Sequence: Synthetic oligonucleotide
  misc_feature 1..20: note = Target: SCN10A; (+) strand; PAM type: YTN; PAM sequence: CTA
  source 1..20: mol_type = other DNA
attttttgtatttttagtag

SEQ ID NO: 64524 - DNA, 20 bp, synthetic construct
  misc_feature 1..20: note = Description of Artificial Sequence: Synthetic oligonucleotide
  misc_feature 1..20: note = Target: SCN10A; (+) strand; PAM type: YTN; PAM sequence: TTT
  source 1..20: mol_type = other DNA
tttgtatttttagtagagac

SEQ ID NO: 64525 - DNA, 20 bp, synthetic construct
  misc_feature 1..20: note = Description of Artificial Sequence: Synthetic oligonucleotide
  misc_feature 1..20: note = Target: SCN10A; (+) strand; PAM type: YTN; PAM sequence: TTT
  source 1..20: mol_type = other DNA
ttgtatttttagtagagacg

SEQ ID NO: 64526 - DNA, 20 bp, synthetic construct
  misc_feature 1..20: note = Description of Artificial Sequence: Synthetic oligonucleotide
  misc_feature 1..20: note = Target: SCN10A; (+) strand; PAM type: YTN; PAM sequence: TTT
  source 1..20: mol_type = other DNA
tgtatttttagtagagacgg

SEQ ID NO: 64527 - DNA, 20 bp, synthetic construct
  misc_feature 1..20: note = Description of Artificial Sequence: Synthetic oligonucleotide
  misc_feature 1..20: note = Target: SCN10A; (+) strand; PAM type: YTN; PAM sequence: TTT
  source 1..20: mol_type = other DNA
gtatttttagtagagacggg

SEQ ID NO: 64528 - DNA, 20 bp, synthetic construct
  misc_feature 1..20: note = Description of Artificial Sequence: Synthetic oligonucleotide
  misc_feature 1..20: note = Target: SCN10A; (+) strand; PAM type: YTN; PAM sequence: TTG
  source 1..20: mol_type = other DNA
tatttttagtagagacgggg

SEQ ID NO: 64529 - DNA, 20 bp, synthetic construct
  misc_feature 1..20: note = Description of Artificial Sequence: Synthetic oligonucleotide
  misc_feature 1..20: note = Target: SCN10A; (+) strand; PAM type: YTN; PAM sequence: TTT
  source 1..20: mol_type = other DNA
ttagtagagacggggtttca

SEQ ID NO: 64530 - DNA, 20 bp, synthetic construct
  misc_feature 1..20: note = Description of Artificial Sequence: Synthetic oligonucleotide
  misc_feature 1..20: note = Target: SCN10A; (+) strand; PAM type: YTN; PAM sequence: TTT
  source 1..20: mol_type = other DNA
tagtagagacggggtttcac

SEQ ID NO: 64531 - DNA, 20 bp, synthetic construct
  misc_feature 1..20: note = Description of Artificial Sequence: Synthetic oligonucleotide
  misc_feature 1..20: note = Target: SCN10A; (+) strand; PAM type: YTN; PAM sequence: TTT
  source 1..20: mol_type = other DNA
agtagagacggggtttcacc

SEQ ID NO: 64532 - DNA, 20 bp, synthetic construct
  misc_feature 1..20: note = Description of Artificial Sequence: Synthetic oligonucleotide
  misc_feature 1..20: note = Target: SCN10A; (+) strand; PAM type: YTN; PAM sequence: TTA
  source 1..20: mol_type = other DNA
gtagagacggggtttcaccg

SEQ ID NO: 64533 - DNA, 20 bp, synthetic construct
  misc_feature 1..20: note = Description of Artificial Sequence: Synthetic oligonucleotide
  misc_feature 1..20: note = Target: SCN10A; (+) strand; PAM type: YTN; PAM sequence: TTT
  source 1..20: mol_type = other DNA
caccgtgttagccaagatgg

SEQ ID NO: 64534 - DNA, 20 bp, synthetic construct
  misc_feature 1..20: note = Description of Artificial Sequence: Synthetic oligonucleotide
  misc_feature 1..20: note = Target: SCN10A; (+) strand; PAM type: YTN; PAM sequence: TTC
  source 1..20: mol_type = other DNA
accgtgttagccaagatggt

SEQ ID NO: 64535 - DNA, 20 bp, synthetic construct
  misc_feature 1..20: note = Description of Artificial Sequence: Synthetic oligonucleotide
  misc_feature 1..20: note = Target: SCN10A; (+) strand; PAM type: YTN; PAM sequence: TTA
  source 1..20: mol_type = other DNA
gccaagatggtctcgatctc

SEQ ID NO: 64536 - DNA, 20 bp, synthetic construct
  misc_feature 1..20: note = Description of Artificial Sequence: Synthetic oligonucleotide
  misc_feature 1..20: note = Target: SCN10A; (+) strand; PAM type: YTN; PAM sequence: CTC
  source 1..20: mol_type = other DNA
gatctcctgaccttgtgatc

SEQ ID NO: 64537 - DNA, 20 bp, synthetic construct
  misc_feature 1..20: note = Description of Artificial Sequence: Synthetic oligonucleotide
  misc_feature 1..20: note = Target: SCN10A; (+) strand; PAM type: YTN; PAM sequence: CTC
  source 1..20: mol_type = other DNA
ctgaccttgtgatccgcctg

SEQ ID NO: 64538 - DNA, 20 bp, synthetic construct
  misc_feature 1..20: note = Description of Artificial Sequence: Synthetic oligonucleotide
  misc_feature 1..20: note = Target: SCN10A; (+) strand; PAM type: YTN; PAM sequence: CTG
  source 1..20: mol_type = other DNA
accttgtgatccgcctgcct

SEQ ID NO: 64539 - DNA, 20 bp, synthetic construct
  misc_feature 1..20: note = Description of Artificial Sequence: Synthetic oligonucleotide
  misc_feature 1..20: note = Target: SCN10A; (+) strand; PAM type: YTN; PAM sequence: CTT
  source 1..20: mol_type = other DNA
gtgatccgcctgcctcggcc

SEQ ID NO: 64540 - DNA, 20 bp, synthetic construct
  misc_feature 1..20: note = Description of Artificial Sequence: Synthetic oligonucleotide
  misc_feature 1..20: note = Target: SCN10A; (+) strand; PAM type: YTN; PAM sequence: TTG
  source 1..20: mol_type = other DNA
tgatccgcctgcctcggcct

SEQ ID NO: 64541 - DNA, 20 bp, synthetic construct
  misc_feature 1..20: note = Description of Artificial Sequence: Synthetic oligonucleotide
  misc_feature 1..20: note = Target: SCN10A; (+) strand; PAM type: YTN; PAM sequence: CTG
  source 1..20: mol_type = other DNA
cctcggcctcccaaagtgct

SEQ ID NO: 64542 - DNA, 20 bp, synthetic construct
  misc_feature 1..20: note = Description of Artificial Sequence: Synthetic oligonucleotide
  misc_feature 1..20: note = Target: SCN10A; (+) strand; PAM type: YTN; PAM sequence: CTC
  source 1..20: mol_type = other DNA
ggcctcccaaagtgctggga

SEQ ID NO: 64543 - DNA, 20 bp, synthetic construct
  misc_feature 1..20: note = Description of Artificial Sequence: Synthetic oligonucleotide
  misc_feature 1..20: note = Target: SCN10A; (+) strand; PAM type: YTN; PAM sequence: CTC
  source 1..20: mol_type = other DNA
ccaaagtgctgggattacag

SEQ ID NO: 64544 - DNA, 20 bp, synthetic construct
  misc_feature 1..20: note = Description of Artificial Sequence: Synthetic oligonucleotide
  misc_feature 1..20: note = Target: SCN10A; (+) strand; PAM type: YTN; PAM sequence: CTG
  source 1..20: mol_type = other DNA
ggattacaggcgtgagccac

SEQ ID NO: 64545 - DNA, 20 bp, synthetic construct
  misc_feature 1..20: note = Description of Artificial Sequence: Synthetic oligonucleotide
  misc_feature 1..20: note = Target: SCN10A; (+) strand; PAM type: YTN; PAM sequence: TTA
  source 1..20: mol_type = other DNA
caggcgtgagccaccgcgcc

SEQ ID NO: 64546 - DNA, 20 bp, synthetic construct
  misc_feature 1..20: note = Description of Artificial Sequence: Synthetic oligonucleotide
  misc_feature 1..20: note = Target: SCN10A; (+) strand; PAM type: YTN; PAM sequence: CTC
  source 1..20: mol_type = other DNA
gtattttattagaaaactaa

SEQ ID NO: 64547 - DNA, 20 bp, synthetic construct
  misc_feature 1..20: note = Description of Artificial Sequence: Synthetic oligonucleotide
  misc_feature 1..20: note = Target: SCN10A; (+) strand; PAM type: YTN; PAM sequence: TTT
  source 1..20: mol_type = other DNA
tattagaaaactaactgtgg

SEQ ID NO: 64548 - DNA, 20 bp, synthetic construct
  misc_feature 1..20: note = Description of Artificial Sequence: Synthetic oligonucleotide
  misc_feature 1..20: note = Target: SCN10A; (+) strand; PAM type: YTN; PAM sequence: TTT
  source 1..20: mol_type = other DNA
attagaaaactaactgtggg

SEQ ID NO: 64549 - DNA, 20 bp, synthetic construct
  misc_feature 1..20: note = Description of Artificial Sequence: Synthetic oligonucleotide
  misc_feature 1..20: note = Target: SCN10A; (+) strand; PAM type: YTN; PAM sequence: TTA
  source 1..20: mol_type = other DNA
ttagaaaactaactgtgggc

SEQ ID NO: 64550 - DNA, 20 bp, synthetic construct
  misc_feature 1..20: note = Description of Artificial Sequence: Synthetic oligonucleotide
  misc_feature 1..20: note = Target: SCN10A; (+) strand; PAM type: YTN; PAM sequence: TTA
  source 1..20: mol_type = other DNA
gaaaactaactgtgggcctg

SEQ ID NO: 64551 - DNA, 20 bp, synthetic construct
  misc_feature 1..20: note = Description of Artificial Sequence: Synthetic oligonucleotide
  misc_feature 1..20: note = Target: SCN10A; (+) strand; PAM type: YTN; PAM sequence: CTA
  source 1..20: mol_type = other DNA
actgtgggcctgccagggta

SEQ ID NO: 64552 - DNA, 20 bp, synthetic construct
  misc_feature 1..20: note = Description of Artificial Sequence: Synthetic oligonucleotide
  misc_feature 1..20: note = Target: SCN10A; (+) strand; PAM type: YTN; PAM sequence: CTG
  source 1..20: mol_type = other DNA
tgggcctgccagggtatggg

SEQ ID NO: 64553 - DNA, 20 bp, synthetic construct
  misc_feature 1..20: note = Description of Artificial Sequence: Synthetic oligonucleotide
  misc_feature 1..20: note = Target: SCN10A; (+) strand; PAM type: YTN; PAM sequence: CTG
  source 1..20: mol_type = other DNA
ccagggtatgggggtgtgat

SEQ ID NO: 64554 - DNA, 20 bp, synthetic construct
  misc_feature 1..20: note = Description of Artificial Sequence: Synthetic oligonucleotide
  misc_feature 1..20: note = Target: SCN10A; (+) strand; PAM type: YTN; PAM sequence: CTC
  source 1..20: mol_type = other DNA
ctgctctcttgacgattgtg

SEQ ID NO: 64555 - DNA, 20 bp, synthetic construct
  misc_feature 1..20: note = Description of Artificial Sequence: Synthetic oligonucleotide
  misc_feature 1..20: note = Target: SCN10A; (+) strand; PAM type: YTN; PAM sequence: CTG
  source 1..20: mol_type = other DNA
ctctcttgacgattgtgcat

SEQ ID NO: 64556 - DNA, 20 bp, synthetic construct
  misc_feature 1..20: note = Description of Artificial Sequence: Synthetic oligonucleotide
  misc_feature 1..20: note = Target: SCN10A; (+) strand; PAM type: YTN; PAM sequence: CTC
  source 1..20: mol_type = other DNA
tcttgacgattgtgcatagg

SEQ ID NO: 64557 - DNA, 20 bp, synthetic construct
  misc_feature 1..20: note = Description of Artificial Sequence: Synthetic oligonucleotide
  misc_feature 1..20: note = Target: SCN10A; (+) strand; PAM type: YTN; PAM sequence: CTC
  source 1..20: mol_type = other DNA
ttgacgattgtgcataggta

SEQ ID NO: 64558 - DNA, 20 bp, synthetic construct
  misc_feature 1..20: note = Description of Artificial Sequence: Synthetic oligonucleotide
  misc_feature 1..20: note = Target: SCN10A; (+) strand; PAM type: YTN; PAM sequence: CTT
  source 1..20: mol_type = other DNA
gacgattgtgcataggtacc

SEQ ID NO: 64559 - DNA, 20 bp, synthetic construct
  misc_feature 1..20: note = Description of Artificial Sequence: Synthetic oligonucleotide
  misc_feature 1..20: note = Target: SCN10A; (+) strand; PAM type: YTN; PAM sequence: TTG
  source 1..20: mol_type = other DNA
acgattgtgcataggtacct

SEQ ID NO: 64560 - DNA, 20 bp, synthetic construct
  misc_feature 1..20: note = Description of Artificial Sequence: Synthetic oligonucleotide
  misc_feature 1..20: note = Target: SCN10A; (+) strand; PAM type: YTN; PAM sequence: TTG
  source 1..20: mol_type = other DNA
tgcataggtaccttatattg

SEQ ID NO: 64561 - DNA, 20 bp, synthetic construct
  misc_feature 1..20: note = Description of Artificial Sequence: Synthetic oligonucleotide
  misc_feature 1..20: note = Target: SCN10A; (+) strand; PAM type: YTN; PAM sequence: CTT
  source 1..20: mol_type = other DNA
atattgaccattagcttagg

SEQ ID NO: 64562 - DNA, 20 bp, synthetic construct
  misc_feature 1..20: note = Description of Artificial Sequence: Synthetic oligonucleotide
  misc_feature 1..20: note = Target: SCN10A; (+) strand; PAM type: YTN; PAM sequence: TTA
  source 1..20: mol_type = other DNA
tattgaccattagcttaggg

SEQ ID NO: 64563 - DNA, 20 bp, synthetic construct
  misc_feature 1..20: note = Description of Artificial Sequence: Synthetic oligonucleotide
  misc_feature 1..20: note = Target: SCN10A; (+) strand; PAM type: YTN; PAM sequence: TTG
  source 1..20: mol_type = other DNA
accattagcttaggggccta

SEQ ID NO: 64564 - DNA, 20 bp, synthetic construct
  misc_feature 1..20: note = Description of Artificial Sequence: Synthetic oligonucleotide
  misc_feature 1..20: note = Target: SCN10A; (+) strand; PAM type: YTN; PAM sequence: TTA
  source 1..20: mol_type = other DNA
gcttaggggcctacatcttg

SEQ ID NO: 64565 - DNA, 20 bp, synthetic construct
  misc_feature 1..20: note = Description of Artificial Sequence: Synthetic oligonucleotide
  misc_feature 1..20: note = Target: SCN10A; (+) strand; PAM type: YTN; PAM sequence: CTT
  source 1..20: mol_type = other DNA
aggggcctacatcttgacat

SEQ ID NO: 64566 - DNA, 20 bp, synthetic construct
  misc_feature 1..20: note = Description of Artificial Sequence: Synthetic oligonucleotide
  misc_feature 1..20: note = Target: SCN10A; (+) strand; PAM type: YTN; PAM sequence: TTA
  source 1..20: mol_type = other DNA
ggggcctacatcttgacatc

SEQ ID NO: 64567 - DNA, 20 bp, synthetic construct
  misc_feature 1..20: note = Description of Artificial Sequence: Synthetic oligonucleotide
  misc_feature 1..20: note = Target: SCN10A; (+) strand; PAM type: YTN; PAM sequence: CTA
  source 1..20: mol_type = other DNA
catcttgacatcaatttcta

SEQ ID NO: 64568 - DNA, 20 bp, synthetic construct
  misc_feature 1..20: note = Description of Artificial Sequence: Synthetic oligonucleotide
  misc_feature 1..20: note = Target: SCN10A; (+) strand; PAM type: YTN; PAM sequence: CTT
  source 1..20: mol_type = other DNA
gacatcaatttctagatacc

SEQ ID NO: 64569 - DNA, 20 bp, synthetic construct
  misc_feature 1..20: note = Description of Artificial Sequence: Synthetic oligonucleotide
  misc_feature 1..20: note = Target: SCN10A; (+) strand; PAM type: YTN; PAM sequence: TTG
  source 1..20: mol_type = other DNA
acatcaatttctagatacct

SEQ ID NO: 64570 - DNA, 20 bp, synthetic construct
  misc_feature 1..20: note = Description of Artificial Sequence: Synthetic oligonucleotide
  misc_feature 1..20: note = Target: SCN10A; (+) strand; PAM type: YTN; PAM sequence: TTT
  source 1..20: mol_type = other DNA
ctagatacctagagaaatct

SEQ ID NO: 64571 - DNA, 20 bp, synthetic construct
  misc_feature 1..20: note = Description of Artificial Sequence: Synthetic oligonucleotide
  misc_feature 1..20: note = Target: SCN10A; (+) strand; PAM type: YTN; PAM sequence: TTC
  source 1..20: mol_type = other DNA
tagatacctagagaaatctg

SEQ ID NO: 64572 - DNA, 20 bp, synthetic construct
  misc_feature 1..20: note = Description of Artificial Sequence: Synthetic oligonucleotide
  misc_feature 1..20: note = Target: SCN10A; (+) strand; PAM type: YTN; PAM sequence: CTA
  source 1..20: mol_type = other DNA
gatacctagagaaatctgtc

SEQ ID NO: 64573 - DNA, 20 bp, synthetic construct
  misc_feature 1..20: note = Description of Artificial Sequence: Synthetic oligonucleotide
  misc_feature 1..20: note = Target: SCN10A; (+) strand; PAM type: YTN; PAM sequence: CTA
  source 1..20: mol_type = other DNA
gagaaatctgtccttctaaa

SEQ ID NO: 64574 - DNA, 20 bp, synthetic construct
  misc_feature 1..20: note = Description of Artificial Sequence: Synthetic oligonucleotide
  misc_feature 1..20: note = Target: SCN10A; (+) strand; PAM type: YTN; PAM sequence: CTG
  source 1..20: mol_type = other DNA
tccttctaaaaatgtgattt

SEQ ID NO: 64575 - DNA, 20 bp, synthetic construct
  misc_feature 1..20: note = Description of Artificial Sequence: Synthetic oligonucleotide
  misc_feature 1..20: note = Target: SCN10A; (+) strand; PAM type: YTN; PAM sequence: CTT
  source 1..20: mol_type = other DNA
ctaaaaatgtgatttaattc

SEQ ID NO: 64576 - DNA, 20 bp, synthetic construct
  misc_feature 1..20: note = Description of Artificial Sequence: Synthetic oligonucleotide
  misc_feature 1..20: note = Target: SCN10A; (+) strand; PAM type: YTN; PAM sequence: TTC
  source 1..20: mol_type = other DNA
taaaaatgtgatttaattct

SEQ ID NO: 64577 - DNA, 20 bp, synthetic construct
  misc_feature 1..20: note = Description of Artificial Sequence: Synthetic oligonucleotide
  misc_feature 1..20: note = Target: SCN10A; (+) strand; PAM type: YTN; PAM sequence: CTA
  source 1..20: mol_type = other DNA
aaaatgtgatttaattctga

SEQ ID NO: 64578 - DNA, 20 bp, synthetic construct
  misc_feature 1..20: note = Description of Artificial Sequence: Synthetic oligonucleotide
  misc_feature 1..20: note = Target: SCN10A; (+) strand; PAM type: YTN; PAM sequence: TTT
  source 1..20: mol_type = other DNA
aattctgaccttgtaagatt

SEQ ID NO: 64579 - DNA, 20 bp, synthetic construct
  misc_feature 1..20: note = Description of Artificial Sequence: Synthetic oligonucleotide
  misc_feature 1..20: note = Target: SCN10A; (+) strand; PAM type: YTN; PAM sequence: TTA
  source 1..20: mol_type = other DNA
attctgaccttgtaagattt

SEQ ID NO: 64580 - DNA, 20 bp, synthetic construct
  misc_feature 1..20: note = Description of Artificial Sequence: Synthetic oligonucleotide
  misc_feature 1..20: note = Target: SCN10A; (+) strand; PAM type: YTN; PAM sequence: TTC
  source 1..20: mol_type = other DNA
tgaccttgtaagattttcaa

SEQ ID NO: 64581 - DNA, 20 bp, synthetic construct
  misc_feature 1..20: note = Description of Artificial Sequence: Synthetic oligonucleotide
  misc_feature 1..20: note = Target: SCN10A; (+) strand; PAM type: YTN; PAM sequence: CTG
  source 1..20: mol_type = other DNA
accttgtaagattttcaagt

SEQ ID NO: 64582 - DNA, 20 bp, synthetic construct
  misc_feature 1..20: note = Description of Artificial Sequence: Synthetic oligonucleotide
  misc_feature 1..20: note = Target: SCN10A; (+) strand; PAM type: YTN; PAM sequence: CTT
  source 1..20: mol_type = other DNA
gtaagattttcaagttatgg

SEQ ID NO: 64583 - DNA, 20 bp, synthetic construct
  misc_feature 1..20: note = Description of Artificial Sequence: Synthetic oligonucleotide
  misc_feature 1..20: note = Target: SCN10A; (+) strand; PAM type: YTN; PAM sequence: TTG
  source 1..20: mol_type = other DNA
taagattttcaagttatgga

SEQ ID NO: 64584 - DNA, 20 bp, synthetic construct
  misc_feature 1..20: note = Description of Artificial Sequence: Synthetic oligonucleotide
  misc_feature 1..20: note = Target: SCN10A; (+) strand; PAM type: YTN; PAM sequence: TTT
  source 1..20: mol_type = other DNA
tcaagttatggataaagagt

SEQ ID NO: 64585 - DNA, 20 bp, synthetic construct
  misc_feature 1..20: note = Description of Artificial Sequence: Synthetic oligonucleotide
  misc_feature 1..20: note = Target: SCN10A; (+) strand; PAM type: YTN; PAM sequence: TTT
  source 1..20: mol_type = other DNA
caagttatggataaagagtc

SEQ ID NO: 64586 - DNA, 20 bp, synthetic construct
  misc_feature 1..20: note = Description of Artificial Sequence: Synthetic oligonucleotide
  misc_feature 1..20: note = Target: SCN10A; (+) strand; PAM type: YTN; PAM sequence: TTC
  source 1..20: mol_type = other DNA
aagttatggataaagagtcc

SEQ ID NO: 64587 - DNA, 20 bp, synthetic construct
  misc_feature 1..20: note = Description of Artificial Sequence: Synthetic oligonucleotide
  misc_feature 1..20: note = Target: SCN10A; (+) strand; PAM type: YTN; PAM sequence: TTA
  source 1..20: mol_type = other DNA
tggataaagagtcctaccag

SEQ ID NO: 64588 - DNA, 20 bp, synthetic construct
  misc_feature 1..20: note = Description of Artificial Sequence: Synthetic oligonucleotide
  misc_feature 1..20: note = Target: SCN10A; (+) strand; PAM type: YTN; PAM sequence: CTA
  source 1..20: mol_type = other DNA
ccaggcctactctacccttc

SEQ ID NO: 64589 - DNA, 20 bp, synthetic construct
  misc_feature 1..20: note = Description of Artificial Sequence: Synthetic oligonucleotide
  misc_feature 1..20: note = Target: SCN10A; (+) strand; PAM type: YTN; PAM sequence: CTA
  source 1..20: mol_type = other DNA
ctctacccttctcctccctg

SEQ ID NO: 64590 - DNA, 20 bp, synthetic construct
  misc_feature 1..20: note = Description of Artificial Sequence: Synthetic oligonucleotide
  misc_feature 1..20: note = Target: SCN10A; (+) strand; PAM type: YTN; PAM sequence: CTC
  source 1..20: mol_type = other DNA
tacccttctcctccctggga

SEQ ID NO: 64591 - DNA, 20 bp, synthetic construct
  misc_feature 1..20: note = Description of Artificial Sequence: Synthetic oligonucleotide
  misc_feature 1..20: note = Target: SCN10A; (+) strand; PAM type: YTN; PAM sequence: CTA
  source 1..20: mol_type = other DNA
cccttctcctccctgggatg

SEQ ID NO: 64592 - DNA, 20 bp, synthetic construct
  misc_feature 1..20: note = Description of Artificial Sequence: Synthetic oligonucleotide
  misc_feature 1..20: note = Target: SCN10A; (+) strand; PAM type: YTN; PAM sequence: CTT
  source 1..20: mol_type = other DNA
ctcctccctgggatggtgac

SEQ ID NO: 64593 - DNA, 20 bp, synthetic construct
  misc_feature 1..20: note = Description of Artificial Sequence: Synthetic oligonucleotide
  misc_feature 1..20: note = Target: SCN10A; (+) strand; PAM type: YTN; PAM sequence: TTC
  source 1..20: mol_type = other DNA
tcctccctgggatggtgaca

SEQ ID NO: 64594 - DNA, 20 bp, synthetic construct
  misc_feature 1..20: note = Description of Artificial Sequence: Synthetic oligonucleotide
  misc_feature 1..20: note = Target: SCN10A; (+) strand; PAM type: YTN; PAM sequence: CTC
  source 1..20: mol_type = other DNA
ctccctgggatggtgacagt

SEQ ID NO: 64595 - DNA, 20 bp, synthetic construct
  misc_feature 1..20: note = Description of Artificial Sequence: Synthetic oligonucleotide
  misc_feature 1..20: note = Target: SCN10A; (+) strand; PAM type: YTN; PAM sequence: CTC
  source 1..20: mol_type = other DNA
cctgggatggtgacagtacc

SEQ ID NO: 64596 - DNA, 20 bp, synthetic construct
  misc_feature 1..20: note = Description of Artificial Sequence: Synthetic oligonucleotide
  misc_feature 1..20: note = Target: SCN10A; (+) strand; PAM type: YTN; PAM sequence: CTG
  source 1..20: mol_type = other DNA
ggatggtgacagtaccatca

SEQ ID NO: 64597 - DNA, 20 bp, synthetic construct
  misc_feature 1..20: note = Description of Artificial Sequence: Synthetic oligonucleotide
  misc_feature 1..20: note = Target: SCN10A; (+) strand; PAM type: YTN; PAM sequence: CTT
  source 1..20: mol_type = other DNA
aggcagatgccatcaaccag

SEQ ID NO: 64598 - DNA, 20 bp, synthetic construct
  misc_feature 1..20: note = Description of Artificial Sequence: Synthetic oligonucleotide
  misc_feature 1..20: note = Target: SCN10A; (+) strand; PAM type: YTN; PAM sequence: TTA
  source 1..20: mol_type = other DNA
ggcagatgccatcaaccagc

SEQ ID NO: 64599 - DNA, 20 bp, synthetic construct
  misc_feature 1..20: note = Description of Artificial Sequence: Synthetic oligonucleotide
  misc_feature 1..20: note = Target: SCN10A; (+) strand; PAM type: YTN; PAM sequence: TTT
  source 1..20: mol_type = other DNA
catggcacagctgtgtctca

SEQ ID NO: 64600 - DNA, 20 bp, synthetic construct
  misc_feature 1..20: note = Description of Artificial Sequence: Synthetic oligonucleotide
  misc_feature 1..20: note = Target: SCN10A; (+) strand; PAM type: YTN; PAM sequence: TTC
  source 1..20: mol_type = other DNA
atggcacagctgtgtctcag

SEQ ID NO: 64601 - DNA, 20 bp, synthetic construct
  misc_feature 1..20: note = Description of Artificial Sequence: Synthetic oligonucleotide
  misc_feature 1..20: note = Target: SCN10A; (+) strand; PAM type: YTN; PAM sequence: CTG
  source 1..20: mol_type = other DNA
tgtctcaggacatgctttat

SEQ ID NO: 64602 - DNA, 20 bp, synthetic construct
  misc_feature 1..20: note = Description of Artificial Sequence: Synthetic oligonucleotide
  misc_feature 1..20: note = Target: SCN10A; (+) strand; PAM type: YTN; PAM sequence: CTC
  source 1..20: mol_type = other DNA
aggacatgctttatttggtc

SEQ ID NO: 64603 - DNA, 20 bp, synthetic construct
  misc_feature 1..20: note = Description of Artificial Sequence: Synthetic oligonucleotide
  misc_feature 1..20: note = Target: SCN10A; (+) strand; PAM type: YTN; PAM sequence: CTT
  source 1..20: mol_type = other DNA
tatttggtctttagagtgtt

SEQ ID NO: 64604 - DNA, 20 bp, synthetic construct
  misc_feature 1..20: note = Description of Artificial Sequence: Synthetic oligonucleotide
  misc_feature 1..20: note = Target: SCN10A; (+) strand; PAM type: YTN; PAM sequence: TTT
  source 1..20: mol_type = other DNA
atttggtctttagagtgttt

SEQ ID NO: 64605 - DNA, 20 bp, synthetic construct
  misc_feature 1..20: note = Description of Artificial Sequence: Synthetic oligonucleotide
  misc_feature 1..20: note = Target: SCN10A; (+) strand; PAM type: YTN; PAM sequence: TTA
  source 1..20: mol_type = other DNA
tttggtctttagagtgtttt

SEQ ID NO: 64606 - DNA, 20 bp, synthetic construct
  misc_feature 1..20: note = Description of Artificial Sequence: Synthetic oligonucleotide
  misc_feature 1..20: note = Target: SCN10A; (+) strand; PAM type: YTN; PAM sequence: TTT
  source 1..20: mol_type = other DNA
ggtctttagagtgtttttaa

SEQ ID NO: 64607 - DNA, 20 bp, synthetic construct
  misc_feature 1..20: note = Description of Artificial Sequence: Synthetic oligonucleotide
  misc_feature 1..20: note = Target: SCN10A; (+) strand; PAM type: YTN; PAM sequence: TTG
  source 1..20: mol_type = other DNA
gtctttagagtgtttttaaa

SEQ ID NO: 64608 - DNA, 20 bp, synthetic construct
  misc_feature 1..20: note = Description of Artificial Sequence: Synthetic oligonucleotide
  misc_feature 1..20: note = Target: SCN10A; (+) strand; PAM type: YTN; PAM sequence: CTT
  source 1..20: mol_type = other DNA
tagagtgtttttaaaaactg

SEQ ID NO: 64609 - DNA, 20 bp, synthetic construct
  misc_feature 1..20: note = Description of Artificial Sequence: Synthetic oligonucleotide
  misc_feature 1..20: note = Target: SCN10A; (+) strand; PAM type: YTN; PAM sequence: TTT
  source 1..20: mol_type = other DNA
agagtgtttttaaaaactgg

SEQ ID NO: 64610 - DNA, 20 bp, synthetic construct
  misc_feature 1..20: note = Description of Artificial Sequence: Synthetic oligonucleotide
  misc_feature 1..20: note = Target: SCN10A; (+) strand; PAM type: YTN; PAM sequence: TTA
  source 1..20: mol_type = other DNA
gagtgtttttaaaaactgga

SEQ ID NO: 64611 - DNA, 20 bp, synthetic construct
  misc_feature 1..20: note = Description of Artificial Sequence: Synthetic oligonucleotide
  misc_feature 1..20: note = Target: SCN10A; (+) strand; PAM type: YTN; PAM sequence: TTT
  source 1..20: mol_type = other DNA
ttaaaaactggattagtagc

SEQ ID NO: 64612 - DNA, 20 bp, synthetic construct
  misc_feature 1..20: note = Description of Artificial Sequence: Synthetic oligonucleotide
  misc_feature 1..20: note = Target: SCN10A; (+) strand; PAM type: YTN; PAM sequence: TTT
  source 1..20: mol_type = other DNA
taaaaactggattagtagcc

SEQ ID NO: 64613 - DNA, 20 bp, synthetic construct
  misc_feature 1..20: note = Description of Artificial Sequence: Synthetic oligonucleotide
  misc_feature 1..20: note = Target: SCN10A; (+) strand; PAM type: YTN; PAM sequence: TTT
  source 1..20: mol_type = other DNA
aaaaactggattagtagcca

SEQ ID NO: 64614 - DNA, 20 bp, synthetic construct
  misc_feature 1..20: note = Description of Artificial Sequence: Synthetic oligonucleotide
  misc_feature 1..20: note = Target: SCN10A; (+) strand; PAM type: YTN; PAM sequence: TTA
  source 1..20: mol_type = other DNA
aaaactggattagtagccaa

SEQ ID NO: 64615 - DNA, 20 bp, synthetic construct
  misc_feature 1..20: note = Description of Artificial Sequence: Synthetic oligonucleotide
  misc_feature 1..20: note = Target: SCN10A; (+) strand; PAM type: YTN; PAM sequence: CTG
  source 1..20: mol_type = other DNA
gattagtagccaatattaaa

SEQ ID NO: 64616 - DNA, 20 bp, synthetic construct
  misc_feature 1..20: note = Description of Artificial Sequence: Synthetic oligonucleotide
  misc_feature 1..20: note = Target: SCN10A; (+) strand; PAM type: YTN; PAM sequence: TTA
  source 1..20: mol_type = other DNA
gtagccaatattaaagacat

SEQ ID NO: 64617 - DNA, 20 bp, synthetic construct
  misc_feature 1..20: note = Description of Artificial Sequence: Synthetic oligonucleotide
  misc_feature 1..20: note = Target: SCN10A; (+) strand; PAM type: YTN; PAM sequence: TTA
  source 1..20: mol_type = other DNA
aagacatttgcacaaaaatc

SEQ ID NO: 64618 - DNA, 20 bp, synthetic construct
  misc_feature 1..20: note = Description of Artificial Sequence: Synthetic oligonucleotide
  misc_feature 1..20: note = Target: SCN10A; (+) strand; PAM type: YTN; PAM sequence: TTT
  source 1..20: mol_type = other DNA
gcacaaaaatctggatttct

SEQ ID NO: 64619 - DNA, 20 bp, synthetic construct
  misc_feature 1..20: note = Description of Artificial Sequence: Synthetic oligonucleotide
  misc_feature 1..20: note = Target: SCN10A; (+) strand; PAM type: YTN; PAM sequence: TTG
  source 1..20: mol_type = other DNA
cacaaaaatctggatttctg

SEQ ID NO: 64620 - DNA, 20 bp, synthetic construct
  misc_feature 1..20: note = Description of Artificial Sequence: Synthetic oligonucleotide
  misc_feature 1..20: note = Target: SCN10A; (+) strand; PAM type: YTN; PAM sequence: CTG
  source 1..20: mol_type = other DNA
gatttctgacttttttggaa

SEQ ID NO: 64621 - DNA, 20 bp, synthetic construct
  misc_feature 1..20: note = Description of Artificial Sequence: Synthetic oligonucleotide
  misc_feature 1..20: note = Target: SCN10A; (+) strand; PAM type: YTN; PAM sequence: TTT
  source 1..20: mol_type = other DNA
ctgacttttttggaaaatta

SEQ ID NO: 64622 - DNA, 20 bp, synthetic construct
  misc_feature 1..20: note = Description of Artificial Sequence: Synthetic oligonucleotide
  misc_feature 1..20: note = Target: SCN10A; (+) strand; PAM type: YTN; PAM sequence: TTC
  source 1..20: mol_type = other DNA
tgacttttttggaaaattag

SEQ ID NO: 64623 - DNA, 20 bp, synthetic construct
  misc_feature 1..20: note = Description of Artificial Sequence: Synthetic oligonucleotide
  misc_feature 1..20: note = Target: SCN10A; (+) strand; PAM type: YTN; PAM sequence: CTG
  source 1..20: mol_type = other DNA
acttttttggaaaattagta

SEQ ID NO: 64624 - DNA, 20 bp, synthetic construct
  misc_feature 1..20: note = Description of Artificial Sequence: Synthetic oligonucleotide
  misc_feature 1..20: note = Target: SCN10A; (+) strand; PAM type: YTN; PAM sequence: CTT
  source 1..20: mol_type = other DNA
ttttggaaaattagtaactc

SEQ ID NO: 64625 - DNA, 20 bp, synthetic construct
  misc_feature 1..20: note = Description of Artificial Sequence: Synthetic oligonucleotide
  misc_feature 1..20: note = Target: SCN10A; (+) strand; PAM type: YTN; PAM sequence: TTT
  source 1..20: mol_type = other DNA
tttggaaaattagtaactct

SEQ ID NO: 64626 - DNA, 20 bp, synthetic construct
  misc_feature 1..20: note = Description of Artificial Sequence: Synthetic oligonucleotide
  misc_feature 1..20: note = Target: SCN10A; (+) strand; PAM type: YTN; PAM sequence: TTT
  source 1..20: mol_type = other DNA
ttggaaaattagtaactctg

SEQ ID NO: 64627 - DNA, 20 bp, synthetic construct
  misc_feature 1..20: note = Description of Artificial Sequence: Synthetic oligonucleotide
  misc_feature 1..20: note = Target: SCN10A; (+) strand; PAM type: YTN; PAM sequence: TTT
  source 1..20: mol_type = other DNA
tggaaaattagtaactctga

SEQ ID NO: 64628 - DNA, 20 bp, synthetic construct
  misc_feature 1..20: note = Description of Artificial Sequence: Synthetic oligonucleotide
  misc_feature 1..20: note = Target: SCN10A; (+) strand; PAM type: YTN; PAM sequence: TTT
  source 1..20: mol_type = other DNA
ggaaaattagtaactctgac

SEQ ID NO: 64629 - DNA, 20 bp, synthetic construct
  misc_feature 1..20: note = Description of Artificial Sequence: Synthetic oligonucleotide
  misc_feature 1..20: note = Target: SCN10A; (+) strand; PAM type: YTN; PAM sequence: TTG
  source 1..20: mol_type = other DNA
gaaaattagtaactctgaca

SEQ ID NO: 64630 - DNA, 20 bp, synthetic construct
  misc_feature 1..20: note = Description of Artificial Sequence: Synthetic oligonucleotide
  misc_feature 1..20: note = Target: SCN10A; (+) strand; PAM type: YTN; PAM sequence: TTA
  source 1..20: mol_type = other DNA
gtaactctgacaataatgga

SEQ ID NO: 64631 - DNA, 20 bp, synthetic construct
  misc_feature 1..20: note = Description of Artificial Sequence: Synthetic oligonucleotide
  misc_feature 1..20: note = Target: SCN10A; (+) strand; PAM type: YTN; PAM sequence: CTC
  source 1..20: mol_type = other DNA
tgacaataatggacaggcca

SEQ ID NO: 64632 - DNA, 20 bp, synthetic construct
  misc_feature 1..20: note = Description of Artificial Sequence: Synthetic oligonucleotide
  misc_feature 1..20: note = Target: SCN10A; (+) strand; PAM type: YTN; PAM sequence: CTG
  source 1..20: mol_type = other DNA
acaataatggacaggccata

SEQ ID NO: 64633 - DNA, 20 bp, synthetic construct
  misc_feature 1..20: note = Description of Artificial Sequence: Synthetic oligonucleotide
  misc_feature 1..20: note = Target: SCN10A; (+) strand; PAM type: YTN; PAM sequence: CTC
  source 1..20: mol_type = other DNA
gtccttccctccctccctcc

SEQ ID NO: 64634 - DNA, 20 bp, synthetic construct
  misc_feature 1..20: note = Description of Artificial Sequence: Synthetic oligonucleotide
  misc_feature 1..20: note = Target: SCN10A; (+) strand; PAM type: YTN; PAM sequence: CTT
  source 1..20: mol_type = other DNA
ccctccctccctccctctct

SEQ ID NO: 64635 - DNA, 20 bp, synthetic construct
  misc_feature 1..20: note = Description of Artificial Sequence: Synthetic oligonucleotide
  misc_feature 1..20: note = Target: SCN10A; (+) strand; PAM type: YTN; PAM sequence: TTC
  source 1..20: mol_type = other DNA
cctccctccctccctctctc

SEQ ID NO: 64636 - DNA, 20 bp, synthetic construct
  misc_feature 1..20: note = Description of Artificial Sequence: Synthetic oligonucleotide
  misc_feature 1..20: note = Target: SCN10A; (+) strand; PAM type: YTN; PAM sequence: CTC
  source 1..20: mol_type = other DNA
cctccctccctctctctctc

SEQ ID NO: 64637 - DNA, 20 bp, synthetic construct
  misc_feature 1..20: note = Description of Artificial Sequence: Synthetic oligonucleotide
  misc_feature 1..20: note = Target: SCN10A; (+) strand; PAM type: YTN; PAM sequence: CTC
  source 1..20: mol_type = other DNA
cctccctctctctctccctc

SEQ ID NO: 64638 - DNA, 20 bp, synthetic construct
  misc_feature 1..20: note = Description of Artificial Sequence: Synthetic oligonucleotide
  misc_feature 1..20: note = Target: SCN10A; (+) strand; PAM type: YTN; PAM sequence: CTC
  source 1..20: mol_type = other DNA
cctctctctctccctccctc

SEQ ID NO: 64639 - DNA, 20 bp, synthetic construct
  misc_feature 1..20: note = Description of Artificial Sequence: Synthetic oligonucleotide
  misc_feature 1..20: note = Target: SCN10A; (+) strand; PAM type: YTN; PAM sequence: CTC
  source 1..20: mol_type = other DNA
tctctctccctccctccctc

SEQ ID NO: 64640 - DNA, 20 bp, synthetic construct
  misc_feature 1..20: note = Description of Artificial Sequence: Synthetic oligonucleotide
  misc_feature 1..20: note = Target: SCN10A; (+) strand; PAM type: YTN; PAM sequence: CTC
  source 1..20: mol_type = other DNA
tctctccctccctccctccc

SEQ ID NO: 64641 - DNA, 20 bp, synthetic construct
  misc_feature 1..20: note = Description of Artificial Sequence: Synthetic oligonucleotide
  misc_feature 1..20: note = Target: SCN10A; (+) strand; PAM type: YTN; PAM sequence: CTC
  source 1..20: mol_type = other DNA
tctccctccctccctccctc

SEQ ID NO: 64642 - DNA, 20 bp, synthetic construct
  misc_feature 1..20: note = Description of Artificial Sequence: Synthetic oligonucleotide
  misc_feature 1..20: note = Target: SCN10A; (+) strand; PAM type: YTN; PAM sequence: CTC
  source 1..20: mol_type = other DNA
tccctccctccctccctctc

SEQ ID NO: 64643 - DNA, 20 bp, synthetic construct
  misc_feature 1..20: note = Description of Artificial Sequence: Synthetic oligonucleotide
  misc_feature 1..20: note = Target: SCN10A; (+) strand; PAM type: YTN; PAM sequence: CTC
  source 1..20: mol_type = other DNA
cctccctccctccctctctc

SEQ ID NO: 64644 - DNA, 20 bp, synthetic construct
  misc_feature 1..20: note = Description of Artificial Sequence: Synthetic oligonucleotide
  misc_feature 1..20: note = Target: SCN10A; (+) strand; PAM type: YTN; PAM sequence: CTC
  source 1..20: mol_type = other DNA
cctccctccctctctctctc

SEQ ID NO: 64645 - DNA, 20 bp, synthetic construct
  misc_feature 1..20: note = Description of Artificial Sequence: Synthetic oligonucleotide
  misc_feature 1..20: note = Target: SCN10A; (+) strand; PAM type: YTN; PAM sequence: CTC
  source 1..20: mol_type = other DNA
cctccctctctctctccctc

SEQ ID NO: 64646 - DNA, 20 bp, synthetic construct
  misc_feature 1..20: note = Description of Artificial Sequence: Synthetic oligonucleotide
  misc_feature 1..20: note = Target: SCN10A; (+) strand; PAM type: YTN; PAM sequence: CTC
  source 1..20: mol_type = other DNA
cctctctctctccctccctc

SEQ ID NO: 64647 - DNA, 20 bp, synthetic construct
  misc_feature 1..20: note = Description of Artificial Sequence: Synthetic oligonucleotide
  misc_feature 1..20: note = Target: SCN10A; (+) strand; PAM type: YTN; PAM sequence: CTC
  source 1..20: mol_type = other DNA
tctctctccctccctccctc

SEQ ID NO: 64648 - DNA, 20 bp, synthetic construct
  misc_feature 1..20: note = Description of Artificial Sequence: Synthetic oligonucleotide
  misc_feature 1..20: note = Target: SCN10A; (+) strand; PAM type: YTN; PAM sequence: CTC
  source 1..20: mol_type = other DNA
tctctccctccctccctccc

SEQ ID NO: 64649 - DNA, 20 bp, synthetic construct
  misc_feature 1..20: note = Description of Artificial Sequence: Synthetic oligonucleotide
  misc_feature 1..20: note = Target: SCN10A; (+) strand; PAM type: YTN; PAM sequence: CTC
  source 1..20: mol_type = other DNA
tctccctccctccctccctt

SEQ ID NO: 64650 - DNA, 20 bp, synthetic construct
  misc_feature 1..20: note = Description of Artificial Sequence: Synthetic oligonucleotide
  misc_feature 1..20: note = Target: SCN10A; (+) strand; PAM type: YTN; PAM sequence: CTC
  source 1..20: mol_type = other DNA
tccctccctccctcccttcc

SEQ ID NO: 64651 - DNA, 20 bp, synthetic construct
  misc_feature 1..20: note = Description of Artificial Sequence: Synthetic oligonucleotide
  misc_feature 1..20: note = Target: SCN10A; (+) strand; PAM type: YTN; PAM sequence: CTC
  source 1..20: mol_type = other DNA
cctccctccctcccttcctc

SEQ ID NO: 64652 - DNA, 20 bp, synthetic construct
  misc_feature 1..20: note = Description of Artificial Sequence: Synthetic oligonucleotide
  misc_feature 1..20: note = Target: SCN10A; (+) strand; PAM type: YTN; PAM sequence: CTC
  source 1..20: mol_type = other DNA
cctccctcccttcctctttc

SEQ ID NO: 64653 - DNA, 20 bp, synthetic construct
  misc_feature 1..20: note = Description of Artificial Sequence: Synthetic oligonucleotide
  misc_feature 1..20: note = Target: SCN10A; (+) strand; PAM type: YTN; PAM sequence: CTC
  source 1..20: mol_type = other DNA
cctcccttcctctttctttc

SEQ ID NO: 64654 - DNA, 20 bp, synthetic construct
  misc_feature 1..20: note = Description of Artificial Sequence: Synthetic oligonucleotide
  misc_feature 1..20: note = Target: SCN10A; (+) strand; PAM type: YTN; PAM sequence: CTC
  source 1..20: mol_type = other DNA
ccttcctctttctttctttc

SEQ ID NO: 64655 - DNA, 20 bp, synthetic construct
  misc_feature 1..20: note = Description of Artificial Sequence: Synthetic oligonucleotide
  misc_feature 1..20: note = Target: SCN10A; (+) strand; PAM type: YTN; PAM sequence: CTT
  source 1..20: mol_type = other DNA
cctctttctttctttctttc

SEQ ID NO: 64656 - DNA, 20 bp, synthetic construct
  misc_feature 1..20: note = Description of Artificial Sequence: Synthetic oligonucleotide
  misc_feature 1..20: note = Target: SCN10A; (+) strand; PAM type: YTN; PAM sequence: TTC
  source 1..20: mol_type = other DNA
ctctttctttctttctttct

SEQ ID NO: 64657 - DNA, 20 bp, synthetic construct
  misc_feature 1..20: note = Description of Artificial Sequence: Synthetic oligonucleotide
  misc_feature 1..20: note = Target: SCN10A; (+) strand; PAM type: YTN; PAM sequence: CTC
  source 1..20: mol_type = other DNA
tttctttctttctttctttc

SEQ ID NO: 64658 - DNA, 20 bp, synthetic construct
  misc_feature 1..20: note = Description of Artificial Sequence: Synthetic oligonucleotide
  misc_feature 1..20: note = Target: SCN10A; (+) strand; PAM type: YTN; PAM sequence: CTT
  source 1..20: mol_type = other DNA
tctttctttctttctttctt

SEQ ID NO: 64659 - DNA, 20 bp, synthetic construct
  misc_feature 1..20: note = Description of Artificial Sequence: Synthetic oligonucleotide
  misc_feature 1..20: note = Target: SCN10A; (+) strand; PAM type: YTN; PAM sequence: TTT
  source 1..20: mol_type = other DNA
ctttctttctttctttcttt

SEQ ID NO: 64660 - DNA, 20 bp, synthetic construct
  misc_feature 1..20: note = Description of Artificial Sequence: Synthetic oligonucleotide
  misc_feature 1..20: note = Target: SCN10A; (+) strand; PAM type: YTN; PAM sequence: TTC
  source 1..20: mol_type = other DNA
tttctttctttctttctttc

SEQ ID NO: 64661 - DNA, 20 bp, synthetic construct
  misc_feature 1..20: note = Description of Artificial Sequence: Synthetic oligonucleotide
  misc_feature 1..20: note = Target: SCN10A; (+) strand; PAM type: YTN; PAM sequence: CTT
  source 1..20: mol_type = other DNA
tctttctttctttctttctt

SEQ ID NO: 64662 - DNA, 20 bp, synthetic construct
  misc_feature 1..20: note = Description of Artificial Sequence: Synthetic oligonucleotide
  misc_feature 1..20: note = Target: SCN10A; (+) strand; PAM type: YTN; PAM sequence: TTT
  source 1..20: mol_type = other DNA
ctttctttctttctttcttt

SEQ ID NO: 64663 - DNA, 20 bp, synthetic construct
  misc_feature 1..20: note = Description of Artificial Sequence: Synthetic oligonucleotide
  misc_feature 1..20: note = Target: SCN10A; (+) strand; PAM type: YTN; PAM sequence: TTC
  source 1..20: mol_type = other DNA
tttctttctttctttctttc

SEQ ID NO: 64664 - DNA, 20 bp, synthetic construct
  misc_feature 1..20: note = Description of Artificial Sequence: Synthetic oligonucleotide
  misc_feature 1..20: note = Target: SCN10A; (+) strand; PAM type: YTN; PAM sequence: CTT
  source 1..20: mol_type = other DNA
tctttctttctttctttctt

SEQ ID NO: 64665 - DNA, 20 bp, synthetic construct
  misc_feature 1..20: note = Description of Artificial Sequence: Synthetic oligonucleotide
  misc_feature 1..20: note = Target: SCN10A; (+) strand; PAM type: YTN; PAM sequence: TTT
  source 1..20: mol_type = other DNA
ctttctttctttctttcttt

SEQ ID NO: 64666 - DNA, 20 bp, synthetic construct
  misc_feature 1..20: note = Description of Artificial Sequence: Synthetic oligonucleotide
  misc_feature 1..20: note = Target: SCN10A; (+) strand; PAM type: YTN; PAM sequence: TTC
  source 1..20: mol_type = other DNA
tttctttctttctttctttc

SEQ ID NO: 64667 - DNA, 20 bp, synthetic construct
  misc_feature 1..20: note = Description of Artificial Sequence: Synthetic oligonucleotide
  misc_feature 1..20: note = Target: SCN10A; (+) strand; PAM type: YTN; PAM sequence: CTT
  source 1..20: mol_type = other DNA
tctttctttctttctttctc

SEQ ID NO: 64668 - DNA, 20 bp, synthetic construct
  misc_feature 1..20: note = Description of Artificial Sequence: Synthetic oligonucleotide
  misc_feature 1..20: note = Target: SCN10A; (+) strand; PAM type: YTN; PAM sequence: TTT
  source 1..20: mol_type = other DNA
ctttctttctttctttctct

SEQ ID NO: 64669 - DNA, 20 bp, synthetic construct
  misc_feature 1..20: note = Description of Artificial Sequence: Synthetic oligonucleotide
  misc_feature 1..20: note = Target: SCN10A; (+) strand; PAM type: YTN; PAM sequence: TTC
  source 1..20: mol_type = other DNA
tttctttctttctttctctt

SEQ ID NO: 64670 - DNA, 20 bp, synthetic construct
  misc_feature 1..20: note = Description of Artificial Sequence: Synthetic oligonucleotide
  misc_feature 1..20: note = Target: SCN10A; (+) strand; PAM type: YTN; PAM sequence: CTT
  source 1..20: mol_type = other DNA
tctttctttctttctctttc

SEQ ID NO: 64671 - DNA, 20 bp, synthetic construct
  misc_feature 1..20: note = Description of Artificial Sequence: Synthetic oligonucleotide
  misc_feature 1..20: note = Target: SCN10A; (+) strand; PAM type: YTN; PAM sequence: TTT
  source 1..20: mol_type = other DNA
ctttctttctttctctttct

SEQ ID NO: 64672 - DNA, 20 bp, synthetic construct
  misc_feature 1..20: note = Description of Artificial Sequence: Synthetic oligonucleotide
  misc_feature 1..20: note = Target: SCN10A; (+) strand; PAM type: YTN; PAM sequence: TTC
  source 1..20: mol_type = other DNA
tttctttctttctctttctt

SEQ ID NO: 64673 - DNA, 20 bp, synthetic construct
  misc_feature 1..20: note = Description of Artificial Sequence: Synthetic oligonucleotide
  misc_feature 1..20: note = Target: SCN10A; (+) strand; PAM type: YTN; PAM sequence: CTT
  source 1..20: mol_type = other DNA
tctttctttctctttcttct

SEQ ID NO: 64674 - DNA, 20 bp, synthetic construct
  misc_feature 1..20: note = Description of Artificial Sequence: Synthetic oligonucleotide
  misc_feature 1..20: note = Target: SCN10A; (+) strand; PAM type: YTN; PAM sequence: TTT
  source 1..20: mol_type = other DNA
ctttctttctctttcttctt

SEQ ID NO: 64675 - DNA, 20 bp, synthetic construct
  misc_feature 1..20: note = Description of Artificial Sequence: Synthetic oligonucleotide
  misc_feature 1..20: note = Target: SCN10A; (+) strand; PAM type: YTN; PAM sequence: TTC
  source 1..20: mol_type = other DNA
tttctttctctttcttcttt

SEQ ID NO: 64676 - DNA, 20 bp, synthetic construct
  misc_feature 1..20: note = Description of Artificial Sequence: Synthetic oligonucleotide
  misc_feature 1..20: note = Target: SCN10A; (+) strand; PAM type: YTN; PAM sequence: CTT
  source 1..20: mol_type = other DNA
tctttctctttcttctttct

SEQ ID NO: 64677 - DNA, 20 bp, synthetic construct
  misc_feature 1..20: note = Description of Artificial Sequence: Synthetic oligonucleotide
  misc_feature 1..20: note = Target: SCN10A; (+) strand; PAM type: YTN; PAM sequence: TTT
  source 1..20: mol_type = other DNA
ctttctctttcttctttctt

SEQ ID NO: 64678 - DNA, 20 bp, synthetic construct
  misc_feature 1..20: note = Description of Artificial Sequence: Synthetic oligonucleotide
  misc_feature 1..20: note = Target: SCN10A; (+) strand; PAM type: YTN; PAM sequence: TTC
  source 1..20: mol_type = other DNA
tttctctttcttctttcttt

SEQ ID NO: 64679 - DNA, 20 bp, synthetic construct
  misc_feature 1..20: note = Description of Artificial Sequence: Synthetic oligonucleotide
  misc_feature 1..20: note = Target: SCN10A; (+) strand; PAM type: YTN; PAM sequence: CTT
  source 1..20: mol_type = other DNA
tctctttcttctttctttct

SEQ ID NO: 64680 - DNA, 20 bp, synthetic construct
  misc_feature 1..20: note = Description of Artificial Sequence: Synthetic oligonucleotide
  misc_feature 1..20: note = Target: SCN10A; (+) strand; PAM type: YTN; PAM sequence: TTT
  source 1..20: mol_type = other DNA
ctctttcttctttctttctt

SEQ ID NO: 64681 - DNA, 20 bp, synthetic construct
  misc_feature 1..20: note = Description of Artificial Sequence: Synthetic oligonucleotide
  misc_feature 1..20: note = Target: SCN10A; (+) strand; PAM type: YTN; PAM sequence: TTC
  source 1..20: mol_type = other DNA
tctttcttctttctttcttt

SEQ ID NO: 64682 - DNA, 20 bp, synthetic construct
  misc_feature 1..20: note = Description of Artificial Sequence: Synthetic oligonucleotide
  misc_feature 1..20: note = Target: SCN10A; (+) strand; PAM type: YTN; PAM sequence: CTC
  source 1..20: mol_type = other DNA
tttcttctttctttctttct

SEQ ID NO: 64683 - DNA, 20 bp, synthetic construct
  misc_feature 1..20: note = Description of Artificial Sequence: Synthetic oligonucleotide
  misc_feature 1..20: note = Target: SCN10A; (+) strand; PAM type: YTN; PAM sequence: CTT
  source 1..20: mol_type = other DNA
tcttctttctttctttctct

SEQ ID NO: 64684 - DNA, 20 bp, synthetic construct
  misc_feature 1..20: note = Description of Artificial Sequence: Synthetic oligonucleotide
  misc_feature 1..20: note = Target: SCN10A; (+) strand; PAM type: YTN; PAM sequence: TTT
  source 1..20: mol_type = other DNA
cttctttctttctttctctt

SEQ ID NO: 64685 - DNA, 20 bp, synthetic construct
  misc_feature 1..20: note = Description of Artificial Sequence: Synthetic oligonucleotide
  misc_feature 1..20: note = Target: SCN10A; (+) strand; PAM type: YTN; PAM sequence: TTC
  source 1..20: mol_type = other DNA
ttctttctttctttctcttt

SEQ ID NO: 64686 - DNA, 20 bp, synthetic construct
  misc_feature 1..20: note = Description of Artificial Sequence: Synthetic oligonucleotide
  misc_feature 1..20: note = Target: SCN10A; (+) strand; PAM type: YTN; PAM sequence: CTT
  source 1..20: mol_type = other DNA
ctttctttctttctcttttt

SEQ ID NO: 64687 - DNA, 20 bp, synthetic construct
  misc_feature 1..20: note = Description of Artificial Sequence: Synthetic oligonucleotide
  misc_feature 1..20: note = Target: SCN10A; (+) strand; PAM type: YTN; PAM sequence: TTC
  source 1..20: mol_type = other DNA
tttctttctttctctttttc

SEQ ID NO: 64688 - DNA, 20 bp, synthetic construct
  misc_feature 1..20: note = Description of Artificial Sequence: Synthetic oligonucleotide
  misc_feature 1..20: note = Target: SCN10A; (+) strand; PAM type: YTN; PAM sequence: CTT
  source 1..20: mol_type = other DNA
tctttctttctctttttctt

SEQ ID NO: 64689 - DNA, 20 bp, synthetic construct
  misc_feature 1..20: note = Description of Artificial Sequence: Synthetic oligonucleotide
  misc_feature 1..20: note = Target: SCN10A; (+) strand; PAM type: YTN; PAM sequence: TTT
  source 1..20: mol_type = other DNA
ctttctttctctttttcttt

SEQ ID NO: 64690 - DNA, 20 bp, synthetic construct
  misc_feature 1..20: note = Description of Artificial Sequence: Synthetic oligonucleotide
  misc_feature 1..20: note = Target: SCN10A; (+) strand; PAM type: YTN; PAM sequence: TTC
  source 1..20: mol_type = other DNA
tttctttctctttttctttc

SEQ ID NO: 64691 - DNA, 20 bp, synthetic construct
  misc_feature 1..20: note = Description of Artificial Sequence: Synthetic oligonucleotide
  misc_feature 1..20: note = Target: SCN10A; (+) strand; PAM type: YTN; PAM sequence: CTT
  source 1..20: mol_type = other DNA
tctttctctttttctttctc

SEQ ID NO: 64692 - DNA, 20 bp, synthetic construct
  misc_feature 1..20: note = Description of Artificial Sequence: Synthetic oligonucleotide
  misc_feature 1..20: note = Target: SCN10A; (+) strand; PAM type: YTN; PAM sequence: TTT
  source 1..20: mol_type = other DNA
ctttctctttttctttctct

SEQ ID NO: 64693 - DNA, 20 bp, synthetic construct
  misc_feature 1..20: note = Description of Artificial Sequence: Synthetic oligonucleotide
  misc_feature 1..20: note = Target: SCN10A; (+) strand; PAM type: YTN; PAM sequence: TTC
  source 1..20: mol_type = other DNA
tttctctttttctttctctc

SEQ ID NO: 64694 - DNA, 20 bp, synthetic construct
  misc_feature 1..20: note = Description of Artificial Sequence: Synthetic oligonucleotide
  misc_feature 1..20: note = Target: SCN10A; (+) strand; PAM type: YTN; PAM sequence: CTT
  source 1..20: mol_type = other DNA
tctctttttctttctctctc

SEQ ID NO: 64695 - DNA, 20 bp, synthetic construct
  misc_feature 1..20: note = Description of Artificial Sequence: Synthetic oligonucleotide
  misc_feature 1..20: note = Target: SCN10A; (+) strand; PAM type: YTN; PAM sequence: TTT
  source 1..20: mol_type = other DNA
ctctttttctttctctctcc

SEQ ID NO: 64696 - DNA, 20 bp, synthetic construct
  misc_feature 1..20: note = Description of Artificial Sequence: Synthetic oligonucleotide
  misc_feature 1..20: note = Target: SCN10A; (+) strand; PAM type: YTN; PAM sequence: TTC
  source 1..20: mol_type = other DNA
tctttttctttctctctccc

SEQ ID NO: 64697 - DNA, 20 bp, synthetic construct
  misc_feature 1..20: note = Description of Artificial Sequence: Synthetic oligonucleotide
  misc_feature 1..20: note = Target: SCN10A; (+) strand; PAM type: YTN; PAM sequence: CTC
  source 1..20: mol_type = other DNA
tttttctttctctctccctc

SEQ ID NO: 64698 - DNA, 20 bp, synthetic construct
  misc_feature 1..20: note = Description of Artificial Sequence: Synthetic oligonucleotide
  misc_feature 1..20: note = Target: SCN10A; (+) strand; PAM type: YTN; PAM sequence: CTT
  source 1..20: mol_type = other DNA
tttctttctctctccctctt

SEQ ID NO: 64699 - DNA, 20 bp, synthetic construct
  misc_feature 1..20: note = Description of Artificial Sequence: Synthetic oligonucleotide
  misc_feature 1..20: note = Target: SCN10A; (+) strand; PAM type: YTN; PAM sequence: TTT
  source 1..20: mol_type = other DNA
ttctttctctctccctcttg

SEQ ID NO: 64700 - DNA, 20 bp, synthetic construct
  misc_feature 1..20: note = Description of Artificial Sequence: Synthetic oligonucleotide
  misc_feature 1..20: note = Target: SCN10A; (+) strand; PAM type: YTN; PAM sequence: TTT
  source 1..20: mol_type = other DNA
tctttctctctccctcttgc

SEQ ID NO: 64701 - DNA, 20 bp, synthetic construct
  misc_feature 1..20: note = Description of Artificial Sequence: Synthetic oligonucleotide
  misc_feature 1..20: note = Target: SCN10A; (+) strand; PAM type: YTN; PAM sequence: TTT
  source 1..20: mol_type = other DNA
ctttctctctccctcttgct

SEQ ID NO: 64702 - DNA, 20 bp, synthetic construct
  misc_feature 1..20: note = Description of Artificial Sequence: Synthetic oligonucleotide
  misc_feature 1..20: note = Target: SCN10A; (+) strand; PAM type: YTN; PAM sequence: TTC
  source 1..20: mol_type = other DNA
tttctctctccctcttgctc

SEQ ID NO: 64703 - DNA, 20 bp, synthetic construct
  misc_feature 1..20: note = Description of Artificial Sequence: Synthetic oligonucleotide
  misc_feature 1..20: note = Target: SCN10A; (+) strand; PAM type: YTN; PAM sequence: CTT
  source 1..20: mol_type = other DNA
tctctctccctcttgctctc

SEQ ID NO: 64704 - DNA, 20 bp, synthetic construct
  misc_feature 1..20: note = Description of Artificial Sequence: Synthetic oligonucleotide
  misc_feature 1..20: note = Target: SCN10A; (+) strand; PAM type: YTN; PAM sequence: TTT
  source 1..20: mol_type = other DNA
ctctctccctcttgctctct

SEQ ID NO: 64705 - DNA, 20 bp, synthetic construct
  misc_feature 1..20: note = Description of Artificial Sequence: Synthetic oligonucleotide
  misc_feature 1..20: note = Target: SCN10A; (+) strand; PAM type: YTN; PAM sequence: TTC
  source 1..20: mol_type = other DNA
tctctccctcttgctctctc

SEQ ID NO: 64706 - DNA, 20 bp, synthetic construct
  misc_feature 1..20: note = Description of Artificial Sequence: Synthetic oligonucleotide
  misc_feature 1..20: note = Target: SCN10A; (+) strand; PAM type: YTN; PAM sequence: CTC
  source 1..20: mol_type = other DNA
tctccctcttgctctctctc

SEQ ID NO: 64707 - DNA, 20 bp, synthetic construct
  misc_feature 1..20: note = Description of Artificial Sequence: Synthetic oligonucleotide
  misc_feature 1..20: note = Target: SCN10A; (+) strand; PAM type: YTN; PAM sequence: CTC
  source 1..20: mol_type = other DNA
tccctcttgctctctctctt

SEQ ID NO: 64708 - DNA, 20 bp, synthetic construct
  misc_feature 1..20: note = Description of Artificial Sequence: Synthetic oligonucleotide
  misc_feature 1..20: note = Target: SCN10A; (+) strand; PAM type: YTN; PAM sequence: CTC
  source 1..20: mol_type = other DNA
cctcttgctctctctctttc

SEQ ID NO: 64709 - DNA, 20 bp, synthetic construct
  misc_feature 1..20: note = Description of Artificial Sequence: Synthetic oligonucleotide
  misc_feature 1..20: note = Target: SCN10A; (+) strand; PAM type: YTN; PAM sequence: CTC
  source 1..20: mol_type = other DNA
ttgctctctctctttctttc

SEQ ID NO: 64710 - DNA, 20 bp, synthetic construct
  misc_feature 1..20: note = Description of Artificial Sequence: Synthetic oligonucleotide
  misc_feature 1..20: note = Target: SCN10A; (+) strand; PAM type: YTN; PAM sequence: CTT
  source 1..20: mol_type = other DNA
gctctctctctttctttcat

SEQ ID NO: 64711 - DNA, 20 bp, synthetic construct
  misc_feature 1..20: note = Description of Artificial Sequence: Synthetic oligonucleotide
  misc_feature 1..20: note = Target: SCN10A; (+) strand; PAM type: YTN; PAM sequence: TTG
  source 1..20: mol_type = other DNA
ctctctctctttctttcatc

SEQ ID NO: 64712 - DNA, 20 bp, synthetic construct
  misc_feature 1..20: note = Description of Artificial Sequence: Synthetic oligonucleotide
  misc_feature 1..20: note = Target: SCN10A; (+) strand; PAM type: YTN; PAM sequence: CTC
  source 1..20: mol_type = other DNA
tctctctttctttcatctgt

SEQ ID NO: 64713 - DNA, 20 bp, synthetic construct
  misc_feature 1..20: note = Description of Artificial Sequence: Synthetic oligonucleotide
  misc_feature 1..20: note = Target: SCN10A; (+) strand; PAM type: YTN; PAM sequence: CTC
  source 1..20: mol_type = other DNA
tctctttctttcatctgtct

SEQ ID NO: 64714 - DNA, 20 bp, synthetic construct
  misc_feature 1..20: note = Description of Artificial Sequence: Synthetic oligonucleotide
  misc_feature 1..20: note = Target: SCN10A; (+) strand; PAM type: YTN; PAM sequence: CTC
  source 1..20: mol_type = other DNA
tctttctttcatctgtcttt

SEQ ID NO: 64715 - DNA, 20 bp, synthetic construct
  misc_feature 1..20: note = Description of Artificial Sequence: Synthetic oligonucleotide
  misc_feature 1..20: note = Target: SCN10A; (+) strand; PAM type: YTN; PAM sequence: CTC
  source 1..20: mol_type = other DNA
tttctttcatctgtctttct

SEQ ID NO: 64716 - DNA, 20 bp, synthetic construct
  misc_feature 1..20: note = Description of Artificial Sequence: Synthetic oligonucleotide
  misc_feature 1..20: note = Target: SCN10A; (+) strand; PAM type: YTN; PAM sequence: CTT
  source 1..20: mol_type = other DNA
tctttcatctgtctttctct

SEQ ID NO: 64717 - DNA, 20 bp, synthetic construct
  misc_feature 1..20: note = Description of Artificial Sequence: Synthetic oligonucleotide
  misc_feature 1..20: note = Target: SCN10A; (+) strand; PAM type: YTN; PAM sequence: TTT
  source 1..20: mol_type = other DNA
ctttcatctgtctttctctc

SEQ ID NO: 64718 - DNA, 20 bp, synthetic construct
  misc_feature 1..20: note = Description of Artificial Sequence: Synthetic oligonucleotide
  misc_feature 1..20: note = Target: SCN10A; (+) strand; PAM type: YTN; PAM sequence: TTC
  source 1..20: mol_type = other DNA
tttcatctgtctttctctcg

SEQ ID NO: 64719 - DNA, 20 bp, synthetic construct
  misc_feature 1..20: note = Description of Artificial Sequence: Synthetic oligonucleotide
  misc_feature 1..20: note = Target: SCN10A; (+) strand; PAM type: YTN; PAM sequence: CTT
  source 1..20: mol_type = other DNA
tcatctgtctttctctcgct

SEQ ID NO: 64720 - DNA, 20 bp, synthetic construct
  misc_feature 1..20: note = Description of Artificial Sequence: Synthetic oligonucleotide
  misc_feature 1..20: note = Target: SCN10A; (+) strand; PAM type: YTN; PAM sequence: TTT
  source 1..20: mol_type = other DNA
catctgtctttctctcgctt

SEQ ID NO: 64721 - DNA, 20 bp, synthetic construct
  misc_feature 1..20: note = Description of Artificial Sequence: Synthetic oligonucleotide
  misc_feature 1..20: note = Target: SCN10A; (+) strand; PAM type: YTN; PAM sequence: TTC
  source 1..20: mol_type = other DNA
atctgtctttctctcgcttt

SEQ ID NO: 64722 - DNA, 20 bp, synthetic construct
  misc_feature 1..20: note = Description of Artificial Sequence: Synthetic oligonucleotide
  misc_feature 1..20: note = Target: SCN10A; (+) strand; PAM type: YTN; PAM sequence: CTG
  source 1..20: mol_type = other DNA
tctttctctcgctttttcta

SEQ ID NO: 64723 - DNA, 20 bp, synthetic construct
  misc_feature 1..20: note = Description of Artificial Sequence: Synthetic oligonucleotide
  misc_feature 1..20: note = Target: SCN10A; (+) strand; PAM type: YTN; PAM sequence: CTT
  source 1..20: mol_type = other DNA
tctctcgctttttctatctt

SEQ ID NO: 64724 - DNA, 20 bp, synthetic construct
  misc_feature 1..20: note = Description of Artificial Sequence: Synthetic oligonucleotide
  misc_feature 1..20: note = Target: SCN10A; (+) strand; PAM type: YTN; PAM sequence: TTT
  source 1..20: mol_type = other DNA
ctctcgctttttctatcttt

SEQ ID NO: 64725 - DNA, 20 bp, synthetic construct
  misc_feature 1..20: note = Description of Artificial Sequence: Synthetic oligonucleotide
  misc_feature 1..20: note = Target: SCN10A; (+) strand; PAM type: YTN; PAM sequence: TTC
  source 1..20: mol_type = other DNA
tctcgctttttctatcttta

SEQ ID NO: 64726 - DNA, 20 bp, synthetic construct
  misc_feature 1..20: note = Description of Artificial Sequence: Synthetic oligonucleotide
  misc_feature 1..20: note = Target: SCN10A; (+) strand; PAM type: YTN; PAM sequence: CTC
  source 1..20: mol_type = other DNA
tcgctttttctatctttatt

SEQ ID NO: 64727 - DNA, 20 bp, synthetic construct
  misc_feature 1..20: note = Description of Artificial Sequence: Synthetic oligonucleotide
  misc_feature 1..20: note = Target: SCN10A; (+) strand; PAM type: YTN; PAM sequence: CTC
  source 1..20: mol_type = other DNA
gctttttctatctttattcc

SEQ ID NO: 64728 - DNA, 20 bp, synthetic construct
  misc_feature 1..20: note = Description of Artificial Sequence: Synthetic oligonucleotide
  misc_feature 1..20: note = Target: SCN10A; (+) strand; PAM type: YTN; PAM sequence: CTT
  source 1..20: mol_type = other DNA
tttctatctttattcctctc

SEQ ID NO: 64729 - DNA, 20 bp, synthetic construct
  misc_feature 1..20: note = Description of Artificial Sequence: Synthetic oligonucleotide
  misc_feature 1..20: note = Target: SCN10A; (+) strand; PAM type: YTN; PAM sequence: TTT
  source 1..20: mol_type = other DNA
ttctatctttattcctctct

SEQ ID NO: 64730 - DNA, 20 bp, synthetic construct
  misc_feature 1..20: note = Description of Artificial Sequence: Synthetic oligonucleotide
  misc_feature 1..20: note = Target: SCN10A; (+) strand; PAM type: YTN; PAM sequence: TTT
  source 1..20: mol_type = other DNA
tctatctttattcctctctc

SEQ ID NO: 64731 - DNA, 20 bp, synthetic construct
  misc_feature 1..20: note = Description of Artificial Sequence: Synthetic oligonucleotide
  misc_feature 1..20: note = Target: SCN10A; (+) strand; PAM type: YTN; PAM sequence: TTT
  source 1..20: mol_type = other DNA
ctatctttattcctctctct

SEQ ID NO: 64732 - DNA, 20 bp, synthetic construct
  misc_feature 1..20: note = Description of Artificial Sequence: Synthetic oligonucleotide
  misc_feature 1..20: note = Target: SCN10A; (+) strand; PAM type: YTN; PAM sequence: TTC
  source 1..20: mol_type = other DNA
tatctttattcctctctctc

SEQ ID NO: 64733 - DNA, 20 bp, synthetic construct
  misc_feature 1..20: note = Description of Artificial Sequence: Synthetic oligonucleotide
  misc_feature 1..20: note = Target: SCN10A; (+) strand; PAM type: YTN; PAM sequence: CTA
  source 1..20: mol_type = other DNA
tctttattcctctctctctg

SEQ ID NO: 64734 - DNA, 20 bp, synthetic construct
  misc_feature 1..20: note = Description of Artificial Sequence: Synthetic oligonucleotide
  misc_feature 1..20: note = Target: SCN10A; (+) strand; PAM type: YTN; PAM sequence: CTT
  source 1..20: mol_type = other DNA
tattcctctctctctgtgtc

SEQ ID NO: 64735 - DNA, 20 bp, synthetic construct
  misc_feature 1..20: note = Description of Artificial Sequence: Synthetic oligonucleotide
  misc_feature 1..20: note = Target: SCN10A; (+) strand; PAM type: YTN; PAM sequence: TTT
  source 1..20: mol_type = other DNA
attcctctctctctgtgtct

SEQ ID NO: 64736 - DNA, 20 bp, synthetic construct
  misc_feature 1..20: note = Description of Artificial Sequence: Synthetic oligonucleotide
  misc_feature 1..20: note = Target: SCN10A; (+) strand; PAM type: YTN; PAM sequence: TTA
  source 1..20: mol_type = other DNA
ttcctctctctctgtgtctc

SEQ ID NO: 64737 - DNA, 20 bp, synthetic construct
  misc_feature 1..20: note = Description of Artificial Sequence: Synthetic oligonucleotide
  misc_feature 1..20: note = Target: SCN10A; (+) strand; PAM type: YTN; PAM sequence: TTC
  source 1..20: mol_type = other DNA
ctctctctctgtgtctcctt

SEQ ID NO: 64738 - DNA, 20 bp, synthetic construct
  misc_feature 1..20: note = Description of Artificial Sequence: Synthetic oligonucleotide
  misc_feature 1..20: note = Target: SCN10A; (+) strand; PAM type: YTN; PAM sequence: CTC
  source 1..20: mol_type = other DNA
tctctctgtgtctcctttct

SEQ ID NO: 64739 - DNA, 20 bp, synthetic construct
  misc_feature 1..20: note = Description of Artificial Sequence: Synthetic oligonucleotide
  misc_feature 1..20: note = Target: SCN10A; (+) strand; PAM type: YTN; PAM sequence: CTC
  source 1..20: mol_type = other DNA
tctctgtgtctcctttcttt

SEQ ID NO: 64740 - DNA, 20 bp, synthetic construct
  misc_feature 1..20: note = Description of Artificial Sequence: Synthetic oligonucleotide
  misc_feature 1..20: note = Target: SCN10A; (+) strand; PAM type: YTN; PAM sequence: CTC
  source 1..20: mol_type = other DNA
tctgtgtctcctttcttttt

SEQ ID NO: 64741 - DNA, 20 bp, synthetic construct
  misc_feature 1..20: note = Description of Artificial Sequence: Synthetic oligonucleotide
  misc_feature 1..20: note = Target: SCN10A; (+) strand; PAM type: YTN; PAM sequence: CTC
  source 1..20: mol_type = other DNA
tgtgtctcctttcttttttg

SEQ ID NO: 64742 - DNA, 20 bp, synthetic construct
  misc_feature 1..20: note = Description of Artificial Sequence: Synthetic oligonucleotide
  misc_feature 1..20: note = Target: SCN10A; (+) strand; PAM type: YTN; PAM sequence: CTG
  source 1..20: mol_type = other DNA
tgtctcctttcttttttgag

SEQ ID NO: 64743 - DNA, 20 bp, synthetic construct
  misc_feature 1..20: note = Description of Artificial Sequence: Synthetic oligonucleotide
  misc_feature 1..20: note = Target: SCN10A; (+) strand; PAM type: YTN; PAM sequence: CTC
  source 1..20: mol_type = other DNA
ctttcttttttgagacaggt

SEQ ID NO: 64744 - DNA, 20 bp, synthetic construct
  misc_feature 1..20: note = Description of Artificial Sequence: Synthetic oligonucleotide
  misc_feature 1..20: note = Target: SCN10A; (+) strand; PAM type: YTN; PAM sequence: CTT
  source 1..20: mol_type = other DNA
tcttttttgagacaggttct

SEQ ID NO: 64745 - DNA, 20 bp, synthetic construct
  misc_feature 1..20: note = Description of Artificial Sequence: Synthetic oligonucleotide
  misc_feature 1..20: note = Target: SCN10A; (+) strand; PAM type: YTN; PAM sequence: TTT
  source 1..20: mol_type = other DNA
cttttttgagacaggttctt

SEQ ID NO: 64746 - DNA, 20 bp, synthetic construct
  misc_feature 1..20: note = Description of Artificial Sequence: Synthetic oligonucleotide
  misc_feature 1..20: note = Target: SCN10A; (+) strand; PAM type: YTN; PAM sequence: TTC
  source 1..20: mol_type = other DNA
ttttttgagacaggttctta

SEQ ID NO: 64747 - DNA, 20 bp, synthetic construct
  misc_feature 1..20: note = Description of Artificial Sequence: Synthetic oligonucleotide
  misc_feature 1..20: note = Target: SCN10A; (+) strand; PAM type: YTN; PAM sequence: CTT
  source 1..20: mol_type = other DNA
ttttgagacaggttcttact

SEQ ID NO: 64748 - DNA, 20 bp, synthetic construct
  misc_feature 1..20: note = Description of Artificial Sequence: Synthetic oligonucleotide
  misc_feature 1..20: note = Target: SCN10A; (+) strand; PAM type: YTN; PAM sequence: TTT
  source 1..20: mol_type = other DNA
tttgagacaggttcttactc

SEQ ID NO: 64749 - DNA, 20 bp, synthetic construct
  misc_feature 1..20: note = Description of Artificial Sequence: Synthetic oligonucleotide
  misc_feature 1..20: note = Target: SCN10A; (+) strand; PAM type: YTN; PAM sequence: TTT
  source 1..20: mol_type = other DNA
ttgagacaggttcttactct

SEQ ID NO: 64750 - DNA, 20 bp, synthetic construct
  misc_feature 1..20: note = Description of Artificial Sequence: Synthetic oligonucleotide
  misc_feature 1..20: note = Target: SCN10A; (+) strand; PAM type: YTN; PAM sequence: TTT
  source 1..20: mol_type = other DNA
tgagacaggttcttactctg

SEQ ID NO: 64751 - DNA, 20 bp, synthetic construct
  misc_feature 1..20: note = Description of Artificial Sequence: Synthetic oligonucleotide
  misc_feature 1..20: note = Target: SCN10A; (+) strand; PAM type: YTN; PAM sequence: TTT
  source 1..20: mol_type = other DNA
gagacaggttcttactctgt

SEQ ID NO: 64752 - DNA, 20 bp, synthetic construct
  misc_feature 1..20: note = Description of Artificial Sequence: Synthetic oligonucleotide
  misc_feature 1..20: note = Target: SCN10A; (+) strand; PAM type: YTN; PAM sequence: TTG
  source 1..20: mol_type = other DNA
agacaggttcttactctgtc

SEQ ID NO: 64753 - DNA, 20 bp, synthetic construct
  misc_feature 1..20: note = Description of Artificial Sequence: Synthetic oligonucleotide
  misc_feature 1..20: note = Target: SCN10A; (+) strand; PAM type: YTN; PAM sequence: TTC
  source 1..20: mol_type = other DNA
ttactctgtctcccaggctg

SEQ ID NO: 64754 - DNA, 20 bp, synthetic construct
  misc_feature 1..20: note = Description of Artificial Sequence: Synthetic oligonucleotide
  misc_feature 1..20: note = Target: SCN10A; (+) strand; PAM type: YTN; PAM sequence: CTT
  source 1..20: mol_type = other DNA
actctgtctcccaggctgga

SEQ ID NO: 64755 - DNA, 20 bp, synthetic construct
  misc_feature 1..20: note = Description of Artificial Sequence: Synthetic oligonucleotide
  misc_feature 1..20: note = Target: SCN10A; (+) strand; PAM type: YTN; PAM sequence: TTA
  source 1..20: mol_type = other DNA
ctctgtctcccaggctggag

SEQ ID NO: 64756 - DNA, 20 bp, synthetic construct
  misc_feature 1..20: note = Description of Artificial Sequence: Synthetic oligonucleotide
  misc_feature 1..20: note = Target: SCN10A; (+) strand; PAM type: YTN; PAM sequence: CTC
  source 1..20: mol_type = other DNA
tgtctcccaggctggagtgc

SEQ ID NO: 64757 - DNA, 20 bp, synthetic construct
  misc_feature 1..20: note = Description of Artificial Sequence: Synthetic oligonucleotide
  misc_feature 1..20: note = Target: SCN10A; (+) strand; PAM type: YTN; PAM sequence: CTG
  source 1..20: mol_type = other DNA
tctcccaggctggagtgcag

SEQ ID NO: 64758 - DNA, 20 bp, synthetic construct
  misc_feature 1..20: note = Description of Artificial Sequence: Synthetic oligonucleotide
  misc_feature 1..20: note = Target: SCN10A; (+) strand; PAM type: YTN; PAM sequence: CTC
  source 1..20: mol_type = other DNA
ccaggctggagtgcagtggc

SEQ ID NO: 64759 - DNA, 20 bp, synthetic construct
  misc_feature 1..20: note = Description of Artificial Sequence: Synthetic oligonucleotide
  misc_feature 1..20: note = Target: SCN10A; (+) strand; PAM type: YTN; PAM sequence: CTG
  source 1..20: mol_type = other DNA
gagtgcagtggcacgatcat

SEQ ID NO: 64760 - DNA, 20 bp, synthetic construct
  misc_feature 1..20: note = Description of Artificial Sequence: Synthetic oligonucleotide
  misc_feature 1..20: note = Target: SCN10A; (+) strand; PAM type: YTN; PAM sequence: CTG
  source 1..20: mol_type = other DNA
cagcctccacctccctggtc

SEQ ID NO: 64761 - DNA, 20 bp, synthetic construct
  misc_feature 1..20: note = Description of Artificial Sequence: Synthetic oligonucleotide
  misc_feature 1..20: note = Target: SCN10A; (+) strand; PAM type: YTN; PAM sequence: CTC
  source 1..20: mol_type = other DNA
cacctccctggtctcaggtg

SEQ ID NO: 64762 - DNA, 20 bp, synthetic construct
  misc_feature 1..20: note = Description of Artificial Sequence: Synthetic oligonucleotide
  misc_feature 1..20: note = Target: SCN10A; (+) strand; PAM type: YTN; PAM sequence: CTC
  source 1..20: mol_type = other DNA
cctggtctcaggtgatcctc

SEQ ID NO: 64763 - DNA, 20 bp, synthetic construct
  misc_feature 1..20: note = Description of Artificial Sequence: Synthetic oligonucleotide
  misc_feature 1..20: note = Target: SCN10A; (+) strand; PAM type: YTN; PAM sequence: CTG
  source 1..20: mol_type = other DNA
gtctcaggtgatcctcccac

SEQ ID NO: 64764 - DNA, 20 bp, synthetic construct
  misc_feature 1..20: note = Description of Artificial Sequence: Synthetic oligonucleotide
  misc_feature 1..20: note = Target: SCN10A; (+) strand; PAM type: YTN; PAM sequence: CTC
  source 1..20: mol_type = other DNA
aggtgatcctcccacctcag

SEQ ID NO: 64765 - DNA, 20 bp, synthetic construct
  misc_feature 1..20: note = Description of Artificial Sequence: Synthetic oligonucleotide
  misc_feature 1..20: note = Target: SCN10A; (+) strand; PAM type: YTN; PAM sequence: CTC
  source 1..20: mol_type = other DNA
ccacctcagtcttctgagta

SEQ ID NO: 64766 - DNA, 20 bp, synthetic construct
  misc_feature 1..20: note = Description of Artificial Sequence: Synthetic oligonucleotide
  misc_feature 1..20: note = Target: SCN10A; (+) strand; PAM type: YTN; PAM sequence: CTC
  source 1..20: mol_type = other DNA
agtcttctgagtagctagga

SEQ ID NO: 64767 - DNA, 20 bp, synthetic construct
  misc_feature 1..20: note = Description of Artificial Sequence: Synthetic oligonucleotide
  misc_feature 1..20: note = Target: SCN10A; (+) strand; PAM type: YTN; PAM sequence: CTT
  source 1..20: mol_type = other DNA
ctgagtagctaggataacag

SEQ ID NO: 64768 - DNA, 20 bp, synthetic construct
  misc_feature 1..20: note = Description of Artificial Sequence: Synthetic oligonucleotide
  misc_feature 1..20: note = Target: SCN10A; (+) strand; PAM type: YTN; PAM sequence: TTC
  source 1..20: mol_type = other DNA
tgagtagctaggataacaga

SEQ ID NO: 64769 - DNA, 20 bp, synthetic construct
  misc_feature 1..20: note = Description of Artificial Sequence: Synthetic oligonucleotide
  misc_feature 1..20: note = Target: SCN10A; (+) strand; PAM type: YTN; PAM sequence: CTG
  source 1..20: mol_type = other DNA
agtagctaggataacagatg

SEQ ID NO: 64770 - DNA, 20 bp, synthetic construct
  misc_feature 1..20: note = Description of Artificial Sequence: Synthetic oligonucleotide
  misc_feature 1..20: note = Target: SCN10A; (+) strand; PAM type: YTN; PAM sequence: CTA
  source 1..20: mol_type = other DNA
ggataacagatgtgcaccac

SEQ ID NO: 64771 - DNA, 20 bp, synthetic construct
  misc_feature 1..20: note = Description of Artificial Sequence: Synthetic oligonucleotide
  misc_feature 1..20: note = Target: SCN10A; (+) strand; PAM type: YTN; PAM sequence: CTG
  source 1..20: mol_type = other DNA
gctaattttttcattttttg

SEQ ID NO: 64772 - DNA, 20 bp, synthetic construct
  misc_feature 1..20: note = Description of Artificial Sequence: Synthetic oligonucleotide
  misc_feature 1..20: note = Target: SCN10A; (+) strand; PAM type: YTN; PAM sequence: CTA
  source 1..20: mol_type = other DNA
attttttcattttttgtaga

SEQ ID NO: 64773 - DNA, 20 bp, synthetic construct
  misc_feature 1..20: note = Description of Artificial Sequence: Synthetic oligonucleotide
  misc_feature 1..20: note = Target: SCN10A; (+) strand; PAM type: YTN; PAM sequence: TTT
  source 1..20: mol_type = other DNA
tttcattttttgtagagacg

SEQ ID NO: 64774 - DNA, 20 bp, synthetic construct
  misc_feature 1..20: note = Description of Artificial Sequence: Synthetic oligonucleotide
  misc_feature 1..20: note = Target: SCN10A; (+) strand; PAM type: YTN; PAM sequence: TTT
  source 1..20: mol_type = other DNA
ttcattttttgtagagacgg

SEQ ID NO: 64775 - DNA, 20 bp, synthetic construct
  misc_feature 1..20: note = Description of Artificial Sequence: Synthetic oligonucleotide
  misc_feature 1..20: note = Target: SCN10A; (+) strand; PAM type: YTN; PAM sequence: TTT
  source 1..20: mol_type = other DNA
tcattttttgtagagacggg

SEQ ID NO: 64776 - DNA, 20 bp, synthetic construct
  misc_feature 1..20: note = Description of Artificial Sequence: Synthetic oligonucleotide
  misc_feature 1..20: note = Target: SCN10A; (+) strand; PAM type: YTN; PAM sequence: TTT
  source 1..20: mol_type = other DNA
cattttttgtagagacgggg

SEQ ID NO: 64777 - DNA, 20 bp, synthetic construct
  misc_feature 1..20: note = Description of Artificial Sequence: Synthetic oligonucleotide
  misc_feature 1..20: note = Target: SCN10A; (+) strand; PAM type: YTN; PAM sequence: TTC
  source 1..20: mol_type = other DNA
attttttgtagagacggggt

SEQ ID NO: 64778 - DNA, 20 bp, synthetic construct
  misc_feature 1..20: note = Description of Artificial Sequence: Synthetic oligonucleotide
  misc_feature 1..20: note = Target: SCN10A; (+) strand; PAM type: YTN; PAM sequence: TTT
  source 1..20: mol_type = other DNA
tttgtagagacggggtttca

SEQ ID NO: 64779 - DNA, 20 bp, synthetic construct
  misc_feature 1..20: note = Description of Artificial Sequence: Synthetic oligonucleotide
  misc_feature 1..20: note = Target: SCN10A; (+) strand; PAM type: YTN; PAM sequence: TTT
  source 1..20: mol_type = other DNA
ttgtagagacggggtttcac

SEQ ID NO: 64780 - DNA, 20 bp, synthetic construct
  misc_feature 1..20: note = Description of Artificial Sequence: Synthetic oligonucleotide
  misc_feature 1..20: note = Target: SCN10A; (+) strand; PAM type: YTN; PAM sequence: TTT
  source 1..20: mol_type = other DNA
tgtagagacggggtttcacc

SEQ ID NO: 64781 - DNA, 20 bp, synthetic construct
  misc_feature 1..20: note = Description of Artificial Sequence: Synthetic oligonucleotide
  misc_feature 1..20: note = Target: SCN10A; (+) strand; PAM type: YTN; PAM sequence: TTT
  source 1..20: mol_type = other DNA
gtagagacggggtttcacca

SEQ ID NO: 64782 - DNA, 20 bp, synthetic construct
  misc_feature 1..20: note = Description of Artificial Sequence: Synthetic oligonucleotide
  misc_feature 1..20: note = Target: SCN10A; (+) strand; PAM type: YTN; PAM sequence: TTG
  source 1..20: mol_type = other DNA
tagagacggggtttcaccat

SEQ ID NO: 64783 - DNA, 20 bp, synthetic construct
  misc_feature 1..20: note = Description of Artificial Sequence: Synthetic oligonucleotide
  misc_feature 1..20: note = Target: SCN10A; (+) strand; PAM type: YTN; PAM sequence: TTT
  source 1..20: mol_type = other DNA
caccatgttgcccttgaact

SEQ ID NO: 64784 - DNA, 20 bp, synthetic construct
  misc_feature 1..20: note = Description of Artificial Sequence: Synthetic oligonucleotide
  misc_feature 1..20: note = Target: SCN10A; (+) strand; PAM type: YTN; PAM sequence: TTC
  source 1..20: mol_type = other DNA
accatgttgcccttgaactc

SEQ ID NO: 64785 - DNA, 20 bp, synthetic construct
  misc_feature 1..20: note = Description of Artificial Sequence: Synthetic oligonucleotide
  misc_feature 1..20: note = Target: SCN10A; (+) strand; PAM type: YTN; PAM sequence: TTG
  source 1..20: mol_type = other DNA
cccttgaactcctgggctca

SEQ ID NO: 64786 - DNA, 20 bp, synthetic construct
  misc_feature 1..20: note = Description of Artificial Sequence: Synthetic oligonucleotide
  misc_feature 1..20: note = Target: SCN10A; (+) strand; PAM type: YTN; PAM sequence: CTT
  source 1..20: mol_type = other DNA
gaactcctgggctcaagcga

SEQ ID NO: 64787 - DNA, 20 bp, synthetic construct
  misc_feature 1..20: note = Description of Artificial Sequence: Synthetic oligonucleotide
  misc_feature 1..20: note = Target: SCN10A; (+) strand; PAM type: YTN; PAM sequence: TTG
  source 1..20: mol_type = other DNA
aactcctgggctcaagcgat

SEQ ID NO: 64788 - DNA, 20 bp, synthetic construct
  misc_feature 1..20: note = Description of Artificial Sequence: Synthetic oligonucleotide
  misc_feature 1..20: note = Target: SCN10A; (+) strand; PAM type: YTN; PAM sequence: CTC
  source 1..20: mol_type = other DNA
ctgggctcaagcgatctgcc

SEQ ID NO: 64789 - DNA, 20 bp, synthetic construct
  misc_feature 1..20: note = Description of Artificial Sequence: Synthetic oligonucleotide
  misc_feature 1..20: note = Target: SCN10A; (+) strand; PAM type: YTN; PAM sequence: CTG
  source 1..20: mol_type = other DNA
ggctcaagcgatctgcctgc

SEQ ID NO: 64790 - DNA, 20 bp, synthetic construct
  misc_feature 1..20: note = Description of Artificial Sequence: Synthetic oligonucleotide
  misc_feature 1..20: note = Target: SCN10A; (+) strand; PAM type: YTN; PAM sequence: CTC
  source 1..20: mol_type = other DNA
aagcgatctgcctgcctcgg

SEQ ID NO: 64791 - DNA, 20 bp, synthetic construct
  misc_feature 1..20: note = Description of Artificial Sequence: Synthetic oligonucleotide
  misc_feature 1..20: note = Target: SCN10A; (+) strand; PAM type: YTN; PAM sequence: CTG
  source 1..20: mol_type = other DNA
cctgcctcggcctcccaaag

SEQ ID NO: 64792 - DNA, 20 bp, synthetic construct
  misc_feature 1..20: note = Description of Artificial Sequence: Synthetic oligonucleotide
  misc_feature 1..20: note = Target: SCN10A; (+) strand; PAM type: YTN; PAM sequence: CTG
  source 1..20: mol_type = other DNA
cctcggcctcccaaagtact

SEQ ID NO: 64793 - DNA, 20 bp, synthetic construct
  misc_feature 1..20: note = Description of Artificial Sequence: Synthetic oligonucleotide
  misc_feature 1..20: note = Target: SCN10A; (+) strand; PAM type: YTN; PAM sequence: CTC
  source 1..20: mol_type = other DNA
ggcctcccaaagtactagga

SEQ ID NO: 64794 - DNA, 20 bp, synthetic construct
  misc_feature 1..20: note = Description of Artificial Sequence: Synthetic oligonucleotide
  misc_feature 1..20: note = Target: SCN10A; (+) strand; PAM type: YTN; PAM sequence: CTC
  source 1..20: mol_type = other DNA
ccaaagtactaggattacag

SEQ ID NO: 64795 - DNA, 20 bp, synthetic construct
  misc_feature 1..20: note = Description of Artificial Sequence: Synthetic oligonucleotide
  misc_feature 1..20: note = Target: SCN10A; (+) strand; PAM type: YTN; PAM sequence: CTA
  source 1..20: mol_type = other DNA
ggattacaggtgtgagccac

SEQ ID NO: 64796 - DNA, 20 bp, synthetic construct
  misc_feature 1..20: note = Description of Artificial Sequence: Synthetic oligonucleotide
  misc_feature 1..20: note = Target: SCN10A; (+) strand; PAM type: YTN; PAM sequence: TTA
  source 1..20: mol_type = other DNA
caggtgtgagccactgcacc

SEQ ID NO: 64797 - DNA, 20 bp, synthetic construct
  misc_feature 1..20: note = Description of Artificial Sequence: Synthetic oligonucleotide
  misc_feature 1..20: note = Target: SCN10A; (+) strand; PAM type: YTN; PAM sequence: CTG
  source 1..20: mol_type = other DNA
cacctggcctgagatggtca

SEQ ID NO: 64798 - DNA, 20 bp, synthetic construct
  misc_feature 1..20: note = Description of Artificial Sequence: Synthetic oligonucleotide
  misc_feature 1..20: note = Target: SCN10A; (+) strand; PAM type: YTN; PAM sequence: CTG
  source 1..20: mol_type = other DNA
gcctgagatggtcacattga

SEQ ID NO: 64799 - DNA, 20 bp, synthetic construct
  misc_feature 1..20: note = Description of Artificial Sequence: Synthetic oligonucleotide
  misc_feature 1..20: note = Target: SCN10A; (+) strand; PAM type: YTN; PAM sequence: CTG
  source 1..20: mol_type = other DNA
agatggtcacattgatttct

SEQ ID NO: 64800 - DNA, 20 bp, synthetic construct
  misc_feature 1..20: note = Description of Artificial Sequence: Synthetic oligonucleotide
  misc_feature 1..20: note = Target: SCN10A; (+) strand; PAM type: YTN; PAM sequence: TTG
  source 1..20: mol_type = other DNA
atttctatgtaaacatccct

SEQ ID NO: 64801 - DNA, 20 bp, synthetic construct
  misc_feature 1..20: note = Description of Artificial Sequence: Synthetic oligonucleotide
  misc_feature 1..20: note = Target: SCN10A; (+) strand; PAM type: YTN; PAM sequence: TTT
  source 1..20: mol_type = other DNA
ctatgtaaacatccctccca

SEQ ID NO: 64802 - DNA, 20 bp, synthetic construct
  misc_feature 1..20: note = Description of Artificial Sequence: Synthetic oligonucleotide
  misc_feature 1..20: note = Target: SCN10A; (+) strand; PAM type: YTN; PAM sequence: TTC
  source 1..20: mol_type = other DNA
tatgtaaacatccctcccag

SEQ ID NO: 64803 - DNA, 20 bp, synthetic construct
  misc_feature 1..20: note = Description of Artificial Sequence: Synthetic oligonucleotide
  misc_feature 1..20: note = Target: SCN10A; (+) strand; PAM type: YTN; PAM sequence: CTA
  source 1..20: mol_type = other DNA
tgtaaacatccctcccagga

SEQ ID NO: 64804 - DNA, 20 bp, synthetic construct
  misc_feature 1..20: note = Description of Artificial Sequence: Synthetic oligonucleotide
  misc_feature 1..20: note = Target: SCN10A; (+) strand; PAM type: YTN; PAM sequence: CTC
  source 1..20: mol_type = other DNA
ccaggagttgtgcactgctt

SEQ ID NO: 64805 - DNA, 20 bp, synthetic construct
  misc_feature 1..20: note = Description of Artificial Sequence: Synthetic oligonucleotide
  misc_feature 1..20: note = Target: SCN10A; (+) strand; PAM type: YTN; PAM sequence: TTG
  source 1..20: mol_type = other DNA
tgcactgctttgggtctgcc

SEQ ID NO: 64806 - DNA, 20 bp, synthetic construct
  misc_feature 1..20: note = Description of Artificial Sequence: Synthetic oligonucleotide
  misc_feature 1..20: note = Target: SCN10A; (+) strand; PAM type: YTN; PAM sequence: CTG
  source 1..20: mol_type = other DNA
ctttgggtctgcctaggtga

SEQ ID NO: 64807 - DNA, 20 bp, synthetic construct
  misc_feature 1..20: note = Description of Artificial Sequence: Synthetic oligonucleotide
  misc_feature 1..20: note = Target: SCN10A; (+) strand; PAM type: YTN; PAM sequence: CTT
  source 1..20: mol_type = other DNA
tgggtctgcctaggtgaaat

SEQ ID NO: 64808 - DNA, 20 bp, synthetic construct
  misc_feature 1..20: note = Description of Artificial Sequence: Synthetic oligonucleotide
  misc_feature 1..20: note = Target: SCN10A; (+) strand; PAM type: YTN; PAM sequence: TTT
  source 1..20: mol_type = other DNA
gggtctgcctaggtgaaatg

SEQ ID NO: 64809 - DNA, 20 bp, synthetic construct
  misc_feature 1..20: note = Description of Artificial Sequence: Synthetic oligonucleotide
  misc_feature 1..20: note = Target: SCN10A; (+) strand; PAM type: YTN; PAM sequence: TTG
  source 1..20: mol_type = other DNA
ggtctgcctaggtgaaatgg

SEQ ID NO: 64810 - DNA, 20 bp, synthetic construct
  misc_feature 1..20: note = Description of Artificial Sequence: Synthetic oligonucleotide
  misc_feature 1..20: note = Target: SCN10A; (+) strand; PAM type: YTN; PAM sequence: CTG
  source 1..20: mol_type = other DNA
cctaggtgaaatggagtcat

SEQ ID NO: 64811 - DNA, 20 bp, synthetic construct
  misc_feature 1..20: note = Description of Artificial Sequence: Synthetic oligonucleotide
  misc_feature 1..20: note = Target: SCN10A; (+) strand; PAM type: YTN; PAM sequence: CTA
  source 1..20: mol_type = other DNA
ggtgaaatggagtcatcttt

SEQ ID NO: 64812 - DNA, 20 bp, synthetic construct
  misc_feature 1..20: note = Description of Artificial Sequence: Synthetic oligonucleotide
  misc_feature 1..20: note = Target: SCN10A; (+) strand; PAM type: YTN; PAM sequence: CTT
  source 1..20: mol_type = other DNA
tgcctgtctacctgaggcaa

SEQ ID NO: 64813 - DNA, 20 bp, synthetic construct
  misc_feature 1..20: note = Description of Artificial Sequence: Synthetic oligonucleotide
  misc_feature 1..20: note = Target: SCN10A; (+) strand; PAM type: YTN; PAM sequence: TTT
  source 1..20: mol_type = other DNA
gcctgtctacctgaggcaaa

SEQ ID NO: 64814 - DNA, 20 bp, synthetic construct
  misc_feature 1..20: note = Description of Artificial Sequence: Synthetic oligonucleotide
  misc_feature 1..20: note = Target: SCN10A; (+) strand; PAM type: YTN; PAM sequence: TTG
  source 1..20: mol_type = other DNA
cctgtctacctgaggcaaat

SEQ ID NO: 64815 - DNA, 20 bp, synthetic construct
  misc_feature 1..20: note = Description of Artificial Sequence: Synthetic oligonucleotide
  misc_feature 1..20: note = Target: SCN10A; (+) strand; PAM type: YTN; PAM sequence: CTG
  source 1..20: mol_type = other DNA
tctacctgaggcaaatatcc

SEQ ID NO: 64816 - DNA, 20 bp, synthetic construct
  misc_feature 1..20: note = Description of Artificial Sequence: Synthetic oligonucleotide
  misc_feature 1..20: note = Target: SCN10A; (+) strand; PAM type: YTN; PAM sequence: CTA
  source 1..20: mol_type = other DNA
cctgaggcaaatatccagtg

SEQ ID NO: 64817 - DNA, 20 bp, synthetic construct
  misc_feature 1..20: note = Description of Artificial Sequence: Synthetic oligonucleotide
  misc_feature 1..20: note = Target: SCN10A; (+) strand; PAM type: YTN; PAM sequence: CTG
  source 1..20: mol_type = other DNA
aggcaaatatccagtgccca

SEQ ID NO: 64818 - DNA, 20 bp, synthetic construct
  misc_feature 1..20: note = Description of Artificial Sequence: Synthetic oligonucleotide
  misc_feature 1..20: note = Target: SCN10A; (+) strand; PAM type: YTN; PAM sequence: CTC
  source 1..20: mol_type = other DNA
ttccatggctggctctatgt

SEQ ID NO: 64819 - DNA, 20 bp, synthetic construct
  misc_feature 1..20: note = Description of Artificial Sequence: Synthetic oligonucleotide
  misc_feature 1..20: note = Target: SCN10A; (+) strand; PAM type: YTN; PAM sequence: CTT
  source 1..20: mol_type = other DNA
ccatggctggctctatgtca

SEQ ID NO: 64820 - DNA, 20 bp, synthetic construct
  misc_feature 1..20: note = Description of Artificial Sequence: Synthetic oligonucleotide
  misc_feature 1..20: note = Target: SCN10A; (+) strand; PAM type: YTN; PAM sequence: TTC
  source 1..20: mol_type = other DNA
catggctggctctatgtcac

SEQ ID NO: 64821 - DNA, 20 bp, synthetic construct
  misc_feature 1..20: note = Description of Artificial Sequence: Synthetic oligonucleotide
  misc_feature 1..20: note = Target: SCN10A; (+) strand; PAM type: YTN; PAM sequence: CTG
  source 1..20: mol_type = other DNA
gctctatgtcactgcacatg

SEQ ID NO: 64822 - DNA, 20 bp, synthetic construct
  misc_feature 1..20: note = Description of Artificial Sequence: Synthetic oligonucleotide
  misc_feature 1..20: note = Target: SCN10A; (+) strand; PAM type: YTN; PAM sequence: CTC
  source 1..20: mol_type = other DNA
tatgtcactgcacatgggca

SEQ ID NO: 64823 - DNA, 20 bp, synthetic construct
  misc_feature 1..20: note = Description of Artificial Sequence: Synthetic oligonucleotide
  misc_feature 1..20: note = Target: SCN10A; (+) strand; PAM type: YTN; PAM sequence: CTA
  source 1..20: mol_type = other DNA
tgtcactgcacatgggcatt

SEQ ID NO: 64824 - DNA, 20 bp, synthetic construct
  misc_feature 1..20: note = Description of Artificial Sequence: Synthetic oligonucleotide
  misc_feature 1..20: note = Target: SCN10A; (+) strand; PAM type: YTN; PAM sequence: CTG
  source 1..20: mol_type = other DNA
cacatgggcatttgagtttg

SEQ ID NO: 64825 - DNA, 20 bp, synthetic construct
  misc_feature 1..20: note = Description of Artificial Sequence: Synthetic oligonucleotide
  misc_feature 1..20: note = Target: SCN10A; (+) strand; PAM type: YTN; PAM sequence: TTT
  source 1..20: mol_type = other DNA
gagtttgccacccctaatcc

SEQ ID NO: 64826 - DNA, 20 bp, synthetic construct
  misc_feature 1..20: note = Description of Artificial Sequence: Synthetic oligonucleotide
  misc_feature 1..20: note = Target: SCN10A; (+) strand; PAM type: YTN; PAM sequence: TTG
  source 1..20: mol_type = other DNA
agtttgccacccctaatcca

SEQ ID NO: 64827 - DNA, 20 bp, synthetic construct
  misc_feature 1..20: note = Description of Artificial Sequence: Synthetic oligonucleotide
  misc_feature 1..20: note = Target: SCN10A; (+) strand; PAM type: YTN; PAM sequence: TTT
  source 1..20: mol_type = other DNA
gccacccctaatccaggtac

SEQ ID NO: 64828 - DNA, 20 bp, synthetic construct
  misc_feature 1..20: note = Description of Artificial Sequence: Synthetic oligonucleotide
  misc_feature 1..20: note = Target: SCN10A; (+) strand; PAM type: YTN; PAM sequence: TTG
  source 1..20: mol_type = other DNA
ccacccctaatccaggtacg

SEQ ID NO: 64829 - DNA, 20 bp, synthetic construct
  misc_feature 1..20: note = Description of Artificial Sequence: Synthetic oligonucleotide
  misc_feature 1..20: note = Target: SCN10A; (+) strand; PAM type: YTN; PAM sequence: CTA
  source 1..20: mol_type = other DNA
atccaggtacgccaagttca

SEQ ID NO: 64830 - DNA, 20 bp, synthetic construct
  misc_feature 1..20: note = Description of Artificial Sequence: Synthetic oligonucleotide
  misc_feature 1..20: note = Target: SCN10A; (+) strand; PAM type: YTN; PAM sequence: TTC
  source 1..20: mol_type = other DNA
aggggctcagcactgtctca

SEQ ID NO: 64831 - DNA, 20 bp, synthetic construct
  misc_feature 1..20: note = Description of Artificial Sequence: Synthetic oligonucleotide
  misc_feature 1..20: note = Target: SCN10A; (+) strand; PAM type: YTN; PAM sequence: CTC
  source 1..20: mol_type = other DNA
agcactgtctcactggcccc

SEQ ID NO: 64832 - DNA, 20 bp, synthetic construct
  misc_feature 1..20: note = Description of Artificial Sequence: Synthetic oligonucleotide
  misc_feature 1..20: note = Target: SCN10A; (+) strand; PAM type: YTN; PAM sequence: CTG
  source 1..20: mol_type = other DNA
tctcactggcccctgtgata

SEQ ID NO: 64833 - DNA, 20 bp, synthetic construct
  misc_feature 1..20: note = Description of Artificial Sequence: Synthetic oligonucleotide
  misc_feature 1..20: note = Target: SCN10A; (+) strand; PAM type: YTN; PAM sequence: CTC
  source 1..20: mol_type = other DNA
actggcccctgtgatagggt

SEQ ID NO: 64834 - DNA, 20 bp, synthetic construct
  misc_feature 1..20: note = Description of Artificial Sequence: Synthetic oligonucleotide
  misc_feature 1..20: note = Target: SCN10A; (+) strand; PAM type: YTN; PAM sequence: CTG
  source 1..20: mol_type = other DNA
gcccctgtgatagggtccca

SEQ ID NO: 64835 - DNA, 20 bp, synthetic construct
  misc_feature 1..20: note = Description of Artificial Sequence: Synthetic oligonucleotide
  misc_feature 1..20: note = Target: SCN10A; (+) strand; PAM type: YTN; PAM sequence: CTG
  source 1..20: mol_type = other DNA
tgatagggtcccaagcagat

SEQ ID NO: 64836 - DNA, 20 bp, synthetic construct
  misc_feature 1..20: note = Description of Artificial Sequence: Synthetic oligonucleotide
  misc_feature 1..20: note = Target: SCN10A; (+) strand; PAM type: YTN; PAM sequence: CTG
  source 1..20: mol_type = other DNA
tcctagagtctcgttgcctc

SEQ ID NO: 64837 - DNA, 20 bp, synthetic construct
  misc_feature 1..20: note = Description of Artificial Sequence: Synthetic oligonucleotide
  misc_feature 1..20: note = Target: SCN10A; (+) strand; PAM type: YTN; PAM sequence: CTA
  source 1..20: mol_type = other DNA
gagtctcgttgcctcctgaa

SEQ ID NO: 64838 - DNA, 20 bp, synthetic construct
  misc_feature 1..20: note = Description of Artificial Sequence: Synthetic oligonucleotide
  misc_feature 1..20: note = Target: SCN10A; (+) strand; PAM type: YTN; PAM sequence: CTC
  source 1..20: mol_type = other DNA
gttgcctcctgaaccatgca

SEQ ID NO: 64839 - DNA, 20 bp, synthetic construct
  misc_feature 1..20: note = Description of Artificial Sequence: Synthetic oligonucleotide
  misc_feature 1..20: note = Target: SCN10A; (+) strand; PAM type: YTN; PAM sequence: TTG
  source 1..20: mol_type = other DNA
cctcctgaaccatgcacccc

SEQ ID NO: 64840 - DNA, 20 bp, synthetic construct
  misc_feature 1..20: note = Description of Artificial Sequence: Synthetic oligonucleotide
  misc_feature 1..20: note = Target: SCN10A; (+) strand; PAM type: YTN; PAM sequence: CTC
  source 1..20: mol_type = other DNA
ctgaaccatgcacccccttc

SEQ ID NO: 64841 - DNA, 20 bp, synthetic construct
  misc_feature 1..20: note = Description of Artificial Sequence: Synthetic oligonucleotide
  misc_feature 1..20: note = Target: SCN10A; (+) strand; PAM type: YTN; PAM sequence: CTG
  source 1..20: mol_type = other DNA
aaccatgcacccccttcaac

SEQ ID NO: 64842 - DNA, 20 bp, synthetic construct
  misc_feature 1..20: note = Description of Artificial Sequence: Synthetic oligonucleotide
  misc_feature 1..20: note = Target: SCN10A; (+) strand; PAM type: YTN; PAM sequence: CTT
  source 1..20: mol_type = other DNA
caacctctggatgccaacac

SEQ ID NO: 64843 - DNA, 20 bp, synthetic construct
  misc_feature 1..20: note = Description of Artificial Sequence: Synthetic oligonucleotide
  misc_feature 1..20: note = Target: SCN10A; (+) strand; PAM type: YTN; PAM sequence: TTC
  source 1..20: mol_type = other DNA
aacctctggatgccaacact

SEQ ID NO: 64844 - DNA, 20 bp, synthetic construct
  misc_feature 1..20: note = Description of Artificial Sequence: Synthetic oligonucleotide
  misc_feature 1..20: note = Target: SCN10A; (+) strand; PAM type: YTN; PAM sequence: CTC
  source 1..20: mol_type = other DNA
tggatgccaacacttgtcag

SEQ ID NO: 64845 - DNA, 20 bp, synthetic construct
  misc_feature 1..20: note = Description of Artificial Sequence: Synthetic oligonucleotide
  misc_feature 1..20: note = Target: SCN10A; (+) strand; PAM type: YTN; PAM sequence: CTG
  source 1..20: mol_type = other DNA
gatgccaacacttgtcagga

SEQ ID NO: 64846 - DNA, 20 bp, synthetic construct
  misc_feature 1..20: note = Description of Artificial Sequence: Synthetic oligonucleotide
  misc_feature 1..20: note = Target: SCN10A; (+) strand; PAM type: YTN; PAM sequence: CTT
  source 1..20: mol_type = other DNA
gtcaggaccttgggaagatt

SEQ ID NO: 64847 - DNA, 20 bp, synthetic construct
  misc_feature 1..20: note = Description of Artificial Sequence: Synthetic oligonucleotide
  misc_feature 1..20: note = Target: SCN10A; (+) strand; PAM type: YTN; PAM sequence: TTG
  source 1..20: mol_type = other DNA
tcaggaccttgggaagattg

SEQ ID NO: 64848 - DNA, 20 bp, synthetic construct
  misc_feature 1..20: note = Description of Artificial Sequence: Synthetic oligonucleotide
  misc_feature 1..20: note = Target: SCN10A; (+) strand; PAM type: YTN; PAM sequence: CTT
  source 1..20: mol_type = other DNA
gggaagattgttggatactc

SEQ ID NO: 64849 - DNA, 20 bp, synthetic construct
  misc_feature 1..20: note = Description of Artificial Sequence: Synthetic oligonucleotide
  misc_feature 1..20: note = Target: SCN10A; (+) strand; PAM type: YTN; PAM sequence: TTG
  source 1..20: mol_type = other DNA
ggaagattgttggatactcc

SEQ ID NO: 64850 - DNA, 20 bp, synthetic construct
  misc_feature 1..20: note = Description of Artificial Sequence: Synthetic oligonucleotide
  misc_feature 1..20: note = Target: SCN10A; (+) strand; PAM type: YTN; PAM sequence: TTG
  source 1..20: mol_type = other DNA
ttggatactcccctttgttt

SEQ ID NO: 64851 - DNA, 20 bp, synthetic construct
  misc_feature 1..20: note = Description of Artificial Sequence: Synthetic oligonucleotide
  misc_feature 1..20: note = Target: SCN10A; (+) strand; PAM type: YTN; PAM sequence: TTG
  source 1..20: mol_type = other DNA
gatactcccctttgttttgt

SEQ ID NO: 64852 - DNA, 20 bp, synthetic construct
  misc_feature 1..20: note = Description of Artificial Sequence: Synthetic oligonucleotide
  misc_feature 1..20: note = Target: SCN10A; (+) strand; PAM type: YTN; PAM sequence: CTC
  source 1..20: mol_type = other DNA
ccctttgttttgtcacctct

SEQ ID NO: 64853 - DNA, 20 bp, synthetic construct
  misc_feature 1..20: note = Description of Artificial Sequence: Synthetic oligonucleotide
  misc_feature 1..20: note = Target: SCN10A; (+) strand; PAM type: YTN; PAM sequence: CTT
  source 1..20: mol_type = other DNA
tgttttgtcacctctcttca

SEQ ID NO: 64854 - DNA, 20 bp, synthetic construct
  misc_feature 1..20: note = Description of Artificial Sequence: Synthetic oligonucleotide
  misc_feature 1..20: note = Target: SCN10A; (+) strand; PAM type: YTN; PAM sequence: TTT
  source 1..20: mol_type = other DNA
gttttgtcacctctcttcaa

SEQ ID NO: 64855 - DNA, 20 bp, synthetic construct
  misc_feature 1..20: note = Description of Artificial Sequence: Synthetic oligonucleotide
  misc_feature 1..20: note = Target: SCN10A; (+) strand; PAM type: YTN; PAM sequence: TTG
  source 1..20: mol_type = other DNA
ttttgtcacctctcttcaag

SEQ ID NO: 64856 - DNA, 20 bp, synthetic construct
  misc_feature 1..20: note = Description of Artificial Sequence: Synthetic oligonucleotide
  misc_feature 1..20: note = Target: SCN10A; (+) strand; PAM type: YTN; PAM sequence: TTT
  source 1..20: mol_type = other DNA
tgtcacctctcttcaagtct

SEQ ID NO: 64857 - DNA, 20 bp, synthetic construct
  misc_feature 1..20: note = Description of Artificial Sequence: Synthetic oligonucleotide
  misc_feature 1..20: note = Target: SCN10A; (+) strand; PAM type: YTN; PAM sequence: TTT
  source 1..20: mol_type = other DNA
gtcacctctcttcaagtcta

SEQ ID NO: 64858 - DNA, 20 bp, synthetic construct
  misc_feature 1..20: note = Description of Artificial Sequence: Synthetic oligonucleotide
  misc_feature 1..20: note = Target: SCN10A; (+) strand; PAM type: YTN; PAM sequence: TTG
  source 1..20: mol_type = other DNA
tcacctctcttcaagtctag

SEQ ID NO: 64859 - DNA, 20 bp, synthetic construct
  misc_feature 1..20: note = Description of Artificial Sequence: Synthetic oligonucleotide
  misc_feature 1..20: note = Target: SCN10A; (+) strand; PAM type: YTN; PAM sequence: CTC
  source 1..20: mol_type = other DNA
tcttcaagtctagatgcagg

SEQ ID NO: 64860 - DNA, 20 bp, synthetic construct
  misc_feature 1..20: note = Description of Artificial Sequence: Synthetic oligonucleotide
  misc_feature 1..20: note = Target: SCN10A; (+) strand; PAM type: YTN; PAM sequence: CTC
  source 1..20: mol_type = other DNA
ttcaagtctagatgcagggc

SEQ ID NO: 64861 - DNA, 20 bp, synthetic construct
  misc_feature 1..20: note = Description of Artificial Sequence: Synthetic oligonucleotide
  misc_feature 1..20: note = Target: SCN10A; (+) strand; PAM type: YTN; PAM sequence: CTT
  source 1..20: mol_type = other DNA
caagtctagatgcagggctc

SEQ ID NO: 64862 - DNA, 20 bp, synthetic construct
  misc_feature 1..20: note = Description of Artificial Sequence: Synthetic oligonucleotide
  misc_feature 1..20: note = Target: SCN10A; (+) strand; PAM type: YTN; PAM sequence: TTC
  source 1..20: mol_type = other DNA
aagtctagatgcagggctcc

SEQ ID NO: 64863 - DNA, 20 bp, synthetic construct
  misc_feature 1..20: note = Description of Artificial Sequence: Synthetic oligonucleotide
  misc_feature 1..20: note = Target: SCN10A; (+) strand; PAM type: YTN; PAM sequence: CTA
  source 1..20: mol_type = other DNA
gatgcagggctcccagttaa

SEQ ID NO: 64864 - DNA, 20 bp, synthetic construct
  misc_feature 1..20: note = Description of Artificial Sequence: Synthetic oligonucleotide
  misc_feature 1..20: note = Target: SCN10A; (+) strand; PAM type: YTN; PAM sequence: CTC
  source 1..20: mol_type = other DNA
ccagttaatactgagagatt

SEQ ID NO: 64865 - DNA, 20 bp, synthetic construct
  misc_feature 1..20: note = Description of Artificial Sequence: Synthetic oligonucleotide
  misc_feature 1..20: note = Target: SCN10A; (+) strand; PAM type: YTN; PAM sequence: TTA
  source 1..20: mol_type = other DNA
atactgagagattcctgaga

SEQ ID NO: 64866 - DNA, 20 bp, synthetic construct
  misc_feature 1..20: note = Description of Artificial Sequence: Synthetic oligonucleotide
  misc_feature 1..20: note = Target: SCN10A; (+) strand; PAM type: YTN; PAM sequence: CTG
  source 1..20: mol_type = other DNA
agagattcctgagagcaggc

SEQ ID NO: 64867 - DNA, 20 bp, synthetic construct
  misc_feature 1..20: note = Description of Artificial Sequence: Synthetic oligonucleotide
  misc_feature 1..20: note = Target: SCN10A; (+) strand; PAM type: YTN; PAM sequence: TTC
  source 1..20: mol_type = other DNA
ctgagagcaggcggcctgcg

SEQ ID NO: 64868 - DNA, 20 bp, synthetic construct
  misc_feature 1..20: note = Description of Artificial Sequence: Synthetic oligonucleotide
  misc_feature 1..20: note = Target: SCN10A; (+) strand; PAM type: YTN; PAM sequence: CTG
  source 1..20: mol_type = other DNA
agagcaggcggcctgcgcta

SEQ ID NO: 64869 - DNA, 20 bp, synthetic construct
  misc_feature 1..20: note = Description of Artificial Sequence: Synthetic oligonucleotide
  misc_feature 1..20: note = Target: SCN10A; (+) strand; PAM type: YTN; PAM sequence: CTG
  source 1..20: mol_type = other DNA
cgctaacaagccgtgacatt

SEQ ID NO: 64870 - DNA, 20 bp, synthetic construct
  misc_feature 1..20: note = Description of Artificial Sequence: Synthetic oligonucleotide
  misc_feature 1..20: note = Target: SCN10A; (+) strand; PAM type: YTN; PAM sequence: CTA
  source 1..20: mol_type = other DNA
acaagccgtgacatttcttc

SEQ ID NO: 64871 - DNA, 20 bp, synthetic construct
  misc_feature 1..20: note = Description of Artificial Sequence: Synthetic oligonucleotide
  misc_feature 1..20: note = Target: SCN10A; (+) strand; PAM type: YTN; PAM sequence: TTT
  source 1..20: mol_type = other DNA
cttcaggcctctttcctatt

SEQ ID NO: 64872 - DNA, 20 bp, synthetic construct
  misc_feature 1..20: note = Description of Artificial Sequence: Synthetic oligonucleotide
  misc_feature 1..20: note = Target: SCN10A; (+) strand; PAM type: YTN; PAM sequence: TTC
  source 1..20: mol_type = other DNA
ttcaggcctctttcctattc

SEQ ID NO: 64873 - DNA, 20 bp, synthetic construct
  misc_feature 1..20: note = Description of Artificial Sequence: Synthetic oligonucleotide
  misc_feature 1..20: note = Target: SCN10A; (+) strand; PAM type: YTN; PAM sequence: CTT
  source 1..20: mol_type = other DNA
caggcctctttcctattccc

SEQ ID NO: 64874 - DNA, 20 bp, synthetic construct
  misc_feature 1..20: note = Description of Artificial Sequence: Synthetic oligonucleotide
  misc_feature 1..20: note = Target: SCN10A; (+) strand; PAM type: YTN; PAM sequence: TTC
  source 1..20: mol_type = other DNA
aggcctctttcctattccca

SEQ ID NO: 64875 - DNA, 20 bp, synthetic construct
  misc_feature 1..20: note = Description of Artificial Sequence: Synthetic oligonucleotide
  misc_feature 1..20: note = Target: SCN10A; (+) strand; PAM type: YTN; PAM sequence: CTC
  source 1..20: mol_type = other DNA
tttcctattcccaagagtca

SEQ ID NO: 64876 - DNA, 20 bp, synthetic construct
  misc_feature 1..20: note = Description of Artificial Sequence: Synthetic oligonucleotide
  misc_feature 1..20: note = Target: SCN10A; (+) strand; PAM type: YTN; PAM sequence: CTT
  source 1..20: mol_type = other DNA
tcctattcccaagagtcagt

SEQ ID NO: 64877 - DNA, 20 bp, synthetic construct
  misc_feature 1..20: note = Description of Artificial Sequence: Synthetic oligonucleotide
  misc_feature 1..20: note = Target: SCN10A; (+) strand; PAM type: YTN; PAM sequence: TTT
  source 1..20: mol_type = other DNA
cctattcccaagagtcagtg

SEQ ID NO: 64878 - DNA, 20 bp, synthetic construct
  misc_feature 1..20: note = Description of Artificial Sequence: Synthetic oligonucleotide
  misc_feature 1..20: note = Target: SCN10A; (+) strand; PAM type: YTN; PAM sequence: TTC
  source 1..20: mol_type = other DNA
ctattcccaagagtcagtga

SEQ ID NO: 64879 - DNA, 20 bp, synthetic construct
  misc_feature 1..20: note = Description of Artificial Sequence: Synthetic oligonucleotide
  misc_feature 1..20: note = Target: SCN10A; (+) strand; PAM type: YTN; PAM sequence: CTA
  source 1..20: mol_type = other DNA
ttcccaagagtcagtgagat

SEQ ID NO: 64880 - DNA, 20 bp, synthetic construct
  misc_feature 1..20: note = Description of Artificial Sequence: Synthetic oligonucleotide
  misc_feature 1..20: note = Target: SCN10A; (+) strand; PAM type: YTN; PAM sequence: TTC
  source 1..20: mol_type = other DNA
ccaagagtcagtgagatgcc

SEQ ID NO: 64881 - DNA, 20 bp, synthetic construct
  misc_feature 1..20: note = Description of Artificial Sequence: Synthetic oligonucleotide
  misc_feature 1..20: note = Target: SCN10A; (+) strand; PAM type: YTN; PAM sequence: CTT
  source 1..20: mol_type = other DNA
cctccagatggcctggagac

SEQ ID NO: 64882 - DNA, 20 bp, synthetic construct
  misc_feature 1..20: note = Description of Artificial Sequence: Synthetic oligonucleotide
  misc_feature 1..20: note = Target: SCN10A; (+) strand; PAM type: YTN; PAM sequence: TTC
  source 1..20: mol_type = other DNA
ctccagatggcctggagacc

SEQ ID NO: 64883 - DNA, 20 bp, synthetic construct
  misc_feature 1..20: note = Description of Artificial Sequence: Synthetic oligonucleotide
  misc_feature 1..20: note = Target: SCN10A; (+) strand; PAM type: YTN; PAM sequence: CTC
  source 1..20: mol_type = other DNA
cagatggcctggagacctag

SEQ ID NO: 64884 - DNA, 20 bp, synthetic construct
  misc_feature 1..20: note = Description of Artificial Sequence: Synthetic oligonucleotide
  misc_feature 1..20: note = Target: SCN10A; (+) strand; PAM type: YTN; PAM sequence: CTG
  source 1..20: mol_type = other DNA
gagacctagtgacccgacac

SEQ ID NO: 64885 - DNA, 20 bp, synthetic construct
  misc_feature 1..20: note = Description of Artificial Sequence: Synthetic oligonucleotide
  misc_feature 1..20: note = Target: SCN10A; (+) strand; PAM type: YTN; PAM sequence: CTA
  source 1..20: mol_type = other DNA
gtgacccgacactcctggga

SEQ ID NO: 64886 - DNA, 20 bp, synthetic construct
  misc_feature 1..20: note = Description of Artificial Sequence: Synthetic oligonucleotide
  misc_feature 1..20: note = Target: SCN10A; (+) strand; PAM type: YTN; PAM sequence: CTC
  source 1..20: mol_type = other DNA
ctgggaatctgacaggtttg

SEQ ID NO: 64887 - DNA, 20 bp, synthetic construct
  misc_feature 1..20: note = Description of Artificial Sequence: Synthetic oligonucleotide
  misc_feature 1..20: note = Target: SCN10A; (+) strand; PAM type: YTN; PAM sequence: CTG
  source 1..20: mol_type = other DNA
ggaatctgacaggtttggct

SEQ ID NO: 64888 - DNA, 20 bp, synthetic construct
  misc_feature 1..20: note = Description of Artificial Sequence: Synthetic oligonucleotide
  misc_feature 1..20: note = Target: SCN10A; (+) strand; PAM type: YTN; PAM sequence: CTG
  source 1..20: mol_type = other DNA
acaggtttggctgacaaacc

SEQ ID NO: 64889 - DNA, 20 bp, synthetic construct
  misc_feature 1..20: note = Description of Artificial Sequence: Synthetic oligonucleotide
  misc_feature 1..20: note = Target: SCN10A; (+) strand; PAM type: YTN; PAM sequence: TTT
  source 1..20: mol_type = other DNA
ggctgacaaacctgtggctc

SEQ ID NO: 64890 - DNA, 20 bp, synthetic construct
  misc_feature 1..20: note = Description of Artificial Sequence: Synthetic oligonucleotide
  misc_feature 1..20: note = Target: SCN10A; (+) strand; PAM type: YTN; PAM sequence: TTG
  source 1..20: mol_type = other DNA
gctgacaaacctgtggctct

SEQ ID NO: 64891 - DNA, 20 bp, synthetic construct
  misc_feature 1..20: note = Description of Artificial Sequence: Synthetic oligonucleotide
  misc_feature 1..20: note = Target: SCN10A; (+) strand; PAM type: YTN; PAM sequence: CTG
  source 1..20: mol_type = other DNA
acaaacctgtggctctgata

SEQ ID NO: 64892 - DNA, 20 bp, synthetic construct
  misc_feature 1..20: note = Description of Artificial Sequence: Synthetic oligonucleotide
  misc_feature 1..20: note = Target: SCN10A; (+) strand; PAM type: YTN; PAM sequence: CTG
  source 1..20: mol_type = other DNA
tggctctgataaaagtgggt

SEQ ID NO: 64893 - DNA, 20 bp, synthetic construct
  misc_feature 1..20: note = Description of Artificial Sequence: Synthetic oligonucleotide
  misc_feature 1..20: note = Target: SCN10A; (+) strand; PAM type: YTN; PAM sequence: CTC
  source 1..20: mol_type = other DNA
tgataaaagtgggtggcctg

SEQ ID NO: 64894 - DNA, 20 bp, synthetic construct
  misc_feature 1..20: note = Description of Artificial Sequence: Synthetic oligonucleotide
  misc_feature 1..20: note = Target: SCN10A; (+) strand; PAM type: YTN; PAM sequence: CTG
  source 1..20: mol_type = other DNA
ataaaagtgggtggcctgtg

SEQ ID NO: 64895 - DNA, 20 bp, synthetic construct
  misc_feature 1..20: note = Description of Artificial Sequence: Synthetic oligonucleotide
  misc_feature 1..20: note = Target: SCN10A; (+) strand; PAM type: YTN; PAM sequence: CTG
  source 1..20: mol_type = other DNA
tggcacttctcctgtagagg

SEQ ID NO: 64896 - DNA, 20 bp, synthetic construct
  misc_feature 1..20: note = Description of Artificial Sequence: Synthetic oligonucleotide
  misc_feature 1..20: note = Target: SCN10A; (+) strand; PAM type: YTN; PAM sequence: CTT
  source 1..20: mol_type = other DNA
ctcctgtagagggcgtcctg

SEQ ID NO: 64897 - DNA, 20 bp, synthetic construct
  misc_feature 1..20: note = Description of Artificial Sequence: Synthetic oligonucleotide
  misc_feature 1..20: note = Target: SCN10A; (+) strand; PAM type: YTN; PAM sequence: TTC
  source 1..20: mol_type = other DNA
tcctgtagagggcgtcctgg

SEQ ID NO: 64898 - DNA, 20 bp, synthetic construct
  misc_feature 1..20: note = Description of Artificial Sequence: Synthetic oligonucleotide
  misc_feature 1..20: note = Target: SCN10A; (+) strand; PAM type: YTN; PAM sequence: CTC
  source 1..20: mol_type = other DNA
ctgtagagggcgtcctggag

SEQ ID NO: 64899 - DNA, 20 bp, synthetic construct
  misc_feature 1..20: note = Description of Artificial Sequence: Synthetic oligonucleotide
  misc_feature 1..20: note = Target: SCN10A; (+) strand; PAM type: YTN; PAM sequence: CTG
  source 1..20: mol_type = other DNA
tagagggcgtcctggagctg

SEQ ID NO: 64900 - DNA, 20 bp, synthetic construct
  misc_feature 1..20: note = Description of Artificial Sequence: Synthetic oligonucleotide
  misc_feature 1..20: note = Target: SCN10A; (+) strand; PAM type: YTN; PAM sequence: CTG
  source 1..20: mol_type = other DNA
gagctgagtttagagaagag

SEQ ID NO: 64901 - DNA, 20 bp, synthetic construct
  misc_feature 1..20: note = Description of Artificial Sequence: Synthetic oligonucleotide
  misc_feature 1..20: note = Target: SCN10A; (+) strand; PAM type: YTN; PAM sequence: CTG
  source 1..20: mol_type = other DNA
agtttagagaagagccatca

SEQ ID NO: 64902 - DNA, 20 bp, synthetic construct
  misc_feature 1..20: note = Description of Artificial Sequence: Synthetic oligonucleotide
  misc_feature 1..20: note = Target: SCN10A; (+) strand; PAM type: YTN; PAM sequence: TTT
  source 1..20: mol_type = other DNA
agagaagagccatcattgca

SEQ ID NO: 64903 - DNA, 20 bp, synthetic construct
  misc_feature 1..20: note = Description of Artificial Sequence: Synthetic oligonucleotide
  misc_feature 1..20: note = Target: SCN10A; (+) strand; PAM type: YTN; PAM sequence: TTA
  source 1..20: mol_type = other DNA
gagaagagccatcattgcat

SEQ ID NO: 64904 - DNA, 20 bp, synthetic construct
  misc_feature 1..20: note = Description of Artificial Sequence: Synthetic oligonucleotide
  misc_feature 1..20: note = Target: SCN10A; (+) strand; PAM type: YTN; PAM sequence: TTG
  source 1..20: mol_type = other DNA
catgtgagtgagactaatag

SEQ ID NO: 64905 - DNA, 20 bp, synthetic construct
  misc_feature 1..20: note = Description of Artificial Sequence: Synthetic oligonucleotide
  misc_feature 1..20: note = Target: SCN10A; (+) strand; PAM type: YTN; PAM sequence: CTA
  source 1..20: mol_type = other DNA
ataggcaggttgaaggtgct

SEQ ID NO: 64906 - DNA, 20 bp, synthetic construct
  misc_feature 1..20: note = Description of Artificial Sequence: Synthetic oligonucleotide
  misc_feature 1..20: note = Target: SCN10A; (+) strand; PAM type: YTN; PAM sequence: TTG
  source 1..20: mol_type = other DNA
aaggtgcttgagacattggg

SEQ ID NO: 64907 - DNA, 20 bp, synthetic construct
  misc_feature 1..20: note = Description of Artificial Sequence: Synthetic oligonucleotide
  misc_feature 1..20: note = Target: SCN10A; (+) strand; PAM type: YTN; PAM sequence: CTT
  source 1..20: mol_type = other DNA
gagacattggggctgtgatt

SEQ ID NO: 64908 - DNA, 20 bp, synthetic construct
  misc_feature 1..20: note = Description of Artificial Sequence: Synthetic oligonucleotide
  misc_feature 1..20: note = Target: SCN10A; (+) strand; PAM type: YTN; PAM sequence: TTG
  source 1..20: mol_type = other DNA
agacattggggctgtgattt

SEQ ID NO: 64909 - DNA, 20 bp, synthetic construct
  misc_feature 1..20: note = Description of Artificial Sequence: Synthetic oligonucleotide
  misc_feature 1..20: note = Target: SCN10A; (+) strand; PAM type: YTN; PAM sequence: TTG
  source 1..20: mol_type = other DNA
gggctgtgatttcgggcaca

SEQ ID NO: 64910 - DNA, 20 bp, synthetic construct
  misc_feature 1..20: note = Description of Artificial Sequence: Synthetic oligonucleotide
  misc_feature 1..20: note = Target: SCN10A; (+) strand; PAM type: YTN; PAM sequence: CTG
  source 1..20: mol_type = other DNA
tgatttcgggcacaagggaa

SEQ ID NO: 64911 - DNA, 20 bp, synthetic construct
  misc_feature 1..20: note = Description of Artificial Sequence: Synthetic oligonucleotide
  misc_feature 1..20: note = Target: SCN10A; (+) strand; PAM type: YTN; PAM sequence: TTT
  source 1..20: mol_type = other DNA
cgggcacaagggaatcagag

SEQ ID NO: 64912 - DNA, 20 bp, synthetic construct
  misc_feature 1..20: note = Description of Artificial Sequence: Synthetic oligonucleotide
  misc_feature 1..20: note = Target: SCN10A; (+) strand; PAM type: YTN; PAM sequence: TTC
  source 1..20: mol_type = other DNA
gggcacaagggaatcagaga

SEQ ID NO: 64913 - DNA, 20 bp, synthetic construct
  misc_feature 1..20: note = Description of Artificial Sequence: Synthetic oligonucleotide
  misc_feature 1..20: note = Target: SCN10A; (+) strand; PAM type: YTN; PAM sequence: CTT
  source 1..20: mol_type = other DNA
ccttgaggctggaaggagct

SEQ ID NO: 64914 - DNA, 20 bp, synthetic construct
  misc_feature 1..20: note = Description of Artificial Sequence: Synthetic oligonucleotide
  misc_feature 1..20: note = Target: SCN10A; (+) strand; PAM type: YTN; PAM sequence: TTC
  source 1..20: mol_type = other DNA
cttgaggctggaaggagctg

SEQ ID NO: 64915 - DNA, 20 bp, synthetic construct
  misc_feature 1..20: note = Description of Artificial Sequence: Synthetic oligonucleotide
  misc_feature 1..20: note = Target: SCN10A; (+) strand; PAM type: YTN; PAM sequence: CTT
  source 1..20: mol_type = other DNA
gaggctggaaggagctgggg

SEQ ID NO: 64916 - DNA, 20 bp, synthetic construct
  misc_feature 1..20: note = Description of Artificial Sequence: Synthetic oligonucleotide
  misc_feature 1..20: note = Target: SCN10A; (+) strand; PAM type: YTN; PAM sequence: TTG
  source 1..20: mol_type = other DNA
aggctggaaggagctggggc

SEQ ID NO: 64917 - DNA, 20 bp, synthetic construct
  misc_feature 1..20: note = Description of Artificial Sequence: Synthetic oligonucleotide
  misc_feature 1..20: note = Target: SCN10A; (+) strand; PAM type: YTN; PAM sequence: CTG
  source 1..20: mol_type = other DNA
gaaggagctggggctctgga

SEQ ID NO: 64918 - DNA, 20 bp, synthetic construct
  misc_feature 1..20: note = Description of Artificial Sequence: Synthetic oligonucleotide
  misc_feature 1..20: note = Target: SCN10A; (+) strand; PAM type: YTN; PAM sequence: CTG
  source 1..20: mol_type = other DNA
gggctctggagtcagacaac

SEQ ID NO: 64919 - DNA, 20 bp, synthetic construct
  misc_feature 1..20: note = Description of Artificial Sequence: Synthetic oligonucleotide
  misc_feature 1..20: note = Target: SCN10A; (+) strand; PAM type: YTN; PAM sequence: CTC
  source 1..20: mol_type = other DNA
tggagtcagacaacctggat

SEQ ID NO: 64920 - DNA, 20 bp, synthetic construct
  misc_feature 1..20: note = Description of Artificial Sequence: Synthetic oligonucleotide
  misc_feature 1..20: note = Target: SCN10A; (+) strand; PAM type: YTN; PAM sequence: CTG
  source 1..20: mol_type = other DNA
gagtcagacaacctggattt

SEQ ID NO: 64921 - DNA, 20 bp, synthetic construct
  misc_feature 1..20: note = Description of Artificial Sequence: Synthetic oligonucleotide
  misc_feature 1..20: note = Target: SCN10A; (+) strand; PAM type: YTN; PAM sequence: CTG
  source 1..20: mol_type = other DNA
gatttgagatccaggtctgt

SEQ ID NO: 64922 - DNA, 20 bp, synthetic construct
  misc_feature 1..20: note = Description of Artificial Sequence: Synthetic oligonucleotide
  misc_feature 1..20: note = Target: SCN10A; (+) strand; PAM type: YTN; PAM sequence: TTT
  source 1..20: mol_type = other DNA
gagatccaggtctgtggctt

SEQ ID NO: 64923 - DNA, 20 bp, synthetic construct
  misc_feature 1..20: note = Description of Artificial Sequence: Synthetic oligonucleotide
  misc_feature 1..20: note = Target: SCN10A; (+) strand; PAM type: YTN; PAM sequence: TTG
  source 1..20: mol_type = other DNA
agatccaggtctgtggctta

SEQ ID NO: 64924 - DNA, 20 bp, synthetic construct
  misc_feature 1..20: note = Description of Artificial Sequence: Synthetic oligonucleotide
  misc_feature 1..20: note = Target: SCN10A; (+) strand; PAM type: YTN; PAM sequence: CTG
  source 1..20: mol_type = other DNA
tggcttattcgcttgcttgg

SEQ ID NO: 64925 - DNA, 20 bp, synthetic construct
  misc_feature 1..20: note = Description of Artificial Sequence: Synthetic oligonucleotide
  misc_feature 1..20: note = Target: SCN10A; (+) strand; PAM type: YTN; PAM sequence: CTT
  source 1..20: mol_type = other DNA
attcgcttgcttggcagatg

SEQ ID NO: 64926 - DNA, 20 bp, synthetic construct
  misc_feature 1..20: note = Description of Artificial Sequence: Synthetic oligonucleotide
  misc_feature 1..20: note = Target: SCN10A; (+) strand; PAM type: YTN; PAM sequence: TTA
  source 1..20: mol_type = other DNA
ttcgcttgcttggcagatgg

SEQ ID NO: 64927 - DNA, 20 bp, synthetic construct
  misc_feature 1..20: note = Description of Artificial Sequence: Synthetic oligonucleotide
  misc_feature 1..20: note = Target: SCN10A; (+) strand; PAM type: YTN; PAM sequence: TTC
  source 1..20: mol_type = other DNA
gcttgcttggcagatgggag

SEQ ID NO: 64928 - DNA, 20 bp, synthetic construct
  misc_feature 1..20: note = Description of Artificial Sequence: Synthetic oligonucleotide
  misc_feature 1..20: note = Target: SCN10A; (+) strand; PAM type: YTN; PAM sequence: CTT
  source 1..20: mol_type = other DNA
gcttggcagatgggagactt

SEQ ID NO: 64929 - DNA, 20 bp, synthetic construct
  misc_feature 1..20: note = Description of Artificial Sequence: Synthetic oligonucleotide
  misc_feature 1..20: note = Target: SCN10A; (+) strand; PAM type: YTN; PAM sequence: TTG
  source 1..20: mol_type = other DNA
cttggcagatgggagacttt

SEQ ID NO: 64930 - DNA, 20 bp, synthetic construct
  misc_feature 1..20: note = Description of Artificial Sequence: Synthetic oligonucleotide
  misc_feature 1..20: note = Target: SCN10A; (+) strand; PAM type: YTN; PAM sequence: CTT
  source 1..20: mol_type = other DNA
ggcagatgggagactttcgg

SEQ ID NO: 64931 - DNA, 20 bp, synthetic construct
  misc_feature 1..20: note = Description of Artificial Sequence: Synthetic oligonucleotide
  misc_feature 1..20: note = Target: SCN10A; (+) strand; PAM type: YTN; PAM sequence: TTG
  source 1..20: mol_type = other DNA
gcagatgggagactttcggg

SEQ ID NO: 64932 - DNA, 20 bp, synthetic construct
  misc_feature 1..20: note = Description of Artificial Sequence: Synthetic oligonucleotide
  misc_feature 1..20: note = Target: SCN10A; (+) strand; PAM type: YTN; PAM sequence: CTT
  source 1..20: mol_type = other DNA
tcgggtcatcatggaaccat

SEQ ID NO: 64933 - DNA, 20 bp, synthetic construct
  misc_feature 1..20: note = Description of Artificial Sequence: Synthetic oligonucleotide
  misc_feature 1..20: note = Target: SCN10A; (+) strand; PAM type: YTN; PAM sequence: TTT
  source 1..20: mol_type = other DNA
cgggtcatcatggaaccatt

SEQ ID NO: 64934 - DNA, 20 bp, synthetic construct
  misc_feature 1..20: note = Description of Artificial Sequence: Synthetic oligonucleotide
  misc_feature 1..20: note = Target: SCN10A; (+) strand; PAM type: YTN; PAM sequence: TTC
  source 1..20: mol_type = other DNA
gggtcatcatggaaccattc

SEQ ID NO: 64935 - DNA, 20 bp, synthetic construct
  misc_feature 1..20: note = Description of Artificial Sequence: Synthetic oligonucleotide
  misc_feature 1..20: note = Target: SCN10A; (+) strand; PAM type: YTN; PAM sequence: TTC
  source 1..20: mol_type = other DNA
tttttcctcacccacccctg

SEQ ID NO: 64936 - DNA, 20 bp, synthetic construct
  misc_feature 1..20: note = Description of Artificial Sequence: Synthetic oligonucleotide
  misc_feature 1..20: note = Target: SCN10A; (+) strand; PAM type: YTN; PAM sequence: CTT
  source 1..20: mol_type = other DNA
tttcctcacccacccctgag

SEQ ID NO: 64937 - DNA, 20 bp, synthetic construct
  misc_feature 1..20: note = Description of Artificial Sequence: Synthetic oligonucleotide
  misc_feature 1..20: note = Target: SCN10A; (+) strand; PAM type: YTN; PAM sequence: TTT
  source 1..20: mol_type = other DNA
ttcctcacccacccctgagg

SEQ ID NO: 64938 - DNA, 20 bp, synthetic construct
  misc_feature 1..20: note = Description of Artificial Sequence: Synthetic oligonucleotide
  misc_feature 1..20: note = Target: SCN10A; (+) strand; PAM type: YTN; PAM sequence: TTT
  source 1..20: mol_type = other DNA
tcctcacccacccctgagga

SEQ ID NO: 64939 - DNA, 20 bp, synthetic construct
  misc_feature 1..20: note = Description of Artificial Sequence: Synthetic oligonucleotide
  misc_feature 1..20: note = Target: SCN10A; (+) strand; PAM type: YTN; PAM sequence: TTT
  source 1..20: mol_type = other DNA
cctcacccacccctgaggat

SEQ ID NO: 64940 - DNA, 20 bp, synthetic construct
  misc_feature 1..20: note = Description of Artificial Sequence: Synthetic oligonucleotide
  misc_feature 1..20: note = Target: SCN10A; (+) strand; PAM type: YTN; PAM sequence: TTC
  source 1..20: mol_type = other DNA
ctcacccacccctgaggatc

SEQ ID NO: 64941 - DNA, 20 bp, synthetic construct
  misc_feature 1..20: note = Description of Artificial Sequence: Synthetic oligonucleotide
  misc_feature 1..20: note = Target: SCN10A; (+) strand; PAM type: YTN; PAM sequence: CTC
  source 1..20: mol_type = other DNA
acccacccctgaggatctta

SEQ ID NO: 64942 - DNA, 20 bp, synthetic construct
  misc_feature 1..20: note = Description of Artificial Sequence: Synthetic oligonucleotide
  misc_feature 1..20: note = Target: SCN10A; (+) strand; PAM type: YTN; PAM sequence: CTG
  source 1..20: mol_type = other DNA
aggatcttaaaaacgactat

SEQ ID NO: 64943 - DNA, 20 bp, synthetic construct
  misc_feature 1..20: note = Description of Artificial Sequence: Synthetic oligonucleotide
  misc_feature 1..20: note = Target: SCN10A; (+) strand; PAM type: YTN; PAM sequence: CTT
  source 1..20: mol_type = other DNA
aaaaacgactatctctcagg

SEQ ID NO: 64944 - DNA, 20 bp, synthetic construct
  misc_feature 1..20: note = Description of Artificial Sequence: Synthetic oligonucleotide
  misc_feature 1..20: note = Target: SCN10A; (+) strand; PAM type: YTN; PAM sequence: TTA
  source 1..20: mol_type = other DNA
aaaacgactatctctcaggg

SEQ ID NO: 64945 - DNA, 20 bp, synthetic construct
  misc_feature 1..20: note = Description of Artificial Sequence: Synthetic oligonucleotide
  misc_feature 1..20: note = Target: SCN10A; (+) strand; PAM type: YTN; PAM sequence: CTA
  source 1..20: mol_type = other DNA
tctctcagggttgttgtgag

SEQ ID NO: 64946 - DNA, 20 bp, synthetic construct
  misc_feature 1..20: note = Description of Artificial Sequence: Synthetic oligonucleotide
  misc_feature 1..20: note = Target: SCN10A; (+) strand; PAM type: YTN; PAM sequence: CTC
  source 1..20: mol_type = other DNA
tcagggttgttgtgagcata

SEQ ID NO: 64947 - DNA, 20 bp, synthetic construct
  misc_feature 1..20: note = Description of Artificial Sequence: Synthetic oligonucleotide
  misc_feature 1..20: note = Target: SCN10A; (+) strand; PAM type: YTN; PAM sequence: CTC
  source 1..20: mol_type = other DNA
agggttgttgtgagcataaa

SEQ ID NO: 64948 - DNA, 20 bp, synthetic construct
  misc_feature 1..20: note = Description of Artificial Sequence: Synthetic oligonucleotide
  misc_feature 1..20: note = Target: SCN10A; (+) strand; PAM type: YTN; PAM sequence: TTG
  source 1..20: mol_type = other DNA
ttgtgagcataaaatgaggt

SEQ ID NO: 64949 - DNA, 20 bp, synthetic construct
  misc_feature 1..20: note = Description of Artificial Sequence: Synthetic oligonucleotide
  misc_feature 1..20: note = Target: SCN10A; (+) strand; PAM type: YTN; PAM sequence: TTG
  source 1..20: mol_type = other DNA
tgagcataaaatgaggtgcg

SEQ ID NO: 64950 - DNA, 20 bp, synthetic construct
  misc_feature 1..20: note = Description of Artificial Sequence: Synthetic oligonucleotide
  misc_feature 1..20: note = Target: SCN10A; (+) strand; PAM type: YTN; PAM sequence: TTT
  source 1..20: mol_type = other DNA
tttcaagtgtccagtgctat

SEQ ID NO: 64951 - DNA, 20 bp, synthetic construct
  misc_feature 1..20: note = Description of Artificial Sequence: Synthetic oligonucleotide
  misc_feature 1..20: note = Target: SCN10A; (+) strand; PAM type: YTN; PAM sequence: TTT
  source 1..20: mol_type = other DNA
ttcaagtgtccagtgctatg

SEQ ID NO: 64952 - DNA, 20 bp, synthetic construct
  misc_feature 1..20: note = Description of Artificial Sequence: Synthetic oligonucleotide
  misc_feature 1..20: note = Target: SCN10A; (+) strand; PAM type: YTN; PAM sequence: TTT
  source 1..20: mol_type = other DNA
tcaagtgtccagtgctatgc

SEQ ID NO: 64953 - DNA, 20 bp, synthetic construct
  misc_feature 1..20: note = Description of Artificial Sequence: Synthetic oligonucleotide
  misc_feature 1..20: note = Target: SCN10A; (+) strand; PAM type: YTN; PAM sequence: TTT
  source 1..20: mol_type = other DNA
caagtgtccagtgctatgcc

SEQ ID NO: 64954 - DNA, 20 bp, synthetic construct
  misc_feature 1..20: note = Description of Artificial Sequence: Synthetic oligonucleotide
  misc_feature 1..20: note = Target: SCN10A; (+) strand; PAM type: YTN; PAM sequence: TTC
  source 1..20: mol_type = other DNA
aagtgtccagtgctatgcct

SEQ ID NO: 64955 - DNA, 20 bp, synthetic construct
  misc_feature 1..20: note = Description of Artificial Sequence: Synthetic oligonucleotide
  misc_feature 1..20: note = Target: SCN10A; (+) strand; PAM type: YTN; PAM sequence: CTA
  source 1..20: mol_type = other DNA
tgcctgacacattgtaagtg

SEQ ID NO: 64956 - DNA, 20 bp, synthetic construct
  misc_feature 1..20: note = Description of Artificial Sequence: Synthetic oligonucleotide
  misc_feature 1..20: note = Target: SCN10A; (+) strand; PAM type: YTN; PAM sequence: CTG
  source 1..20: mol_type = other DNA
acacattgtaagtgctcagt

SEQ ID NO: 64957 - DNA, 20 bp, synthetic construct
  misc_feature 1..20: note = Description of Artificial Sequence: Synthetic oligonucleotide
  misc_feature 1..20: note = Target: SCN10A; (+) strand; PAM type: YTN; PAM sequence: TTG
  source 1..20: mol_type = other DNA
taagtgctcagtaagtatta

SEQ ID NO: 64958 - DNA, 20 bp, synthetic construct
  misc_feature 1..20: note = Description of Artificial Sequence: Synthetic oligonucleotide
  misc_feature 1..20: note = Target: SCN10A; (+) strand; PAM type: YTN; PAM sequence: CTC
  source 1..20: mol_type = other DNA
agtaagtattagctgctgtg

SEQ ID NO: 64959 - DNA, 20 bp, synthetic construct
  misc_feature 1..20: note = Description of Artificial Sequence: Synthetic oligonucleotide
  misc_feature 1..20: note = Target: SCN10A; (+) strand; PAM type: YTN; PAM sequence: TTA
  source 1..20: mol_type = other DNA
gctgctgtgattattgctgt

SEQ ID NO: 64960 - DNA, 20 bp, synthetic construct
  misc_feature 1..20: note = Description of Artificial Sequence: Synthetic oligonucleotide
  misc_feature 1..20: note = Target: SCN10A; (+) strand; PAM type: YTN; PAM sequence: CTG
  source 1..20: mol_type = other DNA
ctgtgattattgctgttatt

SEQ ID NO: 64961 - DNA, 20 bp, synthetic construct
  misc_feature 1..20: note = Description of Artificial Sequence: Synthetic oligonucleotide
  misc_feature 1..20: note = Target: SCN10A; (+) strand; PAM type: YTN; PAM sequence: CTG
  source 1..20: mol_type = other DNA
tgattattgctgttattgtt

SEQ ID NO: 64962 - DNA, 20 bp, synthetic construct
  misc_feature 1..20: note = Description of Artificial Sequence: Synthetic oligonucleotide
  misc_feature 1..20: note = Target: SCN10A; (+) strand; PAM type: YTN; PAM sequence: TTA
  source 1..20: mol_type = other DNA
ttgctgttattgttatttga

SEQ ID NO: 64963 - DNA, 20 bp, synthetic construct
  misc_feature 1..20: note = Description of Artificial Sequence: Synthetic oligonucleotide
  misc_feature 1..20: note = Target: SCN10A; (+) strand; PAM type: YTN; PAM sequence: TTG
  source 1..20: mol_type = other DNA
ctgttattgttatttgataa

SEQ ID NO: 64964 - DNA, 20 bp, synthetic construct
  misc_feature 1..20: note = Description of Artificial Sequence: Synthetic oligonucleotide
  misc_feature 1..20: note = Target: SCN10A; (+) strand; PAM type: YTN; PAM sequence: CTG
  source 1..20: mol_type = other DNA
ttattgttatttgataagag

SEQ ID NO: 64965 - DNA, 20 bp, synthetic construct
  misc_feature 1..20: note = Description of Artificial Sequence: Synthetic oligonucleotide
  misc_feature 1..20: note = Target: SCN10A; (+) strand; PAM type: YTN; PAM sequence: TTA
  source 1..20: mol_type = other DNA
ttgttatttgataagagacg

SEQ ID NO: 64966 - DNA, 20 bp, synthetic construct
  misc_feature 1..20: note = Description of Artificial Sequence: Synthetic oligonucleotide
  misc_feature 1..20: note = Target: SCN10A; (+) strand; PAM type: YTN; PAM sequence: TTG
  source 1..20: mol_type = other DNA
ttatttgataagagacgagg

SEQ ID NO: 64967 - DNA, 20 bp, synthetic construct
  misc_feature 1..20: note = Description of Artificial Sequence: Synthetic oligonucleotide
  misc_feature 1..20: note = Target: SCN10A; (+) strand; PAM type: YTN; PAM sequence: TTA
  source 1..20: mol_type = other DNA
tttgataagagacgaggaca

SEQ ID NO: 64968 - DNA, 20 bp, synthetic construct
  misc_feature 1..20: note = Description of Artificial Sequence: Synthetic oligonucleotide
  misc_feature 1..20: note = Target: SCN10A; (+) strand; PAM type: YTN; PAM sequence: TTT
  source 1..20: mol_type = other DNA
gataagagacgaggacagtg

SEQ ID NO: 64969 - DNA, 20 bp, synthetic construct
  misc_feature 1..20: note = Description of Artificial Sequence: Synthetic oligonucleotide
  misc_feature 1..20: note = Target: SCN10A; (+) strand; PAM type: YTN; PAM sequence: TTG
  source 1..20: mol_type = other DNA
ataagagacgaggacagtgc

SEQ ID NO: 64970 - DNA, 20 bp, synthetic construct
  misc_feature 1..20: note = Description of Artificial Sequence: Synthetic oligonucleotide
  misc_feature 1..20: note = Target: SCN10A; (+) strand; PAM type: YTN; PAM sequence: CTT
  source 1..20: mol_type = other DNA
ggaagtcccctcttggtgca

SEQ ID NO: 64971 - DNA, 20 bp, synthetic construct
  misc_feature 1..20: note = Description of Artificial Sequence: Synthetic oligonucleotide
  misc_feature 1..20: note = Target: SCN10A; (+) strand; PAM type: YTN; PAM sequence: TTG
  source 1..20: mol_type = other DNA
gaagtcccctcttggtgcag

SEQ ID NO: 64972 - DNA, 20 bp, synthetic construct
  misc_feature 1..20: note = Description of Artificial Sequence: Synthetic oligonucleotide
  misc_feature 1..20: note = Target: SCN10A; (+) strand; PAM type: YTN; PAM sequence: CTC
  source 1..20: mol_type = other DNA
ttggtgcagataagggagcc

SEQ ID NO: 64973 - DNA, 20 bp, synthetic construct
  misc_feature 1..20: note = Description of Artificial Sequence: Synthetic oligonucleotide
  misc_feature 1..20: note = Target: SCN10A; (+) strand; PAM type: YTN; PAM sequence: CTT
  source 1..20: mol_type = other DNA
ggtgcagataagggagccaa

SEQ ID NO: 64974 - DNA, 20 bp, synthetic construct
  misc_feature 1..20: note = Description of Artificial Sequence: Synthetic oligonucleotide
  misc_feature 1..20: note = Target: SCN10A; (+) strand; PAM type: YTN; PAM sequence: TTG
  source 1..20: mol_type = other DNA
gtgcagataagggagccaag

SEQ ID NO: 64975 - DNA, 20 bp, synthetic construct
  misc_feature 1..20: note = Description of Artificial Sequence: Synthetic oligonucleotide
  misc_feature 1..20: note = Target: SCN10A; (+) strand; PAM type: YTN; PAM sequence: CTC
  source 1..20: mol_type = other DNA
tgagtcagcgaaaagctggg

SEQ ID NO: 64976 - DNA, 20 bp, synthetic construct
  misc_feature 1..20: note = Description of Artificial Sequence: Synthetic oligonucleotide
  misc_feature 1..20: note = Target: SCN10A; (+) strand; PAM type: YTN; PAM sequence: CTG
  source 1..20: mol_type = other DNA
agtcagcgaaaagctggggc

SEQ ID NO: 64977 - DNA, 20 bp, synthetic construct
  misc_feature 1..20: note = Description of Artificial Sequence: Synthetic oligonucleotide
  misc_feature 1..20: note = Target: SCN10A; (+) strand; PAM type: YTN; PAM sequence: CTG
  source 1..20: mol_type = other DNA
gggccacagacccaagtctc

SEQ ID NO: 64978 - DNA, 20 bp, synthetic construct
  misc_feature 1..20: note = Description of Artificial Sequence: Synthetic oligonucleotide
  misc_feature 1..20: note = Target: SCN10A; (+) strand; PAM type: YTN; PAM sequence: CTC
  source 1..20: mol_type = other DNA
cagtcgcccaggagtcagac

SEQ ID NO: 64979 - DNA, 20 bp, synthetic construct
  misc_feature 1..20: note = Description of Artificial Sequence: Synthetic oligonucleotide
  misc_feature 1..20: note = Target: SCN10A; (+) strand; PAM type: YTN; PAM sequence: CTG
  source 1..20: mol_type = other DNA
ctccctcccacaaggacagg

SEQ ID NO: 64980 - DNA, 20 bp, synthetic construct
  misc_feature 1..20: note = Description of Artificial Sequence: Synthetic oligonucleotide
  misc_feature 1..20: note = Target: SCN10A; (+) strand; PAM type: YTN; PAM sequence: CTC
  source 1..20: mol_type = other DNA
cctcccacaaggacaggaga

SEQ ID NO: 64981 - DNA, 20 bp, synthetic construct
  misc_feature 1..20: note = Description of Artificial Sequence: Synthetic oligonucleotide
  misc_feature 1..20: note = Target: SCN10A; (+) strand; PAM type: YTN; PAM sequence: CTC
  source 1..20: mol_type = other DNA
ccacaaggacaggagaggaa

SEQ ID NO: 64982 - DNA, 20 bp, synthetic construct
  misc_feature 1..20: note = Description of Artificial Sequence: Synthetic oligonucleotide
  misc_feature 1..20: note = Target: SCN10A; (+) strand; PAM type: YTN; PAM sequence: CTG
  source 1..20: mol_type = other DNA
gctggtgcagtccccagagc

SEQ ID NO: 64983 - DNA, 20 bp, synthetic construct
  misc_feature 1..20: note = Description of Artificial Sequence: Synthetic oligonucleotide
  misc_feature 1..20: note = Target: SCN10A; (+) strand; PAM type: YTN; PAM sequence: CTG
  source 1..20: mol_type = other DNA
gtgcagtccccagagcacag

SEQ ID NO: 64984 - DNA, 20 bp, synthetic construct
  misc_feature 1..20: note = Description of Artificial Sequence: Synthetic oligonucleotide
  misc_feature 1..20: note = Target: SCN10A; (+) strand; PAM type: YTN; PAM sequence: CTT
  source 1..20: mol_type = other DNA
ccctgaatctgggtgggagt

SEQ ID NO: 64985 - DNA, 20 bp, synthetic construct
  misc_feature 1..20: note = Description of Artificial Sequence: Synthetic oligonucleotide
  misc_feature 1..20: note = Target: SCN10A; (+) strand; PAM type: YTN; PAM sequence: TTC
  source 1..20: mol_type = other DNA
cctgaatctgggtgggagtt

SEQ ID NO: 64986 - DNA, 20 bp, synthetic construct
  misc_feature 1..20: note = Description of Artificial Sequence: Synthetic oligonucleotide
  misc_feature 1..20: note = Target: SCN10A; (+) strand; PAM type: YTN; PAM sequence: CTG
  source 1..20: mol_type = other DNA
aatctgggtgggagtttccc

SEQ ID NO: 64987 - DNA, 20 bp, synthetic construct
  misc_feature 1..20: note = Description of Artificial Sequence: Synthetic oligonucleotide
  misc_feature 1..20: note = Target: SCN10A; (+) strand; PAM type: YTN; PAM sequence: CTG
  source 1..20: mol_type = other DNA
ggtgggagtttccccaagcc

SEQ ID NO: 64988 - DNA, 20 bp, synthetic construct
  misc_feature 1..20: note = Description of Artificial Sequence: Synthetic oligonucleotide
  misc_feature 1..20: note = Target: SCN10A; (+) strand; PAM type: YTN; PAM sequence: TTT
  source 1..20: mol_type = other DNA
ccccaagccatcaagagaaa

SEQ ID NO: 64989 - DNA, 20 bp, synthetic construct
  misc_feature 1..20: note = Description of Artificial Sequence: Synthetic oligonucleotide
  misc_feature 1..20: note = Target: SCN10A; (+) strand; PAM type: YTN; PAM sequence: TTC
  source 1..20: mol_type = other DNA
cccaagccatcaagagaaaa

SEQ ID NO: 64990 - DNA, 20 bp, synthetic construct
  misc_feature 1..20: note = Description of Artificial Sequence: Synthetic oligonucleotide
  misc_feature 1..20: note = Target: SCN10A; (+) strand; PAM type: YTN; PAM sequence: TTA
  source 1..20: mol_type = other DNA
ccaagcggaagctccgcagc

SEQ ID NO: 64991 - DNA, 20 bp, synthetic construct
  misc_feature 1..20: note = Description of Artificial Sequence: Synthetic oligonucleotide
  misc_feature 1..20: note = Target: SCN10A; (+) strand; PAM type: YTN; PAM sequence: CTC
  source 1..20: mol_type = other DNA
cgcagcacagacaggcttcc

SEQ ID NO: 64992 - DNA, 20 bp, synthetic construct
  misc_feature 1..20: note = Description of Artificial Sequence: Synthetic oligonucleotide
  misc_feature 1..20: note = Target: SCN10A; (+) strand; PAM type: YTN; PAM sequence: CTT
  source 1..20: mol_type = other DNA
cccttcttggccacgcccag

SEQ ID NO: 64993 - DNA, 20 bp, synthetic construct
  misc_feature 1..20: note = Description of Artificial Sequence: Synthetic oligonucleotide
  misc_feature 1..20: note = Target: SCN10A; (+) strand; PAM type: YTN; PAM sequence: TTC
  source 1..20: mol_type = other DNA
ccttcttggccacgcccagc

SEQ ID NO: 64994 - DNA, 20 bp, synthetic construct
  misc_feature 1..20: note = Description of Artificial Sequence: Synthetic oligonucleotide
  misc_feature 1..20: note = Target: SCN10A; (+) strand; PAM type: YTN; PAM sequence: CTT
  source 1..20: mol_type = other DNA
cttggccacgcccagctcta

SEQ ID NO: 64995 - DNA, 20 bp, synthetic construct
  misc_feature 1..20: note = Description of Artificial Sequence: Synthetic oligonucleotide
  misc_feature 1..20: note = Target: SCN10A; (+) strand; PAM type: YTN; PAM sequence: TTC
  source 1..20: mol_type = other DNA
ttggccacgcccagctctag

SEQ ID NO: 64996 - DNA, 20 bp, synthetic construct
  misc_feature 1..20: note = Description of Artificial Sequence: Synthetic oligonucleotide
  misc_feature 1..20: note = Target: SCN10A; (+) strand; PAM type: YTN; PAM sequence: CTT
  source 1..20: mol_type = other DNA
ggccacgcccagctctagca

SEQ ID NO: 64997 - DNA, 20 bp, synthetic construct
  misc_feature 1..20: note = Description of Artificial Sequence: Synthetic oligonucleotide
  misc_feature 1..20: note = Target: SCN10A; (+) strand; PAM type: YTN; PAM sequence: TTG
  source 1..20: mol_type = other DNA
gccacgcccagctctagcag

SEQ ID NO: 64998 - DNA, 20 bp, synthetic construct
  misc_feature 1..20: note = Description of Artificial Sequence: Synthetic oligonucleotide
  misc_feature 1..20: note = Target: SCN10A; (+) strand; PAM type: YTN; PAM sequence: CTC
  source 1..20: mol_type = other DNA
tagcagactcacagtgacga

SEQ ID NO: 64999 - DNA, 20 bp, synthetic construct
  misc_feature 1..20: note = Description of Artificial Sequence: Synthetic oligonucleotide
  misc_feature 1..20: note = Target: SCN10A; (+) strand; PAM type: YTN; PAM sequence: CTA
  source 1..20: mol_type = other DNA
gcagactcacagtgacgatg

SEQ ID NO: 65000 - DNA, 20 bp, synthetic construct
  misc_feature 1..20: note = Description of Artificial Sequence: Synthetic oligonucleotide
  misc_feature 1..20: note = Target: SCN10A; (+) strand; PAM type: YTN; PAM sequence: CTC
  source 1..20: mol_type = other DNA
acagtgacgatgatgcagtc

SEQ ID NO: 65001 - DNA, 20 bp, synthetic construct
  misc_feature 1..20: note = Description of Artificial Sequence: Synthetic oligonucleotide
  misc_feature 1..20: note = Target: SCN10A; (+) strand; PAM type: YTN; PAM sequence: TTC
  source 1..20: mol_type = other DNA
cacttcttctggaaataata

SEQ ID NO: 65002 - DNA, 20 bp, synthetic construct
  misc_feature 1..20: note = Description of Artificial Sequence: Synthetic oligonucleotide
  misc_feature 1..20: note = Target: SCN10A; (+) strand; PAM type: YTN; PAM sequence: CTT
  source 1..20: mol_type = other DNA
cttctggaaataatagtatg

SEQ ID NO: 65003 - DNA, 20 bp, synthetic construct
  misc_feature 1..20: note = Description of Artificial Sequence: Synthetic oligonucleotide
  misc_feature 1..20: note = Target: SCN10A; (+) strand; PAM type: YTN; PAM sequence: TTC
  source 1..20: mol_type = other DNA
ttctggaaataatagtatgg

SEQ ID NO: 65004 - DNA, 20 bp, synthetic construct
  misc_feature 1..20: note = Description of Artificial Sequence: Synthetic oligonucleotide
  misc_feature 1..20: note = Target: SCN10A; (+) strand; PAM type: YTN; PAM sequence: CTT
  source 1..20: mol_type = other DNA
ctggaaataatagtatgggt

SEQ ID NO: 65005 - DNA, 20 bp, synthetic construct
  misc_feature 1..20: note = Description of Artificial Sequence: Synthetic oligonucleotide
  misc_feature 1..20: note = Target: SCN10A; (+) strand; PAM type: YTN; PAM sequence: TTC
  source 1..20: mol_type = other DNA
tggaaataatagtatgggtc

SEQ ID NO: 65006 - DNA, 20 bp, synthetic construct
  misc_feature 1..20: note = Description of Artificial Sequence: Synthetic oligonucleotide
  misc_feature 1..20: note = Target: SCN10A; (+) strand; PAM type: YTN; PAM sequence: CTG
  source 1..20: mol_type = other DNA
gaaataatagtatgggtcga

SEQ ID NO: 65007 - DNA, 20 bp, synthetic construct
  misc_feature 1..20: note = Description of Artificial Sequence: Synthetic oligonucleotide
  misc_feature 1..20: note = Target: SCN10A; (+) strand; PAM type: YTN; PAM sequence: TTT
  source 1..20: mol_type = other DNA
tgaagaccatttcagcagta

SEQ ID NO: 65008 - DNA, 20 bp, synthetic construct
  misc_feature 1..20: note = Description of Artificial Sequence: Synthetic oligonucleotide
  misc_feature 1..20: note = Target: SCN10A; (+) strand; PAM type: YTN; PAM sequence: TTT
  source 1..20: mol_type = other DNA
gaagaccatttcagcagtaa

SEQ ID NO: 65009 - DNA, 20 bp, synthetic construct
  misc_feature 1..20: note = Description of Artificial Sequence: Synthetic oligonucleotide
  misc_feature 1..20: note = Target: SCN10A; (+) strand; PAM type: YTN; PAM sequence: TTG
  source 1..20: mol_type = other DNA
aagaccatttcagcagtaaa

SEQ ID NO: 65010 - DNA, 20 bp, synthetic construct
  misc_feature 1..20: note = Description of Artificial Sequence: Synthetic oligonucleotide
  misc_feature 1..20: note = Target: SCN10A; (+) strand; PAM type: YTN; PAM sequence: TTT
  source 1..20: mol_type = other DNA
cagcagtaaaaaatatggta

SEQ ID NO: 65011 - DNA, 20 bp, synthetic construct
  misc_feature 1..20: note = Description of Artificial Sequence: Synthetic oligonucleotide
  misc_feature 1..20: note = Target: SCN10A; (+) strand; PAM type: YTN; PAM sequence: TTC
  source 1..20: mol_type = other DNA
agcagtaaaaaatatggtaa

SEQ ID NO: 65012 - DNA, 20 bp, synthetic construct
  misc_feature 1..20: note = Description of Artificial Sequence: Synthetic oligonucleotide
  misc_feature 1..20: note = Target: SCN10A; (+) strand; PAM type: YTN; PAM sequence: CTA
  source 1..20: mol_type = other DNA
ggagtggaaacaagctttca

SEQ ID NO: 65013 - DNA, 20 bp, synthetic construct
  misc_feature 1..20: note = Description of Artificial Sequence: Synthetic oligonucleotide
  misc_feature 1..20: note = Target: SCN10A; (+) strand; PAM type: YTN; PAM sequence: CTT
  source 1..20: mol_type = other DNA
tcatcacagtgggatctgtg

SEQ ID NO: 65014 - DNA, 20 bp, synthetic construct
  misc_feature 1..20: note = Description of Artificial Sequence: Synthetic oligonucleotide
  misc_feature 1..20: note = Target: SCN10A; (+) strand; PAM type: YTN; PAM sequence: TTT
  source 1..20: mol_type = other DNA
catcacagtgggatctgtgg

SEQ ID NO: 65015 - DNA, 20 bp, synthetic construct
  misc_feature 1..20: note = Description of Artificial Sequence: Synthetic oligonucleotide
  misc_feature 1..20: note = Target: SCN10A; (+) strand; PAM type: YTN; PAM sequence: TTC
  source 1..20: mol_type = other DNA
atcacagtgggatctgtggg

SEQ ID NO: 65016 - DNA, 20 bp, synthetic construct
  misc_feature 1..20: note = Description of Artificial Sequence: Synthetic oligonucleotide
  misc_feature 1..20: note = Target: SCN10A; (+) strand; PAM type: YTN; PAM sequence: CTG
  source 1..20: mol_type = other DNA
tggggtcggaggcaatgata

SEQ ID NO: 65017 - DNA, 20 bp, synthetic construct
  misc_feature 1..20: note = Description of Artificial Sequence: Synthetic oligonucleotide
  misc_feature 1..20: note = Target: SCN10A; (+) strand; PAM type: YTN; PAM sequence: CTT
  source 1..20: mol_type = other DNA
atttacaaaatagaaaatcc

SEQ ID NO: 65018 - DNA, 20 bp, synthetic construct
  misc_feature 1..20: note = Description of Artificial Sequence: Synthetic oligonucleotide
  misc_feature 1..20: note = Target: SCN10A; (+) strand; PAM type: YTN; PAM sequence: TTA
  source 1..20: mol_type = other DNA
tttacaaaatagaaaatcct

SEQ ID NO: 65019 - DNA, 20 bp, synthetic construct
  misc_feature 1..20: note = Description of Artificial Sequence: Synthetic oligonucleotide
  misc_feature 1..20: note = Target: SCN10A; (+) strand; PAM type: YTN; PAM sequence: TTT
  source 1..20: mol_type = other DNA
acaaaatagaaaatcctttt

SEQ ID NO: 65020 - DNA, 20 bp, synthetic construct
  misc_feature 1..20: note = Description of Artificial Sequence: Synthetic oligonucleotide
  misc_feature 1..20: note = Target: SCN10A; (+) strand; PAM type: YTN; PAM sequence: TTA
  source 1..20: mol_type = other DNA
caaaatagaaaatccttttg

SEQ ID NO: 65021 - DNA, 20 bp, synthetic construct
  misc_feature 1..20: note = Description of Artificial Sequence: Synthetic oligonucleotide
  misc_feature 1..20: note = Target: SCN10A; (+) strand; PAM type: YTN; PAM sequence: CTT
  source 1..20: mol_type = other DNA
ttgttttgttcagttgctat

SEQ ID NO: 65022 - DNA, 20 bp, synthetic construct
  misc_feature 1..20: note = Description of Artificial Sequence: Synthetic oligonucleotide
  misc_feature 1..20: note = Target: SCN10A; (+) strand; PAM type: YTN; PAM sequence: TTT
  source 1..20: mol_type = other DNA
tgttttgttcagttgctatg

SEQ ID NO: 65023 - DNA, 20 bp, synthetic construct
  misc_feature 1..20: note = Description of Artificial Sequence: Synthetic oligonucleotide
  misc_feature 1..20: note = Target: SCN10A; (+) strand; PAM type: YTN; PAM sequence: TTT
  source 1..20: mol_type = other DNA
gttttgttcagttgctatgt

SEQ ID NO: 65024 - DNA, 20 bp, synthetic construct
  misc_feature 1..20: note = Description of Artificial Sequence: Synthetic oligonucleotide
  misc_feature 1..20: note = Target: SCN10A; (+) strand; PAM type: YTN; PAM sequence: TTG
  source 1..20: mol_type = other DNA
ttttgttcagttgctatgtt

SEQ ID NO: 65025 - DNA, 20 bp, synthetic construct
  misc_feature 1..20: note = Description of Artificial Sequence: Synthetic oligonucleotide
  misc_feature 1..20: note = Target: SCN10A; (+) strand; PAM type: YTN; PAM sequence: TTT
  source 1..20: mol_type = other DNA
tgttcagttgctatgttatc

SEQ ID NO: 65026 - DNA, 20 bp, synthetic construct
  misc_feature 1..20: note = Description of Artificial Sequence: Synthetic oligonucleotide
  misc_feature 1..20: note = Target: SCN10A; (+) strand; PAM type: YTN; PAM sequence: TTT
  source 1..20: mol_type = other DNA
gttcagttgctatgttatct

SEQ ID NO: 65027 - DNA, 20 bp, synthetic construct
  misc_feature 1..20: note = Description of Artificial Sequence: Synthetic oligonucleotide
  misc_feature 1..20: note = Target: SCN10A; (+) strand; PAM type: YTN; PAM sequence: TTG
  source 1..20: mol_type = other DNA
ttcagttgctatgttatctg

SEQ ID NO: 65028 - DNA, 20 bp, synthetic construct
  misc_feature 1..20: note = Description of Artificial Sequence: Synthetic oligonucleotide
  misc_feature 1..20: note = Target: SCN10A; (+) strand; PAM type: YTN; PAM sequence: TTC
  source 1..20: mol_type = other DNA
agttgctatgttatctgtgg

SEQ ID NO: 65029 - DNA, 20 bp, synthetic construct
  misc_feature 1..20: note = Description of Artificial Sequence: Synthetic oligonucleotide
  misc_feature 1..20: note = Target: SCN10A; (+) strand; PAM type: YTN; PAM sequence: TTG
  source 1..20: mol_type = other DNA
ctatgttatctgtgggctcc

SEQ ID NO: 65030 - DNA, 20 bp, synthetic construct
  misc_feature 1..20: note = Description of Artificial Sequence: Synthetic oligonucleotide
  misc_feature 1..20: note = Target: SCN10A; (+) strand; PAM type: YTN; PAM sequence: CTA
  source 1..20: mol_type = other DNA
tgttatctgtgggctcctga

SEQ ID NO: 65031 - DNA, 20 bp, synthetic construct
  misc_feature 1..20: note = Description of Artificial Sequence: Synthetic oligonucleotide
  misc_feature 1..20: note = Target: SCN10A; (+) strand; PAM type: YTN; PAM sequence: TTA
  source 1..20: mol_type = other DNA
tctgtgggctcctgaggatt

SEQ ID NO: 65032 - DNA, 20 bp, synthetic construct
  misc_feature 1..20: note = Description of Artificial Sequence: Synthetic oligonucleotide
  misc_feature 1..20: note = Target: SCN10A; (+) strand; PAM type: YTN; PAM sequence: CTG
  source 1..20: mol_type = other DNA
tgggctcctgaggattggcc

SEQ ID NO: 65033 - DNA, 20 bp, synthetic construct
  misc_feature 1..20: note = Description of Artificial Sequence: Synthetic oligonucleotide
  misc_feature 1..20: note = Target: SCN10A; (+) strand; PAM type: YTN; PAM sequence: CTC
  source 1..20: mol_type = other DNA
ctgaggattggccagggtaa

SEQ ID NO: 65034 - DNA, 20 bp, synthetic construct
  misc_feature 1..20: note = Description of Artificial Sequence: Synthetic oligonucleotide
  misc_feature 1..20: note = Target: SCN10A; (+) strand; PAM type: YTN; PAM sequence: CTG
  source 1..20: mol_type = other DNA
aggattggccagggtaacag

SEQ ID NO: 65035 - DNA, 20 bp, synthetic construct
  misc_feature 1..20: note = Description of Artificial Sequence: Synthetic oligonucleotide
  misc_feature 1..20: note = Target: SCN10A; (+) strand; PAM type: YTN; PAM sequence: TTG
  source 1..20: mol_type = other DNA
gccagggtaacagtcaacgt

SEQ ID NO: 65036 - DNA, 20 bp, synthetic construct
  misc_feature 1..20: note = Description of Artificial Sequence: Synthetic oligonucleotide
  misc_feature 1..20: note = Target: SCN10A; (+) strand; PAM type: YTN; PAM sequence: TTT
  source 1..20: mol_type = other DNA
ctgcaccattctcaggggct

SEQ ID NO: 65037 - DNA, 20 bp, synthetic construct
  misc_feature 1..20: note = Description of Artificial Sequence: Synthetic oligonucleotide
  misc_feature 1..20: note = Target: SCN10A; (+) strand; PAM type: YTN; PAM sequence: TTC
  source 1..20: mol_type = other DNA
tgcaccattctcaggggctg

SEQ ID NO: 65038 - DNA, 20 bp, synthetic construct
  misc_feature 1..20: note = Description of Artificial Sequence: Synthetic oligonucleotide
  misc_feature 1..20: note = Target: SCN10A; (+) strand; PAM type: YTN; PAM sequence: CTG
  source 1..20: mol_type = other DNA
caccattctcaggggctgtg

SEQ ID NO: 65039 - DNA, 20 bp, synthetic construct
  misc_feature 1..20: note = Description of Artificial Sequence: Synthetic oligonucleotide
  misc_feature 1..20: note = Target: SCN10A; (+) strand; PAM type: YTN; PAM sequence: TTC
  source 1..20: mol_type = other DNA
tcaggggctgtgcatgctgc

SEQ ID NO: 65040 - DNA, 20 bp, synthetic construct
  misc_feature 1..20: note = Description of Artificial Sequence: Synthetic oligonucleotide
  misc_feature 1..20: note = Target: SCN10A; (+) strand; PAM type: YTN; PAM sequence: CTC
  source 1..20: mol_type = other DNA
aggggctgtgcatgctgcag

SEQ ID NO: 65041 - DNA, 20 bp, synthetic construct
  misc_feature 1..20: note = Description of Artificial Sequence: Synthetic oligonucleotide
  misc_feature 1..20: note = Target: SCN10A; (+) strand; PAM type: YTN; PAM sequence: CTG
  source 1..20: mol_type = other DNA
tgcatgctgcagtttttcca

SEQ ID NO: 65042 - DNA, 20 bp, synthetic construct
  misc_feature 1..20: note = Description of Artificial Sequence: Synthetic oligonucleotide
  misc_feature 1..20: note = Target: SCN10A; (+) strand; PAM type: YTN; PAM sequence: CTG
  source 1..20: mol_type = other DNA
cagtttttccacgtgaatgg

SEQ ID NO: 65043 - DNA, 20 bp, synthetic construct
  misc_feature 1..20: note = Description of Artificial Sequence: Synthetic oligonucleotide
  misc_feature 1..20: note = Target: SCN10A; (+) strand; PAM type: YTN; PAM sequence: TTT
  source 1..20: mol_type = other DNA
ttccacgtgaatggtggtgg

SEQ ID NO: 65044 - DNA, 20 bp, synthetic construct
  misc_feature 1..20: note = Description of Artificial Sequence: Synthetic oligonucleotide
  misc_feature 1..20: note = Target: SCN10A; (+) strand; PAM type: YTN; PAM sequence: TTT
  source 1..20: mol_type = other DNA
tccacgtgaatggtggtggg

SEQ ID NO: 65045 - DNA, 20 bp, synthetic construct
  misc_feature 1..20: note = Description of Artificial Sequence: Synthetic oligonucleotide
  misc_feature 1..20: note = Target: SCN10A; (+) strand; PAM type: YTN; PAM sequence: TTT
  source 1..20: mol_type = other DNA
ccacgtgaatggtggtggga

SEQ ID NO: 65046 - DNA, 20 bp, synthetic construct
  misc_feature 1..20: note = Description of Artificial Sequence: Synthetic oligonucleotide
  misc_feature 1..20: note = Target: SCN10A; (+) strand; PAM type: YTN; PAM sequence: TTC
  source 1..20: mol_type = other DNA
cacgtgaatggtggtgggag

SEQ ID NO: 65047 - DNA, 20 bp, synthetic construct
  misc_feature 1..20: note = Description of Artificial Sequence: Synthetic oligonucleotide
  misc_feature 1..20: note = Target: SCN10A; (+) strand; PAM type: YTN; PAM sequence: CTT
  source 1..20: mol_type = other DNA
taagatcattattataatat

SEQ ID NO: 65048 - DNA, 20 bp, synthetic construct
  misc_feature 1..20: note = Description of Artificial Sequence: Synthetic oligonucleotide
  misc_feature 1..20: note = Target: SCN10A; (+) strand; PAM type: YTN; PAM sequence: TTT
  source 1..20: mol_type = other DNA
aagatcattattataatatc

SEQ ID NO: 65049 - DNA, 20 bp, synthetic construct
  misc_feature 1..20: note = Description of Artificial Sequence: Synthetic oligonucleotide
  misc_feature 1..20: note = Target: SCN10A; (+) strand; PAM type: YTN; PAM sequence: TTA
  source 1..20: mol_type = other DNA
agatcattattataatatca

SEQ ID NO: 65050 - DNA, 20 bp, synthetic construct
  misc_feature 1..20: note = Description of Artificial Sequence: Synthetic oligonucleotide
  misc_feature 1..20: note = Target: SCN10A; (+) strand; PAM type: YTN; PAM sequence: TTA
  source 1..20: mol_type = other DNA
ttataatatcattttgtcag

SEQ ID NO: 65051 - DNA, 20 bp, synthetic construct
  misc_feature 1..20: note = Description of Artificial Sequence: Synthetic oligonucleotide
  misc_feature 1..20: note = Target: SCN10A; (+) strand; PAM type: YTN; PAM sequence: TTA
  source 1..20: mol_type = other DNA
taatatcattttgtcagtga

SEQ ID NO: 65052 - DNA, 20 bp, synthetic construct
  misc_feature 1..20: note = Description of Artificial Sequence: Synthetic oligonucleotide
  misc_feature 1..20: note = Target: SCN10A; (+) strand; PAM type: YTN; PAM sequence: TTT
  source 1..20: mol_type = other DNA
tgtcagtgaagagtcagtct

SEQ ID NO: 65053 - DNA, 20 bp, synthetic construct
  misc_feature 1..20: note = Description of Artificial Sequence: Synthetic oligonucleotide
  misc_feature 1..20: note = Target: SCN10A; (+) strand; PAM type: YTN; PAM sequence: TTT
  source 1..20: mol_type = other DNA
gtcagtgaagagtcagtctg

SEQ ID NO: 65054 - DNA, 20 bp, synthetic construct
  misc_feature 1..20: note = Description of Artificial Sequence: Synthetic oligonucleotide
  misc_feature 1..20: note = Target: SCN10A; (+) strand; PAM type: YTN; PAM sequence: TTG
  source 1..20: mol_type = other DNA
tcagtgaagagtcagtctgg

SEQ ID NO: 65055 - DNA, 20 bp, synthetic construct
  misc_feature 1..20: note = Description of Artificial Sequence: Synthetic oligonucleotide
  misc_feature 1..20: note = Target: SCN10A; (+) strand; PAM type: YTN; PAM sequence: CTG
  source 1..20: mol_type = other DNA
gttcagtagttaaaacgtgt

SEQ ID NO: 65056 - DNA, 20 bp, synthetic construct
  misc_feature 1..20: note = Description of Artificial Sequence: Synthetic oligonucleotide
  misc_feature 1..20: note = Target: SCN10A; (+) strand; PAM type: YTN; PAM sequence: TTC
  source 1..20: mol_type = other DNA
agtagttaaaacgtgtgggt

SEQ ID NO: 65057 - DNA, 20 bp, synthetic construct
  misc_feature 1..20: note = Description of Artificial Sequence: Synthetic oligonucleotide
  misc_feature 1..20: note = Target: SCN10A; (+) strand; PAM type: YTN; PAM sequence: TTA
  source 1..20: mol_type = other DNA
aaacgtgtgggttgtgggac

SEQ ID NO: 65058 - DNA, 20 bp, synthetic construct
  misc_feature 1..20: note = Description of Artificial Sequence: Synthetic oligonucleotide
  misc_feature 1..20: note = Target: SCN10A; (+) strand; PAM type: YTN; PAM sequence: TTG
  source 1..20: mol_type = other DNA
tgggacatcacagacctgga

SEQ ID NO: 65059 - DNA, 20 bp, synthetic construct
  misc_feature 1..20: note = Description of Artificial Sequence: Synthetic oligonucleotide
  misc_feature 1..20: note = Target: SCN10A; (+) strand; PAM type: YTN; PAM sequence: CTG
  source 1..20: mol_type = other DNA
gattaaaatcccagcccaga

SEQ ID NO: 65060 - DNA, 20 bp, synthetic construct
  misc_feature 1..20: note = Description of Artificial Sequence: Synthetic oligonucleotide
  misc_feature 1..20: note = Target: SCN10A; (+) strand; PAM type: YTN; PAM sequence: TTA
  source 1..20: mol_type = other DNA
aaatcccagcccagacattt

SEQ ID NO: 65061 - DNA, 20 bp, synthetic construct
  misc_feature 1..20: note = Description of Artificial Sequence: Synthetic oligonucleotide
  misc_feature 1..20: note = Target: SCN10A; (+) strand; PAM type: YTN; PAM sequence: TTT
  source 1..20: mol_type = other DNA
cctagcttatgtaagcttgg

SEQ ID NO: 65062 - DNA, 20 bp, synthetic construct
  misc_feature 1..20: note = Description of Artificial Sequence: Synthetic oligonucleotide
  misc_feature 1..20: note = Target: SCN10A; (+) strand; PAM type: YTN; PAM sequence: TTC
  source 1..20: mol_type = other DNA
ctagcttatgtaagcttgga

SEQ ID NO: 65063 - DNA, 20 bp, synthetic construct
  misc_feature 1..20: note = Description of Artificial Sequence: Synthetic oligonucleotide
  misc_feature 1..20: note = Target: SCN10A; (+) strand; PAM type: YTN; PAM sequence: CTA
  source 1..20: mol_type = other DNA
gcttatgtaagcttggacaa

SEQ ID NO: 65064 - DNA, 20 bp, synthetic construct
  misc_feature 1..20: note = Description of Artificial Sequence: Synthetic oligonucleotide
  misc_feature 1..20: note = Target: SCN10A; (+) strand; PAM type: YTN; PAM sequence: CTT
  source 1..20: mol_type = other DNA
atgtaagcttggacaaataa

SEQ ID NO: 65065 - DNA, 20 bp, synthetic construct
  misc_feature 1..20: note = Description of Artificial Sequence: Synthetic oligonucleotide
  misc_feature 1..20: note = Target: SCN10A; (+) strand; PAM type: YTN; PAM sequence: TTA
  source 1..20: mol_type = other DNA
tgtaagcttggacaaataat

SEQ ID NO: 65066 - DNA, 20 bp, synthetic construct
  misc_feature 1..20: note = Description of Artificial Sequence: Synthetic oligonucleotide
  misc_feature 1..20: note = Target: SCN10A; (+) strand; PAM type: YTN; PAM sequence: CTT
  source 1..20: mol_type = other DNA
ggacaaataatgcatccttc

SEQ ID NO: 65067 - DNA, 20 bp, synthetic construct
  misc_feature 1..20: note = Description of Artificial Sequence: Synthetic oligonucleotide
  misc_feature 1..20: note = Target: SCN10A; (+) strand; PAM type: YTN; PAM sequence: TTG
  source 1..20: mol_type = other DNA
gacaaataatgcatccttcc

SEQ ID NO: 65068 - DNA, 20 bp, synthetic construct
  misc_feature 1..20: note = Description of Artificial Sequence: Synthetic oligonucleotide
  misc_feature 1..20: note = Target: SCN10A; (+) strand; PAM type: YTN; PAM sequence: CTT
  source 1..20: mol_type = other DNA
cctgtacctcaatttcctca

SEQ ID NO: 65069 - DNA, 20 bp, synthetic construct
  misc_feature 1..20: note = Description of Artificial Sequence: Synthetic oligonucleotide
  misc_feature 1..20: note = Target: SCN10A; (+) strand; PAM type: YTN; PAM sequence: TTC
  source 1..20: mol_type = other DNA
ctgtacctcaatttcctcat

SEQ ID NO: 65070 - DNA, 20 bp, synthetic construct
  misc_feature 1..20: note = Description of Artificial Sequence: Synthetic oligonucleotide
  misc_feature 1..20: note = Target: SCN10A; (+) strand; PAM type: YTN; PAM sequence: CTG
  source 1..20: mol_type = other DNA
tacctcaatttcctcatctg

SEQ ID NO: 65071 - DNA, 20 bp, synthetic construct
  misc_feature 1..20: note = Description of Artificial Sequence: Synthetic oligonucleotide
  misc_feature 1..20: note = Target: SCN10A; (+) strand; PAM type: YTN; PAM sequence: CTC
  source 1..20: mol_type = other DNA
aatttcctcatctgtataat

SEQ ID NO: 65072 - DNA, 20 bp, synthetic construct
  misc_feature 1..20: note = Description of Artificial Sequence: Synthetic oligonucleotide
  misc_feature 1..20: note = Target: SCN10A; (+) strand; PAM type: YTN; PAM sequence: TTT
  source 1..20: mol_type = other DNA
cctcatctgtataatgggca

SEQ ID NO: 65073 - DNA, 20 bp, synthetic construct
  misc_feature 1..20: note = Description of Artificial Sequence: Synthetic oligonucleotide
  misc_feature 1..20: note = Target: SCN10A; (+) strand; PAM type: YTN; PAM sequence: TTC
  source 1..20: mol_type = other DNA
ctcatctgtataatgggcat

SEQ ID NO: 65074 - DNA, 20 bp, synthetic construct
  misc_feature 1..20: note = Description of Artificial Sequence: Synthetic oligonucleotide
  misc_feature 1..20: note = Target: SCN10A; (+) strand; PAM type: YTN; PAM sequence: CTC
  source 1..20: mol_type = other DNA
atctgtataatgggcataaa

SEQ ID NO: 65075 - DNA, 20 bp, synthetic construct
  misc_feature 1..20: note = Description of Artificial Sequence: Synthetic oligonucleotide
  misc_feature 1..20: note = Target: SCN10A; (+) strand; PAM type: YTN; PAM sequence: CTG
  source 1..20: mol_type = other DNA
tataatgggcataaaatgag

SEQ ID NO: 65076 - DNA, 20 bp, synthetic construct
  misc_feature 1..20: note = Description of Artificial Sequence: Synthetic oligonucleotide
  misc_feature 1..20: note = Target: SCN10A; (+) strand; PAM type: YTN; PAM sequence: TTC
  source 1..20: mol_type = other DNA
ttaacaaagggcctggcaga

SEQ ID NO: 65077 - DNA, 20 bp, synthetic construct
  misc_feature 1..20: note = Description of Artificial Sequence: Synthetic oligonucleotide
  misc_feature 1..20: note = Target: SCN10A; (+) strand; PAM type: YTN; PAM sequence: CTT
  source 1..20: mol_type = other DNA
aacaaagggcctggcagaca

SEQ ID NO: 65078 - DNA, 20 bp, synthetic construct
  misc_feature 1..20: note = Description of Artificial Sequence: Synthetic oligonucleotide
  misc_feature 1..20: note = Target: SCN10A; (+) strand; PAM type: YTN; PAM sequence: TTA
  source 1..20: mol_type = other DNA
acaaagggcctggcagacag

SEQ ID NO: 65079 - DNA, 20 bp, synthetic construct
  misc_feature 1..20: note = Description of Artificial Sequence: Synthetic oligonucleotide
  misc_feature 1..20: note = Target: SCN10A; (+) strand; PAM type: YTN; PAM sequence: CTG
  source 1..20: mol_type = other DNA
gcagacagtaattcattcat

SEQ ID NO: 65080 - DNA, 20 bp, synthetic construct
  misc_feature 1..20: note = Description of Artificial Sequence: Synthetic oligonucleotide
  misc_feature 1..20: note = Target: SCN10A; (+) strand; PAM type: YTN; PAM sequence: TTC
  source 1..20: mol_type = other DNA
attcataagtaacagtgact

SEQ ID NO: 65081 - DNA, 20 bp, synthetic construct
  misc_feature 1..20: note = Description of Artificial Sequence: Synthetic oligonucleotide
  misc_feature 1..20: note = Target: SCN10A; (+) strand; PAM type: YTN; PAM sequence: TTC
  source 1..20: mol_type = other DNA
ataagtaacagtgactagta

SEQ ID NO: 65082 - DNA, 20 bp, synthetic construct
  misc_feature 1..20: note = Description of Artificial Sequence: Synthetic oligonucleotide
  misc_feature 1..20: note = Target: SCN10A; (+) strand; PAM type: YTN; PAM sequence: CTA
  source 1..20: mol_type = other DNA
gtaagaacaatgattcattg

SEQ ID NO: 65083 - DNA, 20 bp, synthetic construct
  misc_feature 1..20: note = Description of Artificial Sequence: Synthetic oligonucleotide
  misc_feature 1..20: note = Target: SCN10A; (+) strand; PAM type: YTN; PAM sequence: TTC
  source 1..20: mol_type = other DNA
attgcctctaagattctttt

SEQ ID NO: 65084 - DNA, 20 bp, synthetic construct
  misc_feature 1..20: note = Description of Artificial Sequence: Synthetic oligonucleotide
  misc_feature 1..20: note = Target: SCN10A; (+) strand; PAM type: YTN; PAM sequence: TTG
  source 1..20: mol_type = other DNA
cctctaagattcttttaggc

SEQ ID NO: 65085 - DNA, 20 bp, synthetic construct
  misc_feature 1..20: note = Description of Artificial Sequence: Synthetic oligonucleotide
  misc_feature 1..20: note = Target: SCN10A; (+) strand; PAM type: YTN; PAM sequence: CTC
  source 1..20: mol_type = other DNA
taagattcttttaggctctg

SEQ ID NO: 65086 - DNA, 20 bp, synthetic construct
  misc_feature 1..20: note = Description of Artificial Sequence: Synthetic oligonucleotide
  misc_feature 1..20: note = Target: SCN10A; (+) strand; PAM type: YTN; PAM sequence: CTA
  source 1..20: mol_type = other DNA
agattcttttaggctctgtg

SEQ ID NO: 65087 - DNA, 20 bp, synthetic construct
  misc_feature 1..20: note = Description of Artificial Sequence: Synthetic oligonucleotide
  misc_feature 1..20: note = Target: SCN10A; (+) strand; PAM type: YTN; PAM sequence: TTC
  source 1..20: mol_type = other DNA
ttttaggctctgtgtgtctc

SEQ ID NO: 65088 - DNA, 20 bp, synthetic construct
  misc_feature 1..20: note = Description of Artificial Sequence: Synthetic oligonucleotide
  misc_feature 1..20: note = Target: SCN10A; (+) strand; PAM type: YTN; PAM sequence: CTT
  source 1..20: mol_type = other DNA
ttaggctctgtgtgtctcta

SEQ ID NO: 65089 - DNA, 20 bp, synthetic construct
  misc_feature 1..20: note = Description of Artificial Sequence: Synthetic oligonucleotide
  misc_feature 1..20: note = Target: SCN10A; (+) strand; PAM type: YTN; PAM sequence: TTT
  source 1..20: mol_type = other DNA
taggctctgtgtgtctctaa

SEQ ID NO: 65090 - DNA, 20 bp, synthetic construct
  misc_feature 1..20: note = Description of Artificial Sequence: Synthetic oligonucleotide
  misc_feature 1..20: note = Target: SCN10A; (+) strand; PAM type: YTN; PAM sequence: TTT
  source 1..20: mol_type = other DNA
aggctctgtgtgtctctaat

SEQ ID NO: 65091 - DNA, 20 bp, synthetic construct
  misc_feature 1..20: note = Description of Artificial Sequence: Synthetic oligonucleotide
  misc_feature 1..20: note = Target: SCN10A; (+) strand; PAM type: YTN; PAM sequence: TTA
  source 1..20: mol_type = other DNA
ggctctgtgtgtctctaatt

SEQ ID NO: 65092 - DNA, 20 bp, synthetic construct
  misc_feature 1..20: note = Description of Artificial Sequence: Synthetic oligonucleotide
  misc_feature 1..20: note = Target: SCN10A; (+) strand; PAM type: YTN; PAM sequence: CTC
  source 1..20: mol_type = other DNA
tgtgtgtctctaattgtctt

SEQ ID NO: 65093 - DNA, 20 bp, synthetic construct
  misc_feature 1..20: note = Description of Artificial Sequence: Synthetic oligonucleotide
  misc_feature 1..20: note = Target: SCN10A; (+) strand; PAM type: YTN; PAM sequence: CTG
  source 1..20: mol_type = other DNA
tgtgtctctaattgtcttaa

SEQ ID NO: 65094 - DNA, 20 bp, synthetic construct
  misc_feature 1..20: note = Description of Artificial Sequence: Synthetic oligonucleotide
  misc_feature 1..20: note = Target: SCN10A; (+) strand; PAM type: YTN; PAM sequence: CTC
  source 1..20: mol_type = other DNA
taattgtcttaaataggaca

SEQ ID NO: 65095 - DNA, 20 bp, synthetic construct
  misc_feature 1..20: note = Description of Artificial Sequence: Synthetic oligonucleotide
  misc_feature 1..20: note = Target: SCN10A; (+) strand; PAM type: YTN; PAM sequence: CTA
  source 1..20: mol_type = other DNA
attgtcttaaataggacaga

SEQ ID NO: 65096 - DNA, 20 bp, synthetic construct
  misc_feature 1..20: note = Description of Artificial Sequence: Synthetic oligonucleotide
  misc_feature 1..20: note = Target: SCN10A; (+) strand; PAM type: YTN; PAM sequence: TTG
  source 1..20: mol_type = other DNA
tcttaaataggacagaattc

SEQ ID NO: 65097 - DNA, 20 bp, synthetic construct
  misc_feature 1..20: note = Description of Artificial Sequence: Synthetic oligonucleotide
  misc_feature 1..20: note = Target: SCN10A; (+) strand; PAM type: YTN; PAM sequence: CTT
  source 1..20: mol_type = other DNA
aaataggacagaattctgac

SEQ ID NO: 65098 - DNA, 20 bp, synthetic construct
  misc_feature 1..20: note = Description of Artificial Sequence: Synthetic oligonucleotide
  misc_feature 1..20: note = Target: SCN10A; (+) strand; PAM type: YTN; PAM sequence: TTA
  source 1..20: mol_type = other DNA
aataggacagaattctgaca

SEQ ID NO: 65099 - DNA, 20 bp, synthetic construct
  misc_feature 1..20: note = Description of Artificial Sequence: Synthetic oligonucleotide
  misc_feature 1..20: note = Target: SCN10A; (+) strand; PAM type: YTN; PAM sequence: TTC
  source 1..20: mol_type = other DNA
tgacactgagagaggtcaga

SEQ ID NO: 65100 - DNA, 20 bp, synthetic construct
  misc_feature 1..20: note = Description of Artificial Sequence: Synthetic oligonucleotide
  misc_feature 1..20: note = Target: SCN10A; (+) strand; PAM type: YTN; PAM sequence: CTG
  source 1..20: mol_type = other DNA
acactgagagaggtcagaac

SEQ ID NO: 65101 - DNA, 20 bp, synthetic construct
  misc_feature 1..20: note = Description of Artificial Sequence: Synthetic oligonucleotide
  misc_feature 1..20: note = Target: SCN10A; (+) strand; PAM type: YTN; PAM sequence: CTG
  source 1..20: mol_type = other DNA
agagaggtcagaaccaggct

SEQ ID NO: 65102 - DNA, 20 bp, synthetic construct
  misc_feature 1..20: note = Description of Artificial Sequence: Synthetic oligonucleotide
  misc_feature 1..20: note = Target: SCN10A; (+) strand; PAM type: YTN; PAM sequence: CTC
  source 1..20: mol_type = other DNA
gggtaacacaacaaccagca

SEQ ID NO: 65103 - DNA, 20 bp, synthetic construct
  misc_feature 1..20: note = Description of Artificial Sequence: Synthetic oligonucleotide
  misc_feature 1..20: note = Target: SCN10A; (+) strand; PAM type: YTN; PAM sequence: CTT
  source 1..20: mol_type = other DNA
ttccttcatatctttttatc

SEQ ID NO: 65104 - DNA, 20 bp, synthetic construct
  misc_feature 1..20: note = Description of Artificial Sequence: Synthetic oligonucleotide
  misc_feature 1..20: note = Target: SCN10A; (+) strand; PAM type: YTN; PAM sequence: TTT
  source 1..20: mol_type = other DNA
tccttcatatctttttatct

SEQ ID NO: 65105 - DNA, 20 bp, synthetic construct
  misc_feature 1..20: note = Description of Artificial Sequence: Synthetic oligonucleotide
  misc_feature 1..20: note = Target: SCN10A; (+) strand; PAM type: YTN; PAM sequence: TTT
  source 1..20: mol_type = other DNA
ccttcatatctttttatctg

SEQ ID NO: 65106 - DNA, 20 bp, synthetic construct
  misc_feature 1..20: note = Description of Artificial Sequence: Synthetic oligonucleotide
  misc_feature 1..20: note = Target: SCN10A; (+) strand; PAM type: YTN; PAM sequence: TTC
  source 1..20: mol_type = other DNA
cttcatatctttttatctga

SEQ ID NO: 65107 - DNA, 20 bp, synthetic construct
  misc_feature 1..20: note = Description of Artificial Sequence: Synthetic oligonucleotide
  misc_feature 1..20: note = Target: SCN10A; (+) strand; PAM type: YTN; PAM sequence: CTT
  source 1..20: mol_type = other DNA
catatctttttatctgagcc

SEQ ID NO: 65108 - DNA, 20 bp, synthetic construct
  misc_feature 1..20: note = Description of Artificial Sequence: Synthetic oligonucleotide
  misc_feature 1..20: note = Target: SCN10A; (+) strand; PAM type: YTN; PAM sequence: TTC
  source 1..20: mol_type = other DNA
atatctttttatctgagccc

SEQ ID NO: 65109 - DNA, 20 bp, synthetic construct
  misc_feature 1..20: note = Description of Artificial Sequence: Synthetic oligonucleotide
  misc_feature 1..20: note = Target: SCN10A; (+) strand; PAM type: YTN; PAM sequence: CTT
  source 1..20: mol_type = other DNA
tttatctgagcccctcacca

SEQ ID NO: 65110 - DNA, 20 bp, synthetic construct
  misc_feature 1..20: note = Description of Artificial Sequence: Synthetic oligonucleotide
  misc_feature 1..20: note = Target: SCN10A; (+) strand; PAM type: YTN; PAM sequence: TTT
  source 1..20: mol_type = other DNA
ttatctgagcccctcaccag

SEQ ID NO: 65111 - DNA, 20 bp, synthetic construct
  misc_feature 1..20: note = Description of Artificial Sequence: Synthetic oligonucleotide
  misc_feature 1..20: note = Target: SCN10A; (+) strand; PAM type: YTN; PAM sequence: TTT
  source 1..20: mol_type = other DNA
tatctgagcccctcaccagc

SEQ ID NO: 65112 - DNA, 20 bp, synthetic construct
  misc_feature 1..20: note = Description of Artificial Sequence: Synthetic oligonucleotide
  misc_feature 1..20: note = Target: SCN10A; (+) strand; PAM type: YTN; PAM sequence: TTT
  source 1..20: mol_type = other DNA
atctgagcccctcaccagcc

SEQ ID NO: 65113 - DNA, 20 bp, synthetic construct
  misc_feature 1..20: note = Description of Artificial Sequence: Synthetic oligonucleotide
  misc_feature 1..20: note = Target: SCN10A; (+) strand; PAM type: YTN; PAM sequence: TTA
  source 1..20: mol_type = other DNA
tctgagcccctcaccagcct

SEQ ID NO: 65114 - DNA, 20 bp, synthetic construct
  misc_feature 1..20: note = Description of Artificial Sequence: Synthetic oligonucleotide
  misc_feature 1..20: note = Target: SCN10A; (+) strand; PAM type: YTN; PAM sequence: CTG
  source 1..20: mol_type = other DNA
agcccctcaccagcctgaga

SEQ ID NO: 65115 - DNA, 20 bp, synthetic construct
  misc_feature 1..20: note = Description of Artificial Sequence: Synthetic oligonucleotide
  misc_feature 1..20: note = Target: SCN10A; (+) strand; PAM type: YTN; PAM sequence: CTC
  source 1..20: mol_type = other DNA
accagcctgagaaacagaca

SEQ ID NO: 65116 - DNA, 20 bp, synthetic construct
  misc_feature 1..20: note = Description of Artificial Sequence: Synthetic oligonucleotide
  misc_feature 1..20: note = Target: SCN10A; (+) strand; PAM type: YTN; PAM sequence: CTG
  source 1..20: mol_type = other DNA
agaaacagacaatgcatcct

SEQ ID NO: 65117 - DNA, 20 bp, synthetic construct
  misc_feature 1..20: note = Description of Artificial Sequence: Synthetic oligonucleotide
  misc_feature 1..20: note = Target: SCN10A; (+) strand; PAM type: YTN; PAM sequence: CTT
  source 1..20: mol_type = other DNA
cttatggagaagaaaacagg

SEQ ID NO: 65118 - DNA, 20 bp, synthetic construct
  misc_feature 1..20: note = Description of Artificial Sequence: Synthetic oligonucleotide
  misc_feature 1..20: note = Target: SCN10A; (+) strand; PAM type: YTN; PAM sequence: TTC
  source 1..20: mol_type = other DNA
ttatggagaagaaaacaggc

SEQ ID NO: 65119 - DNA, 20 bp, synthetic construct
  misc_feature 1..20: note = Description of Artificial Sequence: Synthetic oligonucleotide
  misc_feature 1..20: note = Target: SCN10A; (+) strand; PAM type: YTN; PAM sequence: CTT
  source 1..20: mol_type = other DNA
atggagaagaaaacaggctg

SEQ ID NO: 65120 - DNA, 20 bp, synthetic construct
  misc_feature 1..20: note = Description of Artificial Sequence: Synthetic oligonucleotide
  misc_feature 1..20: note = Target: SCN10A; (+) strand; PAM type: YTN; PAM sequence: TTA
  source 1..20: mol_type = other DNA
tggagaagaaaacaggctga

SEQ ID NO: 65121 - DNA, 20 bp, synthetic construct
  misc_feature 1..20: note = Description of Artificial Sequence: Synthetic oligonucleotide
  misc_feature 1..20: note = Target: SCN10A; (+) strand; PAM type: YTN; PAM sequence: CTG
  source 1..20: mol_type = other DNA
agagtttaagtgactttctc

SEQ ID NO: 65122 - DNA, 20 bp, synthetic construct
  misc_feature 1..20: note = Description of Artificial Sequence: Synthetic oligonucleotide
  misc_feature 1..20: note = Target: SCN10A; (+) strand; PAM type: YTN; PAM sequence: TTT
  source 1..20: mol_type = other DNA
aagtgactttctcatgccac

SEQ ID NO: 65123 - DNA, 20 bp, synthetic construct
  misc_feature 1..20: note = Description of Artificial Sequence: Synthetic oligonucleotide
  misc_feature 1..20: note = Target: SCN10A; (+) strand; PAM type: YTN; PAM sequence: TTA
  source 1..20: mol_type = other DNA
agtgactttctcatgccaca

SEQ ID NO: 65124 - DNA, 20 bp, synthetic construct
  misc_feature 1..20: note = Description of Artificial Sequence: Synthetic oligonucleotide
  misc_feature 1..20: note = Target: SCN10A; (+) strand; PAM type: YTN; PAM sequence: CTT
  source 1..20: mol_type = other DNA
tctcatgccacaagactgat

SEQ ID NO: 65125 - DNA, 20 bp, synthetic construct
  misc_feature 1..20: note = Description of Artificial Sequence: Synthetic oligonucleotide
  misc_feature 1..20: note = Target: SCN10A; (+) strand; PAM type: YTN; PAM sequence: TTT
  source 1..20: mol_type = other DNA
ctcatgccacaagactgatt

SEQ ID NO: 65126 - DNA, 20 bp, synthetic construct
  misc_feature 1..20: note = Description of Artificial Sequence: Synthetic oligonucleotide
  misc_feature 1..20: note = Target: SCN10A; (+) strand; PAM type: YTN; PAM sequence: TTC
  source 1..20: mol_type = other DNA
tcatgccacaagactgattc

SEQ ID NO: 65127 - DNA, 20 bp, synthetic construct
  misc_feature 1..20: note = Description of Artificial Sequence: Synthetic oligonucleotide
  misc_feature 1..20: note = Target: SCN10A; (+) strand; PAM type: YTN; PAM sequence: CTC
  source 1..20: mol_type = other DNA
atgccacaagactgattcaa

SEQ ID NO: 65128 - DNA, 20 bp, synthetic construct
  misc_feature 1..20: note = Description of Artificial Sequence: Synthetic oligonucleotide
  misc_feature 1..20: note = Target: SCN10A; (+) strand; PAM type: YTN; PAM sequence: CTG
  source 1..20: mol_type = other DNA
attcaaagagtatctatgga

SEQ ID NO: 65129 - DNA, 20 bp, synthetic construct
  misc_feature 1..20: note = Description of Artificial Sequence: Synthetic oligonucleotide
  misc_feature 1..20: note = Target: SCN10A; (+) strand; PAM type: YTN; PAM sequence: TTC
  source 1..20: mol_type = other DNA
aaagagtatctatggagtgt

SEQ ID NO: 65130 - DNA, 20 bp, synthetic construct
  misc_feature 1..20: note = Description of Artificial Sequence: Synthetic oligonucleotide
  misc_feature 1..20: note = Target: SCN10A; (+) strand; PAM type: YTN; PAM sequence: CTA
  source 1..20: mol_type = other DNA
tggagtgtcccttgtaggca

SEQ ID NO: 65131 - DNA, 20 bp, synthetic construct
  misc_feature 1..20: note = Description of Artificial Sequence: Synthetic oligonucleotide
  misc_feature 1..20: note = Target: SCN10A; (+) strand; PAM type: YTN; PAM sequence: CTT
  source 1..20: mol_type = other DNA
gtaggcaagtcagtgtggtg

SEQ ID NO: 65132 - DNA, 20 bp, synthetic construct
  misc_feature 1..20: note = Description of Artificial Sequence: Synthetic oligonucleotide
  misc_feature 1..20: note = Target: SCN10A; (+) strand; PAM type: YTN; PAM sequence: TTG
  source 1..20: mol_type = other DNA
taggcaagtcagtgtggtgt

SEQ ID NO: 65133 - DNA, 20 bp, synthetic construct
  misc_feature 1..20: note = Description of Artificial Sequence: Synthetic oligonucleotide
  misc_feature 1..20: note = Target: SCN10A; (+) strand; PAM type: YTN; PAM sequence: TTG
  source 1..20: mol_type = other DNA
aggtcttgtgtcttccagag

SEQ ID NO: 65134 - DNA, 20 bp, synthetic construct
  misc_feature 1..20: note = Description of Artificial Sequence: Synthetic oligonucleotide
  misc_feature 1..20: note = Target: SCN10A; (+) strand; PAM type: YTN; PAM sequence: CTT
  source 1..20: mol_type = other DNA
gtgtcttccagagacctggg

SEQ ID NO: 65135 - DNA, 20 bp, synthetic construct
  misc_feature 1..20: note = Description of Artificial Sequence: Synthetic oligonucleotide
  misc_feature 1..20: note = Target: SCN10A; (+) strand; PAM type: YTN; PAM sequence: TTG
  source 1..20: mol_type = other DNA
tgtcttccagagacctgggt

SEQ ID NO: 65136 - DNA, 20 bp, synthetic construct
  misc_feature 1..20: note = Description of Artificial Sequence: Synthetic oligonucleotide
  misc_feature 1..20: note = Target: SCN10A; (+) strand; PAM type: YTN; PAM sequence: CTT
  source 1..20: mol_type = other DNA
ccagagacctgggtccaccc

SEQ ID NO: 65137 - DNA, 20 bp, synthetic construct
  misc_feature 1..20: note = Description of Artificial Sequence: Synthetic oligonucleotide
  misc_feature 1..20: note = Target: SCN10A; (+) strand; PAM type: YTN; PAM sequence: TTC
  source 1..20: mol_type = other DNA
cagagacctgggtccaccct

SEQ ID NO: 65138 - DNA, 20 bp, synthetic construct
  misc_feature 1..20: note = Description of Artificial Sequence: Synthetic oligonucleotide
  misc_feature 1..20: note = Target: SCN10A; (+) strand; PAM type: YTN; PAM sequence: CTG
  source 1..20: mol_type = other DNA
ggtccaccctggatccaccc

SEQ ID NO: 65139 - DNA, 20 bp, synthetic construct
  misc_feature 1..20: note = Description of Artificial Sequence: Synthetic oligonucleotide
  misc_feature 1..20: note = Target: SCN10A; (+) strand; PAM type: YTN; PAM sequence: CTG
  source 1..20: mol_type = other DNA
gatccaccctcaccagctat

SEQ ID NO: 65140 - DNA, 20 bp, synthetic construct
  misc_feature 1..20: note = Description of Artificial Sequence: Synthetic oligonucleotide
  misc_feature 1..20: note = Target: SCN10A; (+) strand; PAM type: YTN; PAM sequence: CTC
  source 1..20: mol_type = other DNA
accagctatacaattttggg

SEQ ID NO: 65141 - DNA, 20 bp, synthetic construct
  misc_feature 1..20: note = Description of Artificial Sequence: Synthetic oligonucleotide
  misc_feature 1..20: note = Target: SCN10A; (+) strand; PAM type: YTN; PAM sequence: CTA
  source 1..20: mol_type = other DNA
tacaattttgggcaggatat

SEQ ID NO: 65142 - DNA, 20 bp, synthetic construct
  misc_feature 1..20: note = Description of Artificial Sequence: Synthetic oligonucleotide
  misc_feature 1..20: note = Target: SCN10A; (+) strand; PAM type: YTN; PAM sequence: TTT
  source 1..20: mol_type = other DNA
tgggcaggatatttaacctc

SEQ ID NO: 65143 - DNA, 20 bp, synthetic construct
  misc_feature 1..20: note = Description of Artificial Sequence: Synthetic oligonucleotide
  misc_feature 1..20: note = Target: SCN10A; (+) strand; PAM type: YTN; PAM sequence: TTT
  source 1..20: mol_type = other DNA
gggcaggatatttaacctct

SEQ ID NO: 65144 - DNA, 20 bp, synthetic construct
  misc_feature 1..20: note = Description of Artificial Sequence: Synthetic oligonucleotide
  misc_feature 1..20: note = Target: SCN10A; (+) strand; PAM type: YTN; PAM sequence: TTG
  source 1..20: mol_type = other DNA
ggcaggatatttaacctctc

SEQ ID NO: 65145 - DNA, 20 bp, synthetic construct
  misc_feature 1..20: note = Description of Artificial Sequence: Synthetic oligonucleotide
  misc_feature 1..20: note = Target: SCN10A; (+) strand; PAM type: YTN; PAM sequence: TTT
  source 1..20: mol_type = other DNA
aacctctctgagtcttagtg

SEQ ID NO: 65146 - DNA, 20 bp, synthetic construct
  misc_feature 1..20: note = Description of Artificial Sequence: Synthetic oligonucleotide
  misc_feature 1..20: note = Target: SCN10A; (+) strand; PAM type: YTN; PAM sequence: TTA
  source 1..20: mol_type = other DNA
acctctctgagtcttagtgc

SEQ ID NO: 65147 - DNA, 20 bp, synthetic construct
  misc_feature 1..20: note = Description of Artificial Sequence: Synthetic oligonucleotide
  misc_feature 1..20: note = Target: SCN10A; (+) strand; PAM type: YTN; PAM sequence: CTC
  source 1..20: mol_type = other DNA
tctgagtcttagtgctctct

SEQ ID NO: 65148 - DNA, 20 bp, synthetic construct
  misc_feature 1..20: note = Description of Artificial Sequence: Synthetic oligonucleotide
  misc_feature 1..20: note = Target: SCN10A; (+) strand; PAM type: YTN; PAM sequence: CTC
  source 1..20: mol_type = other DNA
tgagtcttagtgctctcttt

SEQ ID NO: 65149 - DNA, 20 bp, synthetic construct
  misc_feature 1..20: note = Description of Artificial Sequence: Synthetic oligonucleotide
  misc_feature 1..20: note = Target: SCN10A; (+) strand; PAM type: YTN; PAM sequence: CTG
  source 1..20: mol_type = other DNA
agtcttagtgctctcttttg

SEQ ID NO: 65150 - DNA, 20 bp, synthetic construct
  misc_feature 1..20: note = Description of Artificial Sequence: Synthetic oligonucleotide
  misc_feature 1..20: note = Target: SCN10A; (+) strand; PAM type: YTN; PAM sequence: CTT
  source 1..20: mol_type = other DNA
agtgctctcttttgtcatgt

SEQ ID NO: 65151 - DNA, 20 bp, synthetic construct
  misc_feature 1..20: note = Description of Artificial Sequence: Synthetic oligonucleotide
  misc_feature 1..20: note = Target: SCN10A; (+) strand; PAM type: YTN; PAM sequence: TTA
  source 1..20: mol_type = other DNA
gtgctctcttttgtcatgtg

SEQ ID NO: 65152 - DNA, 20 bp, synthetic construct
  misc_feature 1..20: note = Description of Artificial Sequence: Synthetic oligonucleotide
  misc_feature 1..20: note = Target: SCN10A; (+) strand; PAM type: YTN; PAM sequence: CTC
  source 1..20: mol_type = other DNA
tcttttgtcatgtgagggtg

SEQ ID NO: 65153 - DNA, 20 bp, synthetic construct
  misc_feature 1..20: note = Description of Artificial Sequence: Synthetic oligonucleotide
  misc_feature 1..20: note = Target: SCN10A; (+) strand; PAM type: YTN; PAM sequence: CTC
  source 1..20: mol_type = other DNA
ttttgtcatgtgagggtgat

SEQ ID NO: 65154 - DNA, 20 bp, synthetic construct
  misc_feature 1..20: note = Description of Artificial Sequence: Synthetic oligonucleotide
  misc_feature 1..20: note = Target: SCN10A; (+) strand; PAM type: YTN; PAM sequence: CTT
  source 1..20: mol_type = other DNA
ttgtcatgtgagggtgatgt

SEQ ID NO: 65155 - DNA, 20 bp, synthetic construct
  misc_feature 1..20: note = Description of Artificial Sequence: Synthetic oligonucleotide
  misc_feature 1..20: note = Target: SCN10A; (+) strand; PAM type: YTN; PAM sequence: TTT
  source 1..20: mol_type = other DNA
tgtcatgtgagggtgatgtt

SEQ ID NO: 65156 - DNA, 20 bp, synthetic construct
  misc_feature 1..20: note = Description of Artificial Sequence: Synthetic oligonucleotide
  misc_feature 1..20: note = Target: SCN10A; (+) strand; PAM type: YTN; PAM sequence: TTT
  source 1..20: mol_type = other DNA
gtcatgtgagggtgatgtta

SEQ ID NO: 65157 - DNA, 20 bp, synthetic construct
  misc_feature 1..20: note = Description of Artificial Sequence: Synthetic oligonucleotide
  misc_feature 1..20: note = Target: SCN10A; (+) strand; PAM type: YTN; PAM sequence: TTG
  source 1..20: mol_type = other DNA
tcatgtgagggtgatgttaa

SEQ ID NO: 65158 - DNA, 20 bp, synthetic construct
  misc_feature 1..20: note = Description of Artificial Sequence: Synthetic oligonucleotide
  misc_feature 1..20: note = Target: SCN10A; (+) strand; PAM type: YTN; PAM sequence: TTA
  source 1..20: mol_type = other DNA
acctcataatgttgttgtga

SEQ ID NO: 65159 - DNA, 20 bp, synthetic construct
  misc_feature 1..20: note = Description of Artificial Sequence: Synthetic oligonucleotide
  misc_feature 1..20: note = Target: SCN10A; (+) strand; PAM type: YTN; PAM sequence: CTC
  source 1..20: mol_type = other DNA
ataatgttgttgtgacactg

SEQ ID NO: 65160 - DNA, 20 bp, synthetic construct
  misc_feature 1..20: note = Description of Artificial Sequence: Synthetic oligonucleotide
  misc_feature 1..20: note = Target: SCN10A; (+) strand; PAM type: YTN; PAM sequence: TTG
  source 1..20: mol_type = other DNA
ttgtgacactgaaataacat

SEQ ID NO: 65161 - DNA, 20 bp, synthetic construct
  misc_feature 1..20: note = Description of Artificial Sequence: Synthetic oligonucleotide
  misc_feature 1..20: note = Target: SCN10A; (+) strand; PAM type: YTN; PAM sequence: TTG
  source 1..20: mol_type = other DNA
tgacactgaaataacattca

SEQ ID NO: 65162 - DNA, 20 bp, synthetic construct
  misc_feature 1..20: note = Description of Artificial Sequence: Synthetic oligonucleotide
  misc_feature 1..20: note = Target: SCN10A; (+) strand; PAM type: YTN; PAM sequence: CTG
  source 1..20: mol_type = other DNA
aaataacattcataaagcac

SEQ ID NO: 65163 - DNA, 20 bp, synthetic construct
  misc_feature 1..20: note = Description of Artificial Sequence: Synthetic oligonucleotide
  misc_feature 1..20: note = Target: SCN10A; (+) strand; PAM type: YTN; PAM sequence: TTC
  source 1..20: mol_type = other DNA
ataaagcacctgactcattg

SEQ ID NO: 65164 - DNA, 20 bp, synthetic construct
  misc_feature 1..20: note = Description of Artificial Sequence: Synthetic oligonucleotide
  misc_feature 1..20: note = Target: SCN10A; (+) strand; PAM type: YTN; PAM sequence: CTG
  source 1..20: mol_type = other DNA
actcattgcaggcaccaagc

SEQ ID NO: 65165 - DNA, 20 bp, synthetic construct
  misc_feature 1..20: note = Description of Artificial Sequence: Synthetic oligonucleotide
  misc_feature 1..20: note = Target: SCN10A; (+) strand; PAM type: YTN; PAM sequence: CTC
  source 1..20: mol_type = other DNA
attgcaggcaccaagcacat

SEQ ID NO: 65166 - DNA, 20 bp, synthetic construct
  misc_feature 1..20: note = Description of Artificial Sequence: Synthetic oligonucleotide
  misc_feature 1..20: note = Target: SCN10A; (+) strand; PAM type: YTN; PAM sequence: TTG
  source 1..20: mol_type = other DNA
caggcaccaagcacatgact

SEQ ID NO: 65167 - DNA, 20 bp, synthetic construct
  misc_feature 1..20: note = Description of Artificial Sequence: Synthetic oligonucleotide
  misc_feature 1..20: note = Target: SCN10A; (+) strand; PAM type: YTN; PAM sequence: CTT
  source 1..20: mol_type = other DNA
tcttgctttaaaaaagtggc

SEQ ID NO: 65168 - DNA, 20 bp, synthetic construct
  misc_feature 1..20: note = Description of Artificial Sequence: Synthetic oligonucleotide
  misc_feature 1..20: note = Target: SCN10A; (+) strand; PAM type: YTN; PAM sequence: TTT
  source 1..20: mol_type = other DNA
cttgctttaaaaaagtggca

SEQ ID NO: 65169 - DNA, 20 bp, synthetic construct
  misc_feature 1..20: note = Description of Artificial Sequence: Synthetic oligonucleotide
  misc_feature 1..20: note = Target: SCN10A; (+) strand; PAM type: YTN; PAM sequence: TTC
  source 1..20: mol_type = other DNA
ttgctttaaaaaagtggcac

SEQ ID NO: 65170 - DNA, 20 bp, synthetic construct
  misc_feature 1..20: note = Description of Artificial Sequence: Synthetic oligonucleotide
  misc_feature 1..20: note = Target: SCN10A; (+) strand; PAM type: YTN; PAM sequence: CTT
  source 1..20: mol_type = other DNA
gctttaaaaaagtggcactt

SEQ ID NO: 65171 - DNA, 20 bp, synthetic construct
  misc_feature 1..20: note = Description of Artificial Sequence: Synthetic oligonucleotide
  misc_feature 1..20: note = Target: SCN10A; (+) strand; PAM type: YTN; PAM sequence: TTG
  source 1..20: mol_type = other DNA
ctttaaaaaagtggcacttt

SEQ ID NO: 65172 - DNA, 20 bp, synthetic construct
  misc_feature 1..20: note = Description of Artificial Sequence: Synthetic oligonucleotide
  misc_feature 1..20: note = Target: SCN10A; (+) strand; PAM type: YTN; PAM sequence: CTT
  source 1..20: mol_type = other DNA
taaaaaagtggcactttcct

SEQ ID NO: 65173 - DNA, 20 bp, synthetic construct
  misc_feature 1..20: note = Description of Artificial Sequence: Synthetic oligonucleotide
  misc_feature 1..20: note = Target: SCN10A; (+) strand; PAM type: YTN; PAM sequence: TTT
  source 1..20: mol_type = other DNA
aaaaaagtggcactttcctc

SEQ ID NO: 65174 - DNA, 20 bp, synthetic construct
  misc_feature 1..20: note = Description of Artificial Sequence: Synthetic oligonucleotide
  misc_feature 1..20: note = Target: SCN10A; (+) strand; PAM type: YTN; PAM sequence: TTA
  source 1..20: mol_type = other DNA
aaaaagtggcactttcctct

SEQ ID NO: 65175 - DNA, 20 bp, synthetic construct
  misc_feature 1..20: note = Description of Artificial Sequence: Synthetic oligonucleotide
  misc_feature 1..20: note = Target: SCN10A; (+) strand; PAM type: YTN; PAM sequence: CTT
  source 1..20: mol_type = other DNA
tcctctgacactgtgggaaa

SEQ ID NO: 65176 - DNA, 20 bp, synthetic construct
  misc_feature 1..20: note = Description of Artificial Sequence: Synthetic oligonucleotide
  misc_feature 1..20: note = Target: SCN10A; (+) strand; PAM type: YTN; PAM sequence: TTT
  source 1..20: mol_type = other DNA
cctctgacactgtgggaaag

SEQ ID NO: 65177 - DNA, 20 bp, synthetic construct
  misc_feature 1..20: note = Description of Artificial Sequence: Synthetic oligonucleotide
  misc_feature 1..20: note = Target: SCN10A; (+) strand; PAM type: YTN; PAM sequence: TTC
  source 1..20: mol_type = other DNA
ctctgacactgtgggaaagg

SEQ ID NO: 65178 - DNA, 20 bp, synthetic construct
  misc_feature 1..20: note = Description of Artificial Sequence: Synthetic oligonucleotide
  misc_feature 1..20: note = Target: SCN10A; (+) strand; PAM type: YTN; PAM sequence: CTC
  source 1..20: mol_type = other DNA
tgacactgtgggaaaggcct

SEQ ID NO: 65179 - DNA, 20 bp, synthetic construct
  misc_feature 1..20: note = Description of Artificial Sequence: Synthetic oligonucleotide
  misc_feature 1..20: note = Target: SCN10A; (+) strand; PAM type: YTN; PAM sequence: CTG
  source 1..20: mol_type = other DNA
acactgtgggaaaggccttt

SEQ ID NO: 65180 - DNA, 20 bp, synthetic construct
  misc_feature 1..20: note = Description of Artificial Sequence: Synthetic oligonucleotide
  misc_feature 1..20: note = Target: SCN10A; (+) strand; PAM type: YTN; PAM sequence: CTG
  source 1..20: mol_type = other DNA
tgggaaaggccttttctctc

SEQ ID NO: 65181 - DNA, 20 bp, synthetic construct
  misc_feature 1..20: note = Description of Artificial Sequence: Synthetic oligonucleotide
  misc_feature 1..20: note = Target: SCN10A; (+) strand; PAM type: YTN; PAM sequence: CTT
  source 1..20: mol_type = other DNA
ttctctctcttgcttccact

SEQ ID NO: 65182 - DNA, 20 bp, synthetic construct
  misc_feature 1..20: note = Description of Artificial Sequence: Synthetic oligonucleotide
  misc_feature 1..20: note = Target: SCN10A; (+) strand; PAM type: YTN; PAM sequence: TTT
  source 1..20: mol_type = other DNA
tctctctcttgcttccactt

SEQ ID NO: 65183 - DNA, 20 bp, synthetic construct
  misc_feature 1..20: note = Description of Artificial Sequence: Synthetic oligonucleotide
  misc_feature 1..20: note = Target: SCN10A; (+) strand; PAM type: YTN; PAM sequence: TTT
  source 1..20: mol_type = other DNA
ctctctcttgcttccacttt

SEQ ID NO: 65184 - DNA, 20 bp, synthetic construct
  misc_feature 1..20: note = Description of Artificial Sequence: Synthetic oligonucleotide
  misc_feature 1..20: note = Target: SCN10A; (+) strand; PAM type: YTN; PAM sequence: TTC
  source 1..20: mol_type = other DNA
tctctcttgcttccactttt

SEQ ID NO: 65185 - DNA, 20 bp, synthetic construct
  misc_feature 1..20: note = Description of Artificial Sequence: Synthetic oligonucleotide
  misc_feature 1..20: note = Target: SCN10A; (+) strand; PAM type: YTN; PAM sequence: CTC
  source 1..20: mol_type = other DNA
tctcttgcttccacttttct

SEQ ID NO: 65186 - DNA, 20 bp, synthetic construct
  misc_feature 1..20: note = Description of Artificial Sequence: Synthetic oligonucleotide
  misc_feature 1..20: note = Target: SCN10A; (+) strand; PAM type: YTN; PAM sequence: CTC
  source 1..20: mol_type = other DNA
tcttgcttccacttttctaa

SEQ ID NO: 65187 - DNA, 20 bp, synthetic construct
  misc_feature 1..20: note = Description of Artificial Sequence: Synthetic oligonucleotide
  misc_feature 1..20: note = Target: SCN10A; (+) strand; PAM type: YTN; PAM sequence: CTC
  source 1..20: mol_type = other DNA
ttgcttccacttttctaact

SEQ ID NO: 65188 - DNA, 20 bp, synthetic construct
  misc_feature 1..20: note = Description of Artificial Sequence: Synthetic oligonucleotide
  misc_feature 1..20: note = Target: SCN10A; (+) strand; PAM type: YTN; PAM sequence: CTT
  source 1..20: mol_type = other DNA
gcttccacttttctaactgt

SEQ ID NO: 65189 - DNA, 20 bp, synthetic construct
  misc_feature 1..20: note = Description of Artificial Sequence: Synthetic oligonucleotide
  misc_feature 1..20: note = Target: SCN10A; (+) strand; PAM type: YTN; PAM sequence: TTG
  source 1..20: mol_type = other DNA
cttccacttttctaactgta

SEQ ID NO: 65190 - DNA, 20 bp, synthetic construct
  misc_feature 1..20: note = Description of Artificial Sequence: Synthetic oligonucleotide
  misc_feature 1..20: note = Target: SCN10A; (+) strand; PAM type: YTN; PAM sequence: CTT
  source 1..20: mol_type = other DNA
ccacttttctaactgtagaa

SEQ ID NO: 65191 - DNA, 20 bp, synthetic construct
  misc_feature 1..20: note = Description of Artificial Sequence: Synthetic oligonucleotide
  misc_feature 1..20: note = Target: SCN10A; (+) strand; PAM type: YTN; PAM sequence: TTC
  source 1..20: mol_type = other DNA
cacttttctaactgtagaat

SEQ ID NO: 65192 - DNA, 20 bp, synthetic construct
  misc_feature 1..20: note = Description of Artificial Sequence: Synthetic oligonucleotide
  misc_feature 1..20: note = Target: SCN10A; (+) strand; PAM type: YTN; PAM sequence: CTT
  source 1..20: mol_type = other DNA
ttctaactgtagaatgaggg

SEQ ID NO: 65193 - DNA, 20 bp, synthetic construct
  misc_feature 1..20: note = Description of Artificial Sequence: Synthetic oligonucleotide
  misc_feature 1..20: note = Target: SCN10A; (+) strand; PAM type: YTN; PAM sequence: TTT
  source 1..20: mol_type = other DNA
tctaactgtagaatgagggt

SEQ ID NO: 65194 - DNA, 20 bp, synthetic construct
  misc_feature 1..20: note = Description of Artificial Sequence: Synthetic oligonucleotide
  misc_feature 1..20: note = Target: SCN10A; (+) strand; PAM type: YTN; PAM sequence: TTT
  source 1..20: mol_type = other DNA
ctaactgtagaatgagggtg

SEQ ID NO: 65195 - DNA, 20 bp, synthetic construct
  misc_feature 1..20: note = Description of Artificial Sequence: Synthetic oligonucleotide
  misc_feature 1..20: note = Target: SCN10A; (+) strand; PAM type: YTN; PAM sequence: TTC
  source 1..20: mol_type = other DNA
taactgtagaatgagggtgt

SEQ ID NO: 65196 - DNA, 20 bp, synthetic construct
  misc_feature 1..20: note = Description of Artificial Sequence: Synthetic oligonucleotide
  misc_feature 1..20: note = Target: SCN10A; (+) strand; PAM type: YTN; PAM sequence: CTA
  source 1..20: mol_type = other DNA
actgtagaatgagggtgtgg

SEQ ID NO: 65197 - DNA, 20 bp, synthetic construct
  misc_feature 1..20: note = Description of Artificial Sequence: Synthetic oligonucleotide
  misc_feature 1..20: note = Target: SCN10A; (+) strand; PAM type: YTN; PAM sequence: CTG
  source 1..20: mol_type = other DNA
tagaatgagggtgtgggctc

SEQ ID NO: 65198 - DNA, 20 bp, synthetic construct
  misc_feature 1..20: note = Description of Artificial Sequence: Synthetic oligonucleotide
  misc_feature 1..20: note = Target: SCN10A; (+) strand; PAM type: YTN; PAM sequence: CTC
  source 1..20: mol_type = other DNA
aaatgtctattccataaggc

SEQ ID NO: 65199 - DNA, 20 bp, synthetic construct
  misc_feature 1..20: note = Description of Artificial Sequence: Synthetic oligonucleotide
  misc_feature 1..20: note = Target: SCN10A; (+) strand; PAM type: YTN; PAM sequence: CTA
  source 1..20: mol_type = other DNA
ttccataaggccctctgtgg

SEQ ID NO: 65200 - DNA, 20 bp, synthetic construct
  misc_feature 1..20: note = Description of Artificial Sequence: Synthetic oligonucleotide
  misc_feature 1..20: note = Target: SCN10A; (+) strand; PAM type: YTN; PAM sequence: TTC
  source 1..20: mol_type = other DNA
cataaggccctctgtggtct

SEQ ID NO: 65201 - DNA, 20 bp, synthetic construct
  misc_feature 1..20: note = Description of Artificial Sequence: Synthetic oligonucleotide
  misc_feature 1..20: note = Target: SCN10A; (+) strand; PAM type: YTN; PAM sequence: CTC
  source 1..20: mol_type = other DNA
tgtggtcttaggctgacttc

SEQ ID NO: 65202 - DNA, 20 bp, synthetic construct
  misc_feature 1..20: note = Description of Artificial Sequence: Synthetic oligonucleotide
  misc_feature 1..20: note = Target: SCN10A; (+) strand; PAM type: YTN; PAM sequence: CTG
  source 1..20: mol_type = other DNA
tggtcttaggctgacttctt

SEQ ID NO: 65203 - DNA, 20 bp, synthetic construct
  misc_feature 1..20: note = Description of Artificial Sequence: Synthetic oligonucleotide
  misc_feature 1..20: note = Target: SCN10A; (+) strand; PAM type: YTN; PAM sequence: CTT
  source 1..20: mol_type = other DNA
aggctgacttcttgggaata

SEQ ID NO: 65204 - DNA, 20 bp, synthetic construct
  misc_feature 1..20: note = Description of Artificial Sequence: Synthetic oligonucleotide
  misc_feature 1..20: note = Target: SCN10A; (+) strand; PAM type: YTN; PAM sequence: TTA
  source 1..20: mol_type = other DNA
ggctgacttcttgggaataa

SEQ ID NO: 65205 - DNA, 20 bp, synthetic construct
  misc_feature 1..20: note = Description of Artificial Sequence: Synthetic oligonucleotide
  misc_feature 1..20: note = Target: SCN10A; (+) strand; PAM type: YTN; PAM sequence: CTG
  source 1..20: mol_type = other DNA
acttcttgggaataagcatt

SEQ ID NO: 65206 - DNA, 20 bp, synthetic construct
  misc_feature 1..20: note = Description of Artificial Sequence: Synthetic oligonucleotide
  misc_feature 1..20: note = Target: SCN10A; (+) strand; PAM type: YTN; PAM sequence: CTT
  source 1..20: mol_type = other DNA
cttgggaataagcattctct

SEQ ID NO: 65207 - DNA, 20 bp, synthetic construct
  misc_feature 1..20: note = Description of Artificial Sequence: Synthetic oligonucleotide
  misc_feature 1..20: note = Target: SCN10A; (+) strand; PAM type: YTN; PAM sequence: TTC
  source 1..20: mol_type = other DNA
ttgggaataagcattctctt

SEQ ID NO: 65208 - DNA, 20 bp, synthetic construct
  misc_feature 1..20: note = Description of Artificial Sequence: Synthetic oligonucleotide
  misc_feature 1..20: note = Target: SCN10A; (+) strand; PAM type: YTN; PAM sequence: CTT
  source 1..20: mol_type = other DNA
gggaataagcattctcttct

SEQ ID NO: 65209 - DNA, 20 bp, synthetic construct
  misc_feature 1..20: note = Description of Artificial Sequence: Synthetic oligonucleotide
  misc_feature 1..20: note = Target: SCN10A; (+) strand; PAM type: YTN; PAM sequence: TTG
  source 1..20: mol_type = other DNA
ggaataagcattctcttctc

SEQ ID NO: 65210 - DNA, 20 bp, synthetic construct
  misc_feature 1..20: note = Description of Artificial Sequence: Synthetic oligonucleotide
  misc_feature 1..20: note = Target: SCN10A; (+) strand; PAM type: YTN; PAM sequence: TTC
  source 1..20: mol_type = other DNA
tcttctctttccatttttcc

SEQ ID NO: 65211 - DNA, 20 bp, synthetic construct
  misc_feature 1..20: note = Description of Artificial Sequence: Synthetic oligonucleotide
  misc_feature 1..20: note = Target: SCN10A; (+) strand; PAM type: YTN; PAM sequence: CTC
  source 1..20: mol_type = other DNA
ttctctttccatttttcctt

SEQ ID NO: 65212 - DNA, 20 bp, synthetic construct
  misc_feature 1..20: note = Description of Artificial Sequence: Synthetic oligonucleotide
  misc_feature 1..20: note = Target: SCN10A; (+) strand; PAM type: YTN; PAM sequence: CTT
  source 1..20: mol_type = other DNA
ctctttccatttttcctttt

SEQ ID NO: 65213 - DNA, 20 bp, synthetic construct
  misc_feature 1..20: note = Description of Artificial Sequence: Synthetic oligonucleotide
  misc_feature 1..20: note = Target: SCN10A; (+) strand; PAM type: YTN; PAM sequence: TTC
  source 1..20: mol_type = other DNA
tctttccatttttccttttc

SEQ ID NO: 65214 - DNA, 20 bp, synthetic construct
  misc_feature 1..20: note = Description of Artificial Sequence: Synthetic oligonucleotide
  misc_feature 1..20: note = Target: SCN10A; (+) strand; PAM type: YTN; PAM sequence: CTC
  source 1..20: mol_type = other DNA
tttccatttttccttttcat

SEQ ID NO: 65215 - DNA, 20 bp, synthetic construct
  misc_feature 1..20: note = Description of Artificial Sequence: Synthetic oligonucleotide
  misc_feature 1..20: note = Target: SCN10A; (+) strand; PAM type: YTN; PAM sequence: CTT
  source 1..20: mol_type = other DNA
tccatttttccttttcatat

SEQ ID NO: 65216 - DNA, 20 bp, synthetic construct
  misc_feature 1..20: note = Description of Artificial Sequence: Synthetic oligonucleotide
  misc_feature 1..20: note = Target: SCN10A; (+) strand; PAM type: YTN; PAM sequence: TTT
  source 1..20: mol_type = other DNA
ccatttttccttttcatatc

SEQ ID NO: 65217 - DNA, 20 bp, synthetic construct
  misc_feature 1..20: note = Description of Artificial Sequence: Synthetic oligonucleotide
  misc_feature 1..20: note = Target: SCN10A; (+) strand; PAM type: YTN; PAM sequence: TTC
  source 1..20: mol_type = other DNA
catttttccttttcatatca

SEQ ID NO: 65218 - DNA, 20 bp, synthetic construct
  misc_feature 1..20: note = Description of Artificial Sequence: Synthetic oligonucleotide
  misc_feature 1..20: note = Target: SCN10A; (+) strand; PAM type: YTN; PAM sequence: TTT
  source 1..20: mol_type = other DNA
ttccttttcatatcaacttt

SEQ ID NO: 65219 - DNA, 20 bp, synthetic construct
  misc_feature 1..20: note = Description of Artificial Sequence: Synthetic oligonucleotide
  misc_feature 1..20: note = Target: SCN10A; (+) strand; PAM type: YTN; PAM sequence: TTT
  source 1..20: mol_type = other DNA
tccttttcatatcaacttta

SEQ ID NO: 65220 - DNA, 20 bp, synthetic construct
  misc_feature 1..20: note = Description of Artificial Sequence: Synthetic oligonucleotide
  misc_feature 1..20: note = Target: SCN10A; (+) strand; PAM type: YTN; PAM sequence: TTT
  source 1..20: mol_type = other DNA
ccttttcatatcaactttag

SEQ ID NO: 65221 - DNA, 20 bp, synthetic construct
  misc_feature 1..20: note = Description of Artificial Sequence: Synthetic oligonucleotide
  misc_feature 1..20: note = Target: SCN10A; (+) strand; PAM type: YTN; PAM sequence: TTC
  source 1..20: mol_type = other DNA
cttttcatatcaactttagg

SEQ ID NO: 65222 - DNA, 20 bp, synthetic construct
  misc_feature 1..20: note = Description of Artificial Sequence: Synthetic oligonucleotide
  misc_feature 1..20: note = Target: SCN10A; (+) strand; PAM type: YTN; PAM sequence: CTT
  source 1..20: mol_type = other DNA
ttcatatcaactttaggatg

SEQ ID NO: 65223 - DNA, 20 bp, synthetic construct
  misc_feature 1..20: note = Description of Artificial Sequence: Synthetic oligonucleotide
  misc_feature 1..20: note = Target: SCN10A; (+) strand; PAM type: YTN; PAM sequence: TTT
  source 1..20: mol_type = other DNA
tcatatcaactttaggatgt

SEQ ID NO: 65224 - DNA, 20 bp, synthetic construct
  misc_feature 1..20: note = Description of Artificial Sequence: Synthetic oligonucleotide
  misc_feature 1..20: note = Target: SCN10A; (+) strand; PAM type: YTN; PAM sequence: TTT
  source 1..20: mol_type = other DNA
catatcaactttaggatgtg

SEQ ID NO: 65225 - DNA, 20 bp, synthetic construct
  misc_feature 1..20: note = Description of Artificial Sequence: Synthetic oligonucleotide
  misc_feature 1..20: note = Target: SCN10A; (+) strand; PAM type: YTN; PAM sequence: TTC
  source 1..20: mol_type = other DNA
atatcaactttaggatgtga

SEQ ID NO: 65226 - DNA, 20 bp, synthetic construct
  misc_feature 1..20: note = Description of Artificial Sequence: Synthetic oligonucleotide
  misc_feature 1..20: note = Target: SCN10A; (+) strand; PAM type: YTN; PAM sequence: CTT
  source 1..20: mol_type = other DNA
taggatgtgacctcagccta

SEQ ID NO: 65227 - DNA, 20 bp, synthetic construct
  misc_feature 1..20: note = Description of Artificial Sequence: Synthetic oligonucleotide
  misc_feature 1..20: note = Target: SCN10A; (+) strand; PAM type: YTN; PAM sequence: TTT
  source 1..20: mol_type = other DNA
aggatgtgacctcagcctag

SEQ ID NO: 65228 - DNA, 20 bp, synthetic construct
  misc_feature 1..20: note = Description of Artificial Sequence: Synthetic oligonucleotide
  misc_feature 1..20: note = Target: SCN10A; (+) strand; PAM type: YTN; PAM sequence: TTA
  source 1..20: mol_type = other DNA
ggatgtgacctcagcctagg

SEQ ID NO: 65229 - DNA, 20 bp, synthetic construct
  misc_feature 1..20: note = Description of Artificial Sequence: Synthetic oligonucleotide
  misc_feature 1..20: note = Target: SCN10A; (+) strand; PAM type: YTN; PAM sequence: CTC
  source 1..20: mol_type = other DNA
agcctaggtgctgccaaaac

SEQ ID NO: 65230 - DNA, 20 bp, synthetic construct
  misc_feature 1..20: note = Description of Artificial Sequence: Synthetic oligonucleotide
  misc_feature 1..20: note = Target: SCN10A; (+) strand; PAM type: YTN; PAM sequence: CTA
  source 1..20: mol_type = other DNA
ggtgctgccaaaacatgagg

SEQ ID NO: 65231 - DNA, 20 bp, synthetic construct
  misc_feature 1..20: note = Description of Artificial Sequence: Synthetic oligonucleotide
  misc_feature 1..20: note = Target: SCN10A; (+) strand; PAM type: YTN; PAM sequence: CTG
  source 1..20: mol_type = other DNA
ccaaaacatgaggcatgctg

SEQ ID NO: 65232 - DNA, 20 bp, synthetic construct
  misc_feature 1..20: note = Description of Artificial Sequence: Synthetic oligonucleotide
  misc_feature 1..20: note = Target: SCN10A; (+) strand; PAM type: YTN; PAM sequence: CTG
  source 1..20: mol_type = other DNA
attccaccatgttccagaac

SEQ ID NO: 65233 - DNA, 20 bp, synthetic construct
  misc_feature 1..20: note = Description of Artificial Sequence: Synthetic oligonucleotide
  misc_feature 1..20: note = Target: SCN10A; (+) strand; PAM type: YTN; PAM sequence: TTC
  source 1..20: mol_type = other DNA
caccatgttccagaacctac

SEQ ID NO: 65234 - DNA, 20 bp, synthetic construct
  misc_feature 1..20: note = Description of Artificial Sequence: Synthetic oligonucleotide
  misc_feature 1..20: note = Target: SCN10A; (+) strand; PAM type: YTN; PAM sequence: TTC
  source 1..20: mol_type = other DNA
cagaacctactgctgcccct

SEQ ID NO: 65235 - DNA, 20 bp, synthetic construct
  misc_feature 1..20: note = Description of Artificial Sequence: Synthetic oligonucleotide
  misc_feature 1..20: note = Target: SCN10A; (+) strand; PAM type: YTN; PAM sequence: CTA
  source 1..20: mol_type = other DNA
ctgctgcccctttcacagcc

SEQ ID NO: 65236 - DNA, 20 bp, synthetic construct
  misc_feature 1..20: note = Description of Artificial Sequence: Synthetic oligonucleotide
  misc_feature 1..20: note = Target: SCN10A; (+) strand; PAM type: YTN; PAM sequence: CTG
  source 1..20: mol_type = other DNA
ctgcccctttcacagccctg

SEQ ID NO: 65237 - DNA, 20 bp, synthetic construct
  misc_feature 1..20: note = Description of Artificial Sequence: Synthetic oligonucleotide
  misc_feature 1..20: note = Target: SCN10A; (+) strand; PAM type: YTN; PAM sequence: CTG
  source 1..20: mol_type = other DNA
cccctttcacagccctggat

SEQ ID NO: 65238 - DNA, 20 bp, synthetic construct
  misc_feature 1..20: note = Description of Artificial Sequence: Synthetic oligonucleotide
  misc_feature 1..20: note = Target: SCN10A; (+) strand; PAM type: YTN; PAM sequence: CTT
  source 1..20: mol_type = other DNA
tcacagccctggattatggc

SEQ ID NO: 65239 - DNA, 20 bp, synthetic construct
  misc_feature 1..20: note = Description of Artificial Sequence: Synthetic oligonucleotide
  misc_feature 1..20: note = Target: SCN10A; (+) strand; PAM type: YTN; PAM sequence: TTT
  source 1..20: mol_type = other DNA
cacagccctggattatggcg

SEQ ID NO: 65240 - DNA, 20 bp, synthetic construct
  misc_feature 1..20: note = Description of Artificial Sequence: Synthetic oligonucleotide
  misc_feature 1..20: note = Target: SCN10A; (+) strand; PAM type: YTN; PAM sequence: TTC
  source 1..20: mol_type = other DNA
acagccctggattatggcgg

SEQ ID NO: 65241 - DNA, 20 bp, synthetic construct
  misc_feature 1..20: note = Description of Artificial Sequence: Synthetic oligonucleotide
  misc_feature 1..20: note = Target: SCN10A; (+) strand; PAM type: YTN; PAM sequence: CTG
  source 1..20: mol_type = other DNA
gattatggcggagggagtgg

SEQ ID NO: 65242 - DNA, 20 bp, synthetic construct
  misc_feature 1..20: note = Description of Artificial Sequence: Synthetic oligonucleotide
  misc_feature 1..20: note = Target: SCN10A; (+) strand; PAM type: YTN; PAM sequence: TTA
  source 1..20: mol_type = other DNA
tggcggagggagtggtttct

SEQ ID NO: 65243 - DNA, 20 bp, synthetic construct
  misc_feature 1..20: note = Description of Artificial Sequence: Synthetic oligonucleotide
  misc_feature 1..20: note = Target: SCN10A; (+) strand; PAM type: YTN; PAM sequence: TTT
  source 1..20: mol_type = other DNA
ctagggacaagtagtcacat

SEQ ID NO: 65244 - DNA, 20 bp, synthetic construct
  misc_feature 1..20: note = Description of Artificial Sequence: Synthetic oligonucleotide
  misc_feature 1..20: note = Target: SCN10A; (+) strand; PAM type: YTN; PAM sequence: TTC
  source 1..20: mol_type = other DNA
tagggacaagtagtcacatt

SEQ ID NO: 65245 - DNA, 20 bp, synthetic construct
  misc_feature 1..20: note = Description of Artificial Sequence: Synthetic oligonucleotide
  misc_feature 1..20: note = Target: SCN10A; (+) strand; PAM type: YTN; PAM sequence: CTA
  source 1..20: mol_type = other DNA
gggacaagtagtcacatttc

SEQ ID NO: 65246 - DNA, 20 bp, synthetic construct
  misc_feature 1..20: note = Description of Artificial Sequence: Synthetic oligonucleotide
  misc_feature 1..20: note = Target: SCN10A; (+) strand; PAM type: YTN; PAM sequence: TTT
  source 1..20: mol_type = other DNA
cctctgggccttccccctcc

SEQ ID NO: 65247 - DNA, 20 bp, synthetic construct
  misc_feature 1..20: note = Description of Artificial Sequence: Synthetic oligonucleotide
  misc_feature 1..20: note = Target: SCN10A; (+) strand; PAM type: YTN; PAM sequence: TTC
  source 1..20: mol_type = other DNA
ctctgggccttccccctcca

SEQ ID NO: 65248 - DNA, 20 bp, synthetic construct
  misc_feature 1..20: note = Description of Artificial Sequence: Synthetic oligonucleotide
  misc_feature 1..20: note = Target: SCN10A; (+) strand; PAM type: YTN; PAM sequence: CTC
  source 1..20: mol_type = other DNA
tgggccttccccctccacct

SEQ ID NO: 65249 - DNA, 20 bp, synthetic construct
  misc_feature 1..20: note = Description of Artificial Sequence: Synthetic oligonucleotide
  misc_feature 1..20: note = Target: SCN10A; (+) strand; PAM type: YTN; PAM sequence: CTG
  source 1..20: mol_type = other DNA
ggccttccccctccacctaa

SEQ ID NO: 65250 - DNA, 20 bp, synthetic construct
  misc_feature 1..20: note = Description of Artificial Sequence: Synthetic oligonucleotide
  misc_feature 1..20: note = Target: SCN10A; (+) strand; PAM type: YTN; PAM sequence: CTT
  source 1..20: mol_type = other DNA
ccccctccacctaagtctgc

SEQ ID NO: 65251 - DNA, 20 bp, synthetic construct
  misc_feature 1..20: note = Description of Artificial Sequence: Synthetic oligonucleotide
  misc_feature 1..20: note = Target: SCN10A; (+) strand; PAM type: YTN; PAM sequence: TTC
  source 1..20: mol_type = other DNA
cccctccacctaagtctgca

SEQ ID NO: 65252 - DNA, 20 bp, synthetic construct
  misc_feature 1..20: note = Description of Artificial Sequence: Synthetic oligonucleotide
  misc_feature 1..20: note = Target: SCN10A; (+) strand; PAM type: YTN; PAM sequence: CTC
  source 1..20: mol_type = other DNA
cacctaagtctgcagcctat

SEQ ID NO: 65253 - DNA, 20 bp, synthetic construct
  misc_feature 1..20: note = Description of Artificial Sequence: Synthetic oligonucleotide
  misc_feature 1..20: note = Target: SCN10A; (+) strand; PAM type: YTN; PAM sequence: CTA
  source 1..20: mol_type = other DNA
agtctgcagcctataagaag

SEQ ID NO: 65254 - DNA, 20 bp, synthetic construct
  misc_feature 1..20: note = Description of Artificial Sequence: Synthetic oligonucleotide
  misc_feature 1..20: note = Target: SCN10A; (+) strand; PAM type: YTN; PAM sequence: CTG
  source 1..20: mol_type = other DNA
cagcctataagaagctggac

SEQ ID NO: 65255 - DNA, 20 bp, synthetic construct
  misc_feature 1..20: note = Description of Artificial Sequence: Synthetic oligonucleotide
  misc_feature 1..20: note = Target: SCN10A; (+) strand; PAM type: YTN; PAM sequence: CTA
  source 1..20: mol_type = other DNA
taagaagctggaccccaaag

SEQ ID NO: 65256 - DNA, 20 bp, synthetic construct
  misc_feature 1..20: note = Description of Artificial Sequence: Synthetic oligonucleotide
  misc_feature 1..20: note = Target: SCN10A; (+) strand; PAM type: YTN; PAM sequence: CTG
  source 1..20: mol_type = other DNA
gaccccaaagccagacagtt

SEQ ID NO: 65257 - DNA, 20 bp, synthetic construct
  misc_feature 1..20: note = Description of Artificial Sequence: Synthetic oligonucleotide
  misc_feature 1..20: note = Target: SCN10A; (+) strand; PAM type: YTN; PAM sequence: TTC
  source 1..20: mol_type = other DNA
tggtgaatccagtaggtcac

SEQ ID NO: 65258 - DNA, 20 bp, synthetic construct
  misc_feature 1..20: note = Description of Artificial Sequence: Synthetic oligonucleotide
  misc_feature 1..20: note = Target: SCN10A; (+) strand; PAM type: YTN; PAM sequence: CTG
  source 1..20: mol_type = other DNA
gtgaatccagtaggtcacct

SEQ ID NO: 65259 - DNA, 20 bp, synthetic construct
  misc_feature 1..20: note = Description of Artificial Sequence: Synthetic oligonucleotide
  misc_feature 1..20: note = Target: SCN10A; (+) strand; PAM type: YTN; PAM sequence: CTC
  source 1..20: mol_type = other DNA
cagcttggtggaccctgctg

SEQ ID NO: 65260 - DNA, 20 bp, synthetic construct
  misc_feature 1..20: note = Description of Artificial Sequence: Synthetic oligonucleotide
  misc_feature 1..20: note = Target: SCN10A; (+) strand; PAM type: YTN; PAM sequence: CTT
  source 1..20: mol_type = other DNA
ggtggaccctgctgcggaca

SEQ ID NO: 65261 - DNA, 20 bp, synthetic construct
  misc_feature 1..20: note = Description of Artificial Sequence: Synthetic oligonucleotide
  misc_feature 1..20: note = Target: SCN10A; (+) strand; PAM type: YTN; PAM sequence: TTG
  source 1..20: mol_type = other DNA
gtggaccctgctgcggacat

SEQ ID NO: 65262 - DNA, 20 bp, synthetic construct
  misc_feature 1..20: note = Description of Artificial Sequence: Synthetic oligonucleotide
  misc_feature 1..20: note = Target: SCN10A; (+) strand; PAM type: YTN; PAM sequence: CTG
  source 1..20: mol_type = other DNA
ctgcggacatgaaggcagga

SEQ ID NO: 65263 - DNA, 20 bp, synthetic construct
  misc_feature 1..20: note = Description of Artificial Sequence: Synthetic oligonucleotide
  misc_feature 1..20: note = Target: SCN10A; (+) strand; PAM type: YTN; PAM sequence: CTG
  source 1..20: mol_type = other DNA
cggacatgaaggcaggatgc

SEQ ID NO: 65264 - DNA, 20 bp, synthetic construct
  misc_feature 1..20: note = Description of Artificial Sequence: Synthetic oligonucleotide
  misc_feature 1..20: note = Target: SCN10A; (+) strand; PAM type: YTN; PAM sequence: CTG
  source 1..20: mol_type = other DNA
accctttctagcttctgcct

SEQ ID NO: 65265 - DNA, 20 bp, synthetic construct
  misc_feature 1..20: note = Description of Artificial Sequence: Synthetic oligonucleotide
  misc_feature 1..20: note = Target: SCN10A; (+) strand; PAM type: YTN; PAM sequence: CTT
  source 1..20: mol_type = other DNA
tctagcttctgcctatcatg

SEQ ID NO: 65266 - DNA, 20 bp, synthetic construct
  misc_feature 1..20: note = Description of Artificial Sequence: Synthetic oligonucleotide
  misc_feature 1..20: note = Target: SCN10A; (+) strand; PAM type: YTN; PAM sequence: TTT
  source 1..20: mol_type = other DNA
ctagcttctgcctatcatgt

SEQ ID NO: 65267 - DNA, 20 bp, synthetic construct
  misc_feature 1..20: note = Description of Artificial Sequence: Synthetic oligonucleotide
  misc_feature 1..20: note = Target: SCN10A; (+) strand; PAM type: YTN; PAM sequence: TTC
  source 1..20: mol_type = other DNA
tagcttctgcctatcatgtg

SEQ ID NO: 65268 - DNA, 20 bp, synthetic construct
  misc_feature 1..20: note = Description of Artificial Sequence: Synthetic oligonucleotide
  misc_feature 1..20: note = Target: SCN10A; (+) strand; PAM type: YTN; PAM sequence: CTA
  source 1..20: mol_type = other DNA
gcttctgcctatcatgtgtg

SEQ ID NO: 65269 - DNA, 20 bp, synthetic construct
  misc_feature 1..20: note = Description of Artificial Sequence: Synthetic oligonucleotide
  misc_feature 1..20: note = Target: SCN10A; (+) strand; PAM type: YTN; PAM sequence: CTT
  source 1..20: mol_type = other DNA
ctgcctatcatgtgtgcgtg

SEQ ID NO: 65270 - DNA, 20 bp, synthetic construct
  misc_feature 1..20: note = Description of Artificial Sequence: Synthetic oligonucleotide
  misc_feature 1..20: note = Target: SCN10A; (+) strand; PAM type: YTN; PAM sequence: TTC
  source 1..20: mol_type = other DNA
tgcctatcatgtgtgcgtgt

SEQ ID NO: 65271 - DNA, 20 bp, synthetic construct
  misc_feature 1..20: note = Description of Artificial Sequence: Synthetic oligonucleotide
  misc_feature 1..20: note = Target: SCN10A; (+) strand; PAM type: YTN; PAM sequence: CTG
  source 1..20: mol_type = other DNA
cctatcatgtgtgcgtgtgt

SEQ ID NO: 65272 - DNA, 20 bp, synthetic construct
  misc_feature 1..20: note = Description of Artificial Sequence: Synthetic oligonucleotide
  misc_feature 1..20: note = Target: SCN10A; (+) strand; PAM type: YTN; PAM sequence: CTA
  source 1..20: mol_type = other DNA
tcatgtgtgcgtgtgtttga

SEQ ID NO: 65273 - DNA, 20 bp, synthetic construct
  misc_feature 1..20: note = Description of Artificial Sequence: Synthetic oligonucleotide
  misc_feature 1..20: note = Target: SCN10A; (+) strand; PAM type: YTN; PAM sequence: TTT
  source 1..20: mol_type = other DNA
gaacacacacacacacacac

SEQ ID NO: 65274 - DNA, 20 bp, synthetic construct
  misc_feature 1..20: note = Description of Artificial Sequence: Synthetic oligonucleotide
  misc_feature 1..20: note = Target: SCN10A; (+) strand; PAM type: YTN; PAM sequence: TTG
  source 1..20: mol_type = other DNA
aacacacacacacacacaca

SEQ ID NO: 65275 - DNA, 20 bp, synthetic construct
  misc_feature 1..20: note = Description of Artificial Sequence: Synthetic oligonucleotide
  misc_feature 1..20: note = Target: SCN10A; (+) strand; PAM type: YTN; PAM sequence: CTT
  source 1..20: mol_type = other DNA
gtgaggtggcttaattcagg

SEQ ID NO: 65276 - DNA, 20 bp, synthetic construct
  misc_feature 1..20: note = Description of Artificial Sequence: Synthetic oligonucleotide
  misc_feature 1..20: note = Target: SCN10A; (+) strand; PAM type: YTN; PAM sequence: TTG
  source 1..20: mol_type = other DNA
tgaggtggcttaattcaggg

SEQ ID NO: 65277 - DNA, 20 bp, synthetic construct
  misc_feature 1..20: note = Description of Artificial Sequence: Synthetic oligonucleotide
  misc_feature 1..20: note = Target: SCN10A; (+) strand; PAM type: YTN; PAM sequence: CTT
  source 1..20: mol_type = other DNA
aattcaggggttaagaaaag

SEQ ID NO: 65278 - DNA, 20 bp, synthetic construct
  misc_feature 1..20: note = Description of Artificial Sequence: Synthetic oligonucleotide
  misc_feature 1..20: note = Target: SCN10A; (+) strand; PAM type: YTN; PAM sequence: TTA
  source 1..20: mol_type = other DNA
attcaggggttaagaaaagc

SEQ ID NO: 65279 - DNA, 20 bp, synthetic construct
  misc_feature 1..20: note = Description of Artificial Sequence: Synthetic oligonucleotide
  misc_feature 1..20: note = Target: SCN10A; (+) strand; PAM type: YTN; PAM sequence: TTC
  source 1..20: mol_type = other DNA
aggggttaagaaaagcgggc

SEQ ID NO: 65280 - DNA, 20 bp, synthetic construct
  misc_feature 1..20: note = Description of Artificial Sequence: Synthetic oligonucleotide
  misc_feature 1..20: note = Target: SCN10A; (+) strand; PAM type: YTN; PAM sequence: TTA
  source 1..20: mol_type = other DNA
agaaaagcgggcttggcagc

SEQ ID NO: 65281 - DNA, 20 bp, synthetic construct
  misc_feature 1..20: note = Description of Artificial Sequence: Synthetic oligonucleotide
  misc_feature 1..20: note = Target: SCN10A; (+) strand; PAM type: YTN; PAM sequence: CTT
  source 1..20: mol_type = other DNA
ggcagccggtctgtctgggt

SEQ ID NO: 65282 - DNA, 20 bp, synthetic construct
  misc_feature 1..20: note = Description of Artificial Sequence: Synthetic oligonucleotide
  misc_feature 1..20: note = Target: SCN10A; (+) strand; PAM type: YTN; PAM sequence: TTG
  source 1..20: mol_type = other DNA
gcagccggtctgtctgggtt

SEQ ID NO: 65283 - DNA, 20 bp, synthetic construct
  misc_feature 1..20: note = Description of Artificial Sequence: Synthetic oligonucleotide
  misc_feature 1..20: note = Target: SCN10A; (+) strand; PAM type: YTN; PAM sequence: CTG
  source 1..20: mol_type = other DNA
tctgggttcaaattctgatg

SEQ ID NO: 65284 - DNA, 20 bp, synthetic construct
  misc_feature 1..20: note = Description of Artificial Sequence: Synthetic oligonucleotide
  misc_feature 1..20: note = Target: SCN10A; (+) strand; PAM type: YTN; PAM sequence: CTG
  source 1..20: mol_type = other DNA
ggttcaaattctgatgtggc

SEQ ID NO: 65285 - DNA, 20 bp, synthetic construct
  misc_feature 1..20: note = Description of Artificial Sequence: Synthetic oligonucleotide
  misc_feature 1..20: note = Target: SCN10A; (+) strand; PAM type: YTN; PAM sequence: TTC
  source 1..20: mol_type = other DNA
aaattctgatgtggccacta

SEQ ID NO: 65286 - DNA, 20 bp, synthetic construct
  misc_feature 1..20: note = Description of Artificial Sequence: Synthetic oligonucleotide
  misc_feature 1..20: note = Target: SCN10A; (+) strand; PAM type: YTN; PAM sequence: TTC
  source 1..20: mol_type = other DNA
tgatgtggccactaaactca

SEQ ID NO: 65287 - DNA, 20 bp, synthetic construct
  misc_feature 1..20: note = Description of Artificial Sequence: Synthetic oligonucleotide
  misc_feature 1..20: note = Target: SCN10A; (+) strand; PAM type: YTN; PAM sequence: CTG
  source 1..20: mol_type = other DNA
atgtggccactaaactcaac

SEQ ID NO: 65288 - DNA, 20 bp, synthetic construct
  misc_feature 1..20: note = Description of Artificial Sequence: Synthetic oligonucleotide
  misc_feature 1..20: note = Target: SCN10A; (+) strand; PAM type: YTN; PAM sequence: CTA
  source 1..20: mol_type = other DNA
aactcaactctatgatcttg

SEQ ID NO: 65289 - DNA, 20 bp, synthetic construct
  misc_feature 1..20: note = Description of Artificial Sequence: Synthetic oligonucleotide
  misc_feature 1..20: note = Target: SCN10A; (+) strand; PAM type: YTN; PAM sequence: CTC
  source 1..20: mol_type = other DNA
aactctatgatcttgggaag

SEQ ID NO: 65290 - DNA, 20 bp, synthetic construct
  misc_feature 1..20: note = Description of Artificial Sequence: Synthetic oligonucleotide
  misc_feature 1..20: note = Target: SCN10A; (+) strand; PAM type: YTN; PAM sequence: CTC
  source 1..20: mol_type = other DNA
tatgatcttgggaagattat

SEQ ID NO: 65291 - DNA, 20 bp, synthetic construct
  misc_feature 1..20: note = Description of Artificial Sequence: Synthetic oligonucleotide
  misc_feature 1..20: note = Target: SCN10A; (+) strand; PAM type: YTN; PAM sequence: CTA
  source 1..20: mol_type = other DNA
tgatcttgggaagattattt

SEQ ID NO: 65292 - DNA, 20 bp, synthetic construct
  misc_feature 1..20: note = Description of Artificial Sequence: Synthetic oligonucleotide
  misc_feature 1..20: note = Target: SCN10A; (+) strand; PAM type: YTN; PAM sequence: CTT
  source 1..20: mol_type = other DNA
gggaagattatttaaccttt

SEQ ID NO: 65293 - DNA, 20 bp, synthetic construct
  misc_feature 1..20: note = Description of Artificial Sequence: Synthetic oligonucleotide
  misc_feature 1..20: note = Target: SCN10A; (+) strand; PAM type: YTN; PAM sequence: TTG
  source 1..20: mol_type = other DNA
ggaagattatttaacctttt

SEQ ID NO: 65294 - DNA, 20 bp, synthetic construct
  misc_feature 1..20: note = Description of Artificial Sequence: Synthetic oligonucleotide
  misc_feature 1..20: note = Target: SCN10A; (+) strand; PAM type: YTN; PAM sequence: TTA
  source 1..20: mol_type = other DNA
tttaaccttttgcatctcca

SEQ ID NO: 65295 - DNA, 20 bp, synthetic construct
  misc_feature 1..20: note = Description of Artificial Sequence: Synthetic oligonucleotide
  misc_feature 1..20: note = Target: SCN10A; (+) strand; PAM type: YTN; PAM sequence: TTT
  source 1..20: mol_type = other DNA
aaccttttgcatctccattt

SEQ ID NO: 65296 - DNA, 20 bp, synthetic construct
  misc_feature 1..20: note = Description of Artificial Sequence: Synthetic oligonucleotide
  misc_feature 1..20: note = Target: SCN10A; (+) strand; PAM type: YTN; PAM sequence: TTA
  source 1..20: mol_type = other DNA
accttttgcatctccatttt

SEQ ID NO: 65297 - DNA, 20 bp, synthetic construct
  misc_feature 1..20: note = Description of Artificial Sequence: Synthetic oligonucleotide
  misc_feature 1..20: note = Target: SCN10A; (+) strand; PAM type: YTN; PAM sequence: CTT
  source 1..20: mol_type = other DNA
ttgcatctccatttttccat

SEQ ID NO: 65298 - DNA, 20 bp, synthetic construct
  misc_feature 1..20: note = Description of Artificial Sequence: Synthetic oligonucleotide
  misc_feature 1..20: note = Target: SCN10A; (+) strand; PAM type: YTN; PAM sequence: TTT
  source 1..20: mol_type = other DNA
tgcatctccatttttccatc

SEQ ID NO: 65299 - DNA, 20 bp, synthetic construct
  misc_feature 1..20: note = Description of Artificial Sequence: Synthetic oligonucleotide
  misc_feature 1..20: note = Target: SCN10A; (+) strand; PAM type: YTN; PAM sequence: TTT
  source 1..20: mol_type = other DNA
gcatctccatttttccatct

SEQ ID NO: 65300 - DNA, 20 bp, synthetic construct
  misc_feature 1..20: note = Description of Artificial Sequence: Synthetic oligonucleotide
  misc_feature 1..20: note = Target: SCN10A; (+) strand; PAM type: YTN; PAM sequence: TTG
  source 1..20: mol_type = other DNA
catctccatttttccatctg

SEQ ID NO: 65301 - DNA, 20 bp, synthetic construct
  misc_feature 1..20: note = Description of Artificial Sequence: Synthetic oligonucleotide
  misc_feature 1..20: note = Target: SCN10A; (+) strand; PAM type: YTN; PAM sequence: CTC
  source 1..20: mol_type = other DNA
catttttccatctgggaaag

SEQ ID NO: 65302 - DNA, 20 bp, synthetic construct
  misc_feature 1..20: note = Description of Artificial Sequence: Synthetic oligonucleotide
  misc_feature 1..20: note = Target: SCN10A; (+) strand; PAM type: YTN; PAM sequence: TTT
  source 1..20: mol_type = other DNA
ttccatctgggaaagggaat

SEQ ID NO: 65303 - DNA, 20 bp, synthetic construct
  misc_feature 1..20: note = Description of Artificial Sequence: Synthetic oligonucleotide
  misc_feature 1..20: note = Target: SCN10A; (+) strand; PAM type: YTN; PAM sequence: TTT
  source 1..20: mol_type = other DNA
tccatctgggaaagggaata

SEQ ID NO: 65304 - DNA, 20 bp, synthetic construct
  misc_feature 1..20: note = Description of Artificial Sequence: Synthetic oligonucleotide
  misc_feature 1..20: note = Target: SCN10A; (+) strand; PAM type: YTN; PAM sequence: TTT
  source 1..20: mol_type = other DNA
ccatctgggaaagggaataa

SEQ ID NO: 65305 - DNA, 20 bp, synthetic construct
  misc_feature 1..20: note = Description of Artificial Sequence: Synthetic oligonucleotide
  misc_feature 1..20: note = Target: SCN10A; (+) strand; PAM type: YTN; PAM sequence: TTC
  source 1..20: mol_type = other DNA
catctgggaaagggaataac

SEQ ID NO: 65306 - DNA, 20 bp, synthetic construct
  misc_feature 1..20: note = Description of Artificial Sequence: Synthetic oligonucleotide
  misc_feature 1..20: note = Target: SCN10A; (+) strand; PAM type: YTN; PAM sequence: CTG
  source 1..20: mol_type = other DNA
ggaaagggaataacaagagt

SEQ ID NO: 65307 - DNA, 20 bp, synthetic construct
  misc_feature 1..20: note = Description of Artificial Sequence: Synthetic oligonucleotide
  misc_feature 1..20: note = Target: SCN10A; (+) strand; PAM type: YTN; PAM sequence: CTA
  source 1..20: mol_type = other DNA
ccatgtagggttgttgtgaa

SEQ ID NO: 65308 - DNA, 20 bp, synthetic construct
  misc_feature 1..20: note = Description of Artificial Sequence: Synthetic oligonucleotide
  misc_feature 1..20: note = Target: SCN10A; (+) strand; PAM type: YTN; PAM sequence: TTG
  source 1..20: mol_type = other DNA
ttgtgaaaataaaatgagat

SEQ ID NO: 65309 - DNA, 20 bp, synthetic construct
  misc_feature 1..20: note = Description of Artificial Sequence: Synthetic oligonucleotide
  misc_feature 1..20: note = Target: SCN10A; (+) strand; PAM type: YTN; PAM sequence: TTG
  source 1..20: mol_type = other DNA
tgaaaataaaatgagataat

SEQ ID NO: 65310 - DNA, 20 bp, synthetic construct
  misc_feature 1..20: note = Description of Artificial Sequence: Synthetic oligonucleotide
  misc_feature 1..20: note = Target: SCN10A; (+) strand; PAM type: YTN; PAM sequence: CTG
  source 1..20: mol_type = other DNA
agtattattactattcctgt

SEQ ID NO: 65311 - DNA, 20 bp, synthetic construct
  misc_feature 1..20: note = Description of Artificial Sequence: Synthetic oligonucleotide
  misc_feature 1..20: note = Target: SCN10A; (+) strand; PAM type: YTN; PAM sequence: TTA
  source 1..20: mol_type = other DNA
ttactattcctgtgggtggg

SEQ ID NO: 65312 - DNA, 20 bp, synthetic construct
  misc_feature 1..20: note = Description of Artificial Sequence: Synthetic oligonucleotide
  misc_feature 1..20: note = Target: SCN10A; (+) strand; PAM type: YTN; PAM sequence: TTA
  source 1..20: mol_type = other DNA
ctattcctgtgggtggggca

SEQ ID NO: 65313 - DNA, 20 bp, synthetic construct
  misc_feature 1..20: note = Description of Artificial Sequence: Synthetic oligonucleotide
  misc_feature 1..20: note = Target: SCN10A; (+) strand; PAM type: YTN; PAM sequence: CTA
  source 1..20: mol_type = other DNA
ttcctgtgggtggggcaagg

SEQ ID NO: 65314 - DNA, 20 bp, synthetic construct
  misc_feature 1..20: note = Description of Artificial Sequence: Synthetic oligonucleotide
  misc_feature 1..20: note = Target: SCN10A; (+) strand; PAM type: YTN; PAM sequence: TTC
  source 1..20: mol_type = other DNA
ctgtgggtggggcaaggttg

SEQ ID NO: 65315 - DNA, 20 bp, synthetic construct
  misc_feature 1..20: note = Description of Artificial Sequence: Synthetic oligonucleotide
  misc_feature 1..20: note = Target: SCN10A; (+) strand; PAM type: YTN; PAM sequence: CTG
  source 1..20: mol_type = other DNA
tgggtggggcaaggttggag

SEQ ID NO: 65316 - DNA, 20 bp, synthetic construct
  misc_feature 1..20: note = Description of Artificial Sequence: Synthetic oligonucleotide
  misc_feature 1..20: note = Target: SCN10A; (+) strand; PAM type: YTN; PAM sequence: TTG
  source 1..20: mol_type = other DNA
gagcagttgttgtccctctg

SEQ ID NO: 65317 - DNA, 20 bp, synthetic construct
  misc_feature 1..20: note = Description of Artificial Sequence: Synthetic oligonucleotide
  misc_feature 1..20: note = Target: SCN10A; (+) strand; PAM type: YTN; PAM sequence: TTG
  source 1..20: mol_type = other DNA
ttgtccctctgagtcagata

SEQ ID NO: 65318 - DNA, 20 bp, synthetic construct
  misc_feature 1..20: note = Description of Artificial Sequence: Synthetic oligonucleotide
  misc_feature 1..20: note = Target: SCN10A; (+) strand; PAM type: YTN; PAM sequence: TTG
  source 1..20: mol_type = other DNA
tccctctgagtcagatactt

SEQ ID NO: 65319 - DNA, 20 bp, synthetic construct
  misc_feature 1..20: note = Description of Artificial Sequence: Synthetic oligonucleotide
  misc_feature 1..20: note = Target: SCN10A; (+) strand; PAM type: YTN; PAM sequence: CTC
  source 1..20: mol_type = other DNA
tgagtcagatactttatcca

SEQ ID NO: 65320 - DNA, 20 bp, synthetic construct
  misc_feature 1..20: note = Description of Artificial Sequence: Synthetic oligonucleotide
  misc_feature 1..20: note = Target: SCN10A; (+) strand; PAM type: YTN; PAM sequence: CTG
  source 1..20: mol_type = other DNA
agtcagatactttatccagt

SEQ ID NO: 65321 - DNA, 20 bp, synthetic construct
  misc_feature 1..20: note = Description of Artificial Sequence: Synthetic oligonucleotide
  misc_feature 1..20: note = Target: SCN10A; (+) strand; PAM type: YTN; PAM sequence: CTT
  source 1..20: mol_type = other DNA
tatccagtatatagtgaaat

SEQ ID NO: 65322 - DNA, 20 bp, synthetic construct
  misc_feature 1..20: note = Description of Artificial Sequence: Synthetic oligonucleotide
  misc_feature 1..20: note = Target: SCN10A; (+) strand; PAM type: YTN; PAM sequence: TTT
  source 1..20: mol_type = other DNA
atccagtatatagtgaaatc

SEQ ID NO: 65323 - DNA, 20 bp, synthetic construct
  misc_feature 1..20: note = Description of Artificial Sequence: Synthetic oligonucleotide
  misc_feature 1..20: note = Target: SCN10A; (+) strand; PAM type: YTN; PAM sequence: TTA
  source 1..20: mol_type = other DNA
tccagtatatagtgaaatcc

SEQ ID NO: 65324 - DNA, 20 bp, synthetic construct
  misc_feature 1..20: note = Description of Artificial Sequence: Synthetic oligonucleotide
  misc_feature 1..20: note = Target: SCN10A; (+) strand; PAM type: YTN; PAM sequence: TTG
  source 1..20: mol_type = other DNA
tatcttgttaagagtaaata

SEQ ID NO: 65325 - DNA, 20 bp, synthetic construct
  misc_feature 1..20: note = Description of Artificial Sequence: Synthetic oligonucleotide
  misc_feature 1..20: note = Target: SCN10A; (+) strand; PAM type: YTN; PAM sequence: CTT
  source 1..20: mol_type = other DNA
gttaagagtaaataatacta

SEQ ID NO: 65326 - DNA, 20 bp, synthetic construct
  misc_feature 1..20: note = Description of Artificial Sequence: Synthetic oligonucleotide
  misc_feature 1..20: note = Target: SCN10A; (+) strand; PAM type: YTN; PAM sequence: TTG
  source 1..20: mol_type = other DNA
ttaagagtaaataatactaa

SEQ ID NO: 65327 - DNA, 20 bp, synthetic construct
  misc_feature 1..20: note = Description of Artificial Sequence: Synthetic oligonucleotide
  misc_feature 1..20: note = Target: SCN10A; (+) strand; PAM type: YTN; PAM sequence: TTA
  source 1..20: mol_type = other DNA
agagtaaataatactaacaa

SEQ ID NO: 65328 - DNA, 20 bp, synthetic construct
  misc_feature 1..20: note = Description of Artificial Sequence: Synthetic oligonucleotide
  misc_feature 1..20: note = Target: SCN10A; (+) strand; PAM type: YTN; PAM sequence: CTA
  source 1..20: mol_type = other DNA
acaagtgatggaggaaaatt

SEQ ID NO: 65329 - DNA, 20 bp, synthetic construct
  misc_feature 1..20: note = Description of Artificial Sequence: Synthetic oligonucleotide
  misc_feature 1..20: note = Target: SCN10A; (+) strand; PAM type: YTN; PAM sequence: TTT
  source 1..20: mol_type = other DNA
aaagcagcatgatgtctaaa

SEQ ID NO: 65330 - DNA, 20 bp, synthetic construct
  misc_feature 1..20: note = Description of Artificial Sequence: Synthetic oligonucleotide
  misc_feature 1..20: note = Target: SCN10A; (+) strand; PAM type: YTN; PAM sequence: TTA
  source 1..20: mol_type = other DNA
aagcagcatgatgtctaaac

SEQ ID NO: 65331 - DNA, 20 bp, synthetic construct
  misc_feature 1..20: note = Description of Artificial Sequence: Synthetic oligonucleotide
  misc_feature 1..20: note = Target: SCN10A; (+) strand; PAM type: YTN; PAM sequence: CTA
  source 1..20: mol_type = other DNA
aactagatgccaaagaaaag

SEQ ID NO: 65332 - DNA, 20 bp, synthetic construct
  misc_feature 1..20: note = Description of Artificial Sequence: Synthetic oligonucleotide
  misc_feature 1..20: note = Target: SCN10A; (+) strand; PAM type: YTN; PAM sequence: CTA
  source 1..20: mol_type = other DNA
gatgccaaagaaaagttccg

SEQ ID NO: 65333 - DNA, 20 bp, synthetic construct
  misc_feature 1..20: note = Description of Artificial Sequence: Synthetic oligonucleotide
  misc_feature 1..20: note = Target: SCN10A; (+) strand; PAM type: YTN; PAM sequence: TTC
  source 1..20: mol_type = other DNA
cgacttcctgatgcttttgt

SEQ ID NO: 65334 - DNA, 20 bp, synthetic construct
  misc_feature 1..20: note = Description of Artificial Sequence: Synthetic oligonucleotide
  misc_feature 1..20: note = Target: SCN10A; (+) strand; PAM type: YTN; PAM sequence: CTT
  source 1..20: mol_type = other DNA
cctgatgcttttgttacaac

SEQ ID NO: 65335 - DNA, 20 bp, synthetic construct
  misc_feature 1..20: note = Description of Artificial Sequence: Synthetic oligonucleotide
  misc_feature 1..20: note = Target: SCN10A; (+) strand; PAM type: YTN; PAM sequence: TTC
  source 1..20: mol_type = other DNA
ctgatgcttttgttacaaca

SEQ ID NO: 65336 - DNA, 20 bp, synthetic construct
  misc_feature 1..20: note = Description of Artificial Sequence: Synthetic oligonucleotide
  misc_feature 1..20: note = Target: SCN10A; (+) strand; PAM type: YTN; PAM sequence: CTG
  source 1..20: mol_type = other DNA
atgcttttgttacaacagca

SEQ ID NO: 65337 - DNA, 20 bp, synthetic construct
  misc_feature 1..20: note = Description of Artificial Sequence: Synthetic oligonucleotide
  misc_feature 1..20: note = Target: SCN10A; (+) strand; PAM type: YTN; PAM sequence: CTT
  source 1..20: mol_type = other DNA
ttgttacaacagcaaccttg

SEQ ID NO: 65338 - DNA, 20 bp, synthetic construct
  misc_feature 1..20: note = Description of Artificial Sequence: Synthetic oligonucleotide
  misc_feature 1..20: note = Target: SCN10A; (+) strand; PAM type: YTN; PAM sequence: TTT
  source 1..20: mol_type = other DNA
tgttacaacagcaaccttgt

SEQ ID NO: 65339 - DNA, 20 bp, synthetic construct
  misc_feature 1..20: note = Description of Artificial Sequence: Synthetic oligonucleotide
  misc_feature 1..20: note = Target: SCN10A; (+) strand; PAM type: YTN; PAM sequence: TTT
  source 1..20: mol_type = other DNA
gttacaacagcaaccttgtt

SEQ ID NO: 65340 - DNA, 20 bp, synthetic construct
  misc_feature 1..20: note = Description of Artificial Sequence: Synthetic oligonucleotide
  misc_feature 1..20: note = Target: SCN10A; (+) strand; PAM type: YTN; PAM sequence: TTG
  source 1..20: mol_type = other DNA
ttacaacagcaaccttgttt

SEQ ID NO: 65341 - DNA, 20 bp, synthetic construct
  misc_feature 1..20: note = Description of Artificial Sequence: Synthetic oligonucleotide
  misc_feature 1..20: note = Target: SCN10A; (+) strand; PAM type: YTN; PAM sequence: TTA
  source 1..20: mol_type = other DNA
caacagcaaccttgtttcca

SEQ ID NO: 65342 - DNA, 20 bp, synthetic construct
  misc_feature 1..20: note = Description of Artificial Sequence: Synthetic oligonucleotide
  misc_feature 1..20: note = Target: SCN10A; (+) strand; PAM type: YTN; PAM sequence: CTT
  source 1..20: mol_type = other DNA
gtttccatgtttcctccctt

SEQ ID NO: 65343 - DNA, 20 bp, synthetic construct
  misc_feature 1..20: note = Description of Artificial Sequence: Synthetic oligonucleotide
  misc_feature 1..20: note = Target: SCN10A; (+) strand; PAM type: YTN; PAM sequence: TTG
  source 1..20: mol_type = other DNA
tttccatgtttcctcccttc

SEQ ID NO: 65344 - DNA, 20 bp, synthetic construct
  misc_feature 1..20: note = Description of Artificial Sequence: Synthetic oligonucleotide
  misc_feature 1..20: note = Target: SCN10A; (+) strand; PAM type: YTN; PAM sequence: TTT
  source 1..20: mol_type = other DNA
ccatgtttcctcccttccac

SEQ ID NO: 65345 - DNA, 20 bp, synthetic construct
  misc_feature 1..20: note = Description of Artificial Sequence: Synthetic oligonucleotide
  misc_feature 1..20: note = Target: SCN10A; (+) strand; PAM type: YTN; PAM sequence: TTC
  source 1..20: mol_type = other DNA
catgtttcctcccttccact

SEQ ID NO: 65346 - DNA, 20 bp, synthetic construct
  misc_feature 1..20: note = Description of Artificial Sequence: Synthetic oligonucleotide
  misc_feature 1..20: note = Target: SCN10A; (+) strand; PAM type: YTN; PAM sequence: TTT
  source 1..20: mol_type = other DNA
cctcccttccactgtcttcc

SEQ ID NO: 65347 - DNA, 20 bp, synthetic construct
  misc_feature 1..20: note = Description of Artificial Sequence: Synthetic oligonucleotide
  misc_feature 1..20: note = Target: SCN10A; (+) strand; PAM type: YTN; PAM sequence: TTC
  source 1..20: mol_type = other DNA
ctcccttccactgtcttccc

SEQ ID NO: 65348 - DNA, 20 bp, synthetic construct
  misc_feature 1..20: note = Description of Artificial Sequence: Synthetic oligonucleotide
  misc_feature 1..20: note = Target: SCN10A; (+) strand; PAM type: YTN; PAM sequence: CTC
  source 1..20: mol_type = other DNA
ccttccactgtcttcccctt

SEQ ID NO: 65349 - DNA, 20 bp, synthetic construct
  misc_feature 1..20: note = Description of Artificial Sequence: Synthetic oligonucleotide
  misc_feature 1..20: note = Target: SCN10A; (+) strand; PAM type: YTN; PAM sequence: CTT
  source 1..20: mol_type = other DNA
ccactgtcttccccttccct

SEQ ID NO: 65350 - DNA, 20 bp, synthetic construct
  misc_feature 1..20: note = Description of Artificial Sequence: Synthetic oligonucleotide
  misc_feature 1..20: note = Target: SCN10A; (+) strand; PAM type: YTN; PAM sequence: TTC
  source 1..20: mol_type = other DNA
cactgtcttccccttccctc

SEQ ID NO: 65351 - DNA, 20 bp, synthetic construct
  misc_feature 1..20: note = Description of Artificial Sequence: Synthetic oligonucleotide
  misc_feature 1..20: note = Target: SCN10A; (+) strand; PAM type: YTN; PAM sequence: CTG
  source 1..20: mol_type = other DNA
tcttccccttccctccccaa

SEQ ID NO: 65352 - DNA, 20 bp, synthetic construct
  misc_feature 1..20: note = Description of Artificial Sequence: Synthetic oligonucleotide
  misc_feature 1..20: note = Target: SCN10A; (+) strand; PAM type: YTN; PAM sequence: CTT
  source 1..20: mol_type = other DNA
ccccttccctccccaactct

SEQ ID NO: 65353 - DNA, 20 bp, synthetic construct
  misc_feature 1..20: note = Description of Artificial Sequence: Synthetic oligonucleotide
  misc_feature 1..20: note = Target: SCN10A; (+) strand; PAM type: YTN; PAM sequence: TTC
  source 1..20: mol_type = other DNA
cccttccctccccaactctt

SEQ ID NO: 65354 - DNA, 20 bp, synthetic construct
  misc_feature 1..20: note = Description of Artificial Sequence: Synthetic oligonucleotide
  misc_feature 1..20: note = Target: SCN10A; (+) strand; PAM type: YTN; PAM sequence: CTT
  source 1..20: mol_type = other DNA
ccctccccaactctttttct

SEQ ID NO: 65355 - DNA, 20 bp, synthetic construct
  misc_feature 1..20: note = Description of Artificial Sequence: Synthetic oligonucleotide
  misc_feature 1..20: note = Target: SCN10A; (+) strand; PAM type: YTN; PAM sequence: TTC
  source 1..20: mol_type = other DNA
cctccccaactctttttctc

SEQ ID NO: 65356 - DNA, 20 bp, synthetic construct
  misc_feature 1..20: note = Description of Artificial Sequence: Synthetic oligonucleotide
  misc_feature 1..20: note = Target: SCN10A; (+) strand; PAM type: YTN; PAM sequence: CTC
  source 1..20: mol_type = other DNA
cccaactctttttctcctta

SEQ ID NO: 65357 - DNA, 20 bp, synthetic construct
  misc_feature 1..20: note = Description of Artificial Sequence: Synthetic oligonucleotide
  misc_feature 1..20: note = Target: SCN10A; (+) strand; PAM type: YTN; PAM sequence: CTC
  source 1..20: mol_type = other DNA
tttttctccttaagtgacaa

SEQ ID NO: 65358 - DNA, 20 bp, synthetic construct
  misc_feature 1..20: note = Description of Artificial Sequence: Synthetic oligonucleotide
  misc_feature 1..20: note = Target: SCN10A; (+) strand; PAM type: YTN; PAM sequence: CTT
  source 1..20: mol_type = other DNA
tttctccttaagtgacaaca

SEQ ID NO: 65359 - DNA, 20 bp, synthetic construct
  misc_feature 1..20: note = Description of Artificial Sequence: Synthetic oligonucleotide
  misc_feature 1..20: note = Target: SCN10A; (+) strand; PAM type: YTN; PAM sequence: TTT
  source 1..20: mol_type = other DNA
ttctccttaagtgacaacat

SEQ ID NO: 65360 - DNA, 20 bp, synthetic construct
  misc_feature 1..20: note = Description of Artificial Sequence: Synthetic oligonucleotide
  misc_feature 1..20: note = Target: SCN10A; (+) strand; PAM type: YTN; PAM sequence: TTT
  source 1..20: mol_type = other DNA
tctccttaagtgacaacatt

SEQ ID NO: 65361 - DNA, 20 bp, synthetic construct
  misc_feature 1..20: note = Description of Artificial Sequence: Synthetic oligonucleotide
  misc_feature 1..20: note = Target: SCN10A; (+) strand; PAM type: YTN; PAM sequence: TTT
  source 1..20: mol_type = other DNA
ctccttaagtgacaacattg

SEQ ID NO: 65362 - DNA, 20 bp, synthetic construct
  misc_feature 1..20: note = Description of Artificial Sequence: Synthetic oligonucleotide
  misc_feature 1..20: note = Target: SCN10A; (+) strand; PAM type: YTN; PAM sequence: TTC
  source 1..20: mol_type = other DNA
tccttaagtgacaacattga

SEQ ID NO: 65363 - DNA, 20 bp, synthetic construct
  misc_feature 1..20: note = Description of Artificial Sequence: Synthetic oligonucleotide
  misc_feature 1..20: note = Target: SCN10A; (+) strand; PAM type: YTN; PAM sequence: CTC
  source 1..20: mol_type = other DNA
cttaagtgacaacattgaaa

SEQ ID NO: 65364 - DNA, 20 bp, synthetic construct
  misc_feature 1..20: note = Description of Artificial Sequence: Synthetic oligonucleotide
  misc_feature 1..20: note = Target: SCN10A; (+) strand; PAM type: YTN; PAM sequence: CTT
  source 1..20: mol_type = other DNA
aagtgacaacattgaaaatc

SEQ ID NO: 65365 - DNA, 20 bp, synthetic construct
  misc_feature 1..20: note = Description of Artificial Sequence: Synthetic oligonucleotide
  misc_feature 1..20: note = Target: SCN10A; (+) strand; PAM type: YTN; PAM sequence: TTA
  source 1..20: mol_type = other DNA
agtgacaacattgaaaatcg

SEQ ID NO: 65366 - DNA, 20 bp, synthetic construct
  misc_feature 1..20: note = Description of Artificial Sequence: Synthetic oligonucleotide
  misc_feature 1..20: note = Target: SCN10A; (+) strand; PAM type: YTN; PAM sequence: TTG
  source 1..20: mol_type = other DNA
aaaatcgtggctactgttaa

SEQ ID NO: 65367 - DNA, 20 bp, synthetic construct
  misc_feature 1..20: note = Description of Artificial Sequence: Synthetic oligonucleotide
  misc_feature 1..20: note = Target: SCN10A; (+) strand; PAM type: YTN; PAM sequence: CTA
  source 1..20: mol_type = other DNA
ctgttaattgtggtcataaa

SEQ ID NO: 65368 - DNA, 20 bp, synthetic construct
  misc_feature 1..20: note = Description of Artificial Sequence: Synthetic oligonucleotide
  misc_feature 1..20: note = Target: SCN10A; (+) strand; PAM type: YTN; PAM sequence: CTG
  source 1..20: mol_type = other DNA
ttaattgtggtcataaaagt

SEQ ID NO: 65369 - DNA, 20 bp, synthetic construct
  misc_feature 1..20: note = Description of Artificial Sequence: Synthetic oligonucleotide
  misc_feature 1..20: note = Target: SCN10A; (+) strand; PAM type: YTN; PAM sequence: TTA
  source 1..20: mol_type = other DNA
attgtggtcataaaagtaat

SEQ ID NO: 65370 - DNA, 20 bp, synthetic construct
  misc_feature 1..20: note = Description of Artificial Sequence: Synthetic oligonucleotide
  misc_feature 1..20: note = Target: SCN10A; (+) strand; PAM type: YTN; PAM sequence: TTG
  source 1..20: mol_type = other DNA
tggtcataaaagtaattaca

SEQ ID NO: 65371 - DNA, 20 bp, synthetic construct
  misc_feature 1..20: note = Description of Artificial Sequence: Synthetic oligonucleotide
  misc_feature 1..20: note = Target: SCN10A; (+) strand; PAM type: YTN; PAM sequence: TTA
  source 1..20: mol_type = other DNA
cattggaaggaaacagacaa

SEQ ID NO: 65372 - DNA, 20 bp, synthetic construct
  misc_feature 1..20: note = Description of Artificial Sequence: Synthetic oligonucleotide
  misc_feature 1..20: note = Target: SCN10A; (+) strand; PAM type: YTN; PAM sequence: TTG
  source 1..20: mol_type = other DNA
gaaggaaacagacaagtcca

SEQ ID NO: 65373 - DNA, 20 bp, synthetic construct
  misc_feature 1..20: note = Description of Artificial Sequence: Synthetic oligonucleotide
  misc_feature 1..20: note = Target: SCN10A; (+) strand; PAM type: YTN; PAM sequence: TTG
  source 1..20: mol_type = other DNA
tctttagataaaaaagtgac

SEQ ID NO: 65374 - DNA, 20 bp, synthetic construct
  misc_feature 1..20: note = Description of Artificial Sequence: Synthetic oligonucleotide
  misc_feature 1..20: note = Target: SCN10A; (+) strand; PAM type: YTN; PAM sequence: CTT
  source 1..20: mol_type = other DNA
tagataaaaaagtgacattt

SEQ ID NO: 65375 - DNA, 20 bp, synthetic construct
  misc_feature 1..20: note = Description of Artificial Sequence: Synthetic oligonucleotide
  misc_feature 1..20: note = Target: SCN10A; (+) strand; PAM type: YTN; PAM sequence: TTT
  source 1..20: mol_type = other DNA
agataaaaaagtgacattta

SEQ ID NO: 65376 - DNA, 20 bp, synthetic construct
  misc_feature 1..20: note = Description of Artificial Sequence: Synthetic oligonucleotide
  misc_feature 1..20: note = Target: SCN10A; (+) strand; PAM type: YTN; PAM sequence: TTA
  source 1..20: mol_type = other DNA
gataaaaaagtgacatttat

SEQ ID NO: 65377 - DNA, 20 bp, synthetic construct
  misc_feature 1..20: note = Description of Artificial Sequence: Synthetic oligonucleotide
  misc_feature 1..20: note = Target: SCN10A; (+) strand; PAM type: YTN; PAM sequence: TTT
  source 1..20: mol_type = other DNA
atcctcatttcaaggtagag

SEQ ID NO: 65378 - DNA, 20 bp, synthetic construct
  misc_feature 1..20: note = Description of Artificial Sequence: Synthetic oligonucleotide
  misc_feature 1..20: note = Target: SCN10A; (+) strand; PAM type: YTN; PAM sequence: TTA
  source 1..20: mol_type = other DNA
tcctcatttcaaggtagagg

SEQ ID NO: 65379 - DNA, 20 bp, synthetic construct
  misc_feature 1..20: note = Description of Artificial Sequence: Synthetic oligonucleotide
  misc_feature 1..20: note = Target: SCN10A; (+) strand; PAM type: YTN; PAM sequence: CTC
  source 1..20: mol_type = other DNA
atttcaaggtagaggcaact

SEQ ID NO: 65380 - DNA, 20 bp, synthetic construct
  misc_feature 1..20: note = Description of Artificial Sequence: Synthetic oligonucleotide
  misc_feature 1..20: note = Target: SCN10A; (+) strand; PAM type: YTN; PAM sequence: TTT
  source 1..20: mol_type = other DNA
caaggtagaggcaactgaga

SEQ ID NO: 65381 - DNA, 20 bp, synthetic construct
  misc_feature 1..20: note = Description of Artificial Sequence: Synthetic oligonucleotide
  misc_feature 1..20: note = Target: SCN10A; (+) strand; PAM type: YTN; PAM sequence: TTC
  source 1..20: mol_type = other DNA
aaggtagaggcaactgagat

SEQ ID NO: 65382 - DNA, 20 bp, synthetic construct
  misc_feature 1..20: note = Description of Artificial Sequence: Synthetic oligonucleotide
  misc_feature 1..20: note = Target: SCN10A; (+) strand; PAM type: YTN; PAM sequence: CTG
  source 1..20: mol_type = other DNA
agatccagaaaattcaagtg

SEQ ID NO: 65383 - DNA, 20 bp, synthetic construct
  misc_feature 1..20: note = Description of Artificial Sequence: Synthetic oligonucleotide
  misc_feature 1..20: note = Target: SCN10A; (+) strand; PAM type: YTN; PAM sequence: TTC
  source 1..20: mol_type = other DNA
aagtggttgtcctatgtttt

SEQ ID NO: 65384 - DNA, 20 bp, synthetic construct
  misc_feature 1..20: note = Description of Artificial Sequence: Synthetic oligonucleotide
  misc_feature 1..20: note = Target: SCN10A; (+) strand; PAM type: YTN; PAM sequence: TTG
  source 1..20: mol_type = other DNA
tcctatgttttgtaaagggc

SEQ ID NO: 65385 - DNA, 20 bp, synthetic construct
  misc_feature 1..20: note = Description of Artificial Sequence: Synthetic oligonucleotide
  misc_feature 1..20: note = Target: SCN10A; (+) strand; PAM type: YTN; PAM sequence: CTA
  source 1..20: mol_type = other DNA
tgttttgtaaagggcaacta

SEQ ID NO: 65386 - DNA, 20 bp, synthetic construct
  misc_feature 1..20: note = Description of Artificial Sequence: Synthetic oligonucleotide
  misc_feature 1..20: note = Target: SCN10A; (+) strand; PAM type: YTN; PAM sequence: TTT
  source 1..20: mol_type = other DNA
tgtaaagggcaactagctgc

SEQ ID NO: 65387 - DNA, 20 bp, synthetic construct
  misc_feature 1..20: note = Description of Artificial Sequence: Synthetic oligonucleotide
  misc_feature 1..20: note = Target: SCN10A; (+) strand; PAM type: YTN; PAM sequence: TTT
  source 1..20: mol_type = other DNA
gtaaagggcaactagctgcc

SEQ ID NO: 65388 - DNA, 20 bp, synthetic construct
  misc_feature 1..20: note = Description of Artificial Sequence: Synthetic oligonucleotide
  misc_feature 1..20: note = Target: SCN10A; (+) strand; PAM type: YTN; PAM sequence: TTG
  source 1..20: mol_type = other DNA
taaagggcaactagctgcct

SEQ ID NO: 65389 - DNA, 20 bp, synthetic construct
  misc_feature 1..20: note = Description of Artificial Sequence: Synthetic oligonucleotide
  misc_feature 1..20: note = Target: SCN10A; (+) strand; PAM type: YTN; PAM sequence: CTA
  source 1..20: mol_type = other DNA
gctgcctctggctccaggct

SEQ ID NO: 65390 - DNA, 20 bp, synthetic construct
  misc_feature 1..20: note = Description of Artificial Sequence: Synthetic oligonucleotide
  misc_feature 1..20: note = Target: SCN10A; (+) strand; PAM type: YTN; PAM sequence: CTG
  source 1..20: mol_type = other DNA
cctctggctccaggctctcc

SEQ ID NO: 65391 - DNA, 20 bp, synthetic construct
  misc_feature 1..20: note = Description of Artificial Sequence: Synthetic oligonucleotide
  misc_feature 1..20: note = Target: SCN10A; (+) strand; PAM type: YTN; PAM sequence: CTC
  source 1..20: mol_type = other DNA
tggctccaggctctcctggt

SEQ ID NO: 65392 - DNA, 20 bp, synthetic construct
  misc_feature 1..20: note = Description of Artificial Sequence: Synthetic oligonucleotide
  misc_feature 1..20: note = Target: SCN10A; (+) strand; PAM type: YTN; PAM sequence: CTG
  source 1..20: mol_type = other DNA
gctccaggctctcctggttc

SEQ ID NO: 65393 - DNA, 20 bp, synthetic construct
  misc_feature 1..20: note = Description of Artificial Sequence: Synthetic oligonucleotide
  misc_feature 1..20: note = Target: SCN10A; (+) strand; PAM type: YTN; PAM sequence: CTC
  source 1..20: mol_type = other DNA
caggctctcctggttcactt

SEQ ID NO: 65394 - DNA, 20 bp, synthetic construct
  misc_feature 1..20: note = Description of Artificial Sequence: Synthetic oligonucleotide
  misc_feature 1..20: note = Target: SCN10A; (+) strand; PAM type: YTN; PAM sequence: CTC
  source 1..20: mol_type = other DNA
tcctggttcactttcctgtg

SEQ ID NO: 65395 - DNA, 20 bp, synthetic construct
  misc_feature 1..20: note = Description of Artificial Sequence: Synthetic oligonucleotide
  misc_feature 1..20: note = Target: SCN10A; (+) strand; PAM type: YTN; PAM sequence: CTC
  source 1..20: mol_type = other DNA
ctggttcactttcctgtgct

SEQ ID NO: 65396 - DNA, 20 bp, synthetic construct
  misc_feature 1..20: note = Description of Artificial Sequence: Synthetic oligonucleotide
  misc_feature 1..20: note = Target: SCN10A; (+) strand; PAM type: YTN; PAM sequence: CTG
  source 1..20: mol_type = other DNA
gttcactttcctgtgcttgt

SEQ ID NO: 65397 - DNA, 20 bp, synthetic construct
  misc_feature 1..20: note = Description of Artificial Sequence: Synthetic oligonucleotide
  misc_feature 1..20: note = Target: SCN10A; (+) strand; PAM type: YTN; PAM sequence: TTC
  source 1..20: mol_type = other DNA
actttcctgtgcttgttcat

SEQ ID NO: 65398 - DNA, 20 bp, synthetic construct
  misc_feature 1..20: note = Description of Artificial Sequence: Synthetic oligonucleotide
  misc_feature 1..20: note = Target: SCN10A; (+) strand; PAM type: YTN; PAM sequence: CTT
  source 1..20: mol_type = other DNA
tcctgtgcttgttcatccca

SEQ ID NO: 65399 - DNA, 20 bp, synthetic construct
  misc_feature 1..20: note = Description of Artificial Sequence: Synthetic oligonucleotide
  misc_feature 1..20: note = Target: SCN10A; (+) strand; PAM type: YTN; PAM sequence: TTT
  source 1..20: mol_type = other DNA
cctgtgcttgttcatcccaa

SEQ ID NO: 65400 - DNA, 20 bp, synthetic construct
  misc_feature 1..20: note = Description of Artificial Sequence: Synthetic oligonucleotide
  misc_feature 1..20: note = Target: SCN10A; (+) strand; PAM type: YTN; PAM sequence: TTC
  source 1..20: mol_type = other DNA
ctgtgcttgttcatcccaaa

SEQ ID NO: 65401 - DNA, 20 bp, synthetic construct
  misc_feature 1..20: note = Description of Artificial Sequence: Synthetic oligonucleotide
  misc_feature 1..20: note = Target: SCN10A; (+) strand; PAM type: YTN; PAM sequence: CTG
  source 1..20: mol_type = other DNA
tgcttgttcatcccaaagcc

SEQ ID NO: 65402 - DNA, 20 bp, synthetic construct
  misc_feature 1..20: note = Description of Artificial Sequence: Synthetic oligonucleotide
  misc_feature 1..20: note = Target: SCN10A; (+) strand; PAM type: YTN; PAM sequence: CTT
  source 1..20: mol_type = other DNA
gttcatcccaaagccattcc

SEQ ID NO: 65403 - DNA, 20 bp, synthetic construct
  misc_feature 1..20: note = Description of Artificial Sequence: Synthetic oligonucleotide
  misc_feature 1..20: note = Target: SCN10A; (+) strand; PAM type: YTN; PAM sequence: TTG
  source 1..20: mol_type = other DNA
ttcatcccaaagccattccc

SEQ ID NO: 65404 - DNA, 20 bp, synthetic construct
  misc_feature 1..20: note = Description of Artificial Sequence: Synthetic oligonucleotide
  misc_feature 1..20: note = Target: SCN10A; (+) strand; PAM type: YTN; PAM sequence: TTC
  source 1..20: mol_type = other DNA
atcccaaagccattcccacc

SEQ ID NO: 65405 - DNA, 20 bp, synthetic construct
  misc_feature 1..20: note = Description of Artificial Sequence: Synthetic oligonucleotide
  misc_feature 1..20: note = Target: SCN10A; (+) strand; PAM type: YTN; PAM sequence: TTC
  source 1..20: mol_type = other DNA
ccaccagctcagcctgggtc

SEQ ID NO: 65406 - DNA, 20 bp, synthetic construct
  misc_feature 1..20: note = Description of Artificial Sequence: Synthetic oligonucleotide
  misc_feature 1..20: note = Target: SCN10A; (+) strand; PAM type: YTN; PAM sequence: CTC
  source 1..20: mol_type = other DNA
agcctgggtcctcccacact

SEQ ID NO: 65407 - DNA, 20 bp, synthetic construct
  misc_feature 1..20: note = Description of Artificial Sequence: Synthetic oligonucleotide
  misc_feature 1..20: note = Target: SCN10A; (+) strand; PAM type: YTN; PAM sequence: CTG
  source 1..20: mol_type = other DNA
ggtcctcccacacttgacct

SEQ ID NO: 65408 - DNA, 20 bp, synthetic construct
  misc_feature 1..20: note = Description of Artificial Sequence: Synthetic oligonucleotide
  misc_feature 1..20: note = Target: SCN10A; (+) strand; PAM type: YTN; PAM sequence: CTC
  source 1..20: mol_type = other DNA
ccacacttgacctcctgaac

SEQ ID NO: 65409 - DNA, 20 bp, synthetic construct
  misc_feature 1..20: note = Description of Artificial Sequence: Synthetic oligonucleotide
  misc_feature 1..20: note = Target: SCN10A; (+) strand; PAM type: YTN; PAM sequence: CTT
  source 1..20: mol_type = other DNA
gacctcctgaacccagtgtc

SEQ ID NO: 65410 - DNA, 20 bp, synthetic construct
  misc_feature 1..20: note = Description of Artificial Sequence: Synthetic oligonucleotide
  misc_feature 1..20: note = Target: SCN10A; (+) strand; PAM type: YTN; PAM sequence: TTG
  source 1..20: mol_type = other DNA
acctcctgaacccagtgtcc

SEQ ID NO: 65411 - DNA, 20 bp, synthetic construct
  misc_feature 1..20: note = Description of Artificial Sequence: Synthetic oligonucleotide
  misc_feature 1..20: note = Target: SCN10A; (+) strand; PAM type: YTN; PAM sequence: CTC
  source 1..20: mol_type = other DNA
ctgaacccagtgtccacatg

SEQ ID NO: 65412 - DNA, 20 bp, synthetic construct
  misc_feature 1..20: note = Description of Artificial Sequence: Synthetic oligonucleotide
  misc_feature 1..20: note = Target: SCN10A; (+) strand; PAM type: YTN; PAM sequence: CTG
  source 1..20: mol_type = other DNA
aacccagtgtccacatgtct

SEQ ID NO: 65413 - DNA, 20 bp, synthetic construct
  misc_feature 1..20: note = Description of Artificial Sequence: Synthetic oligonucleotide
  misc_feature 1..20: note = Target: SCN10A; (+) strand; PAM type: YTN; PAM sequence: CTC
  source 1..20: mol_type = other DNA
ctgcactgctgctctgctct

SEQ ID NO: 65414 - DNA, 20 bp, synthetic construct
  misc_feature 1..20: note = Description of Artificial Sequence: Synthetic oligonucleotide
  misc_feature 1..20: note = Target: SCN10A; (+) strand; PAM type: YTN; PAM sequence: CTG
  source 1..20: mol_type = other DNA
cactgctgctctgctctcag

SEQ ID NO: 65415 - DNA, 20 bp, synthetic construct
  misc_feature 1..20: note = Description of Artificial Sequence: Synthetic oligonucleotide
  misc_feature 1..20: note = Target: SCN10A; (+) strand; PAM type: YTN; PAM sequence: CTG
  source 1..20: mol_type = other DNA
ctgctctgctctcagctaac

SEQ ID NO: 65416 - DNA, 20 bp, synthetic construct
  misc_feature 1..20: note = Description of Artificial Sequence: Synthetic oligonucleotide
  misc_feature 1..20: note = Target: SCN10A; (+) strand; PAM type: YTN; PAM sequence: CTG
  source 1..20: mol_type = other DNA
ctctgctctcagctaactgg

SEQ ID NO: 65417 - DNA, 20 bp, synthetic construct
  misc_feature 1..20: note = Description of Artificial Sequence: Synthetic oligonucleotide
  misc_feature 1..20: note = Target: SCN10A; (+) strand; PAM type: YTN; PAM sequence: CTC
  source 1..20: mol_type = other DNA
tgctctcagctaactggctc

SEQ ID NO: 65418 - DNA, 20 bp, synthetic construct
  misc_feature 1..20: note = Description of Artificial Sequence: Synthetic oligonucleotide
  misc_feature 1..20: note = Target: SCN10A; (+) strand; PAM type: YTN; PAM sequence: CTG
  source 1..20: mol_type = other DNA
ctctcagctaactggctcaa

SEQ ID NO: 65419 - DNA, 20 bp, synthetic construct
  misc_feature 1..20: note = Description of Artificial Sequence: Synthetic oligonucleotide
  misc_feature 1..20: note = Target: SCN10A; (+) strand; PAM type: YTN; PAM sequence: CTC
  source 1..20: mol_type = other DNA
tcagctaactggctcaacac

SEQ ID NO: 65420 - DNA, 20 bp, synthetic construct
  misc_feature 1..20: note = Description of Artificial Sequence: Synthetic oligonucleotide
  misc_feature 1..20: note = Target: SCN10A; (+) strand; PAM type: YTN; PAM sequence: CTC
  source 1..20: mol_type = other DNA
agctaactggctcaacacac

SEQ ID NO: 65421 - DNA, 20 bp, synthetic construct
  misc_feature 1..20: note = Description of Artificial Sequence: Synthetic oligonucleotide
  misc_feature 1..20: note = Target: SCN10A; (+) strand; PAM type: YTN; PAM sequence: CTA
  source 1..20: mol_type = other DNA
actggctcaacacactaacc

SEQ ID NO: 65422 - DNA, 20 bp, synthetic construct
  misc_feature 1..20: note = Description of Artificial Sequence: Synthetic oligonucleotide
  misc_feature 1..20: note = Target: SCN10A; (+) strand; PAM type: YTN; PAM sequence: CTG
  source 1..20: mol_type = other DNA
gctcaacacactaaccaata

SEQ ID NO: 65423 - DNA, 20 bp, synthetic construct
  misc_feature 1..20: note = Description of Artificial Sequence: Synthetic oligonucleotide
  misc_feature 1..20: note = Target: SCN10A; (+) strand; PAM type: YTN; PAM sequence: CTC
  source 1..20: mol_type = other DNA
aacacactaaccaataaggg

SEQ ID NO: 65424 - DNA, 20 bp, synthetic construct
  misc_feature 1..20: note = Description of Artificial Sequence: Synthetic oligonucleotide
  misc_feature 1..20: note = Target: SCN10A; (+) strand; PAM type: YTN; PAM sequence: CTA
  source 1..20: mol_type = other DNA
accaataagggcatgcccca

SEQ ID NO: 65425 - DNA, 20 bp, synthetic construct
  misc_feature 1..20: note = Description of Artificial Sequence: Synthetic oligonucleotide
  misc_feature 1..20: note = Target: SCN10A; (+) strand; PAM type: YTN; PAM sequence: CTG
  source 1..20: mol_type = other DNA
caccctgccatcatccccac

SEQ ID NO: 65426 - DNA, 20 bp, synthetic construct
  misc_feature 1..20: note = Description of Artificial Sequence: Synthetic oligonucleotide
  misc_feature 1..20: note = Target: SCN10A; (+) strand; PAM type: YTN; PAM sequence: CTG
  source 1..20: mol_type = other DNA
ccatcatccccaccccgccc

SEQ ID NO: 65427 - DNA, 20 bp, synthetic construct
  misc_feature 1..20: note = Description of Artificial Sequence: Synthetic oligonucleotide
  misc_feature 1..20: note = Target: SCN10A; (+) strand; PAM type: YTN; PAM sequence: CTC
  source 1..20: mol_type = other DNA
acgatgttgcctatctggag

SEQ ID NO: 65428 - DNA, 20 bp, synthetic construct
  misc_feature 1..20: note = Description of Artificial Sequence: Synthetic oligonucleotide
  misc_feature 1..20: note = Target: SCN10A; (+) strand; PAM type: YTN; PAM sequence: TTG
  source 1..20: mol_type = other DNA
cctatctggagcatggcttc

SEQ ID NO: 65429 - DNA, 20 bp, synthetic construct
  misc_feature 1..20: note = Description of Artificial Sequence: Synthetic oligonucleotide
  misc_feature 1..20: note = Target: SCN10A; (+) strand; PAM type: YTN; PAM sequence: CTA
  source 1..20: mol_type = other DNA
tctggagcatggcttcgaag

SEQ ID NO: 65430 - DNA, 20 bp, synthetic construct
  misc_feature 1..20: note = Description of Artificial Sequence: Synthetic oligonucleotide
  misc_feature 1..20: note = Target: SCN10A; (+) strand; PAM type: YTN; PAM sequence: CTG
  source 1..20: mol_type = other DNA
gagcatggcttcgaaggtag

SEQ ID NO: 65431 - DNA, 20 bp, synthetic construct
  misc_feature 1..20: note = Description of Artificial Sequence: Synthetic oligonucleotide
  misc_feature 1..20: note = Target: SCN10A; (+) strand; PAM type: YTN; PAM sequence: CTT
  source 1..20: mol_type = other DNA
cgaaggtagggctcatgcca

SEQ ID NO: 65432 - DNA, 20 bp, synthetic construct
  misc_feature 1..20: note = Description of Artificial Sequence: Synthetic oligonucleotide
  misc_feature 1..20: note = Target: SCN10A; (+) strand; PAM type: YTN; PAM sequence: TTC
  source 1..20: mol_type = other DNA
gaaggtagggctcatgccat

SEQ ID NO: 65433 - DNA, 20 bp, synthetic construct
  misc_feature 1..20: note = Description of Artificial Sequence: Synthetic oligonucleotide
  misc_feature 1..20: note = Target: SCN10A; (+) strand; PAM type: YTN; PAM sequence: CTC
  source 1..20: mol_type = other DNA
atgccatggtgctccatggc

SEQ ID NO: 65434 - DNA, 20 bp, synthetic construct
  misc_feature 1..20: note = Description of Artificial Sequence: Synthetic oligonucleotide
  misc_feature 1..20: note = Target: SCN10A; (+) strand; PAM type: YTN; PAM sequence: CTC
  source 1..20: mol_type = other DNA
catggccatgaagatggtgt

SEQ ID NO: 65435 - DNA, 20 bp, synthetic construct
  misc_feature 1..20: note = Description of Artificial Sequence: Synthetic oligonucleotide
  misc_feature 1..20: note = Target: SCN10A; (+) strand; PAM type: YTN; PAM sequence: TTC
  source 1..20: mol_type = other DNA
accacgatgcacaaggtgat

SEQ ID NO: 65436 - DNA, 20 bp, synthetic construct
  misc_feature 1..20: note = Description of Artificial Sequence: Synthetic oligonucleotide
  misc_feature 1..20: note = Target: SCN10A; (+) strand; PAM type: YTN; PAM sequence: CTC
  source 1..20: mol_type = other DNA
tgcaaagggatccgtcacaa

SEQ ID NO: 65437 - DNA, 20 bp, synthetic construct
  misc_feature 1..20: note = Description of Artificial Sequence: Synthetic oligonucleotide
  misc_feature 1..20: note = Target: SCN10A; (+) strand; PAM type: YTN; PAM sequence: CTG
  source 1..20: mol_type = other DNA
caaagggatccgtcacaagc

SEQ ID NO: 65438 - DNA, 20 bp, synthetic construct
  misc_feature 1..20: note = Description of Artificial Sequence: Synthetic oligonucleotide
  misc_feature 1..20: note = Target: SCN10A; (+) strand; PAM type: YTN; PAM sequence: TTG
  source 1..20: mol_type = other DNA
tcttgagcttcacccacatg

SEQ ID NO: 65439 - DNA, 20 bp, synthetic construct
  misc_feature 1..20: note = Description of Artificial Sequence: Synthetic oligonucleotide
  misc_feature 1..20: note = Target: SCN10A; (+) strand; PAM type: YTN; PAM sequence: CTT
  source 1..20: mol_type = other DNA
gagcttcacccacatggggc

SEQ ID NO: 65440 - DNA, 20 bp, synthetic construct
  misc_feature 1..20: note = Description of Artificial Sequence: Synthetic oligonucleotide
  misc_feature 1..20: note = Target: SCN10A; (+) strand; PAM type: YTN; PAM sequence: TTG
  source 1..20: mol_type = other DNA
agcttcacccacatggggca

SEQ ID NO: 65441 - DNA, 20 bp, synthetic construct
  misc_feature 1..20: note = Description of Artificial Sequence: Synthetic oligonucleotide
  misc_feature 1..20: note = Target: SCN10A; (+) strand; PAM type: YTN; PAM sequence: CTT
  source 1..20: mol_type = other DNA
cacccacatggggcagcaat

SEQ ID NO: 65442 - DNA, 20 bp, synthetic construct
  misc_feature 1..20: note = Description of Artificial Sequence: Synthetic oligonucleotide
  misc_feature 1..20: note = Target: SCN10A; (+) strand; PAM type: YTN; PAM sequence: TTC
  source 1..20: mol_type = other DNA
acccacatggggcagcaatc

SEQ ID NO: 65443 - DNA, 20 bp, synthetic construct
  misc_feature 1..20: note = Description of Artificial Sequence: Synthetic oligonucleotide
  misc_feature 1..20: note = Target: SCN10A; (+) strand; PAM type: YTN; PAM sequence: CTT
  source 1..20: mol_type = other DNA
ctgagacaagctggtcaagc

SEQ ID NO: 65444 - DNA, 20 bp, synthetic construct
  misc_feature 1..20: note = Description of Artificial Sequence: Synthetic oligonucleotide
  misc_feature 1..20: note = Target: SCN10A; (+) strand; PAM type: YTN; PAM sequence: TTC
  source 1..20: mol_type = other DNA
tgagacaagctggtcaagca

SEQ ID NO: 65445 - DNA, 20 bp, synthetic construct
  misc_feature 1..20: note = Description of Artificial Sequence: Synthetic oligonucleotide
  misc_feature 1..20: note = Target: SCN10A; (+) strand; PAM type: YTN; PAM sequence: CTG
  source 1..20: mol_type = other DNA
agacaagctggtcaagcagg

SEQ ID NO: 65446 - DNA, 20 bp, synthetic construct
  misc_feature 1..20: note = Description of Artificial Sequence: Synthetic oligonucleotide
  misc_feature 1..20: note = Target: SCN10A; (+) strand; PAM type: YTN; PAM sequence: CTG
  source 1..20: mol_type = other DNA
gtcaagcagggtgggcactt

SEQ ID NO: 65447 - DNA, 20 bp, synthetic construct
  misc_feature 1..20: note = Description of Artificial Sequence: Synthetic oligonucleotide
  misc_feature 1..20: note = Target: SCN10A; (+) strand; PAM type: YTN; PAM sequence: CTT
  source 1..20: mol_type = other DNA
ctgttcagactcctcgagtt

SEQ ID NO: 65448 - DNA, 20 bp, synthetic construct
  misc_feature 1..20: note = Description of Artificial Sequence: Synthetic oligonucleotide
  misc_feature 1..20: note = Target: SCN10A; (+) strand; PAM type: YTN; PAM sequence: TTC
  source 1..20: mol_type = other DNA
tgttcagactcctcgagttc

SEQ ID NO: 65449 - DNA, 20 bp, synthetic construct
  misc_feature 1..20: note = Description of Artificial Sequence: Synthetic oligonucleotide
  misc_feature 1..20: note = Target: SCN10A; (+) strand; PAM type: YTN; PAM sequence: CTG
  source 1..20: mol_type = other DNA
ttcagactcctcgagttctg

SEQ ID NO: 65450 - DNA, 20 bp, synthetic construct
  misc_feature 1..20: note = Description of Artificial Sequence: Synthetic oligonucleotide
  misc_feature 1..20: note = Target: SCN10A; (+) strand; PAM type: YTN; PAM sequence: TTC
  source 1..20: mol_type = other DNA
agactcctcgagttctgcat

SEQ ID NO: 65451 - DNA, 20 bp, synthetic construct
  misc_feature 1..20: note = Description of Artificial Sequence: Synthetic oligonucleotide
  misc_feature 1..20: note = Target: SCN10A; (+) strand; PAM type: YTN; PAM sequence: CTC
  source 1..20: mol_type = other DNA
ctcgagttctgcattatagt

SEQ ID NO: 65452 - DNA, 20 bp, synthetic construct
  misc_feature 1..20: note = Description of Artificial Sequence: Synthetic oligonucleotide
  misc_feature 1..20: note = Target: SCN10A; (+) strand; PAM type: YTN; PAM sequence: CTC
  source 1..20: mol_type = other DNA
gagttctgcattatagtgtg

SEQ ID NO: 65453 - DNA, 20 bp, synthetic construct
  misc_feature 1..20: note = Description of Artificial Sequence: Synthetic oligonucleotide
  misc_feature 1..20: note = Target: SCN10A; (+) strand; PAM type: YTN; PAM sequence: TTC
  source 1..20: mol_type = other DNA
tgcattatagtgtggtcaat

SEQ ID NO: 65454 - DNA, 20 bp, synthetic construct
  misc_feature 1..20: note = Description of Artificial Sequence: Synthetic oligonucleotide
  misc_feature 1..20: note = Target: SCN10A; (+) strand; PAM type: YTN; PAM sequence: CTG
  source 1..20: mol_type = other DNA
cattatagtgtggtcaatga

SEQ ID NO: 65455 - DNA, 20 bp, synthetic construct
  misc_feature 1..20: note = Description of Artificial Sequence: Synthetic oligonucleotide
  misc_feature 1..20: note = Target: SCN10A; (+) strand; PAM type: YTN; PAM sequence: TTA
  source 1..20: mol_type = other DNA
tagtgtggtcaatgacagct

SEQ ID NO: 65456 - DNA, 20 bp, synthetic construct
  misc_feature 1..20: note = Description of Artificial Sequence: Synthetic oligonucleotide
  misc_feature 1..20: note = Target: SCN10A; (+) strand; PAM type: YTN; PAM sequence: CTG
  source 1..20: mol_type = other DNA
tcagccatgtgtcaccttgg

SEQ ID NO: 65457 - DNA, 20 bp, synthetic construct
  misc_feature 1..20: note = Description of Artificial Sequence: Synthetic oligonucleotide
  misc_feature 1..20: note = Target: SCN10A; (+) strand; PAM type: YTN; PAM sequence: CTT
  source 1..20: mol_type = other DNA
ggaccccaattctgcggtca

SEQ ID NO: 65458 - DNA, 20 bp, synthetic construct
  misc_feature 1..20: note = Description of Artificial Sequence: Synthetic oligonucleotide
  misc_feature 1..20: note = Target: SCN10A; (+) strand; PAM type: YTN; PAM sequence: TTG
  source 1..20: mol_type = other DNA
gaccccaattctgcggtcat

SEQ ID NO: 65459 - DNA, 20 bp, synthetic construct
  misc_feature 1..20: note = Description of Artificial Sequence: Synthetic oligonucleotide
  misc_feature 1..20: note = Target: SCN10A; (+) strand; PAM type: YTN; PAM sequence: TTC
  source 1..20: mol_type = other DNA
tgcggtcatcctctagacct

SEQ ID NO: 65460 - DNA, 20 bp, synthetic construct
  misc_feature 1..20: note = Description of Artificial Sequence: Synthetic oligonucleotide
  misc_feature 1..20: note = Target: SCN10A; (+) strand; PAM type: YTN; PAM sequence: CTG
  source 1..20: mol_type = other DNA
cggtcatcctctagaccttg

SEQ ID NO: 65461 - DNA, 20 bp, synthetic construct
  misc_feature 1..20: note = Description of Artificial Sequence: Synthetic oligonucleotide
  misc_feature 1..20: note = Target: SCN10A; (+) strand; PAM type: YTN; PAM sequence: CTC
  source 1..20: mol_type = other DNA
tagaccttgttgttaataat

SEQ ID NO: 65462 - DNA, 20 bp, synthetic construct
  misc_feature 1..20: note = Description of Artificial Sequence: Synthetic oligonucleotide
  misc_feature 1..20: note = Target: SCN10A; (+) strand; PAM type: YTN; PAM sequence: CTA
  source 1..20: mol_type = other DNA
gaccttgttgttaataataa

SEQ ID NO: 65463 - DNA, 20 bp, synthetic construct
  misc_feature 1..20: note = Description of Artificial Sequence: Synthetic oligonucleotide
  misc_feature 1..20: note = Target: SCN10A; (+) strand; PAM type: YTN; PAM sequence: CTT
  source 1..20: mol_type = other DNA
gttgttaataataagtacca

SEQ ID NO: 65464 - DNA, 20 bp, synthetic construct
  misc_feature 1..20: note = Description of Artificial Sequence: Synthetic oligonucleotide
  misc_feature 1..20: note = Target: SCN10A; (+) strand; PAM type: YTN; PAM sequence: TTG
  source 1..20: mol_type = other DNA
ttgttaataataagtaccac

SEQ ID NO: 65465 - DNA, 20 bp, synthetic construct
  misc_feature 1..20: note = Description of Artificial Sequence: Synthetic oligonucleotide
  misc_feature 1..20: note = Target: SCN10A; (+) strand; PAM type: YTN; PAM sequence: TTG
  source 1..20: mol_type = other DNA
ttaataataagtaccacctc

SEQ ID NO: 65466 - DNA, 20 bp, synthetic construct
  misc_feature 1..20: note = Description of Artificial Sequence: Synthetic oligonucleotide
  misc_feature 1..20: note = Target: SCN10A; (+) strand; PAM type: YTN; PAM sequence: TTA
  source 1..20: mol_type = other DNA
ataataagtaccacctccaa

SEQ ID NO: 65467 - DNA, 20 bp, synthetic construct
  misc_feature 1..20: note = Description of Artificial Sequence: Synthetic oligonucleotide
  misc_feature 1..20: note = Target: SCN10A; (+) strand; PAM type: YTN; PAM sequence: CTC
  source 1..20: mol_type = other DNA
caacattttgacttcagccc

SEQ ID NO: 65468 - DNA, 20 bp, synthetic construct
  misc_feature 1..20: note = Description of Artificial Sequence: Synthetic oligonucleotide
  misc_feature 1..20: note = Target: SCN10A; (+) strand; PAM type: YTN; PAM sequence: TTT
  source 1..20: mol_type = other DNA
tgacttcagccctctctctg

SEQ ID NO: 65469 - DNA, 20 bp, synthetic construct
  misc_feature 1..20: note = Description of Artificial Sequence: Synthetic oligonucleotide
  misc_feature 1..20: note = Target: SCN10A; (+) strand; PAM type: YTN; PAM sequence: TTT
  source 1..20: mol_type = other DNA
gacttcagccctctctctgt

SEQ ID NO: 65470 - DNA, 20 bp, synthetic construct
  misc_feature 1..20: note = Description of Artificial Sequence: Synthetic oligonucleotide
  misc_feature 1..20: note = Target: SCN10A; (+) strand; PAM type: YTN; PAM sequence: TTG
  source 1..20: mol_type = other DNA
acttcagccctctctctgtc

SEQ ID NO: 65471 - DNA, 20 bp, synthetic construct
  misc_feature 1..20: note = Description of Artificial Sequence: Synthetic oligonucleotide
  misc_feature 1..20: note = Target: SCN10A; (+) strand; PAM type: YTN; PAM sequence: CTT
  source 1..20: mol_type = other DNA
cagccctctctctgtctctg

SEQ ID NO: 65472 - DNA, 20 bp, synthetic construct
  misc_feature 1..20: note = Description of Artificial Sequence: Synthetic oligonucleotide
  misc_feature 1..20: note = Target: SCN10A; (+) strand; PAM type: YTN; PAM sequence: TTC
  source 1..20: mol_type = other DNA
agccctctctctgtctctgg

SEQ ID NO: 65473 - DNA, 20 bp, synthetic construct
  misc_feature 1..20: note = Description of Artificial Sequence: Synthetic oligonucleotide
  misc_feature 1..20: note = Target: SCN10A; (+) strand; PAM type: YTN; PAM sequence: CTC
  source 1..20: mol_type = other DNA
tctctgtctctggtattcat

SEQ ID NO: 65474 - DNA, 20 bp, synthetic construct
  misc_feature 1..20: note = Description of Artificial Sequence: Synthetic oligonucleotide
  misc_feature 1..20: note = Target: SCN10A; (+) strand; PAM type: YTN; PAM sequence: CTC
  source 1..20: mol_type = other DNA
tctgtctctggtattcattt

SEQ ID NO: 65475 - DNA, 20 bp, synthetic construct
  misc_feature 1..20: note = Description of Artificial Sequence: Synthetic oligonucleotide
  misc_feature 1..20: note = Target: SCN10A; (+) strand; PAM type: YTN; PAM sequence: CTC
  source 1..20: mol_type = other DNA
tgtctctggtattcatttcc

SEQ ID NO: 65476 - DNA, 20 bp, synthetic construct
  misc_feature 1..20: note = Description of Artificial Sequence: Synthetic oligonucleotide
  misc_feature 1..20: note = Target: SCN10A; (+) strand; PAM type: YTN; PAM sequence: CTG
  source 1..20: mol_type = other DNA
tctctggtattcatttccta

SEQ ID NO: 65477 - DNA, 20 bp, synthetic construct
  misc_feature 1..20: note = Description of Artificial Sequence: Synthetic oligonucleotide
  misc_feature 1..20: note = Target: SCN10A; (+) strand; PAM type: YTN; PAM sequence: CTC
  source 1..20: mol_type = other DNA
tggtattcatttcctatatt

SEQ ID NO: 65478 - DNA, 20 bp, synthetic construct
  misc_feature 1..20: note = Description of Artificial Sequence: Synthetic oligonucleotide
  misc_feature 1..20: note = Target: SCN10A; (+) strand; PAM type: YTN; PAM sequence: CTG
  source 1..20: mol_type = other DNA
gtattcatttcctatatttt

SEQ ID NO: 65479 - DNA, 20 bp, synthetic construct
  misc_feature 1..20: note = Description of Artificial Sequence: Synthetic oligonucleotide
  misc_feature 1..20: note = Target: SCN10A; (+) strand; PAM type: YTN; PAM sequence: TTC
  source 1..20: mol_type = other DNA
atttcctatattttgaactc

SEQ ID NO: 65480 - DNA, 20 bp, synthetic construct
  misc_feature 1..20: note = Description of Artificial Sequence: Synthetic oligonucleotide
  misc_feature 1..20: note = Target: SCN10A; (+) strand; PAM type: YTN; PAM sequence: TTT
  source 1..20: mol_type = other DNA
cctatattttgaactccttt

SEQ ID NO: 65481 - DNA, 20 bp, synthetic construct
  misc_feature 1..20: note = Description of Artificial Sequence: Synthetic oligonucleotide
  misc_feature 1..20: note = Target: SCN10A; (+) strand; PAM type: YTN; PAM sequence: TTC
  source 1..20: mol_type = other DNA
ctatattttgaactccttta

SEQ ID NO: 65482 - DNA, 20 bp, synthetic construct
  misc_feature 1..20: note = Description of Artificial Sequence: Synthetic oligonucleotide
  misc_feature 1..20: note = Target: SCN10A; (+) strand; PAM type: YTN; PAM sequence: CTA
  source 1..20: mol_type = other DNA
tattttgaactcctttagtc

SEQ ID NO: 65483 - DNA, 20 bp, synthetic construct
  misc_feature 1..20: note = Description of Artificial Sequence: Synthetic oligonucleotide
  misc_feature 1..20: note = Target: SCN10A; (+) strand; PAM type: YTN; PAM sequence: TTT
  source 1..20: mol_type = other DNA
tgaactcctttagtcctgca

SEQ ID NO: 65484 - DNA, 20 bp, synthetic construct
  misc_feature 1..20: note = Description of Artificial Sequence: Synthetic oligonucleotide
  misc_feature 1..20: note = Target: SCN10A; (+) strand; PAM type: YTN; PAM sequence: TTT
  source 1..20: mol_type = other DNA
gaactcctttagtcctgcaa

SEQ ID NO: 65485 - DNA, 20 bp, synthetic construct
  misc_feature 1..20: note = Description of Artificial Sequence: Synthetic oligonucleotide
  misc_feature 1..20: note = Target: SCN10A; (+) strand; PAM type: YTN; PAM sequence: TTG
  source 1..20: mol_type = other DNA
aactcctttagtcctgcaac

SEQ ID NO: 65486 - DNA, 20 bp, synthetic construct
  misc_feature 1..20: note = Description of Artificial Sequence: Synthetic oligonucleotide
  misc_feature 1..20: note = Target: SCN10A; (+) strand; PAM type: YTN; PAM sequence: CTC
  source 1..20: mol_type = other DNA
ctttagtcctgcaactccaa

SEQ ID NO: 65487 - DNA, 20 bp, synthetic construct
  misc_feature 1..20: note = Description of Artificial Sequence: Synthetic oligonucleotide
  misc_feature 1..20: note = Target: SCN10A; (+) strand; PAM type: YTN; PAM sequence: CTT
  source 1..20: mol_type = other DNA
tagtcctgcaactccaatta

SEQ ID NO: 65488 - DNA, 20 bp, synthetic construct
  misc_feature 1..20: note = Description of Artificial Sequence: Synthetic oligonucleotide
  misc_feature 1..20: note = Target: SCN10A; (+) strand; PAM type: YTN; PAM sequence: TTT
  source 1..20: mol_type = other DNA
agtcctgcaactccaattaa

SEQ ID NO: 65489 - DNA, 20 bp, synthetic construct
  misc_feature 1..20: note = Description of Artificial Sequence: Synthetic oligonucleotide
  misc_feature 1..20: note = Target: SCN10A; (+) strand; PAM type: YTN; PAM sequence: TTA
  source 1..20: mol_type = other DNA
gtcctgcaactccaattaat

SEQ ID NO: 65490 - DNA, 20 bp, synthetic construct
  misc_feature 1..20: note = Description of Artificial Sequence: Synthetic oligonucleotide
  misc_feature 1..20: note = Target: SCN10A; (+) strand; PAM type: YTN; PAM sequence: CTG
  source 1..20: mol_type = other DNA
caactccaattaatatctgc

SEQ ID NO: 65491 - DNA, 20 bp, synthetic construct
  misc_feature 1..20: note = Description of Artificial Sequence: Synthetic oligonucleotide
  misc_feature 1..20: note = Target: SCN10A; (+) strand; PAM type: YTN; PAM sequence: CTC
  source 1..20: mol_type = other DNA
caattaatatctgccccatc

SEQ ID NO: 65492 - DNA, 20 bp, synthetic construct
  misc_feature 1..20: note = Description of Artificial Sequence: Synthetic oligonucleotide
  misc_feature 1..20: note = Target: SCN10A; (+) strand; PAM type: YTN; PAM sequence: TTA
  source 1..20: mol_type = other DNA
atatctgccccatccagtcc

SEQ ID NO: 65493 - DNA, 20 bp, synthetic construct
  misc_feature 1..20: note = Description of Artificial Sequence: Synthetic oligonucleotide
  misc_feature 1..20: note = Target: SCN10A; (+) strand; PAM type: YTN; PAM sequence: CTG
  source 1..20: mol_type = other DNA
ccccatccagtcctttaaac

SEQ ID NO: 65494 - DNA, 20 bp, synthetic construct
  misc_feature 1..20: note = Description of Artificial Sequence: Synthetic oligonucleotide
  misc_feature 1..20: note = Target: SCN10A; (+) strand; PAM type: YTN; PAM sequence: CTT
  source 1..20: mol_type = other DNA
taaactgctgacattacata

SEQ ID NO: 65495 - DNA, 20 bp, synthetic construct
  misc_feature 1..20: note = Description of Artificial Sequence: Synthetic oligonucleotide
  misc_feature 1..20: note = Target: SCN10A; (+) strand; PAM type: YTN; PAM sequence: TTT
  source 1..20: mol_type = other DNA
aaactgctgacattacatat

SEQ ID NO: 65496 - DNA, 20 bp, synthetic construct
  misc_feature 1..20: note = Description of Artificial Sequence: Synthetic oligonucleotide
  misc_feature 1..20: note = Target: SCN10A; (+) strand; PAM type: YTN; PAM sequence: TTA
  source 1..20: mol_type = other DNA
aactgctgacattacatatt

SEQ ID NO: 65497 - DNA, 20 bp, synthetic construct
  misc_feature 1..20: note = Description of Artificial Sequence: Synthetic oligonucleotide
  misc_feature 1..20: note = Target: SCN10A; (+) strand; PAM type: YTN; PAM sequence: CTG
  source 1..20: mol_type = other DNA
ctgacattacatatttttac

SEQ ID NO: 65498 - DNA, 20 bp, synthetic construct
  misc_feature 1..20: note = Description of Artificial Sequence: Synthetic oligonucleotide
  misc_feature 1..20: note = Target: SCN10A; (+) strand; PAM type: YTN; PAM sequence: CTG
  source 1..20: mol_type = other DNA
acattacatatttttactgc

SEQ ID NO: 65499 - DNA, 20 bp, synthetic construct
  misc_feature 1..20: note = Description of Artificial Sequence: Synthetic oligonucleotide
  misc_feature 1..20: note = Target: SCN10A; (+) strand; PAM type: YTN; PAM sequence: TTA
  source 1..20: mol_type = other DNA
catatttttactgcccatca

SEQ ID NO: 65500 - DNA, 20 bp, synthetic construct
  misc_feature 1..20: note = Description of Artificial Sequence: Synthetic oligonucleotide
  misc_feature 1..20: note = Target: SCN10A; (+) strand; PAM type: YTN; PAM sequence: TTT
  source 1..20: mol_type = other DNA
ttactgcccatcacctatat

SEQ ID NO: 65501 - DNA, 20 bp, synthetic construct
  misc_feature 1..20: note = Description of Artificial Sequence: Synthetic oligonucleotide
  misc_feature 1..20: note = Target: SCN10A; (+) strand; PAM type: YTN; PAM sequence: TTT
  source 1..20: mol_type = other DNA
tactgcccatcacctatatc

SEQ ID NO: 65502 - DNA, 20 bp, synthetic construct
  misc_feature 1..20: note = Description of Artificial Sequence: Synthetic oligonucleotide
  misc_feature 1..20: note = Target: SCN10A; (+) strand; PAM type: YTN; PAM sequence: TTT
  source 1..20: mol_type = other DNA
actgcccatcacctatatca

SEQ ID NO: 65503 - DNA, 20 bp, synthetic construct
  misc_feature 1..20: note = Description of Artificial Sequence: Synthetic oligonucleotide
  misc_feature 1..20: note = Target: SCN10A; (+) strand; PAM type: YTN; PAM sequence: TTA
  source 1..20: mol_type = other DNA
ctgcccatcacctatatcat

SEQ ID NO: 65504 - DNA, 20 bp, synthetic construct
  misc_feature 1..20: note = Description of Artificial Sequence: Synthetic oligonucleotide
  misc_feature 1..20: note = Target: SCN10A; (+) strand; PAM type: YTN; PAM sequence: CTG
  source 1..20: mol_type = other DNA
cccatcacctatatcatgtc

SEQ ID NO: 65505 - DNA, 20 bp, synthetic construct
  misc_feature 1..20: note = Description of Artificial Sequence: Synthetic oligonucleotide
  misc_feature 1..20: note = Target: SCN10A; (+) strand; PAM type: YTN; PAM sequence: CTA
  source 1..20: mol_type = other DNA
tatcatgtccttacttctca

SEQ ID NO: 65506 - DNA, 20 bp, synthetic construct
  misc_feature 1..20: note = Description of Artificial Sequence: Synthetic oligonucleotide
  misc_feature 1..20: note = Target: SCN10A; (+) strand; PAM type: YTN; PAM sequence: CTT
  source 1..20: mol_type = other DNA
acttctcaatttgcccagct

SEQ ID NO: 65507 - DNA, 20 bp, synthetic construct
  misc_feature 1..20: note = Description of Artificial Sequence: Synthetic oligonucleotide
  misc_feature 1..20: note = Target: SCN10A; (+) strand; PAM type: YTN; PAM sequence: TTA
  source 1..20: mol_type = other DNA
cttctcaatttgcccagctt

SEQ ID NO: 65508 - DNA, 20 bp, synthetic construct
  misc_feature 1..20: note = Description of Artificial Sequence: Synthetic oligonucleotide
  misc_feature 1..20: note = Target: SCN10A; (+) strand; PAM type: YTN; PAM sequence: CTT
  source 1..20: mol_type = other DNA
ctcaatttgcccagcttaga

SEQ ID NO: 65509 - DNA, 20 bp, synthetic construct
  misc_feature 1..20: note = Description of Artificial Sequence: Synthetic oligonucleotide
  misc_feature 1..20: note = Target: SCN10A; (+) strand; PAM type: YTN; PAM sequence: TTC
  source 1..20: mol_type = other DNA
tcaatttgcccagcttagat

SEQ ID NO: 65510 - DNA, 20 bp, synthetic construct
  misc_feature 1..20: note = Description of Artificial Sequence: Synthetic oligonucleotide
  misc_feature 1..20: note = Target: SCN10A; (+) strand; PAM type: YTN; PAM sequence: CTC
  source 1..20: mol_type = other DNA
aatttgcccagcttagattt

SEQ ID NO: 65511 - DNA, 20 bp, synthetic construct
  misc_feature 1..20: note = Description of Artificial Sequence: Synthetic oligonucleotide
  misc_feature 1..20: note = Target: SCN10A; (+) strand; PAM type: YTN; PAM sequence: TTT
  source 1..20: mol_type = other DNA
gcccagcttagatttcacat

SEQ ID NO: 65512 - DNA, 20 bp, synthetic construct
  misc_feature 1..20: note = Description of Artificial Sequence: Synthetic oligonucleotide
  misc_feature 1..20: note = Target: SCN10A; (+) strand; PAM type: YTN; PAM sequence: TTG
  source 1..20: mol_type = other DNA
cccagcttagatttcacatc

SEQ ID NO: 65513 - DNA, 20 bp, synthetic construct
  misc_feature 1..20: note = Description of Artificial Sequence: Synthetic oligonucleotide
  misc_feature 1..20: note = Target: SCN10A; (+) strand; PAM type: YTN; PAM sequence: CTT
  source 1..20: mol_type = other DNA
agatttcacatccatctctc

SEQ ID NO: 65514 - DNA, 20 bp, synthetic construct
  misc_feature 1..20: note = Description of Artificial Sequence: Synthetic oligonucleotide
  misc_feature 1..20: note = Target: SCN10A; (+) strand; PAM type: YTN; PAM sequence: TTA
  source 1..20: mol_type = other DNA
gatttcacatccatctctct

SEQ ID NO: 65515 - DNA, 20 bp, synthetic construct
  misc_feature 1..20: note = Description of Artificial Sequence: Synthetic oligonucleotide
  misc_feature 1..20: note = Target: SCN10A; (+) strand; PAM type: YTN; PAM sequence: TTT
  source 1..20: mol_type = other DNA
cacatccatctctctaacta

SEQ ID NO: 65516 - DNA, 20 bp, synthetic construct
  misc_feature 1..20: note = Description of Artificial Sequence: Synthetic oligonucleotide
  misc_feature 1..20: note = Target: SCN10A; (+) strand; PAM type: YTN; PAM sequence: TTC
  source 1..20: mol_type = other DNA
acatccatctctctaactac

SEQ ID NO: 65517 - DNA, 20 bp, synthetic construct
  misc_feature 1..20: note = Description of Artificial Sequence: Synthetic oligonucleotide
  misc_feature 1..20: note = Target: SCN10A; (+) strand; PAM type: YTN; PAM sequence: CTC
  source 1..20: mol_type = other DNA
tctaactactcccttgtagg

SEQ ID NO: 65518 - DNA, 20 bp, synthetic construct
  misc_feature 1..20: note = Description of Artificial Sequence: Synthetic oligonucleotide
  misc_feature 1..20: note = Target: SCN10A; (+) strand; PAM type: YTN; PAM sequence: CTC
  source 1..20: mol_type = other DNA
taactactcccttgtaggca

SEQ ID NO: 65519 - DNA, 20 bp, synthetic construct
  misc_feature 1..20: note = Description of Artificial Sequence: Synthetic oligonucleotide
  misc_feature 1..20: note = Target: SCN10A; (+) strand; PAM type: YTN; PAM sequence: CTA
  source 1..20: mol_type = other DNA
actactcccttgtaggcacc

SEQ ID NO: 65520 - DNA, 20 bp, synthetic construct
  misc_feature 1..20: note = Description of Artificial Sequence: Synthetic oligonucleotide
  misc_feature 1..20: note = Target: SCN10A; (+) strand; PAM type: YTN; PAM sequence: CTA
  source 1..20: mol_type = other DNA
ctcccttgtaggcaccctca

SEQ ID NO: 65521 - DNA, 20 bp, synthetic construct
  misc_feature 1..20: note = Description of Artificial Sequence: Synthetic oligonucleotide
  misc_feature 1..20: note = Target: SCN10A; (+) strand; PAM type: YTN; PAM sequence: CTC
  source 1..20: mol_type = other DNA
ccttgtaggcaccctcaatt

SEQ ID NO: 65522 - DNA, 20 bp, synthetic construct
  misc_feature 1..20: note = Description of Artificial Sequence: Synthetic oligonucleotide
  misc_feature 1..20: note = Target: SCN10A; (+) strand; PAM type: YTN; PAM sequence: CTT
  source 1..20: mol_type = other DNA
gtaggcaccctcaattcctt

SEQ ID NO: 65523 - DNA, 20 bp, synthetic construct
  misc_feature 1..20: note = Description of Artificial Sequence: Synthetic oligonucleotide
  misc_feature 1..20: note = Target: SCN10A; (+) strand; PAM type: YTN; PAM sequence: TTG
  source 1..20: mol_type = other DNA
taggcaccctcaattccttt

SEQ ID NO: 65524 - DNA, 20 bp, synthetic construct
  misc_feature 1..20: note = Description of Artificial Sequence: Synthetic oligonucleotide
  misc_feature 1..20: note = Target: SCN10A; (+) strand; PAM type: YTN; PAM sequence: CTC
  source 1..20: mol_type = other DNA
aattcctttgcccctctcct

SEQ ID NO: 65525 - DNA, 20 bp, synthetic construct
  misc_feature 1..20: note = Description of Artificial Sequence: Synthetic oligonucleotide
  misc_feature 1..20: note = Target: SCN10A; (+) strand; PAM type: YTN; PAM sequence: TTC
  source 1..20: mol_type = other DNA
ctttgcccctctcctccttc

SEQ ID NO: 65526 - DNA, 20 bp, synthetic construct
  misc_feature 1..20: note = Description of Artificial Sequence: Synthetic oligonucleotide
  misc_feature 1..20: note = Target: SCN10A; (+) strand; PAM type: YTN; PAM sequence: CTT
  source 1..20: mol_type = other DNA
tgcccctctcctccttcatt

SEQ ID NO: 65527 - DNA, 20 bp, synthetic construct
  misc_feature 1..20: note = Description of Artificial Sequence: Synthetic oligonucleotide
  misc_feature 1..20: note = Target: SCN10A; (+) strand; PAM type: YTN; PAM sequence: TTT
  source 1..20: mol_type = other DNA
gcccctctcctccttcattg

SEQ ID NO: 65528 - DNA, 20 bp, synthetic construct
  misc_feature 1..20: note = Description of Artificial Sequence: Synthetic oligonucleotide
  misc_feature 1..20: note = Target: SCN10A; (+) strand; PAM type: YTN; PAM sequence: TTG
  source 1..20: mol_type = other DNA
cccctctcctccttcattgt

SEQ ID NO: 65529 - DNA, 20 bp, synthetic construct
  misc_feature 1..20: note = Description of Artificial Sequence: Synthetic oligonucleotide
  misc_feature 1..20: note = Target: SCN10A; (+) strand; PAM type: YTN; PAM sequence: CTC
  source 1..20: mol_type = other DNA
tcctccttcattgtacttgc

SEQ ID NO: 65530 - DNA, 20 bp, synthetic construct
  misc_feature 1..20: note = Description of Artificial Sequence: Synthetic oligonucleotide
  misc_feature 1..20: note = Target: SCN10A; (+) strand; PAM type: YTN; PAM sequence: CTC
  source 1..20: mol_type = other DNA
ctccttcattgtacttgcct

SEQ ID NO: 65531 - DNA, 20 bp, synthetic construct
  misc_feature 1..20: note = Description of Artificial Sequence: Synthetic oligonucleotide
  misc_feature 1..20: note = Target: SCN10A; (+) strand; PAM type: YTN; PAM sequence: CTC
  source 1..20: mol_type = other DNA
cttcattgtacttgcctggc

SEQ ID NO: 65532 - DNA, 20 bp, synthetic construct
  misc_feature 1..20: note = Description of Artificial Sequence: Synthetic oligonucleotide
  misc_feature 1..20: note = Target: SCN10A; (+) strand; PAM type: YTN; PAM sequence: CTT
  source 1..20: mol_type = other DNA
cattgtacttgcctggcaaa

SEQ ID NO: 65533 - DNA, 20 bp, synthetic construct
  misc_feature 1..20: note = Description of Artificial Sequence: Synthetic oligonucleotide
  misc_feature 1..20: note = Target: SCN10A; (+) strand; PAM type: YTN; PAM sequence: TTC
  source 1..20: mol_type = other DNA
attgtacttgcctggcaaaa

SEQ ID NO: 65534 - DNA, 20 bp, synthetic construct
  misc_feature 1..20: note = Description of Artificial Sequence: Synthetic oligonucleotide
  misc_feature 1..20: note = Target: SCN10A; (+) strand; PAM type: YTN; PAM sequence: TTG
  source 1..20: mol_type = other DNA
tacttgcctggcaaaacctg

SEQ ID NO: 65535 - DNA, 20 bp, synthetic construct
  misc_feature 1..20: note = Description of Artificial Sequence: Synthetic oligonucleotide
  misc_feature 1..20: note = Target: SCN10A; (+) strand; PAM type: YTN; PAM sequence: CTT
  source 1..20: mol_type = other DNA
gcctggcaaaacctgaactg

SEQ ID NO: 65536 - DNA, 20 bp, synthetic construct
  misc_feature 1..20: note = Description of Artificial Sequence: Synthetic oligonucleotide
  misc_feature 1..20: note = Target: SCN10A; (+) strand; PAM type: YTN; PAM sequence: TTG
  source 1..20: mol_type = other DNA
cctggcaaaacctgaactgt

SEQ ID NO: 65537 - DNA, 20 bp, synthetic construct
  misc_feature 1..20: note = Description of Artificial Sequence: Synthetic oligonucleotide
  misc_feature 1..20: note = Target: SCN10A; (+) strand; PAM type: YTN; PAM sequence: CTG
  source 1..20: mol_type = other DNA
gcaaaacctgaactgtgaat

SEQ ID NO: 65538 - DNA, 20 bp, synthetic construct
  misc_feature 1..20: note = Description of Artificial Sequence: Synthetic oligonucleotide
  misc_feature 1..20: note = Target: SCN10A; (+) strand; PAM type: YTN; PAM sequence: CTG
  source 1..20: mol_type = other DNA
aactgtgaatagacccaatt

SEQ ID NO: 65539 - DNA, 20 bp, synthetic construct
  misc_feature 1..20: note = Description of Artificial Sequence: Synthetic oligonucleotide
  misc_feature 1..20: note = Target: SCN10A; (+) strand; PAM type: YTN; PAM sequence: CTG
  source 1..20: mol_type = other DNA
tgaatagacccaatttgtag

SEQ ID NO: 65540 - DNA, 20 bp, synthetic construct
  misc_feature 1..20: note = Description of Artificial Sequence: Synthetic oligonucleotide
  misc_feature 1..20: note = Target: SCN10A; (+) strand; PAM type: YTN; PAM sequence: TTT
  source 1..20: mol_type = other DNA
gtagactactctgtacttgc

SEQ ID NO: 65541 - DNA, 20 bp, synthetic construct
  misc_feature 1..20: note = Description of Artificial Sequence: Synthetic oligonucleotide
  misc_feature 1..20: note = Target: SCN10A; (+) strand; PAM type: YTN; PAM sequence: TTG
  source 1..20: mol_type = other DNA
tagactactctgtacttgca

SEQ ID NO: 65542 - DNA, 20 bp, synthetic construct
  misc_feature 1..20: note = Description of Artificial Sequence: Synthetic oligonucleotide
  misc_feature 1..20: note = Target: SCN10A; (+) strand; PAM type: YTN; PAM sequence: CTA
  source 1..20: mol_type = other DNA
ctctgtacttgcacccaacc

SEQ ID NO: 65543 - DNA, 20 bp, synthetic construct
  misc_feature 1..20: note = Description of Artificial Sequence: Synthetic oligonucleotide
  misc_feature 1..20: note = Target: SCN10A; (+) strand; PAM type: YTN; PAM sequence: CTC
  source 1..20: mol_type = other DNA
tgtacttgcacccaaccagc

SEQ ID NO: 65544 - DNA, 20 bp, synthetic construct
  misc_feature 1..20: note = Description of Artificial Sequence: Synthetic oligonucleotide
  misc_feature 1..20: note = Target: SCN10A; (+) strand; PAM type: YTN; PAM sequence: CTG
  source 1..20: mol_type = other DNA
tacttgcacccaaccagctg

SEQ ID NO: 65545 - DNA, 20 bp, synthetic construct
  misc_feature 1..20: note = Description of Artificial Sequence: Synthetic oligonucleotide
  misc_feature 1..20: note = Target: SCN10A; (+) strand; PAM type: YTN; PAM sequence: CTT
  source 1..20: mol_type = other DNA
gcacccaaccagctggacct

SEQ ID NO: 65546 - DNA, 20 bp, synthetic construct
  misc_feature 1..20: note = Description of Artificial Sequence: Synthetic oligonucleotide
  misc_feature 1..20: note = Target: SCN10A; (+) strand; PAM type: YTN; PAM sequence: TTG
  source 1..20: mol_type = other DNA
cacccaaccagctggacctg

SEQ ID NO: 65547 - DNA, 20 bp, synthetic construct
  misc_feature 1..20: note = Description of Artificial Sequence: Synthetic oligonucleotide
  misc_feature 1..20: note = Target: SCN10A; (+) strand; PAM type: YTN; PAM sequence: CTG
  source 1..20: mol_type = other DNA
gacctggctggaaaaaatac

SEQ ID NO: 65548 - DNA, 20 bp, synthetic construct
  misc_feature 1..20: note = Description of Artificial Sequence: Synthetic oligonucleotide
  misc_feature 1..20: note = Target: SCN10A; (+) strand; PAM type: YTN; PAM sequence: CTG
  source 1..20: mol_type = other DNA
gctggaaaaaatacacaact

SEQ ID NO: 65549 - DNA, 20 bp, synthetic construct
  misc_feature 1..20: note = Description of Artificial Sequence: Synthetic oligonucleotide
  misc_feature 1..20: note = Target: SCN10A; (+) strand; PAM type: YTN; PAM sequence: CTG
  source 1..20: mol_type = other DNA
gaaaaaatacacaactatgc

SEQ ID NO: 65550 - DNA, 20 bp, synthetic construct
  misc_feature 1..20: note = Description of Artificial Sequence: Synthetic oligonucleotide
  misc_feature 1..20: note = Target: SCN10A; (+) strand; PAM type: YTN; PAM sequence: CTA
  source 1..20: mol_type = other DNA
tgcttaccaaccctcctaga

SEQ ID NO: 65551 - DNA, 20 bp, synthetic construct
  misc_feature 1..20: note = Description of Artificial Sequence: Synthetic oligonucleotide
  misc_feature 1..20: note = Target: SCN10A; (+) strand; PAM type: YTN; PAM sequence: CTT
  source 1..20: mol_type = other DNA
accaaccctcctagagatct

SEQ ID NO: 65552 - DNA, 20 bp, synthetic construct
  misc_feature 1..20: note = Description of Artificial Sequence: Synthetic oligonucleotide
  misc_feature 1..20: note = Target: SCN10A; (+) strand; PAM type: YTN; PAM sequence: TTA
  source 1..20: mol_type = other DNA
ccaaccctcctagagatctg

SEQ ID NO: 65553 - DNA, 20 bp, synthetic construct
  misc_feature 1..20: note = Description of Artificial Sequence: Synthetic oligonucleotide
  misc_feature 1..20: note = Target: SCN10A; (+) strand; PAM type: YTN; PAM sequence: CTC
  source 1..20: mol_type = other DNA
ctagagatctgtgagcccca

SEQ ID NO: 65554 - DNA, 20 bp, synthetic construct
  misc_feature 1..20: note = Description of Artificial Sequence: Synthetic oligonucleotide
  misc_feature 1..20: note = Target: SCN10A; (+) strand; PAM type: YTN; PAM sequence: CTA
  source 1..20: mol_type = other DNA
gagatctgtgagccccagcc

SEQ ID NO: 65555 - DNA, 20 bp, synthetic construct
  misc_feature 1..20: note = Description of Artificial Sequence: Synthetic oligonucleotide
  misc_feature 1..20: note = Target: SCN10A; (+) strand; PAM type: YTN; PAM sequence: CTG
  source 1..20: mol_type = other DNA
tgagccccagccttgccctg

SEQ ID NO: 65556 - DNA, 20 bp, synthetic construct
  misc_feature 1..20: note = Description of Artificial Sequence: Synthetic oligonucleotide
  misc_feature 1..20: note = Target: SCN10A; (+) strand; PAM type: YTN; PAM sequence: CTT
  source 1..20: mol_type = other DNA
gccctgcccagaaatctggc

SEQ ID NO: 65557 - DNA, 20 bp, synthetic construct
  misc_feature 1..20: note = Description of Artificial Sequence: Synthetic oligonucleotide
  misc_feature 1..20: note = Target: SCN10A; (+) strand; PAM type: YTN; PAM sequence: TTG
  source 1..20: mol_type = other DNA
ccctgcccagaaatctggct

SEQ ID NO: 65558 - DNA, 20 bp, synthetic construct
  misc_feature 1..20: note = Description of Artificial Sequence: Synthetic oligonucleotide
  misc_feature 1..20: note = Target: SCN10A; (+) strand; PAM type: YTN; PAM sequence: CTG
  source 1..20: mol_type = other DNA
cccagaaatctggctgtgtt

SEQ ID NO: 65559 - DNA, 20 bp, synthetic construct
  misc_feature 1..20: note = Description of Artificial Sequence: Synthetic oligonucleotide
  misc_feature 1..20: note = Target: SCN10A; (+) strand; PAM type: YTN; PAM sequence: CTG
  source 1..20: mol_type = other DNA
gctgtgtttctatattatat

SEQ ID NO: 65560 - DNA, 20 bp, synthetic construct
  misc_feature 1..20: note = Description of Artificial Sequence: Synthetic oligonucleotide
  misc_feature 1..20: note = Target: SCN10A; (+) strand; PAM type: YTN; PAM sequence: CTG
  source 1..20: mol_type = other DNA
tgtttctatattatattcca

SEQ ID NO: 65561 - DNA, 20 bp, synthetic construct
  misc_feature 1..20: note = Description of Artificial Sequence: Synthetic oligonucleotide
  misc_feature 1..20: note = Target: SCN10A; (+) strand; PAM type: YTN; PAM sequence: TTT
  source 1..20: mol_type = other DNA
ctatattatattccattcct

SEQ ID NO: 65562 - DNA, 20 bp, synthetic construct
  misc_feature 1..20: note = Description of Artificial Sequence: Synthetic oligonucleotide
  misc_feature 1..20: note = Target: SCN10A; (+) strand; PAM type: YTN; PAM sequence: TTC
  source 1..20: mol_type = other DNA
tatattatattccattcctt

SEQ ID NO: 65563 - DNA, 20 bp, synthetic construct
  misc_feature 1..20: note = Description of Artificial Sequence: Synthetic oligonucleotide
  misc_feature 1..20: note = Target: SCN10A; (+) strand; PAM type: YTN; PAM sequence: CTA
  source 1..20: mol_type = other DNA
tattatattccattccttca

SEQ ID NO: 65564 - DNA, 20 bp, synthetic construct
  misc_feature 1..20: note = Description of Artificial Sequence: Synthetic oligonucleotide
  misc_feature 1..20: note = Target: SCN10A; (+) strand; PAM type: YTN; PAM sequence: TTA
  source 1..20: mol_type = other DNA
tattccattccttcattctt

SEQ ID NO: 65565 - DNA, 20 bp, synthetic construct
  misc_feature 1..20: note = Description of Artificial Sequence: Synthetic oligonucleotide
  misc_feature 1..20: note = Target: SCN10A; (+) strand; PAM type: YTN; PAM sequence: TTC
  source 1..20: mol_type = other DNA
cattccttcattcttccaga

SEQ ID NO: 65566 - DNA, 20 bp, synthetic construct
  misc_feature 1..20: note = Description of Artificial Sequence: Synthetic oligonucleotide
  misc_feature 1..20: note = Target: SCN10A; (+) strand; PAM type: YTN; PAM sequence: TTC
  source 1..20: mol_type = other DNA
cttcattcttccagatgact

SEQ ID NO: 65567 - DNA, 20 bp, synthetic construct
  misc_feature 1..20: note = Description of Artificial Sequence: Synthetic oligonucleotide
  misc_feature 1..20: note = Target: SCN10A; (+) strand; PAM type: YTN; PAM sequence: CTT
  source 1..20: mol_type = other DNA
cattcttccagatgactgtt

SEQ ID NO: 65568 - DNA, 20 bp, synthetic construct
  misc_feature 1..20: note = Description of Artificial Sequence: Synthetic oligonucleotide
  misc_feature 1..20: note = Target: SCN10A; (+) strand; PAM type: YTN; PAM sequence: TTC
  source 1..20: mol_type = other DNA
attcttccagatgactgttt

SEQ ID NO: 65569 - DNA, 20 bp, synthetic construct
  misc_feature 1..20: note = Description of Artificial Sequence: Synthetic oligonucleotide
  misc_feature 1..20: note = Target: SCN10A; (+) strand; PAM type: YTN; PAM sequence: TTC
  source 1..20: mol_type = other DNA
ttccagatgactgtttctca

SEQ ID NO: 65570 - DNA, 20 bp, synthetic construct
  misc_feature 1..20: note = Description of Artificial Sequence: Synthetic oligonucleotide
  misc_feature 1..20: note = Target: SCN10A; (+) strand; PAM type: YTN; PAM sequence: CTT
  source 1..20: mol_type = other DNA
ccagatgactgtttctcact

SEQ ID NO: 65571 - DNA, 20 bp, synthetic construct
  misc_feature 1..20: note = Description of Artificial Sequence: Synthetic oligonucleotide
  misc_feature 1..20: note = Target: SCN10A; (+) strand; PAM type: YTN; PAM sequence: TTC
  source 1..20: mol_type = other DNA
cagatgactgtttctcactt

SEQ ID NO: 65572 - DNA, 20 bp, synthetic construct
  misc_feature 1..20: note = Description of Artificial Sequence: Synthetic oligonucleotide
  misc_feature 1..20: note = Target: SCN10A; (+) strand; PAM type: YTN; PAM sequence: CTG
  source 1..20: mol_type = other DNA
tttctcacttcctcttcccc

SEQ ID NO: 65573 - DNA, 20 bp, synthetic construct
  misc_feature 1..20: note = Description of Artificial Sequence: Synthetic oligonucleotide
  misc_feature 1..20: note = Target: SCN10A; (+) strand; PAM type: YTN; PAM sequence: TTT
  source 1..20: mol_type = other DNA
ctcacttcctcttcccccgt

SEQ ID NO: 65574 - DNA, 20 bp, synthetic construct
  misc_feature 1..20: note = Description of Artificial Sequence: Synthetic oligonucleotide
  misc_feature 1..20: note = Target: SCN10A; (+) strand; PAM type: YTN; PAM sequence: TTC
  source 1..20: mol_type = other DNA
tcacttcctcttcccccgtc

SEQ ID NO: 65575 - DNA, 20 bp, synthetic construct
  misc_feature 1..20: note = Description of Artificial Sequence: Synthetic oligonucleotide
  misc_feature 1..20: note = Target: SCN10A; (+) strand; PAM type: YTN; PAM sequence: CTC
  source 1..20: mol_type = other DNA
acttcctcttcccccgtcta

SEQ ID NO: 65576 - DNA, 20 bp, synthetic construct
  misc_feature 1..20: note = Description of Artificial Sequence: Synthetic oligonucleotide
  misc_feature 1..20: note = Target: SCN10A; (+) strand; PAM type: YTN; PAM sequence: CTT
  source 1..20: mol_type = other DNA
cctcttcccccgtctaacct

SEQ ID NO: 65577 - DNA, 20 bp, synthetic construct
  misc_feature 1..20: note = Description of Artificial Sequence: Synthetic oligonucleotide
  misc_feature 1..20: note = Target: SCN10A; (+) strand; PAM type: YTN; PAM sequence: TTC
  source 1..20: mol_type = other DNA
ctcttcccccgtctaacctc

SEQ ID NO: 65578 - DNA, 20 bp, synthetic construct
  misc_feature 1..20: note = Description of Artificial Sequence: Synthetic oligonucleotide
  misc_feature 1..20: note = Target: SCN10A; (+) strand; PAM type: YTN; PAM sequence: CTC
  source 1..20: mol_type = other DNA
ttcccccgtctaacctccgg

SEQ ID NO: 65579 - DNA, 20 bp, synthetic construct
  misc_feature 1..20: note = Description of Artificial Sequence: Synthetic oligonucleotide
  misc_feature 1..20: note = Target: SCN10A; (+) strand; PAM type: YTN; PAM sequence: CTT
  source 1..20: mol_type = other DNA
cccccgtctaacctccggct

SEQ ID NO: 65580 - DNA, 20 bp, synthetic construct
  misc_feature 1..20: note = Description of Artificial Sequence: Synthetic oligonucleotide
  misc_feature 1..20: note = Target: SCN10A; (+) strand; PAM type: YTN; PAM sequence: TTC
  source 1..20: mol_type = other DNA
ccccgtctaacctccggctc

SEQ ID NO: 65581 - DNA, 20 bp, synthetic construct
  misc_feature 1..20: note = Description of Artificial Sequence: Synthetic oligonucleotide
  misc_feature 1..20: note = Target: SCN10A; (+) strand; PAM type: YTN; PAM sequence: CTA
  source 1..20: mol_type = other DNA
acctccggctcttctttcta

SEQ ID NO: 65582 - DNA, 20 bp, synthetic construct
  misc_feature 1..20: note = Description of Artificial Sequence: Synthetic oligonucleotide
  misc_feature 1..20: note = Target: SCN10A; (+) strand; PAM type: YTN; PAM sequence: CTC
  source 1..20: mol_type = other DNA
cggctcttctttctacttac

SEQ ID NO: 65583 - DNA, 20 bp, synthetic construct
  misc_feature 1..20: note = Description of Artificial Sequence: Synthetic oligonucleotide
  misc_feature 1..20: note = Target: SCN10A; (+) strand; PAM type: YTN; PAM sequence: CTC
  source 1..20: mol_type = other DNA
ttctttctacttactctctg

SEQ ID NO: 65584 - DNA, 20 bp, synthetic construct
  misc_feature 1..20: note = Description of Artificial Sequence: Synthetic oligonucleotide
  misc_feature 1..20: note = Target: SCN10A; (+) strand; PAM type: YTN; PAM sequence: CTT
  source 1..20: mol_type = other DNA
ctttctacttactctctgtt

SEQ ID NO: 65585 - DNA, 20 bp, synthetic construct
  misc_feature 1..20: note = Description of Artificial Sequence: Synthetic oligonucleotide
  misc_feature 1..20: note = Target: SCN10A; (+) strand; PAM type: YTN; PAM sequence: TTC
  source 1..20: mol_type = other DNA
tttctacttactctctgttg

SEQ ID NO: 65586 - DNA, 20 bp, synthetic construct
  misc_feature 1..20: note = Description of Artificial Sequence: Synthetic oligonucleotide
  misc_feature 1..20: note = Target: SCN10A; (+) strand; PAM type: YTN; PAM sequence: CTT
  source 1..20: mol_type = other DNA
tctacttactctctgttgat

SEQ ID NO: 65587 - DNA, 20 bp, synthetic construct
  misc_feature 1..20: note = Description of Artificial Sequence: Synthetic oligonucleotide
  misc_feature 1..20: note = Target: SCN10A; (+) strand; PAM type: YTN; PAM sequence: TTT
  source 1..20: mol_type = other DNA
ctacttactctctgttgatg

SEQ ID NO: 65588 - DNA, 20 bp, synthetic construct
  misc_feature 1..20: note = Description of Artificial Sequence: Synthetic oligonucleotide
  misc_feature 1..20: note = Target: SCN10A; (+) strand; PAM type: YTN; PAM sequence: TTC
  source 1..20: mol_type = other DNA
tacttactctctgttgatga

SEQ ID NO: 65589 - DNA, 20 bp, synthetic construct
  misc_feature 1..20: note = Description of Artificial Sequence: Synthetic oligonucleotide
  misc_feature 1..20: note = Target: SCN10A; (+) strand; PAM type: YTN; PAM sequence: CTA
  source 1..20: mol_type = other DNA
cttactctctgttgatgagc

SEQ ID NO: 65590 - DNA, 20 bp, synthetic construct
  misc_feature 1..20: note = Description of Artificial Sequence: Synthetic oligonucleotide
  misc_feature 1..20: note = Target: SCN10A; (+) strand; PAM type: YTN; PAM sequence: CTT
  source 1..20: mol_type = other DNA
actctctgttgatgagctcc

SEQ ID NO: 65591 - DNA, 20 bp, synthetic construct
  misc_feature 1..20: note = Description of Artificial Sequence: Synthetic oligonucleotide
  misc_feature 1..20: note = Target: SCN10A; (+) strand; PAM type: YTN; PAM sequence: TTA
  source 1..20: mol_type = other DNA
ctctctgttgatgagctccc

SEQ ID NO: 65592 - DNA, 20 bp, synthetic construct
  misc_feature 1..20: note = Description of Artificial Sequence: Synthetic oligonucleotide
  misc_feature 1..20: note = Target: SCN10A; (+) strand; PAM type: YTN; PAM sequence: CTC
  source 1..20: mol_type = other DNA
tctgttgatgagctcccttt

SEQ ID NO: 65593 - DNA, 20 bp, synthetic construct
  misc_feature 1..20: note = Description of Artificial Sequence: Synthetic oligonucleotide
  misc_feature 1..20: note = Target: SCN10A; (+) strand; PAM type: YTN; PAM sequence: CTC
  source 1..20: mol_type = other DNA
tgttgatgagctccctttta

SEQ ID NO: 65594 - DNA, 20 bp, synthetic construct
  misc_feature 1..20: note = Description of Artificial Sequence: Synthetic oligonucleotide
  misc_feature 1..20: note = Target: SCN10A; (+) strand; PAM type: YTN; PAM sequence: CTG
  source 1..20: mol_type = other DNA
ttgatgagctcccttttatt

SEQ ID NO: 65595 - DNA, 20 bp, synthetic construct
  misc_feature 1..20: note = Description of Artificial Sequence: Synthetic oligonucleotide
  misc_feature 1..20: note = Target: SCN10A; (+) strand; PAM type: YTN; PAM sequence: TTG
  source 1..20: mol_type = other DNA
atgagctcccttttatttca

SEQ ID NO: 65596 - DNA, 20 bp, synthetic construct
  misc_feature 1..20: note = Description of Artificial Sequence: Synthetic oligonucleotide
  misc_feature 1..20: note = Target: SCN10A; (+) strand; PAM type: YTN; PAM sequence: CTC
  source 1..20: mol_type = other DNA
ccttttatttcactcagaat

SEQ ID NO: 65597 - DNA, 20 bp, synthetic construct
  misc_feature 1..20: note = Description of Artificial Sequence: Synthetic oligonucleotide
  misc_feature 1..20: note = Target: SCN10A; (+) strand; PAM type: YTN; PAM sequence: CTT
  source 1..20: mol_type = other DNA
ttatttcactcagaatatag

SEQ ID NO: 65598 - DNA, 20 bp, synthetic construct
  misc_feature 1..20: note = Description of Artificial Sequence: Synthetic oligonucleotide
  misc_feature 1..20: note = Target: SCN10A; (+) strand; PAM type: YTN; PAM sequence: TTT
  source 1..20: mol_type = other DNA
tatttcactcagaatataga

SEQ ID NO: 65599 - DNA, 20 bp, synthetic construct
  misc_feature 1..20: note = Description of Artificial Sequence: Synthetic oligonucleotide
  misc_feature 1..20: note = Target: SCN10A; (+) strand; PAM type: YTN; PAM sequence: TTT
  source 1..20: mol_type = other DNA
atttcactcagaatatagac

SEQ ID NO: 65600 - DNA, 20 bp, synthetic construct
  misc_feature 1..20: note = Description of Artificial Sequence: Synthetic oligonucleotide
  misc_feature 1..20: note = Target: SCN10A; (+) strand; PAM type: YTN; PAM sequence: TTA
  source 1..20: mol_type = other DNA
tttcactcagaatatagact

SEQ ID NO: 65601 - DNA, 20 bp, synthetic construct
  misc_feature 1..20: note = Description of Artificial Sequence: Synthetic oligonucleotide
  misc_feature 1..20: note = Target: SCN10A; (+) strand; PAM type: YTN; PAM sequence: TTT
  source 1..20: mol_type = other DNA
cactcagaatatagactagt

SEQ ID NO: 65602 - DNA, 20 bp, synthetic construct
  misc_feature 1..20: note = Description of Artificial Sequence: Synthetic oligonucleotide
  misc_feature 1..20: note = Target: SCN10A; (+) strand; PAM type: YTN; PAM sequence: TTC
  source 1..20: mol_type = other DNA
actcagaatatagactagtt

SEQ ID NO: 65603 - DNA, 20 bp, synthetic construct
  misc_feature 1..20: note = Description of Artificial Sequence: Synthetic oligonucleotide
  misc_feature 1..20: note = Target: SCN10A; (+) strand; PAM type: YTN; PAM sequence: CTC
  source 1..20: mol_type = other DNA
agaatatagactagttcaca

SEQ ID NO: 65604 - DNA, 20 bp, synthetic construct
  misc_feature 1..20: note = Description of Artificial Sequence: Synthetic oligonucleotide
  misc_feature 1..20: note = Target: SCN10A; (+) strand; PAM type: YTN; PAM sequence: CTA
  source 1..20: mol_type = other DNA
gttcacaaaagaacttcccc

SEQ ID NO: 65605 - DNA, 20 bp, synthetic construct
  misc_feature 1..20: note = Description of Artificial Sequence: Synthetic oligonucleotide
  misc_feature 1..20: note = Target: SCN10A; (+) strand; PAM type: YTN; PAM sequence: TTC
  source 1..20: mol_type = other DNA
acaaaagaacttccccttct

SEQ ID NO: 65606 - DNA, 20 bp, synthetic construct
  misc_feature 1..20: note = Description of Artificial Sequence: Synthetic oligonucleotide
  misc_feature 1..20: note = Target: SCN10A; (+) strand; PAM type: YTN; PAM sequence: CTT
  source 1..20: mol_type = other DNA
ccccttcttcctaccactaa

SEQ ID NO: 65607 - DNA, 20 bp, synthetic construct
  misc_feature 1..20: note = Description of Artificial Sequence: Synthetic oligonucleotide
  misc_feature 1..20: note = Target: SCN10A; (+) strand; PAM type: YTN; PAM sequence: TTC
  source 1..20: mol_type = other DNA
cccttcttcctaccactaaa

SEQ ID NO: 65608 - DNA, 20 bp, synthetic construct
  misc_feature 1..20: note = Description of Artificial Sequence: Synthetic oligonucleotide
  misc_feature 1..20: note = Target: SCN10A; (+) strand; PAM type: YTN; PAM sequence: CTT
  source 1..20: mol_type = other DNA
cttcctaccactaaatctct

SEQ ID NO: 65609 - DNA, 20 bp, synthetic construct
  misc_feature 1..20: note = Description of Artificial Sequence: Synthetic oligonucleotide
  misc_feature 1..20: note = Target: SCN10A; (+) strand; PAM type: YTN; PAM sequence: TTC
  source 1..20: mol_type = other DNA
ttcctaccactaaatctctg

SEQ ID NO: 65610 - DNA, 20 bp, synthetic construct
  misc_feature 1..20: note = Description of Artificial Sequence: Synthetic oligonucleotide
  misc_feature 1..20: note = Target: SCN10A; (+) strand; PAM type: YTN; PAM sequence: CTT
  source 1..20: mol_type = other DNA
cctaccactaaatctctggc

SEQ ID NO: 65611 - DNA, 20 bp, synthetic construct
  misc_feature 1..20: note = Description of Artificial Sequence: Synthetic oligonucleotide
  misc_feature 1..20: note = Target: SCN10A; (+) strand; PAM type: YTN; PAM sequence: TTC
  source 1..20: mol_type = other DNA
ctaccactaaatctctggca

SEQ ID NO: 65612 - DNA, 20 bp, synthetic construct
  misc_feature 1..20: note = Description of Artificial Sequence: Synthetic oligonucleotide
  misc_feature 1..20: note = Target: SCN10A; (+) strand; PAM type: YTN; PAM sequence: CTA
  source 1..20: mol_type = other DNA
ccactaaatctctggcatat

SEQ ID NO: 65613 - DNA, 20 bp, synthetic construct
  misc_feature 1..20: note = Description of Artificial Sequence: Synthetic oligonucleotide
  misc_feature 1..20: note = Target: SCN10A; (+) strand; PAM type: YTN; PAM sequence: CTA
  source 1..20: mol_type = other DNA
aatctctggcatatctgcaa

SEQ ID NO: 65614 - DNA, 20 bp, synthetic construct
  misc_feature 1..20: note = Description of Artificial Sequence: Synthetic oligonucleotide
  misc_feature 1..20: note = Target: SCN10A; (+) strand; PAM type: YTN; PAM sequence: CTC
  source 1..20: mol_type = other DNA
tggcatatctgcaagtccac

SEQ ID NO: 65615 - DNA, 20 bp, synthetic construct
  misc_feature 1..20: note = Description of Artificial Sequence: Synthetic oligonucleotide
  misc_feature 1..20: note = Target: SCN10A; (+) strand; PAM type: YTN; PAM sequence: CTG
  source 1..20: mol_type = other DNA
gcatatctgcaagtccacct

SEQ ID NO: 65616 - DNA, 20 bp, synthetic construct
  misc_feature 1..20: note = Description of Artificial Sequence: Synthetic oligonucleotide
  misc_feature 1..20: note = Target: SCN10A; (+) strand; PAM type: YTN; PAM sequence: CTG
  source 1..20: mol_type = other DNA
caagtccacctggtattctg

SEQ ID NO: 65617 - DNA, 20 bp, synthetic construct
  misc_feature 1..20: note = Description of Artificial Sequence: Synthetic oligonucleotide
  misc_feature 1..20: note = Target: SCN10A; (+) strand; PAM type: YTN; PAM sequence: CTG
  source 1..20: mol_type = other DNA
gtattctgtcttcgtgcccc

SEQ ID NO: 65618 - DNA, 20 bp, synthetic construct
  misc_feature 1..20: note = Description of Artificial Sequence: Synthetic oligonucleotide
  misc_feature 1..20: note = Target: SCN10A; (+) strand; PAM type: YTN; PAM sequence: TTC
  source 1..20: mol_type = other DNA
tgtcttcgtgccccacacag

SEQ ID NO: 65619 - DNA, 20 bp, synthetic construct
  misc_feature 1..20: note = Description of Artificial Sequence: Synthetic oligonucleotide
  misc_feature 1..20: note = Target: SCN10A; (+) strand; PAM type: YTN; PAM sequence: CTG
  source 1..20: mol_type = other DNA
tcttcgtgccccacacagtg

SEQ ID NO: 65620 - DNA, 20 bp, synthetic construct
  misc_feature 1..20: note = Description of Artificial Sequence: Synthetic oligonucleotide
  misc_feature 1..20: note = Target: SCN10A; (+) strand; PAM type: YTN; PAM sequence: CTT
  source 1..20: mol_type = other DNA
cgtgccccacacagtgcgtg

SEQ ID NO: 65621 - DNA, 20 bp, synthetic construct
  misc_feature 1..20: note = Description of Artificial Sequence: Synthetic oligonucleotide
  misc_feature 1..20: note = Target: SCN10A; (+) strand; PAM type: YTN; PAM sequence: TTC
  source 1..20: mol_type = other DNA
gtgccccacacagtgcgtgg

SEQ ID NO: 65622 - DNA, 20 bp, synthetic construct
  misc_feature 1..20: note = Description of Artificial Sequence: Synthetic oligonucleotide
  misc_feature 1..20: note = Target: SCN10A; (+) strand; PAM type: YTN; PAM sequence: CTC
  source 1..20: mol_type = other DNA
tacccctcccacttgtgccg

SEQ ID NO: 65623 - DNA, 20 bp, synthetic construct
  misc_feature 1..20: note = Description of Artificial Sequence: Synthetic oligonucleotide
  misc_feature 1..20: note = Target: SCN10A; (+) strand; PAM type: YTN; PAM sequence: CTA
  source 1..20: mol_type = other DNA
cccctcccacttgtgccggg

SEQ ID NO: 65624 - DNA, 20 bp, synthetic construct
  misc_feature 1..20: note = Description of Artificial Sequence: Synthetic oligonucleotide
  misc_feature 1..20: note = Target: SCN10A; (+) strand; PAM type: YTN; PAM sequence: CTC
  source 1..20: mol_type = other DNA
ccacttgtgccgggctcttt

SEQ ID NO: 65625 - DNA, 20 bp, synthetic construct
  misc_feature 1..20: note = Description of Artificial Sequence: Synthetic oligonucleotide
  misc_feature 1..20: note = Target: SCN10A; (+) strand; PAM type: YTN; PAM sequence: CTT
  source 1..20: mol_type = other DNA
gtgccgggctctttcctctc

SEQ ID NO: 65626 - DNA, 20 bp, synthetic construct
  misc_feature 1..20: note = Description of Artificial Sequence: Synthetic oligonucleotide
  misc_feature 1..20: note = Target: SCN10A; (+) strand; PAM type: YTN; PAM sequence: TTG
  source 1..20: mol_type = other DNA
tgccgggctctttcctctcc

SEQ ID NO: 65627 - DNA, 20 bp, synthetic construct
  misc_feature 1..20: note = Description of Artificial Sequence: Synthetic oligonucleotide
  misc_feature 1..20: note = Target: SCN10A; (+) strand; PAM type: YTN; PAM sequence: CTC
  source 1..20: mol_type = other DNA
tttcctctcccacctattca

SEQ ID NO: 65628 - DNA, 20 bp, synthetic construct
  misc_feature 1..20: note = Description of Artificial Sequence: Synthetic oligonucleotide
  misc_feature 1..20: note = Target: SCN10A; (+) strand; PAM type: YTN; PAM sequence: CTT
  source 1..20: mol_type = other DNA
tcctctcccacctattcaag

SEQ ID NO: 65629 - DNA, 20 bp, synthetic construct
  misc_feature 1..20: note = Description of Artificial Sequence: Synthetic oligonucleotide
  misc_feature 1..20: note = Target: SCN10A; (+) strand; PAM type: YTN; PAM sequence: TTT
  source 1..20: mol_type = other DNA
cctctcccacctattcaagg

SEQ ID NO: 65630 - DNA, 20 bp, synthetic construct
  misc_feature 1..20: note = Description of Artificial Sequence: Synthetic oligonucleotide
  misc_feature 1..20: note = Target: SCN10A; (+) strand; PAM type: YTN; PAM sequence: TTC
  source 1..20: mol_type = other DNA
ctctcccacctattcaaggc

SEQ ID NO: 65631 - DNA, 20 bp, synthetic construct
  misc_feature 1..20: note = Description of Artificial Sequence: Synthetic oligonucleotide
  misc_feature 1..20: note = Target: SCN10A; (+) strand; PAM type: YTN; PAM sequence: CTC
  source 1..20: mol_type = other DNA
tcccacctattcaaggcctg

SEQ ID NO: 65632 - DNA, 20 bp, synthetic construct
  misc_feature 1..20: note = Description of Artificial Sequence: Synthetic oligonucleotide
  misc_feature 1..20: note = Target: SCN10A; (+) strand; PAM type: YTN; PAM sequence: CTC
  source 1..20: mol_type = other DNA
ccacctattcaaggcctgca

SEQ ID NO: 65633 - DNA, 20 bp, synthetic construct
  misc_feature 1..20: note = Description of Artificial Sequence: Synthetic oligonucleotide
  misc_feature 1..20: note = Target: SCN10A; (+) strand; PAM type: YTN; PAM sequence: CTA
  source 1..20: mol_type = other DNA
ttcaaggcctgcatcatcca

SEQ ID NO: 65634 - DNA, 20 bp, synthetic construct
  misc_feature 1..20: note = Description of Artificial Sequence: Synthetic oligonucleotide
  misc_feature 1..20: note = Target: SCN10A; (+) strand; PAM type: YTN; PAM sequence: TTC
  source 1..20: mol_type = other DNA
aaggcctgcatcatccagac

SEQ ID NO: 65635 - DNA, 20 bp, synthetic construct
  misc_feature 1..20: note = Description of Artificial Sequence: Synthetic oligonucleotide
  misc_feature 1..20: note = Target: SCN10A; (+) strand; PAM type: YTN; PAM sequence: CTG
  source 1..20: mol_type = other DNA
catcatccagacctgtctcc

SEQ ID NO: 65636 - DNA, 20 bp, synthetic construct
  misc_feature 1..20: note = Description of Artificial Sequence: Synthetic oligonucleotide
  misc_feature 1..20: note = Target: SCN10A; (+) strand; PAM type: YTN; PAM sequence: CTG
  source 1..20: mol_type = other DNA
tctcccttccagaccattgc

SEQ ID NO: 65637 - DNA, 20 bp, synthetic construct
  misc_feature 1..20: note = Description of Artificial Sequence: Synthetic oligonucleotide
  misc_feature 1..20: note = Target: SCN10A; (+) strand; PAM type: YTN; PAM sequence: CTC
  source 1..20: mol_type = other DNA
ccttccagaccattgccatg

SEQ ID NO: 65638 - DNA, 20 bp, synthetic construct
  misc_feature 1..20: note = Description of Artificial Sequence: Synthetic oligonucleotide
  misc_feature 1..20: note = Target: SCN10A; (+) strand; PAM type: YTN; PAM sequence: CTT
  source 1..20: mol_type = other DNA
ccagaccattgccatgagca

SEQ ID NO: 65639 - DNA, 20 bp, synthetic construct
  misc_feature 1..20: note = Description of Artificial Sequence: Synthetic oligonucleotide
  misc_feature 1..20: note = Target: SCN10A; (+) strand; PAM type: YTN; PAM sequence: TTC
  source 1..20: mol_type = other DNA
cagaccattgccatgagcag

SEQ ID NO: 65640 - DNA, 20 bp, synthetic construct
  misc_feature 1..20: note = Description of Artificial Sequence: Synthetic oligonucleotide
  misc_feature 1..20: note = Target: SCN10A; (+) strand; PAM type: YTN; PAM sequence: TTG
  source 1..20: mol_type = other DNA
ccatgagcaggtaaacatgc

SEQ ID NO: 65641 - DNA, 20 bp, synthetic construct
  misc_feature 1..20: note = Description of Artificial Sequence: Synthetic oligonucleotide
  misc_feature 1..20: note = Target: SCN10A; (+) strand; PAM type: YTN; PAM sequence: CTT
  source 1..20: mol_type = other DNA
taattatctcgcggctttga

SEQ ID NO: 65642 - DNA, 20 bp, synthetic construct
  misc_feature 1..20: note = Description of Artificial Sequence: Synthetic oligonucleotide
  misc_feature 1..20: note = Target: SCN10A; (+) strand; PAM type: YTN; PAM sequence: TTT
  source 1..20: mol_type = other DNA
aattatctcgcggctttgaa

SEQ ID NO: 65643 - DNA, 20 bp, synthetic construct
  misc_feature 1..20: note = Description of Artificial Sequence: Synthetic oligonucleotide
  misc_feature 1..20: note = Target: SCN10A; (+) strand; PAM type: YTN; PAM sequence: TTA
  source 1..20: mol_type = other DNA
attatctcgcggctttgaaa

SEQ ID NO: 65644 - DNA, 20 bp, synthetic construct
  misc_feature 1..20: note = Description of Artificial Sequence: Synthetic oligonucleotide
  misc_feature 1..20: note = Target: SCN10A; (+) strand; PAM type: YTN; PAM sequence: TTA
  source 1..20: mol_type = other DNA
tctcgcggctttgaaaaagt

SEQ ID NO: 65645 - DNA, 20 bp, synthetic construct
  misc_feature 1..20: note = Description of Artificial Sequence: Synthetic oligonucleotide
  misc_feature 1..20: note = Target: SCN10A; (+) strand; PAM type: YTN; PAM sequence: CTC
  source 1..20: mol_type = other DNA
gcggctttgaaaaagtctct

SEQ ID NO: 65646 - DNA, 20 bp, synthetic construct
  misc_feature 1..20: note = Description of Artificial Sequence: Synthetic oligonucleotide
  misc_feature 1..20: note = Target: SCN10A; (+) strand; PAM type: YTN; PAM sequence: CTT
  source 1..20: mol_type = other DNA
tgaaaaagtctctctggacc

SEQ ID NO: 65647 - DNA, 20 bp, synthetic construct
  misc_feature 1..20: note = Description of Artificial Sequence: Synthetic oligonucleotide
  misc_feature 1..20: note = Target: SCN10A; (+) strand; PAM type: YTN; PAM sequence: TTT
  source 1..20: mol_type = other DNA
gaaaaagtctctctggaccc

SEQ ID NO: 65648 - DNA, 20 bp, synthetic construct
  misc_feature 1..20: note = Description of Artificial Sequence: Synthetic oligonucleotide
  misc_feature 1..20: note = Target: SCN10A; (+) strand; PAM type: YTN; PAM sequence: TTG
  source 1..20: mol_type = other DNA
aaaaagtctctctggacccc

SEQ ID NO: 65649 - DNA, 20 bp, synthetic construct
  misc_feature 1..20: note = Description of Artificial Sequence: Synthetic oligonucleotide
  misc_feature 1..20: note = Target: SCN10A; (+) strand; PAM type: YTN; PAM sequence: CTC
  source 1..20: mol_type = other DNA
tctggaccccatgctctctt

SEQ ID NO: 65650 - DNA, 20 bp, synthetic construct
  misc_feature 1..20: note = Description of Artificial Sequence: Synthetic oligonucleotide
  misc_feature 1..20: note = Target: SCN10A; (+) strand; PAM type: YTN; PAM sequence: CTC
  source 1..20: mol_type = other DNA
tggaccccatgctctctttc

SEQ ID NO: 65651 - DNA, 20 bp, synthetic construct
  misc_feature 1..20: note = Description of Artificial Sequence: Synthetic oligonucleotide
  misc_feature 1..20: note = Target: SCN10A; (+) strand; PAM type: YTN; PAM sequence: CTG
  source 1..20: mol_type = other DNA
gaccccatgctctctttcat

SEQ ID NO: 65652 - DNA, 20 bp, synthetic construct
  misc_feature 1..20: note = Description of Artificial Sequence: Synthetic oligonucleotide
  misc_feature 1..20: note = Target: SCN10A; (+) strand; PAM type: YTN; PAM sequence: CTC
  source 1..20: mol_type = other DNA
tctttcattactgcttcttt

SEQ ID NO: 65653 - DNA, 20 bp, synthetic construct
  misc_feature 1..20: note = Description of Artificial Sequence: Synthetic oligonucleotide
  misc_feature 1..20: note = Target: SCN10A; (+) strand; PAM type: YTN; PAM sequence: CTC
  source 1..20: mol_type = other DNA
tttcattactgcttctttga

SEQ ID NO: 65654 - DNA, 20 bp, synthetic construct
  misc_feature 1..20: note = Description of Artificial Sequence: Synthetic oligonucleotide
  misc_feature 1..20: note = Target: SCN10A; (+) strand; PAM type: YTN; PAM sequence: CTT
  source 1..20: mol_type = other DNA
tcattactgcttctttgaca

SEQ ID NO: 65655 - DNA, 20 bp, synthetic construct
  misc_feature 1..20: note = Description of Artificial Sequence: Synthetic oligonucleotide
  misc_feature 1..20: note = Target: SCN10A; (+) strand; PAM type: YTN; PAM sequence: TTT
  source 1..20: mol_type = other DNA
cattactgcttctttgacag

SEQ ID NO: 65656 - DNA, 20 bp, synthetic construct
  misc_feature 1..20: note = Description of Artificial Sequence: Synthetic oligonucleotide
  misc_feature 1..20: note = Target: SCN10A; (+) strand; PAM type: YTN; PAM sequence: TTC
  source 1..20: mol_type = other DNA
attactgcttctttgacagt

SEQ ID NO: 65657 - DNA, 20 bp, synthetic construct
  misc_feature 1..20: note = Description of Artificial Sequence: Synthetic oligonucleotide
  misc_feature 1..20: note = Target: SCN10A; (+) strand; PAM type: YTN; PAM sequence: TTA
  source 1..20: mol_type = other DNA
ctgcttctttgacagtaaaa

SEQ ID NO: 65658 - DNA, 20 bp, synthetic construct
  misc_feature 1..20: note = Description of Artificial Sequence: Synthetic oligonucleotide
  misc_feature 1..20: note = Target: SCN10A; (+) strand; PAM type: YTN; PAM sequence: CTG
  source 1..20: mol_type = other DNA
cttctttgacagtaaaattc

SEQ ID NO: 65659 - DNA, 20 bp, synthetic construct
  misc_feature 1..20: note = Description of Artificial Sequence: Synthetic oligonucleotide
  misc_feature 1..20: note = Target: SCN10A; (+) strand; PAM type: YTN; PAM sequence: CTT
  source 1..20: mol_type = other DNA
ctttgacagtaaaattcctt

SEQ ID NO: 65660 - DNA, 20 bp, synthetic construct
  misc_feature 1..20: note = Description of Artificial Sequence: Synthetic oligonucleotide
  misc_feature 1..20: note = Target: SCN10A; (+) strand; PAM type: YTN; PAM sequence: TTC
  source 1..20: mol_type = other DNA
tttgacagtaaaattccttg

SEQ ID NO: 65661 - DNA, 20 bp, synthetic construct
  misc_feature 1..20: note = Description of Artificial Sequence: Synthetic oligonucleotide
  misc_feature 1..20: note = Target: SCN10A; (+) strand; PAM type: YTN; PAM sequence: CTT
  source 1..20: mol_type = other DNA
tgacagtaaaattccttgca

SEQ ID NO: 65662 - DNA, 20 bp, synthetic construct
  misc_feature 1..20: note = Description of Artificial Sequence: Synthetic oligonucleotide
  misc_feature 1..20: note = Target: SCN10A; (+) strand; PAM type: YTN; PAM sequence: TTT
  source 1..20: mol_type = other DNA
gacagtaaaattccttgcaa

SEQ ID NO: 65663 - DNA, 20 bp, synthetic construct
  misc_feature 1..20: note = Description of Artificial Sequence: Synthetic oligonucleotide
  misc_feature 1..20: note = Target: SCN10A; (+) strand; PAM type: YTN; PAM sequence: TTG
  source 1..20: mol_type = other DNA
acagtaaaattccttgcaag

SEQ ID NO: 65664 - DNA, 20 bp, synthetic construct
  misc_feature 1..20: note = Description of Artificial Sequence: Synthetic oligonucleotide
  misc_feature 1..20: note = Target: SCN10A; (+) strand; PAM type: YTN; PAM sequence: TTC
  source 1..20: mol_type = other DNA
cttgcaagagttttctacac

SEQ ID NO: 65665 - DNA, 20 bp, synthetic construct
  misc_feature 1..20: note = Description of Artificial Sequence: Synthetic oligonucleotide
  misc_feature 1..20: note = Target: SCN10A; (+) strand; PAM type: YTN; PAM sequence: CTT
  source 1..20: mol_type = other DNA
gcaagagttttctacactta

SEQ ID NO: 65666 - DNA, 20 bp, synthetic construct
  misc_feature 1..20: note = Description of Artificial Sequence: Synthetic oligonucleotide
  misc_feature 1..20: note = Target: SCN10A; (+) strand; PAM type: YTN; PAM sequence: TTG
  source 1..20: mol_type = other DNA
caagagttttctacacttaa

SEQ ID NO: 65667 - DNA, 20 bp, synthetic construct
  misc_feature 1..20: note = Description of Artificial Sequence: Synthetic oligonucleotide
  misc_feature 1..20: note = Target: SCN10A; (+) strand; PAM type: YTN; PAM sequence: TTT
  source 1..20: mol_type = other DNA
tctacacttaaccttctaca

SEQ ID NO: 65668 - DNA, 20 bp, synthetic construct
  misc_feature 1..20: note = Description of Artificial Sequence: Synthetic oligonucleotide
  misc_feature 1..20: note = Target: SCN10A; (+) strand; PAM type: YTN; PAM sequence: TTT
  source 1..20: mol_type = other DNA
ctacacttaaccttctacag

SEQ ID NO: 65669 - DNA, 20 bp, synthetic construct
  misc_feature 1..20: note = Description of Artificial Sequence: Synthetic oligonucleotide
  misc_feature 1..20: note = Target: SCN10A; (+) strand; PAM type: YTN; PAM sequence: TTC
  source 1..20: mol_type = other DNA
tacacttaaccttctacagc

SEQ ID NO: 65670 - DNA, 20 bp, synthetic construct
  misc_feature 1..20: note = Description of Artificial Sequence: Synthetic oligonucleotide
  misc_feature 1..20: note = Target: SCN10A; (+) strand; PAM type: YTN; PAM sequence: CTA
  source 1..20: mol_type = other DNA
cacttaaccttctacagctc

SEQ ID NO: 65671 - DNA, 20 bp, synthetic construct
  misc_feature 1..20: note = Description of Artificial Sequence: Synthetic oligonucleotide
  misc_feature 1..20: note = Target: SCN10A; (+) strand; PAM type: YTN; PAM sequence: CTT
  source 1..20: mol_type = other DNA
aaccttctacagctccttac

SEQ ID NO: 65672 - DNA, 20 bp, synthetic construct
  misc_feature 1..20: note = Description of Artificial Sequence: Synthetic oligonucleotide
  misc_feature 1..20: note = Target: SCN10A; (+) strand; PAM type: YTN; PAM sequence: TTA
  source 1..20: mol_type = other DNA
accttctacagctccttacc

SEQ ID NO: 65673 - DNA, 20 bp, synthetic construct
  misc_feature 1..20: note = Description of Artificial Sequence: Synthetic oligonucleotide
  misc_feature 1..20: note = Target: SCN10A; (+) strand; PAM type: YTN; PAM sequence: CTT
  source 1..20: mol_type = other DNA
ctacagctccttacctcttt

SEQ ID NO: 65674 - DNA, 20 bp, synthetic construct
  misc_feature 1..20: note = Description of Artificial Sequence: Synthetic oligonucleotide
  misc_feature 1..20: note = Target: SCN10A; (+) strand; PAM type: YTN; PAM sequence: TTC
  source 1..20: mol_type = other DNA
tacagctccttacctctttt

SEQ ID NO: 65675 - DNA, 20 bp, synthetic construct
  misc_feature 1..20: note = Description of Artificial Sequence: Synthetic oligonucleotide
  misc_feature 1..20: note = Target: SCN10A; (+) strand; PAM type: YTN; PAM sequence: CTA
  source 1..20: mol_type = other DNA
cagctccttacctctttttt

SEQ ID NO: 65676 - DNA, 20 bp, synthetic construct
  misc_feature 1..20: note = Description of Artificial Sequence: Synthetic oligonucleotide
  misc_feature 1..20: note = Target: SCN10A; (+) strand; PAM type: YTN; PAM sequence: CTC
  source 1..20: mol_type = other DNA
cttacctctttttttctctg

SEQ ID NO: 65677 - DNA, 20 bp, synthetic construct
  misc_feature 1..20: note = Description of Artificial Sequence: Synthetic oligonucleotide
  misc_feature 1..20: note = Target: SCN10A; (+) strand; PAM type: YTN; PAM sequence: CTT
  source 1..20: mol_type = other DNA
acctctttttttctctgcag

SEQ ID NO: 65678 - DNA, 20 bp, synthetic construct
  misc_feature 1..20: note = Description of Artificial Sequence: Synthetic oligonucleotide
  misc_feature 1..20: note = Target: SCN10A; (+) strand; PAM type: YTN; PAM sequence: TTA
  source 1..20: mol_type = other DNA
cctctttttttctctgcagc

SEQ ID NO: 65679 - DNA, 20 bp, synthetic construct
  misc_feature 1..20: note = Description of Artificial Sequence: Synthetic oligonucleotide
  misc_feature 1..20: note = Target: SCN10A; (+) strand; PAM type: YTN; PAM sequence: CTC
  source 1..20: mol_type = other DNA
tttttttctctgcagcccct

SEQ ID NO: 65680 - DNA, 20 bp, synthetic construct
  misc_feature 1..20: note = Description of Artificial Sequence: Synthetic oligonucleotide
  misc_feature 1..20: note = Target: SCN10A; (+) strand; PAM type: YTN; PAM sequence: CTT
  source 1..20: mol_type = other DNA
tttttctctgcagcccctgg

SEQ ID NO: 65681 - DNA, 20 bp, synthetic construct
  misc_feature 1..20: note = Description of Artificial Sequence: Synthetic oligonucleotide
  misc_feature 1..20: note = Target: SCN10A; (+) strand; PAM type: YTN; PAM sequence: TTT
  source 1..20: mol_type = other DNA
ttttctctgcagcccctgga

SEQ ID NO: 65682 - DNA, 20 bp, synthetic construct
  misc_feature 1..20: note = Description of Artificial Sequence: Synthetic oligonucleotide
  misc_feature 1..20: note = Target: SCN10A; (+) strand; PAM type: YTN; PAM sequence: TTT
  source 1..20: mol_type = other DNA
tttctctgcagcccctggaa

SEQ ID NO: 65683 - DNA, 20 bp, synthetic construct
  misc_feature 1..20: note = Description of Artificial Sequence: Synthetic oligonucleotide
  misc_feature 1..20: note = Target: SCN10A; (+) strand; PAM type: YTN; PAM sequence: TTT
  source 1..20: mol_type = other DNA
ttctctgcagcccctggaat

SEQ ID NO: 65684 - DNA, 20 bp, synthetic construct
  misc_feature 1..20: note = Description of Artificial Sequence: Synthetic oligonucleotide
  misc_feature 1..20: note = Target: SCN10A; (+) strand; PAM type: YTN; PAM sequence: TTT
  source 1..20: mol_type = other DNA
tctctgcagcccctggaatc

SEQ ID NO: 65685 - DNA, 20 bp, synthetic construct
  misc_feature 1..20: note = Description of Artificial Sequence: Synthetic oligonucleotide
  misc_feature 1..20: note = Target: SCN10A; (+) strand; PAM type: YTN; PAM sequence: TTT
  source 1..20: mol_type = other DNA
ctctgcagcccctggaatct

SEQ ID NO: 65686 - DNA, 20 bp, synthetic construct
  misc_feature 1..20: note = Description of Artificial Sequence: Synthetic oligonucleotide
  misc_feature 1..20: note = Target: SCN10A; (+) strand; PAM type: YTN; PAM sequence: TTC
  source 1..20: mol_type = other DNA
tctgcagcccctggaatctg

SEQ ID NO: 65687 - DNA, 20 bp, synthetic construct
  misc_feature 1..20: note = Description of Artificial Sequence: Synthetic oligonucleotide
  misc_feature 1..20: note = Target: SCN10A; (+) strand; PAM type: YTN; PAM sequence: CTC
  source 1..20: mol_type = other DNA
tgcagcccctggaatctgac

SEQ ID NO: 65688 - DNA, 20 bp, synthetic construct
  misc_feature 1..20: note = Description of Artificial Sequence: Synthetic oligonucleotide
  misc_feature 1..20: note = Target: SCN10A; (+) strand; PAM type: YTN; PAM sequence: CTG
  source 1..20: mol_type = other DNA
cagcccctggaatctgactt

SEQ ID NO: 65689 - DNA, 20 bp, synthetic construct
  misc_feature 1..20: note = Description of Artificial Sequence: Synthetic oligonucleotide
  misc_feature 1..20: note = Target: SCN10A; (+) strand; PAM type: YTN; PAM sequence: CTG
  source 1..20: mol_type = other DNA
gaatctgactttaactgctt

SEQ ID NO: 65690 - DNA, 20 bp, synthetic construct
  misc_feature 1..20: note = Description of Artificial Sequence: Synthetic oligonucleotide
  misc_feature 1..20: note = Target: SCN10A; (+) strand; PAM type: YTN; PAM sequence: CTG
  source 1..20: mol_type = other DNA
actttaactgcttccaaatt

SEQ ID NO: 65691 - DNA, 20 bp, synthetic construct
  misc_feature 1..20: note = Description of Artificial Sequence: Synthetic oligonucleotide
  misc_feature 1..20: note = Target: SCN10A; (+) strand; PAM type: YTN; PAM sequence: CTT
  source 1..20: mol_type = other DNA
taactgcttccaaattcaaa

SEQ ID NO: 65692 - DNA, 20 bp, synthetic construct
  misc_feature 1..20: note = Description of Artificial Sequence: Synthetic oligonucleotide
  misc_feature 1..20: note = Target: SCN10A; (+) strand; PAM type: YTN; PAM sequence: TTT
  source 1..20: mol_type = other DNA
aactgcttccaaattcaaat

SEQ ID NO: 65693 - DNA, 20 bp, synthetic construct
  misc_feature 1..20: note = Description of Artificial Sequence: Synthetic oligonucleotide
  misc_feature 1..20: note = Target: SCN10A; (+) strand; PAM type: YTN; PAM sequence: TTA
  source 1..20: mol_type = other DNA
actgcttccaaattcaaata

SEQ ID NO: 65694 - DNA, 20 bp, synthetic construct
  misc_feature 1..20: note = Description of Artificial Sequence: Synthetic oligonucleotide
  misc_feature 1..20: note = Target: SCN10A; (+) strand; PAM type: YTN; PAM sequence: CTG
  source 1..20: mol_type = other DNA
cttccaaattcaaataattg

SEQ ID NO: 65695 - DNA, 20 bp, synthetic construct
  misc_feature 1..20: note = Description of Artificial Sequence: Synthetic oligonucleotide
  misc_feature 1..20: note = Target: SCN10A; (+) strand; PAM type: YTN; PAM sequence: CTT
  source 1..20: mol_type = other DNA
ccaaattcaaataattgatt

SEQ ID NO: 65696 - DNA, 20 bp, synthetic construct
  misc_feature 1..20: note = Description of Artificial Sequence: Synthetic oligonucleotide
  misc_feature 1..20: note = Target: SCN10A; (+) strand; PAM type: YTN; PAM sequence: TTC
  source 1..20: mol_type = other DNA
caaattcaaataattgattt

SEQ ID NO: 65697 - DNA, 20 bp, synthetic construct
  misc_feature 1..20: note = Description of Artificial Sequence: Synthetic oligonucleotide
  misc_feature 1..20: note = Target: SCN10A; (+) strand; PAM type: YTN; PAM sequence: TTC
  source 1..20: mol_type = other DNA
aaataattgatttccagttc

SEQ ID NO: 65698 - DNA, 20 bp, synthetic construct
  misc_feature 1..20: note = Description of Artificial Sequence: Synthetic oligonucleotide
  misc_feature 1..20: note = Target: SCN10A; (+) strand; PAM type: YTN; PAM sequence: TTG
  source 1..20: mol_type = other DNA
atttccagttctcatcttac

SEQ ID NO: 65699 - DNA, 20 bp, synthetic construct
  misc_feature 1..20: note = Description of Artificial Sequence: Synthetic oligonucleotide
  misc_feature 1..20: note = Target: SCN10A; (+) strand; PAM type: YTN; PAM sequence: TTT
  source 1..20: mol_type = other DNA
ccagttctcatcttaccctt

SEQ ID NO: 65700 - DNA, 20 bp, synthetic construct
  misc_feature 1..20: note = Description of Artificial Sequence: Synthetic oligonucleotide
  misc_feature 1..20: note = Target: SCN10A; (+) strand; PAM type: YTN; PAM sequence: TTC
  source 1..20: mol_type = other DNA
cagttctcatcttaccctta

SEQ ID NO: 65701 - DNA, 20 bp, synthetic construct
  misc_feature 1..20: note = Description of Artificial Sequence: Synthetic oligonucleotide
  misc_feature 1..20: note = Target: SCN10A; (+) strand; PAM type: YTN; PAM sequence: TTC
  source 1..20: mol_type = other DNA
tcatcttacccttataacat

SEQ ID NO: 65702 - DNA, 20 bp, synthetic construct
  misc_feature 1..20: note = Description of Artificial Sequence: Synthetic oligonucleotide
  misc_feature 1..20: note = Target: SCN10A; (+) strand; PAM type: YTN; PAM sequence: CTC
  source 1..20: mol_type = other DNA
atcttacccttataacattt

SEQ ID NO: 65703 - DNA, 20 bp, synthetic construct
  misc_feature 1..20: note = Description of Artificial Sequence: Synthetic oligonucleotide
  misc_feature 1..20: note = Target: SCN10A; (+) strand; PAM type: YTN; PAM sequence: CTT
  source 1..20: mol_type = other DNA
acccttataacatttgacag

SEQ ID NO: 65704 - DNA, 20 bp, synthetic construct
  misc_feature 1..20: note = Description of Artificial Sequence: Synthetic oligonucleotide
  misc_feature 1..20: note = Target: SCN10A; (+) strand; PAM type: YTN; PAM sequence: TTA
  source 1..20: mol_type = other DNA
cccttataacatttgacaga

SEQ ID NO: 65705 - DNA, 20 bp, synthetic construct
  misc_feature 1..20: note = Description of Artificial Sequence: Synthetic oligonucleotide
  misc_feature 1..20: note = Target: SCN10A; (+) strand; PAM type: YTN; PAM sequence: CTT
  source 1..20: mol_type = other DNA
ataacatttgacagaattta

SEQ ID NO: 65706 - DNA, 20 bp, synthetic construct
  misc_feature 1..20: note = Description of Artificial Sequence: Synthetic oligonucleotide
  misc_feature 1..20: note = Target: SCN10A; (+) strand; PAM type: YTN; PAM sequence: TTA
  source 1..20: mol_type = other DNA
taacatttgacagaatttat

SEQ ID NO: 65707 - DNA, 20 bp, synthetic construct
  misc_feature 1..20: note = Description of Artificial Sequence: Synthetic oligonucleotide
  misc_feature 1..20: note = Target: SCN10A; (+) strand; PAM type: YTN; PAM sequence: TTT
  source 1..20: mol_type = other DNA
gacagaatttatattgttct

SEQ ID NO: 65708 - DNA, 20 bp, synthetic construct
  misc_feature 1..20: note = Description of Artificial Sequence: Synthetic oligonucleotide
  misc_feature 1..20: note = Target: SCN10A; (+) strand; PAM type: YTN; PAM sequence: TTG
  source 1..20: mol_type = other DNA
acagaatttatattgttctc

SEQ ID NO: 65709 - DNA, 20 bp, synthetic construct
  misc_feature 1..20: note = Description of Artificial Sequence: Synthetic oligonucleotide
  misc_feature 1..20: note = Target: SCN10A; (+) strand; PAM type: YTN; PAM sequence: TTT
  source 1..20: mol_type = other DNA
atattgttctctttgaaacc

SEQ ID NO: 65710 - DNA, 20 bp, synthetic construct
  misc_feature 1..20: note = Description of Artificial Sequence: Synthetic oligonucleotide
  misc_feature 1..20: note = Target: SCN10A; (+) strand; PAM type: YTN; PAM sequence: TTA
  source 1..20: mol_type = other DNA
tattgttctctttgaaacca

SEQ ID NO: 65711 - DNA, 20 bp, synthetic construct
  misc_feature 1..20: note = Description of Artificial Sequence: Synthetic oligonucleotide
  misc_feature 1..20: note = Target: SCN10A; (+) strand; PAM type: YTN; PAM sequence: TTG
  source 1..20: mol_type = other DNA
ttctctttgaaaccagtgtt

SEQ ID NO: 65712 - DNA, 20 bp, synthetic construct
  misc_feature 1..20: note = Description of Artificial Sequence: Synthetic oligonucleotide
  misc_feature 1..20: note = Target: SCN10A; (+) strand; PAM type: YTN; PAM sequence: TTC
  source 1..20: mol_type = other DNA
tctttgaaaccagtgttcat

SEQ ID NO: 65713 - DNA, 20 bp, synthetic construct
  misc_feature 1..20: note = Description of Artificial Sequence: Synthetic oligonucleotide
  misc_feature 1..20: note = Target: SCN10A; (+) strand; PAM type: YTN; PAM sequence: CTC
  source 1..20: mol_type = other DNA
tttgaaaccagtgttcattt

SEQ ID NO: 65714 - DNA, 20 bp, synthetic construct
  misc_feature 1..20: note = Description of Artificial Sequence: Synthetic oligonucleotide
  misc_feature 1..20: note = Target: SCN10A; (+) strand; PAM type: YTN; PAM sequence: CTT
  source 1..20: mol_type = other DNA
tgaaaccagtgttcatttgg

SEQ ID NO: 65715 - DNA, 20 bp, synthetic construct
  misc_feature 1..20: note = Description of Artificial Sequence: Synthetic oligonucleotide
  misc_feature 1..20: note = Target: SCN10A; (+) strand; PAM type: YTN; PAM sequence: TTT
  source 1..20: mol_type = other DNA
gaaaccagtgttcatttggc

SEQ ID NO: 65716 - DNA, 20 bp, synthetic construct
  misc_feature 1..20: note = Description of Artificial Sequence: Synthetic oligonucleotide
  misc_feature 1..20: note = Target: SCN10A; (+) strand; PAM type: YTN; PAM sequence: TTG
  source 1..20: mol_type = other DNA
aaaccagtgttcatttggct

SEQ ID NO: 65717 - DNA, 20 bp, synthetic construct
  misc_feature 1..20: note = Description of Artificial Sequence: Synthetic oligonucleotide
  misc_feature 1..20: note = Target: SCN10A; (+) strand; PAM type: YTN; PAM sequence: TTC
  source 1..20: mol_type = other DNA
atttggctctggggactgca

SEQ ID NO: 65718 - DNA, 20 bp, synthetic construct
  misc_feature 1..20: note = Description of Artificial Sequence: Synthetic oligonucleotide
  misc_feature 1..20: note = Target: SCN10A; (+) strand; PAM type: YTN; PAM sequence: TTT
  source 1..20: mol_type = other DNA
ggctctggggactgcatcat

SEQ ID NO: 65719 - DNA, 20 bp, synthetic construct
  misc_feature 1..20: note = Description of Artificial Sequence: Synthetic oligonucleotide
  misc_feature 1..20: note = Target: SCN10A; (+) strand; PAM type: YTN; PAM sequence: TTG
  source 1..20: mol_type = other DNA
gctctggggactgcatcatc

SEQ ID NO: 65720 - DNA, 20 bp, synthetic construct
  misc_feature 1..20: note = Description of Artificial Sequence: Synthetic oligonucleotide
  misc_feature 1..20: note = Target: SCN10A; (+) strand; PAM type: YTN; PAM sequence: CTC
  source 1..20: mol_type = other DNA
tggggactgcatcatctctt

SEQ ID NO: 65721 - DNA, 20 bp, synthetic construct
  misc_feature 1..20: note = Description of Artificial Sequence: Synthetic oligonucleotide
  misc_feature 1..20: note = Target: SCN10A; (+) strand; PAM type: YTN; PAM sequence: CTG
  source 1..20: mol_type = other DNA
gggactgcatcatctcttgc

SEQ ID NO: 65722 - DNA, 20 bp, synthetic construct
  misc_feature 1..20: note = Description of Artificial Sequence: Synthetic oligonucleotide
  misc_feature 1..20: note = Target: SCN10A; (+) strand; PAM type: YTN; PAM sequence: CTG
  source 1..20: mol_type = other DNA
catcatctcttgctttttct

SEQ ID NO: 65723 - DNA, 20 bp, synthetic construct
  misc_feature 1..20: note = Description of Artificial Sequence: Synthetic oligonucleotide
  misc_feature 1..20: note = Target: SCN10A; (+) strand; PAM type: YTN; PAM sequence: CTC
  source 1..20: mol_type = other DNA
ttgctttttctcccatattt

SEQ ID NO: 65724 - DNA, 20 bp, synthetic construct
  misc_feature 1..20: note = Description of Artificial Sequence: Synthetic oligonucleotide
  misc_feature 1..20: note = Target: SCN10A; (+) strand; PAM type: YTN; PAM sequence: CTT
  source 1..20: mol_type = other DNA
gctttttctcccatatttct

SEQ ID NO: 65725 - DNA, 20 bp, synthetic construct
  misc_feature 1..20: note = Description of Artificial Sequence: Synthetic oligonucleotide
  misc_feature 1..20: note = Target: SCN10A; (+) strand; PAM type: YTN; PAM sequence: TTG
  source 1..20: mol_type = other DNA
ctttttctcccatatttctc

SEQ ID NO: 65726 - DNA, 20 bp, synthetic construct
  misc_feature 1..20: note = Description of Artificial Sequence: Synthetic oligonucleotide
  misc_feature 1..20: note = Target: SCN10A; (+) strand; PAM type: YTN; PAM sequence: CTT
  source 1..20: mol_type = other DNA
tttctcccatatttctccac

SEQ ID NO: 65727 - DNA, 20 bp, synthetic construct
  misc_feature 1..20: note = Description of Artificial Sequence: Synthetic oligonucleotide
  misc_feature 1..20: note = Target: SCN10A; (+) strand; PAM type: YTN; PAM sequence: TTT
  source 1..20: mol_type = other DNA
ttctcccatatttctccact

SEQ ID NO: 65728 - DNA, 20 bp, synthetic construct
  misc_feature 1..20: note = Description of Artificial Sequence: Synthetic oligonucleotide
  misc_feature 1..20: note = Target: SCN10A; (+) strand; PAM type: YTN; PAM sequence: TTT
  source 1..20: mol_type = other DNA
tctcccatatttctccactt

SEQ ID NO: 65729 - DNA, 20 bp, synthetic construct
  misc_feature 1..20: note = Description of Artificial Sequence: Synthetic oligonucleotide
  misc_feature 1..20: note = Target: SCN10A; (+) strand; PAM type: YTN; PAM sequence: TTT
  source 1..20: mol_type = other DNA
ctcccatatttctccacttc

SEQ ID NO: 65730 - DNA, 20 bp, synthetic construct
  misc_feature 1..20: note = Description of Artificial Sequence: Synthetic oligonucleotide
  misc_feature 1..20: note = Target: SCN10A; (+) strand; PAM type: YTN; PAM sequence: TTC
  source 1..20: mol_type = other DNA
tcccatatttctccacttct

SEQ ID NO: 65731 - DNA, 20 bp, synthetic construct
  misc_feature 1..20: note = Description of Artificial Sequence: Synthetic oligonucleotide
  misc_feature 1..20: note = Target: SCN10A; (+) strand; PAM type: YTN; PAM sequence: CTC
  source 1..20: mol_type = other DNA
ccatatttctccacttcttt

SEQ ID NO: 65732 - DNA, 20 bp, synthetic construct
  misc_feature 1..20: note = Description of Artificial Sequence: Synthetic oligonucleotide
  misc_feature 1..20: note = Target: SCN10A; (+) strand; PAM type: YTN; PAM sequence: TTT
  source 1..20: mol_type = other DNA
ctccacttcttttcactttc

SEQ ID NO: 65733 - DNA, 20 bp, synthetic construct
  misc_feature 1..20: note = Description of Artificial Sequence: Synthetic oligonucleotide
  misc_feature 1..20: note = Target: SCN10A; (+) strand; PAM type: YTN; PAM sequence: TTC
  source 1..20: mol_type = other DNA
tccacttcttttcactttct

SEQ ID NO: 65734 - DNA, 20 bp, synthetic construct
  misc_feature 1..20: note = Description of Artificial Sequence: Synthetic oligonucleotide
  misc_feature 1..20: note = Target: SCN10A; (+) strand; PAM type: YTN; PAM sequence: CTC
  source 1..20: mol_type = other DNA
cacttcttttcactttctgt

SEQ ID NO: 65735 - DNA, 20 bp, synthetic construct
  misc_feature 1..20: note = Description of Artificial Sequence: Synthetic oligonucleotide
  misc_feature 1..20: note = Target: SCN10A; (+) strand; PAM type: YTN; PAM sequence: CTT
  source 1..20: mol_type = other DNA
cttttcactttctgtttttg

SEQ ID NO: 65736 - DNA, 20 bp, synthetic construct
  misc_feature 1..20: note = Description of Artificial Sequence: Synthetic oligonucleotide
  misc_feature 1..20: note = Target: SCN10A; (+) strand; PAM type: YTN; PAM sequence: TTC
  source 1..20: mol_type = other DNA
ttttcactttctgtttttgt

SEQ ID NO: 65737 - DNA, 20 bp, synthetic construct
  misc_feature 1..20: note = Description of Artificial Sequence: Synthetic oligonucleotide
  misc_feature 1..20: note = Target: SCN10A; (+) strand; PAM type: YTN; PAM sequence: CTT
  source 1..20: mol_type = other DNA
ttcactttctgtttttgtct

SEQ ID NO: 65738 - DNA, 20 bp, synthetic construct
  misc_feature 1..20: note = Description of Artificial Sequence: Synthetic oligonucleotide
  misc_feature 1..20: note = Target: SCN10A; (+) strand; PAM type: YTN; PAM sequence: TTT
  source 1..20: mol_type = other DNA
tcactttctgtttttgtctc

SEQ ID NO: 65739 - DNA, 20 bp, synthetic construct
  misc_feature 1..20: note = Description of Artificial Sequence: Synthetic oligonucleotide
  misc_feature 1..20: note = Target: SCN10A; (+) strand; PAM type: YTN; PAM sequence: TTT
  source 1..20: mol_type = other DNA
cactttctgtttttgtctcc

SEQ ID NO: 65740 - DNA, 20 bp, synthetic construct
  misc_feature 1..20: note = Description of Artificial Sequence: Synthetic oligonucleotide
  misc_feature 1..20: note = Target: SCN10A; (+) strand; PAM type: YTN; PAM sequence: TTC
  source 1..20: mol_type = other DNA
actttctgtttttgtctccc

SEQ ID NO: 65741 - DNA, 20 bp, synthetic construct
  misc_feature 1..20: note = Description of Artificial Sequence: Synthetic oligonucleotide
  misc_feature 1..20: note = Target: SCN10A; (+) strand; PAM type: YTN; PAM sequence: CTT
  source 1..20: mol_type = other DNA
tctgtttttgtctccctttt

SEQ ID NO: 65742 - DNA, 20 bp, synthetic construct
  misc_feature 1..20: note = Description of Artificial Sequence: Synthetic oligonucleotide
  misc_feature 1..20: note = Target: SCN10A; (+) strand; PAM type: YTN; PAM sequence: TTT
  source 1..20: mol_type = other DNA
ctgtttttgtctcccttttc

SEQ ID NO: 65743 - DNA, 20 bp, synthetic construct
  misc_feature 1..20: note = Description of Artificial Sequence: Synthetic oligonucleotide
  misc_feature 1..20: note = Target: SCN10A; (+) strand; PAM type: YTN; PAM sequence: TTC
  source 1..20: mol_type = other DNA
tgtttttgtctcccttttcc

SEQ ID NO: 65744 - DNA, 20 bp, synthetic construct
  misc_feature 1..20: note = Description of Artificial Sequence: Synthetic oligonucleotide
  misc_feature 1..20: note = Target: SCN10A; (+) strand; PAM type: YTN; PAM sequence: CTG
  source 1..20: mol_type = other DNA
tttttgtctcccttttcctt

SEQ ID NO: 65745 - DNA, 20 bp, synthetic construct
  misc_feature 1..20: note = Description of Artificial Sequence: Synthetic oligonucleotide
  misc_feature 1..20: note = Target: SCN10A; (+) strand; PAM type: YTN; PAM sequence: TTT
  source 1..20: mol_type = other DNA
ttgtctcccttttcctttcc

SEQ ID NO: 65746 - DNA, 20 bp, synthetic construct
  misc_feature 1..20: note = Description of Artificial Sequence: Synthetic oligonucleotide
  misc_feature 1..20: note = Target: SCN10A; (+) strand; PAM type: YTN; PAM sequence: TTT
  source 1..20: mol_type = other DNA
tgtctcccttttcctttcct

SEQ ID NO: 65747 - DNA, 20 bp, synthetic construct
  misc_feature 1..20: note = Description of Artificial Sequence: Synthetic oligonucleotide
  misc_feature 1..20: note = Target: SCN10A; (+) strand; PAM type: YTN; PAM sequence: TTT
  source 1..20: mol_type = other DNA
gtctcccttttcctttcctg

SEQ ID NO: 65748 - DNA, 20 bp, synthetic construct
  misc_feature 1..20: note = Description of Artificial Sequence: Synthetic oligonucleotide
  misc_feature 1..20: note = Target: SCN10A; (+) strand; PAM type: YTN; PAM sequence: TTG
  source 1..20: mol_type = other DNA
tctcccttttcctttcctgc

SEQ ID NO: 65749 - DNA, 20 bp, synthetic construct
  misc_feature 1..20: note = Description of Artificial Sequence: Synthetic oligonucleotide
  misc_feature 1..20: note = Target: SCN10A; (+) strand; PAM type: YTN; PAM sequence: CTC
  source 1..20: mol_type = other DNA
ccttttcctttcctgcttgt

SEQ ID NO: 65750 - DNA, 20 bp, synthetic construct
  misc_feature 1..20: note = Description of Artificial Sequence: Synthetic oligonucleotide
  misc_feature 1..20: note = Target: SCN10A; (+) strand; PAM type: YTN; PAM sequence: CTT
  source 1..20: mol_type = other DNA
ttcctttcctgcttgtaaat

SEQ ID NO: 65751 - DNA, 20 bp, synthetic construct
  misc_feature 1..20: note = Description of Artificial Sequence: Synthetic oligonucleotide
  misc_feature 1..20: note = Target: SCN10A; (+) strand; PAM type: YTN; PAM sequence: TTT
  source 1..20: mol_type = other DNA
tcctttcctgcttgtaaatg

SEQ ID NO: 65752 - DNA, 20 bp, synthetic construct
  misc_feature 1..20: note = Description of Artificial Sequence: Synthetic oligonucleotide
  misc_feature 1..20: note = Target: SCN10A; (+) strand; PAM type: YTN; PAM sequence: TTT
  source 1..20: mol_type = other DNA
cctttcctgcttgtaaatgt

SEQ ID NO: 65753 - DNA, 20 bp, synthetic construct
  misc_feature 1..20: note = Description of Artificial Sequence: Synthetic oligonucleotide
  misc_feature 1..20: note = Target: SCN10A; (+) strand; PAM type: YTN; PAM sequence: TTC
  source 1..20: mol_type = other DNA
ctttcctgcttgtaaatgtt

SEQ ID NO: 65754 - DNA, 20 bp, synthetic construct
  misc_feature 1..20: note = Description of Artificial Sequence: Synthetic oligonucleotide
  misc_feature 1..20: note = Target: SCN10A; (+) strand; PAM type: YTN; PAM sequence: CTT
  source 1..20: mol_type = other DNA
tcctgcttgtaaatgttgaa

SEQ ID NO: 65755 - DNA, 20 bp, synthetic construct
  misc_feature 1..20: note = Description of Artificial Sequence: Synthetic oligonucleotide
  misc_feature 1..20: note = Target: SCN10A; (+) strand; PAM type: YTN; PAM sequence: TTT
  source 1..20: mol_type = other DNA
cctgcttgtaaatgttgaat

SEQ ID NO: 65756 - DNA, 20 bp, synthetic construct
  misc_feature 1..20: note = Description of Artificial Sequence: Synthetic oligonucleotide
  misc_feature 1..20: note = Target: SCN10A; (+) strand; PAM type: YTN; PAM sequence: TTC
  source 1..20: mol_type = other DNA
ctgcttgtaaatgttgaata

SEQ ID NO: 65757 - DNA, 20 bp, synthetic construct
  misc_feature 1..20: note = Description of Artificial Sequence: Synthetic oligonucleotide
  misc_feature 1..20: note = Target: SCN10A; (+) strand; PAM type: YTN; PAM sequence: CTG
  source 1..20: mol_type = other DNA
cttgtaaatgttgaataact

SEQ ID NO: 65758 - DNA, 20 bp, synthetic construct
  misc_feature 1..20: note = Description of Artificial Sequence: Synthetic oligonucleotide
  misc_feature 1..20: note = Target: SCN10A; (+) strand; PAM type: YTN; PAM sequence: CTT
  source 1..20: mol_type = other DNA
gtaaatgttgaataactcaa

SEQ ID NO: 65759 - DNA, 20 bp, synthetic construct
  misc_feature 1..20: note = Description of Artificial Sequence: Synthetic oligonucleotide
  misc_feature 1..20: note = Target: SCN10A; (+) strand; PAM type: YTN; PAM sequence: TTG
  source 1..20: mol_type = other DNA
taaatgttgaataactcaag

SEQ ID NO: 65760 - DNA, 20 bp, synthetic construct
  misc_feature 1..20: note = Description of Artificial Sequence: Synthetic oligonucleotide
  misc_feature 1..20: note = Target: SCN10A; (+) strand; PAM type: YTN; PAM sequence: TTG
  source 1..20: mol_type = other DNA
aataactcaagcattctcac

SEQ ID NO: 65761 - DNA, 20 bp, synthetic construct
  misc_feature 1..20: note = Description of Artificial Sequence: Synthetic oligonucleotide
  misc_feature 1..20: note = Target: SCN10A; (+) strand; PAM type: YTN; PAM sequence: CTC
  source 1..20: mol_type = other DNA
aagcattctcaccttagctt

SEQ ID NO: 65762 - DNA, 20 bp, synthetic construct
  misc_feature 1..20: note = Description of Artificial Sequence: Synthetic oligonucleotide
  misc_feature 1..20: note = Target: SCN10A; (+) strand; PAM type: YTN; PAM sequence: TTC
  source 1..20: mol_type = other DNA
tcaccttagcttctctgtgt

SEQ ID NO: 65763 - DNA, 20 bp, synthetic construct
  misc_feature 1..20: note = Description of Artificial Sequence: Synthetic oligonucleotide
  misc_feature 1..20: note = Target: SCN10A; (+) strand; PAM type: YTN; PAM sequence: CTC
  source 1..20: mol_type = other DNA
accttagcttctctgtgttt

SEQ ID NO: 65764 - DNA, 20 bp, synthetic construct
  misc_feature 1..20: note = Description of Artificial Sequence: Synthetic oligonucleotide
  misc_feature 1..20: note = Target: SCN10A; (+) strand; PAM type: YTN; PAM sequence: CTT
  source 1..20: mol_type = other DNA
agcttctctgtgtttttgaa

SEQ ID NO: 65765 - DNA, 20 bp, synthetic construct
  misc_feature 1..20: note = Description of Artificial Sequence: Synthetic oligonucleotide
  misc_feature 1..20: note = Target: SCN10A; (+) strand; PAM type: YTN; PAM sequence: TTA
  source 1..20: mol_type = other DNA
gcttctctgtgtttttgaat

SEQ ID NO: 65766 - DNA, 20 bp, synthetic construct
  misc_feature 1..20: note = Description of Artificial Sequence: Synthetic oligonucleotide
  misc_feature 1..20: note = Target: SCN10A; (+) strand; PAM type: YTN; PAM sequence: CTT
  source 1..20: mol_type = other DNA
ctctgtgtttttgaatctca

SEQ ID NO: 65767 - DNA, 20 bp, synthetic construct
  misc_feature 1..20: note = Description of Artificial Sequence: Synthetic oligonucleotide
  misc_feature 1..20: note = Target: SCN10A; (+) strand; PAM type: YTN; PAM sequence: TTC
  source 1..20: mol_type = other DNA
tctgtgtttttgaatctcat

SEQ ID NO: 65768 - DNA, 20 bp, synthetic construct
  misc_feature 1..20: note = Description of Artificial Sequence: Synthetic oligonucleotide
  misc_feature 1..20: note = Target: SCN10A; (+) strand; PAM type: YTN; PAM sequence: CTC
  source 1..20: mol_type = other DNA
tgtgtttttgaatctcatag

SEQ ID NO: 65769 - DNA, 20 bp, synthetic construct
  misc_feature 1..20: note = Description of Artificial Sequence: Synthetic oligonucleotide
  misc_feature 1..20: note = Target: SCN10A; (+) strand; PAM type: YTN; PAM sequence: CTG
  source 1..20: mol_type = other DNA
tgtttttgaatctcatagcc

SEQ ID NO: 65770 - DNA, 20 bp, synthetic construct
  misc_feature 1..20: note = Description of Artificial Sequence: Synthetic oligonucleotide
  misc_feature 1..20: note = Target: SCN10A; (+) strand; PAM type: YTN; PAM sequence: TTT
  source 1..20: mol_type = other DNA
ttgaatctcatagccctaaa

SEQ ID NO: 65771 - DNA, 20 bp, synthetic construct
  misc_feature 1..20: note = Description of Artificial Sequence: Synthetic oligonucleotide
  misc_feature 1..20: note = Target: SCN10A; (+) strand; PAM type: YTN; PAM sequence: TTT
  source 1..20: mol_type = other DNA
tgaatctcatagccctaaaa

SEQ ID NO: 65772 - DNA, 20 bp, synthetic construct
  misc_feature 1..20: note = Description of Artificial Sequence: Synthetic oligonucleotide
  misc_feature 1..20: note = Target: SCN10A; (+) strand; PAM type: YTN; PAM sequence: TTT
  source 1..20: mol_type = other DNA
gaatctcatagccctaaaaa

SEQ ID NO: 65773 - DNA, 20 bp, synthetic construct
  misc_feature 1..20: note = Description of Artificial Sequence: Synthetic oligonucleotide
  misc_feature 1..20: note = Target: SCN10A; (+) strand; PAM type: YTN; PAM sequence: TTG
  source 1..20: mol_type = other DNA
aatctcatagccctaaaaaa

SEQ ID NO: 65774 - DNA, 20 bp, synthetic construct
  misc_feature 1..20: note = Description of Artificial Sequence: Synthetic oligonucleotide
  misc_feature 1..20: note = Target: SCN10A; (+) strand; PAM type: YTN; PAM sequence: CTC
  source 1..20: mol_type = other DNA
atagccctaaaaaaccatct

SEQ ID NO: 65775 - DNA, 20 bp, synthetic construct
  misc_feature 1..20: note = Description of Artificial Sequence: Synthetic oligonucleotide
  misc_feature 1..20: note = Target: SCN10A; (+) strand; PAM type: YTN; PAM sequence: CTA
  source 1..20: mol_type = other DNA
aaaaaccatctctatgccaa

SEQ ID NO: 65776 - DNA, 20 bp, synthetic construct
  misc_feature 1..20: note = Description of Artificial Sequence: Synthetic oligonucleotide
  misc_feature 1..20: note = Target: SCN10A; (+) strand; PAM type: YTN; PAM sequence: CTC
  source 1..20: mol_type = other DNA
tatgccaattcccaccaaat

SEQ ID NO: 65777 - DNA, 20 bp, synthetic construct
  misc_feature 1..20: note = Description of Artificial Sequence: Synthetic oligonucleotide
  misc_feature 1..20: note = Target: SCN10A; (+) strand; PAM type: YTN; PAM sequence: CTA
  source 1..20: mol_type = other DNA
tgccaattcccaccaaatta

SEQ ID NO: 65778 - DNA, 20 bp, synthetic construct
  misc_feature 1..20: note = Description of Artificial Sequence: Synthetic oligonucleotide
  misc_feature 1..20: note = Target: SCN10A; (+) strand; PAM type: YTN; PAM sequence: TTC
  source 1..20: mol_type = other DNA
ccaccaaattatgtgtccaa

SEQ ID NO: 65779 - DNA, 20 bp, synthetic construct
  misc_feature 1..20: note = Description of Artificial Sequence: Synthetic oligonucleotide
  misc_feature 1..20: note = Target: SCN10A; (+) strand; PAM type: YTN; PAM sequence: TTA
  source 1..20: mol_type = other DNA
tgtgtccaatttctgatccc

SEQ ID NO: 65780 - DNA, 20 bp, synthetic construct
  misc_feature 1..20: note = Description of Artificial Sequence: Synthetic oligonucleotide
  misc_feature 1..20: note = Target: SCN10A; (+) strand; PAM type: YTN; PAM sequence: TTT
  source 1..20: mol_type = other DNA
ctgatcccttcctgaacact

SEQ ID NO: 65781 - DNA, 20 bp, synthetic construct
  misc_feature 1..20: note = Description of Artificial Sequence: Synthetic oligonucleotide
  misc_feature 1..20: note = Target: SCN10A; (+) strand; PAM type: YTN; PAM sequence: TTC
  source 1..20: mol_type = other DNA
tgatcccttcctgaacacta

SEQ ID NO: 65782 - DNA, 20 bp, synthetic construct
  misc_feature 1..20: note = Description of Artificial Sequence: Synthetic oligonucleotide
  misc_feature 1..20: note = Target: SCN10A; (+) strand; PAM type: YTN; PAM sequence: CTG
  source 1..20: mol_type = other DNA
atcccttcctgaacactagg

SEQ ID NO: 65783 - DNA, 20 bp, synthetic construct
  misc_feature 1..20: note = Description of Artificial Sequence: Synthetic oligonucleotide
  misc_feature 1..20: note = Target: SCN10A; (+) strand; PAM type: YTN; PAM sequence: CTT
  source 1..20: mol_type = other DNA
cctgaacactaggcttatct

SEQ ID NO: 65784 - DNA, 20 bp, synthetic construct
  misc_feature 1..20: note = Description of Artificial Sequence: Synthetic oligonucleotide
  misc_feature 1..20: note = Target: SCN10A; (+) strand; PAM type: YTN; PAM sequence: TTC
  source 1..20: mol_type = other DNA
ctgaacactaggcttatctc

SEQ ID NO: 65785 - DNA, 20 bp, synthetic construct
  misc_feature 1..20: note = Description of Artificial Sequence: Synthetic oligonucleotide
  misc_feature 1..20: note = Target: SCN10A; (+) strand; PAM type: YTN; PAM sequence: CTG
  source 1..20: mol_type = other DNA
aacactaggcttatctctct

SEQ ID NO: 65786 - DNA, 20 bp, synthetic construct
  misc_feature 1..20: note = Description of Artificial Sequence: Synthetic oligonucleotide
  misc_feature 1..20: note = Target: SCN10A; (+) strand; PAM type: YTN; PAM sequence: CTA
  source 1..20: mol_type = other DNA
ggcttatctctctacctgcc

SEQ ID NO: 65787 - DNA, 20 bp, synthetic construct
  misc_feature 1..20: note = Description of Artificial Sequence: Synthetic oligonucleotide
  misc_feature 1..20: note = Target: SCN10A; (+) strand; PAM type: YTN; PAM sequence: CTT
  source 1..20: mol_type = other DNA
atctctctacctgcctccgt

SEQ ID NO: 65788 - DNA, 20 bp, synthetic construct
  misc_feature 1..20: note = Description of Artificial Sequence: Synthetic oligonucleotide
  misc_feature 1..20: note = Target: SCN10A; (+) strand; PAM type: YTN; PAM sequence: TTA
  source 1..20: mol_type = other DNA
tctctctacctgcctccgtt

SEQ ID NO: 65789 - DNA, 20 bp, synthetic construct
  misc_feature 1..20: note = Description of Artificial Sequence: Synthetic oligonucleotide
  misc_feature 1..20: note = Target: SCN10A; (+) strand; PAM type: YTN; PAM sequence: CTC
  source 1..20: mol_type = other DNA
tctacctgcctccgttaaat

SEQ ID NO: 65790 - DNA, 20 bp, synthetic construct
  misc_feature 1..20: note = Description of Artificial Sequence: Synthetic oligonucleotide
  misc_feature 1..20: note = Target: SCN10A; (+) strand; PAM type: YTN; PAM sequence: CTC
  source 1..20: mol_type = other DNA
tacctgcctccgttaaatct

SEQ ID NO: 65791 - DNA, 20 bp, synthetic construct
  misc_feature 1..20: note = Description of Artificial Sequence: Synthetic oligonucleotide
  misc_feature 1..20: note = Target: SCN10A; (+) strand; PAM type: YTN; PAM sequence: CTA
  source 1..20: mol_type = other DNA
cctgcctccgttaaatctcc

SEQ ID NO: 65792 - DNA, 20 bp, synthetic construct
  misc_feature 1..20: note = Description of Artificial Sequence: Synthetic oligonucleotide
  misc_feature 1..20: note = Target: SCN10A; (+) strand; PAM type: YTN; PAM sequence: CTG
  source 1..20: mol_type = other DNA
cctccgttaaatctccatgt

SEQ ID NO: 65793 - DNA, 20 bp, synthetic construct
  misc_feature 1..20: note = Description of Artificial Sequence: Synthetic oligonucleotide
  misc_feature 1..20: note = Target: SCN10A; (+) strand; PAM type: YTN; PAM sequence: CTC
  source 1..20: mol_type = other DNA
cgttaaatctccatgtggat

SEQ ID NO: 65794 - DNA, 20 bp, synthetic construct
  misc_feature 1..20: note = Description of Artificial Sequence: Synthetic oligonucleotide
  misc_feature 1..20: note = Target: SCN10A; (+) strand; PAM type: YTN; PAM sequence: TTA
  source 1..20: mol_type = other DNA
aatctccatgtggatgtgta

SEQ ID NO: 65795 - DNA, 20 bp, synthetic construct
  misc_feature 1..20: note = Description of Artificial Sequence: Synthetic oligonucleotide
  misc_feature 1..20: note = Target: SCN10A; (+) strand; PAM type: YTN; PAM sequence: CTC
  source 1..20: mol_type = other DNA
catgtggatgtgtaactgtg

SEQ ID NO: 65796 - DNA, 20 bp, synthetic construct
  misc_feature 1..20: note = Description of Artificial Sequence: Synthetic oligonucleotide
  misc_feature 1..20: note = Target: SCN10A; (+) strand; PAM type: YTN; PAM sequence: CTG
  source 1..20: mol_type = other DNA
tgttcacctcgatggagggc

SEQ ID NO: 65797 - DNA, 20 bp, synthetic construct
  misc_feature 1..20: note = Description of Artificial Sequence: Synthetic oligonucleotide
  misc_feature 1..20: note = Target: SCN10A; (+) strand; PAM type: YTN; PAM sequence: TTC
  source 1..20: mol_type = other DNA
acctcgatggagggcaattt

SEQ ID NO: 65798 - DNA, 20 bp, synthetic construct
  misc_feature 1..20: note = Description of Artificial Sequence: Synthetic oligonucleotide
  misc_feature 1..20: note = Target: SCN10A; (+) strand; PAM type: YTN; PAM sequence: CTC
  source 1..20: mol_type = other DNA
gatggagggcaatttcttag

SEQ ID NO: 65799 - DNA, 20 bp, synthetic construct
  misc_feature 1..20: note = Description of Artificial Sequence: Synthetic oligonucleotide
  misc_feature 1..20: note = Target: SCN10A; (+) strand; PAM type: YTN; PAM sequence: TTT
  source 1..20: mol_type = other DNA
cttagctttaggtttatcta

SEQ ID NO: 65800 - DNA, 20 bp, synthetic construct
  misc_feature 1..20: note = Description of Artificial Sequence: Synthetic oligonucleotide
  misc_feature 1..20: note = Target: SCN10A; (+) strand; PAM type: YTN; PAM sequence: TTC
  source 1..20: mol_type = other DNA
ttagctttaggtttatctat

SEQ ID NO: 65801 - DNA, 20 bp, synthetic construct
  misc_feature 1..20: note = Description of Artificial Sequence: Synthetic oligonucleotide
  misc_feature 1..20: note = Target: SCN10A; (+) strand; PAM type: YTN; PAM sequence: CTT
  source 1..20: mol_type = other DNA
agctttaggtttatctataa

SEQ ID NO: 65802 - DNA, 20 bp, synthetic construct
  misc_feature 1..20: note = Description of Artificial Sequence: Synthetic oligonucleotide
  misc_feature 1..20: note = Target: SCN10A; (+) strand; PAM type: YTN; PAM sequence: TTA
  source 1..20: mol_type = other DNA
gctttaggtttatctataaa

SEQ ID NO: 65803 - DNA, 20 bp, synthetic construct
  misc_feature 1..20: note = Description of Artificial Sequence: Synthetic oligonucleotide
  misc_feature 1..20: note = Target: SCN10A; (+) strand; PAM type: YTN; PAM sequence: CTT
  source 1..20: mol_type = other DNA
taggtttatctataaattcc

SEQ ID NO: 65804 - DNA, 20 bp, synthetic construct
  misc_feature 1..20: note = Description of Artificial Sequence: Synthetic oligonucleotide
  misc_feature 1..20: note = Target: SCN10A; (+) strand; PAM type: YTN; PAM sequence: TTT
  source 1..20: mol_type = other DNA
aggtttatctataaattcct

SEQ ID NO: 65805 - DNA, 20 bp, synthetic construct
  misc_feature 1..20: note = Description of Artificial Sequence: Synthetic oligonucleotide
  misc_feature 1..20: note = Target: SCN10A; (+) strand; PAM type: YTN; PAM sequence: TTA
  source 1..20: mol_type = other DNA
ggtttatctataaattcctc

SEQ ID NO: 65806 - DNA, 20 bp, synthetic construct
  misc_feature 1..20: note = Description of Artificial Sequence: Synthetic oligonucleotide
  misc_feature 1..20: note = Target: SCN10A; (+) strand; PAM type: YTN; PAM sequence: TTT
  source 1..20: mol_type = other DNA
atctataaattcctcggcaa

SEQ ID NO: 65807 - DNA, 20 bp, synthetic construct
  misc_feature 1..20: note = Description of Artificial Sequence: Synthetic oligonucleotide
  misc_feature 1..20: note = Target: SCN10A; (+) strand; PAM type: YTN; PAM sequence: TTA
  source 1..20: mol_type = other DNA
tctataaattcctcggcaag

SEQ ID NO: 65808 - DNA, 20 bp, synthetic construct
  misc_feature 1..20: note = Description of Artificial Sequence: Synthetic oligonucleotide
  misc_feature 1..20: note = Target: SCN10A; (+) strand; PAM type: YTN; PAM sequence: CTA
  source 1..20: mol_type = other DNA
taaattcctcggcaagacat

SEQ ID NO: 65809 - DNA, 20 bp, synthetic construct
  misc_feature 1..20: note = Description of Artificial Sequence: Synthetic oligonucleotide
  misc_feature 1..20: note = Target: SCN10A; (+) strand; PAM type: YTN; PAM sequence: TTC
  source 1..20: mol_type = other DNA
ctcggcaagacatgcatctt

SEQ ID NO: 65810 - DNA, 20 bp, synthetic construct
  misc_feature 1..20: note = Description of Artificial Sequence: Synthetic oligonucleotide
  misc_feature 1..20: note = Target: SCN10A; (+) strand; PAM type: YTN; PAM sequence: CTC
  source 1..20: mol_type = other DNA
ggcaagacatgcatcttgaa

SEQ ID NO: 65811 - DNA, 20 bp, synthetic construct
  misc_feature 1..20: note = Description of Artificial Sequence: Synthetic oligonucleotide
  misc_feature 1..20: note = Target: SCN10A; (+) strand; PAM type: YTN; PAM sequence: CTT
  source 1..20: mol_type = other DNA
gaacagatatcagcctatgt

SEQ ID NO: 65812 - DNA, 20 bp, synthetic construct
  misc_feature 1..20: note = Description of Artificial Sequence: Synthetic oligonucleotide
  misc_feature 1..20: note = Target: SCN10A; (+) strand; PAM type: YTN; PAM sequence: TTG
  source 1..20: mol_type = other DNA
aacagatatcagcctatgtg

SEQ ID NO: 65813 - DNA, 20 bp, synthetic construct
  misc_feature 1..20: note = Description of Artificial Sequence: Synthetic oligonucleotide
  misc_feature 1..20: note = Target: SCN10A; (+) strand; PAM type: YTN; PAM sequence: CTA
  source 1..20: mol_type = other DNA
tgtgggcaaagaaagatgat

SEQ ID NO: 65814 - DNA, 20 bp, synthetic construct
  misc_feature 1..20: note = Description of Artificial Sequence: Synthetic oligonucleotide
  misc_feature 1..20: note = Target: SCN10A; (+) strand; PAM type: YTN; PAM sequence: TTG
  source 1..20: mol_type = other DNA
tttataataataatggaaaa

SEQ ID NO: 65815 - DNA, 20 bp, synthetic construct
  misc_feature 1..20: note = Description of Artificial Sequence: Synthetic oligonucleotide
  misc_feature 1..20: note = Target: SCN10A; (+) strand; PAM type: YTN; PAM sequence: TTT
  source 1..20: mol_type = other DNA
ataataataatggaaaacaa

SEQ ID NO: 65816 - DNA, 20 bp, synthetic construct
  misc_feature 1..20: note = Description of Artificial Sequence: Synthetic oligonucleotide
  misc_feature 1..20: note = Target: SCN10A; (+) strand; PAM type: YTN; PAM sequence: TTA
  source 1..20: mol_type = other DNA
taataataatggaaaacaac

SEQ ID NO: 65817 - DNA, 20 bp, synthetic construct
  misc_feature 1..20: note = Description of Artificial Sequence: Synthetic oligonucleotide
  misc_feature 1..20: note = Target: SCN10A; (+) strand; PAM type: YTN; PAM sequence: CTG
  source 1..20: mol_type = other DNA
ataaagcataatacattgtg

SEQ ID NO: 65818 - DNA, 20 bp, synthetic construct
  misc_feature 1..20: note = Description of Artificial Sequence: Synthetic oligonucleotide
  misc_feature 1..20: note = Target: SCN10A; (+) strand; PAM type: YTN; PAM sequence: TTG
  source 1..20: mol_type = other DNA
tgaaaaagaatgaggcagat

SEQ ID NO: 65819 - DNA, 20 bp, synthetic construct
  misc_feature 1..20: note = Description of Artificial Sequence: Synthetic oligonucleotide
  misc_feature 1..20: note = Target: SCN10A; (+) strand; PAM type: YTN; PAM sequence: TTT
  source 1..20: mol_type = other DNA
atttgtggtgatgtagaaaa

SEQ ID NO: 65820 - DNA, 20 bp, synthetic construct
  misc_feature 1..20: note = Description of Artificial Sequence: Synthetic oligonucleotide
  misc_feature 1..20: note = Target: SCN10A; (+) strand; PAM type: YTN; PAM sequence: TTA
  source 1..20: mol_type = other DNA
tttgtggtgatgtagaaaaa

SEQ ID NO: 65821 - DNA, 20 bp, synthetic construct
  misc_feature 1..20: note = Description of Artificial Sequence: Synthetic oligonucleotide
  misc_feature 1..20: note = Target: SCN10A; (+) strand; PAM type: YTN; PAM sequence: TTT
  source 1..20: mol_type = other DNA
gtggtgatgtagaaaaatat

SEQ ID NO: 65822 - DNA, 20 bp, synthetic construct
  misc_feature 1..20: note = Description of Artificial Sequence: Synthetic oligonucleotide
  misc_feature 1..20: note = Target: SCN10A; (+) strand; PAM type: YTN; PAM sequence: TTG
  source 1..20: mol_type = other DNA
tggtgatgtagaaaaatatg

SEQ ID NO: 65823 - DNA, 20 bp, synthetic construct
  misc_feature 1..20: note = Description of Artificial Sequence: Synthetic oligonucleotide
  misc_feature 1..20: note = Target: SCN10A; (+) strand; PAM type: YTN; PAM sequence: CTT
  source 1..20: mol_type = other DNA
atatatgcatagaacattgc

SEQ ID NO: 65824 - DNA, 20 bp, synthetic construct
  misc_feature 1..20: note = Description of Artificial Sequence: Synthetic oligonucleotide
  misc_feature 1..20: note = Target: SCN10A; (+) strand; PAM type: YTN; PAM sequence: TTA
  source 1..20: mol_type = other DNA
tatatgcatagaacattgct

SEQ ID NO: 65825 - DNA, 20 bp, synthetic construct
  misc_feature 1..20: note = Description of Artificial Sequence: Synthetic oligonucleotide
  misc_feature 1..20: note = Target: SCN10A; (+) strand; PAM type: YTN; PAM sequence: TTG
  source 1..20: mol_type = other DNA
cttgaagaatataagataaa

SEQ ID NO: 65826 - DNA, 20 bp, synthetic construct
  misc_feature 1..20: note = Description of Artificial Sequence: Synthetic oligonucleotide
  misc_feature 1..20: note = Target: SCN10A; (+) strand; PAM type: YTN; PAM sequence: CTT
  source 1..20: mol_type = other DNA
gaagaatataagataaactg

SEQ ID NO: 65827 - DNA, 20 bp, synthetic construct
  misc_feature 1..20: note = Description of Artificial Sequence: Synthetic oligonucleotide
  misc_feature 1..20: note = Target: SCN10A; (+) strand; PAM type: YTN; PAM sequence: TTG
  source 1..20: mol_type = other DNA
aagaatataagataaactgg

SEQ ID NO: 65828 - DNA, 20 bp, synthetic construct
  misc_feature 1..20: note = Description of Artificial Sequence: Synthetic oligonucleotide
  misc_feature 1..20: note = Target: SCN10A; (+) strand; PAM type: YTN; PAM sequence: CTG
  source 1..20: mol_type = other DNA
gagtgggaggggggtgcacc

SEQ ID NO: 65829 - DNA, 20 bp, synthetic construct
  misc_feature 1..20: note = Description of Artificial Sequence: Synthetic oligonucleotide
  misc_feature 1..20: note = Target: SCN10A; (+) strand; PAM type: YTN; PAM sequence: CTG
  source 1..20: mol_type = other DNA
gggagcaggaagggtctata

SEQ ID NO: 65830 - DNA, 20 bp, synthetic construct
  misc_feature 1..20: note = Description of Artificial Sequence: Synthetic oligonucleotide
  misc_feature 1..20: note = Target: SCN10A; (+) strand; PAM type: YTN; PAM sequence: CTA
  source 1..20: mol_type = other DNA
tagtgggaaggagacatagt

SEQ ID NO: 65831 - DNA, 20 bp, synthetic construct
  misc_feature 1..20: note = Description of Artificial Sequence: Synthetic oligonucleotide
  misc_feature 1..20: note = Target: SCN10A; (+) strand; PAM type: YTN; PAM sequence: TTG
  source 1..20: mol_type = other DNA
tcattgcatacacacttgca

SEQ ID NO: 65832 - DNA, 20 bp, synthetic construct
  misc_feature 1..20: note = Description of Artificial Sequence: Synthetic oligonucleotide
  misc_feature 1..20: note = Target: SCN10A; (+) strand; PAM type: YTN; PAM sequence: TTG
  source 1..20: mol_type = other DNA
catacacacttgcagtgttt

SEQ ID NO: 65833 - DNA, 20 bp, synthetic construct
  misc_feature 1..20: note = Description of Artificial Sequence: Synthetic oligonucleotide
  misc_feature 1..20: note = Target: SCN10A; (+) strand; PAM type: YTN; PAM sequence: CTT
  source 1..20: mol_type = other DNA
gcagtgtttagggttttttt

SEQ ID NO: 65834 - DNA, 20 bp, synthetic construct
  misc_feature 1..20: note = Description of Artificial Sequence: Synthetic oligonucleotide
  misc_feature 1..20: note = Target: SCN10A; (+) strand; PAM type: YTN; PAM sequence: TTG
  source 1..20: mol_type = other DNA
cagtgtttagggtttttttt

SEQ ID NO: 65835 - DNA, 20 bp, synthetic construct
  misc_feature 1..20: note = Description of Artificial Sequence: Synthetic oligonucleotide
  misc_feature 1..20: note = Target: SCN10A; (+) strand; PAM type: YTN; PAM sequence: TTT
  source 1..20: mol_type = other DNA
agggttttttttactatatg

SEQ ID NO: 65836 - DNA, 20 bp, synthetic construct
  misc_feature 1..20: note = Description of Artificial Sequence: Synthetic oligonucleotide
  misc_feature 1..20: note = Target: SCN10A; (+) strand; PAM type: YTN; PAM sequence: TTA
  source 1..20: mol_type = other DNA
gggttttttttactatatgc

SEQ ID NO: 65837 - DNA, 20 bp, synthetic construct
  misc_feature 1..20: note = Description of Artificial Sequence: Synthetic oligonucleotide
  misc_feature 1..20: note = Target: SCN10A; (+) strand; PAM type: YTN; PAM sequence: TTT
  source 1..20: mol_type = other DNA
tttttactatatgcacttga

SEQ ID NO: 65838 - DNA, 20 bp, synthetic construct
  misc_feature 1..20: note = Description of Artificial Sequence: Synthetic oligonucleotide
  misc_feature 1..20: note = Target: SCN10A; (+) strand; PAM type: YTN; PAM sequence: TTT
  source 1..20: mol_type = other DNA
ttttactatatgcacttgaa

SEQ ID NO: 65839 - DNA, 20 bp, synthetic construct
  misc_feature 1..20: note = Description of Artificial Sequence: Synthetic oligonucleotide
  misc_feature 1..20: note = Target: SCN10A; (+) strand; PAM type: YTN; PAM sequence: TTT
  source 1..20: mol_type = other DNA
tttactatatgcacttgaaa

SEQ ID NO: 65840 - DNA, 20 bp, synthetic construct
  misc_feature 1..20: note = Description of Artificial Sequence: Synthetic oligonucleotide
  misc_feature 1..20: note = Target: SCN10A; (+) strand; PAM type: YTN; PAM sequence: TTT
  source 1..20: mol_type = other DNA
ttactatatgcacttgaaaa

SEQ ID NO: 65841 - DNA, 20 bp, synthetic construct
  misc_feature 1..20: note = Description of Artificial Sequence: Synthetic oligonucleotide
  misc_feature 1..20: note = Target: SCN10A; (+) strand; PAM type: YTN; PAM sequence: TTT
  source 1..20: mol_type = other DNA
tactatatgcacttgaaaaa

SEQ ID NO: 65842 - DNA, 20 bp, synthetic construct
  misc_feature 1..20: note = Description of Artificial Sequence: Synthetic oligonucleotide
  misc_feature 1..20: note = Target: SCN10A; (+) strand; PAM type: YTN; PAM sequence: TTT
  source 1..20: mol_type = other DNA
actatatgcacttgaaaaat

SEQ ID NO: 65843 - DNA, 20 bp, synthetic construct
  misc_feature 1..20: note = Description of Artificial Sequence: Synthetic oligonucleotide
  misc_feature 1..20: note = Target: SCN10A; (+) strand; PAM type: YTN; PAM sequence: TTA
  source 1..20: mol_type = other DNA
ctatatgcacttgaaaaatc

SEQ ID NO: 65844 - DNA, 20 bp, synthetic construct
  misc_feature 1..20: note = Description of Artificial Sequence: Synthetic oligonucleotide
  misc_feature 1..20: note = Target: SCN10A; (+) strand; PAM type: YTN; PAM sequence: CTA
  source 1..20: mol_type = other DNA
tatgcacttgaaaaatcagt

SEQ ID NO: 65845 - DNA, 20 bp, synthetic construct
  misc_feature 1..20: note = Description of Artificial Sequence: Synthetic oligonucleotide
  misc_feature 1..20: note = Target: SCN10A; (+) strand; PAM type: YTN; PAM sequence: CTT
  source 1..20: mol_type = other DNA
gaaaaatcagtttagagaaa

SEQ ID NO: 65846 - DNA, 20 bp, synthetic construct
  misc_feature 1..20: note = Description of Artificial Sequence: Synthetic oligonucleotide
  misc_feature 1..20: note = Target: SCN10A; (+) strand; PAM type: YTN; PAM sequence: TTG
  source 1..20: mol_type = other DNA
aaaaatcagtttagagaaat

SEQ ID NO: 65847 - DNA, 20 bp, synthetic construct
  misc_feature 1..20: note = Description of Artificial Sequence: Synthetic oligonucleotide
  misc_feature 1..20: note = Target: SCN10A; (+) strand; PAM type: YTN; PAM sequence: TTT
  source 1..20: mol_type = other DNA
agagaaataactgtgtgccc

SEQ ID NO: 65848 - DNA, 20 bp, synthetic construct
  misc_feature 1..20: note = Description of Artificial Sequence: Synthetic oligonucleotide
  misc_feature 1..20: note = Target: SCN10A; (+) strand; PAM type: YTN; PAM sequence: TTA
  source 1..20: mol_type = other DNA
gagaaataactgtgtgcccc

SEQ ID NO: 65849 - DNA, 20 bp, synthetic construct
  misc_feature 1..20: note = Description of Artificial Sequence: Synthetic oligonucleotide
  misc_feature 1..20: note = Target: SCN10A; (+) strand; PAM type: YTN; PAM sequence: CTG
  source 1..20: mol_type = other DNA
tgtgcccccaaattttgcta

SEQ ID NO: 65850 - DNA, 20 bp, synthetic construct
  misc_feature 1..20: note = Description of Artificial Sequence: Synthetic oligonucleotide
  misc_feature 1..20: note = Target: SCN10A; (+) strand; PAM type: YTN; PAM sequence: TTT
  source 1..20: mol_type = other DNA
tgctaacagtgttttttcct

SEQ ID NO: 65851 - DNA, 20 bp, synthetic construct
  misc_feature 1..20: note = Description of Artificial Sequence: Synthetic oligonucleotide
  misc_feature 1..20: note = Target: SCN10A; (+) strand; PAM type: YTN; PAM sequence: TTT
  source 1..20: mol_type = other DNA
gctaacagtgttttttcctg

SEQ ID NO: 65852 - DNA, 20 bp, synthetic construct
  misc_feature 1..20: note = Description of Artificial Sequence: Synthetic oligonucleotide
  misc_feature 1..20: note = Target: SCN10A; (+) strand; PAM type: YTN; PAM sequence: TTG
  source 1..20: mol_type = other DNA
ctaacagtgttttttcctga

SEQ ID NO: 65853 - DNA, 20 bp, synthetic construct
  misc_feature 1..20: note = Description of Artificial Sequence: Synthetic oligonucleotide
  misc_feature 1..20: note = Target: SCN10A; (+) strand; PAM type: YTN; PAM sequence: CTA
  source 1..20: mol_type = other DNA
acagtgttttttcctgataa

SEQ ID NO: 65854 - DNA, 20 bp, synthetic construct
  misc_feature 1..20: note = Description of Artificial Sequence: Synthetic oligonucleotide
  misc_feature 1..20: note = Target: SCN10A; (+) strand; PAM type: YTN; PAM sequence: TTT
  source 1..20: mol_type = other DNA
tttcctgataatttaaaaat

SEQ ID NO: 65855 - DNA, 20 bp, synthetic construct
  misc_feature 1..20: note = Description of Artificial Sequence: Synthetic oligonucleotide
  misc_feature 1..20: note = Target: SCN10A; (+) strand; PAM type: YTN; PAM sequence: TTT
  source 1..20: mol_type = other DNA
ttcctgataatttaaaaatg

SEQ ID NO: 65856 - DNA, 20 bp, synthetic construct
  misc_feature 1..20: note = Description of Artificial Sequence: Synthetic oligonucleotide
  misc_feature 1..20: note = Target: SCN10A; (+) strand; PAM type: YTN; PAM sequence: TTT
  source 1..20: mol_type = other DNA
tcctgataatttaaaaatgt

SEQ ID NO: 65857 - DNA, 20 bp, synthetic construct
  misc_feature 1..20: note = Description of Artificial Sequence: Synthetic oligonucleotide
  misc_feature 1..20: note = Target: SCN10A; (+) strand; PAM type: YTN; PAM sequence: TTT
  source 1..20: mol_type = other DNA
cctgataatttaaaaatgtg

SEQ ID NO: 65858 - DNA, 20 bp, synthetic construct
  misc_feature 1..20: note = Description of Artificial Sequence: Synthetic oligonucleotide
  misc_feature 1..20: note = Target: SCN10A; (+) strand; PAM type: YTN; PAM sequence: TTC
  source 1..20: mol_type = other DNA
ctgataatttaaaaatgtgt

SEQ ID NO: 65859 - DNA, 20 bp, synthetic construct
  misc_feature 1..20: note = Description of Artificial Sequence: Synthetic oligonucleotide
  misc_feature 1..20: note = Target: SCN10A; (+) strand; PAM type: YTN; PAM sequence: CTG
  source 1..20: mol_type = other DNA
ataatttaaaaatgtgtatg

SEQ ID NO: 65860 - DNA, 20 bp, synthetic construct
  misc_feature 1..20: note = Description of Artificial Sequence: Synthetic oligonucleotide
  misc_feature 1..20: note = Target: SCN10A; (+) strand; PAM type: YTN; PAM sequence: TTT
  source 1..20: mol_type = other DNA
aaaaatgtgtatgtagtcaa

SEQ ID NO: 65861 - DNA, 20 bp, synthetic construct
  misc_feature 1..20: note = Description of Artificial Sequence: Synthetic oligonucleotide
  misc_feature 1..20: note = Target: SCN10A; (+) strand; PAM type: YTN; PAM sequence: TTA
  source 1..20: mol_type = other DNA
aaaatgtgtatgtagtcaag

SEQ ID NO: 65862 - DNA, 20 bp, synthetic construct
  misc_feature 1..20: note = Description of Artificial Sequence: Synthetic oligonucleotide
  misc_feature 1..20: note = Target: SCN10A; (+) strand; PAM type: YTN; PAM sequence: TTT
  source 1..20: mol_type = other DNA
atcagtagtatttttatttg

SEQ ID NO: 65863 - DNA, 20 bp, synthetic construct
  misc_feature 1..20: note = Description of Artificial Sequence: Synthetic oligonucleotide
  misc_feature 1..20: note = Target: SCN10A; (+) strand; PAM type: YTN; PAM sequence: TTA
  source 1..20: mol_type = other DNA
tcagtagtatttttatttgt

SEQ ID NO: 65864 - DNA, 20 bp, synthetic construct
  misc_feature 1..20: note = Description of Artificial Sequence: Synthetic oligonucleotide
  misc_feature 1..20: note = Target: SCN10A; (+) strand; PAM type: YTN; PAM sequence: TTT
  source 1..20: mol_type = other DNA
ttatttgttttctttttttt

SEQ ID NO: 65865 - DNA, 20 bp, synthetic construct
  misc_feature 1..20: note = Description of Artificial Sequence: Synthetic oligonucleotide
  misc_feature 1..20: note = Target: SCN10A; (+) strand; PAM type: YTN; PAM sequence: TTT
  source 1..20: mol_type = other DNA
tatttgttttcttttttttt

SEQ ID NO: 65866 - DNA, 20 bp, synthetic construct
  misc_feature 1..20: note = Description of Artificial Sequence: Synthetic oligonucleotide
  misc_feature 1..20: note = Target: SCN10A; (+) strand; PAM type: YTN; PAM sequence: TTT
  source 1..20: mol_type = other DNA
atttgttttctttttttttc

SEQ ID NO: 65867 - DNA, 20 bp, synthetic construct
  misc_feature 1..20: note = Description of Artificial Sequence: Synthetic oligonucleotide
  misc_feature 1..20: note = Target: SCN10A; (+) strand; PAM type: YTN; PAM sequence: TTA
  source 1..20: mol_type = other DNA
tttgttttctttttttttca

SEQ ID NO: 65868 - DNA, 20 bp, synthetic construct
  misc_feature 1..20: note = Description of Artificial Sequence: Synthetic oligonucleotide
  misc_feature 1..20: note = Target: SCN10A; (+) strand; PAM type: YTN; PAM sequence: TTT
  source 1..20: mol_type = other DNA
gttttctttttttttcaatt

SEQ ID NO: 65869 - DNA, 20 bp, synthetic construct
  misc_feature 1..20: note = Description of Artificial Sequence: Synthetic oligonucleotide
  misc_feature 1..20: note = Target: SCN10A; (+) strand; PAM type: YTN; PAM sequence: TTG
  source 1..20: mol_type = other DNA
ttttctttttttttcaattt

SEQ ID NO: 65870 - DNA, 20 bp, synthetic construct
  misc_feature 1..20: note = Description of Artificial Sequence: Synthetic oligonucleotide
  misc_feature 1..20: note = Target: SCN10A; (+) strand; PAM type: YTN; PAM sequence: TTT
  source 1..20: mol_type = other DNA
tctttttttttcaattttct

SEQ ID NO: 65871 - DNA, 20 bp, synthetic construct
  misc_feature 1..20: note = Description of Artificial Sequence: Synthetic oligonucleotide
  misc_feature 1..20: note = Target: SCN10A; (+) strand; PAM type: YTN; PAM sequence: TTT
  source 1..20: mol_type = other DNA
ctttttttttcaattttctt

SEQ ID NO: 65872 - DNA, 20 bp, synthetic construct
  misc_feature 1..20: note = Description of Artificial Sequence: Synthetic oligonucleotide
  misc_feature 1..20: note = Target: SCN10A; (+) strand; PAM type: YTN; PAM sequence: TTC
  source 1..20: mol_type = other DNA
tttttttttcaattttcttc

SEQ ID NO: 65873 - DNA, 20 bp, synthetic construct
  misc_feature 1..20: note = Description of Artificial Sequence: Synthetic oligonucleotide
  misc_feature 1..20: note = Target: SCN10A; (+) strand; PAM type: YTN; PAM sequence: CTT
  source 1..20: mol_type = other DNA
tttttttcaattttcttcat

SEQ ID NO: 65874 - DNA, 20 bp, synthetic construct
  misc_feature 1..20: note = Description of Artificial Sequence: Synthetic oligonucleotide
  misc_feature 1..20: note = Target: SCN10A; (+) strand; PAM type: YTN; PAM sequence: TTT
  source 1..20: mol_type = other DNA
ttttttcaattttcttcatt

SEQ ID NO: 65875 - DNA, 20 bp, synthetic construct
  misc_feature 1..20: note = Description of Artificial Sequence: Synthetic oligonucleotide
  misc_feature 1..20: note = Target: SCN10A; (+) strand; PAM type: YTN; PAM sequence: TTT
  source 1..20: mol_type = other DNA
tttttcaattttcttcattt

SEQ ID NO: 65876 - DNA, 20 bp, synthetic construct
  misc_feature 1..20: note = Description of Artificial Sequence: Synthetic oligonucleotide
  misc_feature 1..20: note = Target: SCN10A; (+) strand; PAM type: YTN; PAM sequence: TTT
  source 1..20: mol_type = other DNA
ttttcaattttcttcatttt

SEQ ID NO: 65877 - DNA, 20 bp, synthetic construct
  misc_feature 1..20: note = Description of Artificial Sequence: Synthetic oligonucleotide
  misc_feature 1..20: note = Target: SCN10A; (+) strand; PAM type: YTN; PAM sequence: TTT
  source 1..20: mol_type = other DNA
tttcaattttcttcattttt

SEQ ID NO: 65878 - DNA, 20 bp, synthetic construct
  misc_feature 1..20: note = Description of Artificial Sequence: Synthetic oligonucleotide
  misc_feature 1..20: note = Target: SCN10A; (+) strand; PAM type: YTN; PAM sequence: TTT
  source 1..20: mol_type = other DNA
ttcaattttcttcatttttt

SEQ ID NO: 65879 - DNA, 20 bp, synthetic construct
  misc_feature 1..20: note = Description of Artificial Sequence: Synthetic oligonucleotide
  misc_feature 1..20: note = Target: SCN10A; (+) strand; PAM type: YTN; PAM sequence: TTT
  source 1..20: mol_type = other DNA
tcaattttcttcattttttt

SEQ ID NO: 65880 - DNA, 20 bp, synthetic construct
  misc_feature 1..20: note = Description of Artificial Sequence: Synthetic oligonucleotide
  misc_feature 1..20: note = Target: SCN10A; (+) strand; PAM type: YTN; PAM sequence: TTT
  source 1..20: mol_type = other DNA
caattttcttcattttttta

SEQ ID NO: 65881 - DNA, 20 bp, synthetic construct
  misc_feature 1..20: note = Description of Artificial Sequence: Synthetic oligonucleotide
  misc_feature 1..20: note = Target: SCN10A; (+) strand; PAM type: YTN; PAM sequence: TTC
  source 1..20: mol_type = other DNA
aattttcttcatttttttat

SEQ ID NO: 65882 - DNA, 20 bp, synthetic construct
  misc_feature 1..20: note = Description of Artificial Sequence: Synthetic oligonucleotide
  misc_feature 1..20: note = Target: SCN10A; (+) strand; PAM type: YTN; PAM sequence: TTT
  source 1..20: mol_type = other DNA
tcttcatttttttattttaa

SEQ ID NO: 65883 - DNA, 20 bp, synthetic construct
  misc_feature 1..20: note = Description of Artificial Sequence: Synthetic oligonucleotide
  misc_feature 1..20: note = Target: SCN10A; (+) strand; PAM type: YTN; PAM sequence: TTT
  source 1..20: mol_type = other DNA
cttcatttttttattttaaa

SEQ ID NO: 65884 - DNA, 20 bp, synthetic construct
  misc_feature 1..20: note = Description of Artificial Sequence: Synthetic oligonucleotide
  misc_feature 1..20: note = Target: SCN10A; (+) strand; PAM type: YTN; PAM sequence: TTC
  source 1..20: mol_type = other DNA
ttcatttttttattttaaat

SEQ ID NO: 65885 - DNA, 20 bp, synthetic construct
  misc_feature 1..20: note = Description of Artificial Sequence: Synthetic oligonucleotide
  misc_feature 1..20: note = Target: SCN10A; (+) strand; PAM type: YTN; PAM sequence: CTT
  source 1..20: mol_type = other DNA
catttttttattttaaattt

SEQ ID NO: 65886 - DNA, 20 bp, synthetic construct
  misc_feature 1..20: note = Description of Artificial Sequence: Synthetic oligonucleotide
  misc_feature 1..20: note = Target: SCN10A; (+) strand; PAM type: YTN; PAM sequence: TTC
  source 1..20: mol_type = other DNA
atttttttattttaaatttt

SEQ ID NO: 65887 - DNA, 20 bp, synthetic construct
  misc_feature 1..20: note = Description of Artificial Sequence: Synthetic oligonucleotide
  misc_feature 1..20: note = Target: SCN10A; (+) strand; PAM type: YTN; PAM sequence: TTT
  source 1..20: mol_type = other DNA
ttttattttaaatttttttc

SEQ ID NO: 65888 - DNA, 20 bp, synthetic construct
  misc_feature 1..20: note = Description of Artificial Sequence: Synthetic oligonucleotide
  misc_feature 1..20: note = Target: SCN10A; (+) strand; PAM type: YTN; PAM sequence: TTT
  source 1..20: mol_type = other DNA
tttattttaaatttttttct

SEQ ID NO: 65889 - DNA, 20 bp, synthetic construct
  misc_feature 1..20: note = Description of Artificial Sequence: Synthetic oligonucleotide
  misc_feature 1..20: note = Target: SCN10A; (+) strand; PAM type: YTN; PAM sequence: TTT
  source 1..20: mol_type = other DNA
ttattttaaatttttttctt

SEQ ID NO: 65890 - DNA, 20 bp, synthetic construct
  misc_feature 1..20: note = Description of Artificial Sequence: Synthetic oligonucleotide
  misc_feature 1..20: note = Target: SCN10A; (+) strand; PAM type: YTN; PAM sequence: TTT
  source 1..20: mol_type = other DNA
tattttaaatttttttcttt

SEQ ID NO: 65891 - DNA, 20 bp, synthetic construct
  misc_feature 1..20: note = Description of Artificial Sequence: Synthetic oligonucleotide
  misc_feature 1..20: note = Target: SCN10A; (+) strand; PAM type: YTN; PAM sequence: TTT
  source 1..20: mol_type = other DNA
attttaaatttttttctttt

SEQ ID NO: 65892 - DNA, 20 bp, synthetic construct
  misc_feature 1..20: note = Description of Artificial Sequence: Synthetic oligonucleotide
  misc_feature 1..20: note = Target: SCN10A; (+) strand; PAM type: YTN; PAM sequence: TTA
  source 1..20: mol_type = other DNA
ttttaaatttttttcttttt

SEQ ID NO: 65893 - DNA, 20 bp, synthetic construct
  misc_feature 1..20: note = Description of Artificial Sequence: Synthetic oligonucleotide
  misc_feature 1..20: note = Target: SCN10A; (+) strand; PAM type: YTN; PAM sequence: TTT
  source 1..20: mol_type = other DNA
taaatttttttcttttttta

SEQ ID NO: 65894 - DNA, 20 bp, synthetic construct
  misc_feature 1..20: note = Description of Artificial Sequence: Synthetic oligonucleotide
  misc_feature 1..20: note = Target: SCN10A; (+) strand; PAM type: YTN; PAM sequence: TTT
  source 1..20: mol_type = other DNA
aaatttttttctttttttaa

SEQ ID NO: 65895 - DNA, 20 bp, synthetic construct
  misc_feature 1..20: note = Description of Artificial Sequence: Synthetic oligonucleotide
  misc_feature 1..20: note = Target: SCN10A; (+) strand; PAM type: YTN; PAM sequence: TTA
  source 1..20: mol_type = other DNA
aatttttttctttttttaaa

SEQ ID NO: 65896 - DNA, 20 bp, synthetic construct
  misc_feature 1..20: note = Description of Artificial Sequence: Synthetic oligonucleotide
  misc_feature 1..20: note = Target: SCN10A; (+) strand; PAM type: YTN; PAM sequence: TTT
  source 1..20: mol_type = other DNA
ttttctttttttaaattata

SEQ ID NO: 65897 - DNA, 20 bp, synthetic construct
  misc_feature 1..20: note = Description of Artificial Sequence: Synthetic oligonucleotide
  misc_feature 1..20: note = Target: SCN10A; (+) strand; PAM type: YTN; PAM sequence: TTT
  source 1..20: mol_type = other DNA
tttctttttttaaattatac

SEQ ID NO: 65898 - DNA, 20 bp, synthetic construct
  misc_feature 1..20: note = Description of Artificial Sequence: Synthetic oligonucleotide
  misc_feature 1..20: note = Target: SCN10A; (+) strand; PAM type: YTN; PAM sequence: TTT
  source 1..20: mol_type = other DNA
ttctttttttaaattatact

SEQ ID NO: 65899 - DNA, 20 bp, synthetic construct
  misc_feature 1..20: note = Description of Artificial Sequence: Synthetic oligonucleotide
  misc_feature 1..20: note = Target: SCN10A; (+) strand; PAM type: YTN; PAM sequence: TTT
  source 1..20: mol_type = other DNA
tctttttttaaattatactt

SEQ ID NO: 65900 - DNA, 20 bp, synthetic construct
  misc_feature 1..20: note = Description of Artificial Sequence: Synthetic oligonucleotide
  misc_feature 1..20: note = Target: SCN10A; (+) strand; PAM type: YTN; PAM sequence: TTT
  source 1..20: mol_type = other DNA
ctttttttaaattatacttt

SEQ ID NO: 65901 - DNA, 20 bp, synthetic construct
  misc_feature 1..20: note = Description of Artificial Sequence: Synthetic oligonucleotide
  misc_feature 1..20: note = Target: SCN10A; (+) strand; PAM type: YTN; PAM sequence: TTC
  source 1..20: mol_type = other DNA
tttttttaaattatacttta

SEQ ID NO: 65902 - DNA, 20 bp, synthetic construct
  misc_feature 1..20: note = Description of Artificial Sequence: Synthetic oligonucleotide
  misc_feature 1..20: note = Target: SCN10A; (+) strand; PAM type: YTN; PAM sequence: CTT
  source 1..20: mol_type = other DNA
tttttaaattatactttaag

SEQ ID NO: 65903 - DNA, 20 bp, synthetic construct
  misc_feature 1..20: note = Description of Artificial Sequence: Synthetic oligonucleotide
  misc_feature 1..20: note = Target: SCN10A; (+) strand; PAM type: YTN; PAM sequence: TTT
  source 1..20: mol_type = other DNA
ttttaaattatactttaagt

SEQ ID NO: 65904 - DNA, 20 bp, synthetic construct
  misc_feature 1..20: note = Description of Artificial Sequence: Synthetic oligonucleotide
  misc_feature 1..20: note = Target: SCN10A; (+) strand; PAM type: YTN; PAM sequence: TTT
  source 1..20: mol_type = other DNA
tttaaattatactttaagtt

SEQ ID NO: 65905 - DNA, 20 bp, synthetic construct
  misc_feature 1..20: note = Description of Artificial Sequence: Synthetic oligonucleotide
  misc_feature 1..20: note = Target: SCN10A; (+) strand; PAM type: YTN; PAM sequence: TTT
  source 1..20: mol_type = other DNA
ttaaattatactttaagttt

SEQ ID NO: 65906 - DNA, 20 bp, synthetic construct
  misc_feature 1..20: note = Description of Artificial Sequence: Synthetic oligonucleotide
  misc_feature 1..20: note = Target: SCN10A; (+) strand; PAM type: YTN; PAM sequence: TTT
  source 1..20: mol_type = other DNA
taaattatactttaagtttt

SEQ ID NO: 65907 - DNA, 20 bp, synthetic construct
  misc_feature 1..20: note = Description of Artificial Sequence: Synthetic oligonucleotide
  misc_feature 1..20: note = Target: SCN10A; (+) strand; PAM type: YTN; PAM sequence: TTT
  source 1..20: mol_type = other DNA
aaattatactttaagtttta

SEQ ID NO: 65908 - DNA, 20 bp, synthetic construct
  misc_feature 1..20: note = Description of Artificial Sequence: Synthetic oligonucleotide
  misc_feature 1..20: note = Target: SCN10A; (+) strand; PAM type: YTN; PAM sequence: TTA
  source 1..20: mol_type = other DNA
aattatactttaagttttag

SEQ ID NO: 65909 - DNA, 20 bp, synthetic construct
  misc_feature 1..20: note = Description of Artificial Sequence: Synthetic oligonucleotide
  misc_feature 1..20: note = Target: SCN10A; (+) strand; PAM type: YTN; PAM sequence: TTA
  source 1..20: mol_type = other DNA
tactttaagttttagggtaa

SEQ ID NO: 65910 - DNA, 20 bp, synthetic construct
  misc_feature 1..20: note = Description of Artificial Sequence: Synthetic oligonucleotide
  misc_feature 1..20: note = Target: SCN10A; (+) strand; PAM type: YTN; PAM sequence: CTT
  source 1..20: mol_type = other DNA
taagttttagggtaaatgtg

SEQ ID NO: 65911 - DNA, 20 bp, synthetic construct
  misc_feature 1..20: note = Description of Artificial Sequence: Synthetic oligonucleotide
  misc_feature 1..20: note = Target: SCN10A; (+) strand; PAM type: YTN; PAM sequence: TTT
  source 1..20: mol_type = other DNA
aagttttagggtaaatgtgc

SEQ ID NO: 65912 - DNA, 20 bp, synthetic construct
  misc_feature 1..20: note = Description of Artificial Sequence: Synthetic oligonucleotide
  misc_feature 1..20: note = Target: SCN10A; (+) strand; PAM type: YTN; PAM sequence: TTA
  source 1..20: mol_type = other DNA
agttttagggtaaatgtgca

SEQ ID NO: 65913 - DNA, 20 bp, synthetic construct
  misc_feature 1..20: note = Description of Artificial Sequence: Synthetic oligonucleotide
  misc_feature 1..20: note = Target: SCN10A; (+) strand; PAM type: YTN; PAM sequence: TTT
  source 1..20: mol_type = other DNA
tagggtaaatgtgcacatta

SEQ ID NO: 65914 - DNA, 20 bp, synthetic construct
  misc_feature 1..20: note = Description of Artificial Sequence: Synthetic oligonucleotide
  misc_feature 1..20: note = Target: SCN10A; (+) strand; PAM type: YTN; PAM sequence: TTT
  source 1..20: mol_type = other DNA
agggtaaatgtgcacattat

SEQ ID NO: 65915 - DNA, 20 bp, synthetic construct
  misc_feature 1..20: note = Description of Artificial Sequence: Synthetic oligonucleotide
  misc_feature 1..20: note = Target: SCN10A; (+) strand; PAM type: YTN; PAM sequence: TTA
  source 1..20: mol_type = other DNA
gggtaaatgtgcacattatg

SEQ ID NO: 65916 - DNA, 20 bp, synthetic construct
  misc_feature 1..20: note = Description of Artificial Sequence: Synthetic oligonucleotide
  misc_feature 1..20: note = Target: SCN10A; (+) strand; PAM type: YTN; PAM sequence: TTA
  source 1..20: mol_type = other DNA
tgcaggttagccacatatgc

SEQ ID NO: 65917 - DNA, 20 bp, synthetic construct
  misc_feature 1..20: note = Description of Artificial Sequence: Synthetic oligonucleotide
  misc_feature 1..20: note = Target: SCN10A; (+) strand; PAM type: YTN; PAM sequence: TTA
  source 1..20: mol_type = other DNA
gccacatatgcatacatgcc

SEQ ID NO: 65918 - DNA, 20 bp, synthetic construct
  misc_feature 1..20: note = Description of Artificial Sequence: Synthetic oligonucleotide
  misc_feature 1..20: note = Target: SCN10A; (+) strand; PAM type: YTN; PAM sequence: CTT
  source 1..20: mol_type = other DNA
acatatgaagcttttctcac

SEQ ID NO: 65919 - DNA, 20 bp, synthetic construct
  misc_feature 1..20: note = Description of Artificial Sequence: Synthetic oligonucleotide
  misc_feature 1..20: note = Target: SCN10A; (+) strand; PAM type: YTN; PAM sequence: TTA
  source 1..20: mol_type = other DNA
catatgaagcttttctcact

SEQ ID NO: 65920 - DNA, 20 bp, synthetic construct
  misc_feature 1..20: note = Description of Artificial Sequence: Synthetic oligonucleotide
  misc_feature 1..20: note = Target: SCN10A; (+) strand; PAM type: YTN; PAM sequence: CTT
  source 1..20: mol_type = other DNA
ttctcactacaaggcttgga

SEQ ID NO: 65921 - DNA, 20 bp, synthetic construct
  misc_feature 1..20: note = Description of Artificial Sequence: Synthetic oligonucleotide
  misc_feature 1..20: note = Target: SCN10A; (+) strand; PAM type: YTN; PAM sequence: TTT
  source 1..20: mol_type = other DNA
tctcactacaaggcttggaa

SEQ ID NO: 65922 - DNA, 20 bp, synthetic construct
  misc_feature 1..20: note = Description of Artificial Sequence: Synthetic oligonucleotide
  misc_feature 1..20: note = Target: SCN10A; (+) strand; PAM type: YTN; PAM sequence: TTT
  source 1..20: mol_type = other DNA
ctcactacaaggcttggaaa

SEQ ID NO: 65923 - DNA, 20 bp, synthetic construct
  misc_feature 1..20: note = Description of Artificial Sequence: Synthetic oligonucleotide
  misc_feature 1..20: note = Target: SCN10A; (+) strand; PAM type: YTN; PAM sequence: TTC
  source 1..20: mol_type = other DNA
tcactacaaggcttggaaaa

SEQ ID NO: 65924 - DNA, 20 bp, synthetic construct
  misc_feature 1..20: note = Description of Artificial Sequence: Synthetic oligonucleotide
  misc_feature 1..20: note = Target: SCN10A; (+) strand; PAM type: YTN; PAM sequence: CTC
  source 1..20: mol_type = other DNA
actacaaggcttggaaaata

SEQ ID NO: 65925 - DNA, 20 bp, synthetic construct
  misc_feature 1..20: note = Description of Artificial Sequence: Synthetic oligonucleotide
  misc_feature 1..20: note = Target: SCN10A; (+) strand; PAM type: YTN; PAM sequence: CTA
  source 1..20: mol_type = other DNA
caaggcttggaaaatacctt

SEQ ID NO: 65926 - DNA, 20 bp, synthetic construct
  misc_feature 1..20: note = Description of Artificial Sequence: Synthetic oligonucleotide
  misc_feature 1..20: note = Target: SCN10A; (+) strand; PAM type: YTN; PAM sequence: CTT
  source 1..20: mol_type = other DNA
ggaaaataccttctccatgt

SEQ ID NO: 65927 - DNA, 20 bp, synthetic construct
  misc_feature 1..20: note = Description of Artificial Sequence: Synthetic oligonucleotide
  misc_feature 1..20: note = Target: SCN10A; (+) strand; PAM type: YTN; PAM sequence: TTG
  source 1..20: mol_type = other DNA
gaaaataccttctccatgtt

SEQ ID NO: 65928 - DNA, 20 bp, synthetic construct
  misc_feature 1..20: note = Description of Artificial Sequence: Synthetic oligonucleotide
  misc_feature 1..20: note = Target: SCN10A; (+) strand; PAM type: YTN; PAM sequence: CTT
  source 1..20: mol_type = other DNA
ctccatgtttttttctttct

SEQ ID NO: 65929 - DNA, 20 bp, synthetic construct
  misc_feature 1..20: note = Description of Artificial Sequence: Synthetic oligonucleotide
  misc_feature 1..20: note = Target: SCN10A; (+) strand; PAM type: YTN; PAM sequence: TTC
  source 1..20: mol_type = other DNA
tccatgtttttttctttctt

SEQ ID NO: 65930 - DNA, 20 bp, synthetic construct
  misc_feature 1..20: note = Description of Artificial Sequence: Synthetic oligonucleotide
  misc_feature 1..20: note = Target: SCN10A; (+) strand; PAM type: YTN; PAM sequence: CTC
  source 1..20: mol_type = other DNA
catgtttttttctttctttt

SEQ ID NO: 65931 - DNA, 20 bp, synthetic construct
  misc_feature 1..20: note = Description of Artificial Sequence: Synthetic oligonucleotide
  misc_feature 1..20: note = Target: SCN10A; (+) strand; PAM type: YTN; PAM sequence: TTT
  source 1..20: mol_type = other DNA
ttttctttcttttgtagttt

SEQ ID NO: 65932 - DNA, 20 bp, synthetic construct
  misc_feature 1..20: note = Description of Artificial Sequence: Synthetic oligonucleotide
  misc_feature 1..20: note = Target: SCN10A; (+) strand; PAM type: YTN; PAM sequence: TTT
  source 1..20: mol_type = other DNA
tttctttcttttgtagtttc

SEQ ID NO: 65933 - DNA, 20 bp, synthetic construct
  misc_feature 1..20: note = Description of Artificial Sequence: Synthetic oligonucleotide
  misc_feature 1..20: note = Target: SCN10A; (+) strand; PAM type: YTN; PAM sequence: TTT
  source 1..20: mol_type = other DNA
ttctttcttttgtagtttca

SEQ ID NO: 65934 - DNA, 20 bp, synthetic construct
  misc_feature 1..20: note = Description of Artificial Sequence: Synthetic oligonucleotide
  misc_feature 1..20: note = Target: SCN10A; (+) strand; PAM type: YTN; PAM sequence: TTT
  source 1..20: mol_type = other DNA
tctttcttttgtagtttcac

SEQ ID NO: 65935 - DNA, 20 bp, synthetic construct
  misc_feature 1..20: note = Description of Artificial Sequence: Synthetic oligonucleotide
  misc_feature 1..20: note = Target: SCN10A; (+) strand; PAM type: YTN; PAM sequence: TTT
  source 1..20: mol_type = other DNA
ctttcttttgtagtttcact

SEQ ID NO: 65936 - DNA, 20 bp, synthetic construct
  misc_feature 1..20: note = Description of Artificial Sequence: Synthetic oligonucleotide
  misc_feature 1..20: note = Target: SCN10A; (+) strand; PAM type: YTN; PAM sequence: TTC
  source 1..20: mol_type = other DNA
tttcttttgtagtttcactt

SEQ ID NO: 65937 - DNA, 20 bp, synthetic construct
  misc_feature 1..20: note = Description of Artificial Sequence: Synthetic oligonucleotide
  misc_feature 1..20: note = Target: SCN10A; (+) strand; PAM type: YTN; PAM sequence: CTT
  source 1..20: mol_type = other DNA
tcttttgtagtttcactttt

SEQ ID NO: 65938 - DNA, 20 bp, synthetic construct
  misc_feature 1..20: note = Description of Artificial Sequence: Synthetic oligonucleotide
  misc_feature 1..20: note = Target: SCN10A; (+) strand; PAM type: YTN; PAM sequence: TTT
  source 1..20: mol_type = other DNA
cttttgtagtttcacttttt

SEQ ID NO: 65939 - DNA, 20 bp, synthetic construct
  misc_feature 1..20: note = Description of Artificial Sequence: Synthetic oligonucleotide
  misc_feature 1..20: note = Target: SCN10A; (+) strand; PAM type: YTN; PAM sequence: TTC
  source 1..20: mol_type = other DNA
ttttgtagtttcactttttt

SEQ ID NO: 65940 - DNA, 20 bp, synthetic construct
  misc_feature 1..20: note = Description of Artificial Sequence: Synthetic oligonucleotide
  misc_feature 1..20: note = Target: SCN10A; (+) strand; PAM type: YTN; PAM sequence: CTT
  source 1..20: mol_type = other DNA
ttgtagtttcacttttttca

SEQ ID NO: 65941 - DNA, 20 bp, synthetic construct
  misc_feature 1..20: note = Description of Artificial Sequence: Synthetic oligonucleotide
  misc_feature 1..20: note = Target: SCN10A; (+) strand; PAM type: YTN; PAM sequence: TTT
  source 1..20: mol_type = other DNA
tgtagtttcacttttttcac

SEQ ID NO: 65942 - DNA, 20 bp, synthetic construct
  misc_feature 1..20: note = Description of Artificial Sequence: Synthetic oligonucleotide
  misc_feature 1..20: note = Target: SCN10A; (+) strand; PAM type: YTN; PAM sequence: TTT
  source 1..20: mol_type = other DNA
gtagtttcacttttttcact

SEQ ID NO: 65943 - DNA, 20 bp, synthetic construct
  misc_feature 1..20: note = Description of Artificial Sequence: Synthetic oligonucleotide
  misc_feature 1..20: note = Target: SCN10A; (+) strand; PAM type: YTN; PAM sequence: TTG
  source 1..20: mol_type = other DNA
tagtttcacttttttcactt

SEQ ID NO: 65944 - DNA, 20 bp, synthetic construct
  misc_feature 1..20: note = Description of Artificial Sequence: Synthetic oligonucleotide
  misc_feature 1..20: note = Target: SCN10A; (+) strand; PAM type: YTN; PAM sequence: TTT
  source 1..20: mol_type = other DNA
cacttttttcacttaaaact

SEQ ID NO: 65945 - DNA, 20 bp, synthetic construct
  misc_feature 1..20: note = Description of Artificial Sequence: Synthetic oligonucleotide
  misc_feature 1..20: note = Target: SCN10A; (+) strand; PAM type: YTN; PAM sequence: TTC
  source 1..20: mol_type = other DNA
acttttttcacttaaaactt

SEQ ID NO: 65946 - DNA, 20 bp, synthetic construct
  misc_feature 1..20: note = Description of Artificial Sequence: Synthetic oligonucleotide
  misc_feature 1..20: note = Target: SCN10A; (+) strand; PAM type: YTN; PAM sequence: CTT
  source 1..20: mol_type = other DNA
ttttcacttaaaactttggt

SEQ ID NO: 65947 - DNA, 20 bp, synthetic construct
  misc_feature 1..20: note = Description of Artificial Sequence: Synthetic oligonucleotide
  misc_feature 1..20: note = Target: SCN10A; (+) strand; PAM type: YTN; PAM sequence: TTT
  source 1..20: mol_type = other DNA
tttcacttaaaactttggtg

SEQ ID NO: 65948 - DNA, 20 bp, synthetic construct
  misc_feature 1..20: note = Description of Artificial Sequence: Synthetic oligonucleotide
  misc_feature 1..20: note = Target: SCN10A; (+) strand; PAM type: YTN; PAM sequence: TTT
  source 1..20: mol_type = other DNA
ttcacttaaaactttggtgc

SEQ ID NO: 65949 - DNA, 20 bp, synthetic construct
  misc_feature 1..20: note = Description of Artificial Sequence: Synthetic oligonucleotide
  misc_feature 1..20: note = Target: SCN10A; (+) strand; PAM type: YTN; PAM sequence: TTT
  source 1..20: mol_type = other DNA
tcacttaaaactttggtgca

SEQ ID NO: 65950 - DNA, 20 bp, synthetic construct
  misc_feature 1..20: note = Description of Artificial Sequence: Synthetic oligonucleotide
  misc_feature 1..20: note = Target: SCN10A; (+) strand; PAM type: YTN; PAM sequence: TTT
  source 1..20: mol_type = other DNA
cacttaaaactttggtgcat

SEQ ID NO: 65951 - DNA, 20 bp, synthetic construct
  misc_feature 1..20: note = Description of Artificial Sequence: Synthetic oligonucleotide
  misc_feature 1..20: note = Target: SCN10A; (+) strand; PAM type: YTN; PAM sequence: TTC
  source 1..20: mol_type = other DNA
acttaaaactttggtgcatt

SEQ ID NO: 65952 - DNA, 20 bp, synthetic construct
  misc_feature 1..20: note = Description of Artificial Sequence: Synthetic oligonucleotide
  misc_feature 1..20: note = Target: SCN10A; (+) strand; PAM type: YTN; PAM sequence: CTT
  source 1..20: mol_type = other DNA
aaaactttggtgcatttgaa

SEQ ID NO: 65953 - DNA, 20 bp, synthetic construct
  misc_feature 1..20: note = Description of Artificial Sequence: Synthetic oligonucleotide
  misc_feature 1..20: note = Target: SCN10A; (+) strand; PAM type: YTN; PAM sequence: TTA
  source 1..20: mol_type = other DNA
aaactttggtgcatttgaaa

SEQ ID NO: 65954 - DNA, 20 bp, synthetic construct
  misc_feature 1..20: note = Description of Artificial Sequence: Synthetic oligonucleotide
  misc_feature 1..20: note = Target: SCN10A; (+) strand; PAM type: YTN; PAM sequence: CTT
  source 1..20: mol_type = other DNA
tggtgcatttgaaatttatt

SEQ ID NO: 65955 - DNA, 20 bp, synthetic construct
  misc_feature 1..20: note = Description of Artificial Sequence: Synthetic oligonucleotide
  misc_feature 1..20: note = Target: SCN10A; (+) strand; PAM type: YTN; PAM sequence: TTT
  source 1..20: mol_type = other DNA
ggtgcatttgaaatttattt

SEQ ID NO: 65956 - DNA, 20 bp, synthetic construct
  misc_feature 1..20: note = Description of Artificial Sequence: Synthetic oligonucleotide
  misc_feature 1..20: note = Target: SCN10A; (+) strand; PAM type: YTN; PAM sequence: TTG
  source 1..20: mol_type = other DNA
gtgcatttgaaatttatttt

SEQ ID NO: 65957 - DNA, 20 bp, synthetic construct
  misc_feature 1..20: note = Description of Artificial Sequence: Synthetic oligonucleotide
  misc_feature 1..20: note = Target: SCN10A; (+) strand; PAM type: YTN; PAM sequence: TTT
  source 1..20: mol_type = other DNA
gaaatttattttgggtaaag

SEQ ID NO: 65958 - DNA, 20 bp, synthetic construct
  misc_feature 1..20: note = Description of Artificial Sequence: Synthetic oligonucleotide
  misc_feature 1..20: note = Target: SCN10A; (+) strand; PAM type: YTN; PAM sequence: TTG
  source 1..20: mol_type = other DNA
aaatttattttgggtaaaga

SEQ ID NO: 65959 - DNA, 20 bp, synthetic construct
  misc_feature 1..20: note = Description of Artificial Sequence: Synthetic oligonucleotide
  misc_feature 1..20: note = Target: SCN10A; (+) strand; PAM type: YTN; PAM sequence: TTT
  source 1..20: mol_type = other DNA
attttgggtaaagagtaaga

SEQ ID NO: 65960 - DNA, 20 bp, synthetic construct
  misc_feature 1..20: note = Description of Artificial Sequence: Synthetic oligonucleotide
  misc_feature 1..20: note = Target: SCN10A; (+) strand; PAM type: YTN; PAM sequence: TTA
  source 1..20: mol_type = other DNA
ttttgggtaaagagtaagat

SEQ ID NO: 65961 - DNA, 20 bp, synthetic construct
  misc_feature 1..20: note = Description of Artificial Sequence: Synthetic oligonucleotide
  misc_feature 1..20: note = Target: SCN10A; (+) strand; PAM type: YTN; PAM sequence: TTT
  source 1..20: mol_type = other DNA
tgggtaaagagtaagatatt

SEQ ID NO: 65962 - DNA, 20 bp, synthetic construct
  misc_feature 1..20: note = Description of Artificial Sequence: Synthetic oligonucleotide
  misc_feature 1..20: note = Target: SCN10A; (+) strand; PAM type: YTN; PAM sequence: TTT
  source 1..20: mol_type = other DNA
gggtaaagagtaagatattg

SEQ ID NO: 65963 - DNA, 20 bp, synthetic construct
  misc_feature 1..20: note = Description of Artificial Sequence: Synthetic oligonucleotide
  misc_feature 1..20: note = Target: SCN10A; (+) strand; PAM type: YTN; PAM sequence: TTG
  source 1..20: mol_type = other DNA
ggtaaagagtaagatattga

SEQ ID NO: 65964 - DNA, 20 bp, synthetic construct
  misc_feature 1..20: note = Description of Artificial Sequence: Synthetic oligonucleotide
  misc_feature 1..20: note = Target: SCN10A; (+) strand; PAM type: YTN; PAM sequence: TTG
  source 1..20: mol_type = other DNA
atgtggtttattttttcctg

SEQ ID NO: 65965 - DNA, 20 bp, synthetic construct
  misc_feature 1..20: note = Description of Artificial Sequence: Synthetic oligonucleotide
  misc_feature 1..20: note = Target: SCN10A; (+) strand; PAM type: YTN; PAM sequence: TTT
  source 1..20: mol_type = other DNA
attttttcctgtctctgatt

SEQ ID NO: 65966 - DNA, 20 bp, synthetic construct
  misc_feature 1..20: note = Description of Artificial Sequence: Synthetic oligonucleotide
  misc_feature 1..20: note = Target: SCN10A; (+) strand; PAM type: YTN; PAM sequence: TTA
  source 1..20: mol_type = other DNA
ttttttcctgtctctgatta

SEQ ID NO: 65967 - DNA, 20 bp, synthetic construct
  misc_feature 1..20: note = Description of Artificial Sequence: Synthetic oligonucleotide
  misc_feature 1..20: note = Target: SCN10A; (+) strand; PAM type: YTN; PAM sequence: TTT
  source 1..20: mol_type = other DNA
tttcctgtctctgattattt

SEQ ID NO: 65968 - DNA, 20 bp, synthetic construct
  misc_feature 1..20: note = Description of Artificial Sequence: Synthetic oligonucleotide
  misc_feature 1..20: note = Target: SCN10A; (+) strand; PAM type: YTN; PAM sequence: TTT
  source 1..20: mol_type = other DNA
ttcctgtctctgattattta

SEQ ID NO: 65969 - DNA, 20 bp, synthetic construct
  misc_feature 1..20: note = Description of Artificial Sequence: Synthetic oligonucleotide
  misc_feature 1..20: note = Target: SCN10A; (+) strand; PAM type: YTN; PAM sequence: TTT
  source 1..20: mol_type = other DNA
tcctgtctctgattatttat

SEQ ID NO: 65970 - DNA, 20 bp, synthetic construct
  misc_feature 1..20: note = Description of Artificial Sequence: Synthetic oligonucleotide
  misc_feature 1..20: note = Target: SCN10A; (+) strand; PAM type: YTN; PAM sequence: TTT
  source 1..20: mol_type = other DNA
cctgtctctgattatttata

SEQ ID NO: 65971 - DNA, 20 bp, synthetic construct
  misc_feature 1..20: note = Description of Artificial Sequence: Synthetic oligonucleotide
  misc_feature 1..20: note = Target: SCN10A; (+) strand; PAM type: YTN; PAM sequence: TTC
  source 1..20: mol_type = other DNA
ctgtctctgattatttatat

SEQ ID NO: 65972 - DNA, 20 bp, synthetic construct
  misc_feature 1..20: note = Description of Artificial Sequence: Synthetic oligonucleotide
  misc_feature 1..20: note = Target: SCN10A; (+) strand; PAM type: YTN; PAM sequence: CTG
  source 1..20: mol_type = other DNA
tctctgattatttatatcaa

SEQ ID NO: 65973 - DNA, 20 bp, synthetic construct
  misc_feature 1..20: note = Description of Artificial Sequence: Synthetic oligonucleotide
  misc_feature 1..20: note = Target: SCN10A; (+) strand; PAM type: YTN; PAM sequence: CTC
  source 1..20: mol_type = other DNA
tgattatttatatcaacatt

SEQ ID NO: 65974 - DNA, 20 bp, synthetic construct
  misc_feature 1..20: note = Description of Artificial Sequence: Synthetic oligonucleotide
  misc_feature 1..20: note = Target: SCN10A; (+) strand; PAM type: YTN; PAM sequence: CTG
  source 1..20: mol_type = other DNA
attatttatatcaacattac

SEQ ID NO: 65975 - DNA, 20 bp, synthetic construct
  misc_feature 1..20: note = Description of Artificial Sequence: Synthetic oligonucleotide
  misc_feature 1..20: note = Target: SCN10A; (+) strand; PAM type: YTN; PAM sequence: TTA
  source 1..20: mol_type = other DNA
tttatatcaacattacttat

SEQ ID NO: 65976 - DNA, 20 bp, synthetic construct
  misc_feature 1..20: note = Description of Artificial Sequence: Synthetic oligonucleotide
  misc_feature 1..20: note = Target: SCN10A; (+) strand; PAM type: YTN; PAM sequence: TTT
  source 1..20: mol_type = other DNA
atatcaacattacttattga

SEQ ID NO: 65977 - DNA, 20 bp, synthetic construct
  misc_feature 1..20: note = Description of Artificial Sequence: Synthetic oligonucleotide
  misc_feature 1..20: note = Target: SCN10A; (+) strand; PAM type: YTN; PAM sequence: TTA
  source 1..20: mol_type = other DNA
tatcaacattacttattgaa

SEQ ID NO: 65978 - DNA, 20 bp, synthetic construct
  misc_feature 1..20: note = Description of Artificial Sequence: Synthetic oligonucleotide
  misc_feature 1..20: note = Target: SCN10A; (+) strand; PAM type: YTN; PAM sequence: TTA
  source 1..20: mol_type = other DNA
cttattgaataatttttcat

SEQ ID NO: 65979 - DNA, 20 bp, synthetic construct
  misc_feature 1..20: note = Description of Artificial Sequence: Synthetic oligonucleotide
  misc_feature 1..20: note = Target: SCN10A; (+) strand; PAM type: YTN; PAM sequence: CTT
  source 1..20: mol_type = other DNA
attgaataatttttcatttt

SEQ ID NO: 65980 - DNA, 20 bp, synthetic construct
  misc_feature 1..20: note = Description of Artificial Sequence: Synthetic oligonucleotide
  misc_feature 1..20: note = Target: SCN10A; (+) strand; PAM type: YTN; PAM sequence: TTA
  source 1..20: mol_type = other DNA
ttgaataatttttcattttc

SEQ ID NO: 65981 - DNA, 20 bp, synthetic construct
  misc_feature 1..20: note = Description of Artificial Sequence: Synthetic oligonucleotide
  misc_feature 1..20: note = Target: SCN10A; (+) strand; PAM type: YTN; PAM sequence: TTG
  source 1..20: mol_type = other DNA
aataatttttcattttccca

SEQ ID NO: 65982 - DNA, 20 bp, synthetic construct
  misc_feature 1..20: note = Description of Artificial Sequence: Synthetic oligonucleotide
  misc_feature 1..20: note = Target: SCN10A; (+) strand; PAM type: YTN; PAM sequence: TTT
  source 1..20: mol_type = other DNA
ttcattttcccaagatttga

SEQ ID NO: 65983 - DNA, 20 bp, synthetic construct
  misc_feature 1..20: note = Description of Artificial Sequence: Synthetic oligonucleotide
  misc_feature 1..20: note = Target: SCN10A; (+) strand; PAM type: YTN; PAM sequence: TTT
  source 1..20: mol_type = other DNA
tcattttcccaagatttgaa

SEQ ID NO: 65984 - DNA, 20 bp, synthetic construct
  misc_feature 1..20: note = Description of Artificial Sequence: Synthetic oligonucleotide
  misc_feature 1..20: note = Target: SCN10A; (+) strand; PAM type: YTN; PAM sequence: TTT
  source 1..20: mol_type = other DNA
cattttcccaagatttgaaa

SEQ ID NO: 65985 - DNA, 20 bp, synthetic construct
  misc_feature 1..20: note = Description of Artificial Sequence: Synthetic oligonucleotide
  misc_feature 1..20: note = Target: SCN10A; (+) strand; PAM type: YTN; PAM sequence: TTC
  source 1..20: mol_type = other DNA
attttcccaagatttgaaat

SEQ ID NO: 65986 - DNA, 20 bp, synthetic construct
  misc_feature 1..20: note = Description of Artificial Sequence: Synthetic oligonucleotide
  misc_feature 1..20: note = Target: SCN10A; (+) strand; PAM type: YTN; PAM sequence: TTT
  source 1..20: mol_type = other DNA
tcccaagatttgaaatgtca

SEQ ID NO: 65987 - DNA, 20 bp, synthetic construct
  misc_feature 1..20: note = Description of Artificial Sequence: Synthetic oligonucleotide
  misc_feature 1..20: note = Target: SCN10A; (+) strand; PAM type: YTN; PAM sequence: TTT
  source 1..20: mol_type = other DNA
cccaagatttgaaatgtcat

SEQ ID NO: 65988 - DNA, 20 bp, synthetic construct
  misc_feature 1..20: note = Description of Artificial Sequence: Synthetic oligonucleotide
  misc_feature 1..20: note = Target: SCN10A; (+) strand; PAM type: YTN; PAM sequence: TTC
  source 1..20: mol_type = other DNA
ccaagatttgaaatgtcatt

SEQ ID NO: 65989 - DNA, 20 bp, synthetic construct
  misc_feature 1..20: note = Description of Artificial Sequence: Synthetic oligonucleotide
  misc_feature 1..20: note = Target: SCN10A; (+) strand; PAM type: YTN; PAM sequence: TTT
  source 1..20: mol_type = other DNA
gaaatgtcatttttgtcatg

SEQ ID NO: 65990 - DNA, 20 bp, synthetic construct
  misc_feature 1..20: note = Description of Artificial Sequence: Synthetic oligonucleotide
  misc_feature 1..20: note = Target: SCN10A; (+) strand; PAM type: YTN; PAM sequence: TTG
  source 1..20: mol_type = other DNA
aaatgtcatttttgtcatgt

SEQ ID NO: 65991 - DNA, 20 bp, synthetic construct
  misc_feature 1..20: note = Description of Artificial Sequence: Synthetic oligonucleotide
  misc_feature 1..20: note = Target: SCN10A; (+) strand; PAM type: YTN; PAM sequence: TTT
  source 1..20: mol_type = other DNA
ttgtcatgttattaccattt

SEQ ID NO: 65992 - DNA, 20 bp, synthetic construct
  misc_feature 1..20: note = Description of Artificial Sequence: Synthetic oligonucleotide
  misc_feature 1..20: note = Target: SCN10A; (+) strand; PAM type: YTN; PAM sequence: TTT
  source 1..20: mol_type = other DNA
tgtcatgttattaccattta

SEQ ID NO: 65993 - DNA, 20 bp, synthetic construct
  misc_feature 1..20: note = Description of Artificial Sequence: Synthetic oligonucleotide
  misc_feature 1..20: note = Target: SCN10A; (+) strand; PAM type: YTN; PAM sequence: TTT
  source 1..20: mol_type = other DNA
gtcatgttattaccatttat

SEQ ID NO: 65994 - DNA, 20 bp, synthetic construct
  misc_feature 1..20: note = Description of Artificial Sequence: Synthetic oligonucleotide
  misc_feature 1..20: note = Target: SCN10A; (+) strand; PAM type: YTN; PAM sequence: TTG
  source 1..20: mol_type = other DNA
tcatgttattaccatttatg

SEQ ID NO: 65995 - DNA, 20 bp, synthetic construct
  misc_feature 1..20: note = Description of Artificial Sequence: Synthetic oligonucleotide
  misc_feature 1..20: note = Target: SCN10A; (+) strand; PAM type: YTN; PAM sequence: TTA
  source 1..20: mol_type = other DNA
ttaccatttatgttcatgtg

SEQ ID NO: 65996 - DNA, 20 bp, synthetic construct
  misc_feature 1..20: note = Description of Artificial Sequence: Synthetic oligonucleotide
  misc_feature 1..20: note = Target: SCN10A; (+) strand; PAM type: YTN; PAM sequence: TTA
  source 1..20: mol_type = other DNA
ccatttatgttcatgtgttt

SEQ ID NO: 65997 - DNA, 20 bp, synthetic construct
  misc_feature 1..20: note = Description of Artificial Sequence: Synthetic oligonucleotide
  misc_feature 1..20: note = Target: SCN10A; (+) strand; PAM type: YTN; PAM sequence: TTT
  source 1..20: mol_type = other DNA
atgttcatgtgttttcatat

SEQ ID NO: 65998 - DNA, 20 bp, synthetic construct
  misc_feature 1..20: note = Description of Artificial Sequence: Synthetic oligonucleotide
  misc_feature 1..20: note = Target: SCN10A; (+) strand; PAM type: YTN; PAM sequence: TTA
  source 1..20: mol_type = other DNA
tgttcatgtgttttcatata

SEQ ID NO: 65999 - DNA, 20 bp, synthetic construct
  misc_feature 1..20: note = Description of Artificial Sequence: Synthetic oligonucleotide
  misc_feature 1..20: note = Target: SCN10A; (+) strand; PAM type: YTN; PAM sequence: TTC
  source 1..20: mol_type = other DNA
atgtgttttcatatacacat

SEQ ID NO: 66000 - DNA, 20 bp, synthetic construct
  misc_feature 1..20: note = Description of Artificial Sequence: Synthetic oligonucleotide
  misc_feature 1..20: note = Target: SCN10A; (+) strand; PAM type: YTN; PAM sequence: TTT
  source 1..20: mol_type = other DNA
tcatatacacatgtccattt

SEQ ID NO: 66001 - DNA, 20 bp, synthetic construct
  misc_feature 1..20: note = Description of Artificial Sequence: Synthetic oligonucleotide
  misc_feature 1..20: note = Target: SCN10A; (+) strand; PAM type: YTN; PAM sequence: TTT
  source 1..20: mol_type = other DNA
catatacacatgtccatttc

SEQ ID NO: 66002 - DNA, 20 bp, synthetic construct
  misc_feature 1..20: note = Description of Artificial Sequence: Synthetic oligonucleotide
  misc_feature 1..20: note = Target: SCN10A; (+) strand; PAM type: YTN; PAM sequence: TTC
  source 1..20: mol_type = other DNA
atatacacatgtccatttct

SEQ ID NO: 66003 - DNA, 20 bp, synthetic construct
  misc_feature 1..20: note = Description of Artificial Sequence: Synthetic oligonucleotide
  misc_feature 1..20: note = Target: SCN10A; (+) strand; PAM type: YTN; PAM sequence: TTT
  source 1..20: mol_type = other DNA
ctcttccacagatcagacta

SEQ ID NO: 66004 - DNA, 20 bp, synthetic construct
  misc_feature 1..20: note = Description of Artificial Sequence: Synthetic oligonucleotide
  misc_feature 1..20: note = Target: SCN10A; (+) strand; PAM type: YTN; PAM sequence: TTC
  source 1..20: mol_type = other DNA
tcttccacagatcagactat

SEQ ID NO: 66005 - DNA, 20 bp, synthetic construct
  misc_feature 1..20: note = Description of Artificial Sequence: Synthetic oligonucleotide
  misc_feature 1..20: note = Target: SCN10A; (+) strand; PAM type: YTN; PAM sequence: CTC
  source 1..20: mol_type = other DNA
ttccacagatcagactattt

SEQ ID NO: 66006 - DNA, 20 bp, synthetic construct
  misc_feature 1..20: note = Description of Artificial Sequence: Synthetic oligonucleotide
  misc_feature 1..20: note = Target: SCN10A; (+) strand; PAM type: YTN; PAM sequence: CTT
  source 1..20: mol_type = other DNA
ccacagatcagactatttat

SEQ ID NO: 66007 - DNA, 20 bp, synthetic construct
  misc_feature 1..20: note = Description of Artificial Sequence: Synthetic oligonucleotide
  misc_feature 1..20: note = Target: SCN10A; (+) strand; PAM type: YTN; PAM sequence: TTC
  source 1..20: mol_type = other DNA
cacagatcagactatttatt

SEQ ID NO: 66008 - DNA, 20 bp, synthetic construct
  misc_feature 1..20: note = Description of Artificial Sequence: Synthetic oligonucleotide
  misc_feature 1..20: note = Target: SCN10A; (+) strand; PAM type: YTN; PAM sequence: CTA
  source 1..20: mol_type = other DNA
tttattttcactgtcatgct

SEQ ID NO: 66009 - DNA, 20 bp, synthetic construct
  misc_feature 1..20: note = Description of Artificial Sequence: Synthetic oligonucleotide
  misc_feature 1..20: note = Target: SCN10A; (+) strand; PAM type: YTN; PAM sequence: TTT
  source 1..20: mol_type = other DNA
attttcactgtcatgctgtt

SEQ ID NO: 66010 - DNA, 20 bp, synthetic construct
  misc_feature 1..20: note = Description of Artificial Sequence: Synthetic oligonucleotide
  misc_feature 1..20: note = Target: SCN10A; (+) strand; PAM type: YTN; PAM sequence: TTA
  source 1..20: mol_type = other DNA
ttttcactgtcatgctgttt

SEQ ID NO: 66011 - DNA, 20 bp, synthetic construct
  misc_feature 1..20: note = Description of Artificial Sequence: Synthetic oligonucleotide
  misc_feature 1..20: note = Target: SCN10A; (+) strand; PAM type: YTN; PAM sequence: TTT
  source 1..20: mol_type = other DNA
tcactgtcatgctgttttaa

SEQ ID NO: 66012 - DNA, 20 bp, synthetic construct
  misc_feature 1..20: note = Description of Artificial Sequence: Synthetic oligonucleotide
  misc_feature 1..20: note = Target: SCN10A; (+) strand; PAM type: YTN; PAM sequence: TTT
  source 1..20: mol_type = other DNA
cactgtcatgctgttttaat

SEQ ID NO: 66013 - DNA, 20 bp, synthetic construct
  misc_feature 1..20: note = Description of Artificial Sequence: Synthetic oligonucleotide
  misc_feature 1..20: note = Target: SCN10A; (+) strand; PAM type: YTN; PAM sequence: TTC
  source 1..20: mol_type = other DNA
actgtcatgctgttttaatc

SEQ ID NO: 66014 - DNA, 20 bp, synthetic construct
  misc_feature 1..20: note = Description of Artificial Sequence: Synthetic oligonucleotide
  misc_feature 1..20: note = Target: SCN10A; (+) strand; PAM type: YTN; PAM sequence: CTG
  source 1..20: mol_type = other DNA
tcatgctgttttaatcactg

SEQ ID NO: 66015 - DNA, 20 bp, synthetic construct
  misc_feature 1..20: note = Description of Artificial Sequence: Synthetic oligonucleotide
  misc_feature 1..20: note = Target: SCN10A; (+) strand; PAM type: YTN; PAM sequence: CTG
  source 1..20: mol_type = other DNA
ttttaatcactgactggatt

SEQ ID NO: 66016 - DNA, 20 bp, synthetic construct
  misc_feature 1..20: note = Description of Artificial Sequence: Synthetic oligonucleotide
  misc_feature 1..20: note = Target: SCN10A; (+) strand; PAM type: YTN; PAM sequence: TTT
  source 1..20: mol_type = other DNA
taatcactgactggatttta

SEQ ID NO: 66017 - DNA, 20 bp, synthetic construct
  misc_feature 1..20: note = Description of Artificial Sequence: Synthetic oligonucleotide
  misc_feature 1..20: note = Target: SCN10A; (+) strand; PAM type: YTN; PAM sequence: TTT
  source 1..20: mol_type = other DNA
aatcactgactggattttag

SEQ ID NO: 66018 - DNA, 20 bp, synthetic construct
  misc_feature 1..20: note = Description of Artificial Sequence: Synthetic oligonucleotide
  misc_feature 1..20: note = Target: SCN10A; (+) strand; PAM type: YTN; PAM sequence: TTA
  source 1..20: mol_type = other DNA
atcactgactggattttaga

SEQ ID NO: 66019 - DNA, 20 bp, synthetic construct
  misc_feature 1..20: note = Description of Artificial Sequence: Synthetic oligonucleotide
  misc_feature 1..20: note = Target: SCN10A; (+) strand; PAM type: YTN; PAM sequence: CTG
  source 1..20: mol_type = other DNA
actggattttagaaactaca

SEQ ID NO: 66020 - DNA, 20 bp, synthetic construct
  misc_feature 1..20: note = Description of Artificial Sequence: Synthetic oligonucleotide
  misc_feature 1..20: note = Target: SCN10A; (+) strand; PAM type: YTN; PAM sequence: CTG
  source 1..20: mol_type = other DNA
gattttagaaactacagatg

SEQ ID NO: 66021 - DNA, 20 bp, synthetic construct
  misc_feature 1..20: note = Description of Artificial Sequence: Synthetic oligonucleotide
  misc_feature 1..20: note = Target: SCN10A; (+) strand; PAM type: YTN; PAM sequence: TTT
  source 1..20: mol_type = other DNA
tagaaactacagatgtccaa

SEQ ID NO: 66022 - DNA, 20 bp, synthetic construct
  misc_feature 1..20: note = Description of Artificial Sequence: Synthetic oligonucleotide
  misc_feature 1..20: note = Target: SCN10A; (+) strand; PAM type: YTN; PAM sequence: TTT
  source 1..20: mol_type = other DNA
agaaactacagatgtccaaa

SEQ ID NO: 66023 - DNA, 20 bp, synthetic construct
  misc_feature 1..20: note = Description of Artificial Sequence: Synthetic oligonucleotide
  misc_feature 1..20: note = Target: SCN10A; (+) strand; PAM type: YTN; PAM sequence: TTA
  source 1..20: mol_type = other DNA
gaaactacagatgtccaaac

SEQ ID NO: 66024 - DNA, 20 bp, synthetic construct
  misc_feature 1..20: note = Description of Artificial Sequence: Synthetic oligonucleotide
  misc_feature 1..20: note = Target: SCN10A; (+) strand; PAM type: YTN; PAM sequence: CTA
  source 1..20: mol_type = other DNA
cagatgtccaaactggcaaa

SEQ ID NO: 66025 - DNA, 20 bp, synthetic construct
  misc_feature 1..20: note = Description of Artificial Sequence: Synthetic oligonucleotide
  misc_feature 1..20: note = Target: SCN10A; (+) strand; PAM type: YTN; PAM sequence: CTG
  source 1..20: mol_type = other DNA
gcaaagcatagttctctaaa

SEQ ID NO: 66026 - DNA, 20 bp, synthetic construct
  misc_feature 1..20: note = Description of Artificial Sequence: Synthetic oligonucleotide
  misc_feature 1..20: note = Target: SCN10A; (+) strand; PAM type: YTN; PAM sequence: TTC
  source 1..20: mol_type = other DNA
tctaaagaagttggcacatc

SEQ ID NO: 66027 - DNA, 20 bp, synthetic construct
  misc_feature 1..20: note = Description of Artificial Sequence: Synthetic oligonucleotide
  misc_feature 1..20: note = Target: SCN10A; (+) strand; PAM type: YTN; PAM sequence: CTC
  source 1..20: mol_type = other DNA
taaagaagttggcacatcct

SEQ ID NO: 66028 - DNA, 20 bp, synthetic construct
  misc_feature 1..20: note = Description of Artificial Sequence: Synthetic oligonucleotide
  misc_feature 1..20: note = Target: SCN10A; (+) strand; PAM type: YTN; PAM sequence: CTA
  source 1..20: mol_type = other DNA
aagaagttggcacatcctgg

SEQ ID NO: 66029 - DNA, 20 bp, synthetic construct
  misc_feature 1..20: note = Description of Artificial Sequence: Synthetic oligonucleotide
  misc_feature 1..20: note = Target: SCN10A; (+) strand; PAM type: YTN; PAM sequence: TTG
  source 1..20: mol_type = other DNA
gcacatcctgggaccaaaat

SEQ ID NO: 66030 - DNA, 20 bp, synthetic construct
  misc_feature 1..20: note = Description of Artificial Sequence: Synthetic oligonucleotide
  misc_feature 1..20: note = Target: SCN10A; (+) strand; PAM type: YTN; PAM sequence: CTG
  source 1..20: mol_type = other DNA
ggaccaaaatcaacaatccc

SEQ ID NO: 66031 - DNA, 20 bp, synthetic construct
  misc_feature 1..20: note = Description of Artificial Sequence: Synthetic oligonucleotide
  misc_feature 1..20: note = Target: SCN10A; (+) strand; PAM type: YTN; PAM sequence: CTG
  source 1..20: mol_type = other DNA
tttggaacaaaagcaagaac

SEQ ID NO: 66032 - DNA, 20 bp, synthetic construct
  misc_feature 1..20: note = Description of Artificial Sequence: Synthetic oligonucleotide
  misc_feature 1..20: note = Target: SCN10A; (+) strand; PAM type: YTN; PAM sequence: TTT
  source 1..20: mol_type = other DNA
ggaacaaaagcaagaacttc

SEQ ID NO: 66033 - DNA, 20 bp, synthetic construct
  misc_feature 1..20: note = Description of Artificial Sequence: Synthetic oligonucleotide
  misc_feature 1..20: note = Target: SCN10A; (+) strand; PAM type: YTN; PAM sequence: TTG
  source 1..20: mol_type = other DNA
gaacaaaagcaagaacttcc

SEQ ID NO: 66034 - DNA, 20 bp, synthetic construct
  misc_feature 1..20: note = Description of Artificial Sequence: Synthetic oligonucleotide
  misc_feature 1..20: note = Target: SCN10A; (+) strand; PAM type: YTN; PAM sequence: CTT
  source 1..20: mol_type = other DNA
ccctggacctattttggcac

SEQ ID NO: 66035 - DNA, 20 bp, synthetic construct
  misc_feature 1..20: note = Description of Artificial Sequence: Synthetic oligonucleotide
  misc_feature 1..20: note = Target: SCN10A; (+) strand; PAM type: YTN; PAM sequence: TTC
  source 1..20: mol_type = other DNA
cctggacctattttggcact

SEQ ID NO: 66036 - DNA, 20 bp, synthetic construct
  misc_feature 1..20: note = Description of Artificial Sequence: Synthetic oligonucleotide
  misc_feature 1..20: note = Target: SCN10A; (+) strand; PAM type: YTN; PAM sequence: CTG
  source 1..20: mol_type = other DNA
gacctattttggcactaaaa

SEQ ID NO: 66037 - DNA, 20 bp, synthetic construct
  misc_feature 1..20: note = Description of Artificial Sequence: Synthetic oligonucleotide
  misc_feature 1..20: note = Target: SCN10A; (+) strand; PAM type: YTN; PAM sequence: CTA
  source 1..20: mol_type = other DNA
ttttggcactaaaaagaagc

SEQ ID NO: 66038 - DNA, 20 bp, synthetic construct
  misc_feature 1..20: note = Description of Artificial Sequence: Synthetic oligonucleotide
  misc_feature 1..20: note = Target: SCN10A; (+) strand; PAM type: YTN; PAM sequence: TTT
  source 1..20: mol_type = other DNA
tggcactaaaaagaagcaca

SEQ ID NO: 66039 - DNA, 20 bp, synthetic construct
  misc_feature 1..20: note = Description of Artificial Sequence: Synthetic oligonucleotide
  misc_feature 1..20: note = Target: SCN10A; (+) strand; PAM type: YTN; PAM sequence: TTT
  source 1..20: mol_type = other DNA
ggcactaaaaagaagcacag

SEQ ID NO: 66040 - DNA, 20 bp, synthetic construct
  misc_feature 1..20: note = Description of Artificial Sequence: Synthetic oligonucleotide
  misc_feature 1..20: note = Target: SCN10A; (+) strand; PAM type: YTN; PAM sequence: TTG
  source 1..20: mol_type = other DNA
gcactaaaaagaagcacagg

SEQ ID NO: 66041 - DNA, 20 bp, synthetic construct
  misc_feature 1..20: note = Description of Artificial Sequence: Synthetic oligonucleotide
  misc_feature 1..20: note = Target: SCN10A; (+) strand; PAM type: YTN; PAM sequence: CTA
  source 1..20: mol_type = other DNA
aaaagaagcacaggaagtag

SEQ ID NO: 66042 - DNA, 20 bp, synthetic construct
  misc_feature 1..20: note = Description of Artificial Sequence: Synthetic oligonucleotide
  misc_feature 1..20: note = Target: SCN10A; (+) strand; PAM type: YTN; PAM sequence: CTT
  source 1..20: mol_type = other DNA
tagatgtgccattttggcag

SEQ ID NO: 66043 - DNA, 20 bp, synthetic construct
  misc_feature 1..20: note = Description of Artificial Sequence: Synthetic oligonucleotide
  misc_feature 1..20: note = Target: SCN10A; (+) strand; PAM type: YTN; PAM sequence: TTT
  source 1..20: mol_type = other DNA
agatgtgccattttggcagg

SEQ ID NO: 66044 - DNA, 20 bp, synthetic construct
  misc_feature 1..20: note = Description of Artificial Sequence: Synthetic oligonucleotide
  misc_feature 1..20: note = Target: SCN10A; (+) strand; PAM type: YTN; PAM sequence: TTA
  source 1..20: mol_type = other DNA
gatgtgccattttggcagga

SEQ ID NO: 66045 - DNA, 20 bp, synthetic construct
  misc_feature 1..20: note = Description of Artificial Sequence: Synthetic oligonucleotide
  misc_feature 1..20: note = Target: SCN10A; (+) strand; PAM type: YTN; PAM sequence: TTT
  source 1..20: mol_type = other DNA
tggcaggaagcagccacctg

SEQ ID NO: 66046 - DNA, 20 bp, synthetic construct
  misc_feature 1..20: note = Description of Artificial Sequence: Synthetic oligonucleotide
  misc_feature 1..20: note = Target: SCN10A; (+) strand; PAM type: YTN; PAM sequence: TTT
  source 1..20: mol_type = other DNA
ggcaggaagcagccacctgt

SEQ ID NO: 66047 - DNA, 20 bp, synthetic construct
  misc_feature 1..20: note = Description of Artificial Sequence: Synthetic oligonucleotide
  misc_feature 1..20: note = Target: SCN10A; (+) strand; PAM type: YTN; PAM sequence: TTG
  source 1..20: mol_type = other DNA
gcaggaagcagccacctgtg

SEQ ID NO: 66048 - DNA, 20 bp, synthetic construct
  misc_feature 1..20: note = Description of Artificial Sequence: Synthetic oligonucleotide
  misc_feature 1..20: note = Target: SCN10A; (+) strand; PAM type: YTN; PAM sequence: CTG
  source 1..20: mol_type = other DNA
tgaggcatgatgggaaaaga

SEQ ID NO: 66049 - DNA, 20 bp, synthetic construct
  misc_feature 1..20: note = Description of Artificial Sequence: Synthetic oligonucleotide
  misc_feature 1..20: note = Target: SCN10A; (+) strand; PAM type: YTN; PAM sequence: CTT
  source 1..20: mol_type = other DNA
tgtaaacagccttgacattg

SEQ ID NO: 66050 - DNA, 20 bp, synthetic construct
  misc_feature 1..20: note = Description of Artificial Sequence: Synthetic oligonucleotide
  misc_feature 1..20: note = Target: SCN10A; (+) strand; PAM type: YTN; PAM sequence: TTT
  source 1..20: mol_type = other DNA
gtaaacagccttgacattgt

SEQ ID NO: 66051 - DNA, 20 bp, synthetic construct
  misc_feature 1..20: note = Description of Artificial Sequence: Synthetic oligonucleotide
  misc_feature 1..20: note = Target: SCN10A; (+) strand; PAM type: YTN; PAM sequence: TTG
  source 1..20: mol_type = other DNA
taaacagccttgacattgtt

SEQ ID NO: 66052 - DNA, 20 bp, synthetic construct
  misc_feature 1..20: note = Description of Artificial Sequence: Synthetic oligonucleotide
  misc_feature 1..20: note = Target: SCN10A; (+) strand; PAM type: YTN; PAM sequence: CTT
  source 1..20: mol_type = other DNA
gacattgttgaacttgattg

SEQ ID NO: 66053 - DNA, 20 bp, synthetic construct
  misc_feature 1..20: note = Description of Artificial Sequence: Synthetic oligonucleotide
  misc_feature 1..20: note = Target: SCN10A; (+) strand; PAM type: YTN; PAM sequence: TTG
  source 1..20: mol_type = other DNA
acattgttgaacttgattga

SEQ ID NO: 66054 - DNA, 20 bp, synthetic construct
  misc_feature 1..20: note = Description of Artificial Sequence: Synthetic oligonucleotide
  misc_feature 1..20: note = Target: SCN10A; (+) strand; PAM type: YTN; PAM sequence: TTG
  source 1..20: mol_type = other DNA
ttgaacttgattgattgcag

SEQ ID NO: 66055 - DNA, 20 bp, synthetic construct
  misc_feature 1..20: note = Description of Artificial Sequence: Synthetic oligonucleotide
  misc_feature 1..20: note = Target: SCN10A; (+) strand; PAM type: YTN; PAM sequence: TTG
  source 1..20: mol_type = other DNA
aacttgattgattgcagaga

SEQ ID NO: 66056 - DNA, 20 bp, synthetic construct
  misc_feature 1..20: note = Description of Artificial Sequence: Synthetic oligonucleotide
  misc_feature 1..20: note = Target: SCN10A; (+) strand; PAM type: YTN; PAM sequence: CTT
  source 1..20: mol_type = other DNA
gattgattgcagagacacag

SEQ ID NO: 66057 - DNA, 20 bp, synthetic construct
  misc_feature 1..20: note = Description of Artificial Sequence: Synthetic oligonucleotide
  misc_feature 1..20: note = Target: SCN10A; (+) strand; PAM type: YTN; PAM sequence: TTG
  source 1..20: mol_type = other DNA
attgattgcagagacacaga

SEQ ID NO: 66058 - DNA, 20 bp, synthetic construct
  misc_feature 1..20: note = Description of Artificial Sequence: Synthetic oligonucleotide
  misc_feature 1..20: note = Target: SCN10A; (+) strand; PAM type: YTN; PAM sequence: TTG
  source 1..20: mol_type = other DNA
attgcagagacacagagact

SEQ ID NO: 66059 - DNA, 20 bp, synthetic construct
  misc_feature 1..20: note = Description of Artificial Sequence: Synthetic oligonucleotide
  misc_feature 1..20: note = Target: SCN10A; (+) strand; PAM type: YTN; PAM sequence: TTG
  source 1..20: mol_type = other DNA
cagagacacagagactaaaa

SEQ ID NO: 66060 - DNA, 20 bp, synthetic construct
  misc_feature 1..20: note = Description of Artificial Sequence: Synthetic oligonucleotide
  misc_feature 1..20: note = Target: SCN10A; (+) strand; PAM type: YTN; PAM sequence: CTA
  source 1..20: mol_type = other DNA
aaagtatctacttgccagct

SEQ ID NO: 66061 - DNA, 20 bp, synthetic construct
  misc_feature 1..20: note = Description of Artificial Sequence: Synthetic oligonucleotide
  misc_feature 1..20: note = Target: SCN10A; (+) strand; PAM type: YTN; PAM sequence: CTA
  source 1..20: mol_type = other DNA
cttgccagcttaaaacatga

SEQ ID NO: 66062 - DNA, 20 bp, synthetic construct
  misc_feature 1..20: note = Description of Artificial Sequence: Synthetic oligonucleotide
  misc_feature 1..20: note = Target: SCN10A; (+) strand; PAM type: YTN; PAM sequence: CTT
  source 1..20: mol_type = other DNA
gccagcttaaaacatgacca

SEQ ID NO: 66063 - DNA, 20 bp, synthetic construct
  misc_feature 1..20: note = Description of Artificial Sequence: Synthetic oligonucleotide
  misc_feature 1..20: note = Target: SCN10A; (+) strand; PAM type: YTN; PAM sequence: TTG
  source 1..20: mol_type = other DNA
ccagcttaaaacatgaccat

SEQ ID NO: 66064 - DNA, 20 bp, synthetic construct
  misc_feature 1..20: note = Description of Artificial Sequence: Synthetic oligonucleotide
  misc_feature 1..20: note = Target: SCN10A; (+) strand; PAM type: YTN; PAM sequence: CTT
  source 1..20: mol_type = other DNA
aaaacatgaccatggcccca

SEQ ID NO: 66065 - DNA, 20 bp, synthetic construct
  misc_feature 1..20: note = Description of Artificial Sequence: Synthetic oligonucleotide
  misc_feature 1..20: note = Target: SCN10A; (+) strand; PAM type: YTN; PAM sequence: TTA
  source 1..20: mol_type = other DNA
aaacatgaccatggccccac

SEQ ID NO: 66066 - DNA, 20 bp, synthetic construct
  misc_feature 1..20: note = Description of Artificial Sequence: Synthetic oligonucleotide
  misc_feature 1..20: note = Target: SCN10A; (+) strand; PAM type: YTN; PAM sequence: CTC
  source 1..20: mol_type = other DNA
aaaaggatctcctatataaa

SEQ ID NO: 66067 - DNA, 20 bp, synthetic construct
  misc_feature 1..20: note = Description of Artificial Sequence: Synthetic oligonucleotide
  misc_feature 1..20: note = Target: SCN10A; (+) strand; PAM type: YTN; PAM sequence: CTC
  source 1..20: mol_type = other DNA
ctatataaaattgataacag

SEQ ID NO: 66068 - DNA, 20 bp, synthetic construct
  misc_feature 1..20: note = Description of Artificial Sequence: Synthetic oligonucleotide
  misc_feature 1..20: note = Target: SCN10A; (+) strand; PAM type: YTN; PAM sequence: CTA
  source 1..20: mol_type = other DNA
tataaaattgataacagaga

SEQ ID NO: 66069 - DNA, 20 bp, synthetic construct
  misc_feature 1..20: note = Description of Artificial Sequence: Synthetic oligonucleotide
  misc_feature 1..20: note = Target: SCN10A; (+) strand; PAM type: YTN; PAM sequence: TTG
  source 1..20: mol_type = other DNA
ataacagagagaactttcct

SEQ ID NO: 66070 - DNA, 20 bp, synthetic construct
  misc_feature 1..20: note = Description of Artificial Sequence: Synthetic oligonucleotide
  misc_feature 1..20: note = Target: SCN10A; (+) strand; PAM type: YTN; PAM sequence: CTT
  source 1..20: mol_type = other DNA
tcctcccttcatcctgttac

SEQ ID NO: 66071 - DNA, 20 bp, synthetic construct
  misc_feature 1..20: note = Description of Artificial Sequence: Synthetic oligonucleotide
  misc_feature 1..20: note = Target: SCN10A; (+) strand; PAM type: YTN; PAM sequence: TTT
  source 1..20: mol_type = other DNA
cctcccttcatcctgttacg

SEQ ID NO: 66072 - DNA, 20 bp, synthetic construct
  misc_feature 1..20: note = Description of Artificial Sequence: Synthetic oligonucleotide
  misc_feature 1..20: note = Target: SCN10A; (+) strand; PAM type: YTN; PAM sequence: TTC
  source 1..20: mol_type = other DNA
ctcccttcatcctgttacgc

SEQ ID NO: 66073 - DNA, 20 bp, synthetic construct
  misc_feature 1..20: note = Description of Artificial Sequence: Synthetic oligonucleotide
  misc_feature 1..20: note = Target: SCN10A; (+) strand; PAM type: YTN; PAM sequence: CTC
  source 1..20: mol_type = other DNA
ccttcatcctgttacgctta

SEQ ID NO: 66074 - DNA, 20 bp, synthetic construct
  misc_feature 1..20: note = Description of Artificial Sequence: Synthetic oligonucleotide
  misc_feature 1..20: note = Target: SCN10A; (+) strand; PAM type: YTN; PAM sequence: CTT
  source 1..20: mol_type = other DNA
catcctgttacgcttaaaga

SEQ ID NO: 66075 - DNA, 20 bp, synthetic construct
  misc_feature 1..20: note = Description of Artificial Sequence: Synthetic oligonucleotide
  misc_feature 1..20: note = Target: SCN10A; (+) strand; PAM type: YTN; PAM sequence: TTC
  source 1..20: mol_type = other DNA
atcctgttacgcttaaagag

SEQ ID NO: 66076 - DNA, 20 bp, synthetic construct
  misc_feature 1..20: note = Description of Artificial Sequence: Synthetic oligonucleotide
  misc_feature 1..20: note = Target: SCN10A; (+) strand; PAM type: YTN; PAM sequence: CTG
  source 1..20: mol_type = other DNA
ttacgcttaaagaggtcccc

SEQ ID NO: 66077 - DNA, 20 bp, synthetic construct
  misc_feature 1..20: note = Description of Artificial Sequence: Synthetic oligonucleotide
  misc_feature 1..20: note = Target: SCN10A; (+) strand; PAM type: YTN; PAM sequence: TTA
  source 1..20: mol_type = other DNA
cgcttaaagaggtccccctg

SEQ ID NO: 66078 - DNA, 20 bp, synthetic construct
  misc_feature 1..20: note = Description of Artificial Sequence: Synthetic oligonucleotide
  misc_feature 1..20: note = Target: SCN10A; (+) strand; PAM type: YTN; PAM sequence: CTT
  source 1..20: mol_type = other DNA
aaagaggtccccctgctcct

SEQ ID NO: 66079 - DNA, 20 bp, synthetic construct
  misc_feature 1..20: note = Description of Artificial Sequence: Synthetic oligonucleotide
  misc_feature 1..20: note = Target: SCN10A; (+) strand; PAM type: YTN; PAM sequence: TTA
  source 1..20: mol_type = other DNA
aagaggtccccctgctcctg

SEQ ID NO: 66080 - DNA, 20 bp, synthetic construct
  misc_feature 1..20: note = Description of Artificial Sequence: Synthetic oligonucleotide
  misc_feature 1..20: note = Target: SCN10A; (+) strand; PAM type: YTN; PAM sequence: CTG
  source 1..20: mol_type = other DNA
ctcctgttaacaccagtgtc

SEQ ID NO: 66081 - DNA, 20 bp, synthetic construct
  misc_feature 1..20: note = Description of Artificial Sequence: Synthetic oligonucleotide
  misc_feature 1..20: note = Target: SCN10A; (+) strand; PAM type: YTN; PAM sequence: CTC
  source 1..20: mol_type = other DNA
ctgttaacaccagtgtctcc

SEQ ID NO: 66082 - DNA, 20 bp, synthetic construct
  misc_feature 1..20: note = Description of Artificial Sequence: Synthetic oligonucleotide
  misc_feature 1..20: note = Target: SCN10A; (+) strand; PAM type: YTN; PAM sequence: CTG
  source 1..20: mol_type = other DNA
ttaacaccagtgtctccact

SEQ ID NO: 66083 - DNA, 20 bp, synthetic construct
  misc_feature 1..20: note = Description of Artificial Sequence: Synthetic oligonucleotide
  misc_feature 1..20: note = Target: SCN10A; (+) strand; PAM type: YTN; PAM sequence: TTA
  source 1..20: mol_type = other DNA
acaccagtgtctccactgtg

SEQ ID NO: 66084 - DNA, 20 bp, synthetic construct
  misc_feature 1..20: note = Description of Artificial Sequence: Synthetic oligonucleotide
  misc_feature 1..20: note = Target: SCN10A; (+) strand; PAM type: YTN; PAM sequence: CTC
  source 1..20: mol_type = other DNA
cactgtgcattctctcctgc

SEQ ID NO: 66085 - DNA, 20 bp, synthetic construct
  misc_feature 1..20: note = Description of Artificial Sequence: Synthetic oligonucleotide
  misc_feature 1..20: note = Target: SCN10A; (+) strand; PAM type: YTN; PAM sequence: CTG
  source 1..20: mol_type = other DNA
tgcattctctcctgccactg

SEQ ID NO: 66086 - DNA, 20 bp, synthetic construct
  misc_feature 1..20: note = Description of Artificial Sequence: Synthetic oligonucleotide
  misc_feature 1..20: note = Target: SCN10A; (+) strand; PAM type: YTN; PAM sequence: TTC
  source 1..20: mol_type = other DNA
tctcctgccactgcaggagt

SEQ ID NO: 66087 - DNA, 20 bp, synthetic construct
  misc_feature 1..20: note = Description of Artificial Sequence: Synthetic oligonucleotide
  misc_feature 1..20: note = Target: SCN10A; (+) strand; PAM type: YTN; PAM sequence: CTC
  source 1..20: mol_type = other DNA
tcctgccactgcaggagtct

SEQ ID NO: 66088 - DNA, 20 bp, synthetic construct
  misc_feature 1..20: note = Description of Artificial Sequence: Synthetic oligonucleotide
  misc_feature 1..20: note = Target: SCN10A; (+) strand; PAM type: YTN; PAM sequence: CTC
  source 1..20: mol_type = other DNA
ctgccactgcaggagtctgt

SEQ ID NO: 66089 - DNA, 20 bp, synthetic construct
  misc_feature 1..20: note = Description of Artificial Sequence: Synthetic oligonucleotide
  misc_feature 1..20: note = Target: SCN10A; (+) strand; PAM type: YTN; PAM sequence: CTG
  source 1..20: mol_type = other DNA
ccactgcaggagtctgttga

SEQ ID NO: 66090 - DNA, 20 bp, synthetic construct
  misc_feature 1..20: note = Description of Artificial Sequence: Synthetic oligonucleotide
  misc_feature 1..20: note = Target: SCN10A; (+) strand; PAM type: YTN; PAM sequence: CTG
  source 1..20: mol_type = other DNA
caggagtctgttgaatatac

SEQ ID NO: 66091 - DNA, 20 bp, synthetic construct
  misc_feature 1..20: note = Description of Artificial Sequence: Synthetic oligonucleotide
  misc_feature 1..20: note = Target: SCN10A; (+) strand; PAM type: YTN; PAM sequence: CTG
  source 1..20: mol_type = other DNA
ttgaatataccctttcttcc

SEQ ID NO: 66092 - DNA, 20 bp, synthetic construct
  misc_feature 1..20: note = Description of Artificial Sequence: Synthetic oligonucleotide
  misc_feature 1..20: note = Target: SCN10A; (+) strand; PAM type: YTN; PAM sequence: TTG
  source 1..20: mol_type = other DNA
aatataccctttcttccctt

SEQ ID NO: 66093 - DNA, 20 bp, synthetic construct
  misc_feature 1..20: note = Description of Artificial Sequence: Synthetic oligonucleotide
  misc_feature 1..20: note = Target: SCN10A; (+) strand; PAM type: YTN; PAM sequence: CTT
  source 1..20: mol_type = other DNA
tcttcccttaatcttcagtc

SEQ ID NO: 66094 - DNA, 20 bp, synthetic construct
  misc_feature 1..20: note = Description of Artificial Sequence: Synthetic oligonucleotide
  misc_feature 1..20: note = Target: SCN10A; (+) strand; PAM type: YTN; PAM sequence: TTT
  source 1..20: mol_type = other DNA
cttcccttaatcttcagtct

SEQ ID NO: 66095 - DNA, 20 bp, synthetic construct
  misc_feature 1..20: note = Description of Artificial Sequence: Synthetic oligonucleotide
  misc_feature 1..20: note = Target: SCN10A; (+) strand; PAM type: YTN; PAM sequence: TTC
  source 1..20: mol_type = other DNA
ttcccttaatcttcagtctc

SEQ ID NO: 66096 - DNA, 20 bp, synthetic construct
  misc_feature 1..20: note = Description of Artificial Sequence: Synthetic oligonucleotide
  misc_feature 1..20: note = Target: SCN10A; (+) strand; PAM type: YTN; PAM sequence: CTT
  source 1..20: mol_type = other DNA
cccttaatcttcagtctctc

SEQ ID NO: 66097 - DNA, 20 bp, synthetic construct
  misc_feature 1..20: note = Description of Artificial Sequence: Synthetic oligonucleotide
  misc_feature 1..20: note = Target: SCN10A; (+) strand; PAM type: YTN; PAM sequence: TTC
  source 1..20: mol_type = other DNA
ccttaatcttcagtctctct

SEQ ID NO: 66098 - DNA, 20 bp, synthetic construct
  misc_feature 1..20: note = Description of Artificial Sequence: Synthetic oligonucleotide
  misc_feature 1..20: note = Target: SCN10A; (+) strand; PAM type: YTN; PAM sequence: CTT
  source 1..20: mol_type = other DNA
aatcttcagtctctcttatt

SEQ ID NO: 66099 - DNA, 20 bp, synthetic construct
  misc_feature 1..20: note = Description of Artificial Sequence: Synthetic oligonucleotide
  misc_feature 1..20: note = Target: SCN10A; (+) strand; PAM type: YTN; PAM sequence: TTA
  source 1..20: mol_type = other DNA
atcttcagtctctcttattc

SEQ ID NO: 66100 - DNA, 20 bp, synthetic construct
  misc_feature 1..20: note = Description of Artificial Sequence: Synthetic oligonucleotide
  misc_feature 1..20: note = Target: SCN10A; (+) strand; PAM type: YTN; PAM sequence: CTT
  source 1..20: mol_type = other DNA
cagtctctcttattctccca

SEQ ID NO: 66101 - DNA, 20 bp, synthetic construct
  misc_feature 1..20: note = Description of Artificial Sequence: Synthetic oligonucleotide
  misc_feature 1..20: note = Target: SCN10A; (+) strand; PAM type: YTN; PAM sequence: TTC
  source 1..20: mol_type = other DNA
agtctctcttattctcccag

SEQ ID NO: 66102 - DNA, 20 bp, synthetic construct
  misc_feature 1..20: note = Description of Artificial Sequence: Synthetic oligonucleotide
  misc_feature 1..20: note = Target: SCN10A; (+) strand; PAM type: YTN; PAM sequence: CTC
  source 1..20: mol_type = other DNA
tcttattctcccagatcctt

SEQ ID NO: 66103 - DNA, 20 bp, synthetic construct
  misc_feature 1..20: note = Description of Artificial Sequence: Synthetic oligonucleotide
  misc_feature 1..20: note = Target: SCN10A; (+) strand; PAM type: YTN; PAM sequence: CTC
  source 1..20: mol_type = other DNA
ttattctcccagatccttcc

SEQ ID NO: 66104 - DNA, 20 bp, synthetic construct
  misc_feature 1..20: note = Description of Artificial Sequence: Synthetic oligonucleotide
  misc_feature 1..20: note = Target: SCN10A; (+) strand; PAM type: YTN; PAM sequence: CTT
  source 1..20: mol_type = other DNA
attctcccagatccttccca

SEQ ID NO: 66105 - DNA, 20 bp, synthetic construct
  misc_feature 1..20: note = Description of Artificial Sequence: Synthetic oligonucleotide
  misc_feature 1..20: note = Target: SCN10A; (+) strand; PAM type: YTN; PAM sequence: TTA
  source 1..20: mol_type = other DNA
ttctcccagatccttcccat

SEQ ID NO: 66106 - DNA, 20 bp, synthetic construct
  misc_feature 1..20: note = Description of Artificial Sequence: Synthetic oligonucleotide
  misc_feature 1..20: note = Target: SCN10A; (+) strand; PAM type: YTN; PAM sequence: TTC
  source 1..20: mol_type = other DNA
tcccagatccttcccattag

SEQ ID NO: 66107 - DNA, 20 bp, synthetic construct
  misc_feature 1..20: note = Description of Artificial Sequence: Synthetic oligonucleotide
  misc_feature 1..20: note = Target: SCN10A; (+) strand; PAM type: YTN; PAM sequence: CTC
  source 1..20: mol_type = other DNA
ccagatccttcccattagca

SEQ ID NO: 66108 - DNA, 20 bp, synthetic construct
  misc_feature 1..20: note = Description of Artificial Sequence: Synthetic oligonucleotide
  misc_feature 1..20: note = Target: SCN10A; (+) strand; PAM type: YTN; PAM sequence: CTT
  source 1..20: mol_type = other DNA
cccattagcatgcaaatatg

SEQ ID NO: 66109 - DNA, 20 bp, synthetic construct
  misc_feature 1..20: note = Description of Artificial Sequence: Synthetic oligonucleotide
  misc_feature 1..20: note = Target: SCN10A; (+) strand; PAM type: YTN; PAM sequence: TTC
  source 1..20: mol_type = other DNA
ccattagcatgcaaatatgc

SEQ ID NO: 66110 - DNA, 20 bp, synthetic construct
  misc_feature 1..20: note = Description of Artificial Sequence: Synthetic oligonucleotide
  misc_feature 1..20: note = Target: SCN10A; (+) strand; PAM type: YTN; PAM sequence: TTA
  source 1..20: mol_type = other DNA
gcatgcaaatatgctcaaaa

SEQ ID NO: 66111 - DNA, 20 bp, synthetic construct
  misc_feature 1..20: note = Description of Artificial Sequence: Synthetic oligonucleotide
  misc_feature 1..20: note = Target: SCN10A; (+) strand; PAM type: YTN; PAM sequence: CTC
  source 1..20: mol_type = other DNA
aaaacaaacaaacaaacaaa

SEQ ID NO: 66112 - DNA, 20 bp, synthetic construct
  misc_feature 1..20: note = Description of Artificial Sequence: Synthetic oligonucleotide
  misc_feature 1..20: note = Target: SCN10A; (+) strand; PAM type: YTN; PAM sequence: CTC
  source 1..20: mol_type = other DNA
ccccaaacacaaaaaccaaa

SEQ ID NO: 66113 - DNA, 20 bp, synthetic construct
  misc_feature 1..20: note = Description of Artificial Sequence: Synthetic oligonucleotide
  misc_feature 1..20: note = Target: SCN10A; (+) strand; PAM type: YTN; PAM sequence: CTT
  source 1..20: mol_type = other DNA
ctttcaattctccctactcc

SEQ ID NO: 66114 - DNA, 20 bp, synthetic construct
  misc_feature 1..20: note = Description of Artificial Sequence: Synthetic oligonucleotide
  misc_feature 1..20: note = Target: SCN10A; (+) strand; PAM type: YTN; PAM sequence: TTC
  source 1..20: mol_type = other DNA
tttcaattctccctactccc

SEQ ID NO: 66115 - DNA, 20 bp, synthetic construct
  misc_feature 1..20: note = Description of Artificial Sequence: Synthetic oligonucleotide
  misc_feature 1..20: note = Target: SCN10A; (+) strand; PAM type: YTN; PAM sequence: CTT
  source 1..20: mol_type = other DNA
tcaattctccctactcccta

SEQ ID NO: 66116 - DNA, 20 bp, synthetic construct
  misc_feature 1..20: note = Description of Artificial Sequence: Synthetic oligonucleotide
  misc_feature 1..20: note = Target: SCN10A; (+) strand; PAM type: YTN; PAM sequence: TTT
  source 1..20: mol_type = other DNA
caattctccctactccctag

SEQ ID NO: 66117 - DNA, 20 bp, synthetic construct
  misc_feature 1..20: note = Description of Artificial Sequence: Synthetic oligonucleotide
  misc_feature 1..20: note = Target: SCN10A; (+) strand; PAM type: YTN; PAM sequence: TTC
  source 1..20: mol_type = other DNA
aattctccctactccctagt

SEQ ID NO: 66118 - DNA, 20 bp, synthetic construct
  misc_feature 1..20: note = Description of Artificial Sequence: Synthetic oligonucleotide
  misc_feature 1..20: note = Target: SCN10A; (+) strand; PAM type: YTN; PAM sequence: TTC
  source 1..20: mol_type = other DNA
tccctactccctagtgccat

SEQ ID NO: 66119 - DNA, 20 bp, synthetic construct
  misc_feature 1..20: note = Description of Artificial Sequence: Synthetic oligonucleotide
  misc_feature 1..20: note = Target: SCN10A; (+) strand; PAM type: YTN; PAM sequence: CTC
  source 1..20: mol_type = other DNA
cctactccctagtgccatct

SEQ ID NO: 66120 - DNA, 20 bp, synthetic construct
  misc_feature 1..20: note = Description of Artificial Sequence: Synthetic oligonucleotide
  misc_feature 1..20: note = Target: SCN10A; (+) strand; PAM type: YTN; PAM sequence: CTA
  source 1..20: mol_type = other DNA
ctccctagtgccatcttact

SEQ ID NO: 66121 - DNA, 20 bp, synthetic construct
  misc_feature 1..20: note = Description of Artificial Sequence: Synthetic oligonucleotide
  misc_feature 1..20: note = Target: SCN10A; (+) strand; PAM type: YTN; PAM sequence: CTC
  source 1..20: mol_type = other DNA
cctagtgccatcttactatc

SEQ ID NO: 66122 - DNA, 20 bp, synthetic construct
  misc_feature 1..20: note = Description of Artificial Sequence: Synthetic oligonucleotide
  misc_feature 1..20: note = Target: SCN10A; (+) strand; PAM type: YTN; PAM sequence: CTA
  source 1..20: mol_type = other DNA
gtgccatcttactatctcct

SEQ ID NO: 66123 - DNA, 20 bp, synthetic construct
  misc_feature 1..20: note = Description of Artificial Sequence: Synthetic oligonucleotide
  misc_feature 1..20: note = Target: SCN10A; (+) strand; PAM type: YTN; PAM sequence: CTT
  source 1..20: mol_type = other DNA
actatctccttttcctcaca

SEQ ID NO: 66124 - DNA, 20 bp, synthetic construct
  misc_feature 1..20: note = Description of Artificial Sequence: Synthetic oligonucleotide
  misc_feature 1..20: note = Target: SCN10A; (+) strand; PAM type: YTN; PAM sequence: TTA
  source 1..20: mol_type = other DNA
ctatctccttttcctcacag

SEQ ID NO: 66125 - DNA, 20 bp, synthetic construct
  misc_feature 1..20: note = Description of Artificial Sequence: Synthetic oligonucleotide
  misc_feature 1..20: note = Target: SCN10A; (+) strand; PAM type: YTN; PAM sequence: CTA
  source 1..20: mol_type = other DNA
tctccttttcctcacaggca

SEQ ID NO: 66126 - DNA, 20 bp, synthetic construct
  misc_feature 1..20: note = Description of Artificial Sequence: Synthetic oligonucleotide
  misc_feature 1..20: note = Target: SCN10A; (+) strand; PAM type: YTN; PAM sequence: CTC
  source 1..20: mol_type = other DNA
cttttcctcacaggcaaact

SEQ ID NO: 66127 - DNA, 20 bp, synthetic construct
  misc_feature 1..20: note = Description of Artificial Sequence: Synthetic oligonucleotide
  misc_feature 1..20: note = Target: SCN10A; (+) strand; PAM type: YTN; PAM sequence: CTT
  source 1..20: mol_type = other DNA
ttcctcacaggcaaacttct

SEQ ID NO: 66128 - DNA, 20 bp, synthetic construct
  misc_feature 1..20: note = Description of Artificial Sequence: Synthetic oligonucleotide
  misc_feature 1..20: note = Target: SCN10A; (+) strand; PAM type: YTN; PAM sequence: TTT
  source 1..20: mol_type = other DNA
tcctcacaggcaaacttctt

SEQ ID NO: 66129 - DNA, 20 bp, synthetic construct
  misc_feature 1..20: note = Description of Artificial Sequence: Synthetic oligonucleotide
  misc_feature 1..20: note = Target: SCN10A; (+) strand; PAM type: YTN; PAM sequence: TTT
  source 1..20: mol_type = other DNA
cctcacaggcaaacttcttg

SEQ ID NO: 66130 - DNA, 20 bp, synthetic construct
  misc_feature 1..20: note = Description of Artificial Sequence: Synthetic oligonucleotide
  misc_feature 1..20: note = Target: SCN10A; (+) strand; PAM type: YTN; PAM sequence: TTC
  source 1..20: mol_type = other DNA
ctcacaggcaaacttcttga

SEQ ID NO: 66131 - DNA, 20 bp, synthetic construct
  misc_feature 1..20: note = Description of Artificial Sequence: Synthetic oligonucleotide
  misc_feature 1..20: note = Target: SCN10A; (+) strand; PAM type: YTN; PAM sequence: CTC
  source 1..20: mol_type = other DNA
acaggcaaacttcttgaaaa

SEQ ID NO: 66132 - DNA, 20 bp, synthetic construct
  misc_feature 1..20: note = Description of Artificial Sequence: Synthetic oligonucleotide
  misc_feature 1..20: note = Target: SCN10A; (+) strand; PAM type: YTN; PAM sequence: CTT
  source 1..20: mol_type = other DNA
cttgaaaaaattgtctgtac

SEQ ID NO: 66133 - DNA, 20 bp, synthetic construct
  misc_feature 1..20: note = Description of Artificial Sequence: Synthetic oligonucleotide
  misc_feature 1..20: note = Target: SCN10A; (+) strand; PAM type: YTN; PAM sequence: TTC
  source 1..20: mol_type = other DNA
ttgaaaaaattgtctgtaca

SEQ ID NO: 66134 - DNA, 20 bp, synthetic construct
  misc_feature 1..20: note = Description of Artificial Sequence: Synthetic oligonucleotide
  misc_feature 1..20: note = Target: SCN10A; (+) strand; PAM type: YTN; PAM sequence: CTT
  source 1..20: mol_type = other DNA
gaaaaaattgtctgtacacc

SEQ ID NO: 66135 - DNA, 20 bp, synthetic construct
  misc_feature 1..20: note = Description of Artificial Sequence: Synthetic oligonucleotide
  misc_feature 1..20: note = Target: SCN10A; (+) strand; PAM type: YTN; PAM sequence: TTG
  source 1..20: mol_type = other DNA
aaaaaattgtctgtacacca

SEQ ID NO: 66136 - DNA, 20 bp, synthetic construct
  misc_feature 1..20: note = Description of Artificial Sequence: Synthetic oligonucleotide
  misc_feature 1..20: note = Target: SCN10A; (+) strand; PAM type: YTN; PAM sequence: TTG
  source 1..20: mol_type = other DNA
tctgtacaccatatctccat

SEQ ID NO: 66137 - DNA, 20 bp, synthetic construct
  misc_feature 1..20: note = Description of Artificial Sequence: Synthetic oligonucleotide
  misc_feature 1..20: note = Target: SCN10A; (+) strand; PAM type: YTN; PAM sequence: CTG
  source 1..20: mol_type = other DNA
tacaccatatctccatttct

SEQ ID NO: 66138 - DNA, 20 bp, synthetic construct
  misc_feature 1..20: note = Description of Artificial Sequence: Synthetic oligonucleotide
  misc_feature 1..20: note = Target: SCN10A; (+) strand; PAM type: YTN; PAM sequence: CTC
  source 1..20: mol_type = other DNA
catttcttcacctctcaccc

SEQ ID NO: 66139 - DNA, 20 bp, synthetic construct
  misc_feature 1..20: note = Description of Artificial Sequence: Synthetic oligonucleotide
  misc_feature 1..20: note = Target: SCN10A; (+) strand; PAM type: YTN; PAM sequence: TTT
  source 1..20: mol_type = other DNA
cttcacctctcacccgctct

SEQ ID NO: 66140 - DNA, 20 bp, synthetic construct
  misc_feature 1..20: note = Description of Artificial Sequence: Synthetic oligonucleotide
  misc_feature 1..20: note = Target: SCN10A; (+) strand; PAM type: YTN; PAM sequence: TTC
  source 1..20: mol_type = other DNA
ttcacctctcacccgctctt

SEQ ID NO: 66141 - DNA, 20 bp, synthetic construct
  misc_feature 1..20: note = Description of Artificial Sequence: Synthetic oligonucleotide
  misc_feature 1..20: note = Target: SCN10A; (+) strand; PAM type: YTN; PAM sequence: CTT
  source 1..20: mol_type = other DNA
cacctctcacccgctcttta

SEQ ID NO: 66142 - DNA, 20 bp, synthetic construct
  misc_feature 1..20: note = Description of Artificial Sequence: Synthetic oligonucleotide
  misc_feature 1..20: note = Target: SCN10A; (+) strand; PAM type: YTN; PAM sequence: TTC
  source 1..20: mol_type = other DNA
acctctcacccgctctttaa

SEQ ID NO: 66143 - DNA, 20 bp, synthetic construct
  misc_feature 1..20: note = Description of Artificial Sequence: Synthetic oligonucleotide
  misc_feature 1..20: note = Target: SCN10A; (+) strand; PAM type: YTN; PAM sequence: CTC
  source 1..20: mol_type = other DNA
tcacccgctctttaagcccc

SEQ ID NO: 66144 - DNA, 20 bp, synthetic construct
  misc_feature 1..20: note = Description of Artificial Sequence: Synthetic oligonucleotide
  misc_feature 1..20: note = Target: SCN10A; (+) strand; PAM type: YTN; PAM sequence: CTC
  source 1..20: mol_type = other DNA
acccgctctttaagcccctt

SEQ ID NO: 66145 - DNA, 20 bp, synthetic construct
  misc_feature 1..20: note = Description of Artificial Sequence: Synthetic oligonucleotide
  misc_feature 1..20: note = Target: SCN10A; (+) strand; PAM type: YTN; PAM sequence: CTC
  source 1..20: mol_type = other DNA
tttaagccccttcaatatga

SEQ ID NO: 66146 - DNA, 20 bp, synthetic construct
  misc_feature 1..20: note = Description of Artificial Sequence: Synthetic oligonucleotide
  misc_feature 1..20: note = Target: SCN10A; (+) strand; PAM type: YTN; PAM sequence: CTT
  source 1..20: mol_type = other DNA
taagccccttcaatatgacc

SEQ ID NO: 66147 - DNA, 20 bp, synthetic construct
  misc_feature 1..20: note = Description of Artificial Sequence: Synthetic oligonucleotide
  misc_feature 1..20: note = Target: SCN10A; (+) strand; PAM type: YTN; PAM sequence: TTT
  source 1..20: mol_type = other DNA
aagccccttcaatatgacct

SEQ ID NO: 66148 - DNA, 20 bp, synthetic construct
  misc_feature 1..20: note = Description of Artificial Sequence: Synthetic oligonucleotide
  misc_feature 1..20: note = Target: SCN10A; (+) strand; PAM type: YTN; PAM sequence: TTA
  source 1..20: mol_type = other DNA
agccccttcaatatgacctc

SEQ ID NO: 66149 - DNA, 20 bp, synthetic construct
  misc_feature 1..20: note = Description of Artificial Sequence: Synthetic oligonucleotide
  misc_feature 1..20: note = Target: SCN10A; (+) strand; PAM type: YTN; PAM sequence: CTT
  source 1..20: mol_type = other DNA
caatatgacctctgcctacc

SEQ ID NO: 66150 - DNA, 20 bp, synthetic construct
  misc_feature 1..20: note = Description of Artificial Sequence: Synthetic oligonucleotide
  misc_feature 1..20: note = Target: SCN10A; (+) strand; PAM type: YTN; PAM sequence: TTC
  source 1..20: mol_type = other DNA
aatatgacctctgcctaccc

SEQ ID NO: 66151 - DNA, 20 bp, synthetic construct
  misc_feature 1..20: note = Description of Artificial Sequence: Synthetic oligonucleotide
  misc_feature 1..20: note = Target: SCN10A; (+) strand; PAM type: YTN; PAM sequence: CTC
  source 1..20: mol_type = other DNA
tgcctacccttttactccat

SEQ ID NO: 66152 - DNA, 20 bp, synthetic construct
  misc_feature 1..20: note = Description of Artificial Sequence: Synthetic oligonucleotide
  misc_feature 1..20: note = Target: SCN10A; (+) strand; PAM type: YTN; PAM sequence: CTG
  source 1..20: mol_type = other DNA
cctacccttttactccatta

SEQ ID NO: 66153 - DNA, 20 bp, synthetic construct
  misc_feature 1..20: note = Description of Artificial Sequence: Synthetic oligonucleotide
  misc_feature 1..20: note = Target: SCN10A; (+) strand; PAM type: YTN; PAM sequence: CTA
  source 1..20: mol_type = other DNA
cccttttactccattaatcc

SEQ ID NO: 66154 - DNA, 20 bp, synthetic construct
  misc_feature 1..20: note = Description of Artificial Sequence: Synthetic oligonucleotide
  misc_feature 1..20: note = Target: SCN10A; (+) strand; PAM type: YTN; PAM sequence: CTT
  source 1..20: mol_type = other DNA
ttactccattaatcctcttt

SEQ ID NO: 66155 - DNA, 20 bp, synthetic construct
  misc_feature 1..20: note = Description of Artificial Sequence: Synthetic oligonucleotide
  misc_feature 1..20: note = Target: SCN10A; (+) strand; PAM type: YTN; PAM sequence: TTT
  source 1..20: mol_type = other DNA
tactccattaatcctctttt

SEQ ID NO: 66156 - DNA, 20 bp, synthetic construct
  misc_feature 1..20: note = Description of Artificial Sequence: Synthetic oligonucleotide
  misc_feature 1..20: note = Target: SCN10A; (+) strand; PAM type: YTN; PAM sequence: TTT
  source 1..20: mol_type = other DNA
actccattaatcctcttttg

SEQ ID NO: 66157 - DNA, 20 bp, synthetic construct
  misc_feature 1..20: note = Description of Artificial Sequence: Synthetic oligonucleotide
  misc_feature 1..20: note = Target: SCN10A; (+) strand; PAM type: YTN; PAM sequence: TTA
  source 1..20: mol_type = other DNA
ctccattaatcctcttttgc

SEQ ID NO: 66158 - DNA, 20 bp, synthetic construct
  misc_feature 1..20: note = Description of Artificial Sequence: Synthetic oligonucleotide
  misc_feature 1..20: note = Target: SCN10A; (+) strand; PAM type: YTN; PAM sequence: CTC
  source 1..20: mol_type = other DNA
cattaatcctcttttgctta

SEQ ID NO: 66159 - DNA, 20 bp, synthetic construct
  misc_feature 1..20: note = Description of Artificial Sequence: Synthetic oligonucleotide
  misc_feature 1..20: note = Target: SCN10A; (+) strand; PAM type: YTN; PAM sequence: TTA
  source 1..20: mol_type = other DNA
atcctcttttgcttagatca

SEQ ID NO: 66160 - DNA, 20 bp, synthetic construct
  misc_feature 1..20: note = Description of Artificial Sequence: Synthetic oligonucleotide
  misc_feature 1..20: note = Target: SCN10A; (+) strand; PAM type: YTN; PAM sequence: CTC
  source 1..20: mol_type = other DNA
ttttgcttagatcaccaaag

SEQ ID NO: 66161 - DNA, 20 bp, synthetic construct
  misc_feature 1..20: note = Description of Artificial Sequence: Synthetic oligonucleotide
  misc_feature 1..20: note = Target: SCN10A; (+) strand; PAM type: YTN; PAM sequence: CTT
  source 1..20: mol_type = other DNA
ttgcttagatcaccaaagac

SEQ ID NO: 66162 - DNA, 20 bp, synthetic construct
  misc_feature 1..20: note = Description of Artificial Sequence: Synthetic oligonucleotide
  misc_feature 1..20: note = Target: SCN10A; (+) strand; PAM type: YTN; PAM sequence: TTT
  source 1..20: mol_type = other DNA
tgcttagatcaccaaagaca

SEQ ID NO: 66163 - DNA, 20 bp, synthetic construct
  misc_feature 1..20: note = Description of Artificial Sequence: Synthetic oligonucleotide
  misc_feature 1..20: note = Target: SCN10A; (+) strand; PAM type: YTN; PAM sequence: TTT
  source 1..20: mol_type = other DNA
gcttagatcaccaaagacat

SEQ ID NO: 66164 - DNA, 20 bp, synthetic construct
  misc_feature 1..20: note = Description of Artificial Sequence: Synthetic oligonucleotide
  misc_feature 1..20: note = Target: SCN10A; (+) strand; PAM type: YTN; PAM sequence: TTG
  source 1..20: mol_type = other DNA
cttagatcaccaaagacatc

SEQ ID NO: 66165 - DNA, 20 bp, synthetic construct
  misc_feature 1..20: note = Description of Artificial Sequence: Synthetic oligonucleotide
  misc_feature 1..20: note = Target: SCN10A; (+) strand; PAM type: YTN; PAM sequence: CTT
  source 1..20: mol_type = other DNA
agatcaccaaagacatccat

SEQ ID NO: 66166 - DNA, 20 bp, synthetic construct
  misc_feature 1..20: note = Description of Artificial Sequence: Synthetic oligonucleotide
  misc_feature 1..20: note = Target: SCN10A; (+) strand; PAM type: YTN; PAM sequence: TTA
  source 1..20: mol_type = other DNA
gatcaccaaagacatccatg

SEQ ID NO: 66167 - DNA, 20 bp, synthetic construct
  misc_feature 1..20: note = Description of Artificial Sequence: Synthetic oligonucleotide
  misc_feature 1..20: note = Target: SCN10A; (+) strand; PAM type: YTN; PAM sequence: CTA
  source 1..20: mol_type = other DNA
aagcccctggaccttttcat

SEQ ID NO: 66168 - DNA, 20 bp, synthetic construct
  misc_feature 1..20: note = Description of Artificial Sequence: Synthetic oligonucleotide
  misc_feature 1..20: note = Target: SCN10A; (+) strand; PAM type: YTN; PAM sequence: CTG
  source 1..20: mol_type = other DNA
gaccttttcatgtttcattt

SEQ ID NO: 66169 - DNA, 20 bp, synthetic construct
  misc_feature 1..20: note = Description of Artificial Sequence: Synthetic oligonucleotide
  misc_feature 1..20: note = Target: SCN10A; (+) strand; PAM type: YTN; PAM sequence: CTT
  source 1..20: mol_type = other DNA
ttcatgtttcattttacctg

SEQ ID NO: 66170 - DNA, 20 bp, synthetic construct
  misc_feature 1..20: note = Description of Artificial Sequence: Synthetic oligonucleotide
  misc_feature 1..20: note = Target: SCN10A; (+) strand; PAM type: YTN; PAM sequence: TTT
  source 1..20: mol_type = other DNA
tcatgtttcattttacctga

SEQ ID NO: 66171 - DNA, 20 bp, synthetic construct
  misc_feature 1..20: note = Description of Artificial Sequence: Synthetic oligonucleotide
  misc_feature 1..20: note = Target: SCN10A; (+) strand; PAM type: YTN; PAM sequence: TTT
  source 1..20: mol_type = other DNA
catgtttcattttacctgac

SEQ ID NO: 66172 - DNA, 20 bp, synthetic construct
  misc_feature 1..20: note = Description of Artificial Sequence: Synthetic oligonucleotide
  misc_feature 1..20: note = Target: SCN10A; (+) strand; PAM type: YTN; PAM sequence: TTC
  source 1..20: mol_type = other DNA
atgtttcattttacctgacc

SEQ ID NO: 66173 - DNA, 20 bp, synthetic construct
  misc_feature 1..20: note = Description of Artificial Sequence: Synthetic oligonucleotide
  misc_feature 1..20: note = Target: SCN10A; (+) strand; PAM type: YTN; PAM sequence: TTT
  source 1..20: mol_type = other DNA
cattttacctgacctttcca

SEQ ID NO: 66174 - DNA, 20 bp, synthetic construct
  misc_feature 1..20: note = Description of Artificial Sequence: Synthetic oligonucleotide
  misc_feature 1..20: note = Target: SCN10A; (+) strand; PAM type: YTN; PAM sequence: TTC
  source 1..20: mol_type = other DNA
attttacctgacctttccac

SEQ ID NO: 66175 - DNA, 20 bp, synthetic construct
  misc_feature 1..20: note = Description of Artificial Sequence: Synthetic oligonucleotide
  misc_feature 1..20: note = Target: SCN10A; (+) strand; PAM type: YTN; PAM sequence: TTT
  source 1..20: mol_type = other DNA
tacctgacctttccacagca

SEQ ID NO: 66176 - DNA, 20 bp, synthetic construct
  misc_feature 1..20: note = Description of Artificial Sequence: Synthetic oligonucleotide
  misc_feature 1..20: note = Target: SCN10A; (+) strand; PAM type: YTN; PAM sequence: TTT
  source 1..20: mol_type = other DNA
acctgacctttccacagcat

SEQ ID NO: 66177 - DNA, 20 bp, synthetic construct
  misc_feature 1..20: note = Description of Artificial Sequence: Synthetic oligonucleotide
  misc_feature 1..20: note = Target: SCN10A; (+) strand; PAM type: YTN; PAM sequence: TTA
  source 1..20: mol_type = other DNA
cctgacctttccacagcatt

SEQ ID NO: 66178 - DNA, 20 bp, synthetic construct
  misc_feature 1..20: note = Description of Artificial Sequence: Synthetic oligonucleotide
  misc_feature 1..20: note = Target: SCN10A; (+) strand; PAM type: YTN; PAM sequence: CTG
  source 1..20: mol_type = other DNA
acctttccacagcattgcct

SEQ ID NO: 66179 - DNA, 20 bp, synthetic construct
  misc_feature 1..20: note = Description of Artificial Sequence: Synthetic oligonucleotide
  misc_feature 1..20: note = Target: SCN10A; (+) strand; PAM type: YTN; PAM sequence: CTT
  source 1..20: mol_type = other DNA
tccacagcattgcctctgtt

SEQ ID NO: 66180 - DNA, 20 bp, synthetic construct
  misc_feature 1..20: note = Description of Artificial Sequence: Synthetic oligonucleotide
  misc_feature 1..20: note = Target: SCN10A; (+) strand; PAM type: YTN; PAM sequence: TTT
  source 1..20: mol_type = other DNA
ccacagcattgcctctgttg

SEQ ID NO: 66181 - DNA, 20 bp, synthetic construct
  misc_feature 1..20: note = Description of Artificial Sequence: Synthetic oligonucleotide
  misc_feature 1..20: note = Target: SCN10A; (+) strand; PAM type: YTN; PAM sequence: TTC
  source 1..20: mol_type = other DNA
cacagcattgcctctgttgg

SEQ ID NO: 66182 - DNA, 20 bp, synthetic construct
  misc_feature 1..20: note = Description of Artificial Sequence: Synthetic oligonucleotide
  misc_feature 1..20: note = Target: SCN10A; (+) strand; PAM type: YTN; PAM sequence: TTG
  source 1..20: mol_type = other DNA
cctctgttggcctttctatt

SEQ ID NO: 66183 - DNA, 20 bp, synthetic construct
  misc_feature 1..20: note = Description of Artificial Sequence: Synthetic oligonucleotide
  misc_feature 1..20: note = Target: SCN10A; (+) strand; PAM type: YTN; PAM sequence: CTC
  source 1..20: mol_type = other DNA
tgttggcctttctattcttt

SEQ ID NO: 66184 - DNA, 20 bp, synthetic construct
  misc_feature 1..20: note = Description of Artificial Sequence: Synthetic oligonucleotide
  misc_feature 1..20: note = Target: SCN10A; (+) strand; PAM type: YTN; PAM sequence: CTG
  source 1..20: mol_type = other DNA
ttggcctttctattctttct

SEQ ID NO: 66185 - DNA, 20 bp, synthetic construct
  misc_feature 1..20: note = Description of Artificial Sequence: Synthetic oligonucleotide
  misc_feature 1..20: note = Target: SCN10A; (+) strand; PAM type: YTN; PAM sequence: TTG
  source 1..20: mol_type = other DNA
gcctttctattctttctgaa

SEQ ID NO: 66186 - DNA, 20 bp, synthetic construct
  misc_feature 1..20: note = Description of Artificial Sequence: Synthetic oligonucleotide
  misc_feature 1..20: note = Target: SCN10A; (+) strand; PAM type: YTN; PAM sequence: CTT
  source 1..20: mol_type = other DNA
tctattctttctgaagaaat

SEQ ID NO: 66187 - DNA, 20 bp, synthetic construct
  misc_feature 1..20: note = Description of Artificial Sequence: Synthetic oligonucleotide
  misc_feature 1..20: note = Target: SCN10A; (+) strand; PAM type: YTN; PAM sequence: TTT
  source 1..20: mol_type = other DNA
ctattctttctgaagaaatt

SEQ ID NO: 66188 - DNA, 20 bp, synthetic construct
  misc_feature 1..20: note = Description of Artificial Sequence: Synthetic oligonucleotide
  misc_feature 1..20: note = Target: SCN10A; (+) strand; PAM type: YTN; PAM sequence: TTC
  source 1..20: mol_type = other DNA
tattctttctgaagaaattt

SEQ ID NO: 66189 - DNA, 20 bp, synthetic construct
  misc_feature 1..20: note = Description of Artificial Sequence: Synthetic oligonucleotide
  misc_feature 1..20: note = Target: SCN10A; (+) strand; PAM type: YTN; PAM sequence: CTA
  source 1..20: mol_type = other DNA
ttctttctgaagaaattttt

SEQ ID NO: 66190 - DNA, 20 bp, synthetic construct
  misc_feature 1..20: note = Description of Artificial Sequence: Synthetic oligonucleotide
  misc_feature 1..20: note = Target: SCN10A; (+) strand; PAM type: YTN; PAM sequence: TTC
  source 1..20: mol_type = other DNA
tttctgaagaaatttttact

SEQ ID NO: 66191 - DNA, 20 bp, synthetic construct
  misc_feature 1..20: note = Description of Artificial Sequence: Synthetic oligonucleotide
  misc_feature 1..20: note = Target: SCN10A; (+) strand; PAM type: YTN; PAM sequence: CTT
  source 1..20: mol_type = other DNA
tctgaagaaatttttactct

SEQ ID NO: 66192 - DNA, 20 bp, synthetic construct
  misc_feature 1..20: note = Description of Artificial Sequence: Synthetic oligonucleotide
  misc_feature 1..20: note = Target: SCN10A; (+) strand; PAM type: YTN; PAM sequence: TTT
  source 1..20: mol_type = other DNA
ctgaagaaatttttactctt

SEQ ID NO: 66193 - DNA, 20 bp, synthetic construct
  misc_feature 1..20: note = Description of Artificial Sequence: Synthetic oligonucleotide
  misc_feature 1..20: note = Target: SCN10A; (+) strand; PAM type: YTN; PAM sequence: TTC
  source 1..20: mol_type = other DNA
tgaagaaatttttactcttg

SEQ ID NO: 66194 - DNA, 20 bp, synthetic construct
  misc_feature 1..20: note = Description of Artificial Sequence: Synthetic oligonucleotide
  misc_feature 1..20: note = Target: SCN10A; (+) strand; PAM type: YTN; PAM sequence: CTG
  source 1..20: mol_type = other DNA
aagaaatttttactcttggc

SEQ ID NO: 66195 - DNA, 20 bp, synthetic construct
  misc_feature 1..20: note = Description of Artificial Sequence: Synthetic oligonucleotide
  misc_feature 1..20: note = Target: SCN10A; (+) strand; PAM type: YTN; PAM sequence: TTT
  source 1..20: mol_type = other DNA
ttactcttggctctgcattg

SEQ ID NO: 66196 - DNA, 20 bp, synthetic construct
  misc_feature 1..20: note = Description of Artificial Sequence: Synthetic oligonucleotide
  misc_feature 1..20: note = Target: SCN10A; (+) strand; PAM type: YTN; PAM sequence: TTT
  source 1..20: mol_type = other DNA
tactcttggctctgcattgt

SEQ ID NO: 66197 - DNA, 20 bp, synthetic construct
  misc_feature 1..20: note = Description of Artificial Sequence: Synthetic oligonucleotide
  misc_feature 1..20: note = Target: SCN10A; (+) strand; PAM type: YTN; PAM sequence: TTT
  source 1..20: mol_type = other DNA
actcttggctctgcattgta

SEQ ID NO: 66198 - DNA, 20 bp, synthetic construct
  misc_feature 1..20: note = Description of Artificial Sequence: Synthetic oligonucleotide
  misc_feature 1..20: note = Target: SCN10A; (+) strand; PAM type: YTN; PAM sequence: TTA
  source 1..20: mol_type = other DNA
ctcttggctctgcattgtat

SEQ ID NO: 66199 - DNA, 20 bp, synthetic construct
  misc_feature 1..20: note = Description of Artificial Sequence: Synthetic oligonucleotide
  misc_feature 1..20: note = Target: SCN10A; (+) strand; PAM type: YTN; PAM sequence: CTC
  source 1..20: mol_type = other DNA
ttggctctgcattgtattct

SEQ ID NO: 66200 - DNA, 20 bp, synthetic construct
  misc_feature 1..20: note = Description of Artificial Sequence: Synthetic oligonucleotide
  misc_feature 1..20: note = Target: SCN10A; (+) strand; PAM type: YTN; PAM sequence: CTT
  source 1..20: mol_type = other DNA
ggctctgcattgtattcttc

SEQ ID NO: 66201 - DNA, 20 bp, synthetic construct
  misc_feature 1..20: note = Description of Artificial Sequence: Synthetic oligonucleotide
  misc_feature 1..20: note = Target: SCN10A; (+) strand; PAM type: YTN; PAM sequence: TTG
  source 1..20: mol_type = other DNA
gctctgcattgtattcttct

SEQ ID NO: 66202 - DNA, 20 bp, synthetic construct
  misc_feature 1..20: note = Description of Artificial Sequence: Synthetic oligonucleotide
  misc_feature 1..20: note = Target: SCN10A; (+) strand; PAM type: YTN; PAM sequence: CTC
  source 1..20: mol_type = other DNA
tgcattgtattcttctagat

SEQ ID NO: 66203 - DNA, 20 bp, synthetic construct
  misc_feature 1..20: note = Description of Artificial Sequence: Synthetic oligonucleotide
  misc_feature 1..20: note = Target: SCN10A; (+) strand; PAM type: YTN; PAM sequence: CTG
  source 1..20: mol_type = other DNA
cattgtattcttctagatct

SEQ ID NO: 66204 - DNA, 20 bp, synthetic construct
  misc_feature 1..20: note = Description of Artificial Sequence: Synthetic oligonucleotide
  misc_feature 1..20: note = Target: SCN10A; (+) strand; PAM type: YTN; PAM sequence: TTG
  source 1..20: mol_type = other DNA
tattcttctagatcttttcc

SEQ ID NO: 66205 - DNA, 20 bp, synthetic construct
  misc_feature 1..20: note = Description of Artificial Sequence: Synthetic oligonucleotide
  misc_feature 1..20: note = Target: SCN10A; (+) strand; PAM type: YTN; PAM sequence: TTC
  source 1..20: mol_type = other DNA
ttctagatcttttcctattt

SEQ ID NO: 66206 - DNA, 20 bp, synthetic construct
  misc_feature 1..20: note = Description of Artificial Sequence: Synthetic oligonucleotide
  misc_feature 1..20: note = Target: SCN10A; (+) strand; PAM type: YTN; PAM sequence: CTT
  source 1..20: mol_type = other DNA
ctagatcttttcctatttct

SEQ ID NO: 66207 - DNA, 20 bp, synthetic construct
  misc_feature 1..20: note = Description of Artificial Sequence: Synthetic oligonucleotide
  misc_feature 1..20: note = Target: SCN10A; (+) strand; PAM type: YTN; PAM sequence: TTC
  source 1..20: mol_type = other DNA
tagatcttttcctatttctg

SEQ ID NO: 66208 - DNA, 20 bp, synthetic construct
  misc_feature 1..20: note = Description of Artificial Sequence: Synthetic oligonucleotide
  misc_feature 1..20: note = Target: SCN10A; (+) strand; PAM type: YTN; PAM sequence: CTA
  source 1..20: mol_type = other DNA
gatcttttcctatttctgta

SEQ ID NO: 66209 - DNA, 20 bp, synthetic construct
  misc_feature 1..20: note = Description of Artificial Sequence: Synthetic oligonucleotide
  misc_feature 1..20: note = Target: SCN10A; (+) strand; PAM type: YTN; PAM sequence: CTT
  source 1..20: mol_type = other DNA
ttcctatttctgtaccttcc

SEQ ID NO: 66210 - DNA, 20 bp, synthetic construct
  misc_feature 1..20: note = Description of Artificial Sequence: Synthetic oligonucleotide
  misc_feature 1..20: note = Target: SCN10A; (+) strand; PAM type: YTN; PAM sequence: TTT
  source 1..20: mol_type = other DNA
tcctatttctgtaccttcct

SEQ ID NO: 66211 - DNA, 20 bp, synthetic construct
  misc_feature 1..20: note = Description of Artificial Sequence: Synthetic oligonucleotide
  misc_feature 1..20: note = Target: SCN10A; (+) strand; PAM type: YTN; PAM sequence: TTT
  source 1..20: mol_type = other DNA
cctatttctgtaccttcctt

SEQ ID NO: 66212 - DNA, 20 bp, synthetic construct
  misc_feature 1..20: note = Description of Artificial Sequence: Synthetic oligonucleotide
  misc_feature 1..20: note = Target: SCN10A; (+) strand; PAM type: YTN; PAM sequence: TTC
  source 1..20: mol_type = other DNA
ctatttctgtaccttccttt

SEQ ID NO: 66213 - DNA, 20 bp, synthetic construct
  misc_feature 1..20: note = Description of Artificial Sequence: Synthetic oligonucleotide
  misc_feature 1..20: note = Target: SCN10A; (+) strand; PAM type: YTN; PAM sequence: CTA
  source 1..20: mol_type = other DNA
tttctgtaccttccttttca

SEQ ID NO: 66214 - DNA, 20 bp, synthetic construct
  misc_feature 1..20: note = Description of Artificial Sequence: Synthetic oligonucleotide
  misc_feature 1..20: note = Target: SCN10A; (+) strand; PAM type: YTN; PAM sequence: TTT
  source 1..20: mol_type = other DNA
ctgtaccttccttttcagtc

SEQ ID NO: 66215 - DNA, 20 bp, synthetic construct
  misc_feature 1..20: note = Description of Artificial Sequence: Synthetic oligonucleotide
  misc_feature 1..20: note = Target: SCN10A; (+) strand; PAM type: YTN; PAM sequence: TTC
  source 1..20: mol_type = other DNA
tgtaccttccttttcagtct

SEQ ID NO: 66216 - DNA, 20 bp, synthetic construct
  misc_feature 1..20: note = Description of Artificial Sequence: Synthetic oligonucleotide
  misc_feature 1..20: note = Target: SCN10A; (+) strand; PAM type: YTN; PAM sequence: CTG
  source 1..20: mol_type = other DNA
taccttccttttcagtctcc

SEQ ID NO: 66217 - DNA, 20 bp, synthetic construct
  misc_feature 1..20: note = Description of Artificial Sequence: Synthetic oligonucleotide
  misc_feature 1..20: note = Target: SCN10A; (+) strand; PAM type: YTN; PAM sequence: CTT
  source 1..20: mol_type = other DNA
ccttttcagtctcctctgct

SEQ ID NO: 66218 - DNA, 20 bp, synthetic construct
  misc_feature 1..20: note = Description of Artificial Sequence: Synthetic oligonucleotide
  misc_feature 1..20: note = Target: SCN10A; (+) strand; PAM type: YTN; PAM sequence: TTC
  source 1..20: mol_type = other DNA
cttttcagtctcctctgctg

SEQ ID NO: 66219 - DNA, 20 bp, synthetic construct
  misc_feature 1..20: note = Description of Artificial Sequence: Synthetic oligonucleotide
  misc_feature 1..20: note = Target: SCN10A; (+) strand; PAM type: YTN; PAM sequence: CTT
  source 1..20: mol_type = other DNA
ttcagtctcctctgctgggt

SEQ ID NO: 66220 - DNA, 20 bp, synthetic construct
  misc_feature 1..20: note = Description of Artificial Sequence: Synthetic oligonucleotide
  misc_feature 1..20: note = Target: SCN10A; (+) strand; PAM type: YTN; PAM sequence: TTT
  source 1..20: mol_type = other DNA
tcagtctcctctgctgggtc

SEQ ID NO: 66221 - DNA, 20 bp, synthetic construct
  misc_feature 1..20: note = Description of Artificial Sequence: Synthetic oligonucleotide
  misc_feature 1..20: note = Target: SCN10A; (+) strand; PAM type: YTN; PAM sequence: TTT
  source 1..20: mol_type = other DNA
cagtctcctctgctgggtcc

SEQ ID NO: 66222 - DNA, 20 bp, synthetic construct
  misc_feature 1..20: note = Description of Artificial Sequence: Synthetic oligonucleotide
  misc_feature 1..20: note = Target: SCN10A; (+) strand; PAM type: YTN; PAM sequence: TTC
  source 1..20: mol_type = other DNA
agtctcctctgctgggtcca

SEQ ID NO: 66223 - DNA, 20 bp, synthetic construct
  misc_feature 1..20: note = Description of Artificial Sequence: Synthetic oligonucleotide
  misc_feature 1..20: note = Target: SCN10A; (+) strand; PAM type: YTN; PAM sequence: CTC
  source 1..20: mol_type = other DNA
ctctgctgggtccatctctt

SEQ ID NO: 66224 - DNA, 20 bp, synthetic construct
  misc_feature 1..20: note = Description of Artificial Sequence: Synthetic oligonucleotide
  misc_feature 1..20: note = Target: SCN10A; (+) strand; PAM type: YTN; PAM sequence: CTC
  source 1..20: mol_type = other DNA
tgctgggtccatctcttctg

SEQ ID NO: 66225 - DNA, 20 bp, synthetic construct
  misc_feature 1..20: note = Description of Artificial Sequence: Synthetic oligonucleotide
  misc_feature 1..20: note = Target: SCN10A; (+) strand; PAM type: YTN; PAM sequence: CTG
  source 1..20: mol_type = other DNA
ctgggtccatctcttctgct

SEQ ID NO: 66226 - DNA, 20 bp, synthetic construct
  misc_feature 1..20: note = Description of Artificial Sequence: Synthetic oligonucleotide
  misc_feature 1..20: note = Target: SCN10A; (+) strand; PAM type: YTN; PAM sequence: CTG
  source 1..20: mol_type = other DNA
ggtccatctcttctgcttaa

SEQ ID NO: 66227 - DNA, 20 bp, synthetic construct
  misc_feature 1..20: note = Description of Artificial Sequence: Synthetic oligonucleotide
  misc_feature 1..20: note = Target: SCN10A; (+) strand; PAM type: YTN; PAM sequence: CTC
  source 1..20: mol_type = other DNA
ttctgcttaactattaaaca

SEQ ID NO: 66228 - DNA, 20 bp, synthetic construct
  misc_feature 1..20: note = Description of Artificial Sequence: Synthetic oligonucleotide
  misc_feature 1..20: note = Target: SCN10A; (+) strand; PAM type: YTN; PAM sequence: CTT
  source 1..20: mol_type = other DNA
ctgcttaactattaaacatt

SEQ ID NO: 66229 - DNA, 20 bp, synthetic construct
  misc_feature 1..20: note = Description of Artificial Sequence: Synthetic oligonucleotide
  misc_feature 1..20: note = Target: SCN10A; (+) strand; PAM type: YTN; PAM sequence: TTC
  source 1..20: mol_type = other DNA
tgcttaactattaaacattt

SEQ ID NO: 66230 - DNA, 20 bp, synthetic construct
  misc_feature 1..20: note = Description of Artificial Sequence: Synthetic oligonucleotide
  misc_feature 1..20: note = Target: SCN10A; (+) strand; PAM type: YTN; PAM sequence: CTG
  source 1..20: mol_type = other DNA
cttaactattaaacatttag

SEQ ID NO: 66231 - DNA, 20 bp, synthetic construct
  misc_feature 1..20: note = Description of Artificial Sequence: Synthetic oligonucleotide
  misc_feature 1..20: note = Target: SCN10A; (+) strand; PAM type: YTN; PAM sequence: CTT
  source 1..20: mol_type = other DNA
aactattaaacatttagttt

SEQ ID NO: 66232 - DNA, 20 bp, synthetic construct
  misc_feature 1..20: note = Description of Artificial Sequence: Synthetic oligonucleotide
  misc_feature 1..20: note = Target: SCN10A; (+) strand; PAM type: YTN; PAM sequence: TTA
  source 1..20: mol_type = other DNA
actattaaacatttagtttg

SEQ ID NO: 66233 - DNA, 20 bp, synthetic construct
  misc_feature 1..20: note = Description of Artificial Sequence: Synthetic oligonucleotide
  misc_feature 1..20: note = Target: SCN10A; (+) strand; PAM type: YTN; PAM sequence: CTA
  source 1..20: mol_type = other DNA
ttaaacatttagtttgttag

SEQ ID NO: 66234 - DNA, 20 bp, synthetic construct
  misc_feature 1..20: note = Description of Artificial Sequence: Synthetic oligonucleotide
  misc_feature 1..20: note = Target: SCN10A; (+) strand; PAM type: YTN; PAM sequence: TTA
  source 1..20: mol_type = other DNA
aacatttagtttgttagaac

SEQ ID NO: 66235 - DNA, 20 bp, synthetic construct
  misc_feature 1..20: note = Description of Artificial Sequence: Synthetic oligonucleotide
  misc_feature 1..20: note = Target: SCN10A; (+) strand; PAM type: YTN; PAM sequence: TTT
  source 1..20: mol_type = other DNA
agtttgttagaactgtgtct

SEQ ID NO: 66236 - DNA, 20 bp, synthetic construct
  misc_feature 1..20: note = Description of Artificial Sequence: Synthetic oligonucleotide
  misc_feature 1..20: note = Target: SCN10A; (+) strand; PAM type: YTN; PAM sequence: TTA
  source 1..20: mol_type = other DNA
gtttgttagaactgtgtctg

SEQ ID NO: 66237 - DNA, 20 bp, synthetic construct
  misc_feature 1..20: note = Description of Artificial Sequence: Synthetic oligonucleotide
  misc_feature 1..20: note = Target: SCN10A; (+) strand; PAM type: YTN; PAM sequence: TTT
  source 1..20: mol_type = other DNA
gttagaactgtgtctgaggc

SEQ ID NO: 66238 - DNA, 20 bp, synthetic construct
  misc_feature 1..20: note = Description of Artificial Sequence: Synthetic oligonucleotide
  misc_feature 1..20: note = Target: SCN10A; (+) strand; PAM type: YTN; PAM sequence: TTG
  source 1..20: mol_type = other DNA
ttagaactgtgtctgaggcc

SEQ ID NO: 66239 - DNA, 20 bp, synthetic construct
  misc_feature 1..20: note = Description of Artificial Sequence: Synthetic oligonucleotide
  misc_feature 1..20: note = Target: SCN10A; (+) strand; PAM type: YTN; PAM sequence: TTA
  source 1..20: mol_type = other DNA
gaactgtgtctgaggccttc

SEQ ID NO: 66240 - DNA, 20 bp, synthetic construct
  misc_feature 1..20: note = Description of Artificial Sequence: Synthetic oligonucleotide
  misc_feature 1..20: note = Target: SCN10A; (+) strand; PAM type: YTN; PAM sequence: CTG
  source 1..20: mol_type = other DNA
tgtctgaggccttcttctct

SEQ ID NO: 66241 - DNA, 20 bp, synthetic construct
  misc_feature 1..20: note = Description of Artificial Sequence: Synthetic oligonucleotide
  misc_feature 1..20: note = Target: SCN10A; (+) strand; PAM type: YTN; PAM sequence: CTG
  source 1..20: mol_type = other DNA
aggccttcttctcttcttac

SEQ ID NO: 66242 - DNA, 20 bp, synthetic construct
  misc_feature 1..20: note = Description of Artificial Sequence: Synthetic oligonucleotide
  misc_feature 1..20: note = Target: SCN10A; (+) strand; PAM type: YTN; PAM sequence: CTT
  source 1..20: mol_type = other DNA
cttctcttcttacttcaacc

SEQ ID NO: 66243 - DNA, 20 bp, synthetic construct
  misc_feature 1..20: note = Description of Artificial Sequence: Synthetic oligonucleotide
  misc_feature 1..20: note = Target: SCN10A; (+) strand; PAM type: YTN; PAM sequence: TTC
  source 1..20: mol_type = other DNA
ttctcttcttacttcaaccc

SEQ ID NO: 66244 - DNA, 20 bp, synthetic construct
  misc_feature 1..20: note = Description of Artificial Sequence: Synthetic oligonucleotide
  misc_feature 1..20: note = Target: SCN10A; (+) strand; PAM type: YTN; PAM sequence: CTT
  source 1..20: mol_type = other DNA
ctcttcttacttcaaccctt

SEQ ID NO: 66245 - DNA, 20 bp, synthetic construct
  misc_feature 1..20: note = Description of Artificial Sequence: Synthetic oligonucleotide
  misc_feature 1..20: note = Target: SCN10A; (+) strand; PAM type: YTN; PAM sequence: TTC
  source 1..20: mol_type = other DNA
tcttcttacttcaacccttc

SEQ ID NO: 66246 - DNA, 20 bp, synthetic construct
  misc_feature 1..20: note = Description of Artificial Sequence: Synthetic oligonucleotide
  misc_feature 1..20: note = Target: SCN10A; (+) strand; PAM type: YTN; PAM sequence: CTC
  source 1..20: mol_type = other DNA
ttcttacttcaacccttctg

SEQ ID NO: 66247 - DNA, 20 bp, synthetic construct
  misc_feature 1..20: note = Description of Artificial Sequence: Synthetic oligonucleotide
  misc_feature 1..20: note = Target: SCN10A; (+) strand; PAM type: YTN; PAM sequence: CTT
  source 1..20: mol_type = other DNA
cttacttcaacccttctgtg

SEQ ID NO: 66248 - DNA, 20 bp, synthetic construct
  misc_feature 1..20: note = Description of Artificial Sequence: Synthetic oligonucleotide
  misc_feature 1..20: note = Target: SCN10A; (+) strand; PAM type: YTN; PAM sequence: TTC
  source 1..20: mol_type = other DNA
ttacttcaacccttctgtgt

SEQ ID NO: 66249 - DNA, 20 bp, synthetic construct
  misc_feature 1..20: note = Description of Artificial Sequence: Synthetic oligonucleotide
  misc_feature 1..20: note = Target: SCN10A; (+) strand; PAM type: YTN; PAM sequence: CTT
  source 1..20: mol_type = other DNA
acttcaacccttctgtgtta

SEQ ID NO: 66250 - DNA, 20 bp, synthetic construct
  misc_feature 1..20: note = Description of Artificial Sequence: Synthetic oligonucleotide
  misc_feature 1..20: note = Target: SCN10A; (+) strand; PAM type: YTN; PAM sequence: TTA
  source 1..20: mol_type = other DNA
cttcaacccttctgtgttaa

SEQ ID NO: 66251 - DNA, 20 bp, synthetic construct
  misc_feature 1..20: note = Description of Artificial Sequence: Synthetic oligonucleotide
  misc_feature 1..20: note = Target: SCN10A; (+) strand; PAM type: YTN; PAM sequence: CTT
  source 1..20: mol_type = other DNA
caacccttctgtgttaactc

SEQ ID NO: 66252 - DNA, 20 bp, synthetic construct
  misc_feature 1..20: note = Description of Artificial Sequence: Synthetic oligonucleotide
  misc_feature 1..20: note = Target: SCN10A; (+) strand; PAM type: YTN; PAM sequence: TTC
  source 1..20: mol_type = other DNA
aacccttctgtgttaactca

SEQ ID NO: 66253 - DNA, 20 bp, synthetic construct
  misc_feature 1..20: note = Description of Artificial Sequence: Synthetic oligonucleotide
  misc_feature 1..20: note = Target: SCN10A; (+) strand; PAM type: YTN; PAM sequence: CTT
  source 1..20: mol_type = other DNA
ctgtgttaactcatccagtt

SEQ ID NO: 66254 - DNA, 20 bp, synthetic construct
  misc_feature 1..20: note = Description of Artificial Sequence: Synthetic oligonucleotide
  misc_feature 1..20: note = Target: SCN10A; (+) strand; PAM type: YTN; PAM sequence: TTC
  source 1..20: mol_type = other DNA
tgtgttaactcatccagttg

SEQ ID NO: 66255 - DNA, 20 bp, synthetic construct
  misc_feature 1..20: note = Description of Artificial Sequence: Synthetic oligonucleotide
  misc_feature 1..20: note = Target: SCN10A; (+) strand; PAM type: YTN; PAM sequence: CTG
  source 1..20: mol_type = other DNA
tgttaactcatccagttgca

SEQ ID NO: 66256 - DNA, 20 bp, synthetic construct
  misc_feature 1..20: note = Description of Artificial Sequence: Synthetic oligonucleotide
  misc_feature 1..20: note = Target: SCN10A; (+) strand; PAM type: YTN; PAM sequence: TTA
  source 1..20: mol_type = other DNA
actcatccagttgcatcttt

SEQ ID NO: 66257 - DNA, 20 bp, synthetic construct
  misc_feature 1..20: note = Description of Artificial Sequence: Synthetic oligonucleotide
  misc_feature 1..20: note = Target: SCN10A; (+) strand; PAM type: YTN; PAM sequence: CTC
  source 1..20: mol_type = other DNA
atccagttgcatcttttcaa

SEQ ID NO: 66258 - DNA, 20 bp, synthetic construct
  misc_feature 1..20: note = Description of Artificial Sequence: Synthetic oligonucleotide
  misc_feature 1..20: note = Target: SCN10A; (+) strand; PAM type: YTN; PAM sequence: TTG
  source 1..20: mol_type = other DNA
catcttttcaaaattaccac

SEQ ID NO: 66259 - DNA, 20 bp, synthetic construct
  misc_feature 1..20: note = Description of Artificial Sequence: Synthetic oligonucleotide
  misc_feature 1..20: note = Target: SCN10A; (+) strand; PAM type: YTN; PAM sequence: CTT
  source 1..20: mol_type = other DNA
ttcaaaattaccacttacat

SEQ ID NO: 66260 - DNA, 20 bp, synthetic construct
  misc_feature 1..20: note = Description of Artificial Sequence: Synthetic oligonucleotide
  misc_feature 1..20: note = Target: SCN10A; (+) strand; PAM type: YTN; PAM sequence: TTT
  source 1..20: mol_type = other DNA
tcaaaattaccacttacatt

SEQ ID NO: 66261 - DNA, 20 bp, synthetic construct
  misc_feature 1..20: note = Description of Artificial Sequence: Synthetic oligonucleotide
  misc_feature 1..20: note = Target: SCN10A; (+) strand; PAM type: YTN; PAM sequence: TTT
  source 1..20: mol_type = other DNA
caaaattaccacttacattc

SEQ ID NO: 66262 - DNA, 20 bp, synthetic construct
  misc_feature 1..20: note = Description of Artificial Sequence: Synthetic oligonucleotide
  misc_feature 1..20: note = Target: SCN10A; (+) strand; PAM type: YTN; PAM sequence: TTC
  source 1..20: mol_type = other DNA
aaaattaccacttacattca

SEQ ID NO: 66263 - DNA, 20 bp, synthetic construct
  misc_feature 1..20: note = Description of Artificial Sequence: Synthetic oligonucleotide
  misc_feature 1..20: note = Target: SCN10A; (+) strand; PAM type: YTN; PAM sequence: TTA
  source 1..20: mol_type = other DNA
ccacttacattcaaactgct

SEQ ID NO: 66264 - DNA, 20 bp, synthetic construct
  misc_feature 1..20: note = Description of Artificial Sequence: Synthetic oligonucleotide
  misc_feature 1..20: note = Target: SCN10A; (+) strand; PAM type: YTN; PAM sequence: CTT
  source 1..20: mol_type = other DNA
acattcaaactgctttcaaa

SEQ ID NO: 66265 - DNA, 20 bp, synthetic construct
  misc_feature 1..20: note = Description of Artificial Sequence: Synthetic oligonucleotide
  misc_feature 1..20: note = Target: SCN10A; (+) strand; PAM type: YTN; PAM sequence: TTA
  source 1..20: mol_type = other DNA
cattcaaactgctttcaaat

SEQ ID NO: 66266 - DNA, 20 bp, synthetic construct
  misc_feature 1..20: note = Description of Artificial Sequence: Synthetic oligonucleotide
  misc_feature 1..20: note = Target: SCN10A; (+) strand; PAM type: YTN; PAM sequence: TTC
  source 1..20: mol_type = other DNA
aaactgctttcaaatatata

SEQ ID NO: 66267 - DNA, 20 bp, synthetic construct
  misc_feature 1..20: note = Description of Artificial Sequence: Synthetic oligonucleotide
  misc_feature 1..20: note = Target: SCN10A; (+) strand; PAM type: YTN; PAM sequence: CTG
  source 1..20: mol_type = other DNA
ctttcaaatatatatatata

SEQ ID NO: 66268 - DNA, 20 bp, synthetic construct
  misc_feature 1..20: note = Description of Artificial Sequence: Synthetic oligonucleotide
  misc_feature 1..20: note = Target: SCN10A; (+) strand; PAM type: YTN; PAM sequence: CTT
  source 1..20: mol_type = other DNA
tcaaatatatatatatacat

SEQ ID NO: 66269 - DNA, 20 bp, synthetic construct
  misc_feature 1..20: note = Description of Artificial Sequence: Synthetic oligonucleotide
  misc_feature 1..20: note = Target: SCN10A; (+) strand; PAM type: YTN; PAM sequence: TTT
  source 1..20: mol_type = other DNA
caaatatatatatatacata

SEQ ID NO: 66270 - DNA, 20 bp, synthetic construct
  misc_feature 1..20: note = Description of Artificial Sequence: Synthetic oligonucleotide
  misc_feature 1..20: note = Target: SCN10A; (+) strand; PAM type: YTN; PAM sequence: TTC
  source 1..20: mol_type = other DNA
aaatatatatatatacatat

SEQ ID NO: 66271 - DNA, 20 bp, synthetic construct
  misc_feature 1..20: note = Description of Artificial Sequence: Synthetic oligonucleotide
  misc_feature 1..20: note = Target: SCN10A; (+) strand; PAM type: YTN; PAM sequence: CTT
  source 1..20: mol_type = other DNA
tgtcatctaagttctagacc

SEQ ID NO: 66272 - DNA, 20 bp, synthetic construct
  misc_feature 1..20: note = Description of Artificial Sequence: Synthetic oligonucleotide
  misc_feature 1..20: note = Target: SCN10A; (+) strand; PAM type: YTN; PAM sequence: TTT
  source 1..20: mol_type = other DNA
gtcatctaagttctagaccc

SEQ ID NO: 66273 - DNA, 20 bp, synthetic construct
  misc_feature 1..20: note = Description of Artificial Sequence: Synthetic oligonucleotide
  misc_feature 1..20: note = Target: SCN10A; (+) strand; PAM type: YTN; PAM sequence: TTG
  source 1..20: mol_type = other DNA
tcatctaagttctagacccc

SEQ ID NO: 66274 - DNA, 20 bp, synthetic construct
  misc_feature 1..20: note = Description of Artificial Sequence: Synthetic oligonucleotide
  misc_feature 1..20: note = Target: SCN10A; (+) strand; PAM type: YTN; PAM sequence: CTA
  source 1..20: mol_type = other DNA
agttctagacccctatatcc

SEQ ID NO: 66275 - DNA, 20 bp, synthetic construct
  misc_feature 1..20: note = Description of Artificial Sequence: Synthetic oligonucleotide
  misc_feature 1..20: note = Target: SCN10A; (+) strand; PAM type: YTN; PAM sequence: TTC
  source 1..20: mol_type = other DNA
tagacccctatatcctaaag

SEQ ID NO: 66276 - DNA, 20 bp, synthetic construct
  misc_feature 1..20: note = Description of Artificial Sequence: Synthetic oligonucleotide
  misc_feature 1..20: note = Target: SCN10A; (+) strand; PAM type: YTN; PAM sequence: CTA
  source 1..20: mol_type = other DNA
gacccctatatcctaaagtc

SEQ ID NO: 66277 - DNA, 20 bp, synthetic construct
  misc_feature 1..20: note = Description of Artificial Sequence: Synthetic oligonucleotide
  misc_feature 1..20: note = Target: SCN10A; (+) strand; PAM type: YTN; PAM sequence: CTA
  source 1..20: mol_type = other DNA
tatcctaaagtcaacttcct

SEQ ID NO: 66278 - DNA, 20 bp, synthetic construct
  misc_feature 1..20: note = Description of Artificial Sequence: Synthetic oligonucleotide
  misc_feature 1..20: note = Target: SCN10A; (+) strand; PAM type: YTN; PAM sequence: CTA
  source 1..20: mol_type = other DNA
aagtcaacttcctactggac

SEQ ID NO: 66279 - DNA, 20 bp, synthetic construct
  misc_feature 1..20: note = Description of Artificial Sequence: Synthetic oligonucleotide
  misc_feature 1..20: note = Target: SCN10A; (+) strand; PAM type: YTN; PAM sequence: CTT
  source 1..20: mol_type = other DNA
cctactggacacccctacct

SEQ ID NO: 66280 - DNA, 20 bp, synthetic construct
  misc_feature 1..20: note = Description of Artificial Sequence: Synthetic oligonucleotide
  misc_feature 1..20: note = Target: SCN10A; (+) strand; PAM type: YTN; PAM sequence: TTC
  source 1..20: mol_type = other DNA
ctactggacacccctaccta

SEQ ID NO: 66281 - DNA, 20 bp, synthetic construct
  misc_feature 1..20: note = Description of Artificial Sequence: Synthetic oligonucleotide
  misc_feature 1..20: note = Target: SCN10A; (+) strand; PAM type: YTN; PAM sequence: CTA
  source 1..20: mol_type = other DNA
ctggacacccctacctagat

SEQ ID NO: 66282 - DNA, 20 bp, synthetic construct
  misc_feature 1..20: note = Description of Artificial Sequence: Synthetic oligonucleotide
  misc_feature 1..20: note = Target: SCN10A; (+) strand; PAM type: YTN; PAM sequence: CTG
  source 1..20: mol_type = other DNA
gacacccctacctagatgct

SEQ ID NO: 66283 - DNA, 20 bp, synthetic construct
  misc_feature 1..20: note = Description of Artificial Sequence: Synthetic oligonucleotide
  misc_feature 1..20: note = Target: SCN10A; (+) strand; PAM type: YTN; PAM sequence: CTA
  source 1..20: mol_type = other DNA
cctagatgctccaagggcac

SEQ ID NO: 66284 - DNA, 20 bp, synthetic construct
  misc_feature 1..20: note = Description of Artificial Sequence: Synthetic oligonucleotide
  misc_feature 1..20: note = Target: SCN10A; (+) strand; PAM type: YTN; PAM sequence: CTA
  source 1..20: mol_type = other DNA
gatgctccaagggcacctga

SEQ ID NO: 66285 - DNA, 20 bp, synthetic construct
  misc_feature 1..20: note = Description of Artificial Sequence: Synthetic oligonucleotide
  misc_feature 1..20: note = Target: SCN10A; (+) strand; PAM type: YTN; PAM sequence: CTC
  source 1..20: mol_type = other DNA
caagggcacctgaaacccaa

SEQ ID NO: 66286 - DNA, 20 bp, synthetic construct
  misc_feature 1..20: note = Description of Artificial Sequence: Synthetic oligonucleotide
  misc_feature 1..20: note = Target: SCN10A; (+) strand; PAM type: YTN; PAM sequence: CTG
  source 1..20: mol_type = other DNA
aaacccaatatatcccagac

SEQ ID NO: 66287 - DNA, 20 bp, synthetic construct
  misc_feature 1..20: note = Description of Artificial Sequence: Synthetic oligonucleotide
  misc_feature 1..20: note = Target: SCN10A; (+) strand; PAM type: YTN; PAM sequence: CTC
  source 1..20: mol_type = other DNA
aactcataatcttctttcat

SEQ ID NO: 66288 - DNA, 20 bp, synthetic construct
  misc_feature 1..20: note = Description of Artificial Sequence: Synthetic oligonucleotide
  misc_feature 1..20: note = Target: SCN10A; (+) strand; PAM type: YTN; PAM sequence: CTC
  source 1..20: mol_type = other DNA
ataatcttctttcatctttc

SEQ ID NO: 66289 - DNA, 20 bp, synthetic construct
  misc_feature 1..20: note = Description of Artificial Sequence: Synthetic oligonucleotide
  misc_feature 1..20: note = Target: SCN10A; (+) strand; PAM type: YTN; PAM sequence: CTT
  source 1..20: mol_type = other DNA
ctttcatctttccccattaa

SEQ ID NO: 66290 - DNA, 20 bp, synthetic construct
  misc_feature 1..20: note = Description of Artificial Sequence: Synthetic oligonucleotide
  misc_feature 1..20: note = Target: SCN10A; (+) strand; PAM type: YTN; PAM sequence: TTC
  source 1..20: mol_type = other DNA
tttcatctttccccattaaa

SEQ ID NO: 66291 - DNA, 20 bp, synthetic construct
  misc_feature 1..20: note = Description of Artificial Sequence: Synthetic oligonucleotide
  misc_feature 1..20: note = Target: SCN10A; (+) strand; PAM type: YTN; PAM sequence: CTT
  source 1..20: mol_type = other DNA
tcatctttccccattaaagc

SEQ ID NO: 66292 - DNA, 20 bp, synthetic construct
  misc_feature 1..20: note = Description of Artificial Sequence: Synthetic oligonucleotide
  misc_feature 1..20: note = Target: SCN10A; (+) strand; PAM type: YTN; PAM sequence: TTT
  source 1..20: mol_type = other DNA
catctttccccattaaagcc

SEQ ID NO: 66293 - DNA, 20 bp, synthetic construct
  misc_feature 1..20: note = Description of Artificial Sequence: Synthetic oligonucleotide
  misc_feature 1..20: note = Target: SCN10A; (+) strand; PAM type: YTN; PAM sequence: TTC
  source 1..20: mol_type = other DNA
atctttccccattaaagccc

SEQ ID NO: 66294 - DNA, 20 bp, synthetic construct
  misc_feature 1..20: note = Description of Artificial Sequence: Synthetic oligonucleotide
  misc_feature 1..20: note = Target: SCN10A; (+) strand; PAM type: YTN; PAM sequence: CTT
  source 1..20: mol_type = other DNA
tccccattaaagcccccttc

SEQ ID NO: 66295 - DNA, 20 bp, synthetic construct
  misc_feature 1..20: note = Description of Artificial Sequence: Synthetic oligonucleotide
  misc_feature 1..20: note = Target: SCN10A; (+) strand; PAM type: YTN; PAM sequence: TTT
  source 1..20: mol_type = other DNA
ccccattaaagcccccttct

SEQ ID NO: 66296 - DNA, 20 bp, synthetic construct
  misc_feature 1..20: note = Description of Artificial Sequence: Synthetic oligonucleotide
  misc_feature 1..20: note = Target: SCN10A; (+) strand; PAM type: YTN; PAM sequence: TTC
  source 1..20: mol_type = other DNA
cccattaaagcccccttctt

SEQ ID NO: 66297 - DNA, 20 bp, synthetic construct
  misc_feature 1..20: note = Description of Artificial Sequence: Synthetic oligonucleotide
  misc_feature 1..20: note = Target: SCN10A; (+) strand; PAM type: YTN; PAM sequence: TTA
  source 1..20: mol_type = other DNA
aagcccccttcttcccctaa

SEQ ID NO: 66298 - DNA, 20 bp, synthetic construct
  misc_feature 1..20: note = Description of Artificial Sequence: Synthetic oligonucleotide
  misc_feature 1..20: note = Target: SCN10A; (+) strand; PAM type: YTN; PAM sequence: CTT
  source 1..20: mol_type = other DNA
cttcccctaaaatgctccct

SEQ ID NO: 66299 - DNA, 20 bp, synthetic construct
  misc_feature 1..20: note = Description of Artificial Sequence: Synthetic oligonucleotide
  misc_feature 1..20: note = Target: SCN10A; (+) strand; PAM type: YTN; PAM sequence: TTC
  source 1..20: mol_type = other DNA
ttcccctaaaatgctccctt

SEQ ID NO: 66300 - DNA, 20 bp, synthetic construct
  misc_feature 1..20: note = Description of Artificial Sequence: Synthetic oligonucleotide
  misc_feature 1..20: note = Target: SCN10A; (+) strand; PAM type: YTN; PAM sequence: CTT
  source 1..20: mol_type = other DNA
cccctaaaatgctcccttta

SEQ ID NO: 66301 - DNA, 20 bp, synthetic construct
  misc_feature 1..20: note = Description of Artificial Sequence: Synthetic oligonucleotide
  misc_feature 1..20: note = Target: SCN10A; (+) strand; PAM type: YTN; PAM sequence: TTC
  source 1..20: mol_type = other DNA
ccctaaaatgctccctttat

SEQ ID NO: 66302 - DNA, 20 bp, synthetic construct
  misc_feature 1..20: note = Description of Artificial Sequence: Synthetic oligonucleotide
  misc_feature 1..20: note = Target: SCN10A; (+) strand; PAM type: YTN; PAM sequence: CTA
  source 1..20: mol_type = other DNA
aaatgctccctttatgagtt

SEQ ID NO: 66303 - DNA, 20 bp, synthetic construct
  misc_feature 1..20: note = Description of Artificial Sequence: Synthetic oligonucleotide
  misc_feature 1..20: note = Target: SCN10A; (+) strand; PAM type: YTN; PAM sequence: CTC
  source 1..20: mol_type = other DNA
cctttatgagttattgtatc

SEQ ID NO: 66304 - DNA, 20 bp, synthetic construct
  misc_feature 1..20: note = Description of Artificial Sequence: Synthetic oligonucleotide
  misc_feature 1..20: note = Target: SCN10A; (+) strand; PAM type: YTN; PAM sequence: CTT
  source 1..20: mol_type = other DNA
tatgagttattgtatcagca

SEQ ID NO: 66305 - DNA, 20 bp, synthetic construct
  misc_feature 1..20: note = Description of Artificial Sequence: Synthetic oligonucleotide
  misc_feature 1..20: note = Target: SCN10A; (+) strand; PAM type: YTN; PAM sequence: TTT
  source 1..20: mol_type = other DNA
atgagttattgtatcagcat

SEQ ID NO: 66306 - DNA, 20 bp, synthetic construct
  misc_feature 1..20: note = Description of Artificial Sequence: Synthetic oligonucleotide
  misc_feature 1..20: note = Target: SCN10A; (+) strand; PAM type: YTN; PAM sequence: TTA
  source 1..20: mol_type = other DNA
tgagttattgtatcagcata

SEQ ID NO: 66307 - DNA, 20 bp, synthetic construct
  misc_feature 1..20: note = Description of Artificial Sequence: Synthetic oligonucleotide
  misc_feature 1..20: note = Target: SCN10A; (+) strand; PAM type: YTN; PAM sequence: TTA
  source 1..20: mol_type = other DNA
ttgtatcagcatatcttaag

SEQ ID NO: 66308 - DNA, 20 bp, synthetic construct
  misc_feature 1..20: note = Description of Artificial Sequence: Synthetic oligonucleotide
  misc_feature 1..20: note = Target: SCN10A; (+) strand; PAM type: YTN; PAM sequence: TTG
  source 1..20: mol_type = other DNA
tatcagcatatcttaaggca

SEQ ID NO: 66309 - DNA, 20 bp, synthetic construct
  misc_feature 1..20: note = Description of Artificial Sequence: Synthetic oligonucleotide
  misc_feature 1..20: note = Target: SCN10A; (+) strand; PAM type: YTN; PAM sequence: CTT
  source 1..20: mol_type = other DNA
aaggcacttataccagaacc

SEQ ID NO: 66310 - DNA, 20 bp, synthetic construct
  misc_feature 1..20: note = Description of Artificial Sequence: Synthetic oligonucleotide
  misc_feature 1..20: note = Target: SCN10A; (+) strand; PAM type: YTN; PAM sequence: TTA
  source 1..20: mol_type = other DNA
aggcacttataccagaacca

SEQ ID NO: 66311 - DNA, 20 bp, synthetic construct
  misc_feature 1..20: note = Description of Artificial Sequence: Synthetic oligonucleotide
  misc_feature 1..20: note = Target: SCN10A; (+) strand; PAM type: YTN; PAM sequence: CTT
  source 1..20: mol_type = other DNA
ataccagaaccatatgcatc

SEQ ID NO: 66312 - DNA, 20 bp, synthetic construct
  misc_feature 1..20: note = Description of Artificial Sequence: Synthetic oligonucleotide
  misc_feature 1..20: note = Target: SCN10A; (+) strand; PAM type: YTN; PAM sequence: TTA
  source 1..20: mol_type = other DNA
taccagaaccatatgcatca

SEQ ID NO: 66313 - DNA, 20 bp, synthetic construct
  misc_feature 1..20: note = Description of Artificial Sequence: Synthetic oligonucleotide
  misc_feature 1..20: note = Target: SCN10A; (+) strand; PAM type: YTN; PAM sequence: CTG
  source 1..20: mol_type = other DNA
aatcttatgccccttagata

SEQ ID NO: 66314 - DNA, 20 bp, synthetic construct
  misc_feature 1..20: note = Description of Artificial Sequence: Synthetic oligonucleotide
  misc_feature 1..20: note = Target: SCN10A; (+) strand; PAM type: YTN; PAM sequence: CTT
  source 1..20: mol_type = other DNA
atgccccttagatagctctc

SEQ ID NO: 66315 - DNA, 20 bp, synthetic construct
  misc_feature 1..20: note = Description of Artificial Sequence: Synthetic oligonucleotide
  misc_feature 1..20: note = Target: SCN10A; (+) strand; PAM type: YTN; PAM sequence: TTA
  source 1..20: mol_type = other DNA
tgccccttagatagctctca

SEQ ID NO: 66316 - DNA, 20 bp, synthetic construct
  misc_feature 1..20: note = Description of Artificial Sequence: Synthetic oligonucleotide
  misc_feature 1..20: note = Target: SCN10A; (+) strand; PAM type: YTN; PAM sequence: CTT
  source 1..20: mol_type = other DNA
agatagctctcatatccttc

SEQ ID NO: 66317 - DNA, 20 bp, synthetic construct
  misc_feature 1..20: note = Description of Artificial Sequence: Synthetic oligonucleotide
  misc_feature 1..20: note = Target: SCN10A; (+) strand; PAM type: YTN; PAM sequence: TTA
  source 1..20: mol_type = other DNA
gatagctctcatatccttcc

SEQ ID NO: 66318 - DNA, 20 bp, synthetic construct
  misc_feature 1..20: note = Description of Artificial Sequence: Synthetic oligonucleotide
  misc_feature 1..20: note = Target: SCN10A; (+) strand; PAM type: YTN; PAM sequence: CTC
  source 1..20: mol_type = other DNA
tcatatccttccatttccca

SEQ ID NO: 66319 - DNA, 20 bp, synthetic construct
  misc_feature 1..20: note = Description of Artificial Sequence: Synthetic oligonucleotide
  misc_feature 1..20: note = Target: SCN10A; (+) strand; PAM type: YTN; PAM sequence: CTC
  source 1..20: mol_type = other DNA
atatccttccatttcccatc

SEQ ID NO: 66320 - DNA, 20 bp, synthetic construct
  misc_feature 1..20: note = Description of Artificial Sequence: Synthetic oligonucleotide
  misc_feature 1..20: note = Target: SCN10A; (+) strand; PAM type: YTN; PAM sequence: CTT
  source 1..20: mol_type = other DNA
ccatttcccatcagccccac

SEQ ID NO: 66321 - DNA, 20 bp, synthetic construct
  misc_feature 1..20: note = Description of Artificial Sequence: Synthetic oligonucleotide
  misc_feature 1..20: note = Target: SCN10A; (+) strand; PAM type: YTN; PAM sequence: TTC
  source 1..20: mol_type = other DNA
catttcccatcagccccact

SEQ ID NO: 66322 - DNA, 20 bp, synthetic construct
  misc_feature 1..20: note = Description of Artificial Sequence: Synthetic oligonucleotide
  misc_feature 1..20: note = Target: SCN10A; (+) strand; PAM type: YTN; PAM sequence: TTT
  source 1..20: mol_type = other DNA
cccatcagccccactgtcac

SEQ ID NO: 66323 - DNA, 20 bp, synthetic construct
  misc_feature 1..20: note = Description of Artificial Sequence: Synthetic oligonucleotide
  misc_feature 1..20: note = Target: SCN10A; (+) strand; PAM type: YTN; PAM sequence: TTC
  source 1..20: mol_type = other DNA
ccatcagccccactgtcact

SEQ ID NO: 66324 - DNA, 20 bp, synthetic construct
  misc_feature 1..20: note = Description of Artificial Sequence: Synthetic oligonucleotide
  misc_feature 1..20: note = Target: SCN10A; (+) strand; PAM type: YTN; PAM sequence: CTG
  source 1..20: mol_type = other DNA
tcactaccccagagttcaag

SEQ ID NO: 66325 - DNA, 20 bp, synthetic construct
  misc_feature 1..20: note = Description of Artificial Sequence: Synthetic oligonucleotide
  misc_feature 1..20: note = Target: SCN10A; (+) strand; PAM type: YTN; PAM sequence: CTA
  source 1..20: mol_type = other DNA
ccccagagttcaagcactgc

SEQ ID NO: 66326 - DNA, 20 bp, synthetic construct
  misc_feature 1..20: note = Description of Artificial Sequence: Synthetic oligonucleotide
  misc_feature 1..20: note = Target: SCN10A; (+) strand; PAM type: YTN; PAM sequence: TTC
  source 1..20: mol_type = other DNA
aagcactgccatcttgtact

SEQ ID NO: 66327 - DNA, 20 bp, synthetic construct
  misc_feature 1..20: note = Description of Artificial Sequence: Synthetic oligonucleotide
  misc_feature 1..20: note = Target: SCN10A; (+) strand; PAM type: YTN; PAM sequence: CTG
  source 1..20: mol_type = other DNA
ccatcttgtacttggcttcc

SEQ ID NO: 66328 - DNA, 20 bp, synthetic construct
  misc_feature 1..20: note = Description of Artificial Sequence: Synthetic oligonucleotide
  misc_feature 1..20: note = Target: SCN10A; (+) strand; PAM type: YTN; PAM sequence: CTT
  source 1..20: mol_type = other DNA
gtacttggcttcctcctaac

SEQ ID NO: 66329 - DNA, 20 bp, synthetic construct
  misc_feature 1..20: note = Description of Artificial Sequence: Synthetic oligonucleotide
  misc_feature 1..20: note = Target: SCN10A; (+) strand; PAM type: YTN; PAM sequence: TTG
  source 1..20: mol_type = other DNA
tacttggcttcctcctaact

SEQ ID NO: 66330 - DNA, 20 bp, synthetic construct
  misc_feature 1..20: note = Description of Artificial Sequence: Synthetic oligonucleotide
  misc_feature 1..20: note = Target: SCN10A; (+) strand; PAM type: YTN; PAM sequence: CTT
  source 1..20: mol_type = other DNA
ggcttcctcctaactggttt

SEQ ID NO: 66331 - DNA, 20 bp, synthetic construct
  misc_feature 1..20: note = Description of Artificial Sequence: Synthetic oligonucleotide
  misc_feature 1..20: note = Target: SCN10A; (+) strand; PAM type: YTN; PAM sequence: TTG
  source 1..20: mol_type = other DNA
gcttcctcctaactggtttc

SEQ ID NO: 66332 - DNA, 20 bp, synthetic construct
  misc_feature 1..20: note = Description of Artificial Sequence: Synthetic oligonucleotide
  misc_feature 1..20: note = Target: SCN10A; (+) strand; PAM type: YTN; PAM sequence: CTT
  source 1..20: mol_type = other DNA
cctcctaactggtttccctg

SEQ ID NO: 66333 - DNA, 20 bp, synthetic construct
  misc_feature 1..20: note = Description of Artificial Sequence: Synthetic oligonucleotide
  misc_feature 1..20: note = Target: SCN10A; (+) strand; PAM type: YTN; PAM sequence: TTC
  source 1..20: mol_type = other DNA
ctcctaactggtttccctga

SEQ ID NO: 66334 - DNA, 20 bp, synthetic construct
  misc_feature 1..20: note = Description of Artificial Sequence: Synthetic oligonucleotide
  misc_feature 1..20: note = Target: SCN10A; (+) strand; PAM type: YTN; PAM sequence: CTC
  source 1..20: mol_type = other DNA
ctaactggtttccctgacaa

SEQ ID NO: 66335 - DNA, 20 bp, synthetic construct
  misc_feature 1..20: note = Description of Artificial Sequence: Synthetic oligonucleotide
  misc_feature 1..20: note = Target: SCN10A; (+) strand; PAM type: YTN; PAM sequence: CTA
  source 1..20: mol_type = other DNA
actggtttccctgacaacat

SEQ ID NO: 66336 - DNA, 20 bp, synthetic construct
  misc_feature 1..20: note = Description of Artificial Sequence: Synthetic oligonucleotide
  misc_feature 1..20: note = Target: SCN10A; (+) strand; PAM type: YTN; PAM sequence: CTG
  source 1..20: mol_type = other DNA
gtttccctgacaacatactt

SEQ ID NO: 66337 - DNA, 20 bp, synthetic construct
  misc_feature 1..20: note = Description of Artificial Sequence: Synthetic oligonucleotide
  misc_feature 1..20: note = Target: SCN10A; (+) strand; PAM type: YTN; PAM sequence: TTT
  source 1..20: mol_type = other DNA
ccctgacaacatacttcccc

SEQ ID NO: 66338 - DNA, 20 bp, synthetic construct
  misc_feature 1..20: note = Description of Artificial Sequence: Synthetic oligonucleotide
  misc_feature 1..20: note = Target: SCN10A; (+) strand; PAM type: YTN; PAM sequence: TTC
  source 1..20: mol_type = other DNA
cctgacaacatacttcccct

SEQ ID NO: 66339 - DNA, 20 bp, synthetic construct
  misc_feature 1..20: note = Description of Artificial Sequence: Synthetic oligonucleotide
  misc_feature 1..20: note = Target: SCN10A; (+) strand; PAM type: YTN; PAM sequence: CTG
  source 1..20: mol_type = other DNA
acaacatacttcccctctta

SEQ ID NO: 66340 - DNA, 20 bp, synthetic construct
  misc_feature 1..20: note = Description of Artificial Sequence: Synthetic oligonucleotide
  misc_feature 1..20: note = Target: SCN10A; (+) strand; PAM type: YTN; PAM sequence: CTT
  source 1..20: mol_type = other DNA
cccctcttatatctacaagt

SEQ ID NO: 66341 - DNA, 20 bp, synthetic construct
  misc_feature 1..20: note = Description of Artificial Sequence: Synthetic oligonucleotide
  misc_feature 1..20: note = Target: SCN10A; (+) strand; PAM type: YTN; PAM sequence: TTC
  source 1..20: mol_type = other DNA
ccctcttatatctacaagta

SEQ ID NO: 66342 - DNA, 20 bp, synthetic construct
  misc_feature 1..20: note = Description of Artificial Sequence: Synthetic oligonucleotide
  misc_feature 1..20: note = Target: SCN10A; (+) strand; PAM type: YTN; PAM sequence: CTC
  source 1..20: mol_type = other DNA
ttatatctacaagtatccag

SEQ ID NO: 66343 - DNA, 20 bp, synthetic construct
  misc_feature 1..20: note = Description of Artificial Sequence: Synthetic oligonucleotide
  misc_feature 1..20: note = Target: SCN10A; (+) strand; PAM type: YTN; PAM sequence: CTT
  source 1..20: mol_type = other DNA
atatctacaagtatccagag

SEQ ID NO: 66344 - DNA, 20 bp, synthetic construct
  misc_feature 1..20: note = Description of Artificial Sequence: Synthetic oligonucleotide
  misc_feature 1..20: note = Target: SCN10A; (+) strand; PAM type: YTN; PAM sequence: TTA
  source 1..20: mol_type = other DNA
tatctacaagtatccagagt

SEQ ID NO: 66345 - DNA, 20 bp, synthetic construct
  misc_feature 1..20: note = Description of Artificial Sequence: Synthetic oligonucleotide
  misc_feature 1..20: note = Target: SCN10A; (+) strand; PAM type: YTN; PAM sequence: CTA
  source 1..20: mol_type = other DNA
caagtatccagagtaacttt

SEQ ID NO: 66346 - DNA, 20 bp, synthetic construct
  misc_feature 1..20: note = Description of Artificial Sequence: Synthetic oligonucleotide
  misc_feature 1..20: note = Target: SCN10A; (+) strand; PAM type: YTN; PAM sequence: CTT
  source 1..20: mol_type = other DNA
ttataaaatgcaaatgtaac

SEQ ID NO: 66347 - DNA, 20 bp, synthetic construct
  misc_feature 1..20: note = Description of Artificial Sequence: Synthetic oligonucleotide
  misc_feature 1..20: note = Target: SCN10A; (+) strand; PAM type: YTN; PAM sequence: TTT
  source 1..20: mol_type = other DNA
tataaaatgcaaatgtaact

SEQ ID NO: 66348 - DNA, 20 bp, synthetic construct
  misc_feature 1..20: note = Description of Artificial Sequence: Synthetic oligonucleotide
  misc_feature 1..20: note = Target: SCN10A; (+) strand; PAM type: YTN; PAM sequence: TTT
  source 1..20: mol_type = other DNA
ataaaatgcaaatgtaactt

SEQ ID NO: 66349 - DNA, 20 bp, synthetic construct
  misc_feature 1..20: note = Description of Artificial Sequence: Synthetic oligonucleotide
  misc_feature 1..20: note = Target: SCN10A; (+) strand; PAM type: YTN; PAM sequence: TTA
  source 1..20: mol_type = other DNA
taaaatgcaaatgtaacttc

SEQ ID NO: 66350 - DNA, 20 bp, synthetic construct
  misc_feature 1..20: note = Description of Artificial Sequence: Synthetic oligonucleotide
  misc_feature 1..20: note = Target: SCN10A; (+) strand; PAM type: YTN; PAM sequence: CTT
  source 1..20: mol_type = other DNA
ccctgcctccaatcctttaa

SEQ ID NO: 66351 - DNA, 20 bp, synthetic construct
  misc_feature 1..20: note = Description of Artificial Sequence: Synthetic oligonucleotide
  misc_feature 1..20: note = Target: SCN10A; (+) strand; PAM type: YTN; PAM sequence: TTC
  source 1..20: mol_type = other DNA
cctgcctccaatcctttaat

SEQ ID NO: 66352 - DNA, 20 bp, synthetic construct
  misc_feature 1..20: note = Description of Artificial Sequence: Synthetic oligonucleotide
  misc_feature 1..20: note = Target: SCN10A; (+) strand; PAM type: YTN; PAM sequence: CTG
  source 1..20: mol_type = other DNA
cctccaatcctttaatggca

SEQ ID NO: 66353 - DNA, 20 bp, synthetic construct
  misc_feature 1..20: note = Description of Artificial Sequence: Synthetic oligonucleotide
  misc_feature 1..20: note = Target: SCN10A; (+) strand; PAM type: YTN; PAM sequence: CTC
  source 1..20: mol_type = other DNA
caatcctttaatggcacctc

SEQ ID NO: 66354 - DNA, 20 bp, synthetic construct
  misc_feature 1..20: note = Description of Artificial Sequence: Synthetic oligonucleotide
  misc_feature 1..20: note = Target: SCN10A; (+) strand; PAM type: YTN; PAM sequence: CTT
  source 1..20: mol_type = other DNA
taatggcacctcactcctct

SEQ ID NO: 66355 - DNA, 20 bp, synthetic construct
  misc_feature 1..20: note = Description of Artificial Sequence: Synthetic oligonucleotide
  misc_feature 1..20: note = Target: SCN10A; (+) strand; PAM type: YTN; PAM sequence: TTT
  source 1..20: mol_type = other DNA
aatggcacctcactcctctt

SEQ ID NO: 66356 - DNA, 20 bp, synthetic construct
  misc_feature 1..20: note = Description of Artificial Sequence: Synthetic oligonucleotide
  misc_feature 1..20: note = Target: SCN10A; (+) strand; PAM type: YTN; PAM sequence: TTA
  source 1..20: mol_type = other DNA
atggcacctcactcctctta

SEQ ID NO: 66357 - DNA, 20 bp, synthetic construct
  misc_feature 1..20: note = Description of Artificial Sequence: Synthetic oligonucleotide
  misc_feature 1..20: note = Target: SCN10A; (+) strand; PAM type: YTN; PAM sequence: CTC
  source 1..20: mol_type = other DNA
actcctcttagcatgaagtc

SEQ ID NO: 66358 - DNA, 20 bp, synthetic construct
  misc_feature 1..20: note = Description of Artificial Sequence: Synthetic oligonucleotide
  misc_feature 1..20: note = Target: SCN10A; (+) strand; PAM type: YTN; PAM sequence: CTC
  source 1..20: mol_type = other DNA
ctcttagcatgaagtcccat

SEQ ID NO: 66359 - DNA, 20 bp, synthetic construct
  misc_feature 1..20: note = Description of Artificial Sequence: Synthetic oligonucleotide
  misc_feature 1..20: note = Target: SCN10A; (+) strand; PAM type: YTN; PAM sequence: CTC
  source 1..20: mol_type = other DNA
ttagcatgaagtcccatatc

SEQ ID NO: 66360 - DNA, 20 bp, synthetic construct
  misc_feature 1..20: note = Description of Artificial Sequence: Synthetic oligonucleotide
  misc_feature 1..20: note = Target: SCN10A; (+) strand; PAM type: YTN; PAM sequence: CTT
  source 1..20: mol_type = other DNA
agcatgaagtcccatatcct

SEQ ID NO: 66361 - DNA, 20 bp, synthetic construct
  misc_feature 1..20: note = Description of Artificial Sequence: Synthetic oligonucleotide
  misc_feature 1..20: note = Target: SCN10A; (+) strand; PAM type: YTN; PAM sequence: TTA
  source 1..20: mol_type = other DNA
gcatgaagtcccatatcctt

SEQ ID NO: 66362 - DNA, 20 bp, synthetic construct
  misc_feature 1..20: note = Description of Artificial Sequence: Synthetic oligonucleotide
  misc_feature 1..20: note = Target: SCN10A; (+) strand; PAM type: YTN; PAM sequence: CTT
  source 1..20: mol_type = other DNA
aatgcagtctaggagtttct

SEQ ID NO: 66363 - DNA, 20 bp, synthetic construct
  misc_feature 1..20: note = Description of Artificial Sequence: Synthetic oligonucleotide
  misc_feature 1..20: note = Target: SCN10A; (+) strand; PAM type: YTN; PAM sequence: TTA
  source 1..20: mol_type = other DNA
atgcagtctaggagtttctt

SEQ ID NO: 66364 - DNA, 20 bp, synthetic construct
  misc_feature 1..20: note = Description of Artificial Sequence: Synthetic oligonucleotide
  misc_feature 1..20: note = Target: SCN10A; (+) strand; PAM type: YTN; PAM sequence: CTA
  source 1..20: mol_type = other DNA
ggagtttcttgggatctggc

SEQ ID NO: 66365 - DNA, 20 bp, synthetic construct
  misc_feature 1..20: note = Description of Artificial Sequence: Synthetic oligonucleotide
  misc_feature 1..20: note = Target: SCN10A; (+) strand; PAM type: YTN; PAM sequence: TTT
  source 1..20: mol_type = other DNA
cttgggatctggccccaact

SEQ ID NO: 66366 - DNA, 20 bp, synthetic construct
  misc_feature 1..20: note = Description of Artificial Sequence: Synthetic oligonucleotide
  misc_feature 1..20: note = Target: SCN10A; (+) strand; PAM type: YTN; PAM sequence: TTC
  source 1..20: mol_type = other DNA
ttgggatctggccccaactc

SEQ ID NO: 66367 - DNA, 20 bp, synthetic construct
  misc_feature 1..20: note = Description of Artificial Sequence: Synthetic oligonucleotide
  misc_feature 1..20: note = Target: SCN10A; (+) strand; PAM type: YTN; PAM sequence: CTT
  source 1..20: mol_type = other DNA
gggatctggccccaactcat

SEQ ID NO: 66368 - DNA, 20 bp, synthetic construct
  misc_feature 1..20: note = Description of Artificial Sequence: Synthetic oligonucleotide
  misc_feature 1..20: note = Target: SCN10A; (+) strand; PAM type: YTN; PAM sequence: TTG
  source 1..20: mol_type = other DNA
ggatctggccccaactcatc

SEQ ID NO: 66369 - DNA, 20 bp, synthetic construct
  misc_feature 1..20: note = Description of Artificial Sequence: Synthetic oligonucleotide
  misc_feature 1..20: note = Target: SCN10A; (+) strand; PAM type: YTN; PAM sequence: CTG
  source 1..20: mol_type = other DNA
gccccaactcatccctctag

SEQ ID NO: 66370 - DNA, 20 bp, synthetic construct
  misc_feature 1..20: note = Description of Artificial Sequence: Synthetic oligonucleotide
  misc_feature 1..20: note = Target: SCN10A; (+) strand; PAM type: YTN; PAM sequence: CTC
  source 1..20: mol_type = other DNA
atccctctagccttattttc

SEQ ID NO: 66371 - DNA, 20 bp, synthetic construct
  misc_feature 1..20: note = Description of Artificial Sequence: Synthetic oligonucleotide
  misc_feature 1..20: note = Target: SCN10A; (+) strand; PAM type: YTN; PAM sequence: CTC
  source 1..20: mol_type = other DNA
tagccttattttcagttctc

SEQ ID NO: 66372 - DNA, 20 bp, synthetic construct
  misc_feature 1..20: note = Description of Artificial Sequence: Synthetic oligonucleotide
  misc_feature 1..20: note = Target: SCN10A; (+) strand; PAM type: YTN; PAM sequence: CTA
  source 1..20: mol_type = other DNA
gccttattttcagttctcct

SEQ ID NO: 66373 - DNA, 20 bp, synthetic construct
  misc_feature 1..20: note = Description of Artificial Sequence: Synthetic oligonucleotide
  misc_feature 1..20: note = Target: SCN10A; (+) strand; PAM type: YTN; PAM sequence: CTT
  source 1..20: mol_type = other DNA
attttcagttctcctggttc

SEQ ID NO: 66374 - DNA, 20 bp, synthetic construct
  misc_feature 1..20: note = Description of Artificial Sequence: Synthetic oligonucleotide
  misc_feature 1..20: note = Target: SCN10A; (+) strand; PAM type: YTN; PAM sequence: TTA
  source 1..20: mol_type = other DNA
ttttcagttctcctggttct

SEQ ID NO: 66375 - DNA, 20 bp, synthetic construct
  misc_feature 1..20: note = Description of Artificial Sequence: Synthetic oligonucleotide
  misc_feature 1..20: note = Target: SCN10A; (+) strand; PAM type: YTN; PAM sequence: TTT
  source 1..20: mol_type = other DNA
tcagttctcctggttctcta

SEQ ID NO: 66376 - DNA, 20 bp, synthetic construct
  misc_feature 1..20: note = Description of Artificial Sequence: Synthetic oligonucleotide
  misc_feature 1..20: note = Target: SCN10A; (+) strand; PAM type: YTN; PAM sequence: TTT
  source 1..20: mol_type = other DNA
cagttctcctggttctctag

SEQ ID NO: 66377 - DNA, 20 bp, synthetic construct
  misc_feature 1..20: note = Description of Artificial Sequence: Synthetic oligonucleotide
  misc_feature 1..20: note = Target: SCN10A; (+) strand; PAM type: YTN; PAM sequence: TTC
  source 1..20: mol_type = other DNA
agttctcctggttctctagg

SEQ ID NO: 66378 - DNA, 20 bp, synthetic construct
  misc_feature 1..20: note = Description of Artificial Sequence: Synthetic oligonucleotide
  misc_feature 1..20: note = Target: SCN10A; (+) strand; PAM type: YTN; PAM sequence: TTC
  source 1..20: mol_type = other DNA
tcctggttctctaggttaca

SEQ ID NO: 66379 - DNA, 20 bp, synthetic construct
  misc_feature 1..20: note = Description of Artificial Sequence: Synthetic oligonucleotide
  misc_feature 1..20: note = Target: SCN10A; (+) strand; PAM type: YTN; PAM sequence: CTC
  source 1..20: mol_type = other DNA
ctggttctctaggttacagc

SEQ ID NO: 66380 - DNA, 20 bp, synthetic construct
  misc_feature 1..20: note = Description of Artificial Sequence: Synthetic oligonucleotide
  misc_feature 1..20: note = Target: SCN10A; (+) strand; PAM type: YTN; PAM sequence: CTG
  source 1..20: mol_type = other DNA
gttctctaggttacagctac

SEQ ID NO: 66381 - DNA, 20 bp, synthetic construct
  misc_feature 1..20: note = Description of Artificial Sequence: Synthetic oligonucleotide
  misc_feature 1..20: note = Target: SCN10A; (+) strand; PAM type: YTN; PAM sequence: TTC
  source 1..20: mol_type = other DNA
tctaggttacagctacatta

SEQ ID NO: 66382 - DNA, 20 bp, synthetic construct
  misc_feature 1..20: note = Description of Artificial Sequence: Synthetic oligonucleotide
  misc_feature 1..20: note = Target: SCN10A; (+) strand; PAM type: YTN; PAM sequence: CTC
  source 1..20: mol_type = other DNA
taggttacagctacattagg

SEQ ID NO: 66383 - DNA, 20 bp, synthetic construct
  misc_feature 1..20: note = Description of Artificial Sequence: Synthetic oligonucleotide
  misc_feature 1..20: note = Target: SCN10A; (+) strand; PAM type: YTN; PAM sequence: CTA
  source 1..20: mol_type = other DNA
ggttacagctacattaggct

SEQ ID NO: 66384 - DNA, 20 bp, synthetic construct
  misc_feature 1..20: note = Description of Artificial Sequence: Synthetic oligonucleotide
  misc_feature 1..20: note = Target: SCN10A; (+) strand; PAM type: YTN; PAM sequence: TTA
  source 1..20: mol_type = other DNA
cagctacattaggctttttc

SEQ ID NO: 66385 - DNA, 20 bp, synthetic construct
  misc_feature 1..20: note = Description of Artificial Sequence: Synthetic oligonucleotide
  misc_feature 1..20: note = Target: SCN10A; (+) strand; PAM type: YTN; PAM sequence: CTA
  source 1..20: mol_type = other DNA
cattaggctttttcattcct

SEQ ID NO: 66386 - DNA, 20 bp, synthetic construct
  misc_feature 1..20: note = Description of Artificial Sequence: Synthetic oligonucleotide
  misc_feature 1..20: note = Target: SCN10A; (+) strand; PAM type: YTN; PAM sequence: TTA
  source 1..20: mol_type = other DNA
ggctttttcattccttcaaa

SEQ ID NO: 66387 - DNA, 20 bp, synthetic construct
  misc_feature 1..20: note = Description of Artificial Sequence: Synthetic oligonucleotide
  misc_feature 1..20: note = Target: SCN10A; (+) strand; PAM type: YTN; PAM sequence: CTT
  source 1..20: mol_type = other DNA
tttcattccttcaaatgtta

SEQ ID NO: 66388 - DNA, 20 bp, synthetic construct
  misc_feature 1..20: note = Description of Artificial Sequence: Synthetic oligonucleotide
  misc_feature 1..20: note = Target: SCN10A; (+) strand; PAM type: YTN; PAM sequence: TTT
  source 1..20: mol_type = other DNA
ttcattccttcaaatgttat

SEQ ID NO: 66389 - DNA, 20 bp, synthetic construct
  misc_feature 1..20: note = Description of Artificial Sequence: Synthetic oligonucleotide
  misc_feature 1..20: note = Target: SCN10A; (+) strand; PAM type: YTN; PAM sequence: TTT
  source 1..20: mol_type = other DNA
tcattccttcaaatgttatt

SEQ ID NO: 66390 - DNA, 20 bp, synthetic construct
  misc_feature 1..20: note = Description of Artificial Sequence: Synthetic oligonucleotide
  misc_feature 1..20: note = Target: SCN10A; (+) strand; PAM type: YTN; PAM sequence: TTT
  source 1..20: mol_type = other DNA
cattccttcaaatgttattc

SEQ ID NO: 66391 - DNA, 20 bp, synthetic construct
  misc_feature 1..20: note = Description of Artificial Sequence: Synthetic oligonucleotide
  misc_feature 1..20: note = Target: SCN10A; (+) strand; PAM type: YTN; PAM sequence: TTC
  source 1..20: mol_type = other DNA
attccttcaaatgttattct

SEQ ID NO: 66392 - DNA, 20 bp, synthetic construct
  misc_feature 1..20: note = Description of Artificial Sequence: Synthetic oligonucleotide
  misc_feature 1..20: note = Target: SCN10A; (+) strand; PAM type: YTN; PAM sequence: TTC
  source 1..20: mol_type = other DNA
cttcaaatgttattctctct

SEQ ID NO: 66393 - DNA, 20 bp, synthetic construct
  misc_feature 1..20: note = Description of Artificial Sequence: Synthetic oligonucleotide
  misc_feature 1..20: note = Target: SCN10A; (+) strand; PAM type: YTN; PAM sequence: CTT
  source 1..20: mol_type = other DNA
caaatgttattctctcttct

SEQ ID NO: 66394 - DNA, 20 bp, synthetic construct
  misc_feature 1..20: note = Description of Artificial Sequence: Synthetic oligonucleotide
  misc_feature 1..20: note = Target: SCN10A; (+) strand; PAM type: YTN; PAM sequence: TTC
  source 1..20: mol_type = other DNA
aaatgttattctctcttctg

SEQ ID NO: 66395 - DNA, 20 bp, synthetic construct
  misc_feature 1..20: note = Description of Artificial Sequence: Synthetic oligonucleotide
  misc_feature 1..20: note = Target: SCN10A; (+) strand; PAM type: YTN; PAM sequence: TTA
  source 1..20: mol_type = other DNA
ttctctcttctgctttgcag

SEQ ID NO: 66396 - DNA, 20 bp, synthetic construct
  misc_feature 1..20: note = Description of Artificial Sequence: Synthetic oligonucleotide
  misc_feature 1..20: note = Target: SCN10A; (+) strand; PAM type: YTN; PAM sequence: TTC
  source 1..20: mol_type = other DNA
tctcttctgctttgcagtcc

SEQ ID NO: 66397 - DNA, 20 bp, synthetic construct
  misc_feature 1..20: note = Description of Artificial Sequence: Synthetic oligonucleotide
  misc_feature 1..20: note = Target: SCN10A; (+) strand; PAM type: YTN; PAM sequence: CTC
  source 1..20: mol_type = other DNA
tcttctgctttgcagtcctt

SEQ ID NO: 66398 - DNA, 20 bp, synthetic construct
  misc_feature 1..20: note = Description of Artificial Sequence: Synthetic oligonucleotide
  misc_feature 1..20: note = Target: SCN10A; (+) strand; PAM type: YTN; PAM sequence: CTC
  source 1..20: mol_type = other DNA
ttctgctttgcagtcctttc

SEQ ID NO: 66399 - DNA, 20 bp, synthetic construct
  misc_feature 1..20: note = Description of Artificial Sequence: Synthetic oligonucleotide
  misc_feature 1..20: note = Target: SCN10A; (+) strand; PAM type: YTN; PAM sequence: CTT
  source 1..20: mol_type = other DNA
ctgctttgcagtcctttcag

SEQ ID NO: 66400 - DNA, 20 bp, synthetic construct
  misc_feature 1..20: note = Description of Artificial Sequence: Synthetic oligonucleotide
  misc_feature 1..20: note = Target: SCN10A; (+) strand; PAM type: YTN; PAM sequence: TTC
  source 1..20: mol_type = other DNA
tgctttgcagtcctttcagc

SEQ ID NO: 66401 - DNA, 20 bp, synthetic construct
  misc_feature 1..20: note = Description of Artificial Sequence: Synthetic oligonucleotide
  misc_feature 1..20: note = Target: SCN10A; (+) strand; PAM type: YTN; PAM sequence: CTG
  source 1..20: mol_type = other DNA
ctttgcagtcctttcagcct

SEQ ID NO: 66402 - DNA, 20 bp, synthetic construct
  misc_feature 1..20: note = Description of Artificial Sequence: Synthetic oligonucleotide
  misc_feature 1..20: note = Target: SCN10A; (+) strand; PAM type: YTN; PAM sequence: CTT
  source 1..20: mol_type = other DNA
tgcagtcctttcagcctggg

SEQ ID NO: 66403 - DNA, 20 bp, synthetic construct
  misc_feature 1..20: note = Description of Artificial Sequence: Synthetic oligonucleotide
  misc_feature 1..20: note = Target: SCN10A; (+) strand; PAM type: YTN; PAM sequence: TTT
  source 1..20: mol_type = other DNA
gcagtcctttcagcctggga

SEQ ID NO: 66404 - DNA, 20 bp, synthetic construct
  misc_feature 1..20: note = Description of Artificial Sequence: Synthetic oligonucleotide
  misc_feature 1..20: note = Target: SCN10A; (+) strand; PAM type: YTN; PAM sequence: TTG
  source 1..20: mol_type = other DNA
cagtcctttcagcctgggat

SEQ ID NO: 66405 - DNA, 20 bp, synthetic construct
  misc_feature 1..20: note = Description of Artificial Sequence: Synthetic oligonucleotide
  misc_feature 1..20: note = Target: SCN10A; (+) strand; PAM type: YTN; PAM sequence: CTT
  source 1..20: mol_type = other DNA
tcagcctgggataattccct

SEQ ID NO: 66406 - DNA, 20 bp, synthetic construct
  misc_feature 1..20: note = Description of Artificial Sequence: Synthetic oligonucleotide
  misc_feature 1..20: note = Target: SCN10A; (+) strand; PAM type: YTN; PAM sequence: TTT
  source 1..20: mol_type = other DNA
cagcctgggataattccctg

SEQ ID NO: 66407 - DNA, 20 bp, synthetic construct
  misc_feature 1..20: note = Description of Artificial Sequence: Synthetic oligonucleotide
  misc_feature 1..20: note = Target: SCN10A; (+) strand; PAM type: YTN; PAM sequence: TTC
  source 1..20: mol_type = other DNA
agcctgggataattccctgg

SEQ ID NO: 66408 - DNA, 20 bp, synthetic construct
  misc_feature 1..20: note = Description of Artificial Sequence: Synthetic oligonucleotide
  misc_feature 1..20: note = Target: SCN10A; (+) strand; PAM type: YTN; PAM sequence: CTG
  source 1..20: mol_type = other DNA
ggataattccctggctccag

SEQ ID NO: 66409 - DNA, 20 bp, synthetic construct
  misc_feature 1..20: note = Description of Artificial Sequence: Synthetic oligonucleotide
  misc_feature 1..20: note = Target: SCN10A; (+) strand; PAM type: YTN; PAM sequence: TTC
  source 1..20: mol_type = other DNA
cctggctccaggcaaatctt

SEQ ID NO: 66410 - DNA, 20 bp, synthetic construct
  misc_feature 1..20: note = Description of Artificial Sequence: Synthetic oligonucleotide
  misc_feature 1..20: note = Target: SCN10A; (+) strand; PAM type: YTN; PAM sequence: CTG
  source 1..20: mol_type = other DNA
gctccaggcaaatcttacca

SEQ ID NO: 66411 - DNA, 20 bp, synthetic construct
  misc_feature 1..20: note = Description of Artificial Sequence: Synthetic oligonucleotide
  misc_feature 1..20: note = Target: SCN10A; (+) strand; PAM type: YTN; PAM sequence: CTC
  source 1..20: mol_type = other DNA
caggcaaatcttaccatatt

SEQ ID NO: 66412 - DNA, 20 bp, synthetic construct
  misc_feature 1..20: note = Description of Artificial Sequence: Synthetic oligonucleotide
  misc_feature 1..20: note = Target: SCN10A; (+) strand; PAM type: YTN; PAM sequence: CTT
  source 1..20: mol_type = other DNA
accatatttcacttagtatc

SEQ ID NO: 66413 - DNA, 20 bp, synthetic construct
  misc_feature 1..20: note = Description of Artificial Sequence: Synthetic oligonucleotide
  misc_feature 1..20: note = Target: SCN10A; (+) strand; PAM type: YTN; PAM sequence: TTA
  source 1..20: mol_type = other DNA
ccatatttcacttagtatcc

SEQ ID NO: 66414 - DNA, 20 bp, synthetic construct
  misc_feature 1..20: note = Description of Artificial Sequence: Synthetic oligonucleotide
  misc_feature 1..20: note = Target: SCN10A; (+) strand; PAM type: YTN; PAM sequence: TTT
  source 1..20: mol_type = other DNA
cacttagtatcctgcacttc

SEQ ID NO: 66415 - DNA, 20 bp, synthetic construct
  misc_feature 1..20: note = Description of Artificial Sequence: Synthetic oligonucleotide
  misc_feature 1..20: note = Target: SCN10A; (+) strand; PAM type: YTN; PAM sequence: TTC
  source 1..20: mol_type = other DNA
acttagtatcctgcacttcc

SEQ ID NO: 66416 - DNA, 20 bp, synthetic construct
  misc_feature 1..20: note = Description of Artificial Sequence: Synthetic oligonucleotide
  misc_feature 1..20: note = Target: SCN10A; (+) strand; PAM type: YTN; PAM sequence: CTT
  source 1..20: mol_type = other DNA
agtatcctgcacttcctctt

SEQ ID NO: 66417 - DNA, 20 bp, synthetic construct
  misc_feature 1..20: note = Description of Artificial Sequence: Synthetic oligonucleotide
  misc_feature 1..20: note = Target: SCN10A; (+) strand; PAM type: YTN; PAM sequence: TTA
  source 1..20: mol_type = other DNA
gtatcctgcacttcctcttt

SEQ ID NO: 66418 - DNA, 20 bp, synthetic construct
  misc_feature 1..20: note = Description of Artificial Sequence: Synthetic oligonucleotide
  misc_feature 1..20: note = Target: SCN10A; (+) strand; PAM type: YTN; PAM sequence: CTG
  source 1..20: mol_type = other DNA
cacttcctctttaaggcact

SEQ ID NO: 66419 - DNA, 20 bp, synthetic construct
  misc_feature 1..20: note = Description of Artificial Sequence: Synthetic oligonucleotide
  misc_feature 1..20: note = Target: SCN10A; (+) strand; PAM type: YTN; PAM sequence: CTT
  source 1..20: mol_type = other DNA
cctctttaaggcactcacca

SEQ ID NO: 66420 - DNA, 20 bp, synthetic construct
  misc_feature 1..20: note = Description of Artificial Sequence: Synthetic oligonucleotide
  misc_feature 1..20: note = Target: SCN10A; (+) strand; PAM type: YTN; PAM sequence: TTC
  source 1..20: mol_type = other DNA
ctctttaaggcactcaccac

SEQ ID NO: 66421 - DNA, 20 bp, synthetic construct
  misc_feature 1..20: note = Description of Artificial Sequence: Synthetic oligonucleotide
  misc_feature 1..20: note = Target: SCN10A; (+) strand; PAM type: YTN; PAM sequence: CTC
  source 1..20: mol_type = other DNA
tttaaggcactcaccactcc

SEQ ID NO: 66422 - DNA, 20 bp, synthetic construct
  misc_feature 1..20: note = Description of Artificial Sequence: Synthetic oligonucleotide
  misc_feature 1..20: note = Target: SCN10A; (+) strand; PAM type: YTN; PAM sequence: CTT
  source 1..20: mol_type = other DNA
taaggcactcaccactccag

SEQ ID NO: 66423 - DNA, 20 bp, synthetic construct
  misc_feature 1..20: note = Description of Artificial Sequence: Synthetic oligonucleotide
  misc_feature 1..20: note = Target: SCN10A; (+) strand; PAM type: YTN; PAM sequence: TTT
  source 1..20: mol_type = other DNA
aaggcactcaccactccagt

SEQ ID NO: 66424 - DNA, 20 bp, synthetic construct
  misc_feature 1..20: note = Description of Artificial Sequence: Synthetic oligonucleotide
  misc_feature 1..20: note = Target: SCN10A; (+) strand; PAM type: YTN; PAM sequence: TTA
  source 1..20: mol_type = other DNA
aggcactcaccactccagta

SEQ ID NO: 66425 - DNA, 20 bp, synthetic construct
  misc_feature 1..20: note = Description of Artificial Sequence: Synthetic oligonucleotide
  misc_feature 1..20: note = Target: SCN10A; (+) strand; PAM type: YTN; PAM sequence: CTC
  source 1..20: mol_type = other DNA
accactccagtaagctcact

SEQ ID NO: 66426 - DNA, 20 bp, synthetic construct
  misc_feature 1..20: note = Description of Artificial Sequence: Synthetic oligonucleotide
  misc_feature 1..20: note = Target: SCN10A; (+) strand; PAM type: YTN; PAM sequence: CTC
  source 1..20: mol_type = other DNA
cagtaagctcactgctgtga

SEQ ID NO: 66427 - DNA, 20 bp, synthetic construct
  misc_feature 1..20: note = Description of Artificial Sequence: Synthetic oligonucleotide
  misc_feature 1..20: note = Target: SCN10A; (+) strand; PAM type: YTN; PAM sequence: CTC
  source 1..20: mol_type = other DNA
actgctgtgacccagcttct

SEQ ID NO: 66428 - DNA, 20 bp, synthetic construct
  misc_feature 1..20: note = Description of Artificial Sequence: Synthetic oligonucleotide
  misc_feature 1..20: note = Target: SCN10A; (+) strand; PAM type: YTN; PAM sequence: CTG
  source 1..20: mol_type = other DNA
ctgtgacccagcttctggaa

SEQ ID NO: 66429 - DNA, 20 bp, synthetic construct
  misc_feature 1..20: note = Description of Artificial Sequence: Synthetic oligonucleotide
  misc_feature 1..20: note = Target: SCN10A; (+) strand; PAM type: YTN; PAM sequence: CTG
  source 1..20: mol_type = other DNA
tgacccagcttctggaattc

SEQ ID NO: 66430 - DNA, 20 bp, synthetic construct
  misc_feature 1..20: note = Description of Artificial Sequence: Synthetic oligonucleotide
  misc_feature 1..20: note = Target: SCN10A; (+) strand; PAM type: YTN; PAM sequence: CTT
  source 1..20: mol_type = other DNA
ctggaattctggcttggaca

SEQ ID NO: 66431 - DNA, 20 bp, synthetic construct
  misc_feature 1..20: note = Description of Artificial Sequence: Synthetic oligonucleotide
  misc_feature 1..20: note = Target: SCN10A; (+) strand; PAM type: YTN; PAM sequence: TTC
  source 1..20: mol_type = other DNA
tggaattctggcttggacaa

SEQ ID NO: 66432 - DNA, 20 bp, synthetic construct
  misc_feature 1..20: note = Description of Artificial Sequence: Synthetic oligonucleotide
  misc_feature 1..20: note = Target: SCN10A; (+) strand; PAM type: YTN; PAM sequence: CTG
  source 1..20: mol_type = other DNA
gaattctggcttggacaaca

SEQ ID NO: 66433 - DNA, 20 bp, synthetic construct
  misc_feature 1..20: note = Description of Artificial Sequence: Synthetic oligonucleotide
  misc_feature 1..20: note = Target: SCN10A; (+) strand; PAM type: YTN; PAM sequence: TTC
  source 1..20: mol_type = other DNA
tggcttggacaacagtgaaa

SEQ ID NO: 66434 - DNA, 20 bp, synthetic construct
  misc_feature 1..20: note = Description of Artificial Sequence: Synthetic oligonucleotide
  misc_feature 1..20: note = Target: SCN10A; (+) strand; PAM type: YTN; PAM sequence: CTG
  source 1..20: mol_type = other DNA
gcttggacaacagtgaaatc

SEQ ID NO: 66435 - DNA, 20 bp, synthetic construct
  misc_feature 1..20: note = Description of Artificial Sequence: Synthetic oligonucleotide
  misc_feature 1..20: note = Target: SCN10A; (+) strand; PAM type: YTN; PAM sequence: CTT
  source 1..20: mol_type = other DNA
ggacaacagtgaaatctcag

SEQ ID NO: 66436 - DNA, 20 bp, synthetic construct
  misc_feature 1..20: note = Description of Artificial Sequence: Synthetic oligonucleotide
  misc_feature 1..20: note = Target: SCN10A; (+) strand; PAM type: YTN; PAM sequence: TTG
  source 1..20: mol_type = other DNA
gacaacagtgaaatctcagc

SEQ ID NO: 66437 - DNA, 20 bp, synthetic construct
  misc_feature 1..20: note = Description of Artificial Sequence: Synthetic oligonucleotide
  misc_feature 1..20: note = Target: SCN10A; (+) strand; PAM type: YTN; PAM sequence: CTC
  source 1..20: mol_type = other DNA
agcttgcatgccaagcatag

SEQ ID NO: 66438 - DNA, 20 bp, synthetic construct
  misc_feature 1..20: note = Description of Artificial Sequence: Synthetic oligonucleotide
  misc_feature 1..20: note = Target: SCN10A; (+) strand; PAM type: YTN; PAM sequence: CTT
  source 1..20: mol_type = other DNA
gcatgccaagcatagaaggt

SEQ ID NO: 66439 - DNA, 20 bp, synthetic construct
  misc_feature 1..20: note = Description of Artificial Sequence: Synthetic oligonucleotide
  misc_feature 1..20: note = Target: SCN10A; (+) strand; PAM type: YTN; PAM sequence: TTG
  source 1..20: mol_type = other DNA
catgccaagcatagaaggtt

SEQ ID NO: 66440 - DNA, 20 bp, synthetic construct
  misc_feature 1..20: note = Description of Artificial Sequence: Synthetic oligonucleotide
  misc_feature 1..20: note = Target: SCN10A; (+) strand; PAM type: YTN; PAM sequence: TTC
  source 1..20: mol_type = other DNA
acatgctttgagttcagtga

SEQ ID NO: 66441 - DNA, 20 bp, synthetic construct
  misc_feature 1..20: note = Description of Artificial Sequence: Synthetic oligonucleotide
  misc_feature 1..20: note = Target: SCN10A; (+) strand; PAM type: YTN; PAM sequence: CTT
  source 1..20: mol_type = other DNA
tgagttcagtgaattgtcaa

SEQ ID NO: 66442 - DNA, 20 bp, synthetic construct
  misc_feature 1..20: note = Description of Artificial Sequence: Synthetic oligonucleotide
  misc_feature 1..20: note = Target: SCN10A; (+) strand; PAM type: YTN; PAM sequence: TTT
  source 1..20: mol_type = other DNA
gagttcagtgaattgtcaaa

SEQ ID NO: 66443 - DNA, 20 bp, synthetic construct
  misc_feature 1..20: note = Description of Artificial Sequence: Synthetic oligonucleotide
  misc_feature 1..20: note = Target: SCN10A; (+) strand; PAM type: YTN; PAM sequence: TTG
  source 1..20: mol_type = other DNA
agttcagtgaattgtcaaac

SEQ ID NO: 66444 - DNA, 20 bp, synthetic construct
  misc_feature 1..20: note = Description of Artificial Sequence: Synthetic oligonucleotide
  misc_feature 1..20: note = Target: SCN10A; (+) strand; PAM type: YTN; PAM sequence: TTC
  source 1..20: mol_type = other DNA
agtgaattgtcaaactcctg

SEQ ID NO: 66445 - DNA, 20 bp, synthetic construct
  misc_feature 1..20: note = Description of Artificial Sequence: Synthetic oligonucleotide
  misc_feature 1..20: note = Target: SCN10A; (+) strand; PAM type: YTN; PAM sequence: TTG
  source 1..20: mol_type = other DNA
tcaaactcctgttggtttgg

SEQ ID NO: 66446 - DNA, 20 bp, synthetic construct
  misc_feature 1..20: note = Description of Artificial Sequence: Synthetic oligonucleotide
  misc_feature 1..20: note = Target: SCN10A; (+) strand; PAM type: YTN; PAM sequence: CTC
  source 1..20: mol_type = other DNA
ctgttggtttgggccaaact

SEQ ID NO: 66447 - DNA, 20 bp, synthetic construct
  misc_feature 1..20: note = Description of Artificial Sequence: Synthetic oligonucleotide
  misc_feature 1..20: note = Target: SCN10A; (+) strand; PAM type: YTN; PAM sequence: CTG
  source 1..20: mol_type = other DNA
ttggtttgggccaaactttc

SEQ ID NO: 66448 - DNA, 20 bp, synthetic construct
  misc_feature 1..20: note = Description of Artificial Sequence: Synthetic oligonucleotide
  misc_feature 1..20: note = Target: SCN10A; (+) strand; PAM type: YTN; PAM sequence: TTG
  source 1..20: mol_type = other DNA
gtttgggccaaactttctta

SEQ ID NO: 66449 - DNA, 20 bp, synthetic construct
  misc_feature 1..20: note = Description of Artificial Sequence: Synthetic oligonucleotide
  misc_feature 1..20: note = Target: SCN10A; (+) strand; PAM type: YTN; PAM sequence: TTT
  source 1..20: mol_type = other DNA
gggccaaactttcttaagca

SEQ ID NO: 66450 - DNA, 20 bp, synthetic construct
  misc_feature 1..20: note = Description of Artificial Sequence: Synthetic oligonucleotide
  misc_feature 1..20: note = Target: SCN10A; (+) strand; PAM type: YTN; PAM sequence: TTG
  source 1..20: mol_type = other DNA
ggccaaactttcttaagcat

SEQ ID NO: 66451 - DNA, 20 bp, synthetic construct
  misc_feature 1..20: note = Description of Artificial Sequence: Synthetic oligonucleotide
  misc_feature 1..20: note = Target: SCN10A; (+) strand; PAM type: YTN; PAM sequence: CTT
  source 1..20: mol_type = other DNA
tcttaagcataatccctctt

SEQ ID NO: 66452 - DNA, 20 bp, synthetic construct
  misc_feature 1..20: note = Description of Artificial Sequence: Synthetic oligonucleotide
  misc_feature 1..20: note = Target: SCN10A; (+) strand; PAM type: YTN; PAM sequence: TTT
  source 1..20: mol_type = other DNA
cttaagcataatccctctta

SEQ ID NO: 66453 - DNA, 20 bp, synthetic construct
  misc_feature 1..20: note = Description of Artificial Sequence: Synthetic oligonucleotide
  misc_feature 1..20: note = Target: SCN10A; (+) strand; PAM type: YTN; PAM sequence: TTC
  source 1..20: mol_type = other DNA
ttaagcataatccctcttaa

SEQ ID NO: 66454 - DNA, 20 bp, synthetic construct
  misc_feature 1..20: note = Description of Artificial Sequence: Synthetic oligonucleotide
  misc_feature 1..20: note = Target: SCN10A; (+) strand; PAM type: YTN; PAM sequence: CTT
  source 1..20: mol_type = other DNA
aagcataatccctcttaaag

SEQ ID NO: 66455 - DNA, 20 bp, synthetic construct
  misc_feature 1..20: note = Description of Artificial Sequence: Synthetic oligonucleotide
  misc_feature 1..20: note = Target: SCN10A; (+) strand; PAM type: YTN; PAM sequence: TTA
  source 1..20: mol_type = other DNA
agcataatccctcttaaaga

SEQ ID NO: 66456 - DNA, 20 bp, synthetic construct
  misc_feature 1..20: note = Description of Artificial Sequence: Synthetic oligonucleotide
  misc_feature 1..20: note = Target: SCN10A; (+) strand; PAM type: YTN; PAM sequence: CTC
  source 1..20: mol_type = other DNA
ttaaagaggtggcctttata

SEQ ID NO: 66457 - DNA, 20 bp, synthetic construct
  misc_feature 1..20: note = Description of Artificial Sequence: Synthetic oligonucleotide
  misc_feature 1..20: note = Target: SCN10A; (+) strand; PAM type: YTN; PAM sequence: CTT
  source 1..20: mol_type = other DNA
aaagaggtggcctttataaa

SEQ ID NO: 66458 - DNA, 20 bp, synthetic construct
  misc_feature 1..20: note = Description of Artificial Sequence: Synthetic oligonucleotide
  misc_feature 1..20: note = Target: SCN10A; (+) strand; PAM type: YTN; PAM sequence: TTA
  source 1..20: mol_type = other DNA
aagaggtggcctttataaat

SEQ ID NO: 66459 - DNA, 20 bp, synthetic construct
  misc_feature 1..20: note = Description of Artificial Sequence: Synthetic oligonucleotide
  misc_feature 1..20: note = Target: SCN10A; (+) strand; PAM type: YTN; PAM sequence: CTT
  source 1..20: mol_type = other DNA
tataaatcctattacgactc

SEQ ID NO: 66460 - DNA, 20 bp, synthetic construct
  misc_feature 1..20: note = Description of Artificial Sequence: Synthetic oligonucleotide
  misc_feature 1..20: note = Target: SCN10A; (+) strand; PAM type: YTN; PAM sequence: TTT
  source 1..20: mol_type = other DNA
ataaatcctattacgactct

SEQ ID NO: 66461 - DNA, 20 bp, synthetic construct
  misc_feature 1..20: note = Description of Artificial Sequence: Synthetic oligonucleotide
  misc_feature 1..20: note = Target: SCN10A; (+) strand; PAM type: YTN; PAM sequence: TTA
  source 1..20: mol_type = other DNA
taaatcctattacgactctg

SEQ ID NO: 66462 - DNA, 20 bp, synthetic construct
  misc_feature 1..20: note = Description of Artificial Sequence: Synthetic oligonucleotide
  misc_feature 1..20: note = Target: SCN10A; (+) strand; PAM type: YTN; PAM sequence: CTA
  source 1..20: mol_type = other DNA
ttacgactctggcagcatga

SEQ ID NO: 66463 - DNA, 20 bp, synthetic construct
  misc_feature 1..20: note = Description of Artificial Sequence: Synthetic oligonucleotide
  misc_feature 1..20: note = Target: SCN10A; (+) strand; PAM type: YTN; PAM sequence: TTA
  source 1..20: mol_type = other DNA
cgactctggcagcatgaagc

SEQ ID NO: 66464 - DNA, 20 bp, synthetic construct
  misc_feature 1..20: note = Description of Artificial Sequence: Synthetic oligonucleotide
  misc_feature 1..20: note = Target: SCN10A; (+) strand; PAM type: YTN; PAM sequence: CTC
  source 1..20: mol_type = other DNA
tggcagcatgaagcatcctt

SEQ ID NO: 66465 - DNA, 20 bp, synthetic construct
  misc_feature 1..20: note = Description of Artificial Sequence: Synthetic oligonucleotide
  misc_feature 1..20: note = Target: SCN10A; (+) strand; PAM type: YTN; PAM sequence: CTG
  source 1..20: mol_type = other DNA
gcagcatgaagcatccttca

SEQ ID NO: 66466 - DNA, 20 bp, synthetic construct
  misc_feature 1..20: note = Description of Artificial Sequence: Synthetic oligonucleotide
  misc_feature 1..20: note = Target: SCN10A; (+) strand; PAM type: YTN; PAM sequence: CTT
  source 1..20: mol_type = other DNA
caggtgtctcatgtgtgtaa

SEQ ID NO: 66467 - DNA, 20 bp, synthetic construct
  misc_feature 1..20: note = Description of Artificial Sequence: Synthetic oligonucleotide
  misc_feature 1..20: note = Target: SCN10A; (+) strand; PAM type: YTN; PAM sequence: TTC
  source 1..20: mol_type = other DNA
aggtgtctcatgtgtgtaat

SEQ ID NO: 66468 - DNA, 20 bp, synthetic construct
  misc_feature 1..20: note = Description of Artificial Sequence: Synthetic oligonucleotide
  misc_feature 1..20: note = Target: SCN10A; (+) strand; PAM type: YTN; PAM sequence: CTC
  source 1..20: mol_type = other DNA
atgtgtgtaatgaatataac

SEQ ID NO: 66469 - DNA, 20 bp, synthetic construct
  misc_feature 1..20: note = Description of Artificial Sequence: Synthetic oligonucleotide
  misc_feature 1..20: note = Target: SCN10A; (+) strand; PAM type: YTN; PAM sequence: CTA
  source 1..20: mol_type = other DNA
tgctcagaaaactttgacct

SEQ ID NO: 66470 - DNA, 20 bp, synthetic construct
  misc_feature 1..20: note = Description of Artificial Sequence: Synthetic oligonucleotide
  misc_feature 1..20: note = Target: SCN10A; (+) strand; PAM type: YTN; PAM sequence: CTC
  source 1..20: mol_type = other DNA
agaaaactttgacctctttt

SEQ ID NO: 66471 - DNA, 20 bp, synthetic construct
  misc_feature 1..20: note = Description of Artificial Sequence: Synthetic oligonucleotide
  misc_feature 1..20: note = Target: SCN10A; (+) strand; PAM type: YTN; PAM sequence: CTT
  source 1..20: mol_type = other DNA
tgacctcttttatttaacct

SEQ ID NO: 66472 - DNA, 20 bp, synthetic construct
  misc_feature 1..20: note = Description of Artificial Sequence: Synthetic oligonucleotide
  misc_feature 1..20: note = Target: SCN10A; (+) strand; PAM type: YTN; PAM sequence: TTT
  source 1..20: mol_type = other DNA
gacctcttttatttaaccta

SEQ ID NO: 66473 - DNA, 20 bp, synthetic construct
  misc_feature 1..20: note = Description of Artificial Sequence: Synthetic oligonucleotide
  misc_feature 1..20: note = Target: SCN10A; (+) strand; PAM type: YTN; PAM sequence: TTG
  source 1..20: mol_type = other DNA
acctcttttatttaacctaa

SEQ ID NO: 66474 - DNA, 20 bp, synthetic construct
  misc_feature 1..20: note = Description of Artificial Sequence: Synthetic oligonucleotide
  misc_feature 1..20: note = Target: SCN10A; (+) strand; PAM type: YTN; PAM sequence: CTC
  source 1..20: mol_type = other DNA
ttttatttaacctaaggttt

SEQ ID NO: 66475 - DNA, 20 bp, synthetic construct
  misc_feature 1..20: note = Description of Artificial Sequence: Synthetic oligonucleotide
  misc_feature 1..20: note = Target: SCN10A; (+) strand; PAM type: YTN; PAM sequence: CTT
  source 1..20: mol_type = other DNA
ttatttaacctaaggtttcc

SEQ ID NO: 66476 - DNA, 20 bp, synthetic construct
  misc_feature 1..20: note = Description of Artificial Sequence: Synthetic oligonucleotide
  misc_feature 1..20: note = Target: SCN10A; (+) strand; PAM type: YTN; PAM sequence: TTT
  source 1..20: mol_type = other DNA
tatttaacctaaggtttcct

SEQ ID NO: 66477 - DNA, 20 bp, synthetic construct
  misc_feature 1..20: note = Description of Artificial Sequence: Synthetic oligonucleotide
  misc_feature 1..20: note = Target: SCN10A; (+) strand; PAM type: YTN; PAM sequence: TTT
  source 1..20: mol_type = other DNA
atttaacctaaggtttcctc

SEQ ID NO: 66478 - DNA, 20 bp, synthetic construct
  misc_feature 1..20: note = Description of Artificial Sequence: Synthetic oligonucleotide
  misc_feature 1..20: note = Target: SCN10A; (+) strand; PAM type: YTN; PAM sequence: TTA
  source 1..20: mol_type = other DNA
tttaacctaaggtttcctct

SEQ ID NO: 66479 - DNA, 20 bp, synthetic construct
  misc_feature 1..20: note = Description of Artificial Sequence: Synthetic oligonucleotide
  misc_feature 1..20: note = Target: SCN10A; (+) strand; PAM type: YTN; PAM sequence: TTT
  source 1..20: mol_type = other DNA
aacctaaggtttcctctcct

SEQ ID NO: 66480 - DNA, 20 bp, synthetic construct
  misc_feature 1..20: note = Description of Artificial Sequence: Synthetic oligonucleotide
  misc_feature 1..20: note = Target: SCN10A; (+) strand; PAM type: YTN; PAM sequence: TTA
  source 1..20: mol_type = other DNA
acctaaggtttcctctcctc

SEQ ID NO: 66481 - DNA, 20 bp, synthetic construct
  misc_feature 1..20: note = Description of Artificial Sequence: Synthetic oligonucleotide
  misc_feature 1..20: note = Target: SCN10A; (+) strand; PAM type: YTN; PAM sequence: CTA
  source 1..20: mol_type = other DNA
aggtttcctctcctcagatt

SEQ ID NO: 66482 - DNA, 20 bp, synthetic construct
  misc_feature 1..20: note = Description of Artificial Sequence: Synthetic oligonucleotide
  misc_feature 1..20: note = Target: SCN10A; (+) strand; PAM type: YTN; PAM sequence: TTT
  source 1..20: mol_type = other DNA
cctctcctcagattttcttt

SEQ ID NO: 66483 - DNA, 20 bp, synthetic construct
  misc_feature 1..20: note = Description of Artificial Sequence: Synthetic oligonucleotide
  misc_feature 1..20: note = Target: SCN10A; (+) strand; PAM type: YTN; PAM sequence: TTC
  source 1..20: mol_type = other DNA
ctctcctcagattttcttta

SEQ ID NO: 66484 - DNA, 20 bp, synthetic construct
  misc_feature 1..20: note = Description of Artificial Sequence: Synthetic oligonucleotide
  misc_feature 1..20: note = Target: SCN10A; (+) strand; PAM type: YTN; PAM sequence: CTC
  source 1..20: mol_type = other DNA
tcctcagattttctttaaaa

SEQ ID NO: 66485 - DNA, 20 bp, synthetic construct
  misc_feature 1..20: note = Description of Artificial Sequence: Synthetic oligonucleotide
  misc_feature 1..20: note = Target: SCN10A; (+) strand; PAM type: YTN; PAM sequence: CTC
  source 1..20: mol_type = other DNA
ctcagattttctttaaaaca

SEQ ID NO: 66486 - DNA, 20 bp, synthetic construct
  misc_feature 1..20: note = Description of Artificial Sequence: Synthetic oligonucleotide
  misc_feature 1..20: note = Target: SCN10A; (+) strand; PAM type: YTN; PAM sequence: CTC
  source 1..20: mol_type = other DNA
agattttctttaaaacatca

SEQ ID NO: 66487 - DNA, 20 bp, synthetic construct
  misc_feature 1..20: note = Description of Artificial Sequence: Synthetic oligonucleotide
  misc_feature 1..20: note = Target: SCN10A; (+) strand; PAM type: YTN; PAM sequence: TTT
  source 1..20: mol_type = other DNA
tctttaaaacatcattgttt

SEQ ID NO: 66488 - DNA, 20 bp, synthetic construct
  misc_feature 1..20: note = Description of Artificial Sequence: Synthetic oligonucleotide
  misc_feature 1..20: note = Target: SCN10A; (+) strand; PAM type: YTN; PAM sequence: TTT
  source 1..20: mol_type = other DNA
ctttaaaacatcattgtttc

SEQ ID NO: 66489 - DNA, 20 bp, synthetic construct
  misc_feature 1..20: note = Description of Artificial Sequence: Synthetic oligonucleotide
  misc_feature 1..20: note = Target: SCN10A; (+) strand; PAM type: YTN; PAM sequence: TTC
  source 1..20: mol_type = other DNA
tttaaaacatcattgtttct

SEQ ID NO: 66490 - DNA, 20 bp, synthetic construct
  misc_feature 1..20: note = Description of Artificial Sequence: Synthetic oligonucleotide
  misc_feature 1..20: note = Target: SCN10A; (+) strand; PAM type: YTN; PAM sequence: CTT
  source 1..20: mol_type = other DNA
taaaacatcattgtttctct

SEQ ID NO: 66491 - DNA, 20 bp, synthetic construct
  misc_feature 1..20: note = Description of Artificial Sequence: Synthetic oligonucleotide
  misc_feature 1..20: note = Target: SCN10A; (+) strand; PAM type: YTN; PAM sequence: TTT
  source 1..20: mol_type = other DNA
aaaacatcattgtttctctg

SEQ ID NO: 66492 - DNA, 20 bp, synthetic construct
  misc_feature 1..20: note = Description of Artificial Sequence: Synthetic oligonucleotide
  misc_feature 1..20: note = Target: SCN10A; (+) strand; PAM type: YTN; PAM sequence: TTA
  source 1..20: mol_type = other DNA
aaacatcattgtttctctgg

SEQ ID NO: 66493 - DNA, 20 bp, synthetic construct
  misc_feature 1..20: note = Description of Artificial Sequence: Synthetic oligonucleotide
  misc_feature 1..20: note = Target: SCN10A; (+) strand; PAM type: YTN; PAM sequence: TTG
  source 1..20: mol_type = other DNA
tttctctggcctttcttact

SEQ ID NO: 66494 - DNA, 20 bp, synthetic construct
  misc_feature 1..20: note = Description of Artificial Sequence: Synthetic oligonucleotide
  misc_feature 1..20: note = Target: SCN10A; (+) strand; PAM type: YTN; PAM sequence: TTT
  source 1..20: mol_type = other DNA
ctctggcctttcttactcta

SEQ ID NO: 66495 - DNA, 20 bp, synthetic construct
  misc_feature 1..20: note = Description of Artificial Sequence: Synthetic oligonucleotide
  misc_feature 1..20: note = Target: SCN10A; (+) strand; PAM type: YTN; PAM sequence: TTC
  source 1..20: mol_type = other DNA
tctggcctttcttactctac

SEQ ID NO: 66496 - DNA, 20 bp, synthetic construct
  misc_feature 1..20: note = Description of Artificial Sequence: Synthetic oligonucleotide
  misc_feature 1..20: note = Target: SCN10A; (+) strand; PAM type: YTN; PAM sequence: CTC
  source 1..20: mol_type = other DNA
tggcctttcttactctactg

SEQ ID NO: 66497 - DNA, 20 bp, synthetic construct
  misc_feature 1..20: note = Description of Artificial Sequence: Synthetic oligonucleotide
  misc_feature 1..20: note = Target: SCN10A; (+) strand; PAM type: YTN; PAM sequence: CTG
  source 1..20: mol_type = other DNA
gcctttcttactctactgtc

SEQ ID NO: 66498 - DNA, 20 bp, synthetic construct
  misc_feature 1..20: note = Description of Artificial Sequence: Synthetic oligonucleotide
  misc_feature 1..20: note = Target: SCN10A; (+) strand; PAM type: YTN; PAM sequence: CTT
  source 1..20: mol_type = other DNA
tcttactctactgtcacagc

SEQ ID NO: 66499 - DNA, 20 bp, synthetic construct
  misc_feature 1..20: note = Description of Artificial Sequence: Synthetic oligonucleotide
  misc_feature 1..20: note = Target: SCN10A; (+) strand; PAM type: YTN; PAM sequence: TTT
  source 1..20: mol_type = other DNA
cttactctactgtcacagca

SEQ ID NO: 66500 - DNA, 20 bp, synthetic construct
  misc_feature 1..20: note = Description of Artificial Sequence: Synthetic oligonucleotide
  misc_feature 1..20: note = Target: SCN10A; (+) strand; PAM type: YTN; PAM sequence: TTC
  source 1..20: mol_type = other DNA
ttactctactgtcacagcat

SEQ ID NO: 66501 - DNA, 20 bp, synthetic construct
  misc_feature 1..20: note = Description of Artificial Sequence: Synthetic oligonucleotide
  misc_feature 1..20: note = Target: SCN10A; (+) strand; PAM type: YTN; PAM sequence: CTT
  source 1..20: mol_type = other DNA
actctactgtcacagcatct

SEQ ID NO: 66502 - DNA, 20 bp, synthetic construct
  misc_feature 1..20: note = Description of Artificial Sequence: Synthetic oligonucleotide
  misc_feature 1..20: note = Target: SCN10A; (+) strand; PAM type: YTN; PAM sequence: TTA
  source 1..20: mol_type = other DNA
ctctactgtcacagcatctt

SEQ ID NO: 66503 - DNA, 20 bp, synthetic construct
  misc_feature 1..20: note = Description of Artificial Sequence: Synthetic oligonucleotide
  misc_feature 1..20: note = Target: SCN10A; (+) strand; PAM type: YTN; PAM sequence: CTC
  source 1..20: mol_type = other DNA
tactgtcacagcatcttcct

SEQ ID NO: 66504 - DNA, 20 bp, synthetic construct
  misc_feature 1..20: note = Description of Artificial Sequence: Synthetic oligonucleotide
  misc_feature 1..20: note = Target: SCN10A; (+) strand; PAM type: YTN; PAM sequence: CTA
  source 1..20: mol_type = other DNA
ctgtcacagcatcttccttg

SEQ ID NO: 66505 - DNA, 20 bp, synthetic construct
  misc_feature 1..20: note = Description of Artificial Sequence: Synthetic oligonucleotide
  misc_feature 1..20: note = Target: SCN10A; (+) strand; PAM type: YTN; PAM sequence: CTG
  source 1..20: mol_type = other DNA
tcacagcatcttccttgagg

SEQ ID NO: 66506 - DNA, 20 bp, synthetic construct
  misc_feature 1..20: note = Description of Artificial Sequence: Synthetic oligonucleotide
  misc_feature 1..20: note = Target: SCN10A; (+) strand; PAM type: YTN; PAM sequence: CTT
  source 1..20: mol_type = other DNA
ccttgaggggaagtctaccc

SEQ ID NO: 66507 - DNA, 20 bp, synthetic construct
  misc_feature 1..20: note = Description of Artificial Sequence: Synthetic oligonucleotide
  misc_feature 1..20: note = Target: SCN10A; (+) strand; PAM type: YTN; PAM sequence: TTC
  source 1..20: mol_type = other DNA
cttgaggggaagtctaccct

SEQ ID NO: 66508 - DNA, 20 bp, synthetic construct
  misc_feature 1..20: note = Description of Artificial Sequence: Synthetic oligonucleotide
  misc_feature 1..20: note = Target: SCN10A; (+) strand; PAM type: YTN; PAM sequence: CTT
  source 1..20: mol_type = other DNA
gaggggaagtctaccctacc

SEQ ID NO: 66509 - DNA, 20 bp, synthetic construct
  misc_feature 1..20: note = Description of Artificial Sequence: Synthetic oligonucleotide
  misc_feature 1..20: note = Target: SCN10A; (+) strand; PAM type: YTN; PAM sequence: TTG
  source 1..20: mol_type = other DNA
aggggaagtctaccctaccc

SEQ ID NO: 66510 - DNA, 20 bp, synthetic construct
  misc_feature 1..20: note = Description of Artificial Sequence: Synthetic oligonucleotide
  misc_feature 1..20: note = Target: SCN10A; (+) strand; PAM type: YTN; PAM sequence: CTA
  source 1..20: mol_type = other DNA
ccctaccccaacatatttgc

SEQ ID NO: 66511 - DNA, 20 bp, synthetic construct
  misc_feature 1..20: note = Description of Artificial Sequence: Synthetic oligonucleotide
  misc_feature 1..20: note = Target: SCN10A; (+) strand; PAM type: YTN; PAM sequence: CTA
  source 1..20: mol_type = other DNA
ccccaacatatttgcctatt

SEQ ID NO: 66512 - DNA, 20 bp, synthetic construct
  misc_feature 1..20: note = Description of Artificial Sequence: Synthetic oligonucleotide
  misc_feature 1..20: note = Target: SCN10A; (+) strand; PAM type: YTN; PAM sequence: TTT
  source 1..20: mol_type = other DNA
gcctattacttattttcttc

SEQ ID NO: 66513 - DNA, 20 bp, synthetic construct
  misc_feature 1..20: note = Description of Artificial Sequence: Synthetic oligonucleotide
  misc_feature 1..20: note = Target: SCN10A; (+) strand; PAM type: YTN; PAM sequence: TTG
  source 1..20: mol_type = other DNA
cctattacttattttcttcc

SEQ ID NO: 66514 - DNA, 20 bp, synthetic construct
  misc_feature 1..20: note = Description of Artificial Sequence: Synthetic oligonucleotide
  misc_feature 1..20: note = Target: SCN10A; (+) strand; PAM type: YTN; PAM sequence: CTA
  source 1..20: mol_type = other DNA
ttacttattttcttcctttt

SEQ ID NO: 66515 - DNA, 20 bp, synthetic construct
  misc_feature 1..20: note = Description of Artificial Sequence: Synthetic oligonucleotide
  misc_feature 1..20: note = Target: SCN10A; (+) strand; PAM type: YTN; PAM sequence: TTA
  source 1..20: mol_type = other DNA
cttattttcttcctttttat

SEQ ID NO: 66516 - DNA, 20 bp, synthetic construct
  misc_feature 1..20: note = Description of Artificial Sequence: Synthetic oligonucleotide
  misc_feature 1..20: note = Target: SCN10A; (+) strand; PAM type: YTN; PAM sequence: CTT
  source 1..20: mol_type = other DNA
attttcttcctttttatcag

SEQ ID NO: 66517 - DNA, 20 bp, synthetic construct
  misc_feature 1..20: note = Description of Artificial Sequence: Synthetic oligonucleotide
  misc_feature 1..20: note = Target: SCN10A; (+) strand; PAM type: YTN; PAM sequence: TTA
  source 1..20: mol_type = other DNA
ttttcttcctttttatcagt

SEQ ID NO: 66518 - DNA, 20 bp, synthetic construct
  misc_feature 1..20: note = Description of Artificial Sequence: Synthetic oligonucleotide
  misc_feature 1..20: note = Target: SCN10A; (+) strand; PAM type: YTN; PAM sequence: TTT
  source 1..20: mol_type = other DNA
tcttcctttttatcagttca

SEQ ID NO: 66519 - DNA, 20 bp, synthetic construct
  misc_feature 1..20: note = Description of Artificial Sequence: Synthetic oligonucleotide
  misc_feature 1..20: note = Target: SCN10A; (+) strand; PAM type: YTN; PAM sequence: TTT
  source 1..20: mol_type = other DNA
cttcctttttatcagttcac

SEQ ID NO: 66520 - DNA, 20 bp, synthetic construct
  misc_feature 1..20: note = Description of Artificial Sequence: Synthetic oligonucleotide
  misc_feature 1..20: note = Target: SCN10A; (+) strand; PAM type: YTN; PAM sequence: TTC
  source 1..20: mol_type = other DNA
ttcctttttatcagttcaca

SEQ ID NO: 66521 - DNA, 20 bp, synthetic construct
  misc_feature 1..20: note = Description of Artificial Sequence: Synthetic oligonucleotide
  misc_feature 1..20: note = Target: SCN10A; (+) strand; PAM type: YTN; PAM sequence: CTT
  source 1..20: mol_type = other DNA
cctttttatcagttcacact

SEQ ID NO: 66522 - DNA, 20 bp, synthetic construct
  misc_feature 1..20: note = Description of Artificial Sequence: Synthetic oligonucleotide
  misc_feature 1..20: note = Target: SCN10A; (+) strand; PAM type: YTN; PAM sequence: TTC
  source 1..20: mol_type = other DNA
ctttttatcagttcacactg

SEQ ID NO: 66523 - DNA, 20 bp, synthetic construct
  misc_feature 1..20: note = Description of Artificial Sequence: Synthetic oligonucleotide
  misc_feature 1..20: note = Target: SCN10A; (+) strand; PAM type: YTN; PAM sequence: CTT
  source 1..20: mol_type = other DNA
tttatcagttcacactgtta

SEQ ID NO: 66524 - DNA, 20 bp, synthetic construct
  misc_feature 1..20: note = Description of Artificial Sequence: Synthetic oligonucleotide
  misc_feature 1..20: note = Target: SCN10A; (+) strand; PAM type: YTN; PAM sequence: TTT
  source 1..20: mol_type = other DNA
ttatcagttcacactgttat

SEQ ID NO: 66525 - DNA, 20 bp, synthetic construct
  misc_feature 1..20: note = Description of Artificial Sequence: Synthetic oligonucleotide
  misc_feature 1..20: note = Target: SCN10A; (+) strand; PAM type: YTN; PAM sequence: TTT
  source 1..20: mol_type = other DNA
tatcagttcacactgttata

SEQ ID NO: 66526 - DNA, 20 bp, synthetic construct
  misc_feature 1..20: note = Description of Artificial Sequence: Synthetic oligonucleotide
  misc_feature 1..20: note = Target: SCN10A; (+) strand; PAM type: YTN; PAM sequence: TTT
  source 1..20: mol_type = other DNA
atcagttcacactgttataa

SEQ ID NO: 66527 - DNA, 20 bp, synthetic construct
  misc_feature 1..20: note = Description of Artificial Sequence: Synthetic oligonucleotide
  misc_feature 1..20: note = Target: SCN10A; (+) strand; PAM type: YTN; PAM sequence: TTA
  source 1..20: mol_type = other DNA
tcagttcacactgttataaa

SEQ ID NO: 66528 - DNA, 20 bp, synthetic construct
  misc_feature 1..20: note = Description of Artificial Sequence: Synthetic oligonucleotide
  misc_feature 1..20: note = Target: SCN10A; (+) strand; PAM type: YTN; PAM sequence: TTC
  source 1..20: mol_type = other DNA
acactgttataaattagcat

SEQ ID NO: 66529 - DNA, 20 bp, synthetic construct
  misc_feature 1..20: note = Description of Artificial Sequence: Synthetic oligonucleotide
  misc_feature 1..20: note = Target: SCN10A; (+) strand; PAM type: YTN; PAM sequence: CTG
  source 1..20: mol_type = other DNA
ttataaattagcatcactcc

SEQ ID NO: 66530 - DNA, 20 bp, synthetic construct
  misc_feature 1..20: note = Description of Artificial Sequence: Synthetic oligonucleotide
  misc_feature 1..20: note = Target: SCN10A; (+) strand; PAM type: YTN; PAM sequence: TTA
  source 1..20: mol_type = other DNA
taaattagcatcactcccgc

SEQ ID NO: 66531 - DNA, 20 bp, synthetic construct
  misc_feature 1..20: note = Description of Artificial Sequence: Synthetic oligonucleotide
  misc_feature 1..20: note = Target: SCN10A; (+) strand; PAM type: YTN; PAM sequence: TTA
  source 1..20: mol_type = other DNA
gcatcactcccgccgccaac

SEQ ID NO: 66532 - DNA, 20 bp, synthetic construct
  misc_feature 1..20: note = Description of Artificial Sequence: Synthetic oligonucleotide
  misc_feature 1..20: note = Target: SCN10A; (+) strand; PAM type: YTN; PAM sequence: CTC
  source 1..20: mol_type = other DNA
ccgccgccaaccacccaaat

SEQ ID NO: 66533 - DNA, 20 bp, synthetic construct
  misc_feature 1..20: note = Description of Artificial Sequence: Synthetic oligonucleotide
  misc_feature 1..20: note = Target: SCN10A; (+) strand; PAM type: YTN; PAM sequence: CTT
  source 1..20: mol_type = other DNA
tgtgcatgcacttgtcttct

SEQ ID NO: 66534 - DNA, 20 bp, synthetic construct
  misc_feature 1..20: note = Description of Artificial Sequence: Synthetic oligonucleotide
  misc_feature 1..20: note = Target: SCN10A; (+) strand; PAM type: YTN; PAM sequence: TTT
  source 1..20: mol_type = other DNA
gtgcatgcacttgtcttctg

SEQ ID NO: 66535 - DNA, 20 bp, synthetic construct
  misc_feature 1..20: note = Description of Artificial Sequence: Synthetic oligonucleotide
  misc_feature 1..20: note = Target: SCN10A; (+) strand; PAM type: YTN; PAM sequence: TTG
  source 1..20: mol_type = other DNA
tgcatgcacttgtcttctgg

SEQ ID NO: 66536 - DNA, 20 bp, synthetic construct
  misc_feature 1..20: note = Description of Artificial Sequence: Synthetic oligonucleotide
  misc_feature 1..20: note = Target: SCN10A; (+) strand; PAM type: YTN; PAM sequence: CTT
  source 1..20: mol_type = other DNA
gtcttctgggtaatggaggt

SEQ ID NO: 66537 - DNA, 20 bp, synthetic construct
  misc_feature 1..20: note = Description of Artificial Sequence: Synthetic oligonucleotide
  misc_feature 1..20: note = Target: SCN10A; (+) strand; PAM type: YTN; PAM sequence: TTG
  source 1..20: mol_type = other DNA
tcttctgggtaatggaggtc

SEQ ID NO: 66538 - DNA, 20 bp, synthetic construct
  misc_feature 1..20: note = Description of Artificial Sequence: Synthetic oligonucleotide
  misc_feature 1..20: note = Target: SCN10A; (+) strand; PAM type: YTN; PAM sequence: CTT
  source 1..20: mol_type = other DNA
ctgggtaatggaggtcaggc

SEQ ID NO: 66539 - DNA, 20 bp, synthetic construct
  misc_feature 1..20: note = Description of Artificial Sequence: Synthetic oligonucleotide
  misc_feature 1..20: note = Target: SCN10A; (+) strand; PAM type: YTN; PAM sequence: TTC
  source 1..20: mol_type = other DNA
tgggtaatggaggtcaggct

SEQ ID NO: 66540 - DNA, 20 bp, synthetic construct
  misc_feature 1..20: note = Description of Artificial Sequence: Synthetic oligonucleotide
  misc_feature 1..20: note = Target: SCN10A; (+) strand; PAM type: YTN; PAM sequence: CTG
  source 1..20: mol_type = other DNA
ggtaatggaggtcaggctgt

SEQ ID NO: 66541 - DNA, 20 bp, synthetic construct
  misc_feature 1..20: note = Description of Artificial Sequence: Synthetic oligonucleotide
  misc_feature 1..20: note = Target: SCN10A; (+) strand; PAM type: YTN; PAM sequence: CTG
  source 1..20: mol_type = other DNA
tgagcaaaacagacacatct

SEQ ID NO: 66542 - DNA, 20 bp, synthetic construct
  misc_feature 1..20: note = Description of Artificial Sequence: Synthetic oligonucleotide
  misc_feature 1..20: note = Target: SCN10A; (+) strand; PAM type: YTN; PAM sequence: CTC
  source 1..20: mol_type = other DNA
cgccctcatagattttacaa

SEQ ID NO: 66543 - DNA, 20 bp, synthetic construct
  misc_feature 1..20: note = Description of Artificial Sequence: Synthetic oligonucleotide
  misc_feature 1..20: note = Target: SCN10A; (+) strand; PAM type: YTN; PAM sequence: CTC
  source 1..20: mol_type = other DNA
atagattttacaacctagta

SEQ ID NO: 66544 - DNA, 20 bp, synthetic construct
  misc_feature 1..20: note = Description of Artificial Sequence: Synthetic oligonucleotide
  misc_feature 1..20: note = Target: SCN10A; (+) strand; PAM type: YTN; PAM sequence: TTT
  source 1..20: mol_type = other DNA
tacaacctagtaaatcataa

SEQ ID NO: 66545 - DNA, 20 bp, synthetic construct
  misc_feature 1..20: note = Description of Artificial Sequence: Synthetic oligonucleotide
  misc_feature 1..20: note = Target: SCN10A; (+) strand; PAM type: YTN; PAM sequence: TTT
  source 1..20: mol_type = other DNA
acaacctagtaaatcataat

SEQ ID NO: 66546 - DNA, 20 bp, synthetic construct
  misc_feature 1..20: note = Description of Artificial Sequence: Synthetic oligonucleotide
  misc_feature 1..20: note = Target: SCN10A; (+) strand; PAM type: YTN; PAM sequence: TTA
  source 1..20: mol_type = other DNA
caacctagtaaatcataata

SEQ ID NO: 66547 - DNA, 20 bp, synthetic construct
  misc_feature 1..20: note = Description of Artificial Sequence: Synthetic oligonucleotide
  misc_feature 1..20: note = Target: SCN10A; (+) strand; PAM type: YTN; PAM sequence: CTA
  source 1..20: mol_type = other DNA
gtaaatcataatagccaaat

SEQ ID NO: 66548 - DNA, 20 bp, synthetic construct
  misc_feature 1..20: note = Description of Artificial Sequence: Synthetic oligonucleotide
  misc_feature 1..20: note = Target: SCN10A; (+) strand; PAM type: YTN; PAM sequence: TTT
  source 1..20: mol_type = other DNA
actacatgccagtcgtggtt

SEQ ID NO: 66549 - DNA, 20 bp, synthetic construct
  misc_feature 1..20: note = Description of Artificial Sequence: Synthetic oligonucleotide
  misc_feature 1..20: note = Target: SCN10A; (+) strand; PAM type: YTN; PAM sequence: TTA
  source 1..20: mol_type = other DNA
ctacatgccagtcgtggttc

SEQ ID NO: 66550 - DNA, 20 bp, synthetic construct
  misc_feature 1..20: note = Description of Artificial Sequence: Synthetic oligonucleotide
  misc_feature 1..20: note = Target: SCN10A; (+) strand; PAM type: YTN; PAM sequence: CTA
  source 1..20: mol_type = other DNA
catgccagtcgtggttctaa

SEQ ID NO: 66551 - DNA, 20 bp, synthetic construct
  misc_feature 1..20: note = Description of Artificial Sequence: Synthetic oligonucleotide
  misc_feature 1..20: note = Target: SCN10A; (+) strand; PAM type: YTN; PAM sequence: TTC
  source 1..20: mol_type = other DNA
taagcattttgcttgacctg

SEQ ID NO: 66552 - DNA, 20 bp, synthetic construct
  misc_feature 1..20: note = Description of Artificial Sequence: Synthetic oligonucleotide
  misc_feature 1..20: note = Target: SCN10A; (+) strand; PAM type: YTN; PAM sequence: CTA
  source 1..20: mol_type = other DNA
agcattttgcttgacctgac

SEQ ID NO: 66553 - DNA, 20 bp, synthetic construct
  misc_feature 1..20: note = Description of Artificial Sequence: Synthetic oligonucleotide
  misc_feature 1..20: note = Target: SCN10A; (+) strand; PAM type: YTN; PAM sequence: TTT
  source 1..20: mol_type = other DNA
tgcttgacctgactcattta

SEQ ID NO: 66554 - DNA, 20 bp, synthetic construct
  misc_feature 1..20: note = Description of Artificial Sequence: Synthetic oligonucleotide
  misc_feature 1..20: note = Target: SCN10A; (+) strand; PAM type: YTN; PAM sequence: TTT
  source 1..20: mol_type = other DNA
gcttgacctgactcatttaa

SEQ ID NO: 66555 - DNA, 20 bp, synthetic construct
  misc_feature 1..20: note = Description of Artificial Sequence: Synthetic oligonucleotide
  misc_feature 1..20: note = Target: SCN10A; (+) strand; PAM type: YTN; PAM sequence: TTG
  source 1..20: mol_type = other DNA
cttgacctgactcatttaat

SEQ ID NO: 66556 - DNA, 20 bp, synthetic construct
  misc_feature 1..20: note = Description of Artificial Sequence: Synthetic oligonucleotide
  misc_feature 1..20: note = Target: SCN10A; (+) strand; PAM type: YTN; PAM sequence: CTT
  source 1..20: mol_type = other DNA
gacctgactcatttaatcct

SEQ ID NO: 66557 - DNA, 20 bp, synthetic construct
  misc_feature 1..20: note = Description of Artificial Sequence: Synthetic oligonucleotide
  misc_feature 1..20: note = Target: SCN10A; (+) strand; PAM type: YTN; PAM sequence: TTG
  source 1..20: mol_type = other DNA
acctgactcatttaatcctc

SEQ ID NO: 66558 - DNA, 20 bp, synthetic construct
  misc_feature 1..20: note = Description of Artificial Sequence: Synthetic oligonucleotide
  misc_feature 1..20: note = Target: SCN10A; (+) strand; PAM type: YTN; PAM sequence: CTG
  source 1..20: mol_type = other DNA
actcatttaatcctcacaaa

SEQ ID NO: 66559 - DNA, 20 bp, synthetic construct
  misc_feature 1..20: note = Description of Artificial Sequence: Synthetic oligonucleotide
  misc_feature 1..20: note = Target: SCN10A; (+) strand; PAM type: YTN; PAM sequence: CTC
  source 1..20: mol_type = other DNA
atttaatcctcacaaaactc

SEQ ID NO: 66560 - DNA, 20 bp, synthetic construct
  misc_feature 1..20: note = Description of Artificial Sequence: Synthetic oligonucleotide
  misc_feature 1..20: note = Target: SCN10A; (+) strand; PAM type: YTN; PAM sequence: TTT
  source 1..20: mol_type = other DNA
aatcctcacaaaactctaca

SEQ ID NO: 66561 - DNA, 20 bp, synthetic construct
  misc_feature 1..20: note = Description of Artificial Sequence: Synthetic oligonucleotide
  misc_feature 1..20: note = Target: SCN10A; (+) strand; PAM type: YTN; PAM sequence: TTA
  source 1..20: mol_type = other DNA
atcctcacaaaactctacaa

SEQ ID NO: 66562 - DNA, 20 bp, synthetic construct
  misc_feature 1..20: note = Description of Artificial Sequence: Synthetic oligonucleotide
  misc_feature 1..20: note = Target: SCN10A; (+) strand; PAM type: YTN; PAM sequence: CTC
  source 1..20: mol_type = other DNA
acaaaactctacaagataag

SEQ ID NO: 66563 - DNA, 20 bp, synthetic construct
  misc_feature 1..20: note = Description of Artificial Sequence: Synthetic oligonucleotide
  misc_feature 1..20: note = Target: SCN10A; (+) strand; PAM type: YTN; PAM sequence: CTC
  source 1..20: mol_type = other DNA
tacaagataagtatattctc

SEQ ID NO: 66564 - DNA, 20 bp, synthetic construct
  misc_feature 1..20: note = Description of Artificial Sequence: Synthetic oligonucleotide
  misc_feature 1..20: note = Target: SCN10A; (+) strand; PAM type: YTN; PAM sequence: CTA
  source 1..20: mol_type = other DNA
caagataagtatattctcac

SEQ ID NO: 66565 - DNA, 20 bp, synthetic construct
  misc_feature 1..20: note = Description of Artificial Sequence: Synthetic oligonucleotide
  misc_feature 1..20: note = Target: SCN10A; (+) strand; PAM type: YTN; PAM sequence: TTC
  source 1..20: mol_type = other DNA
tcactactttacaggctaaa

SEQ ID NO: 66566 - DNA, 20 bp, synthetic construct
  misc_feature 1..20: note = Description of Artificial Sequence: Synthetic oligonucleotide
  misc_feature 1..20: note = Target: SCN10A; (+) strand; PAM type: YTN; PAM sequence: CTC
  source 1..20: mol_type = other DNA
actactttacaggctaaaaa

SEQ ID NO: 66567 - DNA, 20 bp, synthetic construct
  misc_feature 1..20: note = Description of Artificial Sequence: Synthetic oligonucleotide
  misc_feature 1..20: note = Target: SCN10A; (+) strand; PAM type: YTN; PAM sequence: CTA
  source 1..20: mol_type = other DNA
ctttacaggctaaaaatctg

SEQ ID NO: 66568 - DNA, 20 bp, synthetic construct
  misc_feature 1..20: note = Description of Artificial Sequence: Synthetic oligonucleotide
  misc_feature 1..20: note = Target: SCN10A; (+) strand; PAM type: YTN; PAM sequence: CTT
  source 1..20: mol_type = other DNA
tacaggctaaaaatctgagg

SEQ ID NO: 66569 - DNA, 20 bp, synthetic construct
  misc_feature 1..20: note = Description of Artificial Sequence: Synthetic oligonucleotide
  misc_feature 1..20: note = Target: SCN10A; (+) strand; PAM type: YTN; PAM sequence: TTT
  source 1..20: mol_type = other DNA
acaggctaaaaatctgaggc

SEQ ID NO: 66570 - DNA, 20 bp, synthetic construct
  misc_feature 1..20: note = Description of Artificial Sequence: Synthetic oligonucleotide
  misc_feature 1..20: note = Target: SCN10A; (+) strand; PAM type: YTN; PAM sequence: TTA
  source 1..20: mol_type = other DNA
caggctaaaaatctgaggca

SEQ ID NO: 66571 - DNA, 20 bp, synthetic construct
  misc_feature 1..20: note = Description of Artificial Sequence: Synthetic oligonucleotide
  misc_feature 1..20: note = Target: SCN10A; (+) strand; PAM type: YTN; PAM sequence: CTA
  source 1..20: mol_type = other DNA
aaaatctgaggcacagaaaa

SEQ ID NO: 66572 - DNA, 20 bp, synthetic construct
  misc_feature 1..20: note = Description of Artificial Sequence: Synthetic oligonucleotide
  misc_feature 1..20: note = Target: SCN10A; (+) strand; PAM type: YTN; PAM sequence: CTG
  source 1..20: mol_type = other DNA
aggcacagaaaagttactga

SEQ ID NO: 66573 - DNA, 20 bp, synthetic construct
  misc_feature 1..20: note = Description of Artificial Sequence: Synthetic oligonucleotide
  misc_feature 1..20: note = Target: SCN10A; (+) strand; PAM type: YTN; PAM sequence: TTA
  source 1..20: mol_type = other DNA
ctgaagctccaaggtcacac

SEQ ID NO: 66574 - DNA, 20 bp, synthetic construct
  misc_feature 1..20: note = Description of Artificial Sequence: Synthetic oligonucleotide
  misc_feature 1..20: note = Target: SCN10A; (+) strand; PAM type: YTN; PAM sequence: CTG
  source 1..20: mol_type = other DNA
aagctccaaggtcacactgt

SEQ ID NO: 66575 - DNA, 20 bp, synthetic construct
  misc_feature 1..20: note = Description of Artificial Sequence: Synthetic oligonucleotide
  misc_feature 1..20: note = Target: SCN10A; (+) strand; PAM type: YTN; PAM sequence: CTC
  source 1..20: mol_type = other DNA
caaggtcacactgtgtacca

SEQ ID NO: 66576 - DNA, 20 bp, synthetic construct
  misc_feature 1..20: note = Description of Artificial Sequence: Synthetic oligonucleotide
  misc_feature 1..20: note = Target: SCN10A; (+) strand; PAM type: YTN; PAM sequence: CTG
  source 1..20: mol_type = other DNA
tgtaccataagtggaagagc

SEQ ID NO: 66577 - DNA, 20 bp, synthetic construct
  misc_feature 1..20: note = Description of Artificial Sequence: Synthetic oligonucleotide
  misc_feature 1..20: note = Target: SCN10A; (+) strand; PAM type: YTN; PAM sequence: CTA
  source 1..20: mol_type = other DNA
ggatgcaaacccaggcagcc

SEQ ID NO: 66578 - DNA, 20 bp, synthetic construct
  misc_feature 1..20: note = Description of Artificial Sequence: Synthetic oligonucleotide
  misc_feature 1..20: note = Target: SCN10A; (+) strand; PAM type: YTN; PAM sequence: TTC
  source 1..20: mol_type = other DNA
cagagcagtgttctaactac

SEQ ID NO: 66579 - DNA, 20 bp, synthetic construct
  misc_feature 1..20: note = Description of Artificial Sequence: Synthetic oligonucleotide
  misc_feature 1..20: note = Target: SCN10A; (+) strand; PAM type: YTN; PAM sequence: TTC
  source 1..20: mol_type = other DNA
taactactaccctctgttgc

SEQ ID NO: 66580 - DNA, 20 bp, synthetic construct
  misc_feature 1..20: note = Description of Artificial Sequence: Synthetic oligonucleotide
  misc_feature 1..20: note = Target: SCN10A; (+) strand; PAM type: YTN; PAM sequence: CTA
  source 1..20: mol_type = other DNA
actactaccctctgttgcct

SEQ ID NO: 66581 - DNA, 20 bp, synthetic construct
  misc_feature 1..20: note = Description of Artificial Sequence: Synthetic oligonucleotide
  misc_feature 1..20: note = Target: SCN10A; (+) strand; PAM type: YTN; PAM sequence: CTA
  source 1..20: mol_type = other DNA
ctaccctctgttgcctctca

SEQ ID NO: 66582 - DNA, 20 bp, synthetic construct
  misc_feature 1..20: note = Description of Artificial Sequence: Synthetic oligonucleotide
  misc_feature 1..20: note = Target: SCN10A; (+) strand; PAM type: YTN; PAM sequence: CTA
  source 1..20: mol_type = other DNA
ccctctgttgcctctcattc

SEQ ID NO: 66583 - DNA, 20 bp, synthetic construct
  misc_feature 1..20: note = Description of Artificial Sequence: Synthetic oligonucleotide
  misc_feature 1..20: note = Target: SCN10A; (+) strand; PAM type: YTN; PAM sequence: CTC
  source 1..20: mol_type = other DNA
tgttgcctctcattcatccc

SEQ ID NO: 66584 - DNA, 20 bp, synthetic construct
  misc_feature 1..20: note = Description of Artificial Sequence: Synthetic oligonucleotide
  misc_feature 1..20: note = Target: SCN10A; (+) strand; PAM type: YTN; PAM sequence: CTG
  source 1..20: mol_type = other DNA
ttgcctctcattcatcccat

SEQ ID NO: 66585 - DNA, 20 bp, synthetic construct
  misc_feature 1..20: note = Description of Artificial Sequence: Synthetic oligonucleotide
  misc_feature 1..20: note = Target: SCN10A; (+) strand; PAM type: YTN; PAM sequence: TTG
  source 1..20: mol_type = other DNA
cctctcattcatcccatgac

SEQ ID NO: 66586 - DNA, 20 bp, synthetic construct
  misc_feature 1..20: note = Description of Artificial Sequence: Synthetic oligonucleotide
  misc_feature 1..20: note = Target: SCN10A; (+) strand; PAM type: YTN; PAM sequence: CTC
  source 1..20: mol_type = other DNA
tcattcatcccatgaccttc

SEQ ID NO: 66587 - DNA, 20 bp, synthetic construct
  misc_feature 1..20: note = Description of Artificial Sequence: Synthetic oligonucleotide
  misc_feature 1..20: note = Target: SCN10A; (+) strand; PAM type: YTN; PAM sequence: CTC
  source 1..20: mol_type = other DNA
attcatcccatgaccttctt

SEQ ID NO: 66588 - DNA, 20 bp, synthetic construct
  misc_feature 1..20: note = Description of Artificial Sequence: Synthetic oligonucleotide
  misc_feature 1..20: note = Target: SCN10A; (+) strand; PAM type: YTN; PAM sequence: TTC
  source 1..20: mol_type = other DNA
atcccatgaccttcttttgt

SEQ ID NO: 66589 - DNA, 20 bp, synthetic construct
  misc_feature 1..20: note = Description of Artificial Sequence: Synthetic oligonucleotide
  misc_feature 1..20: note = Target: SCN10A; (+) strand; PAM type: YTN; PAM sequence: CTT
  source 1..20: mol_type = other DNA
cttttgtcttacctacactg

SEQ ID NO: 66590 - DNA, 20 bp, synthetic construct
  misc_feature 1..20: note = Description of Artificial Sequence: Synthetic oligonucleotide
  misc_feature 1..20: note = Target: SCN10A; (+) strand; PAM type: YTN; PAM sequence: TTC
  source 1..20: mol_type = other DNA
ttttgtcttacctacactgg

SEQ ID NO: 66591 - DNA, 20 bp, synthetic construct
  misc_feature 1..20: note = Description of Artificial Sequence: Synthetic oligonucleotide
  misc_feature 1..20: note = Target: SCN10A; (+) strand; PAM type: YTN; PAM sequence: CTT
  source 1..20: mol_type = other DNA
ttgtcttacctacactggga

SEQ ID NO: 66592 - DNA, 20 bp, synthetic construct
  misc_feature 1..20: note = Description of Artificial Sequence: Synthetic oligonucleotide
  misc_feature 1..20: note = Target: SCN10A; (+) strand; PAM type: YTN; PAM sequence: TTT
  source 1..20: mol_type = other DNA
tgtcttacctacactgggat

SEQ ID NO: 66593 - DNA, 20 bp, synthetic construct
  misc_feature 1..20: note = Description of Artificial Sequence: Synthetic oligonucleotide
  misc_feature 1..20: note = Target: SCN10A; (+) strand; PAM type: YTN; PAM sequence: TTT
  source 1..20: mol_type = other DNA
gtcttacctacactgggatg

SEQ ID NO: 66594 - DNA, 20 bp, synthetic construct
  misc_feature 1..20: note = Description of Artificial Sequence: Synthetic oligonucleotide
  misc_feature 1..20: note = Target: SCN10A; (+) strand; PAM type: YTN; PAM sequence: TTG
  source 1..20: mol_type = other DNA
tcttacctacactgggatgt

SEQ ID NO: 66595 - DNA, 20 bp, synthetic construct
  misc_feature 1..20: note = Description of Artificial Sequence: Synthetic oligonucleotide
  misc_feature 1..20: note = Target: SCN10A; (+) strand; PAM type: YTN; PAM sequence: CTT
  source 1..20: mol_type = other DNA
acctacactgggatgtgttt

SEQ ID NO: 66596 - DNA, 20 bp, synthetic construct
  misc_feature 1..20: note = Description of Artificial Sequence: Synthetic oligonucleotide
  misc_feature 1..20: note = Target: SCN10A; (+) strand; PAM type: YTN; PAM sequence: TTA
  source 1..20: mol_type = other DNA
cctacactgggatgtgtttg

SEQ ID NO: 66597 - DNA, 20 bp, synthetic construct
  misc_feature 1..20: note = Description of Artificial Sequence: Synthetic oligonucleotide
  misc_feature 1..20: note = Target: SCN10A; (+) strand; PAM type: YTN; PAM sequence: CTA
  source 1..20: mol_type = other DNA
cactgggatgtgtttgggac

SEQ ID NO: 66598 - DNA, 20 bp, synthetic construct
  misc_feature 1..20: note = Description of Artificial Sequence: Synthetic oligonucleotide
  misc_feature 1..20: note = Target: SCN10A; (+) strand; PAM type: YTN; PAM sequence: CTG
  source 1..20: mol_type = other DNA
ggatgtgtttgggacatgca

SEQ ID NO: 66599 - DNA, 20 bp, synthetic construct
  misc_feature 1..20: note = Description of Artificial Sequence: Synthetic oligonucleotide
  misc_feature 1..20: note = Target: SCN10A; (+) strand; PAM type: YTN; PAM sequence: TTT
  source 1..20: mol_type = other DNA
gggacatgcattttgcttgt

SEQ ID NO: 66600 - DNA, 20 bp, synthetic construct
  misc_feature 1..20: note = Description of Artificial Sequence: Synthetic oligonucleotide
  misc_feature 1..20: note = Target: SCN10A; (+) strand; PAM type: YTN; PAM sequence: TTG
  source 1..20: mol_type = other DNA
ggacatgcattttgcttgtt

SEQ ID NO: 66601 - DNA, 20 bp, synthetic construct
  misc_feature 1..20: note = Description of Artificial Sequence: Synthetic oligonucleotide
  misc_feature 1..20: note = Target: SCN10A; (+) strand; PAM type: YTN; PAM sequence: TTT
  source 1..20: mol_type = other DNA
tgcttgttgctatctcattc

SEQ ID NO: 66602 - DNA, 20 bp, synthetic construct
  misc_feature 1..20: note = Description of Artificial Sequence: Synthetic oligonucleotide
  misc_feature 1..20: note = Target: SCN10A; (+) strand; PAM type: YTN; PAM sequence: TTT
  source 1..20: mol_type = other DNA
gcttgttgctatctcattct

SEQ ID NO: 66603 - DNA, 20 bp, synthetic construct
  misc_feature 1..20: note = Description of Artificial Sequence: Synthetic oligonucleotide
  misc_feature 1..20: note = Target: SCN10A; (+) strand; PAM type: YTN; PAM sequence: TTG
  source 1..20: mol_type = other DNA
cttgttgctatctcattctt

SEQ ID NO: 66604 - DNA, 20 bp, synthetic construct
  misc_feature 1..20: note = Description of Artificial Sequence: Synthetic oligonucleotide
  misc_feature 1..20: note = Target: SCN10A; (+) strand; PAM type: YTN; PAM sequence: CTT
  source 1..20: mol_type = other DNA
gttgctatctcattcttgca

SEQ ID NO: 66605 - DNA, 20 bp, synthetic construct
  misc_feature 1..20: note = Description of Artificial Sequence: Synthetic oligonucleotide
  misc_feature 1..20: note = Target: SCN10A; (+) strand; PAM type: YTN; PAM sequence: TTG
  source 1..20: mol_type = other DNA
ttgctatctcattcttgcag

SEQ ID NO: 66606 - DNA, 20 bp, synthetic construct
  misc_feature 1..20: note = Description of Artificial Sequence: Synthetic oligonucleotide
  misc_feature 1..20: note = Target: SCN10A; (+) strand; PAM type: YTN; PAM sequence: TTG
  source 1..20: mol_type = other DNA
ctatctcattcttgcagaat

SEQ ID NO: 66607 - DNA, 20 bp, synthetic construct
  misc_feature 1..20: note = Description of Artificial Sequence: Synthetic oligonucleotide
  misc_feature 1..20: note = Target: SCN10A; (+) strand; PAM type: YTN; PAM sequence: CTA
  source 1..20: mol_type = other DNA
tctcattcttgcagaatgca

SEQ ID NO: 66608 - DNA, 20 bp, synthetic construct
  misc_feature 1..20: note = Description of Artificial Sequence: Synthetic oligonucleotide
  misc_feature 1..20: note = Target: SCN10A; (+) strand; PAM type: YTN; PAM sequence: CTC
  source 1..20: mol_type = other DNA
attcttgcagaatgcattgt

SEQ ID NO: 66609 - DNA, 20 bp, synthetic construct
  misc_feature 1..20: note = Description of Artificial Sequence: Synthetic oligonucleotide
  misc_feature 1..20: note = Target: SCN10A; (+) strand; PAM type: YTN; PAM sequence: TTC
  source 1..20: mol_type = other DNA
ttgcagaatgcattgtactt

SEQ ID NO: 66610 - DNA, 20 bp, synthetic construct
  misc_feature 1..20: note = Description of Artificial Sequence: Synthetic oligonucleotide
  misc_feature 1..20: note = Target: SCN10A; (+) strand; PAM type: YTN; PAM sequence: CTT
  source 1..20: mol_type = other DNA
gcagaatgcattgtacttgc

SEQ ID NO: 66611 - DNA, 20 bp, synthetic construct
  misc_feature 1..20: note = Description of Artificial Sequence: Synthetic oligonucleotide
  misc_feature 1..20: note = Target: SCN10A; (+) strand; PAM type: YTN; PAM sequence: TTG
  source 1..20: mol_type = other DNA
cagaatgcattgtacttgct

SEQ ID NO: 66612 - DNA, 20 bp, synthetic construct
  misc_feature 1..20: note = Description of Artificial Sequence: Synthetic oligonucleotide
  misc_feature 1..20: note = Target: SCN10A; (+) strand; PAM type: YTN; PAM sequence: TTG
  source 1..20: mol_type = other DNA
tacttgctatttgtgtctgc

SEQ ID NO: 66613 - DNA, 20 bp, synthetic construct
  misc_feature 1..20: note = Description of Artificial Sequence: Synthetic oligonucleotide
  misc_feature 1..20: note = Target: SCN10A; (+) strand; PAM type: YTN; PAM sequence: CTT
  source 1..20: mol_type = other DNA
gctatttgtgtctgcgaact

SEQ ID NO: 66614 - DNA, 20 bp, synthetic construct
  misc_feature 1..20: note = Description of Artificial Sequence: Synthetic oligonucleotide
  misc_feature 1..20: note = Target: SCN10A; (+) strand; PAM type: YTN; PAM sequence: TTG
  source 1..20: mol_type = other DNA
ctatttgtgtctgcgaactt

SEQ ID NO: 66615 - DNA, 20 bp, synthetic construct
  misc_feature 1..20: note = Description of Artificial Sequence: Synthetic oligonucleotide
  misc_feature 1..20: note = Target: SCN10A; (+) strand; PAM type: YTN; PAM sequence: CTA
  source 1..20: mol_type = other DNA
tttgtgtctgcgaactttct

SEQ ID NO: 66616 - DNA, 20 bp, synthetic construct
  misc_feature 1..20: note = Description of Artificial Sequence: Synthetic oligonucleotide
  misc_feature 1..20: note = Target: SCN10A; (+) strand; PAM type: YTN; PAM sequence: TTT
  source 1..20: mol_type = other DNA
gtgtctgcgaactttctcct

SEQ ID NO: 66617 - DNA, 20 bp, synthetic construct
  misc_feature 1..20: note = Description of Artificial Sequence: Synthetic oligonucleotide
  misc_feature 1..20: note = Target: SCN10A; (+) strand; PAM type: YTN; PAM sequence: TTG
  source 1..20: mol_type = other DNA
tgtctgcgaactttctcctc

SEQ ID NO: 66618 - DNA, 20 bp, synthetic construct
  misc_feature 1..20: note = Description of Artificial Sequence: Synthetic oligonucleotide
  misc_feature 1..20: note = Target: SCN10A; (+) strand; PAM type: YTN; PAM sequence: CTG
  source 1..20: mol_type = other DNA
cgaactttctcctcagcttc

SEQ ID NO: 66619 - DNA, 20 bp, synthetic construct
  misc_feature 1..20: note = Description of Artificial Sequence: Synthetic oligonucleotide
  misc_feature 1..20: note = Target: SCN10A; (+) strand; PAM type: YTN; PAM sequence: CTT
  source 1..20: mol_type = other DNA
tctcctcagcttcttacata

SEQ ID NO: 66620 - DNA, 20 bp, synthetic construct
  misc_feature 1..20: note = Description of Artificial Sequence: Synthetic oligonucleotide
  misc_feature 1..20: note = Target: SCN10A; (+) strand; PAM type: YTN; PAM sequence: TTT
  source 1..20: mol_type = other DNA
ctcctcagcttcttacatag

SEQ ID NO: 66621 - DNA, 20 bp, synthetic construct
  misc_feature 1..20: note = Description of Artificial Sequence: Synthetic oligonucleotide
  misc_feature 1..20: note = Target: SCN10A; (+) strand; PAM type: YTN; PAM sequence: TTC
  source 1..20: mol_type = other DNA
tcctcagcttcttacatagc

SEQ ID NO: 66622 - DNA, 20 bp, synthetic construct
  misc_feature 1..20: note = Description of Artificial Sequence: Synthetic oligonucleotide
  misc_feature 1..20: note = Target: SCN10A; (+) strand; PAM type: YTN; PAM sequence: CTC
  source 1..20: mol_type = other DNA
ctcagcttcttacatagctg

SEQ ID NO: 66623 - DNA, 20 bp, synthetic construct
  misc_feature 1..20: note = Description of Artificial Sequence: Synthetic oligonucleotide
  misc_feature 1..20: note = Target: SCN10A; (+) strand; PAM type: YTN; PAM sequence: CTC
  source 1..20: mol_type = other DNA
agcttcttacatagctgatt

SEQ ID NO: 66624 - DNA, 20 bp, synthetic construct
  misc_feature 1..20: note = Description of Artificial Sequence: Synthetic oligonucleotide
  misc_feature 1..20: note = Target: SCN10A; (+) strand; PAM type: YTN; PAM sequence: CTT
  source 1..20: mol_type = other DNA
cttacatagctgattccttt

SEQ ID NO: 66625 - DNA, 20 bp, synthetic construct
  misc_feature 1..20: note = Description of Artificial Sequence: Synthetic oligonucleotide
  misc_feature 1..20: note = Target: SCN10A; (+) strand; PAM type: YTN; PAM sequence: TTC
  source 1..20: mol_type = other DNA
ttacatagctgattccttta

SEQ ID NO: 66626 - DNA, 20 bp, synthetic construct
  misc_feature 1..20: note = Description of Artificial Sequence: Synthetic oligonucleotide
  misc_feature 1..20: note = Target: SCN10A; (+) strand; PAM type: YTN; PAM sequence: CTT
  source 1..20: mol_type = other DNA
acatagctgattcctttatt

SEQ ID NO: 66627 - DNA, 20 bp, synthetic construct
  misc_feature 1..20: note = Description of Artificial Sequence: Synthetic oligonucleotide
  misc_feature 1..20: note = Target: SCN10A; (+) strand; PAM type: YTN; PAM sequence: TTA
  source 1..20: mol_type = other DNA
catagctgattcctttattt

SEQ ID NO: 66628 - DNA, 20 bp, synthetic construct
  misc_feature 1..20: note = Description of Artificial Sequence: Synthetic oligonucleotide
  misc_feature 1..20: note = Target: SCN10A; (+) strand; PAM type: YTN; PAM sequence: CTG
  source 1..20: mol_type = other DNA
attcctttatttaattcaaa

SEQ ID NO: 66629 - DNA, 20 bp, synthetic construct
  misc_feature 1..20: note = Description of Artificial Sequence: Synthetic oligonucleotide
  misc_feature 1..20: note = Target: SCN10A; (+) strand; PAM type: YTN; PAM sequence: TTC
  source 1..20: mol_type = other DNA
ctttatttaattcaaatttc

SEQ ID NO: 66630 - DNA, 20 bp, synthetic construct
  misc_feature 1..20: note = Description of Artificial Sequence: Synthetic oligonucleotide
  misc_feature 1..20: note = Target: SCN10A; (+) strand; PAM type: YTN; PAM sequence: CTT
  source 1..20: mol_type = other DNA
tatttaattcaaatttctgt

SEQ ID NO: 66631 - DNA, 20 bp, synthetic construct
  misc_feature 1..20: note = Description of Artificial Sequence: Synthetic oligonucleotide
  misc_feature 1..20: note = Target: SCN10A; (+) strand; PAM type: YTN; PAM sequence: TTT
  source 1..20: mol_type = other DNA
atttaattcaaatttctgtt

SEQ ID NO: 66632 - DNA, 20 bp, synthetic construct
  misc_feature 1..20: note = Description of Artificial Sequence: Synthetic oligonucleotide
  misc_feature 1..20: note = Target: SCN10A; (+) strand; PAM type: YTN; PAM sequence: TTA
  source 1..20: mol_type = other DNA
tttaattcaaatttctgttc

SEQ ID NO: 66633 - DNA, 20 bp, synthetic construct
  misc_feature 1..20: note = Description of Artificial Sequence: Synthetic oligonucleotide
  misc_feature 1..20: note = Target: SCN10A; (+) strand; PAM type: YTN; PAM sequence: TTT
  source 1..20: mol_type = other DNA
aattcaaatttctgttcttc

SEQ ID NO: 66634 - DNA, 20 bp, synthetic construct
  misc_feature 1..20: note = Description of Artificial Sequence: Synthetic oligonucleotide
  misc_feature 1..20: note = Target: SCN10A; (+) strand; PAM type: YTN; PAM sequence: TTA
  source 1..20: mol_type = other DNA
attcaaatttctgttcttct

SEQ ID NO: 66635 - DNA, 20 bp, synthetic construct
  misc_feature 1..20: note = Description of Artificial Sequence: Synthetic oligonucleotide
  misc_feature 1..20: note = Target: SCN10A; (+) strand; PAM type: YTN; PAM sequence: TTC
  source 1..20: mol_type = other DNA
aaatttctgttcttcttgga

SEQ ID NO: 66636 - DNA, 20 bp, synthetic construct
  misc_feature 1..20: note = Description of Artificial Sequence: Synthetic oligonucleotide
  misc_feature 1..20: note = Target: SCN10A; (+) strand; PAM type: YTN; PAM sequence: TTT
  source 1..20: mol_type = other DNA
ctgttcttcttggagagaat

SEQ ID NO: 66637 - DNA, 20 bp, synthetic construct
  misc_feature 1..20: note = Description of Artificial Sequence: Synthetic oligonucleotide
  misc_feature 1..20: note = Target: SCN10A; (+) strand; PAM type: YTN; PAM sequence: TTC
  source 1..20: mol_type = other DNA
tgttcttcttggagagaatt

SEQ ID NO: 66638 - DNA, 20 bp, synthetic construct
  misc_feature 1..20: note = Description of Artificial Sequence: Synthetic oligonucleotide
  misc_feature 1..20: note = Target: SCN10A; (+) strand; PAM type: YTN; PAM sequence: CTG
  source 1..20: mol_type = other DNA
ttcttcttggagagaatttt

SEQ ID NO: 66639 - DNA, 20 bp, synthetic construct
  misc_feature 1..20: note = Description of Artificial Sequence: Synthetic oligonucleotide
  misc_feature 1..20: note = Target: SCN10A; (+) strand; PAM type: YTN; PAM sequence: TTC
  source 1..20: mol_type = other DNA
ttcttggagagaattttcca

SEQ ID NO: 66640 - DNA, 20 bp, synthetic construct
  misc_feature 1..20: note = Description of Artificial Sequence: Synthetic oligonucleotide
  misc_feature 1..20: note = Target: SCN10A; (+) strand; PAM type: YTN; PAM sequence: CTT
  source 1..20: mol_type = other DNA
cttggagagaattttccatc

SEQ ID NO: 66641 - DNA, 20 bp, synthetic construct
  misc_feature 1..20: note = Description of Artificial Sequence: Synthetic oligonucleotide
  misc_feature 1..20: note = Target: SCN10A; (+) strand; PAM type: YTN; PAM sequence: TTC
  source 1..20: mol_type = other DNA
ttggagagaattttccatct

SEQ ID NO: 66642 - DNA, 20 bp, synthetic construct
  misc_feature 1..20: note = Description of Artificial Sequence: Synthetic oligonucleotide
  misc_feature 1..20: note = Target: SCN10A; (+) strand; PAM type: YTN; PAM sequence: CTT
  source 1..20: mol_type = other DNA
ggagagaattttccatctcc

SEQ ID NO: 66643 - DNA, 20 bp, synthetic construct
  misc_feature 1..20: note = Description of Artificial Sequence: Synthetic oligonucleotide
  misc_feature 1..20: note = Target: SCN10A; (+) strand; PAM type: YTN; PAM sequence: TTG
  source 1..20: mol_type = other DNA
gagagaattttccatctcct

SEQ ID NO: 66644 - DNA, 20 bp, synthetic construct
  misc_feature 1..20: note = Description of Artificial Sequence: Synthetic oligonucleotide
  misc_feature 1..20: note = Target: SCN10A; (+) strand; PAM type: YTN; PAM sequence: TTT
  source 1..20: mol_type = other DNA
tccatctcctttcctacttt

SEQ ID NO: 66645 - DNA, 20 bp, synthetic construct
  misc_feature 1..20: note = Description of Artificial Sequence: Synthetic oligonucleotide
  misc_feature 1..20: note = Target: SCN10A; (+) strand; PAM type: YTN; PAM sequence: TTT
  source 1..20: mol_type = other DNA
ccatctcctttcctacttta

SEQ ID NO: 66646 - DNA, 20 bp, synthetic construct
  misc_feature 1..20: note = Description of Artificial Sequence: Synthetic oligonucleotide
  misc_feature 1..20: note = Target: SCN10A; (+) strand; PAM type: YTN; PAM sequence: TTC
  source 1..20: mol_type = other DNA
catctcctttcctactttat

SEQ ID NO: 66647 - DNA, 20 bp, synthetic construct
  misc_feature 1..20: note = Description of Artificial Sequence: Synthetic oligonucleotide
  misc_feature 1..20: note = Target: SCN10A; (+) strand; PAM type: YTN; PAM sequence: CTC
  source 1..20: mol_type = other DNA
ctttcctactttattttttc

SEQ ID NO: 66648 - DNA, 20 bp, synthetic construct
  misc_feature 1..20: note = Description of Artificial Sequence: Synthetic oligonucleotide
  misc_feature 1..20: note = Target: SCN10A; (+) strand; PAM type: YTN; PAM sequence: CTT
  source 1..20: mol_type = other DNA
tcctactttattttttctcc

SEQ ID NO: 66649 - DNA, 20 bp, synthetic construct
  misc_feature 1..20: note = Description of Artificial Sequence: Synthetic oligonucleotide
  misc_feature 1..20: note = Target: SCN10A; (+) strand; PAM type: YTN; PAM sequence: TTT
  source 1..20: mol_type = other DNA
cctactttattttttctcct

SEQ ID NO: 66650 - DNA, 20 bp, synthetic construct
  misc_feature 1..20: note = Description of Artificial Sequence: Synthetic oligonucleotide
  misc_feature 1..20: note = Target: SCN10A; (+) strand; PAM type: YTN; PAM sequence: TTC
  source 1..20: mol_type = other DNA
ctactttattttttctccta

SEQ ID NO: 66651 - DNA, 20 bp, synthetic construct
  misc_feature 1..20: note = Description of Artificial Sequence: Synthetic oligonucleotide
  misc_feature 1..20: note = Target: SCN10A; (+) strand; PAM type: YTN; PAM sequence: CTA
  source 1..20: mol_type = other DNA
ctttattttttctcctactt

SEQ ID NO: 66652 - DNA, 20 bp, synthetic construct
  misc_feature 1..20: note = Description of Artificial Sequence: Synthetic oligonucleotide
  misc_feature 1..20: note = Target: SCN10A; (+) strand; PAM type: YTN; PAM sequence: CTT
  source 1..20: mol_type = other DNA
tattttttctcctacttctt

SEQ ID NO: 66653 - DNA, 20 bp, synthetic construct
  misc_feature 1..20: note = Description of Artificial Sequence: Synthetic oligonucleotide
  misc_feature 1..20: note = Target: SCN10A; (+) strand; PAM type: YTN; PAM sequence: TTT
  source 1..20: mol_type = other DNA
attttttctcctacttctta

SEQ ID NO: 66654 - DNA, 20 bp, synthetic construct
  misc_feature 1..20: note = Description of Artificial Sequence: Synthetic oligonucleotide
  misc_feature 1..20: note = Target: SCN10A; (+) strand; PAM type: YTN; PAM sequence: TTA
  source 1..20: mol_type = other DNA
ttttttctcctacttcttat

SEQ ID NO: 66655 - DNA, 20 bp, synthetic construct
  misc_feature 1..20: note = Description of Artificial Sequence: Synthetic oligonucleotide
  misc_feature 1..20: note = Target: SCN10A; (+) strand; PAM type: YTN; PAM sequence: TTT
  source 1..20: mol_type = other DNA
tttctcctacttcttatatc

SEQ ID NO: 66656 - DNA, 20 bp, synthetic construct
  misc_feature 1..20: note = Description of Artificial Sequence: Synthetic oligonucleotide
  misc_feature 1..20: note = Target: SCN10A; (+) strand; PAM type: YTN; PAM sequence: TTT
  source 1..20: mol_type = other DNA
ttctcctacttcttatatct

SEQ ID NO: 66657 - DNA, 20 bp, synthetic construct
  misc_feature 1..20: note = Description of Artificial Sequence: Synthetic oligonucleotide
  misc_feature 1..20: note = Target: SCN10A; (+) strand; PAM type: YTN; PAM sequence: TTT
  source 1..20: mol_type = other DNA
tctcctacttcttatatctg

SEQ ID NO: 66658 - DNA, 20 bp, synthetic construct
  misc_feature 1..20: note = Description of Artificial Sequence: Synthetic oligonucleotide
  misc_feature 1..20: note = Target: SCN10A; (+) strand; PAM type: YTN; PAM sequence: TTT
  source 1..20: mol_type = other DNA
ctcctacttcttatatctga

SEQ ID NO: 66659 - DNA, 20 bp, synthetic construct
  misc_feature 1..20: note = Description of Artificial Sequence: Synthetic oligonucleotide
  misc_feature 1..20: note = Target: SCN10A; (+) strand; PAM type: YTN; PAM sequence: TTC
  source 1..20: mol_type = other DNA
tcctacttcttatatctgaa

SEQ ID NO: 66660 - DNA, 20 bp, synthetic construct
  misc_feature 1..20: note = Description of Artificial Sequence: Synthetic oligonucleotide
  misc_feature 1..20: note = Target: SCN10A; (+) strand; PAM type: YTN; PAM sequence: CTC
  source 1..20: mol_type = other DNA
ctacttcttatatctgaata

SEQ ID NO: 66661 - DNA, 20 bp, synthetic construct
  misc_feature 1..20: note = Description of Artificial Sequence: Synthetic oligonucleotide
  misc_feature 1..20: note = Target: SCN10A; (+) strand; PAM type: YTN; PAM sequence: CTA
  source 1..20: mol_type = other DNA
cttcttatatctgaatatct

SEQ ID NO: 66662 - DNA, 20 bp, synthetic construct
  misc_feature 1..20: note = Description of Artificial Sequence: Synthetic oligonucleotide
  misc_feature 1..20: note = Target: SCN10A; (+) strand; PAM type: YTN; PAM sequence: CTT
  source 1..20: mol_type = other DNA
cttatatctgaatatctatt

SEQ ID NO: 66663 - DNA, 20 bp, synthetic construct
  misc_feature 1..20: note = Description of Artificial Sequence: Synthetic oligonucleotide
  misc_feature 1..20: note = Target: SCN10A; (+) strand; PAM type: YTN; PAM sequence: TTC
  source 1..20: mol_type = other DNA
ttatatctgaatatctattc

SEQ ID NO: 66664 - DNA, 20 bp, synthetic construct
  misc_feature 1..20: note = Description of Artificial Sequence: Synthetic oligonucleotide
  misc_feature 1..20: note = Target: SCN10A; (+) strand; PAM type: YTN; PAM sequence: CTT
  source 1..20: mol_type = other DNA
atatctgaatatctattcat

SEQ ID NO: 66665 - DNA, 20 bp, synthetic construct
  misc_feature 1..20: note = Description of Artificial Sequence: Synthetic oligonucleotide
  misc_feature 1..20: note = Target: SCN10A; (+) strand; PAM type: YTN; PAM sequence: TTA
  source 1..20: mol_type = other DNA
tatctgaatatctattcatc

SEQ ID NO: 66666 - DNA, 20 bp, synthetic construct
  misc_feature 1..20: note = Description of Artificial Sequence: Synthetic oligonucleotide
  misc_feature 1..20: note = Target: SCN10A; (+) strand; PAM type: YTN; PAM sequence: CTG
  source 1..20: mol_type = other DNA
aatatctattcatctttcat

SEQ ID NO: 66667 - DNA, 20 bp, synthetic construct
  misc_feature 1..20: note = Description of Artificial Sequence: Synthetic oligonucleotide
  misc_feature 1..20: note = Target: SCN10A; (+) strand; PAM type: YTN; PAM sequence: CTA
  source 1..20: mol_type = other DNA
ttcatctttcatgtcccctt

SEQ ID NO: 66668 - DNA, 20 bp, synthetic construct
  misc_feature 1..20: note = Description of Artificial Sequence: Synthetic oligonucleotide
  misc_feature 1..20: note = Target: SCN10A; (+) strand; PAM type: YTN; PAM sequence: TTC
  source 1..20: mol_type = other DNA
atctttcatgtccccttccc

SEQ ID NO: 66669 - DNA, 20 bp, synthetic construct
  misc_feature 1..20: note = Description of Artificial Sequence: Synthetic oligonucleotide
  misc_feature 1..20: note = Target: SCN10A; (+) strand; PAM type: YTN; PAM sequence: CTT
  source 1..20: mol_type = other DNA
tcatgtccccttccctgcta

SEQ ID NO: 66670 - DNA, 20 bp, synthetic construct
  misc_feature 1..20: note = Description of Artificial Sequence: Synthetic oligonucleotide
  misc_feature 1..20: note = Target: SCN10A; (+) strand; PAM type: YTN; PAM sequence: TTT
  source 1..20: mol_type = other DNA
catgtccccttccctgctag

SEQ ID NO: 66671 - DNA, 20 bp, synthetic construct
  misc_feature 1..20: note = Description of Artificial Sequence: Synthetic oligonucleotide
  misc_feature 1..20: note = Target: SCN10A; (+) strand; PAM type: YTN; PAM sequence: TTC
  source 1..20: mol_type = other DNA
atgtccccttccctgctagg

SEQ ID NO: 66672 - DNA, 20 bp, synthetic construct
  misc_feature 1..20: note = Description of Artificial Sequence: Synthetic oligonucleotide
  misc_feature 1..20: note = Target: SCN10A; (+) strand; PAM type: YTN; PAM sequence: CTT
  source 1..20: mol_type = other DNA
ccctgctaggatgtagattc

SEQ ID NO: 66673 - DNA, 20 bp, synthetic construct
  misc_feature 1..20: note = Description of Artificial Sequence: Synthetic oligonucleotide
  misc_feature 1..20: note = Target: SCN10A; (+) strand; PAM type: YTN; PAM sequence: TTC
  source 1..20: mol_type = other DNA
cctgctaggatgtagattcc

SEQ ID NO: 66674 - DNA, 20 bp, synthetic construct
  misc_feature 1..20: note = Description of Artificial Sequence: Synthetic oligonucleotide
  misc_feature 1..20: note = Target: SCN10A; (+) strand; PAM type: YTN; PAM sequence: CTG
  source 1..20: mol_type = other DNA
ctaggatgtagattccatga

SEQ ID NO: 66675 - DNA, 20 bp, synthetic construct
  misc_feature 1..20: note = Description of Artificial Sequence: Synthetic oligonucleotide
  misc_feature 1..20: note = Target: SCN10A; (+) strand; PAM type: YTN; PAM sequence: CTA
  source 1..20: mol_type = other DNA
ggatgtagattccatgagcg

SEQ ID NO: 66676 - DNA, 20 bp, synthetic construct
  misc_feature 1..20: note = Description of Artificial Sequence: Synthetic oligonucleotide
  misc_feature 1..20: note = Target: SCN10A; (+) strand; PAM type: YTN; PAM sequence: TTC
  source 1..20: mol_type = other DNA
catgagcgcaagcttatatc

SEQ ID NO: 66677 - DNA, 20 bp, synthetic construct
  misc_feature 1..20: note = Description of Artificial Sequence: Synthetic oligonucleotide
  misc_feature 1..20: note = Target: SCN10A; (+) strand; PAM type: YTN; PAM sequence: CTT
  source 1..20: mol_type = other DNA
atatcagttcaccactgaat

SEQ ID NO: 66678 - DNA, 20 bp, synthetic construct
  misc_feature 1..20: note = Description of Artificial Sequence: Synthetic oligonucleotide
  misc_feature 1..20: note = Target: SCN10A; (+) strand; PAM type: YTN; PAM sequence: TTA
  source 1..20: mol_type = other DNA
tatcagttcaccactgaatc

SEQ ID NO: 66679 - DNA, 20 bp, synthetic construct
  misc_feature 1..20: note = Description of Artificial Sequence: Synthetic oligonucleotide
  misc_feature 1..20: note = Target: SCN10A; (+) strand; PAM type: YTN; PAM sequence: TTC
  source 1..20: mol_type = other DNA
accactgaatcccagcacct

SEQ ID NO: 66680 - DNA, 20 bp, synthetic construct
  misc_feature 1..20: note = Description of Artificial Sequence: Synthetic oligonucleotide
  misc_feature 1..20: note = Target: SCN10A; (+) strand; PAM type: YTN; PAM sequence: CTG
  source 1..20: mol_type = other DNA
aatcccagcacctgaagcaa

SEQ ID NO: 66681 - DNA, 20 bp, synthetic construct
  misc_feature 1..20: note = Description of Artificial Sequence: Synthetic oligonucleotide
  misc_feature 1..20: note = Target: SCN10A; (+) strand; PAM type: YTN; PAM sequence: CTG
  source 1..20: mol_type = other DNA
aagcaatgccacacacacaa

SEQ ID NO: 66682 - DNA, 20 bp, synthetic construct
  misc_feature 1..20: note = Description of Artificial Sequence: Synthetic oligonucleotide
  misc_feature 1..20: note = Target: SCN10A; (+) strand; PAM type: YTN; PAM sequence: CTC
  source 1..20: mol_type = other DNA
aacaaatgcttgttgataag

SEQ ID NO: 66683 - DNA, 20 bp, synthetic construct
  misc_feature 1..20: note = Description of Artificial Sequence: Synthetic oligonucleotide
  misc_feature 1..20: note = Target: SCN10A; (+) strand; PAM type: YTN; PAM sequence: CTT
  source 1..20: mol_type = other DNA
gttgataagagaataaatga

SEQ ID NO: 66684 - DNA, 20 bp, synthetic construct
  misc_feature 1..20: note = Description of Artificial Sequence: Synthetic oligonucleotide
  misc_feature 1..20: note = Target: SCN10A; (+) strand; PAM type: YTN; PAM sequence: TTG
  source 1..20: mol_type = other DNA
ttgataagagaataaatgaa

SEQ ID NO: 66685 - DNA, 20 bp, synthetic construct
  misc_feature 1..20: note = Description of Artificial Sequence: Synthetic oligonucleotide
  misc_feature 1..20: note = Target: SCN10A; (+) strand; PAM type: YTN; PAM sequence: TTG
  source 1..20: mol_type = other DNA
ataagagaataaatgaaaga

SEQ ID NO: 66686 - DNA, 20 bp, synthetic construct
  misc_feature 1..20: note = Description of Artificial Sequence: Synthetic oligonucleotide
  misc_feature 1..20: note = Target: SCN10A; (+) strand; PAM type: YTN; PAM sequence: CTT
  source 1..20: mol_type = other DNA
aacagttttcgagaataaat

SEQ ID NO: 66687 - DNA, 20 bp, synthetic construct
  misc_feature 1..20: note = Description of Artificial Sequence: Synthetic oligonucleotide
  misc_feature 1..20: note = Target: SCN10A; (+) strand; PAM type: YTN; PAM sequence: TTA
  source 1..20: mol_type = other DNA
acagttttcgagaataaatg

SEQ ID NO: 66688 - DNA, 20 bp, synthetic construct
  misc_feature 1..20: note = Description of Artificial Sequence: Synthetic oligonucleotide
  misc_feature 1..20: note = Target: SCN10A; (+) strand; PAM type: YTN; PAM sequence: TTT
  source 1..20: mol_type = other DNA
tcgagaataaatgaaaaaaa

SEQ ID NO: 66689 - DNA, 20 bp, synthetic construct
  misc_feature 1..20: note = Description of Artificial Sequence: Synthetic oligonucleotide
  misc_feature 1..20: note = Target: SCN10A; (+) strand; PAM type: YTN; PAM sequence: TTT
  source 1..20: mol_type = other DNA
cgagaataaatgaaaaaaac

SEQ ID NO: 66690 - DNA, 20 bp, synthetic construct
  misc_feature 1..20: note = Description of Artificial Sequence: Synthetic oligonucleotide
  misc_feature 1..20: note = Target: SCN10A; (+) strand; PAM type: YTN; PAM sequence: TTC
  source 1..20: mol_type = other DNA
gagaataaatgaaaaaaaca

SEQ ID NO: 66691 - DNA, 20 bp, synthetic construct
  misc_feature 1..20: note = Description of Artificial Sequence: Synthetic oligonucleotide
  misc_feature 1..20: note = Target: SCN10A; (+) strand; PAM type: YTN; PAM sequence: CTG
  source 1..20: mol_type = other DNA
tttgtattcaatgtttgctg

SEQ ID NO: 66692 - DNA, 20 bp, synthetic construct
  misc_feature 1..20: note = Description of Artificial Sequence: Synthetic oligonucleotide
  misc_feature 1..20: note = Target: SCN10A; (+) strand; PAM type: YTN; PAM sequence: TTT
  source 1..20: mol_type = other DNA
gtattcaatgtttgctgttt

SEQ ID NO: 66693 - DNA, 20 bp, synthetic construct
  misc_feature 1..20: note = Description of Artificial Sequence: Synthetic oligonucleotide
  misc_feature 1..20: note = Target: SCN10A; (+) strand; PAM type: YTN; PAM sequence: TTG
  source 1..20: mol_type = other DNA
tattcaatgtttgctgtttg

SEQ ID NO: 66694 - DNA, 20 bp, synthetic construct
  misc_feature 1..20: note = Description of Artificial Sequence: Synthetic oligonucleotide
  misc_feature 1..20: note = Target: SCN10A; (+) strand; PAM type: YTN; PAM sequence: TTC
  source 1..20: mol_type = other DNA
aatgtttgctgtttgatgac

SEQ ID NO: 66695 - DNA, 20 bp, synthetic construct
  misc_feature 1..20: note = Description of Artificial Sequence: Synthetic oligonucleotide
  misc_feature 1..20: note = Target: SCN10A; (+) strand; PAM type: YTN; PAM sequence: TTT
  source 1..20: mol_type = other DNA
gctgtttgatgactaatagc

SEQ ID NO: 66696 - DNA, 20 bp, synthetic construct
  misc_feature 1..20: note = Description of Artificial Sequence: Synthetic oligonucleotide
  misc_feature 1..20: note = Target: SCN10A; (+) strand; PAM type: YTN; PAM sequence: TTG
  source 1..20: mol_type = other DNA
ctgtttgatgactaatagca

SEQ ID NO: 66697 - DNA, 20 bp, synthetic construct
  misc_feature 1..20: note = Description of Artificial Sequence: Synthetic oligonucleotide
  misc_feature 1..20: note = Target: SCN10A; (+) strand; PAM type: YTN; PAM sequence: CTG
  source 1..20: mol_type = other DNA
tttgatgactaatagcaaaa

SEQ ID NO: 66698 - DNA, 20 bp, synthetic construct
  misc_feature 1..20: note = Description of Artificial Sequence: Synthetic oligonucleotide
  misc_feature 1..20: note = Target: SCN10A; (+) strand; PAM type: YTN; PAM sequence: TTT
  source 1..20: mol_type = other DNA
gatgactaatagcaaaacaa

SEQ ID NO: 66699 - DNA, 20 bp, synthetic construct
  misc_feature 1..20: note = Description of Artificial Sequence: Synthetic oligonucleotide
  misc_feature 1..20: note = Target: SCN10A; (+) strand; PAM type: YTN; PAM sequence: TTG
  source 1..20: mol_type = other DNA
atgactaatagcaaaacaaa

SEQ ID NO: 66700 - DNA, 20 bp, synthetic construct
  misc_feature 1..20: note = Description of Artificial Sequence: Synthetic oligonucleotide
  misc_feature 1..20: note = Target: SCN10A; (+) strand; PAM type: YTN; PAM sequence: CTA
  source 1..20: mol_type = other DNA
atagcaaaacaaaaaccaaa

SEQ ID NO: 66701 - DNA, 20 bp, synthetic construct
  misc_feature 1..20: note = Description of Artificial Sequence: Synthetic oligonucleotide
  misc_feature 1..20: note = Target: SCN10A; (+) strand; PAM type: YTN; PAM sequence: CTA
  source 1..20: mol_type = other DNA
tctggccaagaaagaaattg

SEQ ID NO: 66702 - DNA, 20 bp, synthetic construct
  misc_feature 1..20: note = Description of Artificial Sequence: Synthetic oligonucleotide
  misc_feature 1..20: note = Target: SCN10A; (+) strand; PAM type: YTN; PAM sequence: CTG
  source 1..20: mol_type = other DNA
gccaagaaagaaattgtggg

SEQ ID NO: 66703 - DNA, 20 bp, synthetic construct
  misc_feature 1..20: note = Description of Artificial Sequence: Synthetic oligonucleotide
  misc_feature 1..20: note = Target: SCN10A; (+) strand; PAM type: YTN; PAM sequence: TTG
  source 1..20: mol_type = other DNA
tgggaatagcagcttggtca

SEQ ID NO: 66704 - DNA, 20 bp, synthetic construct
  misc_feature 1..20: note = Description of Artificial Sequence: Synthetic oligonucleotide
  misc_feature 1..20: note = Target: SCN10A; (+) strand; PAM type: YTN; PAM sequence: CTT
  source 1..20: mol_type = other DNA
ggtcaaattctatgccatga

SEQ ID NO: 66705 - DNA, 20 bp, synthetic construct
  misc_feature 1..20: note = Description of Artificial Sequence: Synthetic oligonucleotide
  misc_feature 1..20: note = Target: SCN10A; (+) strand; PAM type: YTN; PAM sequence: TTG
  source 1..20: mol_type = other DNA
gtcaaattctatgccatgaa

SEQ ID NO: 66706 - DNA, 20 bp, synthetic construct
  misc_feature 1..20: note = Description of Artificial Sequence: Synthetic oligonucleotide
  misc_feature 1..20: note = Target: SCN10A; (+) strand; PAM type: YTN; PAM sequence: TTC
  source 1..20: mol_type = other DNA
tatgccatgaaaaatgttag

SEQ ID NO: 66707 - DNA, 20 bp, synthetic construct
  misc_feature 1..20: note = Description of Artificial Sequence: Synthetic oligonucleotide
  misc_feature 1..20: note = Target: SCN10A; (+) strand; PAM type: YTN; PAM sequence: CTA
  source 1..20: mol_type = other DNA
tgccatgaaaaatgttagaa

SEQ ID NO: 66708 - DNA, 20 bp, synthetic construct
  misc_feature 1..20: note = Description of Artificial Sequence: Synthetic oligonucleotide
  misc_feature 1..20: note = Target: SCN10A; (+) strand; PAM type: YTN; PAM sequence: TTA
  source 1..20: mol_type = other DNA
gaagtacagactctattaca

SEQ ID NO: 66709 - DNA, 20 bp, synthetic construct
  misc_feature 1..20: note = Description of Artificial Sequence: Synthetic oligonucleotide
  misc_feature 1..20: note = Target: SCN10A; (+) strand; PAM type: YTN; PAM sequence: CTC
  source 1..20: mol_type = other DNA
tattacaatgaacagtgata

SEQ ID NO: 66710 - DNA, 20 bp, synthetic construct
  misc_feature 1..20: note = Description of Artificial Sequence: Synthetic oligonucleotide
  misc_feature 1..20: note = Target: SCN10A; (+) strand; PAM type: YTN; PAM sequence: CTA
  source 1..20: mol_type = other DNA
ttacaatgaacagtgatatt

SEQ ID NO: 66711 - DNA, 20 bp, synthetic construct
  misc_feature 1..20: note = Description of Artificial Sequence: Synthetic oligonucleotide
  misc_feature 1..20: note = Target: SCN10A; (+) strand; PAM type: YTN; PAM sequence: TTA
  source 1..20: mol_type = other DNA
caatgaacagtgatattaaa

SEQ ID NO: 66712 - DNA, 20 bp, synthetic construct
  misc_feature 1..20: note = Description of Artificial Sequence: Synthetic oligonucleotide
  misc_feature 1..20: note = Target: SCN10A; (+) strand; PAM type: YTN; PAM sequence: TTA
  source 1..20: mol_type = other DNA
aataattatcaatgagaaaa

SEQ ID NO: 66713 - DNA, 20 bp, synthetic construct
  misc_feature 1..20: note = Description of Artificial Sequence: Synthetic oligonucleotide
  misc_feature 1..20: note = Target: SCN10A; (+) strand; PAM type: YTN; PAM sequence: TTA
  source 1..20: mol_type = other DNA
tcaatgagaaaaaataatag

SEQ ID NO: 66714 - DNA, 20 bp, synthetic construct
  misc_feature 1..20: note = Description of Artificial Sequence: Synthetic oligonucleotide
  misc_feature 1..20: note = Target: SCN10A; (+) strand; PAM type: YTN; PAM sequence: CTG
  source 1..20: mol_type = other DNA
tacacgttgttgttgagaaa

SEQ ID NO: 66715 - DNA, 20 bp, synthetic construct
  misc_feature 1..20: note = Description of Artificial Sequence: Synthetic oligonucleotide
  misc_feature 1..20: note = Target: SCN10A; (+) strand; PAM type: YTN; PAM sequence: TTG
  source 1..20: mol_type = other DNA
ttgttgagaaatgagtacac

SEQ ID NO: 66716 - DNA, 20 bp, synthetic construct
  misc_feature 1..20: note = Description of Artificial Sequence: Synthetic oligonucleotide
  misc_feature 1..20: note = Target: SCN10A; (+) strand; PAM type: YTN; PAM sequence: TTG
  source 1..20: mol_type = other DNA
ttgagaaatgagtacacatt

SEQ ID NO: 66717 - DNA, 20 bp, synthetic construct
  misc_feature 1..20: note = Description of Artificial Sequence: Synthetic oligonucleotide
  misc_feature 1..20: note = Target: SCN10A; (+) strand; PAM type: YTN; PAM sequence: TTG
  source 1..20: mol_type = other DNA
agaaatgagtacacatttct

SEQ ID NO: 66718 - DNA, 20 bp, synthetic construct
  misc_feature 1..20: note = Description of Artificial Sequence: Synthetic oligonucleotide
  misc_feature 1..20: note = Target: SCN10A; (+) strand; PAM type: YTN; PAM sequence: TTT
  source 1..20: mol_type = other DNA
ctcaaagcacaaactcaggt

SEQ ID NO: 66719 - DNA, 20 bp, synthetic construct
  misc_feature 1..20: note = Description of Artificial Sequence: Synthetic oligonucleotide
  misc_feature 1..20: note = Target: SCN10A; (+) strand; PAM type: YTN; PAM sequence: TTC
  source 1..20: mol_type = other DNA
tcaaagcacaaactcaggta

SEQ ID NO: 66720 - DNA, 20 bp, synthetic construct
  misc_feature 1..20: note = Description of Artificial Sequence: Synthetic oligonucleotide
  misc_feature 1..20: note = Target: SCN10A; (+) strand; PAM type: YTN; PAM sequence: CTC
  source 1..20: mol_type = other DNA
aaagcacaaactcaggtatg

SEQ ID NO: 66721 - DNA, 20 bp, synthetic construct
  misc_feature 1..20: note = Description of Artificial Sequence: Synthetic oligonucleotide
  misc_feature 1..20: note = Target: SCN10A; (+) strand; PAM type: YTN; PAM sequence: CTC
  source 1..20: mol_type = other DNA
aggtatgcaagaaatgtaac

SEQ ID NO: 66722 - DNA, 20 bp, synthetic construct
  misc_feature 1..20: note = Description of Artificial Sequence: Synthetic oligonucleotide
  misc_feature 1..20: note = Target: SCN10A; (+) strand; PAM type: YTN; PAM sequence: CTT
  source 1..20: mol_type = other DNA
agttgaattcaatttatgct

SEQ ID NO: 66723 - DNA, 20 bp, synthetic construct
  misc_feature 1..20: note = Description of Artificial Sequence: Synthetic oligonucleotide
  misc_feature 1..20: note = Target: SCN10A; (+) strand; PAM type: YTN; PAM sequence: TTA
  source 1..20: mol_type = other DNA
gttgaattcaatttatgctt

SEQ ID NO: 66724 - DNA, 20 bp, synthetic construct
  misc_feature 1..20: note = Description of Artificial Sequence: Synthetic oligonucleotide
  misc_feature 1..20: note = Target: SCN10A; (+) strand; PAM type: YTN; PAM sequence: TTG
  source 1..20: mol_type = other DNA
aattcaatttatgcttcaag

SEQ ID NO: 66725 - DNA, 20 bp, synthetic construct
  misc_feature 1..20: note = Description of Artificial Sequence: Synthetic oligonucleotide
  misc_feature 1..20: note = Target: SCN10A; (+) strand; PAM type: YTN; PAM sequence: TTC
  source 1..20: mol_type = other DNA
aatttatgcttcaagtcctc

SEQ ID NO: 66726 - DNA, 20 bp, synthetic construct
  misc_feature 1..20: note = Description of Artificial Sequence: Synthetic oligonucleotide
  misc_feature 1..20: note = Target: SCN10A; (+) strand; PAM type: YTN; PAM sequence: TTT
  source 1..20: mol_type = other DNA
atgcttcaagtcctcaccat

SEQ ID NO: 66727 - DNA, 20 bp, synthetic construct
  misc_feature 1..20: note = Description of Artificial Sequence: Synthetic oligonucleotide
  misc_feature 1..20: note = Target: SCN10A; (+) strand; PAM type: YTN; PAM sequence: TTA
  source 1..20: mol_type = other DNA
tgcttcaagtcctcaccatg

SEQ ID NO: 66728 - DNA, 20 bp, synthetic construct
  misc_feature 1..20: note = Description of Artificial Sequence: Synthetic oligonucleotide
  misc_feature 1..20: note = Target: SCN10A; (+) strand; PAM type: YTN; PAM sequence: CTT
  source 1..20: mol_type = other DNA
caagtcctcaccatgggaac

SEQ ID NO: 66729 - DNA, 20 bp, synthetic construct
  misc_feature 1..20: note = Description of Artificial Sequence: Synthetic oligonucleotide
  misc_feature 1..20: note = Target: SCN10A; (+) strand; PAM type: YTN; PAM sequence: TTC
  source 1..20: mol_type = other DNA
aagtcctcaccatgggaact

SEQ ID NO: 66730 - DNA, 20 bp, synthetic construct
  misc_feature 1..20: note = Description of Artificial Sequence: Synthetic oligonucleotide
  misc_feature 1..20: note = Target: SCN10A; (+) strand; PAM type: YTN; PAM sequence: CTC
  source 1..20: mol_type = other DNA
accatgggaactgtctcttg

SEQ ID NO: 66731 - DNA, 20 bp, synthetic construct
  misc_feature 1..20: note = Description of Artificial Sequence: Synthetic oligonucleotide
  misc_feature 1..20: note = Target: SCN10A; (+) strand; PAM type: YTN; PAM sequence: CTG
  source 1..20: mol_type = other DNA
tctcttgttaagtcaatgtt

SEQ ID NO: 66732 - DNA, 20 bp, synthetic construct
  misc_feature 1..20: note = Description of Artificial Sequence: Synthetic oligonucleotide
  misc_feature 1..20: note = Target: SCN10A; (+) strand; PAM type: YTN; PAM sequence: CTC
  source 1..20: mol_type = other DNA
ttgttaagtcaatgttgggt

SEQ ID NO: 66733 - DNA, 20 bp, synthetic construct
  misc_feature 1..20: note = Description of Artificial Sequence: Synthetic oligonucleotide
  misc_feature 1..20: note = Target: SCN10A; (+) strand; PAM type: YTN; PAM sequence: CTT
  source 1..20: mol_type = other DNA
gttaagtcaatgttgggtac

SEQ ID NO: 66734 - DNA, 20 bp, synthetic construct
  misc_feature 1..20: note = Description of Artificial Sequence: Synthetic oligonucleotide
  misc_feature 1..20: note = Target: SCN10A; (+) strand; PAM type: YTN; PAM sequence: TTG
  source 1..20: mol_type = other DNA
ttaagtcaatgttgggtact

SEQ ID NO: 66735 - DNA, 20 bp, synthetic construct
  misc_feature 1..20: note = Description of Artificial Sequence: Synthetic oligonucleotide
  misc_feature 1..20: note = Target: SCN10A; (+) strand; PAM type: YTN; PAM sequence: TTA
  source 1..20: mol_type = other DNA
agtcaatgttgggtactatt

SEQ ID NO: 66736 - DNA, 20 bp, synthetic construct
  misc_feature 1..20: note = Description of Artificial Sequence: Synthetic oligonucleotide
  misc_feature 1..20: note = Target: SCN10A; (+) strand; PAM type: YTN; PAM sequence: TTG
  source 1..20: mol_type = other DNA
ggtactatttcaatatctga

SEQ ID NO: 66737 - DNA, 20 bp, synthetic construct
  misc_feature 1..20: note = Description of Artificial Sequence: Synthetic oligonucleotide
  misc_feature 1..20: note = Target: SCN10A; (+) strand; PAM type: YTN; PAM sequence: CTA
  source 1..20: mol_type = other DNA
tttcaatatctgagtctgtg

SEQ ID NO: 66738 - DNA, 20 bp, synthetic construct
  misc_feature 1..20: note = Description of Artificial Sequence: Synthetic oligonucleotide
  misc_feature 1..20: note = Target: SCN10A; (+) strand; PAM type: YTN; PAM sequence: TTT
  source 1..20: mol_type = other DNA
caatatctgagtctgtgtct

SEQ ID NO: 66739 - DNA, 20 bp, synthetic construct
  misc_feature 1..20: note = Description of Artificial Sequence: Synthetic oligonucleotide
  misc_feature 1..20: note = Target: SCN10A; (+) strand; PAM type: YTN; PAM sequence: TTC
  source 1..20: mol_type = other DNA
aatatctgagtctgtgtctg

SEQ ID NO: 66740 - DNA, 20 bp, synthetic construct
  misc_feature 1..20: note = Description of Artificial Sequence: Synthetic oligonucleotide
  misc_feature 1..20: note = Target: SCN10A; (+) strand; PAM type: YTN; PAM sequence: CTG
  source 1..20: mol_type = other DNA
agtctgtgtctgagttttgt

SEQ ID NO: 66741 - DNA, 20 bp, synthetic construct
  misc_feature 1..20: note = Description of Artificial Sequence: Synthetic oligonucleotide
  misc_feature 1..20: note = Target: SCN10A; (+) strand; PAM type: YTN; PAM sequence: CTG
  source 1..20: mol_type = other DNA
tgtctgagttttgtagggct

SEQ ID NO: 66742 - DNA, 20 bp, synthetic construct
  misc_feature 1..20: note = Description of Artificial Sequence: Synthetic oligonucleotide
  misc_feature 1..20: note = Target: SCN10A; (+) strand; PAM type: YTN; PAM sequence: CTG
  source 1..20: mol_type = other DNA
agttttgtagggctcaaacc

SEQ ID NO: 66743 - DNA, 20 bp, synthetic construct
  misc_feature 1..20: note = Description of Artificial Sequence: Synthetic oligonucleotide
  misc_feature 1..20: note = Target: SCN10A; (+) strand; PAM type: YTN; PAM sequence: TTT
  source 1..20: mol_type = other DNA
tgtagggctcaaacctggag

SEQ ID NO: 66744 - DNA, 20 bp, synthetic construct
  misc_feature 1..20: note = Description of Artificial Sequence: Synthetic oligonucleotide
  misc_feature 1..20: note = Target: SCN10A; (+) strand; PAM type: YTN; PAM sequence: TTT
  source 1..20: mol_type = other DNA
gtagggctcaaacctggagg

SEQ ID NO: 66745 - DNA, 20 bp, synthetic construct
  misc_feature 1..20: note = Description of Artificial Sequence: Synthetic oligonucleotide
  misc_feature 1..20: note = Target: SCN10A; (+) strand; PAM type: YTN; PAM sequence: TTG
  source 1..20: mol_type = other DNA
tagggctcaaacctggagga

SEQ ID NO: 66746 - DNA, 20 bp, synthetic construct
  misc_feature 1..20: note = Description of Artificial Sequence: Synthetic oligonucleotide
  misc_feature 1..20: note = Target: SCN10A; (+) strand; PAM type: YTN; PAM sequence: CTC
  source 1..20: mol_type = other DNA
aaacctggaggagagttgag

SEQ ID NO: 66747 - DNA, 20 bp, synthetic construct
  misc_feature 1..20: note = Description of Artificial Sequence: Synthetic oligonucleotide
  misc_feature 1..20: note = Target: SCN10A; (+) strand; PAM type: YTN; PAM sequence: CTG
  source 1..20: mol_type = other DNA
gaggagagttgagctggtcc

SEQ ID NO: 66748 - DNA, 20 bp, synthetic construct
  misc_feature 1..20: note = Description of Artificial Sequence: Synthetic oligonucleotide
  misc_feature 1..20: note = Target: SCN10A; (+) strand; PAM type: YTN; PAM sequence: TTG
  source 1..20: mol_type = other DNA
agctggtcctttgtcattgc

SEQ ID NO: 66749 - DNA, 20 bp, synthetic construct
  misc_feature 1..20: note = Description of Artificial Sequence: Synthetic oligonucleotide
  misc_feature 1..20: note = Target: SCN10A; (+) strand; PAM type: YTN; PAM sequence: CTG
  source 1..20: mol_type = other DNA
gtcctttgtcattgctaagc

SEQ ID NO: 66750 - DNA, 20 bp, synthetic construct
  misc_feature 1..20: note = Description of Artificial Sequence: Synthetic oligonucleotide
  misc_feature 1..20: note = Target: SCN10A; (+) strand; PAM type: YTN; PAM sequence: CTT
  source 1..20: mol_type = other DNA
tgtcattgctaagcgtattt

SEQ ID NO: 66751 - DNA, 20 bp, synthetic construct
  misc_feature 1..20: note = Description of Artificial Sequence: Synthetic oligonucleotide
  misc_feature 1..20: note = Target: SCN10A; (+) strand; PAM type: YTN; PAM sequence: TTT
  source 1..20: mol_type = other DNA
gtcattgctaagcgtatttt

SEQ ID NO: 66752 - DNA, 20 bp, synthetic construct
  misc_feature 1..20: note = Description of Artificial Sequence: Synthetic oligonucleotide
  misc_feature 1..20: note = Target: SCN10A; (+) strand; PAM type: YTN; PAM sequence: TTG
  source 1..20: mol_type = other DNA
tcattgctaagcgtattttg

SEQ ID NO: 66753 - DNA, 20 bp, synthetic construct
  misc_feature 1..20: note = Description of Artificial Sequence: Synthetic oligonucleotide
  misc_feature 1..20: note = Target: SCN10A; (+) strand; PAM type: YTN; PAM sequence: TTG
  source 1..20: mol_type = other DNA
ctaagcgtattttgcctgag

SEQ ID NO: 66754 - DNA, 20 bp, synthetic construct
  misc_feature 1..20: note = Description of Artificial Sequence: Synthetic oligonucleotide
  misc_feature 1..20: note = Target: SCN10A; (+) strand; PAM type: YTN; PAM sequence: CTA
  source 1..20: mol_type = other DNA
agcgtattttgcctgagttg

SEQ ID NO: 66755 - DNA, 20 bp, synthetic construct
  misc_feature 1..20: note = Description of Artificial Sequence: Synthetic oligonucleotide
  misc_feature 1..20: note = Target: SCN10A; (+) strand; PAM type: YTN; PAM sequence: TTT
  source 1..20: mol_type = other DNA
tgcctgagttgtagctccca

SEQ ID NO: 66756 - DNA, 20 bp, synthetic construct
  misc_feature 1..20: note = Description of Artificial Sequence: Synthetic oligonucleotide
  misc_feature 1..20: note = Target: SCN10A; (+) strand; PAM type: YTN; PAM sequence: TTT
  source 1..20: mol_type = other DNA
gcctgagttgtagctcccat

SEQ ID NO: 66757 - DNA, 20 bp, synthetic construct
  misc_feature 1..20: note = Description of Artificial Sequence: Synthetic oligonucleotide
  misc_feature 1..20: note = Target: SCN10A; (+) strand; PAM type: YTN; PAM sequence: TTG
  source 1..20: mol_type = other DNA
cctgagttgtagctcccatc

SEQ ID NO: 66758 - DNA, 20 bp, synthetic construct
  misc_feature 1..20: note = Description of Artificial Sequence: Synthetic oligonucleotide
  misc_feature 1..20: note = Target: SCN10A; (+) strand; PAM type: YTN; PAM sequence: CTG
  source 1..20: mol_type = other DNA
agttgtagctcccatctggt

SEQ ID NO: 66759 - DNA, 20 bp, synthetic construct
  misc_feature 1..20: note = Description of Artificial Sequence: Synthetic oligonucleotide
  misc_feature 1..20: note = Target: SCN10A; (+) strand; PAM type: YTN; PAM sequence: TTG
  source 1..20: mol_type = other DNA
tagctcccatctggtccctg

SEQ ID NO: 66760 - DNA, 20 bp, synthetic construct
  misc_feature 1..20: note = Description of Artificial Sequence: Synthetic oligonucleotide
  misc_feature 1..20: note = Target: SCN10A; (+) strand; PAM type: YTN; PAM sequence: CTC
  source 1..20: mol_type = other DNA
ccatctggtccctggtggga

SEQ ID NO: 66761 - DNA, 20 bp, synthetic construct
  misc_feature 1..20: note = Description of Artificial Sequence: Synthetic oligonucleotide
  misc_feature 1..20: note = Target: SCN10A; (+) strand; PAM type: YTN; PAM sequence: CTG
  source 1..20: mol_type = other DNA
gtccctggtgggagagtcca

SEQ ID NO: 66762 - DNA, 20 bp, synthetic construct
  misc_feature 1..20: note = Description of Artificial Sequence: Synthetic oligonucleotide
  misc_feature 1..20: note = Target: SCN10A; (+) strand; PAM type: YTN; PAM sequence: CTG
  source 1..20: mol_type = other DNA
gtgggagagtccatgaagat

SEQ ID NO: 66763 - DNA, 20 bp, synthetic construct
  misc_feature 1..20: note = Description of Artificial Sequence: Synthetic oligonucleotide
  misc_feature 1..20: note = Target: SCN10A; (+) strand; PAM type: YTN; PAM sequence: CTC
  source 1..20: mol_type = other DNA
ttctctctctagtttccctc

SEQ ID NO: 66764 - DNA, 20 bp, synthetic construct
  misc_feature 1..20: note = Description of Artificial Sequence: Synthetic oligonucleotide
  misc_feature 1..20: note = Target: SCN10A; (+) strand; PAM type: YTN; PAM sequence: CTT
  source 1..20: mol_type = other DNA
ctctctctagtttccctcta

SEQ ID NO: 66765 - DNA, 20 bp, synthetic construct
  misc_feature 1..20: note = Description of Artificial Sequence: Synthetic oligonucleotide
  misc_feature 1..20: note = Target: SCN10A; (+) strand; PAM type: YTN; PAM sequence: TTC
  source 1..20: mol_type = other DNA
tctctctagtttccctctat

SEQ ID NO: 66766 - DNA, 20 bp, synthetic construct
  misc_feature 1..20: note = Description of Artificial Sequence: Synthetic oligonucleotide
  misc_feature 1..20: note = Target: SCN10A; (+) strand; PAM type: YTN; PAM sequence: CTC
  source 1..20: mol_type = other DNA
tctctagtttccctctatgg

SEQ ID NO: 66767 - DNA, 20 bp, synthetic construct
  misc_feature 1..20: note = Description of Artificial Sequence: Synthetic oligonucleotide
  misc_feature 1..20: note = Target: SCN10A; (+) strand; PAM type: YTN; PAM sequence: CTC
  source 1..20: mol_type = other DNA
tctagtttccctctatgggt

SEQ ID NO: 66768 - DNA, 20 bp, synthetic construct
  misc_feature 1..20: note = Description of Artificial Sequence: Synthetic oligonucleotide
  misc_feature 1..20: note = Target: SCN10A; (+) strand; PAM type: YTN; PAM sequence: CTC
  source 1..20: mol_type = other DNA
tagtttccctctatgggtct

SEQ ID NO: 66769 - DNA, 20 bp, synthetic construct
  misc_feature 1..20: note = Description of Artificial Sequence: Synthetic oligonucleotide
  misc_feature 1..20: note = Target: SCN10A; (+) strand; PAM type: YTN; PAM sequence: CTA
  source 1..20: mol_type = other DNA
gtttccctctatgggtctca

SEQ ID NO: 66770 - DNA, 20 bp, synthetic construct
  misc_feature 1..20: note = Description of Artificial Sequence: Synthetic oligonucleotide
  misc_feature 1..20: note = Target: SCN10A; (+) strand; PAM type: YTN; PAM sequence: TTT
  source 1..20: mol_type = other DNA
ccctctatgggtctcactca

SEQ ID NO: 66771 - DNA, 20 bp, synthetic construct
  misc_feature 1..20: note = Description of Artificial Sequence: Synthetic oligonucleotide
  misc_feature 1..20: note = Target: SCN10A; (+) strand; PAM type: YTN; PAM sequence: TTC
  source 1..20: mol_type = other DNA
cctctatgggtctcactcat

SEQ ID NO: 66772 - DNA, 20 bp, synthetic construct
  misc_feature 1..20: note = Description of Artificial Sequence: Synthetic oligonucleotide
  misc_feature 1..20: note = Target: SCN10A; (+) strand; PAM type: YTN; PAM sequence: CTC
  source 1..20: mol_type = other DNA
tatgggtctcactcatcttt

SEQ ID NO: 66773 - DNA, 20 bp, synthetic construct
  misc_feature 1..20: note = Description of Artificial Sequence: Synthetic oligonucleotide
  misc_feature 1..20: note = Target: SCN10A; (+) strand; PAM type: YTN; PAM sequence: CTA
  source 1..20: mol_type = other DNA
tgggtctcactcatcttttt

SEQ ID NO: 66774 - DNA, 20 bp, synthetic construct
  misc_feature 1..20: note = Description of Artificial Sequence: Synthetic oligonucleotide
  misc_feature 1..20: note = Target: SCN10A; (+) strand; PAM type: YTN; PAM sequence: CTC
  source 1..20: mol_type = other DNA
actcatctttttccatagcc

SEQ ID NO: 66775 - DNA, 20 bp, synthetic construct
  misc_feature 1..20: note = Description of Artificial Sequence: Synthetic oligonucleotide
  misc_feature 1..20: note = Target: SCN10A; (+) strand; PAM type: YTN; PAM sequence: CTC
  source 1..20: mol_type = other DNA
atctttttccatagccttca

SEQ ID NO: 66776 - DNA, 20 bp, synthetic construct
  misc_feature 1..20: note = Description of Artificial Sequence: Synthetic oligonucleotide
  misc_feature 1..20: note = Target: SCN10A; (+) strand; PAM type: YTN; PAM sequence: CTT
  source 1..20: mol_type = other DNA
tttccatagccttcactggg

SEQ ID NO: 66777 - DNA, 20 bp, synthetic construct
  misc_feature 1..20: note = Description of Artificial Sequence: Synthetic oligonucleotide
  misc_feature 1..20: note = Target: SCN10A; (+) strand; PAM type: YTN; PAM sequence: TTT
  source 1..20: mol_type = other DNA
ttccatagccttcactgggg

SEQ ID NO: 66778 - DNA, 20 bp, synthetic construct
  misc_feature 1..20: note = Description of Artificial Sequence: Synthetic oligonucleotide
  misc_feature 1..20: note = Target: SCN10A; (+) strand; PAM type: YTN; PAM sequence: TTT
  source 1..20: mol_type = other DNA
tccatagccttcactggggg

SEQ ID NO: 66779 - DNA, 20 bp, synthetic construct
  misc_feature 1..20: note = Description of Artificial Sequence: Synthetic oligonucleotide
  misc_feature 1..20: note = Target: SCN10A; (+) strand; PAM type: YTN; PAM sequence: TTT
  source 1..20: mol_type = other DNA
ccatagccttcactgggggc

SEQ ID NO: 66780 - DNA, 20 bp, synthetic construct
  misc_feature 1..20: note = Description of Artificial Sequence: Synthetic oligonucleotide
  misc_feature 1..20: note = Target: SCN10A; (+) strand; PAM type: YTN; PAM sequence: TTC
  source 1..20: mol_type = other DNA
catagccttcactgggggct

SEQ ID NO: 66781 - DNA, 20 bp, synthetic construct
  misc_feature 1..20: note = Description of Artificial Sequence: Synthetic oligonucleotide
  misc_feature 1..20: note = Target: SCN10A; (+) strand; PAM type: YTN; PAM sequence: CTT
  source 1..20: mol_type = other DNA
cactgggggctaagtcatca

SEQ ID NO: 66782 - DNA, 20 bp, synthetic construct
  misc_feature 1..20: note = Description of Artificial Sequence: Synthetic oligonucleotide
  misc_feature 1..20: note = Target: SCN10A; (+) strand; PAM type: YTN; PAM sequence: TTC
  source 1..20: mol_type = other DNA
actgggggctaagtcatcac

SEQ ID NO: 66783 - DNA, 20 bp, synthetic construct
  misc_feature 1..20: note = Description of Artificial Sequence: Synthetic oligonucleotide
  misc_feature 1..20: note = Target: SCN10A; (+) strand; PAM type: YTN; PAM sequence: CTG
  source 1..20: mol_type = other DNA
ggggctaagtcatcacccag

SEQ ID NO: 66784 - DNA, 20 bp, synthetic construct
  misc_feature 1..20: note = Description of Artificial Sequence: Synthetic oligonucleotide
  misc_feature 1..20: note = Target: SCN10A; (+) strand; PAM type: YTN; PAM sequence: CTA
  source 1..20: mol_type = other DNA
agtcatcacccagctcctct

SEQ ID NO: 66785 - DNA, 20 bp, synthetic construct
  misc_feature 1..20: note = Description of Artificial Sequence: Synthetic oligonucleotide
  misc_feature 1..20: note = Target: SCN10A; (+) strand; PAM type: YTN; PAM sequence: CTC
  source 1..20: mol_type = other DNA
ctctctgccattctggagcc

SEQ ID NO: 66786 - DNA, 20 bp, synthetic construct
  misc_feature 1..20: note = Description of Artificial Sequence: Synthetic oligonucleotide
  misc_feature 1..20: note = Target: SCN10A; (+) strand; PAM type: YTN; PAM sequence: CTC
  source 1..20: mol_type = other DNA
tctgccattctggagccaca

SEQ ID NO: 66787 - DNA, 20 bp, synthetic construct
  misc_feature 1..20: note = Description of Artificial Sequence: Synthetic oligonucleotide
  misc_feature 1..20: note = Target: SCN10A; (+) strand; PAM type: YTN; PAM sequence: CTC
  source 1..20: mol_type = other DNA
tgccattctggagccacagg

SEQ ID NO: 66788 - DNA, 20 bp, synthetic construct
  misc_feature 1..20: note = Description of Artificial Sequence: Synthetic oligonucleotide
  misc_feature 1..20: note = Target: SCN10A; (+) strand; PAM type: YTN; PAM sequence: CTG
  source 1..20: mol_type = other DNA
ccattctggagccacagggc

SEQ ID NO: 66789 - DNA, 20 bp, synthetic construct
  misc_feature 1..20: note = Description of Artificial Sequence: Synthetic oligonucleotide
  misc_feature 1..20: note = Target: SCN10A; (+) strand; PAM type: YTN; PAM sequence: TTC
  source 1..20: mol_type = other DNA
tggagccacagggctctctc

SEQ ID NO: 66790 - DNA, 20 bp, synthetic construct
  misc_feature 1..20: note = Description of Artificial Sequence: Synthetic oligonucleotide
  misc_feature 1..20: note = Target: SCN10A; (+) strand; PAM type: YTN; PAM sequence: CTG
  source 1..20: mol_type = other DNA
gagccacagggctctctctg

SEQ ID NO: 66791 - DNA, 20 bp, synthetic construct
  misc_feature 1..20: note = Description of Artificial Sequence: Synthetic oligonucleotide
  misc_feature 1..20: note = Target: SCN10A; (+) strand; PAM type: YTN; PAM sequence: CTC
  source 1..20: mol_type = other DNA
tctctgaggctgcttcaggc

SEQ ID NO: 66792 - DNA, 20 bp, synthetic construct
  misc_feature 1..20: note = Description of Artificial Sequence: Synthetic oligonucleotide
  misc_feature 1..20: note = Target: SCN10A; (+) strand; PAM type: YTN; PAM sequence: CTC
  source 1..20: mol_type = other DNA
tctgaggctgcttcaggcct

SEQ ID NO: 66793 - DNA, 20 bp, synthetic construct
  misc_feature 1..20: note = Description of Artificial Sequence: Synthetic oligonucleotide
  misc_feature 1..20: note = Target: SCN10A; (+) strand; PAM type: YTN; PAM sequence: CTC
  source 1..20: mol_type = other DNA
tgaggctgcttcaggccttc

SEQ ID NO: 66794 - DNA, 20 bp, synthetic construct
  misc_feature 1..20: note = Description of Artificial Sequence: Synthetic oligonucleotide
  misc_feature 1..20: note = Target: SCN10A; (+) strand; PAM type: YTN; PAM sequence: CTG
  source 1..20: mol_type = other DNA
aggctgcttcaggccttctc

SEQ ID NO: 66795 - DNA, 20 bp, synthetic construct
  misc_feature 1..20: note = Description of Artificial Sequence: Synthetic oligonucleotide
  misc_feature 1..20: note = Target: SCN10A; (+) strand; PAM type: YTN; PAM sequence: CTG
  source 1..20: mol_type = other DNA
cttcaggccttctctaacct

SEQ ID NO: 66796 - DNA, 20 bp, synthetic construct
  misc_feature 1..20: note = Description of Artificial Sequence: Synthetic oligonucleotide
  misc_feature 1..20: note = Target: SCN10A; (+) strand; PAM type: YTN; PAM sequence: CTT
  source 1..20: mol_type = other DNA
caggccttctctaacctaag

SEQ ID NO: 66797 - DNA, 20 bp, synthetic construct
  misc_feature 1..20: note = Description of Artificial Sequence: Synthetic oligonucleotide
  misc_feature 1..20: note = Target: SCN10A; (+) strand; PAM type: YTN; PAM sequence: TTC
  source 1..20: mol_type = other DNA
aggccttctctaacctaagg

SEQ ID NO: 66798 - DNA, 20 bp, synthetic construct
  misc_feature 1..20: note = Description of Artificial Sequence: Synthetic oligonucleotide
  misc_feature 1..20: note = Target: SCN10A; (+) strand; PAM type: YTN; PAM sequence: CTT
  source 1..20: mol_type = other DNA
ctctaacctaaggttgacct

SEQ ID NO: 66799 - DNA, 20 bp, synthetic construct
  misc_feature 1..20: note = Description of Artificial Sequence: Synthetic oligonucleotide
  misc_feature 1..20: note = Target: SCN10A; (+) strand; PAM type: YTN; PAM sequence: TTC
  source 1..20: mol_type = other DNA
tctaacctaaggttgaccta

SEQ ID NO: 66800 - DNA, 20 bp, synthetic construct
  misc_feature 1..20: note = Description of Artificial Sequence: Synthetic oligonucleotide
  misc_feature 1..20: note = Target: SCN10A; (+) strand; PAM type: YTN; PAM sequence: CTC
  source 1..20: mol_type = other DNA
taacctaaggttgacctaag

SEQ ID NO: 66801 - DNA, 20 bp, synthetic construct
  misc_feature 1..20: note = Description of Artificial Sequence: Synthetic oligonucleotide
  misc_feature 1..20: note = Target: SCN10A; (+) strand; PAM type: YTN; PAM sequence: CTA
  source 1..20: mol_type = other DNA
acctaaggttgacctaagct

SEQ ID NO: 66802 - DNA, 20 bp, synthetic construct
  misc_feature 1..20: note = Description of Artificial Sequence: Synthetic oligonucleotide
  misc_feature 1..20: note = Target: SCN10A; (+) strand; PAM type: YTN; PAM sequence: CTA
  source 1..20: mol_type = other DNA
aggttgacctaagctaaggt

SEQ ID NO: 66803 - DNA, 20 bp, synthetic construct
  misc_feature 1..20: note = Description of Artificial Sequence: Synthetic oligonucleotide
  misc_feature 1..20: note = Target: SCN10A; (+) strand; PAM type: YTN; PAM sequence: TTG
  source 1..20: mol_type = other DNA
acctaagctaaggttgcctt

SEQ ID NO: 66804 - DNA, 20 bp, synthetic construct
  misc_feature 1..20: note = Description of Artificial Sequence: Synthetic oligonucleotide
  misc_feature 1..20: note = Target: SCN10A; (+) strand; PAM type: YTN; PAM sequence: CTA
  source 1..20: mol_type = other DNA
agctaaggttgcctttcccc

SEQ ID NO: 66805 - DNA, 20 bp, synthetic construct
  misc_feature 1..20: note = Description of Artificial Sequence: Synthetic oligonucleotide
  misc_feature 1..20: note = Target: SCN10A; (+) strand; PAM type: YTN; PAM sequence: CTA
  source 1..20: mol_type = other DNA
aggttgcctttccccagatt

SEQ ID NO: 66806 - DNA, 20 bp, synthetic construct
  misc_feature 1..20: note = Description of Artificial Sequence: Synthetic oligonucleotide
  misc_feature 1..20: note = Target: SCN10A; (+) strand; PAM type: YTN; PAM sequence: TTG
  source 1..20: mol_type = other DNA
cctttccccagattttctta

SEQ ID NO: 66807 - DNA, 20 bp, synthetic construct
  misc_feature 1..20: note = Description of Artificial Sequence: Synthetic oligonucleotide
  misc_feature 1..20: note = Target: SCN10A; (+) strand; PAM type: YTN; PAM sequence: CTT
  source 1..20: mol_type = other DNA
tccccagattttcttaaaaa

SEQ ID NO: 66808 - DNA, 20 bp, synthetic construct
  misc_feature 1..20: note = Description of Artificial Sequence: Synthetic oligonucleotide
  misc_feature 1..20: note = Target: SCN10A; (+) strand; PAM type: YTN; PAM sequence: TTT
  source 1..20: mol_type = other DNA
ccccagattttcttaaaaac

SEQ ID NO: 66809 - DNA, 20 bp, synthetic construct
  misc_feature 1..20: note = Description of Artificial Sequence: Synthetic oligonucleotide
  misc_feature 1..20: note = Target: SCN10A; (+) strand; PAM type: YTN; PAM sequence: TTC
  source 1..20: mol_type = other DNA
cccagattttcttaaaaacg

SEQ ID NO: 66810 - DNA, 20 bp, synthetic construct
  misc_feature 1..20: note = Description of Artificial Sequence: Synthetic oligonucleotide
  misc_feature 1..20: note = Target: SCN10A; (+) strand; PAM type: YTN; PAM sequence: TTT
  source 1..20: mol_type = other DNA
tcttaaaaacgtctttgttt

SEQ ID NO: 66811 - DNA, 20 bp, synthetic construct
  misc_feature 1..20: note = Description of Artificial Sequence: Synthetic oligonucleotide
  misc_feature 1..20: note = Target: SCN10A; (+) strand; PAM type: YTN; PAM sequence: TTT
  source 1..20: mol_type = other DNA
cttaaaaacgtctttgtttc

SEQ ID NO: 66812 - DNA, 20 bp, synthetic construct
  misc_feature 1..20: note = Description of Artificial Sequence: Synthetic oligonucleotide
  misc_feature 1..20: note = Target: SCN10A; (+) strand; PAM type: YTN; PAM sequence: TTC
  source 1..20: mol_type = other DNA
ttaaaaacgtctttgtttct

SEQ ID NO: 66813 - DNA, 20 bp, synthetic construct
  misc_feature 1..20: note = Description of Artificial Sequence: Synthetic oligonucleotide
  misc_feature 1..20: note = Target: SCN10A; (+) strand; PAM type: YTN; PAM sequence: CTT
  source 1..20: mol_type = other DNA
aaaaacgtctttgtttctcc

SEQ ID NO: 66814 - DNA, 20 bp, synthetic construct
  misc_feature 1..20: note = Description of Artificial Sequence: Synthetic oligonucleotide
  misc_feature 1..20: note = Target: SCN10A; (+) strand; PAM type: YTN; PAM sequence: TTA
  source 1..20: mol_type = other DNA
aaaacgtctttgtttctcct

SEQ ID NO: 66815 - DNA, 20 bp, synthetic construct
  misc_feature 1..20: note = Description of Artificial Sequence: Synthetic oligonucleotide
  misc_feature 1..20: note = Target: SCN10A; (+) strand; PAM type: YTN; PAM sequence: CTT
  source 1..20: mol_type = other DNA
tgtttctcctgcctttctta

SEQ ID NO: 66816 - DNA, 20 bp, synthetic construct
  misc_feature 1..20: note = Description of Artificial Sequence: Synthetic oligonucleotide
  misc_feature 1..20: note = Target: SCN10A; (+) strand; PAM type: YTN; PAM sequence: TTT
  source 1..20: mol_type = other DNA
gtttctcctgcctttcttac

SEQ ID NO: 66817 - DNA, 20 bp, synthetic construct
  misc_feature 1..20: note = Description of Artificial Sequence: Synthetic oligonucleotide
  misc_feature 1..20: note = Target: SCN10A; (+) strand; PAM type: YTN; PAM sequence: TTG
  source 1..20: mol_type = other DNA
tttctcctgcctttcttact

SEQ ID NO: 66818 - DNA, 20 bp, synthetic construct
  misc_feature 1..20: note = Description of Artificial Sequence: Synthetic oligonucleotide
  misc_feature 1..20: note = Target: SCN10A; (+) strand; PAM type: YTN; PAM sequence: TTT
  source 1..20: mol_type = other DNA
ctcctgcctttcttactcta

SEQ ID NO: 66819 - DNA, 20 bp, synthetic construct
  misc_feature 1..20: note = Description of Artificial Sequence: Synthetic oligonucleotide
  misc_feature 1..20: note = Target: SCN10A; (+) strand; PAM type: YTN; PAM sequence: TTC
  source 1..20: mol_type = other DNA
tcctgcctttcttactctac

SEQ ID NO: 66820 - DNA, 20 bp, synthetic construct
  misc_feature 1..20: note = Description of Artificial Sequence: Synthetic oligonucleotide
  misc_feature 1..20: note = Target: SCN10A; (+) strand; PAM type: YTN; PAM sequence: CTC
  source 1..20: mol_type = other DNA
ctgcctttcttactctactc

SEQ ID NO: 66821 - DNA, 20 bp, synthetic construct
  misc_feature 1..20: note = Description of Artificial Sequence: Synthetic oligonucleotide
  misc_feature 1..20: note = Target: SCN10A; (+) strand; PAM type: YTN; PAM sequence: CTG
  source 1..20: mol_type = other DNA
cctttcttactctactctca

SEQ ID NO: 66822 - DNA, 20 bp, synthetic construct
  misc_feature 1..20: note = Description of Artificial Sequence: Synthetic oligonucleotide
  misc_feature 1..20: note = Target: SCN10A; (+) strand; PAM type: YTN; PAM sequence: CTT
  source 1..20: mol_type = other DNA
tcttactctactctcacagt

SEQ ID NO: 66823 - DNA, 20 bp, synthetic construct
  misc_feature 1..20: note = Description of Artificial Sequence: Synthetic oligonucleotide
  misc_feature 1..20: note = Target: SCN10A; (+) strand; PAM type: YTN; PAM sequence: TTT
  source 1..20: mol_type = other DNA
cttactctactctcacagta

SEQ ID NO: 66824 - DNA, 20 bp, synthetic construct
  misc_feature 1..20: note = Description of Artificial Sequence: Synthetic oligonucleotide
  misc_feature 1..20: note = Target: SCN10A; (+) strand; PAM type: YTN; PAM sequence: TTC
  source 1..20: mol_type = other DNA
ttactctactctcacagtat

SEQ ID NO: 66825 - DNA, 20 bp, synthetic construct
  misc_feature 1..20: note = Description of Artificial Sequence: Synthetic oligonucleotide
  misc_feature 1..20: note = Target: SCN10A; (+) strand; PAM type: YTN; PAM sequence: CTT
  source 1..20: mol_type = other DNA
actctactctcacagtatct

SEQ ID NO: 66826 - DNA, 20 bp, synthetic construct
  misc_feature 1..20: note = Description of Artificial Sequence: Synthetic oligonucleotide
  misc_feature 1..20: note = Target: SCN10A; (+) strand; PAM type: YTN; PAM sequence: TTA
  source 1..20: mol_type = other DNA
ctctactctcacagtatctt

SEQ ID NO: 66827 - DNA, 20 bp, synthetic construct
  misc_feature 1..20: note = Description of Artificial Sequence: Synthetic oligonucleotide
  misc_feature 1..20: note = Target: SCN10A; (+) strand; PAM type: YTN; PAM sequence: CTC
  source 1..20: mol_type = other DNA
tactctcacagtatcttcct

SEQ ID NO: 66828 - DNA, 20 bp, synthetic construct
  misc_feature 1..20: note = Description of Artificial Sequence: Synthetic oligonucleotide
  misc_feature 1..20: note = Target: SCN10A; (+) strand; PAM type: YTN; PAM sequence: CTA
  source 1..20: mol_type = other DNA
ctctcacagtatcttccttg

SEQ ID NO: 66829 - DNA, 20 bp, synthetic construct
  misc_feature 1..20: note = Description of Artificial Sequence: Synthetic oligonucleotide
  misc_feature 1..20: note = Target: SCN10A; (+) strand; PAM type: YTN; PAM sequence: CTC
  source 1..20: mol_type = other DNA
tcacagtatcttccttgagc

SEQ ID NO: 66830 - DNA, 20 bp, synthetic construct
  misc_feature 1..20: note = Description of Artificial Sequence: Synthetic oligonucleotide
  misc_feature 1..20: note = Target: SCN10A; (+) strand; PAM type: YTN; PAM sequence: CTC
  source 1..20: mol_type = other DNA
acagtatcttccttgagcgg

SEQ ID NO: 66831 - DNA, 20 bp, synthetic construct
  misc_feature 1..20: note = Description of Artificial Sequence: Synthetic oligonucleotide
  misc_feature 1..20: note = Target: SCN10A; (+) strand; PAM type: YTN; PAM sequence: CTT
  source 1..20: mol_type = other DNA
ccttgagcggaagtctatcc

SEQ ID NO: 66832 - DNA, 20 bp, synthetic construct
  misc_feature 1..20: note = Description of Artificial Sequence: Synthetic oligonucleotide
  misc_feature 1..20: note = Target: SCN10A; (+) strand; PAM type: YTN; PAM sequence: TTC
  source 1..20: mol_type = other DNA
cttgagcggaagtctatcct

SEQ ID NO: 66833 - DNA, 20 bp, synthetic construct
  misc_feature 1..20: note = Description of Artificial Sequence: Synthetic oligonucleotide
  misc_feature 1..20: note = Target: SCN10A; (+) strand; PAM type: YTN; PAM sequence: CTT
  source 1..20: mol_type = other DNA
gagcggaagtctatcctacc

SEQ ID NO: 66834 - DNA, 20 bp, synthetic construct
  misc_feature 1..20: note = Description of Artificial Sequence: Synthetic oligonucleotide
  misc_feature 1..20: note = Target: SCN10A; (+) strand; PAM type: YTN; PAM sequence: TTG
  source 1..20: mol_type = other DNA
agcggaagtctatcctaccc

SEQ ID NO: 66835 - DNA, 20 bp, synthetic construct
  misc_feature 1..20: note = Description of Artificial Sequence: Synthetic oligonucleotide
  misc_feature 1..20: note = Target: SCN10A; (+) strand; PAM type: YTN; PAM sequence: CTA
  source 1..20: mol_type = other DNA
tcctaccccaagatacctga

SEQ ID NO: 66836 - DNA, 20 bp, synthetic construct
  misc_feature 1..20: note = Description of Artificial Sequence: Synthetic oligonucleotide
  misc_feature 1..20: note = Target: SCN10A; (+) strand; PAM type: YTN; PAM sequence: CTA
  source 1..20: mol_type = other DNA
ccccaagatacctgactatt

SEQ ID NO: 66837 - DNA, 20 bp, synthetic construct
  misc_feature 1..20: note = Description of Artificial Sequence: Synthetic oligonucleotide
  misc_feature 1..20: note = Target: SCN10A; (+) strand; PAM type: YTN; PAM sequence: CTG
  source 1..20: mol_type = other DNA
actattccttattttcttcc

SEQ ID NO: 66838 - DNA, 20 bp, synthetic construct
  misc_feature 1..20: note = Description of Artificial Sequence: Synthetic oligonucleotide
  misc_feature 1..20: note = Target: SCN10A; (+) strand; PAM type: YTN; PAM sequence: CTA
  source 1..20: mol_type = other DNA
ttccttattttcttcctttt

SEQ ID NO: 66839 - DNA, 20 bp, synthetic construct
  misc_feature 1..20: note = Description of Artificial Sequence: Synthetic oligonucleotide
  misc_feature 1..20: note = Target: SCN10A; (+) strand; PAM type: YTN; PAM sequence: TTC
  source 1..20: mol_type = other DNA
cttattttcttcctttttat

SEQ ID NO: 66840 - DNA, 20 bp, synthetic construct
  misc_feature 1..20: note = Description of Artificial Sequence: Synthetic oligonucleotide
  misc_feature 1..20: note = Target: SCN10A; (+) strand; PAM type: YTN; PAM sequence: CTT
  source 1..20: mol_type = other DNA
attttcttcctttttatcag

SEQ ID NO: 66841 - DNA, 20 bp, synthetic construct
  misc_feature 1..20: note = Description of Artificial Sequence: Synthetic oligonucleotide
  misc_feature 1..20: note = Target: SCN10A; (+) strand; PAM type: YTN; PAM sequence: TTA
  source 1..20: mol_type = other DNA
ttttcttcctttttatcagt

SEQ ID NO: 66842 - DNA, 20 bp, synthetic construct
  misc_feature 1..20: note = Description of Artificial Sequence: Synthetic oligonucleotide
  misc_feature 1..20: note = Target: SCN10A; (+) strand; PAM type: YTN; PAM sequence: TTT
  source 1..20: mol_type = other DNA
tcttcctttttatcagttta

SEQ ID NO: 66843 - DNA, 20 bp, synthetic construct
  misc_feature 1..20: note = Description of Artificial Sequence: Synthetic oligonucleotide
  misc_feature 1..20: note = Target: SCN10A; (+) strand; PAM type: YTN; PAM sequence: TTT
  source 1..20: mol_type = other DNA
cttcctttttatcagtttac

SEQ ID NO: 66844 - DNA, 20 bp, synthetic construct
  misc_feature 1..20: note = Description of Artificial Sequence: Synthetic oligonucleotide
  misc_feature 1..20: note = Target: SCN10A; (+) strand; PAM type: YTN; PAM sequence: TTC
  source 1..20: mol_type = other DNA
ttcctttttatcagtttaca

SEQ ID NO: 66845 - DNA, 20 bp, synthetic construct
  misc_feature 1..20: note = Description of Artificial Sequence: Synthetic oligonucleotide
  misc_feature 1..20: note = Target: SCN10A; (+) strand; PAM type: YTN; PAM sequence: CTT
  source 1..20: mol_type = other DNA
cctttttatcagtttacacc

SEQ ID NO: 66846 - DNA, 20 bp, synthetic construct
  misc_feature 1..20: note = Description of Artificial Sequence: Synthetic oligonucleotide
  misc_feature 1..20: note = Target: SCN10A; (+) strand; PAM type: YTN; PAM sequence: TTC
  source 1..20: mol_type = other DNA
ctttttatcagtttacacca

SEQ ID NO: 66847 - DNA, 20 bp, synthetic construct
  misc_feature 1..20: note = Description of Artificial Sequence: Synthetic oligonucleotide
  misc_feature 1..20: note = Target: SCN10A; (+) strand; PAM type: YTN; PAM sequence: CTT
  source 1..20: mol_type = other DNA
tttatcagtttacaccacta

SEQ ID NO: 66848 - DNA, 20 bp, synthetic construct
  misc_feature 1..20: note = Description of Artificial Sequence: Synthetic oligonucleotide
  misc_feature 1..20: note = Target: SCN10A; (+) strand; PAM type: YTN; PAM sequence: TTT
  source 1..20: mol_type = other DNA
ttatcagtttacaccactat

SEQ ID NO: 66849 - DNA, 20 bp, synthetic construct
  misc_feature 1..20: note = Description of Artificial Sequence: Synthetic oligonucleotide
  misc_feature 1..20: note = Target: SCN10A; (+) strand; PAM type: YTN; PAM sequence: TTT
  source 1..20: mol_type = other DNA
tatcagtttacaccactata

SEQ ID NO: 66850 - DNA, 20 bp, synthetic construct
  misc_feature 1..20: note = Description of Artificial Sequence: Synthetic oligonucleotide
  misc_feature 1..20: note = Target: SCN10A; (+) strand; PAM type: YTN; PAM sequence: TTT
  source 1..20: mol_type = other DNA
atcagtttacaccactataa

SEQ ID NO: 66851 - DNA, 20 bp, synthetic construct
  misc_feature 1..20: note = Description of Artificial Sequence: Synthetic oligonucleotide
  misc_feature 1..20: note = Target: SCN10A; (+) strand; PAM type: YTN; PAM sequence: TTA
  source 1..20: mol_type = other DNA
tcagtttacaccactataaa

SEQ ID NO: 66852 - DNA, 20 bp, synthetic construct
  misc_feature 1..20: note = Description of Artificial Sequence: Synthetic oligonucleotide
  misc_feature 1..20: note = Target: SCN10A; (+) strand; PAM type: YTN; PAM sequence: TTT
  source 1..20: mol_type = other DNA
acaccactataaagtagcat

SEQ ID NO: 66853 - DNA, 20 bp, synthetic construct
  misc_feature 1..20: note = Description of Artificial Sequence: Synthetic oligonucleotide
  misc_feature 1..20: note = Target: SCN10A; (+) strand; PAM type: YTN; PAM sequence: TTA
  source 1..20: mol_type = other DNA
caccactataaagtagcatc

SEQ ID NO: 66854 - DNA, 20 bp, synthetic construct
  misc_feature 1..20: note = Description of Artificial Sequence: Synthetic oligonucleotide
  misc_feature 1..20: note = Target: SCN10A; (+) strand; PAM type: YTN; PAM sequence: CTA
  source 1..20: mol_type = other DNA
taaagtagcatcacccccca

SEQ ID NO: 66855 - DNA, 20 bp, synthetic construct
  misc_feature 1..20: note = Description of Artificial Sequence: Synthetic oligonucleotide
  misc_feature 1..20: note = Target: SCN10A; (+) strand; PAM type: YTN; PAM sequence: CTT
  source 1..20: mol_type = other DNA
tgttaatgcactgctcttct

SEQ ID NO: 66856 - DNA, 20 bp, synthetic construct
  misc_feature 1..20: note = Description of Artificial Sequence: Synthetic oligonucleotide
  misc_feature 1..20: note = Target: SCN10A; (+) strand; PAM type: YTN; PAM sequence: TTT
  source 1..20: mol_type = other DNA
gttaatgcactgctcttcta

SEQ ID NO: 66857 - DNA, 20 bp, synthetic construct
  misc_feature 1..20: note = Description of Artificial Sequence: Synthetic oligonucleotide
  misc_feature 1..20: note = Target: SCN10A; (+) strand; PAM type: YTN; PAM sequence: TTG
  source 1..20: mol_type = other DNA
ttaatgcactgctcttctag

SEQ ID NO: 66858 - DNA, 20 bp, synthetic construct
  misc_feature 1..20: note = Description of Artificial Sequence: Synthetic oligonucleotide
  misc_feature 1..20: note = Target: SCN10A; (+) strand; PAM type: YTN; PAM sequence: TTA
  source 1..20: mol_type = other DNA
atgcactgctcttctaggta

SEQ ID NO: 66859 - DNA, 20 bp, synthetic construct
  misc_feature 1..20: note = Description of Artificial Sequence: Synthetic oligonucleotide
  misc_feature 1..20: note = Target: SCN10A; (+) strand; PAM type: YTN; PAM sequence: CTG
  source 1..20: mol_type = other DNA
ctcttctaggtaatggagat

SEQ ID NO: 66860 - DNA, 20 bp, synthetic construct
  misc_feature 1..20: note = Description of Artificial Sequence: Synthetic oligonucleotide
  misc_feature 1..20: note = Target: SCN10A; (+) strand; PAM type: YTN; PAM sequence: CTC
  source 1..20: mol_type = other DNA
ttctaggtaatggagatcca

SEQ ID NO: 66861 - DNA, 20 bp, synthetic construct
  misc_feature 1..20: note = Description of Artificial Sequence: Synthetic oligonucleotide
  misc_feature 1..20: note = Target: SCN10A; (+) strand; PAM type: YTN; PAM sequence: CTT
  source 1..20: mol_type = other DNA
ctaggtaatggagatccagc

SEQ ID NO: 66862 - DNA, 20 bp, synthetic construct
  misc_feature 1..20: note = Description of Artificial Sequence: Synthetic oligonucleotide
  misc_feature 1..20: note = Target: SCN10A; (+) strand; PAM type: YTN; PAM sequence: TTC
  source 1..20: mol_type = other DNA
taggtaatggagatccagct

SEQ ID NO: 66863 - DNA, 20 bp, synthetic construct
  misc_feature 1..20: note = Description of Artificial Sequence: Synthetic oligonucleotide
  misc_feature 1..20: note = Target: SCN10A; (+) strand; PAM type: YTN; PAM sequence: CTA
  source 1..20: mol_type = other DNA
ggtaatggagatccagctgt

SEQ ID NO: 66864 - DNA, 20 bp, synthetic construct
  misc_feature 1..20: note = Description of Artificial Sequence: Synthetic oligonucleotide
  misc_feature 1..20: note = Target: SCN10A; (+) strand; PAM type: YTN; PAM sequence: CTG
  source 1..20: mol_type = other DNA
tgagcaaaacagatacatct

SEQ ID NO: 66865 - DNA, 20 bp, synthetic construct
  misc_feature 1..20: note = Description of Artificial Sequence: Synthetic oligonucleotide
  misc_feature 1..20: note = Target: SCN10A; (+) strand; PAM type: YTN; PAM sequence: CTC
  source 1..20: mol_type = other DNA
tgcatatctggtaaattact

SEQ ID NO: 66866 - DNA, 20 bp, synthetic construct
  misc_feature 1..20: note = Description of Artificial Sequence: Synthetic oligonucleotide
  misc_feature 1..20: note = Target: SCN10A; (+) strand; PAM type: YTN; PAM sequence: CTG
  source 1..20: mol_type = other DNA
catatctggtaaattactgg

SEQ ID NO: 66867 - DNA, 20 bp, synthetic construct
  misc_feature 1..20: note = Description of Artificial Sequence: Synthetic oligonucleotide
  misc_feature 1..20: note = Target: SCN10A; (+) strand; PAM type: YTN; PAM sequence: CTG
  source 1..20: mol_type = other DNA
gtaaattactggctagttct

SEQ ID NO: 66868 - DNA, 20 bp, synthetic construct
  misc_feature 1..20: note = Description of Artificial Sequence: Synthetic oligonucleotide
  misc_feature 1..20: note = Target: SCN10A; (+) strand; PAM type: YTN; PAM sequence: TTA
  source 1..20: mol_type = other DNA
ctggctagttctactctaca

SEQ ID NO: 66869 - DNA, 20 bp, synthetic construct
  misc_feature 1..20: note = Description of Artificial Sequence: Synthetic oligonucleotide
  misc_feature 1..20: note = Target: SCN10A; (+) strand; PAM type: YTN; PAM sequence: CTG
  source 1..20: mol_type = other DNA
gctagttctactctacagtt

SEQ ID NO: 66870 - DNA, 20 bp, synthetic construct
  misc_feature 1..20: note = Description of Artificial Sequence: Synthetic oligonucleotide
  misc_feature 1..20: note = Target: SCN10A; (+) strand; PAM type: YTN; PAM sequence: CTA
  source 1..20: mol_type = other DNA
gttctactctacagtttctg

SEQ ID NO: 66871 - DNA, 20 bp, synthetic construct
  misc_feature 1..20: note = Description of Artificial Sequence: Synthetic oligonucleotide
  misc_feature 1..20: note = Target: SCN10A; (+) strand; PAM type: YTN; PAM sequence: TTC
  source 1..20: mol_type = other DNA
tactctacagtttctgtgca

SEQ ID NO: 66872 - DNA, 20 bp, synthetic construct
  misc_feature 1..20: note = Description of Artificial Sequence: Synthetic oligonucleotide
  misc_feature 1..20: note = Target: SCN10A; (+) strand; PAM type: YTN; PAM sequence: CTA
  source 1..20: mol_type = other DNA
ctctacagtttctgtgcatg

SEQ ID NO: 66873 - DNA, 20 bp, synthetic construct
  misc_feature 1..20: note = Description of Artificial Sequence: Synthetic oligonucleotide
  misc_feature 1..20: note = Target: SCN10A; (+) strand; PAM type: YTN; PAM sequence: CTC
  source 1..20: mol_type = other DNA
tacagtttctgtgcatgtga

SEQ ID NO: 66874 - DNA, 20 bp, synthetic construct
  misc_feature 1..20: note = Description of Artificial Sequence: Synthetic oligonucleotide
  misc_feature 1..20: note = Target: SCN10A; (+) strand; PAM type: YTN; PAM sequence: CTA
  source 1..20: mol_type = other DNA
cagtttctgtgcatgtgaat

SEQ ID NO: 66875 - DNA, 20 bp, synthetic construct
  misc_feature 1..20: note = Description of Artificial Sequence: Synthetic oligonucleotide
  misc_feature 1..20: note = Target: SCN10A; (+) strand; PAM type: YTN; PAM sequence: TTT
  source 1..20: mol_type = other DNA
ctgtgcatgtgaatctctct

SEQ ID NO: 66876 - DNA, 20 bp, synthetic construct
  misc_feature 1..20: note = Description of Artificial Sequence: Synthetic oligonucleotide
  misc_feature 1..20: note = Target: SCN10A; (+) strand; PAM type: YTN; PAM sequence: TTC
  source 1..20: mol_type = other DNA
tgtgcatgtgaatctctctc

SEQ ID NO: 66877 - DNA, 20 bp, synthetic construct
  misc_feature 1..20: note = Description of Artificial Sequence: Synthetic oligonucleotide
  misc_feature 1..20: note = Target: SCN10A; (+) strand; PAM type: YTN; PAM sequence: CTG
  source 1..20: mol_type = other DNA
tgcatgtgaatctctctcta

SEQ ID NO: 66878 - DNA, 20 bp, synthetic construct
  misc_feature 1..20: note = Description of Artificial Sequence: Synthetic oligonucleotide
  misc_feature 1..20: note = Target: SCN10A; (+) strand; PAM type: YTN; PAM sequence: CTC
  source 1..20: mol_type = other DNA
tctctaaggcttgccacctc

SEQ ID NO: 66879 - DNA, 20 bp, synthetic construct
  misc_feature 1..20: note = Description of Artificial Sequence: Synthetic oligonucleotide
  misc_feature 1..20: note = Target: SCN10A; (+) strand; PAM type: YTN; PAM sequence: CTC
  source 1..20: mol_type = other DNA
tctaaggcttgccacctctg

SEQ ID NO: 66880 - DNA, 20 bp, synthetic construct
  misc_feature 1..20: note = Description of Artificial Sequence: Synthetic oligonucleotide
  misc_feature 1..20: note = Target: SCN10A; (+) strand; PAM type: YTN; PAM sequence: CTC
  source 1..20: mol_type = other DNA
taaggcttgccacctctggc

SEQ ID NO: 66881 - DNA, 20 bp, synthetic construct
  misc_feature 1..20: note = Description of Artificial Sequence: Synthetic oligonucleotide
  misc_feature 1..20: note = Target: SCN10A; (+) strand; PAM type: YTN; PAM sequence: CTA
  source 1..20: mol_type = other DNA
aggcttgccacctctggctt

SEQ ID NO: 66882 - DNA, 20 bp, synthetic construct
  misc_feature 1..20: note = Description of Artificial Sequence: Synthetic oligonucleotide
  misc_feature 1..20: note = Target: SCN10A; (+) strand; PAM type: YTN; PAM sequence: CTT
  source 1..20: mol_type = other DNA
gccacctctggctttaccta

SEQ ID NO: 66883 - DNA, 20 bp, synthetic construct
  misc_feature 1..20: note = Description of Artificial Sequence: Synthetic oligonucleotide
  misc_feature 1..20: note = Target: SCN10A; (+) strand; PAM type: YTN; PAM sequence: TTG
  source 1..20: mol_type = other DNA
ccacctctggctttacctag

SEQ ID NO: 66884 - DNA, 20 bp, synthetic construct
  misc_feature 1..20: note = Description of Artificial Sequence: Synthetic oligonucleotide
  misc_feature 1..20: note = Target: SCN10A; (+) strand; PAM type: YTN; PAM sequence: CTC
  source 1..20: mol_type = other DNA
tggctttacctagaaagtag

SEQ ID NO: 66885 - DNA, 20 bp, synthetic construct
  misc_feature 1..20: note = Description of Artificial Sequence: Synthetic oligonucleotide
  misc_feature 1..20: note = Target: SCN10A; (+) strand; PAM type: YTN; PAM sequence: CTG
  source 1..20: mol_type = other DNA
gctttacctagaaagtaggg

SEQ ID NO: 66886 - DNA, 20 bp, synthetic construct
  misc_feature 1..20: note = Description of Artificial Sequence: Synthetic oligonucleotide
  misc_feature 1..20: note = Target: SCN10A; (+) strand; PAM type: YTN; PAM sequence: CTT
  source 1..20: mol_type = other DNA
tacctagaaagtagggcaca

SEQ ID NO: 66887 - DNA, 20 bp, synthetic construct
  misc_feature 1..20: note = Description of Artificial Sequence: Synthetic oligonucleotide
  misc_feature 1..20: note = Target: SCN10A; (+) strand; PAM type: YTN; PAM sequence: TTT
  source 1..20: mol_type = other DNA
acctagaaagtagggcacac

SEQ ID NO: 66888 - DNA, 20 bp, synthetic construct
  misc_feature 1..20: note = Description of Artificial Sequence: Synthetic oligonucleotide
  misc_feature 1..20: note = Target: SCN10A; (+) strand; PAM type: YTN; PAM sequence: TTA
  source 1..20: mol_type = other DNA
cctagaaagtagggcacaca

SEQ ID NO: 66889 - DNA, 20 bp, synthetic construct
  misc_feature 1..20: note = Description of Artificial Sequence: Synthetic oligonucleotide
  misc_feature 1..20: note = Target: SCN10A; (+) strand; PAM type: YTN; PAM sequence: CTA
  source 1..20: mol_type = other DNA
gaaagtagggcacacattgg

SEQ ID NO: 66890 - DNA, 20 bp, synthetic construct
  misc_feature 1..20: note = Description of Artificial Sequence: Synthetic oligonucleotide
  misc_feature 1..20: note = Target: SCN10A; (+) strand; PAM type: YTN; PAM sequence: TTG
  source 1..20: mol_type = other DNA
gctctgttttgaaatccctc

SEQ ID NO: 66891 - DNA, 20 bp, synthetic construct
  misc_feature 1..20: note = Description of Artificial Sequence: Synthetic oligonucleotide
  misc_feature 1..20: note = Target: SCN10A; (+) strand; PAM type: YTN; PAM sequence: CTC
  source 1..20: mol_type = other DNA
tgttttgaaatccctcaaac

SEQ ID NO: 66892 - DNA, 20 bp, synthetic construct
  misc_feature 1..20: note = Description of Artificial Sequence: Synthetic oligonucleotide
  misc_feature 1..20: note = Target: SCN10A; (+) strand; PAM type: YTN; PAM sequence: CTG
  source 1..20: mol_type = other DNA
ttttgaaatccctcaaacat

SEQ ID NO: 66893 - DNA, 20 bp, synthetic construct
  misc_feature 1..20: note = Description of Artificial Sequence: Synthetic oligonucleotide
  misc_feature 1..20: note = Target: SCN10A; (+) strand; PAM type: YTN; PAM sequence: TTT
  source 1..20: mol_type = other DNA
tgaaatccctcaaacatttt

SEQ ID NO: 66894 - DNA, 20 bp, synthetic construct
  misc_feature 1..20: note = Description of Artificial Sequence: Synthetic oligonucleotide
  misc_feature 1..20: note = Target: SCN10A; (+) strand; PAM type: YTN; PAM sequence: TTT
  source 1..20: mol_type = other DNA
gaaatccctcaaacattttt

SEQ ID NO: 66895 - DNA, 20 bp, synthetic construct
  misc_feature 1..20: note = Description of Artificial Sequence: Synthetic oligonucleotide
  misc_feature 1..20: note = Target: SCN10A; (+) strand; PAM type: YTN; PAM sequence: TTG
  source 1..20: mol_type = other DNA
aaatccctcaaacatttttt

SEQ ID NO: 66896 - DNA, 20 bp, synthetic construct
  misc_feature 1..20: note = Description of Artificial Sequence: Synthetic oligonucleotide
  misc_feature 1..20: note = Target: SCN10A; (+) strand; PAM type: YTN; PAM sequence: CTC
  source 1..20: mol_type = other DNA
aaacatttttttggtttcta

SEQ ID NO: 66897 - DNA, 20 bp, synthetic construct
  misc_feature 1..20: note = Description of Artificial Sequence: Synthetic oligonucleotide
  misc_feature 1..20: note = Target: SCN10A; (+) strand; PAM type: YTN; PAM sequence: TTT
  source 1..20: mol_type = other DNA
ttttggtttctattgctcac

SEQ ID NO: 66898 - DNA, 20 bp, synthetic construct
  misc_feature 1..20: note = Description of Artificial Sequence: Synthetic oligonucleotide
  misc_feature 1..20: note = Target: SCN10A; (+) strand; PAM type: YTN; PAM sequence: TTT
  source 1..20: mol_type = other DNA
tttggtttctattgctcacc

SEQ ID NO: 66899 - DNA, 20 bp, synthetic construct
  misc_feature 1..20: note = Description of Artificial Sequence: Synthetic oligonucleotide
  misc_feature 1..20: note = Target: SCN10A; (+) strand; PAM type: YTN; PAM sequence: TTT
  source 1..20: mol_type = other DNA
ttggtttctattgctcacca

SEQ ID NO: 66900 - DNA, 20 bp, synthetic construct
  misc_feature 1..20: note = Description of Artificial Sequence: Synthetic oligonucleotide
  misc_feature 1..20: note = Target: SCN10A; (+) strand; PAM type: YTN; PAM sequence: TTT
  source 1..20: mol_type = other DNA
tggtttctattgctcaccac

SEQ ID NO: 66901 - DNA, 20 bp, synthetic construct
  misc_feature 1..20: note = Description of Artificial Sequence: Synthetic oligonucleotide
  misc_feature 1..20: note = Target: SCN10A; (+) strand; PAM type: YTN; PAM sequence: TTT
  source 1..20: mol_type = other DNA
ggtttctattgctcaccact

SEQ ID NO: 66902 - DNA, 20 bp, synthetic construct
  misc_feature 1..20: note = Description of Artificial Sequence: Synthetic oligonucleotide
  misc_feature 1..20: note = Target: SCN10A; (+) strand; PAM type: YTN; PAM sequence: TTG
  source 1..20: mol_type = other DNA
gtttctattgctcaccactt

SEQ ID NO: 66903 - DNA, 20 bp, synthetic construct
  misc_feature 1..20: note = Description of Artificial Sequence: Synthetic oligonucleotide
  misc_feature 1..20: note = Target: SCN10A; (+) strand; PAM type: YTN; PAM sequence: TTT
  source 1..20: mol_type = other DNA
ctattgctcaccacttcttc

SEQ ID NO: 66904 - DNA, 20 bp, synthetic construct
  misc_feature 1..20: note = Description of Artificial Sequence: Synthetic oligonucleotide
  misc_feature 1..20: note = Target: SCN10A; (+) strand; PAM type: YTN; PAM sequence: TTC
  source 1..20: mol_type = other DNA
tattgctcaccacttcttcc

SEQ ID NO: 66905 - DNA, 20 bp, synthetic construct
  misc_feature 1..20: note = Description of Artificial Sequence: Synthetic oligonucleotide
  misc_feature 1..20: note = Target: SCN10A; (+) strand; PAM type: YTN; PAM sequence: CTA
  source 1..20: mol_type = other DNA
ttgctcaccacttcttcccc

SEQ ID NO: 66906 - DNA, 20 bp, synthetic construct
  misc_feature 1..20: note = Description of Artificial Sequence: Synthetic oligonucleotide
  misc_feature 1..20: note = Target: SCN10A; (+) strand; PAM type: YTN; PAM sequence: TTG
  source 1..20: mol_type = other DNA
ctcaccacttcttcccctca

SEQ ID NO: 66907 - DNA, 20 bp, synthetic construct
  misc_feature 1..20: note = Description of Artificial Sequence: Synthetic oligonucleotide
  misc_feature 1..20: note = Target: SCN10A; (+) strand; PAM type: YTN; PAM sequence: CTC
  source 1..20: mol_type = other DNA
accacttcttcccctcaaat

SEQ ID NO: 66908 - DNA, 20 bp, synthetic construct
  misc_feature 1..20: note = Description of Artificial Sequence: Synthetic oligonucleotide
  misc_feature 1..20: note = Target: SCN10A; (+) strand; PAM type: YTN; PAM sequence: CTT
  source 1..20: mol_type = other DNA
cttcccctcaaattaggatt

SEQ ID NO: 66909 - DNA, 20 bp, synthetic construct
  misc_feature 1..20: note = Description of Artificial Sequence: Synthetic oligonucleotide
  misc_feature 1..20: note = Target: SCN10A; (+) strand; PAM type: YTN; PAM sequence: TTC
  source 1..20: mol_type = other DNA
ttcccctcaaattaggattc

SEQ ID NO: 66910 - DNA, 20 bp, synthetic construct
  misc_feature 1..20: note = Description of Artificial Sequence: Synthetic oligonucleotide
  misc_feature 1..20: note = Target: SCN10A; (+) strand; PAM type: YTN; PAM sequence: CTT
  source 1..20: mol_type = other DNA
cccctcaaattaggattcag

SEQ ID NO: 66911 - DNA, 20 bp, synthetic construct
  misc_feature 1..20: note = Description of Artificial Sequence: Synthetic oligonucleotide
  misc_feature 1..20: note = Target: SCN10A; (+) strand; PAM type: YTN; PAM sequence: TTC
  source 1..20: mol_type = other DNA
ccctcaaattaggattcagc

SEQ ID NO: 66912 - DNA, 20 bp, synthetic construct
  misc_feature 1..20: note = Description of Artificial Sequence: Synthetic oligonucleotide
  misc_feature 1..20: note = Target: SCN10A; (+) strand; PAM type: YTN; PAM sequence: CTC
  source 1..20: mol_type = other DNA
aaattaggattcagcctagg

SEQ ID NO: 66913 - DNA, 20 bp, synthetic construct
  misc_feature 1..20: note = Description of Artificial Sequence: Synthetic oligonucleotide
  misc_feature 1..20: note = Target: SCN10A; (+) strand; PAM type: YTN; PAM sequence: TTA
  source 1..20: mol_type = other DNA
ggattcagcctagggctggg

SEQ ID NO: 66914 - DNA, 20 bp, synthetic construct
  misc_feature 1..20: note = Description of Artificial Sequence: Synthetic oligonucleotide
  misc_feature 1..20: note = Target: SCN10A; (+) strand; PAM type: YTN; PAM sequence: TTC
  source 1..20: mol_type = other DNA
agcctagggctgggaggaaa

SEQ ID NO: 66915 - DNA, 20 bp, synthetic construct
  misc_feature 1..20: note = Description of Artificial Sequence: Synthetic oligonucleotide
  misc_feature 1..20: note = Target: SCN10A; (+) strand; PAM type: YTN; PAM sequence: CTA
  source 1..20: mol_type = other DNA
gggctgggaggaaaacacac

SEQ ID NO: 66916 - DNA, 20 bp, synthetic construct
  misc_feature 1..20: note = Description of Artificial Sequence: Synthetic oligonucleotide
  misc_feature 1..20: note = Target: SCN10A; (+) strand; PAM type: YTN; PAM sequence: CTG
  source 1..20: mol_type = other DNA
ggaggaaaacacacaggact

SEQ ID NO: 66917 - DNA, 20 bp, synthetic construct
  misc_feature 1..20: note = Description of Artificial Sequence: Synthetic oligonucleotide
  misc_feature 1..20: note = Target: SCN10A; (+) strand; PAM type: YTN; PAM sequence: CTC
  source 1..20: mol_type = other DNA
cttctcaggggcacaccagc

SEQ ID NO: 66918 - DNA, 20 bp, synthetic construct
  misc_feature 1..20: note = Description of Artificial Sequence: Synthetic oligonucleotide
  misc_feature 1..20: note = Target: SCN10A; (+) strand; PAM type: YTN; PAM sequence: CTT
  source 1..20: mol_type = other DNA
ctcaggggcacaccagcact

SEQ ID NO: 66919 - DNA, 20 bp, synthetic construct
  misc_feature 1..20: note = Description of Artificial Sequence: Synthetic oligonucleotide
  misc_feature 1..20: note = Target: SCN10A; (+) strand; PAM type: YTN; PAM sequence: TTC
  source 1..20: mol_type = other DNA
tcaggggcacaccagcactc

SEQ ID NO: 66920 - DNA, 20 bp, synthetic construct
  misc_feature 1..20: note = Description of Artificial Sequence: Synthetic oligonucleotide
  misc_feature 1..20: note = Target: SCN10A; (+) strand; PAM type: YTN; PAM sequence: CTC
  source 1..20: mol_type = other DNA
aggggcacaccagcactcaa

SEQ ID NO: 66921 - DNA, 20 bp, synthetic construct
  misc_feature 1..20: note = Description of Artificial Sequence: Synthetic oligonucleotide
  misc_feature 1..20: note = Target: SCN10A; (+) strand; PAM type: YTN; PAM sequence: CTC
  source 1..20: mol_type = other DNA
aagctcccttacaactcctc

SEQ ID NO: 66922 - DNA, 20 bp, synthetic construct
  misc_feature 1..20: note = Description of Artificial Sequence: Synthetic oligonucleotide
  misc_feature 1..20: note = Target: SCN10A; (+) strand; PAM type: YTN; PAM sequence: CTC
  source 1..20: mol_type = other DNA
ccttacaactcctccagcct

SEQ ID NO: 66923 - DNA, 20 bp, synthetic construct
  misc_feature 1..20: note = Description of Artificial Sequence: Synthetic oligonucleotide
  misc_feature 1..20: note = Target: SCN10A; (+) strand; PAM type: YTN; PAM sequence: CTT
  source 1..20: mol_type = other DNA
acaactcctccagcctaggt

SEQ ID NO: 66924 - DNA, 20 bp, synthetic construct
  misc_feature 1..20: note = Description of Artificial Sequence: Synthetic oligonucleotide
  misc_feature 1..20: note = Target: SCN10A; (+) strand; PAM type: YTN; PAM sequence: TTA
  source 1..20: mol_type = other DNA
caactcctccagcctaggtc

SEQ ID NO: 66925 - DNA, 20 bp, synthetic construct
  misc_feature 1..20: note = Description of Artificial Sequence: Synthetic oligonucleotide
  misc_feature 1..20: note = Target: SCN10A; (+) strand; PAM type: YTN; PAM sequence: CTC
  source 1..20: mol_type = other DNA
ctccagcctaggtcagttta

SEQ ID NO: 66926 - DNA, 20 bp, synthetic construct
  misc_feature 1..20: note = Description of Artificial Sequence: Synthetic oligonucleotide
  misc_feature 1..20: note = Target: SCN10A; (+) strand; PAM type: YTN; PAM sequence: CTC
  source 1..20: mol_type = other DNA
cagcctaggtcagtttaatt

SEQ ID NO: 66927 - DNA, 20 bp, synthetic construct
  misc_feature 1..20: note = Description of Artificial Sequence: Synthetic oligonucleotide
  misc_feature 1..20: note = Target: SCN10A; (+) strand; PAM type: YTN; PAM sequence: CTA
  source 1..20: mol_type = other DNA
ggtcagtttaatttgtctag

SEQ ID NO: 66928 - DNA, 20 bp, synthetic construct
  misc_feature 1..20: note = Description of Artificial Sequence: Synthetic oligonucleotide
  misc_feature 1..20: note = Target: SCN10A; (+) strand; PAM type: YTN; PAM sequence: TTT
  source 1..20: mol_type = other DNA
aatttgtctaggggagtaag

SEQ ID NO: 66929 - DNA, 20 bp, synthetic construct
  misc_feature 1..20: note = Description of Artificial Sequence: Synthetic oligonucleotide
  misc_feature 1..20: note = Target: SCN10A; (+) strand; PAM type: YTN; PAM sequence: TTA
  source 1..20: mol_type = other DNA
atttgtctaggggagtaaga

SEQ ID NO: 66930 - DNA, 20 bp, synthetic construct
  misc_feature 1..20: note = Description of Artificial Sequence: Synthetic oligonucleotide
  misc_feature 1..20: note = Target: SCN10A; (+) strand; PAM type: YTN; PAM sequence: TTT
  source 1..20: mol_type = other DNA
gtctaggggagtaagataac

SEQ ID NO: 66931 - DNA, 20 bp, synthetic construct
  misc_feature 1..20: note = Description of Artificial Sequence: Synthetic oligonucleotide
  misc_feature 1..20: note = Target: SCN10A; (+) strand; PAM type: YTN; PAM sequence: TTG
  source 1..20: mol_type = other DNA
tctaggggagtaagataact

SEQ ID NO: 66932 - DNA, 20 bp, synthetic construct
  misc_feature 1..20: note = Description of Artificial Sequence: Synthetic oligonucleotide
  misc_feature 1..20: note = Target: SCN10A; (+) strand; PAM type: YTN; PAM sequence: CTA
  source 1..20: mol_type = other DNA
ggggagtaagataactggaa

SEQ ID NO: 66933 - DNA, 20 bp, synthetic construct
  misc_feature 1..20: note = Description of Artificial Sequence: Synthetic oligonucleotide
  misc_feature 1..20: note = Target: SCN10A; (+) strand; PAM type: YTN; PAM sequence: CTG
  source 1..20: mol_type = other DNA
gaaatgatgaaggttgcatt

SEQ ID NO: 66934 - DNA, 20 bp, synthetic construct
  misc_feature 1..20: note = Description of Artificial Sequence: Synthetic oligonucleotide
  misc_feature 1..20: note = Target: SCN10A; (+) strand; PAM type: YTN; PAM sequence: TTG
  source 1..20: mol_type = other DNA
cattctccataccctaaggc

SEQ ID NO: 66935 - DNA, 20 bp, synthetic construct
  misc_feature 1..20: note = Description of Artificial Sequence: Synthetic oligonucleotide
  misc_feature 1..20: note = Target: SCN10A; (+) strand; PAM type: YTN; PAM sequence: TTC
  source 1..20: mol_type = other DNA
tccataccctaaggcaaaaa

SEQ ID NO: 66936 - DNA, 20 bp, synthetic construct
  misc_feature 1..20: note = Description of Artificial Sequence: Synthetic oligonucleotide
  misc_feature 1..20: note = Target: SCN10A; (+) strand; PAM type: YTN; PAM sequence: CTC
  source 1..20: mol_type = other DNA
cataccctaaggcaaaaaaa

SEQ ID NO: 66937 - DNA, 20 bp, synthetic construct
  misc_feature 1..20: note = Description of Artificial Sequence: Synthetic oligonucleotide
  misc_feature 1..20: note = Target: SCN10A; (+) strand; PAM type: YTN; PAM sequence: CTA
  source 1..20: mol_type = other DNA
aggcaaaaaaaggctggatt

SEQ ID NO: 66938 - DNA, 20 bp, synthetic construct
  misc_feature 1..20: note = Description of Artificial Sequence: Synthetic oligonucleotide
  misc_feature 1..20: note = Target: SCN10A; (+) strand; PAM type: YTN; PAM sequence: CTG
  source 1..20: mol_type = other DNA
gattagaacagacctcctgc

SEQ ID NO: 66939 - DNA, 20 bp, synthetic construct
  misc_feature 1..20: note = Description of Artificial Sequence: Synthetic oligonucleotide
  misc_feature 1..20: note = Target: SCN10A; (+) strand; PAM type: YTN; PAM sequence: TTA
  source 1..20: mol_type = other DNA
gaacagacctcctgctcaag

SEQ ID NO: 66940 - DNA, 20 bp, synthetic construct
  misc_feature 1..20: note = Description of Artificial Sequence: Synthetic oligonucleotide
  misc_feature 1..20: note = Target: SCN10A; (+) strand; PAM type: YTN; PAM sequence: CTC
  source 1..20: mol_type = other DNA
ctgctcaaggttagagggat

SEQ ID NO: 66941 - DNA, 20 bp, synthetic construct
  misc_feature 1..20: note = Description of Artificial Sequence: Synthetic oligonucleotide
  misc_feature 1..20: note = Target: SCN10A; (+) strand; PAM type: YTN; PAM sequence: CTG
  source 1..20: mol_type = other DNA
ctcaaggttagagggatgca

SEQ ID NO: 66942 - DNA, 20 bp, synthetic construct
  misc_feature 1..20: note = Description of Artificial Sequence: Synthetic oligonucleotide
  misc_feature 1..20: note = Target: SCN10A; (+) strand; PAM type: YTN; PAM sequence: CTC
  source 1..20: mol_type = other DNA
aaggttagagggatgcaatc

SEQ ID NO: 66943 - DNA, 20 bp, synthetic construct
  misc_feature 1..20: note = Description of Artificial Sequence: Synthetic oligonucleotide
  misc_feature 1..20: note = Target: SCN10A; (+) strand; PAM type: YTN; PAM sequence: TTA
  source 1..20: mol_type = other DNA
gagggatgcaatcacgctct

SEQ ID NO: 66944 - DNA, 20 bp, synthetic construct
  misc_feature 1..20: note = Description of Artificial Sequence: Synthetic oligonucleotide
  misc_feature 1..20: note = Target: SCN10A; (+) strand; PAM type: YTN; PAM sequence: CTC
  source 1..20: mol_type = other DNA
tatggcaaagtgtgtggata

SEQ ID NO: 66945 - DNA, 20 bp, synthetic construct
  misc_feature 1..20: note = Description of Artificial Sequence: Synthetic oligonucleotide
  misc_feature 1..20: note = Target: SCN10A; (+) strand; PAM type: YTN; PAM sequence: CTA
  source 1..20: mol_type = other DNA
tggcaaagtgtgtggatagg

SEQ ID NO: 66946 - DNA, 20 bp, synthetic construct
  misc_feature 1..20: note = Description of Artificial Sequence: Synthetic oligonucleotide
  misc_feature 1..20: note = Target: SCN10A; (+) strand; PAM type: YTN; PAM sequence: TTG
  source 1..20: mol_type = other DNA
ccactctcttcctctaccct

SEQ ID NO: 66947 - DNA, 20 bp, synthetic construct
  misc_feature 1..20: note = Description of Artificial Sequence: Synthetic oligonucleotide
  misc_feature 1..20: note = Target: SCN10A; (+) strand; PAM type: YTN; PAM sequence: CTC
  source 1..20: mol_type = other DNA
tcttcctctaccctttggct

SEQ ID NO: 66948 - DNA, 20 bp, synthetic construct
  misc_feature 1..20: note = Description of Artificial Sequence: Synthetic oligonucleotide
  misc_feature 1..20: note = Target: SCN10A; (+) strand; PAM type: YTN; PAM sequence: CTC
  source 1..20: mol_type = other DNA
ttcctctaccctttggcttg

SEQ ID NO: 66949 - DNA, 20 bp, synthetic construct
  misc_feature 1..20: note = Description of Artificial Sequence: Synthetic oligonucleotide
  misc_feature 1..20: note = Target: SCN10A; (+) strand; PAM type: YTN; PAM sequence: CTT
  source 1..20: mol_type = other DNA
cctctaccctttggcttgga

SEQ ID NO: 66950 - DNA, 20 bp, synthetic construct
  misc_feature 1..20: note = Description of Artificial Sequence: Synthetic oligonucleotide
  misc_feature 1..20: note = Target: SCN10A; (+) strand; PAM type: YTN; PAM sequence: TTC
  source 1..20: mol_type = other DNA
ctctaccctttggcttggaa

SEQ ID NO: 66951 - DNA, 20 bp, synthetic construct
  misc_feature 1..20: note = Description of Artificial Sequence: Synthetic oligonucleotide
  misc_feature 1..20: note = Target: SCN10A; (+) strand; PAM type: YTN; PAM sequence: CTC
  source 1..20: mol_type = other DNA
taccctttggcttggaactt

SEQ ID NO: 66952 - DNA, 20 bp, synthetic construct
  misc_feature 1..20: note = Description of Artificial Sequence: Synthetic oligonucleotide
  misc_feature 1..20: note = Target: SCN10A; (+) strand; PAM type: YTN; PAM sequence: CTA
  source 1..20: mol_type = other DNA
ccctttggcttggaacttag

SEQ ID NO: 66953 - DNA, 20 bp, synthetic construct
  misc_feature 1..20: note = Description of Artificial Sequence: Synthetic oligonucleotide
  misc_feature 1..20: note = Target: SCN10A; (+) strand; PAM type: YTN; PAM sequence: CTT
  source 1..20: mol_type = other DNA
tggcttggaacttagataca

SEQ ID NO: 66954 - DNA, 20 bp, synthetic construct
  misc_feature 1..20: note = Description of Artificial Sequence: Synthetic oligonucleotide
  misc_feature 1..20: note = Target: SCN10A; (+) strand; PAM type: YTN; PAM sequence: TTT
  source 1..20: mol_type = other DNA
ggcttggaacttagatacat

SEQ ID NO: 66955 - DNA, 20 bp, synthetic construct
  misc_feature 1..20: note = Description of Artificial Sequence: Synthetic oligonucleotide
  misc_feature 1..20: note = Target: SCN10A; (+) strand; PAM type: YTN; PAM sequence: TTG
  source 1..20: mol_type = other DNA
gcttggaacttagatacatt

SEQ ID NO: 66956 - DNA, 20 bp, synthetic construct
  misc_feature 1..20: note = Description of Artificial Sequence: Synthetic oligonucleotide
  misc_feature 1..20: note = Target: SCN10A; (+) strand; PAM type: YTN; PAM sequence: CTT
  source 1..20: mol_type = other DNA
ggaacttagatacattgctg

SEQ ID NO: 66957 - DNA, 20 bp, synthetic construct
  misc_feature 1..20: note = Description of Artificial Sequence: Synthetic oligonucleotide
  misc_feature 1..20: note = Target: SCN10A; (+) strand; PAM type: YTN; PAM sequence: TTG
  source 1..20: mol_type = other DNA
gaacttagatacattgctgg

SEQ ID NO: 66958 - DNA, 20 bp, synthetic construct
  misc_feature 1..20: note = Description of Artificial Sequence: Synthetic oligonucleotide
  misc_feature 1..20: note = Target: SCN10A; (+) strand; PAM type: YTN; PAM sequence: CTT
  source 1..20: mol_type = other DNA
agatacattgctggggagac

SEQ ID NO: 66959 - DNA, 20 bp, synthetic construct
  misc_feature 1..20: note = Description of Artificial Sequence: Synthetic oligonucleotide
  misc_feature 1..20: note = Target: SCN10A; (+) strand; PAM type: YTN; PAM sequence: TTA
  source 1..20: mol_type = other DNA
gatacattgctggggagact

SEQ ID NO: 66960 - DNA, 20 bp, synthetic construct
  misc_feature 1..20: note = Description of Artificial Sequence: Synthetic oligonucleotide
  misc_feature 1..20: note = Target: SCN10A; (+) strand; PAM type: YTN; PAM sequence: TTG
  source 1..20: mol_type = other DNA
ctggggagactgagtggatt

SEQ ID NO: 66961 - DNA, 20 bp, synthetic construct
  misc_feature 1..20: note = Description of Artificial Sequence: Synthetic oligonucleotide
  misc_feature 1..20: note = Target: SCN10A; (+) strand; PAM type: YTN; PAM sequence: CTG
  source 1..20: mol_type = other DNA
gggagactgagtggattccc

SEQ ID NO: 66962 - DNA, 20 bp, synthetic construct
  misc_feature 1..20: note = Description of Artificial Sequence: Synthetic oligonucleotide
  misc_feature 1..20: note = Target: SCN10A; (+) strand; PAM type: YTN; PAM sequence: CTG
  source 1..20: mol_type = other DNA
agtggattcccacttgattg

SEQ ID NO: 66963 - DNA, 20 bp, synthetic construct
  misc_feature 1..20: note = Description of Artificial Sequence: Synthetic oligonucleotide
  misc_feature 1..20: note = Target: SCN10A; (+) strand; PAM type: YTN; PAM sequence: TTC
  source 1..20: mol_type = other DNA
ccacttgattggtagaattc

SEQ ID NO: 66964 - DNA, 20 bp, synthetic construct
  misc_feature 1..20: note = Description of Artificial Sequence: Synthetic oligonucleotide
  misc_feature 1..20: note = Target: SCN10A; (+) strand; PAM type: YTN; PAM sequence: CTT
  source 1..20: mol_type = other DNA
gattggtagaattctaaatt

SEQ ID NO: 66965 - DNA, 20 bp, synthetic construct
  misc_feature 1..20: note = Description of Artificial Sequence: Synthetic oligonucleotide
  misc_feature 1..20: note = Target: SCN10A; (+) strand; PAM type: YTN; PAM sequence: TTG
  source 1..20: mol_type = other DNA
attggtagaattctaaatta

SEQ ID NO: 66966 - DNA, 20 bp, synthetic construct
  misc_feature 1..20: note = Description of Artificial Sequence: Synthetic oligonucleotide
  misc_feature 1..20: note = Target: SCN10A; (+) strand; PAM type: YTN; PAM sequence: TTG
  source 1..20: mol_type = other DNA
gtagaattctaaattaacaa

SEQ ID NO: 66967 - DNA, 20 bp, synthetic construct
  misc_feature 1..20: note = Description of Artificial Sequence: Synthetic oligonucleotide
  misc_feature 1..20: note = Target: SCN10A; (+) strand; PAM type: YTN; PAM sequence: TTC
  source 1..20: mol_type = other DNA
taaattaacaaggacttagt

SEQ ID NO: 66968 - DNA, 20 bp, synthetic construct
  misc_feature 1..20: note = Description of Artificial Sequence: Synthetic oligonucleotide
  misc_feature 1..20: note = Target: SCN10A; (+) strand; PAM type: YTN; PAM sequence: CTA
  source 1..20: mol_type = other DNA
aattaacaaggacttagtta

SEQ ID NO: 66969 - DNA, 20 bp, synthetic construct
  misc_feature 1..20: note = Description of Artificial Sequence: Synthetic oligonucleotide
  misc_feature 1..20: note = Target: SCN10A; (+) strand; PAM type: YTN; PAM sequence: TTA
  source 1..20: mol_type = other DNA
acaaggacttagttaaattg

SEQ ID NO: 66970 - DNA, 20 bp, synthetic construct
  misc_feature 1..20: note = Description of Artificial Sequence: Synthetic oligonucleotide
  misc_feature 1..20: note = Target: SCN10A; (+) strand; PAM type: YTN; PAM sequence: CTT
  source 1..20: mol_type = other DNA
agttaaattgactgattaat

SEQ ID NO: 66971 - DNA, 20 bp, synthetic construct
  misc_feature 1..20: note = Description of Artificial Sequence: Synthetic oligonucleotide
  misc_feature 1..20: note = Target: SCN10A; (+) strand; PAM type: YTN; PAM sequence: TTA
  source 1..20: mol_type = other DNA
gttaaattgactgattaatg

SEQ ID NO: 66972 - DNA, 20 bp, synthetic construct
  misc_feature 1..20: note = Description of Artificial Sequence: Synthetic oligonucleotide
  misc_feature 1..20: note = Target: SCN10A; (+) strand; PAM type: YTN; PAM sequence: TTA
  source 1..20: mol_type = other DNA
aattgactgattaatggact

SEQ ID NO: 66973 - DNA, 20 bp, synthetic construct
  misc_feature 1..20: note = Description of Artificial Sequence: Synthetic oligonucleotide
  misc_feature 1..20: note = Target: SCN10A; (+) strand; PAM type: YTN; PAM sequence: TTG
  source 1..20: mol_type = other DNA
actgattaatggacttaaat

SEQ ID NO: 66974 - DNA, 20 bp, synthetic construct
  misc_feature 1..20: note = Description of Artificial Sequence: Synthetic oligonucleotide
  misc_feature 1..20: note = Target: SCN10A; (+) strand; PAM type: YTN; PAM sequence: CTG
  source 1..20: mol_type = other DNA
attaatggacttaaattgtc

SEQ ID NO: 66975 - DNA, 20 bp, synthetic construct
  misc_feature 1..20: note = Description of Artificial Sequence: Synthetic oligonucleotide
  misc_feature 1..20: note = Target: SCN10A; (+) strand; PAM type: YTN; PAM sequence: TTA
  source 1..20: mol_type = other DNA
atggacttaaattgtctacc

SEQ ID NO: 66976 - DNA, 20 bp, synthetic construct
  misc_feature 1..20: note = Description of Artificial Sequence: Synthetic oligonucleotide
  misc_feature 1..20: note = Target: SCN10A; (+) strand; PAM type: YTN; PAM sequence: CTT
  source 1..20: mol_type = other DNA
aaattgtctaccaatattca

SEQ ID NO: 66977 - DNA, 20 bp, synthetic construct
  misc_feature 1..20: note = Description of Artificial Sequence: Synthetic oligonucleotide
  misc_feature 1..20: note = Target: SCN10A; (+) strand; PAM type: YTN; PAM sequence: TTA
  source 1..20: mol_type = other DNA
aattgtctaccaatattcag

SEQ ID NO: 66978 - DNA, 20 bp, synthetic construct
  misc_feature 1..20: note = Description of Artificial Sequence: Synthetic oligonucleotide
  misc_feature 1..20: note = Target: SCN10A; (+) strand; PAM type: YTN; PAM sequence: TTG
  source 1..20: mol_type = other DNA
tctaccaatattcagcataa

SEQ ID NO: 66979 - DNA, 20 bp, synthetic construct
  misc_feature 1..20: note = Description of Artificial Sequence: Synthetic oligonucleotide
  misc_feature 1..20: note = Target: SCN10A; (+) strand; PAM type: YTN; PAM sequence: CTA
  source 1..20: mol_type = other DNA
ccaatattcagcataatgtg

SEQ ID NO: 66980 - DNA, 20 bp, synthetic construct
  misc_feature 1..20: note = Description of Artificial Sequence: Synthetic oligonucleotide
  misc_feature 1..20: note = Target: SCN10A; (+) strand; PAM type: YTN; PAM sequence: TTC
  source 1..20: mol_type = other DNA
agcataatgtgggcttgaac

SEQ ID NO: 66981 - DNA, 20 bp, synthetic construct
  misc_feature 1..20: note = Description of Artificial Sequence: Synthetic oligonucleotide
  misc_feature 1..20: note = Target: SCN10A; (+) strand; PAM type: YTN; PAM sequence: CTT
  source 1..20: mol_type = other DNA
gaacaagaaattaaattaca

SEQ ID NO: 66982 - DNA, 20 bp, synthetic construct
  misc_feature 1..20: note = Description of Artificial Sequence: Synthetic oligonucleotide
  misc_feature 1..20: note = Target: SCN10A; (+) strand; PAM type: YTN; PAM sequence: TTG
  source 1..20: mol_type = other DNA
aacaagaaattaaattacaa

SEQ ID NO: 66983 - DNA, 20 bp, synthetic construct
  misc_feature 1..20: note = Description of Artificial Sequence: Synthetic oligonucleotide
  misc_feature 1..20: note = Target: SCN10A; (+) strand; PAM type: YTN; PAM sequence: TTA
  source 1..20: mol_type = other DNA
aattacaactgtgtaagtta

SEQ ID NO: 66984 - DNA, 20 bp, synthetic construct
  misc_feature 1..20: note = Description of Artificial Sequence: Synthetic oligonucleotide
  misc_feature 1..20: note = Target: SCN10A; (+) strand; PAM type: YTN; PAM sequence: TTA
  source 1..20: mol_type = other DNA
caactgtgtaagttacaacc

SEQ ID NO: 66985 - DNA, 20 bp, synthetic construct
  misc_feature 1..20: note = Description of Artificial Sequence: Synthetic oligonucleotide
  misc_feature 1..20: note = Target: SCN10A; (+) strand; PAM type: YTN; PAM sequence: CTG
  source 1..20: mol_type = other DNA
tgtaagttacaaccatgaaa

SEQ ID NO: 66986 - DNA, 20 bp, synthetic construct
  misc_feature 1..20: note = Description of Artificial Sequence: Synthetic oligonucleotide
  misc_feature 1..20: note = Target: SCN10A; (+) strand; PAM type: YTN; PAM sequence: TTA
  source 1..20: mol_type = other DNA
caaccatgaaaaatataatt

SEQ ID NO: 66987 - DNA, 20 bp, synthetic construct
  misc_feature 1..20: note = Description of Artificial Sequence: Synthetic oligonucleotide
  misc_feature 1..20: note = Target: SCN10A; (+) strand; PAM type: YTN; PAM sequence: TTA
  source 1..20: mol_type = other DNA
tgaaaccatgaaaaggataa

SEQ ID NO: 66988 - DNA, 20 bp, synthetic construct
  misc_feature 1..20: note = Description of Artificial Sequence: Synthetic oligonucleotide
  misc_feature 1..20: note = Target: SCN10A; (+) strand; PAM type: YTN; PAM sequence: TTT
  source 1..20: mol_type = other DNA
tgccatgttggaaaattaag

SEQ ID NO: 66989 - DNA, 20 bp, synthetic construct
  misc_feature 1..20: note = Description of Artificial Sequence: Synthetic oligonucleotide
  misc_feature 1..20: note = Target: SCN10A; (+) strand; PAM type: YTN; PAM sequence: TTT
  source 1..20: mol_type = other DNA
gccatgttggaaaattaagg

SEQ ID NO: 66990 - DNA, 20 bp, synthetic construct
  misc_feature 1..20: note = Description of Artificial Sequence: Synthetic oligonucleotide
  misc_feature 1..20: note = Target: SCN10A; (+) strand; PAM type: YTN; PAM sequence: TTG
  source 1..20: mol_type = other DNA
ccatgttggaaaattaagga

SEQ ID NO: 66991 - DNA, 20 bp, synthetic construct
  misc_feature 1..20: note = Description of Artificial Sequence: Synthetic oligonucleotide
  misc_feature 1..20: note = Target: SCN10A; (+) strand; PAM type: YTN; PAM sequence: TTG
  source 1..20: mol_type = other DNA
gaaaattaaggatggttaaa

SEQ ID NO: 66992 - DNA, 20 bp, synthetic construct
  misc_feature 1..20: note = Description of Artificial Sequence: Synthetic oligonucleotide
  misc_feature 1..20: note = Target: SCN10A; (+) strand; PAM type: YTN; PAM sequence: TTA
  source 1..20: mol_type = other DNA
aggatggttaaatttcttgt

SEQ ID NO: 66993 - DNA, 20 bp, synthetic construct
  misc_feature 1..20: note = Description of Artificial Sequence: Synthetic oligonucleotide
  misc_feature 1..20: note = Target: SCN10A; (+) strand; PAM type: YTN; PAM sequence: TTA
  source 1..20: mol_type = other DNA
aatttcttgtacaccggaga

SEQ ID NO: 66994 - DNA, 20 bp, synthetic construct
  misc_feature 1..20: note = Description of Artificial Sequence: Synthetic oligonucleotide
  misc_feature 1..20: note = Target: SCN10A; (+) strand; PAM type: YTN; PAM sequence: TTT
  source 1..20: mol_type = other DNA
cttgtacaccggagagctgg

SEQ ID NO: 66995 - DNA, 20 bp, synthetic construct
  misc_feature 1..20: note = Description of Artificial Sequence: Synthetic oligonucleotide
  misc_feature 1..20: note = Target: SCN10A; (+) strand; PAM type: YTN; PAM sequence: TTC
  source 1..20: mol_type = other DNA
ttgtacaccggagagctggc

SEQ ID NO: 66996 - DNA, 20 bp, synthetic construct
  misc_feature 1..20: note = Description of Artificial Sequence: Synthetic oligonucleotide
  misc_feature 1..20: note = Target: SCN10A; (+) strand; PAM type: YTN; PAM sequence: CTT
  source 1..20: mol_type = other DNA
gtacaccggagagctggcct

SEQ ID NO: 66997 - DNA, 20 bp, synthetic construct
  misc_feature 1..20: note = Description of Artificial Sequence: Synthetic oligonucleotide
  misc_feature 1..20: note = Target: SCN10A; (+) strand; PAM type: YTN; PAM sequence: TTG
  source 1..20: mol_type = other DNA
tacaccggagagctggcctg

SEQ ID NO: 66998 - DNA, 20 bp, synthetic construct
  misc_feature 1..20: note = Description of Artificial Sequence: Synthetic oligonucleotide
  misc_feature 1..20: note = Target: SCN10A; (+) strand; PAM type: YTN; PAM sequence: CTG
  source 1..20: mol_type = other DNA
gcctgaaattctctgatgcc

SEQ ID NO: 66999 - DNA, 20 bp, synthetic construct
  misc_feature 1..20: note = Description of Artificial Sequence: Synthetic oligonucleotide
  misc_feature 1..20: note = Target: SCN10A; (+) strand; PAM type: YTN; PAM sequence: CTG
  source 1..20: mol_type = other DNA
aaattctctgatgcctgcca

SEQ ID NO: 67000 - DNA, 20 bp, synthetic construct
  misc_feature 1..20: note = Description of Artificial Sequence: Synthetic oligonucleotide
  misc_feature 1..20: note = Target: SCN10A; (+) strand; PAM type: YTN; PAM sequence: TTC
  source 1..20: mol_type = other DNA
tctgatgcctgccagatcac

SEQ ID NO: 67001 - DNA, 20 bp, synthetic construct
  misc_feature 1..20: note = Description of Artificial Sequence: Synthetic oligonucleotide
  misc_feature 1..20: note = Target: SCN10A; (+) strand; PAM type: YTN; PAM sequence: CTC
  source 1..20: mol_type = other DNA
tgatgcctgccagatcactt

SEQ ID NO: 67002 - DNA, 20 bp, synthetic construct
  misc_feature 1..20: note = Description of Artificial Sequence: Synthetic oligonucleotide
  misc_feature 1..20: note = Target: SCN10A; (+) strand; PAM type: YTN; PAM sequence: CTG
  source 1..20: mol_type = other DNA
atgcctgccagatcactttt

SEQ ID NO: 67003 - DNA, 20 bp, synthetic construct
  misc_feature 1..20: note = Description of Artificial Sequence: Synthetic oligonucleotide
  misc_feature 1..20: note = Target: SCN10A; (+) strand; PAM type: YTN; PAM sequence: CTG
  source 1..20: mol_type = other DNA
ccagatcacttttaaaaatc

SEQ ID NO: 67004 - DNA, 20 bp, synthetic construct
  misc_feature 1..20: note = Description of Artificial Sequence: Synthetic oligonucleotide
  misc_feature 1..20: note = Target: SCN10A; (+) strand; PAM type: YTN; PAM sequence: CTT
  source 1..20: mol_type = other DNA
ttaaaaatctagttttgtga

SEQ ID NO: 67005 - DNA, 20 bp, synthetic construct
  misc_feature 1..20: note = Description of Artificial Sequence: Synthetic oligonucleotide
  misc_feature 1..20: note = Target: SCN10A; (+) strand; PAM type: YTN; PAM sequence: TTT
  source 1..20: mol_type = other DNA
taaaaatctagttttgtgat

SEQ ID NO: 67006 - DNA, 20 bp, synthetic construct
  misc_feature 1..20: note = Description of Artificial Sequence: Synthetic oligonucleotide
  misc_feature 1..20: note = Target: SCN10A; (+) strand; PAM type: YTN; PAM sequence: TTT
  source 1..20: mol_type = other DNA
aaaaatctagttttgtgatg

SEQ ID NO: 67007 - DNA, 20 bp, synthetic construct
  misc_feature 1..20: note = Description of Artificial Sequence: Synthetic oligonucleotide
  misc_feature 1..20: note = Target: SCN10A; (+) strand; PAM type: YTN; PAM sequence: TTA
  source 1..20: mol_type = other DNA
aaaatctagttttgtgatgc

SEQ ID NO: 67008 - DNA, 20 bp, synthetic construct
  misc_feature 1..20: note = Description of Artificial Sequence: Synthetic oligonucleotide
  misc_feature 1..20: note = Target: SCN10A; (+) strand; PAM type: YTN; PAM sequence: CTA
  source 1..20: mol_type = other DNA
gttttgtgatgcatgcaaag

SEQ ID NO: 67009 - DNA, 20 bp, synthetic construct
  misc_feature 1..20: note = Description of Artificial Sequence: Synthetic oligonucleotide
  misc_feature 1..20: note = Target: SCN10A; (+) strand; PAM type: YTN; PAM sequence: TTT
  source 1..20: mol_type = other DNA
tgtgatgcatgcaaagcaga

SEQ ID NO: 67010 - DNA, 20 bp, synthetic construct
  misc_feature 1..20: note = Description of Artificial Sequence: Synthetic oligonucleotide
  misc_feature 1..20: note = Target: SCN10A; (+) strand; PAM type: YTN; PAM sequence: TTT
  source 1..20: mol_type = other DNA
gtgatgcatgcaaagcagat

SEQ ID NO: 67011 - DNA, 20 bp, synthetic construct
  misc_feature 1..20: note = Description of Artificial Sequence: Synthetic oligonucleotide
  misc_feature 1..20: note = Target: SCN10A; (+) strand; PAM type: YTN; PAM sequence: TTG
  source 1..20: mol_type = other DNA
tgatgcatgcaaagcagatg

SEQ ID NO: 67012 - DNA, 20 bp, synthetic construct
  misc_feature 1..20: note = Description of Artificial Sequence: Synthetic oligonucleotide
  misc_feature 1..20: note = Target: SCN10A; (+) strand; PAM type: YTN; PAM sequence: CTA
  source 1..20: mol_type = other DNA
atttgaacaagagatgagct

SEQ ID NO: 67013 - DNA, 20 bp, synthetic construct
  misc_feature 1..20: note = Description of Artificial Sequence: Synthetic oligonucleotide
  misc_feature 1..20: note = Target: SCN10A; (+) strand; PAM type: YTN; PAM sequence: TTT
  source 1..20: mol_type = other DNA
gaacaagagatgagctagga

SEQ ID NO: 67014 - DNA, 20 bp, synthetic construct
  misc_feature 1..20: note = Description of Artificial Sequence: Synthetic oligonucleotide
  misc_feature 1..20: note = Target: SCN10A; (+) strand; PAM type: YTN; PAM sequence: TTG
  source 1..20: mol_type = other DNA
aacaagagatgagctaggat

SEQ ID NO: 67015 - DNA, 20 bp, synthetic construct
  misc_feature 1..20: note = Description of Artificial Sequence: Synthetic oligonucleotide
  misc_feature 1..20: note = Target: SCN10A; (+) strand; PAM type: YTN; PAM sequence: CTA
  source 1..20: mol_type = other DNA
ggatattttattcatcaaat

SEQ ID NO: 67016 - DNA, 20 bp, synthetic construct
  misc_feature 1..20: note = Description of Artificial Sequence: Synthetic oligonucleotide
  misc_feature 1..20: note = Target: SCN10A; (+) strand; PAM type: YTN; PAM sequence: TTT
  source 1..20: mol_type = other DNA
tattcatcaaattattttgt

SEQ ID NO: 67017 - DNA, 20 bp, synthetic construct
  misc_feature 1..20: note = Description of Artificial Sequence: Synthetic oligonucleotide
  misc_feature 1..20: note = Target: SCN10A; (+) strand; PAM type: YTN; PAM sequence: TTT
  source 1..20: mol_type = other DNA
attcatcaaattattttgtt

SEQ ID NO: 67018 - DNA, 20 bp, synthetic construct
  misc_feature 1..20: note = Description of Artificial Sequence: Synthetic oligonucleotide
  misc_feature 1..20: note = Target: SCN10A; (+) strand; PAM type: YTN; PAM sequence: TTA
  source 1..20: mol_type = other DNA
ttcatcaaattattttgttt

SEQ ID NO: 67019 - DNA, 20 bp, synthetic construct
  misc_feature 1..20: note = Description of Artificial Sequence: Synthetic oligonucleotide
  misc_feature 1..20: note = Target: SCN10A; (+) strand; PAM type: YTN; PAM sequence: TTC
  source 1..20: mol_type = other DNA
atcaaattattttgtttttg

SEQ ID NO: 67020 - DNA, 20 bp, synthetic construct
  misc_feature 1..20: note = Description of Artificial Sequence: Synthetic oligonucleotide
  misc_feature 1..20: note = Target: SCN10A; (+) strand; PAM type: YTN; PAM sequence: TTA
  source 1..20: mol_type = other DNA
ttttgtttttgaaaaattat

SEQ ID NO: 67021 - DNA, 20 bp, synthetic construct
  misc_feature 1..20: note = Description of Artificial Sequence: Synthetic oligonucleotide
  misc_feature 1..20: note = Target: SCN10A; (+) strand; PAM type: YTN; PAM sequence: TTT
  source 1..20: mol_type = other DNA
tgtttttgaaaaattatgca

SEQ ID NO: 67022 - DNA, 20 bp, synthetic construct
  misc_feature 1..20: note = Description of Artificial Sequence: Synthetic oligonucleotide
  misc_feature 1..20: note = Target: SCN10A; (+) strand; PAM type: YTN; PAM sequence: TTT
  source 1..20: mol_type = other DNA
gtttttgaaaaattatgcat

SEQ ID NO: 67023 - DNA, 20 bp, synthetic construct
  misc_feature 1..20: note = Description of Artificial Sequence: Synthetic oligonucleotide
  misc_feature 1..20: note = Target: SCN10A; (+) strand; PAM type: YTN; PAM sequence: TTG
  source 1..20: mol_type = other DNA
tttttgaaaaattatgcatc

SEQ ID NO: 67024 - DNA, 20 bp, synthetic construct
  misc_feature 1..20: note = Description of Artificial Sequence: Synthetic oligonucleotide
  misc_feature 1..20: note = Target: SCN10A; (+) strand; PAM type: YTN; PAM sequence: TTT
  source 1..20: mol_type = other DNA
ttgaaaaattatgcatctaa

SEQ ID NO: 67025 - DNA, 20 bp, synthetic construct
  misc_feature 1..20: note = Description of Artificial Sequence: Synthetic oligonucleotide
  misc_feature 1..20: note = Target: SCN10A; (+) strand; PAM type: YTN; PAM sequence: TTT
  source 1..20: mol_type = other DNA
tgaaaaattatgcatctaaa

SEQ ID NO: 67026 - DNA, 20 bp, synthetic construct
  misc_feature 1..20: note = Description of Artificial Sequence: Synthetic oligonucleotide
  misc_feature 1..20: note = Target: SCN10A; (+) strand; PAM type: YTN; PAM sequence: TTT
  source 1..20: mol_type = other DNA
gaaaaattatgcatctaaaa

SEQ ID NO: 67027 - DNA, 20 bp, synthetic construct
  misc_feature 1..20: note = Description of Artificial Sequence: Synthetic oligonucleotide
  misc_feature 1..20: note = Target: SCN10A; (+) strand; PAM type: YTN; PAM sequence: TTG
  source 1..20: mol_type = other DNA
aaaaattatgcatctaaaaa

SEQ ID NO: 67028 - DNA, 20 bp, synthetic construct
  misc_feature 1..20: note = Description of Artificial Sequence: Synthetic oligonucleotide
  misc_feature 1..20: note = Target: SCN10A; (+) strand; PAM type: YTN; PAM sequence: TTA
  source 1..20: mol_type = other DNA
tgcatctaaaaaaccacatt

SEQ ID NO: 67029 - DNA, 20 bp, synthetic construct
  misc_feature 1..20: note = Description of Artificial Sequence: Synthetic oligonucleotide
  misc_feature 1..20: note = Target: SCN10A; (+) strand; PAM type: YTN; PAM sequence: CTA
  source 1..20: mol_type = other DNA
aaaaaccacattgataaaag

SEQ ID NO: 67030 - DNA, 20 bp, synthetic construct
  misc_feature 1..20: note = Description of Artificial Sequence: Synthetic oligonucleotide
  misc_feature 1..20: note = Target: SCN10A; (+) strand; PAM type: YTN; PAM sequence: TTG
  source 1..20: mol_type = other DNA
ataaaagatggtggggccta

SEQ ID NO: 67031 - DNA, 20 bp, synthetic construct
  misc_feature 1..20: note = Description of Artificial Sequence: Synthetic oligonucleotide
  misc_feature 1..20: note = Target: SCN10A; (+) strand; PAM type: YTN; PAM sequence: CTA
  source 1..20: mol_type = other DNA
agacataagaatgaggagta

SEQ ID NO: 67032 - DNA, 20 bp, synthetic construct
  misc_feature 1..20: note = Description of Artificial Sequence: Synthetic oligonucleotide
  misc_feature 1..20: note = Target: SCN10A; (+) strand; PAM type: YTN; PAM sequence: TTA
  source 1..20: mol_type = other DNA
ggaattccagtacacagaga

SEQ ID NO: 67033 - DNA, 20 bp, synthetic construct
  misc_feature 1..20: note = Description of Artificial Sequence: Synthetic oligonucleotide
  misc_feature 1..20: note = Target: SCN10A; (+) strand; PAM type: YTN; PAM sequence: TTC
  source 1..20: mol_type = other DNA
cagtacacagagatggacgc

SEQ ID NO: 67034 - DNA, 20 bp, synthetic construct
  misc_feature 1..20: note = Description of Artificial Sequence: Synthetic oligonucleotide
  misc_feature 1..20: note = Target: SCN10A; (+) strand; PAM type: YTN; PAM sequence: CTT
  source 1..20: mol_type = other DNA
tgacacgagttagagacatt

SEQ ID NO: 67035 - DNA, 20 bp, synthetic construct
  misc_feature 1..20: note = Description of Artificial Sequence: Synthetic oligonucleotide
  misc_feature 1..20: note = Target: SCN10A; (+) strand; PAM type: YTN; PAM sequence: TTT
  source 1..20: mol_type = other DNA
gacacgagttagagacattg

SEQ ID NO: 67036 - DNA, 20 bp, synthetic construct
  misc_feature 1..20: note = Description of Artificial Sequence: Synthetic oligonucleotide
  misc_feature 1..20: note = Target: SCN10A; (+) strand; PAM type: YTN; PAM sequence: TTG
  source 1..20: mol_type = other DNA
acacgagttagagacattgc

SEQ ID NO: 67037 - DNA, 20 bp, synthetic construct
  misc_feature 1..20: note = Description of Artificial Sequence: Synthetic oligonucleotide
  misc_feature 1..20: note = Target: SCN10A; (+) strand; PAM type: YTN; PAM sequence: TTA
  source 1..20: mol_type = other DNA
gagacattgcttctgctgct

SEQ ID NO: 67038 - DNA, 20 bp, synthetic construct
  misc_feature 1..20: note = Description of Artificial Sequence: Synthetic oligonucleotide
  misc_feature 1..20: note = Target: SCN10A; (+) strand; PAM type: YTN; PAM sequence: TTG
  source 1..20: mol_type = other DNA
cttctgctgctcacatggga

SEQ ID NO: 67039 - DNA, 20 bp, synthetic construct
  misc_feature 1..20: note = Description of Artificial Sequence: Synthetic oligonucleotide
  misc_feature 1..20: note = Target: SCN10A; (+) strand; PAM type: YTN; PAM sequence: CTT
  source 1..20: mol_type = other DNA
ctgctgctcacatgggaatt

SEQ ID NO: 67040 - DNA, 20 bp, synthetic construct
  misc_feature 1..20: note = Description of Artificial Sequence: Synthetic oligonucleotide
  misc_feature 1..20: note = Target: SCN10A; (+) strand; PAM type: YTN; PAM sequence: TTC
  source 1..20: mol_type = other DNA
tgctgctcacatgggaattc

SEQ ID NO: 67041 - DNA, 20 bp, synthetic construct
  misc_feature 1..20: note = Description of Artificial Sequence: Synthetic oligonucleotide
  misc_feature 1..20: note = Target: SCN10A; (+) strand; PAM type: YTN; PAM sequence: CTG
  source 1..20: mol_type = other DNA
ctgctcacatgggaattcat

SEQ ID NO: 67042 - DNA, 20 bp, synthetic construct
  misc_feature 1..20: note = Description of Artificial Sequence: Synthetic oligonucleotide
  misc_feature 1..20: note = Target: SCN10A; (+) strand; PAM type: YTN; PAM sequence: CTG
  source 1..20: mol_type = other DNA
ctcacatgggaattcatcat

SEQ ID NO: 67043 - DNA, 20 bp, synthetic construct
  misc_feature 1..20: note = Description of Artificial Sequence: Synthetic oligonucleotide
  misc_feature 1..20: note = Target: SCN10A; (+) strand; PAM type: YTN; PAM sequence: CTC
  source 1..20: mol_type = other DNA
acatgggaattcatcatgac

SEQ ID NO: 67044 - DNA, 20 bp, synthetic construct
  misc_feature 1..20: note = Description of Artificial Sequence: Synthetic oligonucleotide
  misc_feature 1..20: note = Target: SCN10A; (+) strand; PAM type: YTN; PAM sequence: TTC
  source 1..20: mol_type = other DNA
atcatgacacagtggatgaa

SEQ ID NO: 67045 - DNA, 20 bp, synthetic construct
  misc_feature 1..20: note = Description of Artificial Sequence: Synthetic oligonucleotide
  misc_feature 1..20: note = Target: SCN10A; (+) strand; PAM type: YTN; PAM sequence: CTT
  source 1..20: mol_type = other DNA
accctcaaggacggaggtta

SEQ ID NO: 67046 - DNA, 20 bp, synthetic construct
  misc_feature 1..20: note = Description of Artificial Sequence: Synthetic oligonucleotide
  misc_feature 1..20: note = Target: SCN10A; (+) strand; PAM type: YTN; PAM sequence: TTA
  source 1..20: mol_type = other DNA
ccctcaaggacggaggttat

SEQ ID NO: 67047 - DNA, 20 bp, synthetic construct
  misc_feature 1..20: note = Description of Artificial Sequence: Synthetic oligonucleotide
  misc_feature 1..20: note = Target: SCN10A; (+) strand; PAM type: YTN; PAM sequence: CTC
  source 1..20: mol_type = other DNA
aaggacggaggttatgatac

SEQ ID NO: 67048 - DNA, 20 bp, synthetic construct
  misc_feature 1..20: note = Description of Artificial Sequence: Synthetic oligonucleotide
  misc_feature 1..20: note = Target: SCN10A; (+) strand; PAM type: YTN; PAM sequence: TTA
  source 1..20: mol_type = other DNA
tgatactgacaacactcatt

SEQ ID NO: 67049 - DNA, 20 bp, synthetic construct
  misc_feature 1..20: note = Description of Artificial Sequence: Synthetic oligonucleotide
  misc_feature 1..20: note = Target: SCN10A; (+) strand; PAM type: YTN; PAM sequence: CTG
  source 1..20: mol_type = other DNA
acaacactcattgccctttg

SEQ ID NO: 67050 - DNA, 20 bp, synthetic construct
  misc_feature 1..20: note = Description of Artificial Sequence: Synthetic oligonucleotide
  misc_feature 1..20: note = Target: SCN10A; (+) strand; PAM type: YTN; PAM sequence: CTC
  source 1..20: mol_type = other DNA
attgccctttgggcccggaa

SEQ ID NO: 67051 - DNA, 20 bp, synthetic construct
  misc_feature 1..20: note = Description of Artificial Sequence: Synthetic oligonucleotide
  misc_feature 1..20: note = Target: SCN10A; (+) strand; PAM type: YTN; PAM sequence: TTG
  source 1..20: mol_type = other DNA
ccctttgggcccggaaaggt

SEQ ID NO: 67052 - DNA, 20 bp, synthetic construct
  misc_feature 1..20: note = Description of Artificial Sequence: Synthetic oligonucleotide
  misc_feature 1..20: note = Target: SCN10A; (+) strand; PAM type: YTN; PAM sequence: CTT
  source 1..20: mol_type = other DNA
tgggcccggaaaggttcatc

SEQ ID NO: 67053 - DNA, 20 bp, synthetic construct
  misc_feature 1..20: note = Description of Artificial Sequence: Synthetic oligonucleotide
  misc_feature 1..20: note = Target: SCN10A; (+) strand; PAM type: YTN; PAM sequence: TTT
  source 1..20: mol_type = other DNA
gggcccggaaaggttcatct

SEQ ID NO: 67054 - DNA, 20 bp, synthetic construct
  misc_feature 1..20: note = Description of Artificial Sequence: Synthetic oligonucleotide
  misc_feature 1..20: note = Target: SCN10A; (+) strand; PAM type: YTN; PAM sequence: TTG
  source 1..20: mol_type = other DNA
ggcccggaaaggttcatcta

SEQ ID NO: 67055 - DNA, 20 bp, synthetic construct
  misc_feature 1..20: note = Description of Artificial Sequence: Synthetic oligonucleotide
  misc_feature 1..20: note = Target: SCN10A; (+) strand; PAM type: YTN; PAM sequence: TTC
  source 1..20: mol_type = other DNA
atctaagtattctgctgaca

SEQ ID NO: 67056 - DNA, 20 bp, synthetic construct
  misc_feature 1..20: note = Description of Artificial Sequence: Synthetic oligonucleotide
  misc_feature 1..20: note = Target: SCN10A; (+) strand; PAM type: YTN; PAM sequence: CTA
  source 1..20: mol_type = other DNA
agtattctgctgacaagaaa

SEQ ID NO: 67057 - DNA, 20 bp, synthetic construct
  misc_feature 1..20: note = Description of Artificial Sequence: Synthetic oligonucleotide
  misc_feature 1..20: note = Target: SCN10A; (+) strand; PAM type: YTN; PAM sequence: TTC
  source 1..20: mol_type = other DNA
tgctgacaagaaagtcttct

SEQ ID NO: 67058 - DNA, 20 bp, synthetic construct
  misc_feature 1..20: note = Description of Artificial Sequence: Synthetic oligonucleotide
  misc_feature 1..20: note = Target: SCN10A; (+) strand; PAM type: YTN; PAM sequence: CTG
  source 1..20: mol_type = other DNA
ctgacaagaaagtcttcttt

SEQ ID NO: 67059 - DNA, 20 bp, synthetic construct
  misc_feature 1..20: note = Description of Artificial Sequence: Synthetic oligonucleotide
  misc_feature 1..20: note = Target: SCN10A; (+) strand; PAM type: YTN; PAM sequence: CTG
  source 1..20: mol_type = other DNA
acaagaaagtcttcttttgt

SEQ ID NO: 67060 - DNA, 20 bp, synthetic construct
  misc_feature 1..20: note = Description of Artificial Sequence: Synthetic oligonucleotide
  misc_feature 1..20: note = Target: SCN10A; (+) strand; PAM type: YTN; PAM sequence: CTT
  source 1..20: mol_type = other DNA
cttttgtcctgcatcgaatg

SEQ ID NO: 67061 - DNA, 20 bp, synthetic construct
  misc_feature 1..20: note = Description of Artificial Sequence: Synthetic oligonucleotide
  misc_feature 1..20: note = Target: SCN10A; (+) strand; PAM type: YTN; PAM sequence: TTC
  source 1..20: mol_type = other DNA
ttttgtcctgcatcgaatgc

SEQ ID NO: 67062 - DNA, 20 bp, synthetic construct
  misc_feature 1..20: note = Description of Artificial Sequence: Synthetic oligonucleotide
  misc_feature 1..20: note = Target: SCN10A; (+) strand; PAM type: YTN; PAM sequence: CTT
  source 1..20: mol_type = other DNA
ttgtcctgcatcgaatgcct

SEQ ID NO: 67063 - DNA, 20 bp, synthetic construct
  misc_feature 1..20: note = Description of Artificial Sequence: Synthetic oligonucleotide
  misc_feature 1..20: note = Target: SCN10A; (+) strand; PAM type: YTN; PAM sequence: TTT
  source 1..20: mol_type = other DNA
tgtcctgcatcgaatgcctg

SEQ ID NO: 67064 - DNA, 20 bp, synthetic construct
  misc_feature 1..20: note = Description of Artificial Sequence: Synthetic oligonucleotide
  misc_feature 1..20: note = Target: SCN10A; (+) strand; PAM type: YTN; PAM sequence: TTT
  source 1..20: mol_type = other DNA
gtcctgcatcgaatgcctgt

SEQ ID NO: 67065 - DNA, 20 bp, synthetic construct
  misc_feature 1..20: note = Description of Artificial Sequence: Synthetic oligonucleotide
  misc_feature 1..20: note = Target: SCN10A; (+) strand; PAM type: YTN; PAM sequence: TTG
  source 1..20: mol_type = other DNA
tcctgcatcgaatgcctgtt

SEQ ID NO: 67066 - DNA, 20 bp, synthetic construct
  misc_feature 1..20: note = Description of Artificial Sequence: Synthetic oligonucleotide
  misc_feature 1..20: note = Target: SCN10A; (+) strand; PAM type: YTN; PAM sequence: CTG
  source 1..20: mol_type = other DNA
catcgaatgcctgttgagac

SEQ ID NO: 67067 - DNA, 20 bp, synthetic construct
  misc_feature 1..20: note = Description of Artificial Sequence: Synthetic oligonucleotide
  misc_feature 1..20: note = Target: SCN10A; (+) strand; PAM type: YTN; PAM sequence: CTG
  source 1..20: mol_type = other DNA
ttgagacacaaacagagtca

SEQ ID NO: 67068 - DNA, 20 bp, synthetic construct
  misc_feature 1..20: note = Description of Artificial Sequence: Synthetic oligonucleotide
  misc_feature 1..20: note = Target: SCN10A; (+) strand; PAM type: YTN; PAM sequence: TTG
  source 1..20: mol_type = other DNA
agacacaaacagagtcagga

SEQ ID NO: 67069 - DNA, 20 bp, synthetic construct
  misc_feature 1..20: note = Description of Artificial Sequence: Synthetic oligonucleotide
  misc_feature 1..20: note = Target: SCN10A; (+) strand; PAM type: YTN; PAM sequence: CTC
  source 1..20: mol_type = other DNA
ctttaacctgacatcttcat

SEQ ID NO: 67070 - DNA, 20 bp, synthetic construct
  misc_feature 1..20: note = Description of Artificial Sequence: Synthetic oligonucleotide
  misc_feature 1..20: note = Target: SCN10A; (+) strand; PAM type: YTN; PAM sequence: CTT
  source 1..20: mol_type = other DNA
taacctgacatcttcatggc

SEQ ID NO: 67071 - DNA, 20 bp, synthetic construct
  misc_feature 1..20: note = Description of Artificial Sequence: Synthetic oligonucleotide
  misc_feature 1..20: note = Target: SCN10A; (+) strand; PAM type: YTN; PAM sequence: TTT
  source 1..20: mol_type = other DNA
aacctgacatcttcatggca

SEQ ID NO: 67072 - DNA, 20 bp, synthetic construct
  misc_feature 1..20: note = Description of Artificial Sequence: Synthetic oligonucleotide
  misc_feature 1..20: note = Target: SCN10A; (+) strand; PAM type: YTN; PAM sequence: TTA
  source 1..20: mol_type = other DNA
acctgacatcttcatggcaa

SEQ ID NO: 67073 - DNA, 20 bp, synthetic construct
  misc_feature 1..20: note = Description of Artificial Sequence: Synthetic oligonucleotide
  misc_feature 1..20: note = Target: SCN10A; (+) strand; PAM type: YTN; PAM sequence: CTG
  source 1..20: mol_type = other DNA
acatcttcatggcaaagttg

SEQ ID NO: 67074 - DNA, 20 bp, synthetic construct
  misc_feature 1..20: note = Description of Artificial Sequence: Synthetic oligonucleotide
  misc_feature 1..20: note = Target: SCN10A; (+) strand; PAM type: YTN; PAM sequence: CTT
  source 1..20: mol_type = other DNA
catggcaaagttggatcatt

SEQ ID NO: 67075 - DNA, 20 bp, synthetic construct
  misc_feature 1..20: note = Description of Artificial Sequence: Synthetic oligonucleotide
  misc_feature 1..20: note = Target: SCN10A; (+) strand; PAM type: YTN; PAM sequence: TTC
  source 1..20: mol_type = other DNA
atggcaaagttggatcattc

SEQ ID NO: 67076 - DNA, 20 bp, synthetic construct
  misc_feature 1..20: note = Description of Artificial Sequence: Synthetic oligonucleotide
  misc_feature 1..20: note = Target: SCN10A; (+) strand; PAM type: YTN; PAM sequence: TTG
  source 1..20: mol_type = other DNA
gatcattcagcctcttattg

SEQ ID NO: 67077 - DNA, 20 bp, synthetic construct
  misc_feature 1..20: note = Description of Artificial Sequence: Synthetic oligonucleotide
  misc_feature 1..20: note = Target: SCN10A; (+) strand; PAM type: YTN; PAM sequence: TTC
  source 1..20: mol_type = other DNA
agcctcttattggccaatct

SEQ ID NO: 67078 - DNA, 20 bp, synthetic construct
  misc_feature 1..20: note = Description of Artificial Sequence: Synthetic oligonucleotide
  misc_feature 1..20: note = Target: SCN10A; (+) strand; PAM type: YTN; PAM sequence: CTC
  source 1..20: mol_type = other DNA
ttattggccaatctcatata

SEQ ID NO: 67079 - DNA, 20 bp, synthetic construct
  misc_feature 1..20: note = Description of Artificial Sequence: Synthetic oligonucleotide
  misc_feature 1..20: note = Target: SCN10A; (+) strand; PAM type: YTN; PAM sequence: CTT
  source 1..20: mol_type = other DNA
attggccaatctcatatata

SEQ ID NO: 67080 - DNA, 20 bp, synthetic construct
  misc_feature 1..20: note = Description of Artificial Sequence: Synthetic oligonucleotide
  misc_feature 1..20: note = Target: SCN10A; (+) strand; PAM type: YTN; PAM sequence: TTA
  source 1..20: mol_type = other DNA
ttggccaatctcatatatag

SEQ ID NO: 67081 - DNA, 20 bp, synthetic construct
  misc_feature 1..20: note = Description of Artificial Sequence: Synthetic oligonucleotide
  misc_feature 1..20: note = Target: SCN10A; (+) strand; PAM type: YTN; PAM sequence: TTG
  source 1..20: mol_type = other DNA
gccaatctcatatatagtca

SEQ ID NO: 67082 - DNA, 20 bp, synthetic construct
  misc_feature 1..20: note = Description of Artificial Sequence: Synthetic oligonucleotide
  misc_feature 1..20: note = Target: SCN10A; (+) strand; PAM type: YTN; PAM sequence: CTC
  source 1..20: mol_type = other DNA
atatatagtcatatgtcact

SEQ ID NO: 67083 - DNA, 20 bp, synthetic construct
  misc_feature 1..20: note = Description of Artificial Sequence: Synthetic oligonucleotide
  misc_feature 1..20: note = Target: SCN10A; (+) strand; PAM type: YTN; PAM sequence: CTT
  source 1..20: mol_type = other DNA
acagatagagatatgttctg

SEQ ID NO: 67084 - DNA, 20 bp, synthetic construct
  misc_feature 1..20: note = Description of Artificial Sequence: Synthetic oligonucleotide
  misc_feature 1..20: note = Target: SCN10A; (+) strand; PAM type: YTN; PAM sequence: TTA
  source 1..20: mol_type = other DNA
cagatagagatatgttctga

SEQ ID NO: 67085 - DNA, 20 bp, synthetic construct
  misc_feature 1..20: note = Description of Artificial Sequence: Synthetic oligonucleotide
  misc_feature 1..20: note = Target: SCN10A; (+) strand; PAM type: YTN; PAM sequence: TTC
  source 1..20: mol_type = other DNA
tgacaaatacatcattaggt

SEQ ID NO: 67086 - DNA, 20 bp, synthetic construct
  misc_feature 1..20: note = Description of Artificial Sequence: Synthetic oligonucleotide
  misc_feature 1..20: note = Target: SCN10A; (+) strand; PAM type: YTN; PAM sequence: CTG
  source 1..20: mol_type = other DNA
acaaatacatcattaggtga

SEQ ID NO: 67087 - DNA, 20 bp, synthetic construct
  misc_feature 1..20: note = Description of Artificial Sequence: Synthetic oligonucleotide
  misc_feature 1..20: note = Target: SCN10A; (+) strand; PAM type: YTN; PAM sequence: TTA
  source 1..20: mol_type = other DNA
ggtgatttcatcattctgtg

SEQ ID NO: 67088 - DNA, 20 bp, synthetic construct
  misc_feature 1..20: note = Description of Artificial Sequence: Synthetic oligonucleotide
  misc_feature 1..20: note = Target: SCN10A; (+) strand; PAM type: YTN; PAM sequence: TTT
  source 1..20: mol_type = other DNA
catcattctgtgaatatcct

SEQ ID NO: 67089 - DNA, 20 bp, synthetic construct
  misc_feature 1..20: note = Description of Artificial Sequence: Synthetic oligonucleotide
  misc_feature 1..20: note = Target: SCN10A; (+) strand; PAM type: YTN; PAM sequence: TTC
  source 1..20: mol_type = other DNA
atcattctgtgaatatccta

SEQ ID NO: 67090 - DNA, 20 bp, synthetic construct
  misc_feature 1..20: note = Description of Artificial Sequence: Synthetic oligonucleotide
  misc_feature 1..20: note = Target: SCN10A; (+) strand; PAM type: YTN; PAM sequence: TTC
  source 1..20: mol_type = other DNA
tgtgaatatcctacattgta

SEQ ID NO: 67091 - DNA, 20 bp, synthetic construct
  misc_feature 1..20: note = Description of Artificial Sequence: Synthetic oligonucleotide
  misc_feature 1..20: note = Target: SCN10A; (+) strand; PAM type: YTN; PAM sequence: CTG
  source 1..20: mol_type = other DNA
tgaatatcctacattgtatt

SEQ ID NO: 67092 - DNA, 20 bp, synthetic construct
  misc_feature 1..20: note = Description of Artificial Sequence: Synthetic oligonucleotide
  misc_feature 1..20: note = Target: SCN10A; (+) strand; PAM type: YTN; PAM sequence: CTA
  source 1..20: mol_type = other DNA
cattgtatttacacaaacaa

SEQ ID NO: 67093 - DNA, 20 bp, synthetic construct
  misc_feature 1..20: note = Description of Artificial Sequence: Synthetic oligonucleotide
  misc_feature 1..20: note = Target: SCN10A; (+) strand; PAM type: YTN; PAM sequence: TTG
  source 1..20: mol_type = other DNA
tatttacacaaacaaatgct

SEQ ID NO: 67094 - DNA, 20 bp, synthetic construct
  misc_feature 1..20: note = Description of Artificial Sequence: Synthetic oligonucleotide
  misc_feature 1..20: note = Target: SCN10A; (+) strand; PAM type: YTN; PAM sequence: TTT
  source 1..20: mol_type = other DNA
acacaaacaaatgctatagc

SEQ ID NO: 67095 - DNA, 20 bp, synthetic construct
  misc_feature 1..20: note = Description of Artificial Sequence: Synthetic oligonucleotide
  misc_feature 1..20: note = Target: SCN10A; (+) strand; PAM type: YTN; PAM sequence: TTA
  source 1..20: mol_type = other DNA
cacaaacaaatgctatagcc

SEQ ID NO: 67096 - DNA, 20 bp, synthetic construct
  misc_feature 1..20: note = Description of Artificial Sequence: Synthetic oligonucleotide
  misc_feature 1..20: note = Target: SCN10A; (+) strand; PAM type: YTN; PAM sequence: CTA
  source 1..20: mol_type = other DNA
tagccttctatacatctagg

SEQ ID NO: 67097 - DNA, 20 bp, synthetic construct
  misc_feature 1..20: note = Description of Artificial Sequence: Synthetic oligonucleotide
  misc_feature 1..20: note = Target: SCN10A; (+) strand; PAM type: YTN; PAM sequence: CTT
  source 1..20: mol_type = other DNA
ctatacatctaggctaaata

SEQ ID NO: 67098 - DNA, 20 bp, synthetic construct
  misc_feature 1..20: note = Description of Artificial Sequence: Synthetic oligonucleotide
  misc_feature 1..20: note = Target: SCN10A; (+) strand; PAM type: YTN; PAM sequence: TTC
  source 1..20: mol_type = other DNA
tatacatctaggctaaatag

SEQ ID NO: 67099 - DNA, 20 bp, synthetic construct
  misc_feature 1..20: note = Description of Artificial Sequence: Synthetic oligonucleotide
  misc_feature 1..20: note = Target: SCN10A; (+) strand; PAM type: YTN; PAM sequence: CTA
  source 1..20: mol_type = other DNA
tacatctaggctaaatagtg

SEQ ID NO: 67100 - DNA, 20 bp, synthetic construct
  misc_feature 1..20: note = Description of Artificial Sequence: Synthetic oligonucleotide
  misc_feature 1..20: note = Target: SCN10A; (+) strand; PAM type: YTN; PAM sequence: CTA
  source 1..20: mol_type = other DNA
ggctaaatagtgtggcctat

SEQ ID NO: 67101 - DNA, 20 bp, synthetic construct
  misc_feature 1..20: note = Description of Artificial Sequence: Synthetic oligonucleotide
  misc_feature 1..20: note = Target: SCN10A; (+) strand; PAM type: YTN; PAM sequence: CTA
  source 1..20: mol_type = other DNA
aatagtgtggcctattgctc

SEQ ID NO: 67102 - DNA, 20 bp, synthetic construct
  misc_feature 1..20: note = Description of Artificial Sequence: Synthetic oligonucleotide
  misc_feature 1..20: note = Target: SCN10A; (+) strand; PAM type: YTN; PAM sequence: CTA
  source 1..20: mol_type = other DNA
ttgctcctaggctacaaatc

SEQ ID NO: 67103 - DNA, 20 bp, synthetic construct
  misc_feature 1..20: note = Description of Artificial Sequence: Synthetic oligonucleotide
  misc_feature 1..20: note = Target: SCN10A; (+) strand; PAM type: YTN; PAM sequence: TTG
  source 1..20: mol_type = other DNA
ctcctaggctacaaatctgt

SEQ ID NO: 67104 - DNA, 20 bp, synthetic construct
  misc_feature 1..20: note = Description of Artificial Sequence: Synthetic oligonucleotide
  misc_feature 1..20: note = Target: SCN10A; (+) strand; PAM type: YTN; PAM sequence: CTC
  source 1..20: mol_type = other DNA
ctaggctacaaatctgtaca

SEQ ID NO: 67105 - DNA, 20 bp, synthetic construct
  misc_feature 1..20: note = Description of Artificial Sequence: Synthetic oligonucleotide
  misc_feature 1..20: note = Target: SCN10A; (+) strand; PAM type: YTN; PAM sequence: CTA
  source 1..20: mol_type = other DNA
ggctacaaatctgtacagca

SEQ ID NO: 67106 - DNA, 20 bp, synthetic construct
  misc_feature 1..20: note = Description of Artificial Sequence: Synthetic oligonucleotide
  misc_feature 1..20: note = Target: SCN10A; (+) strand; PAM type: YTN; PAM sequence: CTA
  source 1..20: mol_type = other DNA
caaatctgtacagcatgtta

SEQ ID NO: 67107 - DNA, 20 bp, synthetic construct
  misc_feature 1..20: note = Description of Artificial Sequence: Synthetic oligonucleotide
  misc_feature 1..20: note = Target: SCN10A; (+) strand; PAM type: YTN; PAM sequence: CTG
  source 1..20: mol_type = other DNA
tacagcatgttattgctgaa

SEQ ID NO: 67108 - DNA, 20 bp, synthetic construct
  misc_feature 1..20: note = Description of Artificial Sequence: Synthetic oligonucleotide
  misc_feature 1..20: note = Target: SCN10A; (+) strand; PAM type: YTN; PAM sequence: TTA
  source 1..20: mol_type = other DNA
ttgctgaatactgtaagtat

SEQ ID NO: 67109 - DNA, 20 bp, synthetic construct
  misc_feature 1..20: note = Description of Artificial Sequence: Synthetic oligonucleotide
  misc_feature 1..20: note = Target: SCN10A; (+) strand; PAM type: YTN; PAM sequence: TTG
  source 1..20: mol_type = other DNA
ctgaatactgtaagtataaa

SEQ ID NO: 67110 - DNA, 20 bp, synthetic construct
  misc_feature 1..20: note = Description of Artificial Sequence: Synthetic oligonucleotide
  misc_feature 1..20: note = Target: SCN10A; (+) strand; PAM type: YTN; PAM sequence: CTG
  source 1..20: mol_type = other DNA
aatactgtaagtataaacag

SEQ ID NO: 67111 - DNA, 20 bp, synthetic construct
  misc_feature 1..20: note = Description of Artificial Sequence: Synthetic oligonucleotide
  misc_feature 1..20: note = Target: SCN10A; (+) strand; PAM type: YTN; PAM sequence: CTG
  source 1..20: mol_type = other DNA
taagtataaacagttaataa

SEQ ID NO: 67112 - DNA, 20 bp, synthetic construct
  misc_feature 1..20: note = Description of Artificial Sequence: Synthetic oligonucleotide
  misc_feature 1..20: note = Target: SCN10A; (+) strand; PAM type: YTN; PAM sequence: TTA
  source 1..20: mol_type = other DNA
ataaacataaagaaagttta

SEQ ID NO: 67113 - DNA, 20 bp, synthetic construct
  misc_feature 1..20: note = Description of Artificial Sequence: Synthetic oligonucleotide
  misc_feature 1..20: note = Target: SCN10A; (+) strand; PAM type: YTN; PAM sequence: TTT
  source 1..20: mol_type = other DNA
ataaagcttccaaccatgag

SEQ ID NO: 67114 - DNA, 20 bp, synthetic construct
  misc_feature 1..20: note = Description of Artificial Sequence: Synthetic oligonucleotide
  misc_feature 1..20: note = Target: SCN10A; (+) strand; PAM type: YTN; PAM sequence: TTA
  source 1..20: mol_type = other DNA
taaagcttccaaccatgagg

SEQ ID NO: 67115 - DNA, 20 bp, synthetic construct
  misc_feature 1..20: note = Description of Artificial Sequence: Synthetic oligonucleotide
  misc_feature 1..20: note = Target: SCN10A; (+) strand; PAM type: YTN; PAM sequence: CTT
  source 1..20: mol_type = other DNA
ccaaccatgaggactaagca

SEQ ID NO: 67116 - DNA, 20 bp, synthetic construct
  misc_feature 1..20: note = Description of Artificial Sequence: Synthetic oligonucleotide
  misc_feature 1..20: note = Target: SCN10A; (+) strand; PAM type: YTN; PAM sequence: TTC
  source 1..20: mol_type = other DNA
caaccatgaggactaagcaa

SEQ ID NO: 67117 - DNA, 20 bp, synthetic construct
  misc_feature 1..20: note = Description of Artificial Sequence: Synthetic oligonucleotide
  misc_feature 1..20: note = Target: SCN10A; (+) strand; PAM type: YTN; PAM sequence: CTA
  source 1..20: mol_type = other DNA
agcaaatgatactagtagtc

SEQ ID NO: 67118 - DNA, 20 bp, synthetic construct
  misc_feature 1..20: note = Description of Artificial Sequence: Synthetic oligonucleotide
  misc_feature 1..20: note = Target: SCN10A; (+) strand; PAM type: YTN; PAM sequence: CTA
  source 1..20: mol_type = other DNA
gtagtcactatttattgtta

SEQ ID NO: 67119 - DNA, 20 bp, synthetic construct
  misc_feature 1..20: note = Description of Artificial Sequence: Synthetic oligonucleotide
  misc_feature 1..20: note = Target: SCN10A; (+) strand; PAM type: YTN; PAM sequence: CTA
  source 1..20: mol_type = other DNA
tttattgttatctgtcagac

SEQ ID NO: 67120 - DNA, 20 bp, synthetic construct
  misc_feature 1..20: note = Description of Artificial Sequence: Synthetic oligonucleotide
  misc_feature 1..20: note = Target: SCN10A; (+) strand; PAM type: YTN; PAM sequence: TTT
  source 1..20: mol_type = other DNA
attgttatctgtcagacatg

SEQ ID NO: 67121 - DNA, 20 bp, synthetic construct
  misc_feature 1..20: note = Description of Artificial Sequence: Synthetic oligonucleotide
  misc_feature 1..20: note = Target: SCN10A; (+) strand; PAM type: YTN; PAM sequence: TTA
  source 1..20: mol_type = other DNA
ttgttatctgtcagacatgt

SEQ ID NO: 67122 - DNA, 20 bp, synthetic construct
  misc_feature 1..20: note = Description of Artificial Sequence: Synthetic oligonucleotide
  misc_feature 1..20: note = Target: SCN10A; (+) strand; PAM type: YTN; PAM sequence: TTG
  source 1..20: mol_type = other DNA
ttatctgtcagacatgtata

SEQ ID NO: 67123 - DNA, 20 bp, synthetic construct
  misc_feature 1..20: note = Description of Artificial Sequence: Synthetic oligonucleotide
  misc_feature 1..20: note = Target: SCN10A; (+) strand; PAM type: YTN; PAM sequence: TTA
  source 1..20: mol_type = other DNA
tctgtcagacatgtataaaa

SEQ ID NO: 67124 - DNA, 20 bp, synthetic construct
  misc_feature 1..20: note = Description of Artificial Sequence: Synthetic oligonucleotide
  misc_feature 1..20: note = Target: SCN10A; (+) strand; PAM type: YTN; PAM sequence: CTG
  source 1..20: mol_type = other DNA
tcagacatgtataaaaatgt

SEQ ID NO: 67125 - DNA, 20 bp, synthetic construct
  misc_feature 1..20: note = Description of Artificial Sequence: Synthetic oligonucleotide
  misc_feature 1..20: note = Target: SCN10A; (+) strand; PAM type: YTN; PAM sequence: CTT
  source 1..20: mol_type = other DNA
tgttatttcatttaaccctc

SEQ ID NO: 67126 - DNA, 20 bp, synthetic construct
  misc_feature 1..20: note = Description of Artificial Sequence: Synthetic oligonucleotide
  misc_feature 1..20: note = Target: SCN10A; (+) strand; PAM type: YTN; PAM sequence: TTT
  source 1..20: mol_type = other DNA
gttatttcatttaaccctcc

SEQ ID NO: 67127 - DNA, 20 bp, synthetic construct
  misc_feature 1..20: note = Description of Artificial Sequence: Synthetic oligonucleotide
  misc_feature 1..20: note = Target: SCN10A; (+) strand; PAM type: YTN; PAM sequence: TTG
  source 1..20: mol_type = other DNA
ttatttcatttaaccctcca

SEQ ID NO: 67128 - DNA, 20 bp, synthetic construct
  misc_feature 1..20: note = Description of Artificial Sequence: Synthetic oligonucleotide
  misc_feature 1..20: note = Target: SCN10A; (+) strand; PAM type: YTN; PAM sequence: TTA
  source 1..20: mol_type = other DNA
tttcatttaaccctccagct

SEQ ID NO: 67129 - DNA, 20 bp, synthetic construct
  misc_feature 1..20: note = Description of Artificial Sequence: Synthetic oligonucleotide
  misc_feature 1..20: note = Target: SCN10A; (+) strand; PAM type: YTN; PAM sequence: TTT
  source 1..20: mol_type = other DNA
catttaaccctccagctatt

SEQ ID NO: 67130 - DNA, 20 bp, synthetic construct
  misc_feature 1..20: note = Description of Artificial Sequence: Synthetic oligonucleotide
  misc_feature 1..20: note = Target: SCN10A; (+) strand; PAM type: YTN; PAM sequence: TTC
  source 1..20: mol_type = other DNA
atttaaccctccagctattt

SEQ ID NO: 67131 - DNA, 20 bp, synthetic construct
  misc_feature 1..20: note = Description of Artificial Sequence: Synthetic oligonucleotide
  misc_feature 1..20: note = Target: SCN10A; (+) strand; PAM type: YTN; PAM sequence: TTT
  source 1..20: mol_type = other DNA
aaccctccagctatttagaa

SEQ ID NO: 67132 - DNA, 20 bp, synthetic construct
  misc_feature 1..20: note = Description of Artificial Sequence: Synthetic oligonucleotide
  misc_feature 1..20: note = Target: SCN10A; (+) strand; PAM type: YTN; PAM sequence: TTA
  source 1..20: mol_type = other DNA
accctccagctatttagaaa

SEQ ID NO: 67133 - DNA, 20 bp, synthetic construct
  misc_feature 1..20: note = Description of Artificial Sequence: Synthetic oligonucleotide
  misc_feature 1..20: note = Target: SCN10A; (+) strand; PAM type: YTN; PAM sequence: CTC
  source 1..20: mol_type = other DNA
cagctatttagaaacctttt

SEQ ID NO: 67134 - DNA, 20 bp, synthetic construct
  misc_feature 1..20: note = Description of Artificial Sequence: Synthetic oligonucleotide
  misc_feature 1..20: note = Target: SCN10A; (+) strand; PAM type: YTN; PAM sequence: CTA
  source 1..20: mol_type = other DNA
tttagaaacctttttacaag

SEQ ID NO: 67135 - DNA, 20 bp, synthetic construct
  misc_feature 1..20: note = Description of Artificial Sequence: Synthetic oligonucleotide
  misc_feature 1..20: note = Target: SCN10A; (+) strand; PAM type: YTN; PAM sequence: TTT
  source 1..20: mol_type = other DNA
agaaacctttttacaagggg

SEQ ID NO: 67136 - DNA, 20 bp, synthetic construct
  misc_feature 1..20: note = Description of Artificial Sequence: Synthetic oligonucleotide
  misc_feature 1..20: note = Target: SCN10A; (+) strand; PAM type: YTN; PAM sequence: TTA
  source 1..20: mol_type = other DNA
gaaacctttttacaagggga

SEQ ID NO: 67137 - DNA, 20 bp, synthetic construct
  misc_feature 1..20: note = Description of Artificial Sequence: Synthetic oligonucleotide
  misc_feature 1..20: note = Target: SCN10A; (+) strand; PAM type: YTN; PAM sequence: CTT
  source 1..20: mol_type = other DNA
tttacaaggggagataagga

SEQ ID NO: 67138 - DNA, 20 bp, synthetic construct
  misc_feature 1..20: note = Description of Artificial Sequence: Synthetic oligonucleotide
  misc_feature 1..20: note = Target: SCN10A; (+) strand; PAM type: YTN; PAM sequence: TTT
  source 1..20: mol_type = other DNA
ttacaaggggagataaggag

SEQ ID NO: 67139 - DNA, 20 bp, synthetic construct
  misc_feature 1..20: note = Description of Artificial Sequence: Synthetic oligonucleotide
  misc_feature 1..20: note = Target: SCN10A; (+) strand; PAM type: YTN; PAM sequence: TTT
  source 1..20: mol_type = other DNA
tacaaggggagataaggagg

SEQ ID NO: 67140 - DNA, 20 bp, synthetic construct
  misc_feature 1..20: note = Description of Artificial Sequence: Synthetic oligonucleotide
  misc_feature 1..20: note = Target: SCN10A; (+) strand; PAM type: YTN; PAM sequence: TTT
  source 1..20: mol_type = other DNA
acaaggggagataaggaggc

SEQ ID NO: 67141 - DNA, 20 bp, synthetic construct
  misc_feature 1..20: note = Description of Artificial Sequence: Synthetic oligonucleotide
  misc_feature 1..20: note = Target: SCN10A; (+) strand; PAM type: YTN; PAM sequence: TTA
  source 1..20: mol_type = other DNA
caaggggagataaggaggct

SEQ ID NO: 67142 - DNA, 20 bp, synthetic construct
  misc_feature 1..20: note = Description of Artificial Sequence: Synthetic oligonucleotide
  misc_feature 1..20: note = Target: SCN10A; (+) strand; PAM type: YTN; PAM sequence: CTT
  source 1..20: mol_type = other DNA
ggataatttaaaggacttgc

SEQ ID NO: 67143 - DNA, 20 bp, synthetic construct
  misc_feature 1..20: note = Description of Artificial Sequence: Synthetic oligonucleotide
  misc_feature 1..20: note = Target: SCN10A; (+) strand; PAM type: YTN; PAM sequence: TTG
  source 1..20: mol_type = other DNA
gataatttaaaggacttgct

SEQ ID NO: 67144 - DNA, 20 bp, synthetic construct
  misc_feature 1..20: note = Description of Artificial Sequence: Synthetic oligonucleotide
  misc_feature 1..20: note = Target: SCN10A; (+) strand; PAM type: YTN; PAM sequence: TTT
  source 1..20: mol_type = other DNA
aaaggacttgctaaatgtga

SEQ ID NO: 67145 - DNA, 20 bp, synthetic construct
  misc_feature 1..20: note = Description of Artificial Sequence: Synthetic oligonucleotide
  misc_feature 1..20: note = Target: SCN10A; (+) strand; PAM type: YTN; PAM sequence: TTA
  source 1..20: mol_type = other DNA
aaggacttgctaaatgtgac

SEQ ID NO: 67146 - DNA, 20 bp, synthetic construct
  misc_feature 1..20: note = Description of Artificial Sequence: Synthetic oligonucleotide
  misc_feature 1..20: note = Target: SCN10A; (+) strand; PAM type: YTN; PAM sequence: CTT
  source 1..20: mol_type = other DNA
gctaaatgtgactcaggtgg

SEQ ID NO: 67147 - DNA, 20 bp, synthetic construct
  misc_feature 1..20: note = Description of Artificial Sequence: Synthetic oligonucleotide
  misc_feature 1..20: note = Target: SCN10A; (+) strand; PAM type: YTN; PAM sequence: TTG
  source 1..20: mol_type = other DNA
ctaaatgtgactcaggtggt

SEQ ID NO: 67148 - DNA, 20 bp, synthetic construct
  misc_feature 1..20: note = Description of Artificial Sequence: Synthetic oligonucleotide
  misc_feature 1..20: note = Target: SCN10A; (+) strand; PAM type: YTN; PAM sequence: CTA
  source 1..20: mol_type = other DNA
aatgtgactcaggtggtaac

SEQ ID NO: 67149 - DNA, 20 bp, synthetic construct
  misc_feature 1..20: note = Description of Artificial Sequence: Synthetic oligonucleotide
  misc_feature 1..20: note = Target: SCN10A; (+) strand; PAM type: YTN; PAM sequence: CTC
  source 1..20: mol_type = other DNA
aggtggtaactggcacagtt

SEQ ID NO: 67150 - DNA, 20 bp, synthetic construct
  misc_feature 1..20: note = Description of Artificial Sequence: Synthetic oligonucleotide
  misc_feature 1..20: note = Target: SCN10A; (+) strand; PAM type: YTN; PAM sequence: CTG
  source 1..20: mol_type = other DNA
gcacagttgggactaaaata

SEQ ID NO: 67151 - DNA, 20 bp, synthetic construct
  misc_feature 1..20: note = Description of Artificial Sequence: Synthetic oligonucleotide
  misc_feature 1..20: note = Target: SCN10A; (+) strand; PAM type: YTN; PAM sequence: TTG
  source 1..20: mol_type = other DNA
ggactaaaatataggtccat

SEQ ID NO: 67152 - DNA, 20 bp, synthetic construct
  misc_feature 1..20: note = Description of Artificial Sequence: Synthetic oligonucleotide
  misc_feature 1..20: note = Target: SCN10A; (+) strand; PAM type: YTN; PAM sequence: CTA
  source 1..20: mol_type = other DNA
aaatataggtccatactaaa

SEQ ID NO: 67153 - DNA, 20 bp, synthetic construct
  misc_feature 1..20: note = Description of Artificial Sequence: Synthetic oligonucleotide
  misc_feature 1..20: note = Target: SCN10A; (+) strand; PAM type: YTN; PAM sequence: CTA
  source 1..20: mol_type = other DNA
aacagaagggcctaaagagt

SEQ ID NO: 67154 - DNA, 20 bp, synthetic construct
  misc_feature 1..20: note = Description of Artificial Sequence: Synthetic oligonucleotide
  misc_feature 1..20: note = Target: SCN10A; (+) strand; PAM type: YTN; PAM sequence: CTA
  source 1..20: mol_type = other DNA
aagagtcaatctttcactag

SEQ ID NO: 67155 - DNA, 20 bp, synthetic construct
  misc_feature 1..20: note = Description of Artificial Sequence: Synthetic oligonucleotide
  misc_feature 1..20: note = Target: SCN10A; (+) strand; PAM type: YTN; PAM sequence: CTT
  source 1..20: mol_type = other DNA
tcactagcctggtaatttaa

SEQ ID NO: 67156 - DNA, 20 bp, synthetic construct
  misc_feature 1..20: note = Description of Artificial Sequence: Synthetic oligonucleotide
  misc_feature 1..20: note = Target: SCN10A; (+) strand; PAM type: YTN; PAM sequence: TTT
  source 1..20: mol_type = other DNA
cactagcctggtaatttaac

SEQ ID NO: 67157 - DNA, 20 bp, synthetic construct
  misc_feature 1..20: note = Description of Artificial Sequence: Synthetic oligonucleotide
  misc_feature 1..20: note = Target: SCN10A; (+) strand; PAM type: YTN; PAM sequence: TTC
  source 1..20: mol_type = other DNA
actagcctggtaatttaact

SEQ ID NO: 67158 - DNA, 20 bp, synthetic construct
  misc_feature 1..20: note = Description of Artificial Sequence: Synthetic oligonucleotide
  misc_feature 1..20: note = Target: SCN10A; (+) strand; PAM type: YTN; PAM sequence: CTA
  source 1..20: mol_type = other DNA
gcctggtaatttaactagaa

SEQ ID NO: 67159 - DNA, 20 bp, synthetic construct
  misc_feature 1..20: note = Description of Artificial Sequence: Synthetic oligonucleotide
  misc_feature 1..20: note = Target: SCN10A; (+) strand; PAM type: YTN; PAM sequence: CTG
  source 1..20: mol_type = other DNA
gtaatttaactagaatgaat

SEQ ID NO: 67160 - DNA, 20 bp, synthetic construct
  misc_feature 1..20: note = Description of Artificial Sequence: Synthetic oligonucleotide
  misc_feature 1..20: note = Target: SCN10A; (+) strand; PAM type: YTN; PAM sequence: TTT
  source 1..20: mol_type = other DNA
aactagaatgaatcaaggtc

SEQ ID NO: 67161 - DNA, 20 bp, synthetic construct
  misc_feature 1..20: note = Description of Artificial Sequence: Synthetic oligonucleotide
  misc_feature 1..20: note = Target: SCN10A; (+) strand; PAM type: YTN; PAM sequence: TTA
  source 1..20: mol_type = other DNA
actagaatgaatcaaggtca

SEQ ID NO: 67162 - DNA, 20 bp, synthetic construct
  misc_feature 1..20: note = Description of Artificial Sequence: Synthetic oligonucleotide
  misc_feature 1..20: note = Target: SCN10A; (+) strand; PAM type: YTN; PAM sequence: CTA
  source 1..20: mol_type = other DNA
gaatgaatcaaggtcagaat

SEQ ID NO: 67163 - DNA, 20 bp, synthetic construct
  misc_feature 1..20: note = Description of Artificial Sequence: Synthetic oligonucleotide
  misc_feature 1..20: note = Target: SCN10A; (+) strand; PAM type: YTN; PAM sequence: CTA
  source 1..20: mol_type = other DNA
gacacatgataatctcagga

SEQ ID NO: 67164 - DNA, 20 bp, synthetic construct
  misc_feature 1..20: note = Description of Artificial Sequence: Synthetic oligonucleotide
  misc_feature 1..20: note = Target: SCN10A; (+) strand; PAM type: YTN; PAM sequence: CTC
  source 1..20: mol_type = other DNA
aggaacagagaaaggagggt

SEQ ID NO: 67165 - DNA, 20 bp, synthetic construct
  misc_feature 1..20: note = Description of Artificial Sequence: Synthetic oligonucleotide
  misc_feature 1..20: note = Target: SCN10A; (+) strand; PAM type: YTN; PAM sequence: CTT
  source 1..20: mol_type = other DNA
cagtgaggcattttctagag

SEQ ID NO: 67166 - DNA, 20 bp, synthetic construct
  misc_feature 1..20: note = Description of Artificial Sequence: Synthetic oligonucleotide
  misc_feature 1..20: note = Target: SCN10A; (+) strand; PAM type: YTN; PAM sequence: TTC
  source 1..20: mol_type = other DNA
agtgaggcattttctagagt

SEQ ID NO: 67167 - DNA, 20 bp, synthetic construct
  misc_feature 1..20: note = Description of Artificial Sequence: Synthetic oligonucleotide
  misc_feature 1..20: note = Target: SCN10A; (+) strand; PAM type: YTN; PAM sequence: TTT
  source 1..20: mol_type = other DNA
tctagagtgctaatgcactc

SEQ ID NO: 67168 - DNA, 20 bp, synthetic construct
  misc_feature 1..20: note = Description of Artificial Sequence: Synthetic oligonucleotide
  misc_feature 1..20: note = Target: SCN10A; (+) strand; PAM type: YTN; PAM sequence: TTT
  source 1..20: mol_type = other DNA
ctagagtgctaatgcactcc

SEQ ID NO: 67169 - DNA, 20 bp, synthetic construct
  misc_feature 1..20: note = Description of Artificial Sequence: Synthetic oligonucleotide
  misc_feature 1..20: note = Target: SCN10A; (+) strand; PAM type: YTN; PAM sequence: TTC
  source 1..20: mol_type = other DNA
tagagtgctaatgcactccc

SEQ ID NO: 67170 - DNA, 20 bp, synthetic construct
  misc_feature 1..20: note = Description of Artificial Sequence: Synthetic oligonucleotide
  misc_feature 1..20: note = Target: SCN10A; (+) strand; PAM type: YTN; PAM sequence: CTA
  source 1..20: mol_type = other DNA
gagtgctaatgcactcccag

SEQ ID NO: 67171 - DNA, 20 bp, synthetic construct
  misc_feature 1..20: note = Description of Artificial Sequence: Synthetic oligonucleotide
  misc_feature 1..20: note = Target: SCN10A; (+) strand; PAM type: YTN; PAM sequence: CTA
  source 1..20: mol_type = other DNA
atgcactcccagcgagccct

SEQ ID NO: 67172 - DNA, 20 bp, synthetic construct
  misc_feature 1..20: note = Description of Artificial Sequence: Synthetic oligonucleotide
  misc_feature 1..20: note = Target: SCN10A; (+) strand; PAM type: YTN; PAM sequence: CTC
  source 1..20: mol_type = other DNA
ccagcgagccctgcaggatg

SEQ ID NO: 67173 - DNA, 20 bp, synthetic construct
  misc_feature 1..20: note = Description of Artificial Sequence: Synthetic oligonucleotide
  misc_feature 1..20: note = Target: SCN10A; (+) strand; PAM type: YTN; PAM sequence: CTG
  source 1..20: mol_type = other DNA
caggatgcctttgactttaa

SEQ ID NO: 67174 - DNA, 20 bp, synthetic construct
  misc_feature 1..20: note = Description of Artificial Sequence: Synthetic oligonucleotide
  misc_feature 1..20: note = Target: SCN10A; (+) strand; PAM type: YTN; PAM sequence: CTT
  source 1..20: mol_type = other DNA
tgactttaaggctctgtttt

SEQ ID NO: 67175 - DNA, 20 bp, synthetic construct
  misc_feature 1..20: note = Description of Artificial Sequence: Synthetic oligonucleotide
  misc_feature 1..20: note = Target: SCN10A; (+) strand; PAM type: YTN; PAM sequence: TTT
  source 1..20: mol_type = other DNA
gactttaaggctctgttttg

SEQ ID NO: 67176 - DNA, 20 bp, synthetic construct
  misc_feature 1..20: note = Description of Artificial Sequence: Synthetic oligonucleotide
  misc_feature 1..20: note = Target: SCN10A; (+) strand; PAM type: YTN; PAM sequence: TTG
  source 1..20: mol_type = other DNA
actttaaggctctgttttgg

SEQ ID NO: 67177 - DNA, 20 bp, synthetic construct
  misc_feature 1..20: note = Description of Artificial Sequence: Synthetic oligonucleotide
  misc_feature 1..20: note = Target: SCN10A; (+) strand; PAM type: YTN; PAM sequence: CTT
  source 1..20: mol_type = other DNA
taaggctctgttttggtgat

SEQ ID NO: 67178 - DNA, 20 bp, synthetic construct
  misc_feature 1..20: note = Description of Artificial Sequence: Synthetic oligonucleotide
  misc_feature 1..20: note = Target: SCN10A; (+) strand; PAM type: YTN; PAM sequence: TTT
  source 1..20: mol_type = other DNA
aaggctctgttttggtgatt

SEQ ID NO: 67179 - DNA, 20 bp, synthetic construct
  misc_feature 1..20: note = Description of Artificial Sequence: Synthetic oligonucleotide
  misc_feature 1..20: note = Target: SCN10A; (+) strand; PAM type: YTN; PAM sequence: TTA
  source 1..20: mol_type = other DNA
aggctctgttttggtgattc

SEQ ID NO: 67180 - DNA, 20 bp, synthetic construct
  misc_feature 1..20: note = Description of Artificial Sequence: Synthetic oligonucleotide
  misc_feature 1..20: note = Target: SCN10A; (+) strand; PAM type: YTN; PAM sequence: CTC
  source 1..20: mol_type = other DNA
tgttttggtgattccatttg

SEQ ID NO: 67181 - DNA, 20 bp, synthetic construct
  misc_feature 1..20: note = Description of Artificial Sequence: Synthetic oligonucleotide
  misc_feature 1..20: note = Target: SCN10A; (+) strand; PAM type: YTN; PAM sequence: CTG
  source 1..20: mol_type = other DNA
ttttggtgattccatttgcc

SEQ ID NO: 67182 - DNA, 20 bp, synthetic construct
  misc_feature 1..20: note = Description of Artificial Sequence: Synthetic oligonucleotide
  misc_feature 1..20: note = Target: SCN10A; (+) strand; PAM type: YTN; PAM sequence: TTT
  source 1..20: mol_type = other DNA
tggtgattccatttgccctg

SEQ ID NO: 67183 - DNA, 20 bp, synthetic construct
  misc_feature 1..20: note = Description of Artificial Sequence: Synthetic oligonucleotide
  misc_feature 1..20: note = Target: SCN10A; (+) strand; PAM type: YTN; PAM sequence: TTT
  source 1..20: mol_type = other DNA
ggtgattccatttgccctgg

SEQ ID NO: 67184 - DNA, 20 bp, synthetic construct
  misc_feature 1..20: note = Description of Artificial Sequence: Synthetic oligonucleotide
  misc_feature 1..20: note = Target: SCN10A; (+) strand; PAM type: YTN; PAM sequence: TTG
  source 1..20: mol_type = other DNA
gtgattccatttgccctgga

SEQ ID NO: 67185 - DNA, 20 bp, synthetic construct
  misc_feature 1..20: note = Description of Artificial Sequence: Synthetic oligonucleotide
  misc_feature 1..20: note = Target: SCN10A; (+) strand; PAM type: YTN; PAM sequence: TTC
  source 1..20: mol_type = other DNA
catttgccctggagacctac

SEQ ID NO: 67186 - DNA, 20 bp, synthetic construct
  misc_feature 1..20: note = Description of Artificial Sequence: Synthetic oligonucleotide
  misc_feature 1..20: note = Target: SCN10A; (+) strand; PAM type: YTN; PAM sequence: TTT
  source 1..20: mol_type = other DNA
gccctggagacctactctct

SEQ ID NO: 67187 - DNA, 20 bp, synthetic construct
  misc_feature 1..20: note = Description of Artificial Sequence: Synthetic oligonucleotide
  misc_feature 1..20: note = Target: SCN10A; (+) strand; PAM type: YTN; PAM sequence: TTG
  source 1..20: mol_type = other DNA
ccctggagacctactctcta

SEQ ID NO: 67188 - DNA, 20 bp, synthetic construct
  misc_feature 1..20: note = Description of Artificial Sequence: Synthetic oligonucleotide
  misc_feature 1..20: note = Target: SCN10A; (+) strand; PAM type: YTN; PAM sequence: CTG
  source 1..20: mol_type = other DNA
gagacctactctctaccttc

SEQ ID NO: 67189 - DNA, 20 bp, synthetic construct
  misc_feature 1..20: note = Description of Artificial Sequence: Synthetic oligonucleotide
  misc_feature 1..20: note = Target: SCN10A; (+) strand; PAM type: YTN; PAM sequence: CTA
  source 1..20: mol_type = other DNA
ctctctaccttctccactgt

SEQ ID NO: 67190 - DNA, 20 bp, synthetic construct
  misc_feature 1..20: note = Description of Artificial Sequence: Synthetic oligonucleotide
  misc_feature 1..20: note = Target: SCN10A; (+) strand; PAM type: YTN; PAM sequence: CTC
  source 1..20: mol_type = other DNA
tctaccttctccactgtctc

SEQ ID NO: 67191 - DNA, 20 bp, synthetic construct
  misc_feature 1..20: note = Description of Artificial Sequence: Synthetic oligonucleotide
  misc_feature 1..20: note = Target: SCN10A; (+) strand; PAM type: YTN; PAM sequence: CTC
  source 1..20: mol_type = other DNA
taccttctccactgtctctg

SEQ ID NO: 67192 - DNA, 20 bp, synthetic construct
  misc_feature 1..20: note = Description of Artificial Sequence: Synthetic oligonucleotide
  misc_feature 1..20: note = Target: SCN10A; (+) strand; PAM type: YTN; PAM sequence: CTA
  source 1..20: mol_type = other DNA
ccttctccactgtctctgtt

SEQ ID NO: 67193 - DNA, 20 bp, synthetic construct
  misc_feature 1..20: note = Description of Artificial Sequence: Synthetic oligonucleotide
  misc_feature 1..20: note = Target: SCN10A; (+) strand; PAM type: YTN; PAM sequence: CTT
  source 1..20: mol_type = other DNA
ctccactgtctctgttcctg

SEQ ID NO: 67194 - DNA, 20 bp, synthetic construct
  misc_feature 1..20: note = Description of Artificial Sequence: Synthetic oligonucleotide
  misc_feature 1..20: note = Target: SCN10A; (+) strand; PAM type: YTN; PAM sequence: TTC
  source 1..20: mol_type = other DNA
tccactgtctctgttcctgg

SEQ ID NO: 67195 - DNA, 20 bp, synthetic construct
  misc_feature 1..20: note = Description of Artificial Sequence: Synthetic oligonucleotide
  misc_feature 1..20: note = Target: SCN10A; (+) strand; PAM type: YTN; PAM sequence: CTC
  source 1..20: mol_type = other DNA
cactgtctctgttcctgggg

SEQ ID NO: 67196 - DNA, 20 bp, synthetic construct
  misc_feature 1..20: note = Description of Artificial Sequence: Synthetic oligonucleotide
  misc_feature 1..20: note = Target: SCN10A; (+) strand; PAM type: YTN; PAM sequence: CTG
  source 1..20: mol_type = other DNA
tctctgttcctggggaggga

SEQ ID NO: 67197 - DNA, 20 bp, synthetic construct
  misc_feature 1..20: note = Description of Artificial Sequence: Synthetic oligonucleotide
  misc_feature 1..20: note = Target: SCN10A; (+) strand; PAM type: YTN; PAM sequence: CTC
  source 1..20: mol_type = other DNA
tgttcctggggagggagacc

SEQ ID NO: 67198 - DNA, 20 bp, synthetic construct
  misc_feature 1..20: note = Description of Artificial Sequence: Synthetic oligonucleotide
  misc_feature 1..20: note = Target: SCN10A; (+) strand; PAM type: YTN; PAM sequence: CTG
  source 1..20: mol_type = other DNA
ttcctggggagggagacctg

SEQ ID NO: 67199 - DNA, 20 bp, synthetic construct
  misc_feature 1..20: note = Description of Artificial Sequence: Synthetic oligonucleotide
  misc_feature 1..20: note = Target: SCN10A; (+) strand; PAM type: YTN; PAM sequence: TTC
  source 1..20: mol_type = other DNA
ctggggagggagacctgtac

SEQ ID NO: 67200 - DNA, 20 bp, synthetic construct
  misc_feature 1..20: note = Description of Artificial Sequence: Synthetic oligonucleotide
  misc_feature 1..20: note = Target: SCN10A; (+) strand; PAM type: YTN; PAM sequence: CTG
  source 1..20: mol_type = other DNA
gggagggagacctgtacaaa

SEQ ID NO: 67201 - DNA, 20 bp, synthetic construct
  misc_feature 1..20: note = Description of Artificial Sequence: Synthetic oligonucleotide
  misc_feature 1..20: note = Target: SCN10A; (+) strand; PAM type: YTN; PAM sequence: CTG
  source 1..20: mol_type = other DNA
tacaaaatgtgttatcctta

SEQ ID NO: 67202 - DNA, 20 bp, synthetic construct
  misc_feature 1..20: note = Description of Artificial Sequence: Synthetic oligonucleotide
  misc_feature 1..20: note = Target: SCN10A; (+) strand; PAM type: YTN; PAM sequence: TTA
  source 1..20: mol_type = other DNA
tccttaccctctggttctgg

SEQ ID NO: 67203 - DNA, 20 bp, synthetic construct
  misc_feature 1..20: note = Description of Artificial Sequence: Synthetic oligonucleotide
  misc_feature 1..20: note = Target: SCN10A; (+) strand; PAM type: YTN; PAM sequence: CTT
  source 1..20: mol_type = other DNA
accctctggttctggccagg

SEQ ID NO: 67204 - DNA, 20 bp, synthetic construct
  misc_feature 1..20: note = Description of Artificial Sequence: Synthetic oligonucleotide
  misc_feature 1..20: note = Target: SCN10A; (+) strand; PAM type: YTN; PAM sequence: TTA
  source 1..20: mol_type = other DNA
ccctctggttctggccaggt

SEQ ID NO: 67205 - DNA, 20 bp, synthetic construct
  misc_feature 1..20: note = Description of Artificial Sequence: Synthetic oligonucleotide
  misc_feature 1..20: note = Target: SCN10A; (+) strand; PAM type: YTN; PAM sequence: CTC
  source 1..20: mol_type = other DNA
tggttctggccaggtttggt

SEQ ID NO: 67206 - DNA, 20 bp, synthetic construct
  misc_feature 1..20: note = Description of Artificial Sequence: Synthetic oligonucleotide
  misc_feature 1..20: note = Target: SCN10A; (+) strand; PAM type: YTN; PAM sequence: CTG
  source 1..20: mol_type = other DNA
gttctggccaggtttggtta

SEQ ID NO: 67207 - DNA, 20 bp, synthetic construct
  misc_feature 1..20: note = Description of Artificial Sequence: Synthetic oligonucleotide
  misc_feature 1..20: note = Target: SCN10A; (+) strand; PAM type: YTN; PAM sequence: TTC
  source 1..20: mol_type = other DNA
tggccaggtttggttaatgg

SEQ ID NO: 67208 - DNA, 20 bp, synthetic construct
  misc_feature 1..20: note = Description of Artificial Sequence: Synthetic oligonucleotide
  misc_feature 1..20: note = Target: SCN10A; (+) strand; PAM type: YTN; PAM sequence: CTG
  source 1..20: mol_type = other DNA
gccaggtttggttaatggga

SEQ ID NO: 67209 - DNA, 20 bp, synthetic construct
  misc_feature 1..20: note = Description of Artificial Sequence: Synthetic oligonucleotide
  misc_feature 1..20: note = Target: SCN10A; (+) strand; PAM type: YTN; PAM sequence: TTT
  source 1..20: mol_type = other DNA
ggttaatgggagacataggc

SEQ ID NO: 67210 - DNA, 20 bp, synthetic construct
  misc_feature 1..20: note = Description of Artificial Sequence: Synthetic oligonucleotide
  misc_feature 1..20: note = Target: SCN10A; (+) strand; PAM type: YTN; PAM sequence: TTG
  source 1..20: mol_type = other DNA
gttaatgggagacataggca

SEQ ID NO: 67211 - DNA, 20 bp, synthetic construct
  misc_feature 1..20: note = Description of Artificial Sequence: Synthetic oligonucleotide
  misc_feature 1..20: note = Target: SCN10A; (+) strand; PAM type: YTN; PAM sequence: TTA
  source 1..20: mol_type = other DNA
atgggagacataggcaggac

SEQ ID NO: 67212 - DNA, 20 bp, synthetic construct
  misc_feature 1..20: note = Description of Artificial Sequence: Synthetic oligonucleotide
  misc_feature 1..20: note = Target: SCN10A; (+) strand; PAM type: YTN; PAM sequence: TTC
  source 1..20: mol_type = other DNA
aaggatagaaggagagacaa

SEQ ID NO: 67213 - DNA, 20 bp, synthetic construct
  misc_feature 1..20: note = Description of Artificial Sequence: Synthetic oligonucleotide
  misc_feature 1..20: note = Target: SCN10A; (+) strand; PAM type: YTN; PAM sequence: TTT
  source 1..20: mol_type = other DNA
tcccctggcttcttctctcc

SEQ ID NO: 67214 - DNA, 20 bp, synthetic construct
  misc_feature 1..20: note = Description of Artificial Sequence: Synthetic oligonucleotide
  misc_feature 1..20: note = Target: SCN10A; (+) strand; PAM type: YTN; PAM sequence: TTT
  source 1..20: mol_type = other DNA
cccctggcttcttctctcct

SEQ ID NO: 67215 - DNA, 20 bp, synthetic construct
  misc_feature 1..20: note = Description of Artificial Sequence: Synthetic oligonucleotide
  misc_feature 1..20: note = Target: SCN10A; (+) strand; PAM type: YTN; PAM sequence: TTC
  source 1..20: mol_type = other DNA
ccctggcttcttctctcctg

SEQ ID NO: 67216 - DNA, 20 bp, synthetic construct
  misc_feature 1..20: note = Description of Artificial Sequence: Synthetic oligonucleotide
  misc_feature 1..20: note = Target: SCN10A; (+) strand; PAM type: YTN; PAM sequence: CTG
  source 1..20: mol_type = other DNA
gcttcttctctcctgtgcta

SEQ ID NO: 67217 - DNA, 20 bp, synthetic construct
  misc_feature 1..20: note = Description of Artificial Sequence: Synthetic oligonucleotide
  misc_feature 1..20: note = Target: SCN10A; (+) strand; PAM type: YTN; PAM sequence: CTT
  source 1..20: mol_type = other DNA
cttctctcctgtgctatggc

SEQ ID NO: 67218 - DNA, 20 bp, synthetic construct
  misc_feature 1..20: note = Description of Artificial Sequence: Synthetic oligonucleotide
  misc_feature 1..20: note = Target: SCN10A; (+) strand; PAM type: YTN; PAM sequence: TTC
  source 1..20: mol_type = other DNA
ttctctcctgtgctatggct

SEQ ID NO: 67219 - DNA, 20 bp, synthetic construct
  misc_feature 1..20: note = Description of Artificial Sequence: Synthetic oligonucleotide
  misc_feature 1..20: note = Target: SCN10A; (+) strand; PAM type: YTN; PAM sequence: CTT
  source 1..20: mol_type = other DNA
ctctcctgtgctatggctga

SEQ ID NO: 67220 - DNA, 20 bp, synthetic construct
  misc_feature 1..20: note = Description of Artificial Sequence: Synthetic oligonucleotide
  misc_feature 1..20: note = Target: SCN10A; (+) strand; PAM type: YTN; PAM sequence: TTC
  source 1..20: mol_type = other DNA
tctcctgtgctatggctgag

SEQ ID NO: 67221 - DNA, 20 bp, synthetic construct
  misc_feature 1..20: note = Description of Artificial Sequence: Synthetic oligonucleotide
  misc_feature 1..20: note = Target: SCN10A; (+) strand; PAM type: YTN; PAM sequence: CTC
  source 1..20: mol_type = other DNA
tcctgtgctatggctgagta

SEQ ID NO: 67222 - DNA, 20 bp, synthetic construct
  misc_feature 1..20: note = Description of Artificial Sequence: Synthetic oligonucleotide
  misc_feature 1..20: note = Target: SCN10A; (+) strand; PAM type: YTN; PAM sequence: CTC
  source 1..20: mol_type = other DNA
ctgtgctatggctgagtagc

SEQ ID NO: 67223 - DNA, 20 bp, synthetic construct
  misc_feature 1..20: note = Description of Artificial Sequence: Synthetic oligonucleotide
  misc_feature 1..20: note = Target: SCN10A; (+) strand; PAM type: YTN; PAM sequence: CTG
  source 1..20: mol_type = other DNA
tgctatggctgagtagcaga

SEQ ID NO: 67224 - DNA, 20 bp, synthetic construct
  misc_feature 1..20: note = Description of Artificial Sequence: Synthetic oligonucleotide
  misc_feature 1..20: note = Target: SCN10A; (+) strand; PAM type: YTN; PAM sequence: CTA
  source 1..20: mol_type = other DNA
tggctgagtagcagagctgt

SEQ ID NO: 67225 - DNA, 20 bp, synthetic construct
  misc_feature 1..20: note = Description of Artificial Sequence: Synthetic oligonucleotide
  misc_feature 1..20: note = Target: SCN10A; (+) strand; PAM type: YTN; PAM sequence: CTG
  source 1..20: mol_type = other DNA
agtagcagagctgtgatcct

SEQ ID NO: 67226 - DNA, 20 bp, synthetic construct
  misc_feature 1..20: note = Description of Artificial Sequence: Synthetic oligonucleotide
  misc_feature 1..20: note = Target: SCN10A; (+) strand; PAM type: YTN; PAM sequence: CTG
  source 1..20: mol_type = other DNA
tgatcctctactaagatcac

SEQ ID NO: 67227 - DNA, 20 bp, synthetic construct
  misc_feature 1..20: note = Description of Artificial Sequence: Synthetic oligonucleotide
  misc_feature 1..20: note = Target: SCN10A; (+) strand; PAM type: YTN; PAM sequence: CTC
  source 1..20: mol_type = other DNA
tactaagatcacaagttctg

SEQ ID NO: 67228 - DNA, 20 bp, synthetic construct
  misc_feature 1..20: note = Description of Artificial Sequence: Synthetic oligonucleotide
  misc_feature 1..20: note = Target: SCN10A; (+) strand; PAM type: YTN; PAM sequence: CTA
  source 1..20: mol_type = other DNA
ctaagatcacaagttctgcc

SEQ ID NO: 67229 - DNA, 20 bp, synthetic construct
  misc_feature 1..20: note = Description of Artificial Sequence: Synthetic oligonucleotide
  misc_feature 1..20: note = Target: SCN10A; (+) strand; PAM type: YTN; PAM sequence: CTA
  source 1..20: mol_type = other DNA
agatcacaagttctgccagg

SEQ ID NO: 67230 - DNA, 20 bp, synthetic construct
  misc_feature 1..20: note = Description of Artificial Sequence: Synthetic oligonucleotide
  misc_feature 1..20: note = Target: SCN10A; (+) strand; PAM type: YTN; PAM sequence: TTC
  source 1..20: mol_type = other DNA
tgccaggcagcctctctgac

SEQ ID NO: 67231 - DNA, 20 bp, synthetic construct
  misc_feature 1..20: note = Description of Artificial Sequence: Synthetic oligonucleotide
  misc_feature 1..20: note = Target: SCN10A; (+) strand; PAM type: YTN; PAM sequence: CTG
  source 1..20: mol_type = other DNA
ccaggcagcctctctgacac

SEQ ID NO: 67232 - DNA, 20 bp, synthetic construct
  misc_feature 1..20: note = Description of Artificial Sequence: Synthetic oligonucleotide
  misc_feature 1..20: note = Target: SCN10A; (+) strand; PAM type: YTN; PAM sequence: CTC
  source 1..20: mol_type = other DNA
tctgacacatgagggcagct

SEQ ID NO: 67233 - DNA, 20 bp, synthetic construct
  misc_feature 1..20: note = Description of Artificial Sequence: Synthetic oligonucleotide
  misc_feature 1..20: note = Target: SCN10A; (+) strand; PAM type: YTN; PAM sequence: CTC
  source 1..20: mol_type = other DNA
tgacacatgagggcagctgc

SEQ ID NO: 67234 - DNA, 20 bp, synthetic construct
  misc_feature 1..20: note = Description of Artificial Sequence: Synthetic oligonucleotide
  misc_feature 1..20: note = Target: SCN10A; (+) strand; PAM type: YTN; PAM sequence: CTG
  source 1..20: mol_type = other DNA
acacatgagggcagctgctg

SEQ ID NO: 67235 - DNA, 20 bp, synthetic construct
  misc_feature 1..20: note = Description of Artificial Sequence: Synthetic oligonucleotide
  misc_feature 1..20: note = Target: SCN10A; (+) strand; PAM type: YTN; PAM sequence: CTG
  source 1..20: mol_type = other DNA
ctgctgtagtctaattctgg

SEQ ID NO: 67236 - DNA, 20 bp, synthetic construct
  misc_feature 1..20: note = Description of Artificial Sequence: Synthetic oligonucleotide
  misc_feature 1..20: note = Target: SCN10A; (+) strand; PAM type: YTN; PAM sequence: CTG
  source 1..20: mol_type = other DNA
ctgtagtctaattctggtcc

SEQ ID NO: 67237 - DNA, 20 bp, synthetic construct
  misc_feature 1..20: note = Description of Artificial Sequence: Synthetic oligonucleotide
  misc_feature 1..20: note = Target: SCN10A; (+) strand; PAM type: YTN; PAM sequence: CTG
  source 1..20: mol_type = other DNA
tagtctaattctggtccttt

SEQ ID NO: 67238 - DNA, 20 bp, synthetic construct
  misc_feature 1..20: note = Description of Artificial Sequence: Synthetic oligonucleotide
  misc_feature 1..20: note = Target: SCN10A; (+) strand; PAM type: YTN; PAM sequence: CTA
  source 1..20: mol_type = other DNA
attctggtcctttccttcat

SEQ ID NO: 67239 - DNA, 20 bp, synthetic construct
  misc_feature 1..20: note = Description of Artificial Sequence: Synthetic oligonucleotide
  misc_feature 1..20: note = Target: SCN10A; (+) strand; PAM type: YTN; PAM sequence: TTC
  source 1..20: mol_type = other DNA
tggtcctttccttcatccct

SEQ ID NO: 67240 - DNA, 20 bp, synthetic construct
  misc_feature 1..20: note = Description of Artificial Sequence: Synthetic oligonucleotide
  misc_feature 1..20: note = Target: SCN10A; (+) strand; PAM type: YTN; PAM sequence: CTG
  source 1..20: mol_type = other DNA
gtcctttccttcatcccttc

SEQ ID NO: 67241 - DNA, 20 bp, synthetic construct
  misc_feature 1..20: note = Description of Artificial Sequence: Synthetic oligonucleotide
  misc_feature 1..20: note = Target: SCN10A; (+) strand; PAM type: YTN; PAM sequence: CTT
  source 1..20: mol_type = other DNA
tccttcatcccttcagccta

SEQ ID NO: 67242 - DNA, 20 bp, synthetic construct
  misc_feature 1..20: note = Description of Artificial Sequence: Synthetic oligonucleotide
  misc_feature 1..20: note = Target: SCN10A; (+) strand; PAM type: YTN; PAM sequence: TTT
  source 1..20: mol_type = other DNA
ccttcatcccttcagcctag

SEQ ID NO: 67243 - DNA, 20 bp, synthetic construct
  misc_feature 1..20: note = Description of Artificial Sequence: Synthetic oligonucleotide
  misc_feature 1..20: note = Target: SCN10A; (+) strand; PAM type: YTN; PAM sequence: TTC
  source 1..20: mol_type = other DNA
cttcatcccttcagcctagg

SEQ ID NO: 67244 - DNA, 20 bp, synthetic construct
  misc_feature 1..20: note = Description of Artificial Sequence: Synthetic oligonucleotide
  misc_feature 1..20: note = Target: SCN10A; (+) strand; PAM type: YTN; PAM sequence: CTT
  source 1..20: mol_type = other DNA
catcccttcagcctaggcat

SEQ ID NO: 67245 - DNA, 20 bp, synthetic construct
  misc_feature 1..20: note = Description of Artificial Sequence: Synthetic oligonucleotide
  misc_feature 1..20: note = Target: SCN10A; (+) strand; PAM type: YTN; PAM sequence: TTC
  source 1..20: mol_type = other DNA
atcccttcagcctaggcatg

SEQ ID NO: 67246 - DNA, 20 bp, synthetic construct
  misc_feature 1..20: note = Description of Artificial Sequence: Synthetic oligonucleotide
  misc_feature 1..20: note = Target: SCN10A; (+) strand; PAM type: YTN; PAM sequence: CTT
  source 1..20: mol_type = other DNA
cagcctaggcatgtaacagc

SEQ ID NO: 67247 - DNA, 20 bp, synthetic construct
  misc_feature 1..20: note = Description of Artificial Sequence: Synthetic oligonucleotide
  misc_feature 1..20: note = Target: SCN10A; (+) strand; PAM type: YTN; PAM sequence: TTC
  source 1..20: mol_type = other DNA
agcctaggcatgtaacagct

SEQ ID NO: 67248 - DNA, 20 bp, synthetic construct
  misc_feature 1..20: note = Description of Artificial Sequence: Synthetic oligonucleotide
  misc_feature 1..20: note = Target: SCN10A; (+) strand; PAM type: YTN; PAM sequence: CTA
  source 1..20: mol_type = other DNA
ggcatgtaacagcttccccc

SEQ ID NO: 67249 - DNA, 20 bp, synthetic construct
  misc_feature 1..20: note = Description of Artificial Sequence: Synthetic oligonucleotide
  misc_feature 1..20: note = Target: SCN10A; (+) strand; PAM type: YTN; PAM sequence: CTT
  source 1..20: mol_type = other DNA
ccccctgttactagtttcta

SEQ ID NO: 67250 - DNA, 20 bp, synthetic construct
  misc_feature 1..20: note = Description of Artificial Sequence: Synthetic oligonucleotide
  misc_feature 1..20: note = Target: SCN10A; (+) strand; PAM type: YTN; PAM sequence: TTC
  source 1..20: mol_type = other DNA
cccctgttactagtttctag

SEQ ID NO: 67251 - DNA, 20 bp, synthetic construct
  misc_feature 1..20: note = Description of Artificial Sequence: Synthetic oligonucleotide
  misc_feature 1..20: note = Target: SCN10A; (+) strand; PAM type: YTN; PAM sequence: CTG
  source 1..20: mol_type = other DNA
ttactagtttctaggtgcct

SEQ ID NO: 67252 - DNA, 20 bp, synthetic construct
  misc_feature 1..20: note = Description of Artificial Sequence: Synthetic oligonucleotide
  misc_feature 1..20: note = Target: SCN10A; (+) strand; PAM type: YTN; PAM sequence: TTA
  source 1..20: mol_type = other DNA
ctagtttctaggtgcctcac

SEQ ID NO: 67253 - DNA, 20 bp, synthetic construct
  misc_feature 1..20: note = Description of Artificial Sequence: Synthetic oligonucleotide
  misc_feature 1..20: note = Target: SCN10A; (+) strand; PAM type: YTN; PAM sequence: CTA
  source 1..20: mol_type = other DNA
gtttctaggtgcctcactgt

SEQ ID NO: 67254 - DNA, 20 bp, synthetic construct
  misc_feature 1..20: note = Description of Artificial Sequence: Synthetic oligonucleotide
  misc_feature 1..20: note = Target: SCN10A; (+) strand; PAM type: YTN; PAM sequence: TTT
  source 1..20: mol_type = other DNA
ctaggtgcctcactgtccct

SEQ ID NO: 67255 - DNA, 20 bp, synthetic construct
  misc_feature 1..20: note = Description of Artificial Sequence: Synthetic oligonucleotide
  misc_feature 1..20: note = Target: SCN10A; (+) strand; PAM type: YTN; PAM sequence: TTC
  source 1..20: mol_type = other DNA
taggtgcctcactgtccctt

SEQ ID NO: 67256 - DNA, 20 bp, synthetic construct
  misc_feature 1..20: note = Description of Artificial Sequence: Synthetic oligonucleotide
  misc_feature 1..20: note = Target: SCN10A; (+) strand; PAM type: YTN; PAM sequence: CTA
  source 1..20: mol_type = other DNA
ggtgcctcactgtcccttat

SEQ ID NO: 67257 - DNA, 20 bp, synthetic construct
  misc_feature 1..20: note = Description of Artificial Sequence: Synthetic oligonucleotide
  misc_feature 1..20: note = Target: SCN10A; (+) strand; PAM type: YTN; PAM sequence: CTC
  source 1..20: mol_type = other DNA
actgtcccttattcattccc

SEQ ID NO: 67258 - DNA, 20 bp, synthetic construct
  misc_feature 1..20: note = Description of Artificial Sequence: Synthetic oligonucleotide
  misc_feature 1..20: note = Target: SCN10A; (+) strand; PAM type: YTN; PAM sequence: CTG
  source 1..20: mol_type = other DNA
tcccttattcattccctaag

SEQ ID NO: 67259 - DNA, 20 bp, synthetic construct
  misc_feature 1..20: note = Description of Artificial Sequence: Synthetic oligonucleotide
  misc_feature 1..20: note = Target: SCN10A; (+) strand; PAM type: YTN; PAM sequence: CTT
  source 1..20: mol_type = other DNA
attcattccctaagcccagc

SEQ ID NO: 67260 - DNA, 20 bp, synthetic construct
  misc_feature 1..20: note = Description of Artificial Sequence: Synthetic oligonucleotide
  misc_feature 1..20: note = Target: SCN10A; (+) strand; PAM type: YTN; PAM sequence: TTA
  source 1..20: mol_type = other DNA
ttcattccctaagcccagcc

SEQ ID NO: 67261 - DNA, 20 bp, synthetic construct
  misc_feature 1..20: note = Description of Artificial Sequence: Synthetic oligonucleotide
  misc_feature 1..20: note = Target: SCN10A; (+) strand; PAM type: YTN; PAM sequence: TTC
  source 1..20: mol_type = other DNA
attccctaagcccagcccac

SEQ ID NO: 67262 - DNA, 20 bp, synthetic construct
  misc_feature 1..20: note = Description of Artificial Sequence: Synthetic oligonucleotide
  misc_feature 1..20: note = Target: SCN10A; (+) strand; PAM type: YTN; PAM sequence: TTC
  source 1..20: mol_type = other DNA
cctaagcccagcccacacct

SEQ ID NO: 67263 - DNA, 20 bp, synthetic construct
  misc_feature 1..20: note = Description of Artificial Sequence: Synthetic oligonucleotide
  misc_feature 1..20: note = Target: SCN10A; (+) strand; PAM type: YTN; PAM sequence: CTA
  source 1..20: mol_type = other DNA
agcccagcccacacctctgt

SEQ ID NO: 67264 - DNA, 20 bp, synthetic construct
  misc_feature 1..20: note = Description of Artificial Sequence: Synthetic oligonucleotide
  misc_feature 1..20: note = Target: SCN10A; (+) strand; PAM type: YTN; PAM sequence: CTC
  source 1..20: mol_type = other DNA
tgtaaatactttactaaact

SEQ ID NO: 67265 - DNA, 20 bp, synthetic construct
  misc_feature 1..20: note = Description of Artificial Sequence: Synthetic oligonucleotide
  misc_feature 1..20: note = Target: SCN10A; (+) strand; PAM type: YTN; PAM sequence: CTG
  source 1..20: mol_type = other DNA
taaatactttactaaactct

SEQ ID NO: 67266 - DNA, 20 bp, synthetic construct
  misc_feature 1..20: note = Description of Artificial Sequence: Synthetic oligonucleotide
  misc_feature 1..20: note = Target: SCN10A; (+) strand; PAM type: YTN; PAM sequence: CTT
  source 1..20: mol_type = other DNA
tactaaactctctctattag

SEQ ID NO: 67267 - DNA, 20 bp, synthetic construct
  misc_feature 1..20: note = Description of Artificial Sequence: Synthetic oligonucleotide
  misc_feature 1..20: note = Target: SCN10A; (+) strand; PAM type: YTN; PAM sequence: TTT
  source 1..20: mol_type = other DNA
actaaactctctctattagc

SEQ ID NO: 67268 - DNA, 20 bp, synthetic construct
  misc_feature 1..20: note = Description of Artificial Sequence: Synthetic oligonucleotide
  misc_feature 1..20: note = Target: SCN10A; (+) strand; PAM type: YTN; PAM sequence: TTA
  source 1..20: mol_type = other DNA
ctaaactctctctattagcc

SEQ ID NO: 67269 - DNA, 20 bp, synthetic construct
  misc_feature 1..20: note = Description of Artificial Sequence: Synthetic oligonucleotide
  misc_feature 1..20: note = Target: SCN10A; (+) strand; PAM type: YTN; PAM sequence: CTA
  source 1..20: mol_type = other DNA
aactctctctattagcccat

SEQ ID NO: 67270 - DNA, 20 bp, synthetic construct
  misc_feature 1..20: note = Description of Artificial Sequence: Synthetic oligonucleotide
  misc_feature 1..20: note = Target: SCN10A; (+) strand; PAM type: YTN; PAM sequence: CTC
  source 1..20: mol_type = other DNA
tctctattagcccatcggag

SEQ ID NO: 67271 - DNA, 20 bp, synthetic construct
  misc_feature 1..20: note = Description of Artificial Sequence: Synthetic oligonucleotide
  misc_feature 1..20: note = Target: SCN10A; (+) strand; PAM type: YTN; PAM sequence: CTC
  source 1..20: mol_type = other DNA
tctattagcccatcggagtg

SEQ ID NO: 67272 - DNA, 20 bp, synthetic construct
  misc_feature 1..20: note = Description of Artificial Sequence: Synthetic oligonucleotide
  misc_feature 1..20: note = Target: SCN10A; (+) strand; PAM type: YTN; PAM sequence: CTC
  source 1..20: mol_type = other DNA
tattagcccatcggagtggt

SEQ ID NO: 67273 - DNA, 20 bp, synthetic construct
  misc_feature 1..20: note = Description of Artificial Sequence: Synthetic oligonucleotide
  misc_feature 1..20: note = Target: SCN10A; (+) strand; PAM type: YTN; PAM sequence: CTA
  source 1..20: mol_type = other DNA
ttagcccatcggagtggtcc

SEQ ID NO: 67274 - DNA, 20 bp, synthetic construct
  misc_feature 1..20: note = Description of Artificial Sequence: Synthetic oligonucleotide
  misc_feature 1..20: note = Target: SCN10A; (+) strand; PAM type: YTN; PAM sequence: TTA
  source 1..20: mol_type = other DNA
gcccatcggagtggtccatc

SEQ ID NO: 67275 - DNA, 20 bp, synthetic construct
  misc_feature 1..20: note = Description of Artificial Sequence: Synthetic oligonucleotide
  misc_feature 1..20: note = Target: SCN10A; (+) strand; PAM type: YTN; PAM sequence: CTG
  source 1..20: mol_type = other DNA
tttcttgctgggaccctgaa

SEQ ID NO: 67276 - DNA, 20 bp, synthetic construct
  misc_feature 1..20: note = Description of Artificial Sequence: Synthetic oligonucleotide
  misc_feature 1..20: note = Target: SCN10A; (+) strand; PAM type: YTN; PAM sequence: TTT
  source 1..20: mol_type = other DNA
cttgctgggaccctgaatca

SEQ ID NO: 67277 - DNA, 20 bp, synthetic construct
  misc_feature 1..20: note = Description of Artificial Sequence: Synthetic oligonucleotide
  misc_feature 1..20: note = Target: SCN10A; (+) strand; PAM type: YTN; PAM sequence: TTC
  source 1..20: mol_type = other DNA
ttgctgggaccctgaatcac

SEQ ID NO: 67278 - DNA, 20 bp, synthetic construct
  misc_feature 1..20: note = Description of Artificial Sequence: Synthetic oligonucleotide
  misc_feature 1..20: note = Target: SCN10A; (+) strand; PAM type: YTN; PAM sequence: CTT
  source 1..20: mol_type = other DNA
gctgggaccctgaatcacat

SEQ ID NO: 67279 - DNA, 20 bp, synthetic construct
  misc_feature 1..20: note = Description of Artificial Sequence: Synthetic oligonucleotide
  misc_feature 1..20: note = Target: SCN10A; (+) strand; PAM type: YTN; PAM sequence: TTG
  source 1..20: mol_type = other DNA
ctgggaccctgaatcacatg

SEQ ID NO: 67280 - DNA, 20 bp, synthetic construct
  misc_feature 1..20: note = Description of Artificial Sequence: Synthetic oligonucleotide
  misc_feature 1..20: note = Target: SCN10A; (+) strand; PAM type: YTN; PAM sequence: CTG
  source 1..20: mol_type = other DNA
ggaccctgaatcacatgaca

SEQ ID NO: 67281 - DNA, 20 bp, synthetic construct
  misc_feature 1..20: note = Description of Artificial Sequence: Synthetic oligonucleotide
  misc_feature 1..20: note = Target: SCN10A; (+) strand; PAM type: YTN; PAM sequence: CTG
  source 1..20: mol_type = other DNA
aatcacatgacattgagtca

SEQ ID NO: 67282 - DNA, 20 bp, synthetic construct
  misc_feature 1..20: note = Description of Artificial Sequence: Synthetic oligonucleotide
  misc_feature 1..20: note = Target: SCN10A; (+) strand; PAM type: YTN; PAM sequence: TTG
  source 1..20: mol_type = other DNA
agtcagagactgagctaagg

SEQ ID NO: 67283 - DNA, 20 bp, synthetic construct
  misc_feature 1..20: note = Description of Artificial Sequence: Synthetic oligonucleotide
  misc_feature 1..20: note = Target: SCN10A; (+) strand; PAM type: YTN; PAM sequence: CTG
  source 1..20: mol_type = other DNA
agctaaggcaactctaagac

SEQ ID NO: 67284 - DNA, 20 bp, synthetic construct
  misc_feature 1..20: note = Description of Artificial Sequence: Synthetic oligonucleotide
  misc_feature 1..20: note = Target: SCN10A; (+) strand; PAM type: YTN; PAM sequence: CTA
  source 1..20: mol_type = other DNA
aggcaactctaagacttatc

SEQ ID NO: 67285 - DNA, 20 bp, synthetic construct
  misc_feature 1..20: note = Description of Artificial Sequence: Synthetic oligonucleotide
  misc_feature 1..20: note = Target: SCN10A; (+) strand; PAM type: YTN; PAM sequence: CTC
  source 1..20: mol_type = other DNA
taagacttatctgtatcagt

SEQ ID NO: 67286 - DNA, 20 bp, synthetic construct
  misc_feature 1..20: note = Description of Artificial Sequence: Synthetic oligonucleotide
  misc_feature 1..20: note = Target: SCN10A; (+) strand; PAM type: YTN; PAM sequence: CTA
  source 1..20: mol_type = other DNA
agacttatctgtatcagtgg

SEQ ID NO: 67287 - DNA, 20 bp, synthetic construct
  misc_feature 1..20: note = Description of Artificial Sequence: Synthetic oligonucleotide
  misc_feature 1..20: note = Target: SCN10A; (+) strand; PAM type: YTN; PAM sequence: CTT
  source 1..20: mol_type = other DNA
atctgtatcagtggaaccat

SEQ ID NO: 67288 - DNA, 20 bp, synthetic construct
  misc_feature 1..20: note = Description of Artificial Sequence: Synthetic oligonucleotide
  misc_feature 1..20: note = Target: SCN10A; (+) strand; PAM type: YTN; PAM sequence: TTA
  source 1..20: mol_type = other DNA
tctgtatcagtggaaccatt

SEQ ID NO: 67289 - DNA, 20 bp, synthetic construct
  misc_feature 1..20: note = Description of Artificial Sequence: Synthetic oligonucleotide
  misc_feature 1..20: note = Target: SCN10A; (+) strand; PAM type: YTN; PAM sequence: CTG
  source 1..20: mol_type = other DNA
tatcagtggaaccatttatt

SEQ ID NO: 67290 - DNA, 20 bp, synthetic construct
  misc_feature 1..20: note = Description of Artificial Sequence: Synthetic oligonucleotide
  misc_feature 1..20: note = Target: SCN10A; (+) strand; PAM type: YTN; PAM sequence: TTT
  source 1..20: mol_type = other DNA
attggtctctttacaattct

SEQ ID NO: 67291 - DNA, 20 bp, synthetic construct
  misc_feature 1..20: note = Description of Artificial Sequence: Synthetic oligonucleotide
  misc_feature 1..20: note = Target: SCN10A; (+) strand; PAM type: YTN; PAM sequence: TTA
  source 1..20: mol_type = other DNA
ttggtctctttacaattctg

SEQ ID NO: 67292 - DNA, 20 bp, synthetic construct
  misc_feature 1..20: note = Description of Artificial Sequence: Synthetic oligonucleotide
  misc_feature 1..20: note = Target: SCN10A; (+) strand; PAM type: YTN; PAM sequence: TTG
  source 1..20: mol_type = other DNA
gtctctttacaattctgtct

SEQ ID NO: 67293 - DNA, 20 bp, synthetic construct
  misc_feature 1..20: note = Description of Artificial Sequence: Synthetic oligonucleotide
  misc_feature 1..20: note = Target: SCN10A; (+) strand; PAM type: YTN; PAM sequence: CTC
  source 1..20: mol_type = other DNA
tttacaattctgtctgcaat

SEQ ID NO: 67294 - DNA, 20 bp, synthetic construct
  misc_feature 1..20: note = Description of Artificial Sequence: Synthetic oligonucleotide
  misc_feature 1..20: note = Target: SCN10A; (+) strand; PAM type: YTN; PAM sequence: CTT
  source 1..20: mol_type = other DNA
tacaattctgtctgcaattg

SEQ ID NO: 67295 - DNA, 20 bp, synthetic construct
  misc_feature 1..20: note = Description of Artificial Sequence: Synthetic oligonucleotide
  misc_feature 1..20: note = Target: SCN10A; (+) strand; PAM type: YTN; PAM sequence: TTT
  source 1..20: mol_type = other DNA
acaattctgtctgcaattgc

SEQ ID NO: 67296 - DNA, 20 bp, synthetic construct
  misc_feature 1..20: note = Description of Artificial Sequence: Synthetic oligonucleotide
  misc_feature 1..20: note = Target: SCN10A; (+) strand; PAM type: YTN; PAM sequence: TTA
  source 1..20: mol_type = other DNA
caattctgtctgcaattgcg

SEQ ID NO: 67297 - DNA, 20 bp, synthetic construct
  misc_feature 1..20: note = Description of Artificial Sequence: Synthetic oligonucleotide
  misc_feature 1..20: note = Target: SCN10A; (+) strand; PAM type: YTN; PAM sequence: TTC
  source 1..20: mol_type = other DNA
tgtctgcaattgcgctgtat

SEQ ID NO: 67298 - DNA, 20 bp, synthetic construct
  misc_feature 1..20: note = Description of Artificial Sequence: Synthetic oligonucleotide
  misc_feature 1..20: note = Target: SCN10A; (+) strand; PAM type: YTN; PAM sequence: CTG
  source 1..20: mol_type = other DNA
tctgcaattgcgctgtatcc

SEQ ID NO: 67299 - DNA, 20 bp, synthetic construct
  misc_feature 1..20: note = Description of Artificial Sequence: Synthetic oligonucleotide
  misc_feature 1..20: note = Target: SCN10A; (+) strand; PAM type: YTN; PAM sequence: CTG
  source 1..20: mol_type = other DNA
caattgcgctgtatccctgg

SEQ ID NO: 67300 - DNA, 20 bp, synthetic construct
  misc_feature 1..20: note = Description of Artificial Sequence: Synthetic oligonucleotide
  misc_feature 1..20: note = Target: SCN10A; (+) strand; PAM type: YTN; PAM sequence: TTG
  source 1..20: mol_type = other DNA
cgctgtatccctggctagcc

SEQ ID NO: 67301 - DNA, 20 bp, synthetic construct
  misc_feature 1..20: note = Description of Artificial Sequence: Synthetic oligonucleotide
  misc_feature 1..20: note = Target: SCN10A; (+) strand; PAM type: YTN; PAM sequence: CTG
  source 1..20: mol_type = other DNA
tatccctggctagccagaga

SEQ ID NO: 67302 - DNA, 20 bp, synthetic construct
  misc_feature 1..20: note = Description of Artificial Sequence: Synthetic oligonucleotide
  misc_feature 1..20: note = Target: SCN10A; (+) strand; PAM type: YTN; PAM sequence: CTG
  source 1..20: mol_type = other DNA
gctagccagagagggcaaat

SEQ ID NO: 67303 - DNA, 20 bp, synthetic construct
  misc_feature 1..20: note = Description of Artificial Sequence: Synthetic oligonucleotide
  misc_feature 1..20: note = Target: SCN10A; (+) strand; PAM type: YTN; PAM sequence: CTA
  source 1..20: mol_type = other DNA
gccagagagggcaaatgaaa

SEQ ID NO: 67304 - DNA, 20 bp, synthetic construct
  misc_feature 1..20: note = Description of Artificial Sequence: Synthetic oligonucleotide
  misc_feature 1..20: note = Target: SCN10A; (+) strand; PAM type: YTN; PAM sequence: CTA
  source 1..20: mol_type = other DNA
gaaacatcattgctgaaact

SEQ ID NO: 67305 - DNA, 20 bp, synthetic construct
  misc_feature 1..20: note = Description of Artificial Sequence: Synthetic oligonucleotide
  misc_feature 1..20: note = Target: SCN10A; (+) strand; PAM type: YTN; PAM sequence: TTG
  source 1..20: mol_type = other DNA
ctgaaactggaggggagagc

SEQ ID NO: 67306 - DNA, 20 bp, synthetic construct
  misc_feature 1..20: note = Description of Artificial Sequence: Synthetic oligonucleotide
  misc_feature 1..20: note = Target: SCN10A; (+) strand; PAM type: YTN; PAM sequence: CTG
  source 1..20: mol_type = other DNA
aaactggaggggagagctca

SEQ ID NO: 67307 - DNA, 20 bp, synthetic construct
  misc_feature 1..20: note = Description of Artificial Sequence: Synthetic oligonucleotide
  misc_feature 1..20: note = Target: SCN10A; (+) strand; PAM type: YTN; PAM sequence: CTG
  source 1..20: mol_type = other DNA
gaggggagagctcacattaa

SEQ ID NO: 67308 - DNA, 20 bp, synthetic construct
  misc_feature 1..20: note = Description of Artificial Sequence: Synthetic oligonucleotide
  misc_feature 1..20: note = Target: SCN10A; (+) strand; PAM type: YTN; PAM sequence: CTC
  source 1..20: mol_type = other DNA
acattaactcacagctccca

SEQ ID NO: 67309 - DNA, 20 bp, synthetic construct
  misc_feature 1..20: note = Description of Artificial Sequence: Synthetic oligonucleotide
  misc_feature 1..20: note = Target: SCN10A; (+) strand; PAM type: YTN; PAM sequence: TTA
  source 1..20: mol_type = other DNA
actcacagctcccaatccaa

SEQ ID NO: 67310 - DNA, 20 bp, synthetic construct
  misc_feature 1..20: note = Description of Artificial Sequence: Synthetic oligonucleotide
  misc_feature 1..20: note = Target: SCN10A; (+) strand; PAM type: YTN; PAM sequence: CTC
  source 1..20: mol_type = other DNA
acagctcccaatccaatgag

SEQ ID NO: 67311 - DNA, 20 bp, synthetic construct
  misc_feature 1..20: note = Description of Artificial Sequence: Synthetic oligonucleotide
  misc_feature 1..20: note = Target: SCN10A; (+) strand; PAM type: YTN; PAM sequence: CTC
  source 1..20: mol_type = other DNA
ccaatccaatgaggaatccc

SEQ ID NO: 67312 - DNA, 20 bp, synthetic construct
  misc_feature 1..20: note = Description of Artificial Sequence: Synthetic oligonucleotide
  misc_feature 1..20: note = Target: SCN10A; (+) strand; PAM type: YTN; PAM sequence: CTG
  source 1..20: mol_type = other DNA
acttgccattacactctgcg

SEQ ID NO: 67313 - DNA, 20 bp, synthetic construct
  misc_feature 1..20: note = Description of Artificial Sequence: Synthetic oligonucleotide
  misc_feature 1..20: note = Target: SCN10A; (+) strand; PAM type: YTN; PAM sequence: CTT
  source 1..20: mol_type = other DNA
gccattacactctgcgatta

SEQ ID NO: 67314 - DNA, 20 bp, synthetic construct
  misc_feature 1..20: note = Description of Artificial Sequence: Synthetic oligonucleotide
  misc_feature 1..20: note = Target: SCN10A; (+) strand; PAM type: YTN; PAM sequence: TTG
  source 1..20: mol_type = other DNA
ccattacactctgcgattat

SEQ ID NO: 67315 - DNA, 20 bp, synthetic construct
  misc_feature 1..20: note = Description of Artificial Sequence: Synthetic oligonucleotide
  misc_feature 1..20: note = Target: SCN10A; (+) strand; PAM type: YTN; PAM sequence: TTA
  source 1..20: mol_type = other DNA
cactctgcgattattctatt

SEQ ID NO: 67316 - DNA, 20 bp, synthetic construct
  misc_feature 1..20: note = Description of Artificial Sequence: Synthetic oligonucleotide
  misc_feature 1..20: note = Target: SCN10A; (+) strand; PAM type: YTN; PAM sequence: CTC
  source 1..20: mol_type = other DNA
tgcgattattctattaaaga

SEQ ID NO: 67317 - DNA, 20 bp, synthetic construct
  misc_feature 1..20: note = Description of Artificial Sequence: Synthetic oligonucleotide
  misc_feature 1..20: note = Target: SCN10A; (+) strand; PAM type: YTN; PAM sequence: CTG
  source 1..20: mol_type = other DNA
cgattattctattaaagagt

SEQ ID NO: 67318 - DNA, 20 bp, synthetic construct
  misc_feature 1..20: note = Description of Artificial Sequence: Synthetic oligonucleotide
  misc_feature 1..20: note = Target: SCN10A; (+) strand; PAM type: YTN; PAM sequence: TTA
  source 1..20: mol_type = other DNA
ttctattaaagagtgctggc

SEQ ID NO: 67319 - DNA, 20 bp, synthetic construct
  misc_feature 1..20: note = Description of Artificial Sequence: Synthetic oligonucleotide
  misc_feature 1..20: note = Target: SCN10A; (+) strand; PAM type: YTN; PAM sequence: TTC
  source 1..20: mol_type = other DNA
tattaaagagtgctggccag

SEQ ID NO: 67320 - DNA, 20 bp, synthetic construct
  misc_feature 1..20: note = Description of Artificial Sequence: Synthetic oligonucleotide
  misc_feature 1..20: note = Target: SCN10A; (+) strand; PAM type: YTN; PAM sequence: CTA
  source 1..20: mol_type = other DNA
ttaaagagtgctggccagtt

SEQ ID NO: 67321 - DNA, 20 bp, synthetic construct
  misc_feature 1..20: note = Description of Artificial Sequence: Synthetic oligonucleotide
  misc_feature 1..20: note = Target: SCN10A; (+) strand; PAM type: YTN; PAM sequence: TTA
  source 1..20: mol_type = other DNA
aagagtgctggccagttagt

SEQ ID NO: 67322 - DNA, 20 bp, synthetic construct
  misc_feature 1..20: note = Description of Artificial Sequence: Synthetic oligonucleotide
  misc_feature 1..20: note = Target: SCN10A; (+) strand; PAM type: YTN; PAM sequence: CTG
  source 1..20: mol_type = other DNA
gccagttagtcactgttgcc

SEQ ID NO: 67323 - DNA, 20 bp, synthetic construct
  misc_feature 1..20: note = Description of Artificial Sequence: Synthetic oligonucleotide
  misc_feature 1..20: note = Target: SCN10A; (+) strand; PAM type: YTN; PAM sequence: TTA
  source 1..20: mol_type = other DNA
gtcactgttgcctaatttgc

SEQ ID NO: 67324 - DNA, 20 bp, synthetic construct
  misc_feature 1..20: note = Description of Artificial Sequence: Synthetic oligonucleotide
  misc_feature 1..20: note = Target: SCN10A; (+) strand; PAM type: YTN; PAM sequence: CTG
  source 1..20: mol_type = other DNA
ttgcctaatttgctcatttt

SEQ ID NO: 67325 - DNA, 20 bp, synthetic construct
  misc_feature 1..20: note = Description of Artificial Sequence: Synthetic oligonucleotide
  misc_feature 1..20: note = Target: SCN10A; (+) strand; PAM type: YTN; PAM sequence: TTG
  source 1..20: mol_type = other DNA
cctaatttgctcattttggc

SEQ ID NO: 67326 - DNA, 20 bp, synthetic construct
  misc_feature 1..20: note = Description of Artificial Sequence: Synthetic oligonucleotide
  misc_feature 1..20: note = Target: SCN10A; (+) strand; PAM type: YTN; PAM sequence: CTA
  source 1..20: mol_type = other DNA
atttgctcattttggcaaat

SEQ ID NO: 67327 - DNA, 20 bp, synthetic construct
  misc_feature 1..20: note = Description of Artificial Sequence: Synthetic oligonucleotide
  misc_feature 1..20: note = Target: SCN10A; (+) strand; PAM type: YTN; PAM sequence: TTT
  source 1..20: mol_type = other DNA
gctcattttggcaaattatt

SEQ ID NO: 67328 - DNA, 20 bp, synthetic construct
  misc_feature 1..20: note = Description of Artificial Sequence: Synthetic oligonucleotide
  misc_feature 1..20: note = Target: SCN10A; (+) strand; PAM type: YTN; PAM sequence: TTG
  source 1..20: mol_type = other DNA
ctcattttggcaaattattt

SEQ ID NO: 67329 - DNA, 20 bp, synthetic construct
  misc_feature 1..20: note = Description of Artificial Sequence: Synthetic oligonucleotide
  misc_feature 1..20: note = Target: SCN10A; (+) strand; PAM type: YTN; PAM sequence: CTC
  source 1..20: mol_type = other DNA
attttggcaaattatttctt

SEQ ID NO: 67330 - DNA, 20 bp, synthetic construct
  misc_feature 1..20: note = Description of Artificial Sequence: Synthetic oligonucleotide
  misc_feature 1..20: note = Target: SCN10A; (+) strand; PAM type: YTN; PAM sequence: TTT
  source 1..20: mol_type = other DNA
tggcaaattatttcttctgt

SEQ ID NO: 67331 - DNA, 20 bp, synthetic construct
  misc_feature 1..20: note = Description of Artificial Sequence: Synthetic oligonucleotide
  misc_feature 1..20: note = Target: SCN10A; (+) strand; PAM type: YTN; PAM sequence: TTT
  source 1..20: mol_type = other DNA
ggcaaattatttcttctgtg

SEQ ID NO: 67332 - DNA, 20 bp, synthetic construct
  misc_feature 1..20: note = Description of Artificial Sequence: Synthetic oligonucleotide
  misc_feature 1..20: note = Target: SCN10A; (+) strand; PAM type: YTN; PAM sequence: TTG
  source 1..20: mol_type = other DNA
gcaaattatttcttctgtga

SEQ ID NO: 67333 - DNA, 20 bp, synthetic construct
  misc_feature 1..20: note = Description of Artificial Sequence: Synthetic oligonucleotide
  misc_feature 1..20: note = Target: SCN10A; (+) strand; PAM type: YTN; PAM sequence: TTA
  source 1..20: mol_type = other DNA
tttcttctgtgagtaaagca

SEQ ID NO: 67334 - DNA, 20 bp, synthetic construct
  misc_feature 1..20: note = Description of Artificial Sequence: Synthetic oligonucleotide
  misc_feature 1..20: note = Target: SCN10A; (+) strand; PAM type: YTN; PAM sequence: TTT
  source 1..20: mol_type = other DNA
cttctgtgagtaaagcaagg

SEQ ID NO: 67335 - DNA, 20 bp, synthetic construct
  misc_feature 1..20: note = Description of Artificial Sequence: Synthetic oligonucleotide
  misc_feature 1..20: note = Target: SCN10A; (+) strand; PAM type: YTN; PAM sequence: TTC
  source 1..20: mol_type = other DNA
ttctgtgagtaaagcaagga

SEQ ID NO: 67336 - DNA, 20 bp, synthetic construct
  misc_feature 1..20: note = Description of Artificial Sequence: Synthetic oligonucleotide
  misc_feature 1..20: note = Target: SCN10A; (+) strand; PAM type: YTN; PAM sequence: CTT
  source 1..20: mol_type = other DNA
ctgtgagtaaagcaaggaat

SEQ ID NO: 67337 - DNA, 20 bp, synthetic construct
  misc_feature 1..20: note = Description of Artificial Sequence: Synthetic oligonucleotide
  misc_feature 1..20: note = Target: SCN10A; (+) strand; PAM type: YTN; PAM sequence: TTC
  source 1..20: mol_type = other DNA
tgtgagtaaagcaaggaata

SEQ ID NO: 67338 - DNA, 20 bp, synthetic construct
  misc_feature 1..20: note = Description of Artificial Sequence: Synthetic oligonucleotide
  misc_feature 1..20: note = Target: SCN10A; (+) strand; PAM type: YTN; PAM sequence: CTG
  source 1..20: mol_type = other DNA
tgagtaaagcaaggaatact

SEQ ID NO: 67339 - DNA, 20 bp, synthetic construct
  misc_feature 1..20: note = Description of Artificial Sequence: Synthetic oligonucleotide
  misc_feature 1..20: note = Target: SCN10A; (+) strand; PAM type: YTN; PAM sequence: CTG
  source 1..20: mol_type = other DNA
tgcttctattcagatctgtc

SEQ ID NO: 67340 - DNA, 20 bp, synthetic construct
  misc_feature 1..20: note = Description of Artificial Sequence: Synthetic oligonucleotide
  misc_feature 1..20: note = Target: SCN10A; (+) strand; PAM type: YTN; PAM sequence: CTT
  source 1..20: mol_type = other DNA
ctattcagatctgtcctaag

SEQ ID NO: 67341 - DNA, 20 bp, synthetic construct
  misc_feature 1..20: note = Description of Artificial Sequence: Synthetic oligonucleotide
  misc_feature 1..20: note = Target: SCN10A; (+) strand; PAM type: YTN; PAM sequence: TTC
  source 1..20: mol_type = other DNA
tattcagatctgtcctaaga

SEQ ID NO: 67342 - DNA, 20 bp, synthetic construct
  misc_feature 1..20: note = Description of Artificial Sequence: Synthetic oligonucleotide
  misc_feature 1..20: note = Target: SCN10A; (+) strand; PAM type: YTN; PAM sequence: CTA
  source 1..20: mol_type = other DNA
ttcagatctgtcctaagaaa

SEQ ID NO: 67343 - DNA, 20 bp, synthetic construct
  misc_feature 1..20: note = Description of Artificial Sequence: Synthetic oligonucleotide
  misc_feature 1..20: note = Target: SCN10A; (+) strand; PAM type: YTN; PAM sequence: TTC
  source 1..20: mol_type = other DNA
agatctgtcctaagaaactt

SEQ ID NO: 67344 - DNA, 20 bp, synthetic construct
  misc_feature 1..20: note = Description of Artificial Sequence: Synthetic oligonucleotide
  misc_feature 1..20: note = Target: SCN10A; (+) strand; PAM type: YTN; PAM sequence: CTG
  source 1..20: mol_type = other DNA
tcctaagaaacttcctgaat

SEQ ID NO: 67345 - DNA, 20 bp, synthetic construct
  misc_feature 1..20: note = Description of Artificial Sequence: Synthetic oligonucleotide
  misc_feature 1..20: note = Target: SCN10A; (+) strand; PAM type: YTN; PAM sequence: CTA
  source 1..20: mol_type = other DNA
agaaacttcctgaatttctc

SEQ ID NO: 67346 - DNA, 20 bp, synthetic construct
  misc_feature 1..20: note = Description of Artificial Sequence: Synthetic oligonucleotide
  misc_feature 1..20: note = Target: SCN10A; (+) strand; PAM type: YTN; PAM sequence: CTT
  source 1..20: mol_type = other DNA
cctgaatttctctgggtgcc

SEQ ID NO: 67347 - DNA, 20 bp, synthetic construct
  misc_feature 1..20: note = Description of Artificial Sequence: Synthetic oligonucleotide
  misc_feature 1..20: note = Target: SCN10A; (+) strand; PAM type: YTN; PAM sequence: TTC
  source 1..20: mol_type = other DNA
ctgaatttctctgggtgcca

SEQ ID NO: 67348 - DNA, 20 bp, synthetic construct
  misc_feature 1..20: note = Description of Artificial Sequence: Synthetic oligonucleotide
  misc_feature 1..20: note = Target: SCN10A; (+) strand; PAM type: YTN; PAM sequence: CTG
  source 1..20: mol_type = other DNA
aatttctctgggtgccattt

SEQ ID NO: 67349 - DNA, 20 bp, synthetic construct
  misc_feature 1..20: note = Description of Artificial Sequence: Synthetic oligonucleotide
  misc_feature 1..20: note = Target: SCN10A; (+) strand; PAM type: YTN; PAM sequence: TTT
  source 1..20: mol_type = other DNA
ctctgggtgccatttgccca

SEQ ID NO: 67350 - DNA, 20 bp, synthetic construct
  misc_feature 1..20: note = Description of Artificial Sequence: Synthetic oligonucleotide
  misc_feature 1..20: note = Target: SCN10A; (+) strand; PAM type: YTN; PAM sequence: TTC
  source 1..20: mol_type = other DNA
tctgggtgccatttgcccag

SEQ ID NO: 67351 - DNA, 20 bp, synthetic construct
  misc_feature 1..20: note = Description of Artificial Sequence: Synthetic oligonucleotide
  misc_feature 1..20: note = Target: SCN10A; (+) strand; PAM type: YTN; PAM sequence: CTC
  source 1..20: mol_type = other DNA
tgggtgccatttgcccagcc

SEQ ID NO: 67352 - DNA, 20 bp, synthetic construct
  misc_feature 1..20: note = Description of Artificial Sequence: Synthetic oligonucleotide
  misc_feature 1..20: note = Target: SCN10A; (+) strand; PAM type: YTN; PAM sequence: CTG
  source 1..20: mol_type = other DNA
ggtgccatttgcccagccta

SEQ ID NO: 67353 - DNA, 20 bp, synthetic construct
  misc_feature 1..20: note = Description of Artificial Sequence: Synthetic oligonucleotide
  misc_feature 1..20: note = Target: SCN10A; (+) strand; PAM type: YTN; PAM sequence: TTT
  source 1..20: mol_type = other DNA
gcccagcctagaagagtttg

SEQ ID NO: 67354 - DNA, 20 bp, synthetic construct
  misc_feature 1..20: note = Description of Artificial Sequence: Synthetic oligonucleotide
  misc_feature 1..20: note = Target: SCN10A; (+) strand; PAM type: YTN; PAM sequence: TTG
  source 1..20: mol_type = other DNA
cccagcctagaagagtttgc

SEQ ID NO: 67355 - DNA, 20 bp, synthetic construct
  misc_feature 1..20: note = Description of Artificial Sequence: Synthetic oligonucleotide
  misc_feature 1..20: note = Target: SCN10A; (+) strand; PAM type: YTN; PAM sequence: CTA
  source 1..20: mol_type = other DNA
gaagagtttgcatagagcca

SEQ ID NO: 67356 - DNA, 20 bp, synthetic construct
  misc_feature 1..20: note = Description of Artificial Sequence: Synthetic oligonucleotide
  misc_feature 1..20: note = Target: SCN10A; (+) strand; PAM type: YTN; PAM sequence: TTT
  source 1..20: mol_type = other DNA
gcatagagccataagcagga

SEQ ID NO: 67357 - DNA, 20 bp, synthetic construct
  misc_feature 1..20: note = Description of Artificial Sequence: Synthetic oligonucleotide
  misc_feature 1..20: note = Target: SCN10A; (+) strand; PAM type: YTN; PAM sequence: TTG
  source 1..20: mol_type = other DNA
catagagccataagcaggaa

SEQ ID NO: 67358 - DNA, 20 bp, synthetic construct
  misc_feature 1..20: note = Description of Artificial Sequence: Synthetic oligonucleotide
  misc_feature 1..20: note = Target: SCN10A; (+) strand; PAM type: YTN; PAM sequence: CTT
  source 1..20: mol_type = other DNA
cagtttttctcatacctgtc

SEQ ID NO: 67359 - DNA, 20 bp, synthetic construct
  misc_feature 1..20: note = Description of Artificial Sequence: Synthetic oligonucleotide
  misc_feature 1..20: note = Target: SCN10A; (+) strand; PAM type: YTN; PAM sequence: TTC
  source 1..20: mol_type = other DNA
agtttttctcatacctgtcc

SEQ ID NO: 67360 - DNA, 20 bp, synthetic construct
  misc_feature 1..20: note = Description of Artificial Sequence: Synthetic oligonucleotide
  misc_feature 1..20: note = Target: SCN10A; (+) strand; PAM type: YTN; PAM sequence: TTT
  source 1..20: mol_type = other DNA
ttctcatacctgtccaacaa

SEQ ID NO: 67361 - DNA, 20 bp, synthetic construct
  misc_feature 1..20: note = Description of Artificial Sequence: Synthetic oligonucleotide
  misc_feature 1..20: note = Target: SCN10A; (+) strand; PAM type: YTN; PAM sequence: TTT
  source 1..20: mol_type = other DNA
tctcatacctgtccaacaag

SEQ ID NO: 67362 - DNA, 20 bp, synthetic construct
  misc_feature 1..20: note = Description of Artificial Sequence: Synthetic oligonucleotide
  misc_feature 1..20: note = Target: SCN10A; (+) strand; PAM type: YTN; PAM sequence: TTT
  source 1..20: mol_type = other DNA
ctcatacctgtccaacaaga

SEQ ID NO: 67363 - DNA, 20 bp, synthetic construct
  misc_feature 1..20: note = Description of Artificial Sequence: Synthetic oligonucleotide
  misc_feature 1..20: note = Target: SCN10A; (+) strand; PAM type: YTN; PAM sequence: TTC
  source 1..20: mol_type = other DNA
tcatacctgtccaacaagaa

SEQ ID NO: 67364 - DNA, 20 bp, synthetic construct
  misc_feature 1..20: note = Description of Artificial Sequence: Synthetic oligonucleotide
  misc_feature 1..20: note = Target: SCN10A; (+) strand; PAM type: YTN; PAM sequence: CTC
  source 1..20: mol_type = other DNA
atacctgtccaacaagaaag

SEQ ID NO: 67365 - DNA, 20 bp, synthetic construct
  misc_feature 1..20: note = Description of Artificial Sequence: Synthetic oligonucleotide
  misc_feature 1..20: note = Target: SCN10A; (+) strand; PAM type: YTN; PAM sequence: CTG
  source 1..20: mol_type = other DNA
tccaacaagaaagcaggcct

SEQ ID NO: 67366 - DNA, 20 bp, synthetic construct
  misc_feature 1..20: note = Description of Artificial Sequence: Synthetic oligonucleotide
  misc_feature 1..20: note = Target: SCN10A; (+) strand; PAM type: YTN; PAM sequence: CTA
  source 1..20: mol_type = other DNA
tcactgaggcagtgatgttg

SEQ ID NO: 67367 - DNA, 20 bp, synthetic construct
  misc_feature 1..20: note = Description of Artificial Sequence: Synthetic oligonucleotide
  misc_feature 1..20: note = Target: SCN10A; (+) strand; PAM type: YTN; PAM sequence: CTG
  source 1..20: mol_type = other DNA
aggcagtgatgttgagtggg

SEQ ID NO: 67368 - DNA, 20 bp, synthetic construct
  misc_feature 1..20: note = Description of Artificial Sequence: Synthetic oligonucleotide
  misc_feature 1..20: note = Target: SCN10A; (+) strand; PAM type: YTN; PAM sequence: TTG
  source 1..20: mol_type = other DNA
agtggggacagagaagcact

SEQ ID NO: 67369 - DNA, 20 bp, synthetic construct
  misc_feature 1..20: note = Description of Artificial Sequence: Synthetic oligonucleotide
  misc_feature 1..20: note = Target: SCN10A; (+) strand; PAM type: YTN; PAM sequence: CTG
  source 1..20: mol_type = other DNA
ataagaaatatggggtcaaa

SEQ ID NO: 67370 - DNA, 20 bp, synthetic construct
  misc_feature 1..20: note = Description of Artificial Sequence: Synthetic oligonucleotide
  misc_feature 1..20: note = Target: SCN10A; (+) strand; PAM type: YTN; PAM sequence: TTT
  source 1..20: mol_type = other DNA
gcatcactactgcagaataa

SEQ ID NO: 67371 - DNA, 20 bp, synthetic construct
  misc_feature 1..20: note = Description of Artificial Sequence: Synthetic oligonucleotide
  misc_feature 1..20: note = Target: SCN10A; (+) strand; PAM type: YTN; PAM sequence: TTG
  source 1..20: mol_type = other DNA
catcactactgcagaataaa

SEQ ID NO: 67372 - DNA, 20 bp, synthetic construct
  misc_feature 1..20: note = Description of Artificial Sequence: Synthetic oligonucleotide
  misc_feature 1..20: note = Target: SCN10A; (+) strand; PAM type: YTN; PAM sequence: CTA
  source 1..20: mol_type = other DNA
ctgcagaataaaccaggaaa

SEQ ID NO: 67373 - DNA, 20 bp, synthetic construct
  misc_feature 1..20: note = Description of Artificial Sequence: Synthetic oligonucleotide
  misc_feature 1..20: note = Target: SCN10A; (+) strand; PAM type: YTN; PAM sequence: CTG
  source 1..20: mol_type = other DNA
cagaataaaccaggaaacct

SEQ ID NO: 67374 - DNA, 20 bp, synthetic construct
  misc_feature 1..20: note = Description of Artificial Sequence: Synthetic oligonucleotide
  misc_feature 1..20: note = Target: SCN10A; (+) strand; PAM type: YTN; PAM sequence: CTG
  source 1..20: mol_type = other DNA
tttgacctcaggccaactca

SEQ ID NO: 67375 - DNA, 20 bp, synthetic construct
  misc_feature 1..20: note = Description of Artificial Sequence: Synthetic oligonucleotide
  misc_feature 1..20: note = Target: SCN10A; (+) strand; PAM type: YTN; PAM sequence: TTT
  source 1..20: mol_type = other DNA
gacctcaggccaactcaatc

SEQ ID NO: 67376 - DNA, 20 bp, synthetic construct
  misc_feature 1..20: note = Description of Artificial Sequence: Synthetic oligonucleotide
  misc_feature 1..20: note = Target: SCN10A; (+) strand; PAM type: YTN; PAM sequence: TTG
  source 1..20: mol_type = other DNA
acctcaggccaactcaatct

SEQ ID NO: 67377 - DNA, 20 bp, synthetic construct
  misc_feature 1..20: note = Description of Artificial Sequence: Synthetic oligonucleotide
  misc_feature 1..20: note = Target: SCN10A; (+) strand; PAM type: YTN; PAM sequence: CTC
  source 1..20: mol_type = other DNA
aggccaactcaatctctctc

SEQ ID NO: 67378 - DNA, 20 bp, synthetic construct
  misc_feature 1..20: note = Description of Artificial Sequence: Synthetic oligonucleotide
  misc_feature 1..20: note = Target: SCN10A; (+) strand; PAM type: YTN; PAM sequence: CTC
  source 1..20: mol_type = other DNA
aatctctctctctctctggg

SEQ ID NO: 67379 - DNA, 20 bp, synthetic construct
  misc_feature 1..20: note = Description of Artificial Sequence: Synthetic oligonucleotide
  misc_feature 1..20: note = Target: SCN10A; (+) strand; PAM type: YTN; PAM sequence: CTC
  source 1..20: mol_type = other DNA
tctctctctctgggtctcat

SEQ ID NO: 67380 - DNA, 20 bp, synthetic construct
  misc_feature 1..20: note = Description of Artificial Sequence: Synthetic oligonucleotide
  misc_feature 1..20: note = Target: SCN10A; (+) strand; PAM type: YTN; PAM sequence: CTC
  source 1..20: mol_type = other DNA
tctctctctgggtctcatct

SEQ ID NO: 67381 - DNA, 20 bp, synthetic construct
  misc_feature 1..20: note = Description of Artificial Sequence: Synthetic oligonucleotide
  misc_feature 1..20: note = Target: SCN10A; (+) strand; PAM type: YTN; PAM sequence: CTC
  source 1..20: mol_type = other DNA
tctctctgggtctcatcttc

SEQ ID NO: 67382 - DNA, 20 bp, synthetic construct
  misc_feature 1..20: note = Description of Artificial Sequence: Synthetic oligonucleotide
  misc_feature 1..20: note = Target: SCN10A; (+) strand; PAM type: YTN; PAM sequence: CTC
  source 1..20: mol_type = other DNA
tctctgggtctcatcttcta

SEQ ID NO: 67383 - DNA, 20 bp, synthetic construct
  misc_feature 1..20: note = Description of Artificial Sequence: Synthetic oligonucleotide
  misc_feature 1..20: note = Target: SCN10A; (+) strand; PAM type: YTN; PAM sequence: CTC
  source 1..20: mol_type = other DNA
tctgggtctcatcttctatg

SEQ ID NO: 67384 - DNA, 20 bp, synthetic construct
  misc_feature 1..20: note = Description of Artificial Sequence: Synthetic oligonucleotide
  misc_feature 1..20: note = Target: SCN10A; (+) strand; PAM type: YTN; PAM sequence: CTC
  source 1..20: mol_type = other DNA
tgggtctcatcttctatgtc

SEQ ID NO: 67385 - DNA, 20 bp, synthetic construct
  misc_feature 1..20: note = Description of Artificial Sequence: Synthetic oligonucleotide
  misc_feature 1..20: note = Target: SCN10A; (+) strand; PAM type: YTN; PAM sequence: CTG
  source 1..20: mol_type = other DNA
ggtctcatcttctatgtctg

SEQ ID NO: 67386 - DNA, 20 bp, synthetic construct
  misc_feature 1..20: note = Description of Artificial Sequence: Synthetic oligonucleotide
  misc_feature 1..20: note = Target: SCN10A; (+) strand; PAM type: YTN; PAM sequence: CTC
  source 1..20: mol_type = other DNA
atcttctatgtctgtaaaaa

SEQ ID NO: 67387 - DNA, 20 bp, synthetic construct
  misc_feature 1..20: note = Description of Artificial Sequence: Synthetic oligonucleotide
  misc_feature 1..20: note = Target: SCN10A; (+) strand; PAM type: YTN; PAM sequence: CTT
  source 1..20: mol_type = other DNA
ctatgtctgtaaaaaaggag

SEQ ID NO: 67388 - DNA, 20 bp, synthetic construct
  misc_feature 1..20: note = Description of Artificial Sequence: Synthetic oligonucleotide
  misc_feature 1..20: note = Target: SCN10A; (+) strand; PAM type: YTN; PAM sequence: TTC
  source 1..20: mol_type = other DNA
tatgtctgtaaaaaaggagt

SEQ ID NO: 67389 - DNA, 20 bp, synthetic construct
  misc_feature 1..20: note = Description of Artificial Sequence: Synthetic oligonucleotide
  misc_feature 1..20: note = Target: SCN10A; (+) strand; PAM type: YTN; PAM sequence: CTA
  source 1..20: mol_type = other DNA
tgtctgtaaaaaaggagtag

SEQ ID NO: 67390 - DNA, 20 bp, synthetic construct
  misc_feature 1..20: note = Description of Artificial Sequence: Synthetic oligonucleotide
  misc_feature 1..20: note = Target: SCN10A; (+) strand; PAM type: YTN; PAM sequence: CTG
  source 1..20: mol_type = other DNA
taaaaaaggagtagaatggg

SEQ ID NO: 67391 - DNA, 20 bp, synthetic construct
  misc_feature 1..20: note = Description of Artificial Sequence: Synthetic oligonucleotide
  misc_feature 1..20: note = Target: SCN10A; (+) strand; PAM type: YTN; PAM sequence: TTG
  source 1..20: mol_type = other DNA
gacaggatgatggctaaaga

SEQ ID NO: 67392 - DNA, 20 bp, synthetic construct
  misc_feature 1..20: note = Description of Artificial Sequence: Synthetic oligonucleotide
  misc_feature 1..20: note = Target: SCN10A; (+) strand; PAM type: YTN; PAM sequence: CTA
  source 1..20: mol_type = other DNA
aagatcccttccattggtga

SEQ ID NO: 67393 - DNA, 20 bp, synthetic construct
  misc_feature 1..20: note = Description of Artificial Sequence: Synthetic oligonucleotide
  misc_feature 1..20: note = Target: SCN10A; (+) strand; PAM type: YTN; PAM sequence: CTT
  source 1..20: mol_type = other DNA
ccattggtgatactcaggct

SEQ ID NO: 67394 - DNA, 20 bp, synthetic construct
  misc_feature 1..20: note = Description of Artificial Sequence: Synthetic oligonucleotide
  misc_feature 1..20: note = Target: SCN10A; (+) strand; PAM type: YTN; PAM sequence: TTC
  source 1..20: mol_type = other DNA
cattggtgatactcaggctt

SEQ ID NO: 67395 - DNA, 20 bp, synthetic construct
  misc_feature 1..20: note = Description of Artificial Sequence: Synthetic oligonucleotide
  misc_feature 1..20: note = Target: SCN10A; (+) strand; PAM type: YTN; PAM sequence: TTG
  source 1..20: mol_type = other DNA
gtgatactcaggcttcttgg

SEQ ID NO: 67396 - DNA, 20 bp, synthetic construct
  misc_feature 1..20: note = Description of Artificial Sequence: Synthetic oligonucleotide
  misc_feature 1..20: note = Target: SCN10A; (+) strand; PAM type: YTN; PAM sequence: CTC
  source 1..20: mol_type = other DNA
aggcttcttggctcaaggct

SEQ ID NO: 67397 - DNA, 20 bp, synthetic construct
  misc_feature 1..20: note = Description of Artificial Sequence: Synthetic oligonucleotide
  misc_feature 1..20: note = Target: SCN10A; (+) strand; PAM type: YTN; PAM sequence: CTT
  source 1..20: mol_type = other DNA
cttggctcaaggcttctagg

SEQ ID NO: 67398 - DNA, 20 bp, synthetic construct
  misc_feature 1..20: note = Description of Artificial Sequence: Synthetic oligonucleotide
  misc_feature 1..20: note = Target: SCN10A; (+) strand; PAM type: YTN; PAM sequence: TTC
  source 1..20: mol_type = other DNA
ttggctcaaggcttctaggt

SEQ ID NO: 67399 - DNA, 20 bp, synthetic construct
  misc_feature 1..20: note = Description of Artificial Sequence: Synthetic oligonucleotide
  misc_feature 1..20: note = Target: SCN10A; (+) strand; PAM type: YTN; PAM sequence: CTT
  source 1..20: mol_type = other DNA
ggctcaaggcttctaggtgg

SEQ ID NO: 67400 - DNA, 20 bp, synthetic construct
  misc_feature 1..20: note = Description of Artificial Sequence: Synthetic oligonucleotide
  misc_feature 1..20: note = Target: SCN10A; (+) strand; PAM type: YTN; PAM sequence: TTG
  source 1..20: mol_type = other DNA
gctcaaggcttctaggtgga

SEQ ID NO: 67401 - DNA, 20 bp, synthetic construct
  misc_feature 1..20: note = Description of Artificial Sequence: Synthetic oligonucleotide
  misc_feature 1..20: note = Target: SCN10A; (+) strand; PAM type: YTN; PAM sequence: CTC
  source 1..20: mol_type = other DNA
aaggcttctaggtggaagac

SEQ ID NO: 67402 - DNA, 20 bp, synthetic construct
  misc_feature 1..20: note = Description of Artificial Sequence: Synthetic oligonucleotide
  misc_feature 1..20: note = Target: SCN10A; (+) strand; PAM type: YTN; PAM sequence: CTT
  source 1..20: mol_type = other DNA
ctaggtggaagacagcctga

SEQ ID NO: 67403 - DNA, 20 bp, synthetic construct
  misc_feature 1..20: note = Description of Artificial Sequence: Synthetic oligonucleotide
  misc_feature 1..20: note = Target: SCN10A; (+) strand; PAM type: YTN; PAM sequence: TTC
  source 1..20: mol_type = other DNA
taggtggaagacagcctgag

SEQ ID NO: 67404 - DNA, 20 bp, synthetic construct
  misc_feature 1..20: note = Description of Artificial Sequence: Synthetic oligonucleotide
  misc_feature 1..20: note = Target: SCN10A; (+) strand; PAM type: YTN; PAM sequence: CTA
  source 1..20: mol_type = other DNA
ggtggaagacagcctgaggg

SEQ ID NO: 67405 - DNA, 20 bp, synthetic construct
  misc_feature 1..20: note = Description of Artificial Sequence: Synthetic oligonucleotide
  misc_feature 1..20: note = Target: SCN10A; (+) strand; PAM type: YTN; PAM sequence: CTG
  source 1..20: mol_type = other DNA
agggagtctgaagcattcac

SEQ ID NO: 67406 - DNA, 20 bp, synthetic construct
  misc_feature 1..20: note = Description of Artificial Sequence: Synthetic oligonucleotide
  misc_feature 1..20: note = Target: SCN10A; (+) strand; PAM type: YTN; PAM sequence: CTG
  source 1..20: mol_type = other DNA
aagcattcacaaactcaccg

SEQ ID NO: 67407 - DNA, 20 bp, synthetic construct
  misc_feature 1..20: note = Description of Artificial Sequence: Synthetic oligonucleotide
  misc_feature 1..20: note = Target: SCN10A; (+) strand; PAM type: YTN; PAM sequence: TTC
  source 1..20: mol_type = other DNA
acaaactcaccgagacatcg

SEQ ID NO: 67408 - DNA, 20 bp, synthetic construct
  misc_feature 1..20: note = Description of Artificial Sequence: Synthetic oligonucleotide
  misc_feature 1..20: note = Target: SCN10A; (+) strand; PAM type: YTN; PAM sequence: CTC
  source 1..20: mol_type = other DNA
accgagacatcgacagctcc

SEQ ID NO: 67409 - DNA, 20 bp, synthetic construct
  misc_feature 1..20: note = Description of Artificial Sequence: Synthetic oligonucleotide
  misc_feature 1..20: note = Target: SCN10A; (+) strand; PAM type: YTN; PAM sequence: CTC
  source 1..20: mol_type = other DNA
caggggcaagctcactagtg

SEQ ID NO: 67410 - DNA, 20 bp, synthetic construct
  misc_feature 1..20: note = Description of Artificial Sequence: Synthetic oligonucleotide
  misc_feature 1..20: note = Target: SCN10A; (+) strand; PAM type: YTN; PAM sequence: CTC
  source 1..20: mol_type = other DNA
actagtgggcggcggttggt

SEQ ID NO: 67411 - DNA, 20 bp, synthetic construct
  misc_feature 1..20: note = Description of Artificial Sequence: Synthetic oligonucleotide
  misc_feature 1..20: note = Target: SCN10A; (+) strand; PAM type: YTN; PAM sequence: CTA
  source 1..20: mol_type = other DNA
gtgggcggcggttggtgttc

SEQ ID NO: 67412 - DNA, 20 bp, synthetic construct
  misc_feature 1..20: note = Description of Artificial Sequence: Synthetic oligonucleotide
  misc_feature 1..20: note = Target: SCN10A; (+) strand; PAM type: YTN; PAM sequence: TTG
  source 1..20: mol_type = other DNA
gtgttcatcttctccatgcc

SEQ ID NO: 67413 - DNA, 20 bp, synthetic construct
  misc_feature 1..20: note = Description of Artificial Sequence: Synthetic oligonucleotide
  misc_feature 1..20: note = Target: SCN10A; (+) strand; PAM type: YTN; PAM sequence: TTC
  source 1..20: mol_type = other DNA
atcttctccatgcctggagt

SEQ ID NO: 67414 - DNA, 20 bp, synthetic construct
  misc_feature 1..20: note = Description of Artificial Sequence: Synthetic oligonucleotide
  misc_feature 1..20: note = Target: SCN10A; (+) strand; PAM type: YTN; PAM sequence: CTT
  source 1..20: mol_type = other DNA
ctccatgcctggagtcaggg

SEQ ID NO: 67415 - DNA, 20 bp, synthetic construct
  misc_feature 1..20: note = Description of Artificial Sequence: Synthetic oligonucleotide
  misc_feature 1..20: note = Target: SCN10A; (+) strand; PAM type: YTN; PAM sequence: TTC
  source 1..20: mol_type = other DNA
tccatgcctggagtcagggt

SEQ ID NO: 67416 - DNA, 20 bp, synthetic construct
  misc_feature 1..20: note = Description of Artificial Sequence: Synthetic oligonucleotide
  misc_feature 1..20: note = Target: SCN10A; (+) strand; PAM type: YTN; PAM sequence: CTC
  source 1..20: mol_type = other DNA
catgcctggagtcagggttg

SEQ ID NO: 67417 - DNA, 20 bp, synthetic construct
  misc_feature 1..20: note = Description of Artificial Sequence: Synthetic oligonucleotide
  misc_feature 1..20: note = Target: SCN10A; (+) strand; PAM type: YTN; PAM sequence: CTG
  source 1..20: mol_type = other DNA
gagtcagggttgctgggttg

SEQ ID NO: 67418 - DNA, 20 bp, synthetic construct
  misc_feature 1..20: note = Description of Artificial Sequence: Synthetic oligonucleotide
  misc_feature 1..20: note = Target: SCN10A; (+) strand; PAM type: YTN; PAM sequence: TTG
  source 1..20: mol_type = other DNA
ctgggttgaggaagagggct

SEQ ID NO: 67419 - DNA, 20 bp, synthetic construct
  misc_feature 1..20: note = Description of Artificial Sequence: Synthetic oligonucleotide
  misc_feature 1..20: note = Target: SCN10A; (+) strand; PAM type: YTN; PAM sequence: CTG
  source 1..20: mol_type = other DNA
ggttgaggaagagggcttct

SEQ ID NO: 67420 - DNA, 20 bp, synthetic construct
  misc_feature 1..20: note = Description of Artificial Sequence: Synthetic oligonucleotide
  misc_feature 1..20: note = Target: SCN10A; (+) strand; PAM type: YTN; PAM sequence: TTG
  source 1..20: mol_type = other DNA
aggaagagggcttctaggga

SEQ ID NO: 67421 - DNA, 20 bp, synthetic construct
  misc_feature 1..20: note = Description of Artificial Sequence: Synthetic oligonucleotide
  misc_feature 1..20: note = Target: SCN10A; (+) strand; PAM type: YTN; PAM sequence: CTT
  source 1..20: mol_type = other DNA
ctagggagggggccttgctg

SEQ ID NO: 67422 - DNA, 20 bp, synthetic construct
  misc_feature 1..20: note = Description of Artificial Sequence: Synthetic oligonucleotide
  misc_feature 1..20: note = Target: SCN10A; (+) strand; PAM type: YTN; PAM sequence: TTC
  source 1..20: mol_type = other DNA
tagggagggggccttgctgg

SEQ ID NO: 67423 - DNA, 20 bp, synthetic construct
  misc_feature 1..20: note = Description of Artificial Sequence: Synthetic oligonucleotide
  misc_feature 1..20: note = Target: SCN10A; (+) strand; PAM type: YTN; PAM sequence: CTA
  source 1..20: mol_type = other DNA
gggagggggccttgctggcc

SEQ ID NO: 67424 - DNA, 20 bp, synthetic construct
  misc_feature 1..20: note = Description of Artificial Sequence: Synthetic oligonucleotide
  misc_feature 1..20: note = Target: SCN10A; (+) strand; PAM type: YTN; PAM sequence: CTT
  source 1..20: mol_type = other DNA
gctggccagcacccccaccc

SEQ ID NO: 67425 - DNA, 20 bp, synthetic construct
  misc_feature 1..20: note = Description of Artificial Sequence: Synthetic oligonucleotide
  misc_feature 1..20: note = Target: SCN10A; (+) strand; PAM type: YTN; PAM sequence: TTG
  source 1..20: mol_type = other DNA
ctggccagcacccccaccca

SEQ ID NO: 67426 - DNA, 20 bp, synthetic construct
  misc_feature 1..20: note = Description of Artificial Sequence: Synthetic oligonucleotide
  misc_feature 1..20: note = Target: SCN10A; (+) strand; PAM type: YTN; PAM sequence: CTG
  source 1..20: mol_type = other DNA
gccagcacccccacccagca

SEQ ID NO: 67427 - DNA, 20 bp, synthetic construct
  misc_feature 1..20: note = Description of Artificial Sequence: Synthetic oligonucleotide
  misc_feature 1..20: note = Target: SCN10A; (+) strand; PAM type: YTN; PAM sequence: CTT
  source 1..20: mol_type = other DNA
tcgtggtctccaggaaagac

SEQ ID NO: 67428 - DNA, 20 bp, synthetic construct
  misc_feature 1..20: note = Description of Artificial Sequence: Synthetic oligonucleotide
  misc_feature 1..20: note = Target: SCN10A; (+) strand; PAM type: YTN; PAM sequence: TTT
  source 1..20: mol_type = other DNA
cgtggtctccaggaaagact

SEQ ID NO: 67429 - DNA, 20 bp, synthetic construct
  misc_feature 1..20: note = Description of Artificial Sequence: Synthetic oligonucleotide
  misc_feature 1..20: note = Target: SCN10A; (+) strand; PAM type: YTN; PAM sequence: TTC
  source 1..20: mol_type = other DNA
gtggtctccaggaaagactc

SEQ ID NO: 67430 - DNA, 20 bp, synthetic construct
  misc_feature 1..20: note = Description of Artificial Sequence: Synthetic oligonucleotide
  misc_feature 1..20: note = Target: SCN10A; (+) strand; PAM type: YTN; PAM sequence: CTC
  source 1..20: mol_type = other DNA
caggaaagactccatcatct

SEQ ID NO: 67431 - DNA, 20 bp, synthetic construct
  misc_feature 1..20: note = Description of Artificial Sequence: Synthetic oligonucleotide
  misc_feature 1..20: note = Target: SCN10A; (+) strand; PAM type: YTN; PAM sequence: CTC
  source 1..20: mol_type = other DNA
catcatctgtgactccctca

SEQ ID NO: 67432 - DNA, 20 bp, synthetic construct
  misc_feature 1..20: note = Description of Artificial Sequence: Synthetic oligonucleotide
  misc_feature 1..20: note = Target: SCN10A; (+) strand; PAM type: YTN; PAM sequence: CTG
  source 1..20: mol_type = other DNA
tgactccctcagggagtgag

SEQ ID NO: 67433 - DNA, 20 bp, synthetic construct
  misc_feature 1..20: note = Description of Artificial Sequence: Synthetic oligonucleotide
  misc_feature 1..20: note = Target: SCN10A; (+) strand; PAM type: YTN; PAM sequence: CTC
  source 1..20: mol_type = other DNA
cctcagggagtgagatatct

SEQ ID NO: 67434 - DNA, 20 bp, synthetic construct
  misc_feature 1..20: note = Description of Artificial Sequence: Synthetic oligonucleotide
  misc_feature 1..20: note = Target: SCN10A; (+) strand; PAM type: YTN; PAM sequence: CTC
  source 1..20: mol_type = other DNA
agggagtgagatatctcggc

SEQ ID NO: 67435 - DNA, 20 bp, synthetic construct
  misc_feature 1..20: note = Description of Artificial Sequence: Synthetic oligonucleotide
  misc_feature 1..20: note = Target: SCN10A; (+) strand; PAM type: YTN; PAM sequence: CTC
  source 1..20: mol_type = other DNA
ggccaggggaccggaaatgg

SEQ ID NO: 67436 - DNA, 20 bp, synthetic construct
  misc_feature 1..20: note = Description of Artificial Sequence: Synthetic oligonucleotide
  misc_feature 1..20: note = Target: SCN10A; (+) strand; PAM type: YTN; PAM sequence: CTG
  source 1..20: mol_type = other DNA
ccatgactagcccggcgttt

SEQ ID NO: 67437 - DNA, 20 bp, synthetic construct
  misc_feature 1..20: note = Description of Artificial Sequence: Synthetic oligonucleotide
  misc_feature 1..20: note = Target: SCN10A; (+) strand; PAM type: YTN; PAM sequence: CTA
  source 1..20: mol_type = other DNA
gcccggcgttttccagaggc

SEQ ID NO: 67438 - DNA, 20 bp, synthetic construct
  misc_feature 1..20: note = Description of Artificial Sequence: Synthetic oligonucleotide
  misc_feature 1..20: note = Target: SCN10A; (+) strand; PAM type: YTN; PAM sequence: TTT
  source 1..20: mol_type = other DNA
tccagaggcgaggcctagaa

SEQ ID NO: 67439 - DNA, 20 bp, synthetic construct
  misc_feature 1..20: note = Description of Artificial Sequence: Synthetic oligonucleotide
  misc_feature 1..20: note = Target: SCN10A; (+) strand; PAM type: YTN; PAM sequence: TTT
  source 1..20: mol_type = other DNA
ccagaggcgaggcctagaaa

SEQ ID NO: 67440 - DNA, 20 bp, synthetic construct
  misc_feature 1..20: note = Description of Artificial Sequence: Synthetic oligonucleotide
  misc_feature 1..20: note = Target: SCN10A; (+) strand; PAM type: YTN; PAM sequence: TTC
  source 1..20: mol_type = other DNA
cagaggcgaggcctagaaaa

SEQ ID NO: 67441 - DNA, 20 bp, synthetic construct
  misc_feature 1..20: note = Description of Artificial Sequence: Synthetic oligonucleotide
  misc_feature 1..20: note = Target: SCN10A; (+) strand; PAM type: YTN; PAM sequence: CTA
  source 1..20: mol_type = other DNA
gaaaagactgggcattgccc

SEQ ID NO: 67442 - DNA, 20 bp, synthetic construct
  misc_feature 1..20: note = Description of Artificial Sequence: Synthetic oligonucleotide
  misc_feature 1..20: note = Target: SCN10A; (+) strand; PAM type: YTN; PAM sequence: CTG
  source 1..20: mol_type = other DNA
ggcattgccccaaaggagca

SEQ ID NO: 67443 - DNA, 20 bp, synthetic construct
  misc_feature 1..20: note = Description of Artificial Sequence: Synthetic oligonucleotide
  misc_feature 1..20: note = Target: SCN10A; (+) strand; PAM type: YTN; PAM sequence: TTG
  source 1..20: mol_type = other DNA
ccccaaaggagcaagaaggc

SEQ ID NO: 67444 - DNA, 20 bp, synthetic construct
  misc_feature 1..20: note = Description of Artificial Sequence: Synthetic oligonucleotide
  misc_feature 1..20: note = Target: SCN10A; (+) strand; PAM type: YTN; PAM sequence: CTG
  source 1..20: mol_type = other DNA
gaaactggtcctctgggaaa

SEQ ID NO: 67445 - DNA, 20 bp, synthetic construct
  misc_feature 1..20: note = Description of Artificial Sequence: Synthetic oligonucleotide
  misc_feature 1..20: note = Target: SCN10A; (+) strand; PAM type: YTN; PAM sequence: CTG
  source 1..20: mol_type = other DNA
gtcctctgggaaatctagag

SEQ ID NO: 67446 - DNA, 20 bp, synthetic construct
  misc_feature 1..20: note = Description of Artificial Sequence: Synthetic oligonucleotide
  misc_feature 1..20: note = Target: SCN10A; (+) strand; PAM type: YTN; PAM sequence: CTC
  source 1..20: mol_type = other DNA
tgggaaatctagagcccaac

SEQ ID NO: 67447 - DNA, 20 bp, synthetic construct
  misc_feature 1..20: note = Description of Artificial Sequence: Synthetic oligonucleotide
  misc_feature 1..20: note = Target: SCN10A; (+) strand; PAM type: YTN; PAM sequence: CTG
  source 1..20: mol_type = other DNA
ggaaatctagagcccaacac

SEQ ID NO: 67448 - DNA, 20 bp, synthetic construct
  misc_feature 1..20: note = Description of Artificial Sequence: Synthetic oligonucleotide
  misc_feature 1..20: note = Target: SCN10A; (+) strand; PAM type: YTN; PAM sequence: CTA
  source 1..20: mol_type = other DNA
gagcccaacacttccctcta

SEQ ID NO: 67449 - DNA, 20 bp, synthetic construct
  misc_feature 1..20: note = Description of Artificial Sequence: Synthetic oligonucleotide
  misc_feature 1..20: note = Target: SCN10A; (+) strand; PAM type: YTN; PAM sequence: CTT
  source 1..20: mol_type = other DNA
ccctctacctactcccattt

SEQ ID NO: 67450 - DNA, 20 bp, synthetic construct
  misc_feature 1..20: note = Description of Artificial Sequence: Synthetic oligonucleotide
  misc_feature 1..20: note = Target: SCN10A; (+) strand; PAM type: YTN; PAM sequence: TTC
  source 1..20: mol_type = other DNA
cctctacctactcccatttc

SEQ ID NO: 67451 - DNA, 20 bp, synthetic construct
  misc_feature 1..20: note = Description of Artificial Sequence: Synthetic oligonucleotide
  misc_feature 1..20: note = Target: SCN10A; (+) strand; PAM type: YTN; PAM sequence: CTC
  source 1..20: mol_type = other DNA
tacctactcccatttccctg

SEQ ID NO: 67452 - DNA, 20 bp, synthetic construct
  misc_feature 1..20: note = Description of Artificial Sequence: Synthetic oligonucleotide
  misc_feature 1..20: note = Target: SCN10A; (+) strand; PAM type: YTN; PAM sequence: CTA
  source 1..20: mol_type = other DNA
cctactcccatttccctgcc

SEQ ID NO: 67453 - DNA, 20 bp, synthetic construct
  misc_feature 1..20: note = Description of Artificial Sequence: Synthetic oligonucleotide
  misc_feature 1..20: note = Target: SCN10A; (+) strand; PAM type: YTN; PAM sequence: CTA
  source 1..20: mol_type = other DNA
ctcccatttccctgcccctg

SEQ ID NO: 67454 - DNA, 20 bp, synthetic construct
  misc_feature 1..20: note = Description of Artificial Sequence: Synthetic oligonucleotide
  misc_feature 1..20: note = Target: SCN10A; (+) strand; PAM type: YTN; PAM sequence: CTC
  source 1..20: mol_type = other DNA
ccatttccctgcccctgtct

SEQ ID NO: 67455 - DNA, 20 bp, synthetic construct
  misc_feature 1..20: note = Description of Artificial Sequence: Synthetic oligonucleotide
  misc_feature 1..20: note = Target: SCN10A; (+) strand; PAM type: YTN; PAM sequence: TTT
  source 1..20: mol_type = other DNA
ccctgcccctgtctttatga

SEQ ID NO: 67456 - DNA, 20 bp, synthetic construct
  misc_feature 1..20: note = Description of Artificial Sequence: Synthetic oligonucleotide
  misc_feature 1..20: note = Target: SCN10A; (+) strand; PAM type: YTN; PAM sequence: TTC
  source 1..20: mol_type = other DNA
cctgcccctgtctttatgac

SEQ ID NO: 67457 - DNA, 20 bp, synthetic construct
  misc_feature 1..20: note = Description of Artificial Sequence: Synthetic oligonucleotide
  misc_feature 1..20: note = Target: SCN10A; (+) strand; PAM type: YTN; PAM sequence: CTG
  source 1..20: mol_type = other DNA
cccctgtctttatgaccttt

SEQ ID NO: 67458 - DNA, 20 bp, synthetic construct
  misc_feature 1..20: note = Description of Artificial Sequence: Synthetic oligonucleotide
  misc_feature 1..20: note = Target: SCN10A; (+) strand; PAM type: YTN; PAM sequence: CTG
  source 1..20: mol_type = other DNA
tctttatgacctttcagtca

SEQ ID NO: 67459 - DNA, 20 bp, synthetic construct
  misc_feature 1..20: note = Description of Artificial Sequence: Synthetic oligonucleotide
  misc_feature 1..20: note = Target: SCN10A; (+) strand; PAM type: YTN; PAM sequence: CTT
  source 1..20: mol_type = other DNA
tatgacctttcagtcactaa

SEQ ID NO: 67460 - DNA, 20 bp, synthetic construct
  misc_feature 1..20: note = Description of Artificial Sequence: Synthetic oligonucleotide
  misc_feature 1..20: note = Target: SCN10A; (+) strand; PAM type: YTN; PAM sequence: TTT
  source 1..20: mol_type = other DNA
atgacctttcagtcactaag

SEQ ID NO: 67461 - DNA, 20 bp, synthetic construct
  misc_feature 1..20: note = Description of Artificial Sequence: Synthetic oligonucleotide
  misc_feature 1..20: note = Target: SCN10A; (+) strand; PAM type: YTN; PAM sequence: TTA
  source 1..20: mol_type = other DNA
tgacctttcagtcactaagt

SEQ ID NO: 67462 - DNA, 20 bp, synthetic construct
  misc_feature 1..20: note = Description of Artificial Sequence: Synthetic oligonucleotide
  misc_feature 1..20: note = Target: SCN10A; (+) strand; PAM type: YTN; PAM sequence: CTT
  source 1..20: mol_type = other DNA
tcagtcactaagtaaaggca

SEQ ID NO: 67463 - DNA, 20 bp, synthetic construct
  misc_feature 1..20: note = Description of Artificial Sequence: Synthetic oligonucleotide
  misc_feature 1..20: note = Target: SCN10A; (+) strand; PAM type: YTN; PAM sequence: TTT
  source 1..20: mol_type = other DNA
cagtcactaagtaaaggcac

SEQ ID NO: 67464 - DNA, 20 bp, synthetic construct
  misc_feature 1..20: note = Description of Artificial Sequence: Synthetic oligonucleotide
  misc_feature 1..20: note = Target: SCN10A; (+) strand; PAM type: YTN; PAM sequence: TTC
  source 1..20: mol_type = other DNA
agtcactaagtaaaggcaca

SEQ ID NO: 67465 - DNA, 20 bp, synthetic construct
  misc_feature 1..20: note = Description of Artificial Sequence: Synthetic oligonucleotide
  misc_feature 1..20: note = Target: SCN10A; (+) strand; PAM type: YTN; PAM sequence: CTA
  source 1..20: mol_type = other DNA
agtaaaggcacaaatctaag

SEQ ID NO: 67466 - DNA, 20 bp, synthetic construct
  misc_feature 1..20: note = Description of Artificial Sequence: Synthetic oligonucleotide
  misc_feature 1..20: note = Target: SCN10A; (+) strand; PAM type: YTN; PAM sequence: CTA
  source 1..20: mol_type = other DNA
aggggtattctaggtatgca

SEQ ID NO: 67467 - DNA, 20 bp, synthetic construct
  misc_feature 1..20: note = Description of Artificial Sequence: Synthetic oligonucleotide
  misc_feature 1..20: note = Target: SCN10A; (+) strand; PAM type: YTN; PAM sequence: TTC
  source 1..20: mol_type = other DNA
taggtatgcatggtggggaa

SEQ ID NO: 67468 - DNA, 20 bp, synthetic construct
  misc_feature 1..20: note = Description of Artificial Sequence: Synthetic oligonucleotide
  misc_feature 1..20: note = Target: SCN10A; (+) strand; PAM type: YTN; PAM sequence: CTA
  source 1..20: mol_type = other DNA
ggtatgcatggtggggaaaa

SEQ ID NO: 67469 - DNA, 20 bp, synthetic construct
  misc_feature 1..20: note = Description of Artificial Sequence: Synthetic oligonucleotide
  misc_feature 1..20: note = Target: SCN10A; (+) strand; PAM type: YTN; PAM sequence: CTC
  source 1..20: mol_type = other DNA
tagatagactccgggaaaga

SEQ ID NO: 67470 - DNA, 20 bp, synthetic construct
  misc_feature 1..20: note = Description of Artificial Sequence: Synthetic oligonucleotide
  misc_feature 1..20: note = Target: SCN10A; (+) strand; PAM type: YTN; PAM sequence: CTA
  source 1..20: mol_type = other DNA
gatagactccgggaaagacc

SEQ ID NO: 67471 - DNA, 20 bp, synthetic construct
  misc_feature 1..20: note = Description of Artificial Sequence: Synthetic oligonucleotide
  misc_feature 1..20: note = Target: SCN10A; (+) strand; PAM type: YTN; PAM sequence: CTC
  source 1..20: mol_type = other DNA
cgggaaagaccaggagagag

SEQ ID NO: 67472 - DNA, 20 bp, synthetic construct
  misc_feature 1..20: note = Description of Artificial Sequence: Synthetic oligonucleotide
  misc_feature 1..20: note = Target: SCN10A; (+) strand; PAM type: YTN; PAM sequence: TTA
  source 1..20: mol_type = other DNA
cagcgtgctgatgctcagca

SEQ ID NO: 67473 - DNA, 20 bp, synthetic construct
  misc_feature 1..20: note = Description of Artificial Sequence: Synthetic oligonucleotide
  misc_feature 1..20: note = Target: SCN10A; (+) strand; PAM type: YTN; PAM sequence: CTG
  source 1..20: mol_type = other DNA
atgctcagcaaataggttat

SEQ ID NO: 67474 - DNA, 20 bp, synthetic construct
  misc_feature 1..20: note = Description of Artificial Sequence: Synthetic oligonucleotide
  misc_feature 1..20: note = Target: SCN10A; (+) strand; PAM type: YTN; PAM sequence: CTC
  source 1..20: mol_type = other DNA
agcaaataggttatcatggt

SEQ ID NO: 67475 - DNA, 20 bp, synthetic construct
  misc_feature 1..20: note = Description of Artificial Sequence: Synthetic oligonucleotide
  misc_feature 1..20: note = Target: SCN10A; (+) strand; PAM type: YTN; PAM sequence: TTA
  source 1..20: mol_type = other DNA
tcatggtcaggaacatgtca

SEQ ID NO: 67476 - DNA, 20 bp, synthetic construct
  misc_feature 1..20: note = Description of Artificial Sequence: Synthetic oligonucleotide
  misc_feature 1..20: note = Target: SCN10A; (+) strand; PAM type: YTN; PAM sequence: CTT
  source 1..20: mol_type = other DNA
gtcacctggatagttcagtt

SEQ ID NO: 67477 - DNA, 20 bp, synthetic construct
  misc_feature 1..20: note = Description of Artificial Sequence: Synthetic oligonucleotide
  misc_feature 1..20: note = Target: SCN10A; (+) strand; PAM type: YTN; PAM sequence: TTG
  source 1..20: mol_type = other DNA
tcacctggatagttcagttg

SEQ ID NO: 67478 - DNA, 20 bp, synthetic construct
  misc_feature 1..20: note = Description of Artificial Sequence: Synthetic oligonucleotide
  misc_feature 1..20: note = Target: SCN10A; (+) strand; PAM type: YTN; PAM sequence: CTG
  source 1..20: mol_type = other DNA
gatagttcagttgattgcca

SEQ ID NO: 67479 - DNA, 20 bp, synthetic construct
  misc_feature 1..20: note = Description of Artificial Sequence: Synthetic oligonucleotide
  misc_feature 1..20: note = Target: SCN10A; (+) strand; PAM type: YTN; PAM sequence: TTC
  source 1..20: mol_type = other DNA
agttgattgccaacctttgg

SEQ ID NO: 67480 - DNA, 20 bp, synthetic construct
  misc_feature 1..20: note = Description of Artificial Sequence: Synthetic oligonucleotide
  misc_feature 1..20: note = Target: SCN10A; (+) strand; PAM type: YTN; PAM sequence: TTG
  source 1..20: mol_type = other DNA
attgccaacctttggccaca

SEQ ID NO: 67481 - DNA, 20 bp, synthetic construct
  misc_feature 1..20: note = Description of Artificial Sequence: Synthetic oligonucleotide
  misc_feature 1..20: note = Target: SCN10A; (+) strand; PAM type: YTN; PAM sequence: TTG
  source 1..20: mol_type = other DNA
ccaacctttggccacagggc

SEQ ID NO: 67482 - DNA, 20 bp, synthetic construct
  misc_feature 1..20: note = Description of Artificial Sequence: Synthetic oligonucleotide
  misc_feature 1..20: note = Target: SCN10A; (+) strand; PAM type: YTN; PAM sequence: CTT
  source 1..20: mol_type = other DNA
tggccacagggctagacaaa

SEQ ID NO: 67483 - DNA, 20 bp, synthetic construct
  misc_feature 1..20: note = Description of Artificial Sequence: Synthetic oligonucleotide
  misc_feature 1..20: note = Target: SCN10A; (+) strand; PAM type: YTN; PAM sequence: TTT
  source 1..20: mol_type = other DNA
ggccacagggctagacaaag

SEQ ID NO: 67484 - DNA, 20 bp, synthetic construct
  misc_feature 1..20: note = Description of Artificial Sequence: Synthetic oligonucleotide
  misc_feature 1..20: note = Target: SCN10A; (+) strand; PAM type: YTN; PAM sequence: TTG
  source 1..20: mol_type = other DNA
gccacagggctagacaaagc

SEQ ID NO: 67485 - DNA, 20 bp, synthetic construct
  misc_feature 1..20: note = Description of Artificial Sequence: Synthetic oligonucleotide
  misc_feature 1..20: note = Target: SCN10A; (+) strand; PAM type: YTN; PAM sequence: CTA
  source 1..20: mol_type = other DNA
gacaaagctgtcctaagttc

SEQ ID NO: 67486 - DNA, 20 bp, synthetic construct
  misc_feature 1..20: note = Description of Artificial Sequence: Synthetic oligonucleotide
  misc_feature 1..20: note = Target: SCN10A; (+) strand; PAM type: YTN; PAM sequence: CTG
  source 1..20: mol_type = other DNA
tcctaagttcacttttccac

SEQ ID NO: 67487 - DNA, 20 bp, synthetic construct
  misc_feature 1..20: note = Description of Artificial Sequence: Synthetic oligonucleotide
  misc_feature 1..20: note = Target: SCN10A; (+) strand; PAM type: YTN; PAM sequence: CTA
  source 1..20: mol_type = other DNA
agttcacttttccacatgca

SEQ ID NO: 67488 - DNA, 20 bp, synthetic construct
  misc_feature 1..20: note = Description of Artificial Sequence: Synthetic oligonucleotide
  misc_feature 1..20: note = Target: SCN10A; (+) strand; PAM type: YTN; PAM sequence: TTC
  source 1..20: mol_type = other DNA
acttttccacatgcaaagtt

SEQ ID NO: 67489 - DNA, 20 bp, synthetic construct
  misc_feature 1..20: note = Description of Artificial Sequence: Synthetic oligonucleotide
  misc_feature 1..20: note = Target: SCN10A; (+) strand; PAM type: YTN; PAM sequence: CTT
  source 1..20: mol_type = other DNA
ttccacatgcaaagttgtga

SEQ ID NO: 67490 - DNA, 20 bp, synthetic construct
  misc_feature 1..20: note = Description of Artificial Sequence: Synthetic oligonucleotide
  misc_feature 1..20: note = Target: SCN10A; (+) strand; PAM type: YTN; PAM sequence: TTT
  source 1..20: mol_type = other DNA
tccacatgcaaagttgtgac

SEQ ID NO: 67491 - DNA, 20 bp, synthetic construct
  misc_feature 1..20: note = Description of Artificial Sequence: Synthetic oligonucleotide
  misc_feature 1..20: note = Target: SCN10A; (+) strand; PAM type: YTN; PAM sequence: TTT
  source 1..20: mol_type = other DNA
ccacatgcaaagttgtgacc

SEQ ID NO: 67492 - DNA, 20 bp, synthetic construct
  misc_feature 1..20: note = Description of Artificial Sequence: Synthetic oligonucleotide
  misc_feature 1..20: note = Target: SCN10A; (+) strand; PAM type: YTN; PAM sequence: TTC
  source 1..20: mol_type = other DNA
cacatgcaaagttgtgacct

SEQ ID NO: 67493 - DNA, 20 bp, synthetic construct
  misc_feature 1..20: note = Description of Artificial Sequence: Synthetic oligonucleotide
  misc_feature 1..20: note = Target: SCN10A; (+) strand; PAM type: YTN; PAM sequence: TTG
  source 1..20: mol_type = other DNA
tgacctaaggaggctactat

SEQ ID NO: 67494 - DNA, 20 bp, synthetic construct
  misc_feature 1..20: note = Description of Artificial Sequence: Synthetic oligonucleotide
  misc_feature 1..20: note = Target: SCN10A; (+) strand; PAM type: YTN; PAM sequence: CTA
  source 1..20: mol_type = other DNA
aggaggctactatgcacacc

SEQ ID NO: 67495 - DNA, 20 bp, synthetic construct
  misc_feature 1..20: note = Description of Artificial Sequence: Synthetic oligonucleotide
  misc_feature 1..20: note = Target: SCN10A; (+) strand; PAM type: YTN; PAM sequence: CTA
  source 1..20: mol_type = other DNA
ctatgcacaccagtactgga

SEQ ID NO: 67496 - DNA, 20 bp, synthetic construct
  misc_feature 1..20: note = Description of Artificial Sequence: Synthetic oligonucleotide
  misc_feature 1..20: note = Target: SCN10A; (+) strand; PAM type: YTN; PAM sequence: CTA
  source 1..20: mol_type = other DNA
tgcacaccagtactggaaca

SEQ ID NO: 67497 - DNA, 20 bp, synthetic construct
  misc_feature 1..20: note = Description of Artificial Sequence: Synthetic oligonucleotide
  misc_feature 1..20: note = Target: SCN10A; (+) strand; PAM type: YTN; PAM sequence: CTG
  source 1..20: mol_type = other DNA
gaacatacttggtaagtggt

SEQ ID NO: 67498 - DNA, 20 bp, synthetic construct
  misc_feature 1..20: note = Description of Artificial Sequence: Synthetic oligonucleotide
  misc_feature 1..20: note = Target: SCN10A; (+) strand; PAM type: YTN; PAM sequence: CTT
  source 1..20: mol_type = other DNA
ggtaagtggttgttgaatga

SEQ ID NO: 67499 - DNA, 20 bp, synthetic construct
  misc_feature 1..20: note = Description of Artificial Sequence: Synthetic oligonucleotide
  misc_feature 1..20: note = Target: SCN10A; (+) strand; PAM type: YTN; PAM sequence: TTG
  source 1..20: mol_type = other DNA
gtaagtggttgttgaatgaa

SEQ ID NO: 67500 - DNA, 20 bp, synthetic construct
  misc_feature 1..20: note = Description of Artificial Sequence: Synthetic oligonucleotide
  misc_feature 1..20: note = Target: SCN10A; (+) strand; PAM type: YTN; PAM sequence: TTG
  source 1..20: mol_type = other DNA
ttgaatgaataagtgcactt

SEQ ID NO: 67501 - DNA, 20 bp, synthetic construct
  misc_feature 1..20: note = Description of Artificial Sequence: Synthetic oligonucleotide
  misc_feature 1..20: note = Target: SCN10A; (+) strand; PAM type: YTN; PAM sequence: TTG
  source 1..20: mol_type = other DNA
aatgaataagtgcacttcat

SEQ ID NO: 67502 - DNA, 20 bp, synthetic construct
  misc_feature 1..20: note = Description of Artificial Sequence: Synthetic oligonucleotide
  misc_feature 1..20: note = Target: SCN10A; (+) strand; PAM type: YTN; PAM sequence: CTT
  source 1..20: mol_type = other DNA
cattgtctgaaaattaggta

SEQ ID NO: 67503 - DNA, 20 bp, synthetic construct
  misc_feature 1..20: note = Description of Artificial Sequence: Synthetic oligonucleotide
  misc_feature 1..20: note = Target: SCN10A; (+) strand; PAM type: YTN; PAM sequence: TTC
  source 1..20: mol_type = other DNA
attgtctgaaaattaggtag

SEQ ID NO: 67504 - DNA, 20 bp, synthetic construct
  misc_feature 1..20: note = Description of Artificial Sequence: Synthetic oligonucleotide
  misc_feature 1..20: note = Target: SCN10A; (+) strand; PAM type: YTN; PAM sequence: TTG
  source 1..20: mol_type = other DNA
tctgaaaattaggtagtaca

SEQ ID NO: 67505 - DNA, 20 bp, synthetic construct
  misc_feature 1..20: note = Description of Artificial Sequence: Synthetic oligonucleotide
  misc_feature 1..20: note = Target: SCN10A; (+) strand; PAM type: YTN; PAM sequence: CTG
  source 1..20: mol_type = other DNA
aaaattaggtagtacaattc

SEQ ID NO: 67506 - DNA, 20 bp, synthetic construct
  misc_feature 1..20: note = Description of Artificial Sequence: Synthetic oligonucleotide
  misc_feature 1..20: note = Target: SCN10A; (+) strand; PAM type: YTN; PAM sequence: TTA
  source 1..20: mol_type = other DNA
ggtagtacaattcattagat

SEQ ID NO: 67507 - DNA, 20 bp, synthetic construct
  misc_feature 1..20: note = Description of Artificial Sequence: Synthetic oligonucleotide
  misc_feature 1..20: note = Target: SCN10A; (+) strand; PAM type: YTN; PAM sequence: TTC
  source 1..20: mol_type = other DNA
attagatcccatctgtatga

SEQ ID NO: 67508 - DNA, 20 bp, synthetic construct
  misc_feature 1..20: note = Description of Artificial Sequence: Synthetic oligonucleotide
  misc_feature 1..20: note = Target: SCN10A; (+) strand; PAM type: YTN; PAM sequence: TTA
  source 1..20: mol_type = other DNA
gatcccatctgtatgaatgt

SEQ ID NO: 67509 - DNA, 20 bp, synthetic construct
  misc_feature 1..20: note = Description of Artificial Sequence: Synthetic oligonucleotide
  misc_feature 1..20: note = Target: SCN10A; (+) strand; PAM type: YTN; PAM sequence: CTG
  source 1..20: mol_type = other DNA
tatgaatgtgagagtttgtg

SEQ ID NO: 67510 - DNA, 20 bp, synthetic construct
  misc_feature 1..20: note = Description of Artificial Sequence: Synthetic oligonucleotide
  misc_feature 1..20: note = Target: SCN10A; (+) strand; PAM type: YTN; PAM sequence: TTT
  source 1..20: mol_type = other DNA
gtgttgcaaaggaggagaca

SEQ ID NO: 67511 - DNA, 20 bp, synthetic construct
  misc_feature 1..20: note = Description of Artificial Sequence: Synthetic oligonucleotide
  misc_feature 1..20: note = Target: SCN10A; (+) strand; PAM type: YTN; PAM sequence: TTG
  source 1..20: mol_type = other DNA
tgttgcaaaggaggagacaa

SEQ ID NO: 67512 - DNA, 20 bp, synthetic construct
  misc_feature 1..20: note = Description of Artificial Sequence: Synthetic oligonucleotide
  misc_feature 1..20: note = Target: SCN10A; (+) strand; PAM type: YTN; PAM sequence: TTG
  source 1..20: mol_type = other DNA
caaaggaggagacaagagct

SEQ ID NO: 67513 - DNA, 20 bp, synthetic construct
  misc_feature 1..20: note = Description of Artificial Sequence: Synthetic oligonucleotide
  misc_feature 1..20: note = Target: SCN10A; (+) strand; PAM type: YTN; PAM sequence: CTG
  source 1..20: mol_type = other DNA
tacagtgcaatgagtttcta

SEQ ID NO: 67514 - DNA, 20 bp, synthetic construct
  misc_feature 1..20: note = Description of Artificial Sequence: Synthetic oligonucleotide
  misc_feature 1..20: note = Target: SCN10A; (+) strand; PAM type: YTN; PAM sequence: TTT
  source 1..20: mol_type = other DNA
ctaggatccctcgaggcttg

SEQ ID NO: 67515 - DNA, 20 bp, synthetic construct
  misc_feature 1..20: note = Description of Artificial Sequence: Synthetic oligonucleotide
  misc_feature 1..20: note = Target: SCN10A; (+) strand; PAM type: YTN; PAM sequence: TTC
  source 1..20: mol_type = other DNA
taggatccctcgaggcttga

SEQ ID NO: 67516 - DNA, 20 bp, synthetic construct
  misc_feature 1..20: note = Description of Artificial Sequence: Synthetic oligonucleotide
  misc_feature 1..20: note = Target: SCN10A; (+) strand; PAM type: YTN; PAM sequence: CTA
  source 1..20: mol_type = other DNA
ggatccctcgaggcttgaac

SEQ ID NO: 67517 - DNA, 20 bp, synthetic construct
  misc_feature 1..20: note = Description of Artificial Sequence: Synthetic oligonucleotide
  misc_feature 1..20: note = Target: SCN10A; (+) strand; PAM type: YTN; PAM sequence: CTC
  source 1..20: mol_type = other DNA
gaggcttgaacagtcaacaa

SEQ ID NO: 67518 - DNA, 20 bp, synthetic construct
  misc_feature 1..20: note = Description of Artificial Sequence: Synthetic oligonucleotide
  misc_feature 1..20: note = Target: SCN10A; (+) strand; PAM type: YTN; PAM sequence: CTT
  source 1..20: mol_type = other DNA
gaacagtcaacaatggagag

SEQ ID NO: 67519 - DNA, 20 bp, synthetic construct
  misc_feature 1..20: note = Description of Artificial Sequence: Synthetic oligonucleotide
  misc_feature 1..20: note = Target: SCN10A; (+) strand; PAM type: YTN; PAM sequence: TTG
  source 1..20: mol_type = other DNA
aacagtcaacaatggagaga

SEQ ID NO: 67520 - DNA, 20 bp, synthetic construct
  misc_feature 1..20: note = Description of Artificial Sequence: Synthetic oligonucleotide
  misc_feature 1..20: note = Target: SCN10A; (+) strand; PAM type: YTN; PAM sequence: CTG
  source 1..20: mol_type = other DNA
aaggaagggttgcagcctaa

SEQ ID NO: 67521 - DNA, 20 bp, synthetic construct
  misc_feature 1..20: note = Description of Artificial Sequence: Synthetic oligonucleotide
  misc_feature 1..20: note = Target: SCN10A; (+) strand; PAM type: YTN; PAM sequence: TTG
  source 1..20: mol_type = other DNA
cagcctaatttcctggaaga

SEQ ID NO: 67522 - DNA, 20 bp, synthetic construct
  misc_feature 1..20: note = Description of Artificial Sequence: Synthetic oligonucleotide
  misc_feature 1..20: note = Target: SCN10A; (+) strand; PAM type: YTN; PAM sequence: CTA
  source 1..20: mol_type = other DNA
atttcctggaagaataatgt

SEQ ID NO: 67523 - DNA, 20 bp, synthetic construct
  misc_feature 1..20: note = Description of Artificial Sequence: Synthetic oligonucleotide
  misc_feature 1..20: note = Target: SCN10A; (+) strand; PAM type: YTN; PAM sequence: TTT
  source 1..20: mol_type = other DNA
cctggaagaataatgtcatt

SEQ ID NO: 67524 - DNA, 20 bp, synthetic construct
  misc_feature 1..20: note = Description of Artificial Sequence: Synthetic oligonucleotide
  misc_feature 1..20: note = Target: SCN10A; (+) strand; PAM type: YTN; PAM sequence: TTC
  source 1..20: mol_type = other DNA
ctggaagaataatgtcattc

SEQ ID NO: 67525 - DNA, 20 bp, synthetic construct
  misc_feature 1..20: note = Description of Artificial Sequence: Synthetic oligonucleotide
  misc_feature 1..20: note = Target: SCN10A; (+) strand; PAM type: YTN; PAM sequence: CTG
  source 1..20: mol_type = other DNA
gaagaataatgtcattcctc

SEQ ID NO: 67526 - DNA, 20 bp, synthetic construct
  misc_feature 1..20: note = Description of Artificial Sequence: Synthetic oligonucleotide
  misc_feature 1..20: note = Target: SCN10A; (+) strand; PAM type: YTN; PAM sequence: TTC
  source 1..20: mol_type = other DNA
ctccaaatcaataaacattt

SEQ ID NO: 67527 - DNA, 20 bp, synthetic construct
  misc_feature 1..20: note = Description of Artificial Sequence: Synthetic oligonucleotide
  misc_feature 1..20: note = Target: SCN10A; (+) strand; PAM type: YTN; PAM sequence: CTC
  source 1..20: mol_type = other DNA
caaatcaataaacatttccc

SEQ ID NO: 67528 - DNA, 20 bp, synthetic construct
  misc_feature 1..20: note = Description of Artificial Sequence: Synthetic oligonucleotide
  misc_feature 1..20: note = Target: SCN10A; (+) strand; PAM type: YTN; PAM sequence: TTT
  source 1..20: mol_type = other DNA
cccatcaaaatcttccattg

SEQ ID NO: 67529 - DNA, 20 bp, synthetic construct
  misc_feature 1..20: note = Description of Artificial Sequence: Synthetic oligonucleotide
  misc_feature 1..20: note = Target: SCN10A; (+) strand; PAM type: YTN; PAM sequence: TTC
  source 1..20: mol_type = other DNA
ccatcaaaatcttccattga

SEQ ID NO: 67530 - DNA, 20 bp, synthetic construct
  misc_feature 1..20: note = Description of Artificial Sequence: Synthetic oligonucleotide
  misc_feature 1..20: note = Target: SCN10A; (+) strand; PAM type: YTN; PAM sequence: CTT
  source 1..20: mol_type = other DNA
ccattgagggaactgtgtgg

SEQ ID NO: 67531 - DNA, 20 bp, synthetic construct
  misc_feature 1..20: note = Description of Artificial Sequence: Synthetic oligonucleotide
  misc_feature 1..20: note = Target: SCN10A; (+) strand; PAM type: YTN; PAM sequence: TTC
  source 1..20: mol_type = other DNA
cattgagggaactgtgtggc

SEQ ID NO: 67532 - DNA, 20 bp, synthetic construct
  misc_feature 1..20: note = Description of Artificial Sequence: Synthetic oligonucleotide
  misc_feature 1..20: note = Target: SCN10A; (+) strand; PAM type: YTN; PAM sequence: TTG
  source 1..20: mol_type = other DNA
agggaactgtgtggcttaaa

SEQ ID NO: 67533 - DNA, 20 bp, synthetic construct
  misc_feature 1..20: note = Description of Artificial Sequence: Synthetic oligonucleotide
  misc_feature 1..20: note = Target: SCN10A; (+) strand; PAM type: YTN; PAM sequence: CTG
  source 1..20: mol_type = other DNA
tgtggcttaaagttgccaga

SEQ ID NO: 67534 - DNA, 20 bp, synthetic construct
  misc_feature 1..20: note = Description of Artificial Sequence: Synthetic oligonucleotide
  misc_feature 1..20: note = Target: SCN10A; (+) strand; PAM type: YTN; PAM sequence: CTT
  source 1..20: mol_type = other DNA
aaagttgccagagaaaagag

SEQ ID NO: 67535 - DNA, 20 bp, synthetic construct
  misc_feature 1..20: note = Description of Artificial Sequence: Synthetic oligonucleotide
  misc_feature 1..20: note = Target: SCN10A; (+) strand; PAM type: YTN; PAM sequence: TTA
  source 1..20: mol_type = other DNA
aagttgccagagaaaagagc

SEQ ID NO: 67536 - DNA, 20 bp, synthetic construct
  misc_feature 1..20: note = Description of Artificial Sequence: Synthetic oligonucleotide
  misc_feature 1..20: note = Target: SCN10A; (+) strand; PAM type: YTN; PAM sequence: TTG
  source 1..20: mol_type = other DNA
ccagagaaaagagctaattc

SEQ ID NO: 67537 - DNA, 20 bp, synthetic construct
  misc_feature 1..20: note = Description of Artificial Sequence: Synthetic oligonucleotide
  misc_feature 1..20: note = Target: SCN10A; (+) strand; PAM type: YTN; PAM sequence: CTA
  source 1..20: mol_type = other DNA
attcataaacccagagccct

SEQ ID NO: 67538 - DNA, 20 bp, synthetic construct
  misc_feature 1..20: note = Description of Artificial Sequence: Synthetic oligonucleotide
  misc_feature 1..20: note = Target: SCN10A; (+) strand; PAM type: YTN; PAM sequence: TTC
  source 1..20: mol_type = other DNA
ataaacccagagccctcaga

SEQ ID NO: 67539 - DNA, 20 bp, synthetic construct
  misc_feature 1..20: note = Description of Artificial Sequence: Synthetic oligonucleotide
  misc_feature 1..20: note = Target: SCN10A; (+) strand; PAM type: YTN; PAM sequence: CTC
  source 1..20: mol_type = other DNA
agagaattagtgtgctgggt

SEQ ID NO: 67540 - DNA, 20 bp, synthetic construct
  misc_feature 1..20: note = Description of Artificial Sequence: Synthetic oligonucleotide
  misc_feature 1..20: note = Target: SCN10A; (+) strand; PAM type: YTN; PAM sequence: TTA
  source 1..20: mol_type = other DNA
gtgtgctgggttaggtagtt

SEQ ID NO: 67541 - DNA, 20 bp, synthetic construct
  misc_feature 1..20: note = Description of Artificial Sequence: Synthetic oligonucleotide
  misc_feature 1..20: note = Target: SCN10A; (+) strand; PAM type: YTN; PAM sequence: CTG
  source 1..20: mol_type = other DNA
ggttaggtagttcccatgac

SEQ ID NO: 67542 - DNA, 20 bp, synthetic construct
  misc_feature 1..20: note = Description of Artificial Sequence: Synthetic oligonucleotide
  misc_feature 1..20: note = Target: SCN10A; (+) strand; PAM type: YTN; PAM sequence: TTA
  source 1..20: mol_type = other DNA
ggtagttcccatgaccatag

SEQ ID NO: 67543 - DNA, 20 bp, synthetic construct
  misc_feature 1..20: note = Description of Artificial Sequence: Synthetic oligonucleotide
  misc_feature 1..20: note = Target: SCN10A; (+) strand; PAM type: YTN; PAM sequence: TTC
  source 1..20: mol_type = other DNA
ccatgaccatagtgaaactt

SEQ ID NO: 67544 - DNA, 20 bp, synthetic construct
  misc_feature 1..20: note = Description of Artificial Sequence: Synthetic oligonucleotide
  misc_feature 1..20: note = Target: SCN10A; (+) strand; PAM type: YTN; PAM sequence: CTT
  source 1..20: mol_type = other DNA
gaccataataaaccatcatt

SEQ ID NO: 67545 - DNA, 20 bp, synthetic construct
  misc_feature 1..20: note = Description of Artificial Sequence: Synthetic oligonucleotide
  misc_feature 1..20: note = Target: SCN10A; (+) strand; PAM type: YTN; PAM sequence: TTG
  source 1..20: mol_type = other DNA
accataataaaccatcattt

SEQ ID NO: 67546 - DNA, 20 bp, synthetic construct
  misc_feature 1..20: note = Description of Artificial Sequence: Synthetic oligonucleotide
  misc_feature 1..20: note = Target: SCN10A; (+) strand; PAM type: YTN; PAM sequence: TTT
  source 1..20: mol_type = other DNA
gtgtcctcaggtggtctata

SEQ ID NO: 67547 - DNA, 20 bp, synthetic construct
  misc_feature 1..20: note = Description of Artificial Sequence: Synthetic oligonucleotide
  misc_feature 1..20: note = Target: SCN10A; (+) strand; PAM type: YTN; PAM sequence: TTG
  source 1..20: mol_type = other DNA
tgtcctcaggtggtctatag

SEQ ID NO: 67548 - DNA, 20 bp, synthetic construct
  misc_feature 1..20: note = Description of Artificial Sequence: Synthetic oligonucleotide
  misc_feature 1..20: note = Target: SCN10A; (+) strand; PAM type: YTN; PAM sequence: CTC
  source 1..20: mol_type = other DNA
aggtggtctatagtatgtac

SEQ ID NO: 67549 - DNA, 20 bp, synthetic construct
  misc_feature 1..20: note = Description of Artificial Sequence: Synthetic oligonucleotide
  misc_feature 1..20: note = Target: SCN10A; (+) strand; PAM type: YTN; PAM sequence: CTA
  source 1..20: mol_type = other DNA
tagtatgtacaaaatctaaa

SEQ ID NO: 67550 - DNA, 20 bp, synthetic construct
  misc_feature 1..20: note = Description of Artificial Sequence: Synthetic oligonucleotide
  misc_feature 1..20: note = Target: SCN10A; (+) strand; PAM type: YTN; PAM sequence: CTA
  source 1..20: mol_type = other DNA
aacattgacttcataccaaa

SEQ ID NO: 67551 - DNA, 20 bp, synthetic construct
  misc_feature 1..20: note = Description of Artificial Sequence: Synthetic oligonucleotide
  misc_feature 1..20: note = Target: SCN10A; (+) strand; PAM type: YTN; PAM sequence: TTG
  source 1..20: mol_type = other DNA
acttcataccaaactctgat

SEQ ID NO: 67552 - DNA, 20 bp, synthetic construct
  misc_feature 1..20: note = Description of Artificial Sequence: Synthetic oligonucleotide
  misc_feature 1..20: note = Target: SCN10A; (+) strand; PAM type: YTN; PAM sequence: CTT
  source 1..20: mol_type = other DNA
cataccaaactctgatcata

SEQ ID NO: 67553 - DNA, 20 bp, synthetic construct
  misc_feature 1..20: note = Description of Artificial Sequence: Synthetic oligonucleotide
  misc_feature 1..20: note = Target: SCN10A; (+) strand; PAM type: YTN; PAM sequence: TTC
  source 1..20: mol_type = other DNA
ataccaaactctgatcatac

SEQ ID NO: 67554 - DNA, 20 bp, synthetic construct
  misc_feature 1..20: note = Description of Artificial Sequence: Synthetic oligonucleotide
  misc_feature 1..20: note = Target: SCN10A; (+) strand; PAM type: YTN; PAM sequence: CTC
  source 1..20: mol_type = other DNA
tgatcataccgatttattcc

SEQ ID NO: 67555 - DNA, 20 bp, synthetic construct
  misc_feature 1..20: note = Description of Artificial Sequence: Synthetic oligonucleotide
  misc_feature 1..20: note = Target: SCN10A; (+) strand; PAM type: YTN; PAM sequence: CTG
  source 1..20: mol_type = other DNA
atcataccgatttattccac

SEQ ID NO: 67556 - DNA, 20 bp, synthetic construct
  misc_feature 1..20: note = Description of Artificial Sequence: Synthetic oligonucleotide
  misc_feature 1..20: note = Target: SCN10A; (+) strand; PAM type: YTN; PAM sequence: TTT
  source 1..20: mol_type = other DNA
attccactcaccttccttaa

SEQ ID NO: 67557 - DNA, 20 bp, synthetic construct
  misc_feature 1..20: note = Description of Artificial Sequence: Synthetic oligonucleotide
  misc_feature 1..20: note = Target: SCN10A; (+) strand; PAM type: YTN; PAM sequence: TTA
  source 1..20: mol_type = other DNA
ttccactcaccttccttaac

SEQ ID NO: 67558 - DNA, 20 bp, synthetic construct
  misc_feature 1..20: note = Description of Artificial Sequence: Synthetic oligonucleotide
  misc_feature 1..20: note = Target: SCN10A; (+) strand; PAM type: YTN; PAM sequence: TTC
  source 1..20: mol_type = other DNA
cactcaccttccttaactcc

SEQ ID NO: 67559 - DNA, 20 bp, synthetic construct
  misc_feature 1..20: note = Description of Artificial Sequence: Synthetic oligonucleotide
  misc_feature 1..20: note = Target: SCN10A; (+) strand; PAM type: YTN; PAM sequence: CTC
  source 1..20: mol_type = other DNA
accttccttaactccttttt

SEQ ID NO: 67560 - DNA, 20 bp, synthetic construct
  misc_feature 1..20: note = Description of Artificial Sequence: Synthetic oligonucleotide
  misc_feature 1..20: note = Target: SCN10A; (+) strand; PAM type: YTN; PAM sequence: CTT
  source 1..20: mol_type = other DNA
ccttaactcctttttattac

SEQ ID NO: 67561 - DNA, 20 bp, synthetic construct
  misc_feature 1..20: note = Description of Artificial Sequence: Synthetic oligonucleotide
  misc_feature 1..20: note = Target: SCN10A; (+) strand; PAM type: YTN; PAM sequence: TTC
  source 1..20: mol_type = other DNA
cttaactcctttttattact

SEQ ID NO: 67562 - DNA, 20 bp, synthetic construct
  misc_feature 1..20: note = Description of Artificial Sequence: Synthetic oligonucleotide
  misc_feature 1..20: note = Target: SCN10A; (+) strand; PAM type: YTN; PAM sequence: CTT
  source 1..20: mol_type = other DNA
aactcctttttattactaag

SEQ ID NO: 67563 - DNA, 20 bp, synthetic construct
  misc_feature 1..20: note = Description of Artificial Sequence: Synthetic oligonucleotide
  misc_feature 1..20: note = Target: SCN10A; (+) strand; PAM type: YTN; PAM sequence: TTA
  source 1..20: mol_type = other DNA
actcctttttattactaagc

SEQ ID NO: 67564 - DNA, 20 bp, synthetic construct
  misc_feature 1..20: note = Description of Artificial Sequence: Synthetic oligonucleotide
  misc_feature 1..20: note = Target: SCN10A; (+) strand; PAM type: YTN; PAM sequence: CTC
  source 1..20: mol_type = other DNA
ctttttattactaagctact

SEQ ID NO: 67565 - DNA, 20 bp, synthetic construct
  misc_feature 1..20: note = Description of Artificial Sequence: Synthetic oligonucleotide
  misc_feature 1..20: note = Target: SCN10A; (+) strand; PAM type: YTN; PAM sequence: CTT
  source 1..20: mol_type = other DNA
tttattactaagctactaaa

SEQ ID NO: 67566 - DNA, 20 bp, synthetic construct
  misc_feature 1..20: note = Description of Artificial Sequence: Synthetic oligonucleotide
  misc_feature 1..20: note = Target: SCN10A; (+) strand; PAM type: YTN; PAM sequence: TTT
  source 1..20: mol_type = other DNA
ttattactaagctactaaag

SEQ ID NO: 67567 - DNA, 20 bp, synthetic construct
  misc_feature 1..20: note = Description of Artificial Sequence: Synthetic oligonucleotide
  misc_feature 1..20: note = Target: SCN10A; (+) strand; PAM type: YTN; PAM sequence: TTT
  source 1..20: mol_type = other DNA
tattactaagctactaaagt

SEQ ID NO: 67568 - DNA, 20 bp, synthetic construct
  misc_feature 1..20: note = Description of Artificial Sequence: Synthetic oligonucleotide
  misc_feature 1..20: note = Target: SCN10A; (+) strand; PAM type: YTN; PAM sequence: TTT
  source 1..20: mol_type = other DNA
attactaagctactaaagtg

SEQ ID NO: 67569 - DNA, 20 bp, synthetic construct
  misc_feature 1..20: note = Description of Artificial Sequence: Synthetic oligonucleotide
  misc_feature 1..20: note = Target: SCN10A; (+) strand; PAM type: YTN; PAM sequence: TTA
  source 1..20: mol_type = other DNA
ttactaagctactaaagtgg

SEQ ID NO: 67570 - DNA, 20 bp, synthetic construct
  misc_feature 1..20: note = Description of Artificial Sequence: Synthetic oligonucleotide
  misc_feature 1..20: note = Target: SCN10A; (+) strand; PAM type: YTN; PAM sequence: TTA
  source 1..20: mol_type = other DNA
ctaagctactaaagtggaga

SEQ ID NO: 67571 - DNA, 20 bp, synthetic construct
  misc_feature 1..20: note = Description of Artificial Sequence: Synthetic oligonucleotide
  misc_feature 1..20: note = Target: SCN10A; (+) strand; PAM type: YTN; PAM sequence: CTA
  source 1..20: mol_type = other DNA
agctactaaagtggagaatc

SEQ ID NO: 67572 - DNA, 20 bp, synthetic construct
  misc_feature 1..20: note = Description of Artificial Sequence: Synthetic oligonucleotide
  misc_feature 1..20: note = Target: SCN10A; (+) strand; PAM type: YTN; PAM sequence: CTA
  source 1..20: mol_type = other DNA
ctaaagtggagaatcttgcc

SEQ ID NO: 67573 - DNA, 20 bp, synthetic construct
  misc_feature 1..20: note = Description of Artificial Sequence: Synthetic oligonucleotide
  misc_feature 1..20: note = Target: SCN10A; (+) strand; PAM type: YTN; PAM sequence: CTA
  source 1..20: mol_type = other DNA
aagtggagaatcttgccaat

SEQ ID NO: 67574 - DNA, 20 bp, synthetic construct
  misc_feature 1..20: note = Description of Artificial Sequence: Synthetic oligonucleotide
  misc_feature 1..20: note = Target: SCN10A; (+) strand; PAM type: YTN; PAM sequence: CTT
  source 1..20: mol_type = other DNA
gccaattggggttctcctta

SEQ ID NO: 67575 - DNA, 20 bp, synthetic construct
  misc_feature 1..20: note = Description of Artificial Sequence: Synthetic oligonucleotide
  misc_feature 1..20: note = Target: SCN10A; (+) strand; PAM type: YTN; PAM sequence: TTG
  source 1..20: mol_type = other DNA
ccaattggggttctccttac

SEQ ID NO: 67576 - DNA, 20 bp, synthetic construct
  misc_feature 1..20: note = Description of Artificial Sequence: Synthetic oligonucleotide
  misc_feature 1..20: note = Target: SCN10A; (+) strand; PAM type: YTN; PAM sequence: TTG
  source 1..20: mol_type = other DNA
gggttctccttactaatccc

SEQ ID NO: 67577 - DNA, 20 bp, synthetic construct
  misc_feature 1..20: note = Description of Artificial Sequence: Synthetic oligonucleotide
  misc_feature 1..20: note = Target: SCN10A; (+) strand; PAM type: YTN; PAM sequence: TTC
  source 1..20: mol_type = other DNA
tccttactaatccccttatc

SEQ ID NO: 67578 - DNA, 20 bp, synthetic construct
  misc_feature 1..20: note = Description of Artificial Sequence: Synthetic oligonucleotide
  misc_feature 1..20: note = Target: SCN10A; (+) strand; PAM type: YTN; PAM sequence: CTC
  source 1..20: mol_type = other DNA
cttactaatccccttatctc

SEQ ID NO: 67579 - DNA, 20 bp, synthetic construct
  misc_feature 1..20: note = Description of Artificial Sequence: Synthetic oligonucleotide
  misc_feature 1..20: note = Target: SCN10A; (+) strand; PAM type: YTN; PAM sequence: CTT
  source 1..20: mol_type = other DNA
actaatccccttatctcaca

SEQ ID NO: 67580 - DNA, 20 bp, synthetic construct
  misc_feature 1..20: note = Description of Artificial Sequence: Synthetic oligonucleotide
  misc_feature 1..20: note = Target: SCN10A; (+) strand; PAM type: YTN; PAM sequence: TTA
  source 1..20: mol_type = other DNA
ctaatccccttatctcacag

SEQ ID NO: 67581 - DNA, 20 bp, synthetic construct
  misc_feature 1..20: note = Description of Artificial Sequence: Synthetic oligonucleotide
  misc_feature 1..20: note = Target: SCN10A; (+) strand; PAM type: YTN; PAM sequence: CTA
  source 1..20: mol_type = other DNA
atccccttatctcacagaac

SEQ ID NO: 67582 - DNA, 20 bp, synthetic construct
  misc_feature 1..20: note = Description of Artificial Sequence: Synthetic oligonucleotide
  misc_feature 1..20: note = Target: SCN10A; (+) strand; PAM type: YTN; PAM sequence: CTT
  source 1..20: mol_type = other DNA
atctcacagaactgaagttt

SEQ ID NO: 67583 - DNA, 20 bp, synthetic construct
  misc_feature 1..20: note = Description of Artificial Sequence: Synthetic oligonucleotide
  misc_feature 1..20: note = Target: SCN10A; (+) strand; PAM type: YTN; PAM sequence: TTA
  source 1..20: mol_type = other DNA
tctcacagaactgaagtttc

SEQ ID NO: 67584 - DNA, 20 bp, synthetic construct
  misc_feature 1..20: note = Description of Artificial Sequence: Synthetic oligonucleotide
  misc_feature 1..20: note = Target: SCN10A; (+) strand; PAM type: YTN; PAM sequence: CTC
  source 1..20: mol_type = other DNA
acagaactgaagtttcctct

SEQ ID NO: 67585 - DNA, 20 bp, synthetic construct
  misc_feature 1..20: note = Description of Artificial Sequence: Synthetic oligonucleotide
  misc_feature 1..20: note = Target: SCN10A; (+) strand; PAM type: YTN; PAM sequence: CTG
  source 1..20: mol_type = other DNA
aagtttcctctcttgataat

SEQ ID NO: 67586 - DNA, 20 bp, synthetic construct
  misc_feature 1..20: note = Description of Artificial Sequence: Synthetic oligonucleotide
  misc_feature 1..20: note = Target: SCN10A; (+) strand; PAM type: YTN; PAM sequence: TTT
  source 1..20: mol_type = other DNA
cctctcttgataatttgaag

SEQ ID NO: 67587 - DNA, 20 bp, synthetic construct
  misc_feature 1..20: note = Description of Artificial Sequence: Synthetic oligonucleotide
  misc_feature 1..20: note = Target: SCN10A; (+) strand; PAM type: YTN; PAM sequence: TTC
  source 1..20: mol_type = other DNA
ctctcttgataatttgaagc

SEQ ID NO: 67588 - DNA, 20 bp, synthetic construct
  misc_feature 1..20: note = Description of Artificial Sequence: Synthetic oligonucleotide
  misc_feature 1..20: note = Target: SCN10A; (+) strand; PAM type: YTN; PAM sequence: CTC
  source 1..20: mol_type = other DNA
tcttgataatttgaagcctg

SEQ ID NO: 67589 - DNA, 20 bp, synthetic construct
  misc_feature 1..20: note = Description of Artificial Sequence: Synthetic oligonucleotide
  misc_feature 1..20: note = Target: SCN10A; (+) strand; PAM type: YTN; PAM sequence: CTC
  source 1..20: mol_type = other DNA
ttgataatttgaagcctgat

SEQ ID NO: 67590 - DNA, 20 bp, synthetic construct
  misc_feature 1..20: note = Description of Artificial Sequence: Synthetic oligonucleotide
  misc_feature 1..20: note = Target: SCN10A; (+) strand; PAM type: YTN; PAM sequence: CTT
  source 1..20: mol_type = other DNA
gataatttgaagcctgatcc

SEQ ID NO: 67591 - DNA, 20 bp, synthetic construct
  misc_feature 1..20: note = Description of Artificial Sequence: Synthetic oligonucleotide
  misc_feature 1..20: note = Target: SCN10A; (+) strand; PAM type: YTN; PAM sequence: TTG
  source 1..20: mol_type = other DNA
ataatttgaagcctgatcct

SEQ ID NO: 67592 - DNA, 20 bp, synthetic construct
  misc_feature 1..20: note = Description of Artificial Sequence: Synthetic oligonucleotide
  misc_feature 1..20: note = Target: SCN10A; (+) strand; PAM type: YTN; PAM sequence: TTT
  source 1..20: mol_type = other DNA
gaagcctgatcctgtttagc

SEQ ID NO: 67593 - DNA, 20 bp, synthetic construct
  misc_feature 1..20: note = Description of Artificial Sequence: Synthetic oligonucleotide
  misc_feature 1..20: note = Target: SCN10A; (+) strand; PAM type: YTN; PAM sequence: TTG
  source 1..20: mol_type = other DNA
aagcctgatcctgtttagca

SEQ ID NO: 67594 - DNA, 20 bp, synthetic construct
  misc_feature 1..20: note = Description of Artificial Sequence: Synthetic oligonucleotide
  misc_feature 1..20: note = Target: SCN10A; (+) strand; PAM type: YTN; PAM sequence: CTG
  source 1..20: mol_type = other DNA
atcctgtttagcaaccatta

SEQ ID NO: 67595 - DNA, 20 bp, synthetic construct
  misc_feature 1..20: note = Description of Artificial Sequence: Synthetic oligonucleotide
  misc_feature 1..20: note = Target: SCN10A; (+) strand; PAM type: YTN; PAM sequence: CTG
  source 1..20: mol_type = other DNA
tttagcaaccattattaaaa

SEQ ID NO: 67596 - DNA, 20 bp, synthetic construct
  misc_feature 1..20: note = Description of Artificial Sequence: Synthetic oligonucleotide
  misc_feature 1..20: note = Target: SCN10A; (+) strand; PAM type: YTN; PAM sequence: TTT
  source 1..20: mol_type = other DNA
agcaaccattattaaaagct

SEQ ID NO: 67597 - DNA, 20 bp, synthetic construct
  misc_feature 1..20: note = Description of Artificial Sequence: Synthetic oligonucleotide
  misc_feature 1..20: note = Target: SCN10A; (+) strand; PAM type: YTN; PAM sequence: TTA
  source 1..20: mol_type = other DNA
gcaaccattattaaaagctc

SEQ ID NO: 67598 - DNA, 20 bp, synthetic construct
  misc_feature 1..20: note = Description of Artificial Sequence: Synthetic oligonucleotide
  misc_feature 1..20: note = Target: SCN10A; (+) strand; PAM type: YTN; PAM sequence: TTA
  source 1..20: mol_type = other DNA
ttaaaagctcagtattataa

SEQ ID NO: 67599 - DNA, 20 bp, synthetic construct
  misc_feature 1..20: note = Description of Artificial Sequence: Synthetic oligonucleotide
  misc_feature 1..20: note = Target: SCN10A; (+) strand; PAM type: YTN; PAM sequence: TTA
  source 1..20: mol_type = other DNA
aaagctcagtattataaata

SEQ ID NO: 67600 - DNA, 20 bp, synthetic construct
  misc_feature 1..20: note = Description of Artificial Sequence: Synthetic oligonucleotide
  misc_feature 1..20: note = Target: SCN10A; (+) strand; PAM type: YTN; PAM sequence: CTC
  source 1..20: mol_type = other DNA
agtattataaatagagtact

SEQ ID NO: 67601 - DNA, 20 bp, synthetic construct
  misc_feature 1..20: note = Description of Artificial Sequence: Synthetic oligonucleotide
  misc_feature 1..20: note = Target: SCN10A; (+) strand; PAM type: YTN; PAM sequence: TTA
  source 1..20: mol_type = other DNA
taaatagagtactctctgcc

SEQ ID NO: 67602 - DNA, 20 bp, synthetic construct
  misc_feature 1..20: note = Description of Artificial Sequence: Synthetic oligonucleotide
  misc_feature 1..20: note = Target: SCN10A; (+) strand; PAM type: YTN; PAM sequence: CTC
  source 1..20: mol_type = other DNA
tctgcctgtaatacatgccc

SEQ ID NO: 67603 - DNA, 20 bp, synthetic construct
  misc_feature 1..20: note = Description of Artificial Sequence: Synthetic oligonucleotide
  misc_feature 1..20: note = Target: SCN10A; (+) strand; PAM type: YTN; PAM sequence: CTC
  source 1..20: mol_type = other DNA
tgcctgtaatacatgcccaa

SEQ ID NO: 67604 - DNA, 20 bp, synthetic construct
  misc_feature 1..20: note = Description of Artificial Sequence: Synthetic oligonucleotide
  misc_feature 1..20: note = Target: SCN10A; (+) strand; PAM type: YTN; PAM sequence: CTG
  source 1..20: mol_type = other DNA
cctgtaatacatgcccaagg

SEQ ID NO: 67605 - DNA, 20 bp, synthetic construct
  misc_feature 1..20: note = Description of Artificial Sequence: Synthetic oligonucleotide
  misc_feature 1..20: note = Target: SCN10A; (+) strand; PAM type: YTN; PAM sequence: CTG
  source 1..20: mol_type = other DNA
taatacatgcccaaggacta

SEQ ID NO: 67606 - DNA, 20 bp, synthetic construct
  misc_feature 1..20: note = Description of Artificial Sequence: Synthetic oligonucleotide
  misc_feature 1..20: note = Target: SCN10A; (+) strand; PAM type: YTN; PAM sequence: CTA
  source 1..20: mol_type = other DNA
tagaactcataaaatgcaaa

SEQ ID NO: 67607 - DNA, 20 bp, synthetic construct
  misc_feature 1..20: note = Description of Artificial Sequence: Synthetic oligonucleotide
  misc_feature 1..20: note = Target: SCN10A; (+) strand; PAM type: YTN; PAM sequence: CTC
  source 1..20: mol_type = other DNA
ataaaatgcaaaaatccttc

SEQ ID NO: 67608 - DNA, 20 bp, synthetic construct
  misc_feature 1..20: note = Description of Artificial Sequence: Synthetic oligonucleotide
  misc_feature 1..20: note = Target: SCN10A; (+) strand; PAM type: YTN; PAM sequence: CTT
  source 1..20: mol_type = other DNA
ccaatttttgaagcaaatga

SEQ ID NO: 67609 - DNA, 20 bp, synthetic construct
  misc_feature 1..20: note = Description of Artificial Sequence: Synthetic oligonucleotide
  misc_feature 1..20: note = Target: SCN10A; (+) strand; PAM type: YTN; PAM sequence: TTC
  source 1..20: mol_type = other DNA
caatttttgaagcaaatgag

SEQ ID NO: 67610 - DNA, 20 bp, synthetic construct
  misc_feature 1..20: note = Description of Artificial Sequence: Synthetic oligonucleotide
  misc_feature 1..20: note = Target: SCN10A; (+) strand; PAM type: YTN; PAM sequence: TTT
  source 1..20: mol_type = other DNA
ttgaagcaaatgagaaaaat

SEQ ID NO: 67611 - DNA, 20 bp, synthetic construct
  misc_feature 1..20: note = Description of Artificial Sequence: Synthetic oligonucleotide
  misc_feature 1..20: note = Target: SCN10A; (+) strand; PAM type: YTN; PAM sequence: TTT
  source 1..20: mol_type = other DNA
tgaagcaaatgagaaaaatt

SEQ ID NO: 67612 - DNA, 20 bp, synthetic construct
  misc_feature 1..20: note = Description of Artificial Sequence: Synthetic oligonucleotide
  misc_feature 1..20: note = Target: SCN10A; (+) strand; PAM type: YTN; PAM sequence: TTT
  source 1..20: mol_type = other DNA
gaagcaaatgagaaaaattg

SEQ ID NO: 67613 - DNA, 20 bp, synthetic construct
  misc_feature 1..20: note = Description of Artificial Sequence: Synthetic oligonucleotide
  misc_feature 1..20: note = Target: SCN10A; (+) strand; PAM type: YTN; PAM sequence: TTG
  source 1..20: mol_type = other DNA
aagcaaatgagaaaaattga

SEQ ID NO: 67614 - DNA, 20 bp, synthetic construct
  misc_feature 1..20: note = Description of Artificial Sequence: Synthetic oligonucleotide
  misc_feature 1..20: note = Target: SCN10A; (+) strand; PAM type: YTN; PAM sequence: TTG
  source 1..20: mol_type = other DNA
acacatccatattaaggaag

SEQ ID NO: 67615 - DNA, 20 bp, synthetic construct
  misc_feature 1..20: note = Description of Artificial Sequence: Synthetic oligonucleotide
  misc_feature 1..20: note = Target: SCN10A; (+) strand; PAM type: YTN; PAM sequence: TTA
  source 1..20: mol_type = other DNA
aggaagggaatactacatta

SEQ ID NO: 67616 - DNA, 20 bp, synthetic construct
  misc_feature 1..20: note = Description of Artificial Sequence: Synthetic oligonucleotide
  misc_feature 1..20: note = Target: SCN10A; (+) strand; PAM type: YTN; PAM sequence: CTA
  source 1..20: mol_type = other DNA
cattatttgcacttgagcac

SEQ ID NO: 67617 - DNA, 20 bp, synthetic construct
  misc_feature 1..20: note = Description of Artificial Sequence: Synthetic oligonucleotide
  misc_feature 1..20: note = Target: SCN10A; (+) strand; PAM type: YTN; PAM sequence: TTA
  source 1..20: mol_type = other DNA
tttgcacttgagcaccaagc

SEQ ID NO: 67618 - DNA, 20 bp, synthetic construct
  misc_feature 1..20: note = Description of Artificial Sequence: Synthetic oligonucleotide
  misc_feature 1..20: note = Target: SCN10A; (+) strand; PAM type: YTN; PAM sequence: TTT
  source 1..20: mol_type = other DNA
gcacttgagcaccaagcaaa

SEQ ID NO: 67619 - DNA, 20 bp, synthetic construct
  misc_feature 1..20: note = Description of Artificial Sequence: Synthetic oligonucleotide
  misc_feature 1..20: note = Target: SCN10A; (+) strand; PAM type: YTN; PAM sequence: TTG
  source 1..20: mol_type = other DNA
cacttgagcaccaagcaaac

SEQ ID NO: 67620 - DNA, 20 bp, synthetic construct
  misc_feature 1..20: note = Description of Artificial Sequence: Synthetic oligonucleotide
  misc_feature 1..20: note = Target: SCN10A; (+) strand; PAM type: YTN; PAM sequence: CTT
  source 1..20: mol_type = other DNA
gagcaccaagcaaaccaatg

SEQ ID NO: 67621 - DNA, 20 bp, synthetic construct
  misc_feature 1..20: note = Description of Artificial Sequence: Synthetic oligonucleotide
  misc_feature 1..20: note = Target: SCN10A; (+) strand; PAM type: YTN; PAM sequence: TTG
  source 1..20: mol_type = other DNA
agcaccaagcaaaccaatga

SEQ ID NO: 67622 - DNA, 20 bp, synthetic construct
  misc_feature 1..20: note = Description of Artificial Sequence: Synthetic oligonucleotide
  misc_feature 1..20: note = Target: SCN10A; (+) strand; PAM type: YTN; PAM sequence: CTG
  source 1..20: mol_type = other DNA
agaagaaaattttggttgca

SEQ ID NO: 67623 - DNA, 20 bp, synthetic construct
  misc_feature 1..20: note = Description of Artificial Sequence: Synthetic oligonucleotide
  misc_feature 1..20: note = Target: SCN10A; (+) strand; PAM type: YTN; PAM sequence: TTT
  source 1..20: mol_type = other DNA
tggttgcatatttgacagca

SEQ ID NO: 67624 - DNA, 20 bp, synthetic construct
  misc_feature 1..20: note = Description of Artificial Sequence: Synthetic oligonucleotide
  misc_feature 1..20: note = Target: SCN10A; (+) strand; PAM type: YTN; PAM sequence: TTT
  source 1..20: mol_type = other DNA
ggttgcatatttgacagcag

SEQ ID NO: 67625 - DNA, 20 bp, synthetic construct
  misc_feature 1..20: note = Description of Artificial Sequence: Synthetic oligonucleotide
  misc_feature 1..20: note = Target: SCN10A; (+) strand; PAM type: YTN; PAM sequence: TTG
  source 1..20: mol_type = other DNA
gttgcatatttgacagcagt

SEQ ID NO: 67626 - DNA, 20 bp, synthetic construct
  misc_feature 1..20: note = Description of Artificial Sequence: Synthetic oligonucleotide
  misc_feature 1..20: note = Target: SCN10A; (+) strand; PAM type: YTN; PAM sequence: TTG
  source 1..20: mol_type = other DNA
catatttgacagcagtgtct

SEQ ID NO: 67627 - DNA, 20 bp, synthetic construct
  misc_feature 1..20: note = Description of Artificial Sequence: Synthetic oligonucleotide
  misc_feature 1..20: note = Target: SCN10A; (+) strand; PAM type: YTN; PAM sequence: TTT
  source 1..20: mol_type = other DNA
gacagcagtgtctccttggc

SEQ ID NO: 67628 - DNA, 20 bp, synthetic construct
  misc_feature 1..20: note = Description of Artificial Sequence: Synthetic oligonucleotide
  misc_feature 1..20: note = Target: SCN10A; (+) strand; PAM type: YTN; PAM sequence: TTG
  source 1..20: mol_type = other DNA
acagcagtgtctccttggcc

SEQ ID NO: 67629 - DNA, 20 bp, synthetic construct
  misc_feature 1..20: note = Description of Artificial Sequence: Synthetic oligonucleotide
  misc_feature 1..20: note = Target: SCN10A; (+) strand; PAM type: YTN; PAM sequence: CTC
  source 1..20: mol_type = other DNA
cttggccacgagttatttta

SEQ ID NO: 67630 - DNA, 20 bp, synthetic construct
  misc_feature 1..20: note = Description of Artificial Sequence: Synthetic oligonucleotide
  misc_feature 1..20: note = Target: SCN10A; (+) strand; PAM type: YTN; PAM sequence: CTT
  source 1..20: mol_type = other DNA
ggccacgagttattttagaa

SEQ ID NO: 67631 - DNA, 20 bp, synthetic construct
  misc_feature 1..20: note = Description of Artificial Sequence: Synthetic oligonucleotide
  misc_feature 1..20: note = Target: SCN10A; (+) strand; PAM type: YTN; PAM sequence: TTG
  source 1..20: mol_type = other DNA
gccacgagttattttagaat

SEQ ID NO: 67632 - DNA, 20 bp, synthetic construct
  misc_feature 1..20: note = Description of Artificial Sequence: Synthetic oligonucleotide
  misc_feature 1..20: note = Target: SCN10A; (+) strand; PAM type: YTN; PAM sequence: TTA
  source 1..20: mol_type = other DNA
ttttagaattaaggttttga

SEQ ID NO: 67633 - DNA, 20 bp, synthetic construct
  misc_feature 1..20: note = Description of Artificial Sequence: Synthetic oligonucleotide
  misc_feature 1..20: note = Target: SCN10A; (+) strand; PAM type: YTN; PAM sequence: TTT
  source 1..20: mol_type = other DNA
tagaattaaggttttgacaa

SEQ ID NO: 67634 - DNA, 20 bp, synthetic construct
  misc_feature 1..20: note = Description of Artificial Sequence: Synthetic oligonucleotide
  misc_feature 1..20: note = Target: SCN10A; (+) strand; PAM type: YTN; PAM sequence: TTT
  source 1..20: mol_type = other DNA
agaattaaggttttgacaaa

SEQ ID NO: 67635 - DNA, 20 bp, synthetic construct
  misc_feature 1..20: note = Description of Artificial Sequence: Synthetic oligonucleotide
  misc_feature 1..20: note = Target: SCN10A; (+) strand; PAM type: YTN; PAM sequence: TTA
  source 1..20: mol_type = other DNA
gaattaaggttttgacaaat

SEQ ID NO: 67636 - DNA, 20 bp, synthetic construct
  misc_feature 1..20: note = Description of Artificial Sequence: Synthetic oligonucleotide
  misc_feature 1..20: note = Target: SCN10A; (+) strand; PAM type: YTN; PAM sequence: TTA
  source 1..20: mol_type = other DNA
aggttttgacaaatggtggg

SEQ ID NO: 67637 - DNA, 20 bp, synthetic construct
  misc_feature 1..20: note = Description of Artificial Sequence: Synthetic oligonucleotide
  misc_feature 1..20: note = Target: SCN10A; (+) strand; PAM type: YTN; PAM sequence: TTT
  source 1..20: mol_type = other DNA
tgacaaatggtgggcaatgt

SEQ ID NO: 67638 - DNA, 20 bp, synthetic construct
  misc_feature 1..20: note = Description of Artificial Sequence: Synthetic oligonucleotide
  misc_feature 1..20: note = Target: SCN10A; (+) strand; PAM type: YTN; PAM sequence: TTT
  source 1..20: mol_type = other DNA
gacaaatggtgggcaatgtc

SEQ ID NO: 67639 - DNA, 20 bp, synthetic construct
  misc_feature 1..20: note = Description of Artificial Sequence: Synthetic oligonucleotide
  misc_feature 1..20: note = Target: SCN10A; (+) strand; PAM type: YTN; PAM sequence: TTG
  source 1..20: mol_type = other DNA
acaaatggtgggcaatgtct

SEQ ID NO: 67640 - DNA, 20 bp, synthetic construct
  misc_feature 1..20: note = Description of Artificial Sequence: Synthetic oligonucleotide
  misc_feature 1..20: note = Target: SCN10A; (+) strand; PAM type: YTN; PAM sequence: CTT
  source 1..20: mol_type = other DNA
ctgagtataagcattagaat

SEQ ID NO: 67641 - DNA, 20 bp, synthetic construct
  misc_feature 1..20: note = Description of Artificial Sequence: Synthetic oligonucleotide
  misc_feature 1..20: note = Target: SCN10A; (+) strand; PAM type: YTN; PAM sequence: TTC
  source 1..20: mol_type = other DNA
tgagtataagcattagaatt

SEQ ID NO: 67642 - DNA, 20 bp, synthetic construct
  misc_feature 1..20: note = Description of Artificial Sequence: Synthetic oligonucleotide
  misc_feature 1..20: note = Target: SCN10A; (+) strand; PAM type: YTN; PAM sequence: CTG
  source 1..20: mol_type = other DNA
agtataagcattagaattgc

SEQ ID NO: 67643 - DNA, 20 bp, synthetic construct
  misc_feature 1..20: note = Description of Artificial Sequence: Synthetic oligonucleotide
  misc_feature 1..20: note = Target: SCN10A; (+) strand; PAM type: YTN; PAM sequence: TTA
  source 1..20: mol_type = other DNA
gaattgctttaaaattcatc

SEQ ID NO: 67644 - DNA, 20 bp, synthetic construct
  misc_feature 1..20: note = Description of Artificial Sequence: Synthetic oligonucleotide
  misc_feature 1..20: note = Target: SCN10A; (+) strand; PAM type: YTN; PAM sequence: TTG
  source 1..20: mol_type = other DNA
ctttaaaattcatcctctaa

SEQ ID NO: 67645 - DNA, 20 bp, synthetic construct
  misc_feature 1..20: note = Description of Artificial Sequence: Synthetic oligonucleotide
  misc_feature 1..20: note = Target: SCN10A; (+) strand; PAM type: YTN; PAM sequence: CTT
  source 1..20: mol_type = other DNA
taaaattcatcctctaacga

SEQ ID NO: 67646 - DNA, 20 bp, synthetic construct
  misc_feature 1..20: note = Description of Artificial Sequence: Synthetic oligonucleotide
  misc_feature 1..20: note = Target: SCN10A; (+) strand; PAM type: YTN; PAM sequence: TTT
  source 1..20: mol_type = other DNA
aaaattcatcctctaacgag

SEQ ID NO: 67647 - DNA, 20 bp, synthetic construct
  misc_feature 1..20: note = Description of Artificial Sequence: Synthetic oligonucleotide
  misc_feature 1..20: note = Target: SCN10A; (+) strand; PAM type: YTN; PAM sequence: TTA
  source 1..20: mol_type = other DNA
aaattcatcctctaacgaga

SEQ ID NO: 67648 - DNA, 20 bp, synthetic construct
  misc_feature 1..20: note = Description of Artificial Sequence: Synthetic oligonucleotide
  misc_feature 1..20: note = Target: SCN10A; (+) strand; PAM type: YTN; PAM sequence: TTC
  source 1..20: mol_type = other DNA
atcctctaacgagaccaact

SEQ ID NO: 67649 - DNA, 20 bp, synthetic construct
  misc_feature 1..20: note = Description of Artificial Sequence: Synthetic oligonucleotide
  misc_feature 1..20: note = Target: SCN10A; (+) strand; PAM type: YTN; PAM sequence: CTC
  source 1..20: mol_type = other DNA
taacgagaccaactggtctg

SEQ ID NO: 67650 - DNA, 20 bp, synthetic construct
  misc_feature 1..20: note = Description of Artificial Sequence: Synthetic oligonucleotide
  misc_feature 1..20: note = Target: SCN10A; (+) strand; PAM type: YTN; PAM sequence: CTA
  source 1..20: mol_type = other DNA
acgagaccaactggtctgtg

SEQ ID NO: 67651 - DNA, 20 bp, synthetic construct
  misc_feature 1..20: note = Description of Artificial Sequence: Synthetic oligonucleotide
  misc_feature 1..20: note = Target: SCN10A; (+) strand; PAM type: YTN; PAM sequence: CTG
  source 1..20: mol_type = other DNA
gtctgtgattttccacaaaa

SEQ ID NO: 67652 - DNA, 20 bp, synthetic construct
  misc_feature 1..20: note = Description of Artificial Sequence: Synthetic oligonucleotide
  misc_feature 1..20: note = Target: SCN10A; (+) strand; PAM type: YTN; PAM sequence: CTG
  source 1..20: mol_type = other DNA
tgattttccacaaaaaccct

SEQ ID NO: 67653 - DNA, 20 bp, synthetic construct
  misc_feature 1..20: note = Description of Artificial Sequence: Synthetic oligonucleotide
  misc_feature 1..20: note = Target: SCN10A; (+) strand; PAM type: YTN; PAM sequence: TTT
  source 1..20: mol_type = other DNA
tccacaaaaaccctcctggg

SEQ ID NO: 67654 - DNA, 20 bp, synthetic construct
  misc_feature 1..20: note = Description of Artificial Sequence: Synthetic oligonucleotide
  misc_feature 1..20: note = Target: SCN10A; (+) strand; PAM type: YTN; PAM sequence: TTT
  source 1..20: mol_type = other DNA
ccacaaaaaccctcctgggt

SEQ ID NO: 67655 - DNA, 20 bp, synthetic construct
  misc_feature 1..20: note = Description of Artificial Sequence: Synthetic oligonucleotide
  misc_feature 1..20: note = Target: SCN10A; (+) strand; PAM type: YTN; PAM sequence: TTC
  source 1..20: mol_type = other DNA
cacaaaaaccctcctgggtc

SEQ ID NO: 67656 - DNA, 20 bp, synthetic construct
  misc_feature 1..20: note = Description of Artificial Sequence: Synthetic oligonucleotide
  misc_feature 1..20: note = Target: SCN10A; (+) strand; PAM type: YTN; PAM sequence: CTC
  source 1..20: mol_type = other DNA
ctgggtctcttctatatatt

SEQ ID NO: 67657 - DNA, 20 bp, synthetic construct
  misc_feature 1..20: note = Description of Artificial Sequence: Synthetic oligonucleotide
  misc_feature 1..20: note = Target: SCN10A; (+) strand; PAM type: YTN; PAM sequence: CTG
  source 1..20: mol_type = other DNA
ggtctcttctatatattcct

SEQ ID NO: 67658 - DNA, 20 bp, synthetic construct
  misc_feature 1..20: note = Description of Artificial Sequence: Synthetic oligonucleotide
  misc_feature 1..20: note = Target: SCN10A; (+) strand; PAM type: YTN; PAM sequence: CTC
  source 1..20: mol_type = other DNA
ttctatatattcctctattt

SEQ ID NO: 67659 - DNA, 20 bp, synthetic construct
  misc_feature 1..20: note = Description of Artificial Sequence: Synthetic oligonucleotide
  misc_feature 1..20: note = Target: SCN10A; (+) strand; PAM type: YTN; PAM sequence: CTT
  source 1..20: mol_type = other DNA
ctatatattcctctatttaa

SEQ ID NO: 67660 - DNA, 20 bp, synthetic construct
  misc_feature 1..20: note = Description of Artificial Sequence: Synthetic oligonucleotide
  misc_feature 1..20: note = Target: SCN10A; (+) strand; PAM type: YTN; PAM sequence: TTC
  source 1..20: mol_type = other DNA
tatatattcctctatttaat

SEQ ID NO: 67661 - DNA, 20 bp, synthetic construct
  misc_feature 1..20: note = Description of Artificial Sequence: Synthetic oligonucleotide
  misc_feature 1..20: note = Target: SCN10A; (+) strand; PAM type: YTN; PAM sequence: CTA
  source 1..20: mol_type = other DNA
tatattcctctatttaattt

SEQ ID NO: 67662 - DNA, 20 bp, synthetic construct
  misc_feature 1..20: note = Description of Artificial Sequence: Synthetic oligonucleotide
  misc_feature 1..20: note = Target: SCN10A; (+) strand; PAM type: YTN; PAM sequence: TTC
  source 1..20: mol_type = other DNA
ctctatttaatttctattgg

SEQ ID NO: 67663 - DNA, 20 bp, synthetic construct
  misc_feature 1..20: note = Description of Artificial Sequence: Synthetic oligonucleotide
  misc_feature 1..20: note = Target: SCN10A; (+) strand; PAM type: YTN; PAM sequence: CTC
  source 1..20: mol_type = other DNA
tatttaatttctattggtta

SEQ ID NO: 67664 - DNA, 20 bp, synthetic construct
  misc_feature 1..20: note = Description of Artificial Sequence: Synthetic oligonucleotide
  misc_feature 1..20: note = Target: SCN10A; (+) strand; PAM type: YTN; PAM sequence: CTA
  source 1..20: mol_type = other DNA
tttaatttctattggttata

SEQ ID NO: 67665 - DNA, 20 bp, synthetic construct
  misc_feature 1..20: note = Description of Artificial Sequence: Synthetic oligonucleotide
  misc_feature 1..20: note = Target: SCN10A; (+) strand; PAM type: YTN; PAM sequence: TTT
  source 1..20: mol_type = other DNA
aatttctattggttataaaa

SEQ ID NO: 67666 - DNA, 20 bp, synthetic construct
  misc_feature 1..20: note = Description of Artificial Sequence: Synthetic oligonucleotide
  misc_feature 1..20: note = Target: SCN10A; (+) strand; PAM type: YTN; PAM sequence: TTA
  source 1..20: mol_type = other DNA
atttctattggttataaaat

SEQ ID NO: 67667 - DNA, 20 bp, synthetic construct
  misc_feature 1..20: note = Description of Artificial Sequence: Synthetic oligonucleotide
  misc_feature 1..20: note = Target: SCN10A; (+) strand; PAM type: YTN; PAM sequence: TTT
  source 1..20: mol_type = other DNA
ctattggttataaaatggct

SEQ ID NO: 67668 - DNA, 20 bp, synthetic construct
  misc_feature 1..20: note = Description of Artificial Sequence: Synthetic oligonucleotide
  misc_feature 1..20: note = Target: SCN10A; (+) strand; PAM type: YTN; PAM sequence: TTC
  source 1..20: mol_type = other DNA
tattggttataaaatggctt

SEQ ID NO: 67669 - DNA, 20 bp, synthetic construct
  misc_feature 1..20: note = Description of Artificial Sequence: Synthetic oligonucleotide
  misc_feature 1..20: note = Target: SCN10A; (+) strand; PAM type: YTN; PAM sequence: CTA
  source 1..20: mol_type = other DNA
ttggttataaaatggcttta

SEQ ID NO: 67670 - DNA, 20 bp, synthetic construct
  misc_feature 1..20: note = Description of Artificial Sequence: Synthetic oligonucleotide
  misc_feature 1..20: note = Target: SCN10A; (+) strand; PAM type: YTN; PAM sequence: TTG
  source 1..20: mol_type = other DNA
gttataaaatggctttagat

SEQ ID NO: 67671 - DNA, 20 bp, synthetic construct
  misc_feature 1..20: note = Description of Artificial Sequence: Synthetic oligonucleotide
  misc_feature 1..20: note = Target: SCN10A; (+) strand; PAM type: YTN; PAM sequence: TTA
  source 1..20: mol_type = other DNA
taaaatggctttagataaaa

SEQ ID NO: 67672 - DNA, 20 bp, synthetic construct
  misc_feature 1..20: note = Description of Artificial Sequence: Synthetic oligonucleotide
  misc_feature 1..20: note = Target: SCN10A; (+) strand; PAM type: YTN; PAM sequence: CTT
  source 1..20: mol_type = other DNA
tagataaaaactgcattagg

SEQ ID NO: 67673 - DNA, 20 bp, synthetic construct
  misc_feature 1..20: note = Description of Artificial Sequence: Synthetic oligonucleotide
  misc_feature 1..20: note = Target: SCN10A; (+) strand; PAM type: YTN; PAM sequence: TTT
  source 1..20: mol_type = other DNA
agataaaaactgcattaggt

SEQ ID NO: 67674 - DNA, 20 bp, synthetic construct
  misc_feature 1..20: note = Description of Artificial Sequence: Synthetic oligonucleotide
  misc_feature 1..20: note = Target: SCN10A; (+) strand; PAM type: YTN; PAM sequence: TTA
  source 1..20: mol_type = other DNA
gataaaaactgcattaggtc

SEQ ID NO: 67675 - DNA, 20 bp, synthetic construct
  misc_feature 1..20: note = Description of Artificial Sequence: Synthetic oligonucleotide
  misc_feature 1..20: note = Target: SCN10A; (+) strand; PAM type: YTN; PAM sequence: CTG
  source 1..20: mol_type = other DNA
cattaggtctatttaccaca

SEQ ID NO: 67676 - DNA, 20 bp, synthetic construct
  misc_feature 1..20: note = Description of Artificial Sequence: Synthetic oligonucleotide
  misc_feature 1..20: note = Target: SCN10A; (+) strand; PAM type: YTN; PAM sequence: TTA
  source 1..20: mol_type = other DNA
ggtctatttaccacatgaat

SEQ ID NO: 67677 - DNA, 20 bp, synthetic construct
  misc_feature 1..20: note = Description of Artificial Sequence: Synthetic oligonucleotide
  misc_feature 1..20: note = Target: SCN10A; (+) strand; PAM type: YTN; PAM sequence: CTA
  source 1..20: mol_type = other DNA
tttaccacatgaatgtacct

SEQ ID NO: 67678 - DNA, 20 bp, synthetic construct
  misc_feature 1..20: note = Description of Artificial Sequence: Synthetic oligonucleotide
  misc_feature 1..20: note = Target: SCN10A; (+) strand; PAM type: YTN; PAM sequence: TTT
  source 1..20: mol_type = other DNA
accacatgaatgtacctggg

SEQ ID NO: 67679 - DNA, 20 bp, synthetic construct
  misc_feature 1..20: note = Description of Artificial Sequence: Synthetic oligonucleotide
  misc_feature 1..20: note = Target: SCN10A; (+) strand; PAM type: YTN; PAM sequence: TTA
  source 1..20: mol_type = other DNA
ccacatgaatgtacctggga

SEQ ID NO: 67680 - DNA, 20 bp, synthetic construct
  misc_feature 1..20: note = Description of Artificial Sequence: Synthetic oligonucleotide
  misc_feature 1..20: note = Target: SCN10A; (+) strand; PAM type: YTN; PAM sequence: CTG
  source 1..20: mol_type = other DNA
ggaaaagagggagaggatgc

SEQ ID NO: 67681 - DNA, 20 bp, synthetic construct
  misc_feature 1..20: note = Description of Artificial Sequence: Synthetic oligonucleotide
  misc_feature 1..20: note = Target: SCN10A; (+) strand; PAM type: YTN; PAM sequence: CTT
  source 1..20: mol_type = other DNA
cctgagtgggctccaataaa

SEQ ID NO: 67682 - DNA, 20 bp, synthetic construct
  misc_feature 1..20: note = Description of Artificial Sequence: Synthetic oligonucleotide
  misc_feature 1..20: note = Target: SCN10A; (+) strand; PAM type: YTN; PAM sequence: TTC
  source 1..20: mol_type = other DNA
ctgagtgggctccaataaat

SEQ ID NO: 67683 - DNA, 20 bp, synthetic construct
  misc_feature 1..20: note = Description of Artificial Sequence: Synthetic oligonucleotide
  misc_feature 1..20: note = Target: SCN10A; (+) strand; PAM type: YTN; PAM sequence: CTG
  source 1..20: mol_type = other DNA
agtgggctccaataaatcaa

SEQ ID NO: 67684 - DNA, 20 bp, synthetic construct
  misc_feature 1..20: note = Description of Artificial Sequence: Synthetic oligonucleotide
  misc_feature 1..20: note = Target: SCN10A; (+) strand; PAM type: YTN; PAM sequence: CTC
  source 1..20: mol_type = other DNA
caataaatcaattagcatta

SEQ ID NO: 67685 - DNA, 20 bp, synthetic construct
  misc_feature 1..20: note = Description of Artificial Sequence: Synthetic oligonucleotide
  misc_feature 1..20: note = Target: SCN10A; (+) strand; PAM type: YTN; PAM sequence: TTA
  source 1..20: mol_type = other DNA
gcattaaagaagtacttaaa

SEQ ID NO: 67686 - DNA, 20 bp, synthetic construct
  misc_feature 1..20: note = Description of Artificial Sequence: Synthetic oligonucleotide
  misc_feature 1..20: note = Target: SCN10A; (+) strand; PAM type: YTN; PAM sequence: TTA
  source 1..20: mol_type = other DNA
aagaagtacttaaatggtgc

SEQ ID NO: 67687 - DNA, 20 bp, synthetic construct
  misc_feature 1..20: note = Description of Artificial Sequence: Synthetic oligonucleotide
  misc_feature 1..20: note = Target: SCN10A; (+) strand; PAM type: YTN; PAM sequence: CTT
  source 1..20: mol_type = other DNA
aaatggtgcctccctgtctt

SEQ ID NO: 67688 - DNA, 20 bp, synthetic construct
  misc_feature 1..20: note = Description of Artificial Sequence: Synthetic oligonucleotide
  misc_feature 1..20: note = Target: SCN10A; (+) strand; PAM type: YTN; PAM sequence: TTA
  source 1..20: mol_type = other DNA
aatggtgcctccctgtcttt

SEQ ID NO: 67689 - DNA, 20 bp, synthetic construct
  misc_feature 1..20: note = Description of Artificial Sequence: Synthetic oligonucleotide
  misc_feature 1..20: note = Target: SCN10A; (+) strand; PAM type: YTN; PAM sequence: CTC
  source 1..20: mol_type = other DNA
cctgtctttgcacatacatg

SEQ ID NO: 67690 - DNA, 20 bp, synthetic construct
  misc_feature 1..20: note = Description of Artificial Sequence: Synthetic oligonucleotide
  misc_feature 1..20: note = Target: SCN10A; (+) strand; PAM type: YTN; PAM sequence: CTG
  source 1..20: mol_type = other DNA
tctttgcacatacatgttgt

SEQ ID NO: 67691 - DNA, 20 bp, synthetic construct
  misc_feature 1..20: note = Description of Artificial Sequence: Synthetic oligonucleotide
  misc_feature 1..20: note = Target: SCN10A; (+) strand; PAM type: YTN; PAM sequence: CTT
  source 1..20: mol_type = other DNA
tgcacatacatgttgttctt

SEQ ID NO: 67692 - DNA, 20 bp, synthetic construct
  misc_feature 1..20: note = Description of Artificial Sequence: Synthetic oligonucleotide
  misc_feature 1..20: note = Target: SCN10A; (+) strand; PAM type: YTN; PAM sequence: TTT
  source 1..20: mol_type = other DNA
gcacatacatgttgttcttt

SEQ ID NO: 67693 - DNA, 20 bp, synthetic construct
  misc_feature 1..20: note = Description of Artificial Sequence: Synthetic oligonucleotide
  misc_feature 1..20: note = Target: SCN10A; (+) strand; PAM type: YTN; PAM sequence: TTG
  source 1..20: mol_type = other DNA
cacatacatgttgttctttc

SEQ ID NO: 67694 - DNA, 20 bp, synthetic construct
  misc_feature 1..20: note = Description of Artificial Sequence: Synthetic oligonucleotide
  misc_feature 1..20: note = Target: SCN10A; (+) strand; PAM type: YTN; PAM sequence: TTG
  source 1..20: mol_type = other DNA
ttctttctgccaggaaaata

SEQ ID NO: 67695 - DNA, 20 bp, synthetic construct
  misc_feature 1..20: note = Description of Artificial Sequence: Synthetic oligonucleotide
  misc_feature 1..20: note = Target: SCN10A; (+) strand; PAM type: YTN; PAM sequence: TTC
  source 1..20: mol_type = other DNA
tttctgccaggaaaatactc

SEQ ID NO: 67696 - DNA, 20 bp, synthetic construct
  misc_feature 1..20: note = Description of Artificial Sequence: Synthetic oligonucleotide
  misc_feature 1..20: note = Target: SCN10A; (+) strand; PAM type: YTN; PAM sequence: CTT
  source 1..20: mol_type = other DNA
tctgccaggaaaatactcct

SEQ ID NO: 67697 - DNA, 20 bp, synthetic construct
  misc_feature 1..20: note = Description of Artificial Sequence: Synthetic oligonucleotide
  misc_feature 1..20: note = Target: SCN10A; (+) strand; PAM type: YTN; PAM sequence: TTT
  source 1..20: mol_type = other DNA
ctgccaggaaaatactcctc

SEQ ID NO: 67698 - DNA, 20 bp, synthetic construct
  misc_feature 1..20: note = Description of Artificial Sequence: Synthetic oligonucleotide
  misc_feature 1..20: note = Target: SCN10A; (+) strand; PAM type: YTN; PAM sequence: TTC
  source 1..20: mol_type = other DNA
tgccaggaaaatactcctcc

SEQ ID NO: 67699 - DNA, 20 bp, synthetic construct
  misc_feature 1..20: note = Description of Artificial Sequence: Synthetic oligonucleotide
  misc_feature 1..20: note = Target: SCN10A; (+) strand; PAM type: YTN; PAM sequence: CTG
  source 1..20: mol_type = other DNA
ccaggaaaatactcctcccc

SEQ ID NO: 67700 - DNA, 20 bp, synthetic construct
  misc_feature 1..20: note = Description of Artificial Sequence: Synthetic oligonucleotide
  misc_feature 1..20: note = Target: SCN10A; (+) strand; PAM type: YTN; PAM sequence: CTC
  source 1..20: mol_type = other DNA
ctccccaaactctctcaagt

SEQ ID NO: 67701 - DNA, 20 bp, synthetic construct
  misc_feature 1..20: note = Description of Artificial Sequence: Synthetic oligonucleotide
  misc_feature 1..20: note = Target: SCN10A; (+) strand; PAM type: YTN; PAM sequence: CTC
  source 1..20: mol_type = other DNA
cccaaactctctcaagtctt

SEQ ID NO: 67702 - DNA, 20 bp, synthetic construct
  misc_feature 1..20: note = Description of Artificial Sequence: Synthetic oligonucleotide
  misc_feature 1..20: note = Target: SCN10A; (+) strand; PAM type: YTN; PAM sequence: CTC
  source 1..20: mol_type = other DNA
tctcaagtcttcaattacta

SEQ ID NO: 67703 - DNA, 20 bp, synthetic construct
  misc_feature 1..20: note = Description of Artificial Sequence: Synthetic oligonucleotide
  misc_feature 1..20: note = Target: SCN10A; (+) strand; PAM type: YTN; PAM sequence: CTC
  source 1..20: mol_type = other DNA
tcaagtcttcaattactaga

SEQ ID NO: 67704 - DNA, 20 bp, synthetic construct
  misc_feature 1..20: note = Description of Artificial Sequence: Synthetic oligonucleotide
  misc_feature 1..20: note = Target: SCN10A; (+) strand; PAM type: YTN; PAM sequence: CTC
  source 1..20: mol_type = other DNA
aagtcttcaattactagaag

SEQ ID NO: 67705 - DNA, 20 bp, synthetic construct
  misc_feature 1..20: note = Description of Artificial Sequence: Synthetic oligonucleotide
  misc_feature 1..20: note = Target: SCN10A; (+) strand; PAM type: YTN; PAM sequence: CTT
  source 1..20: mol_type = other DNA
caattactagaagaacccct

SEQ ID NO: 67706 - DNA, 20 bp, synthetic construct
  misc_feature 1..20: note = Description of Artificial Sequence: Synthetic oligonucleotide
  misc_feature 1..20: note = Target: SCN10A; (+) strand; PAM type: YTN; PAM sequence: TTC
  source 1..20: mol_type = other DNA
aattactagaagaaccccta

SEQ ID NO: 67707 - DNA, 20 bp, synthetic construct
  misc_feature 1..20: note = Description of Artificial Sequence: Synthetic oligonucleotide
  misc_feature 1..20: note = Target: SCN10A; (+) strand; PAM type: YTN; PAM sequence: TTA
  source 1..20: mol_type = other DNA
ctagaagaacccctacatgc

SEQ ID NO: 67708 - DNA, 20 bp, synthetic construct
  misc_feature 1..20: note = Description of Artificial Sequence: Synthetic oligonucleotide
  misc_feature 1..20: note = Target: SCN10A; (+) strand; PAM type: YTN; PAM sequence: CTA
  source 1..20: mol_type = other DNA
gaagaacccctacatgctat

SEQ ID NO: 67709 - DNA, 20 bp, synthetic construct
  misc_feature 1..20: note = Description of Artificial Sequence: Synthetic oligonucleotide
  misc_feature 1..20: note = Target: SCN10A; (+) strand; PAM type: YTN; PAM sequence: CTA
  source 1..20: mol_type = other DNA
catgctatttattgttgatc

SEQ ID NO: 67710 - DNA, 20 bp, synthetic construct
  misc_feature 1..20: note = Description of Artificial Sequence: Synthetic oligonucleotide
  misc_feature 1..20: note = Target: SCN10A; (+) strand; PAM type: YTN; PAM sequence: CTA
  source 1..20: mol_type = other DNA
tttattgttgatcccaatta

SEQ ID NO: 67711 - DNA, 20 bp, synthetic construct
  misc_feature 1..20: note = Description of Artificial Sequence: Synthetic oligonucleotide
  misc_feature 1..20: note = Target: SCN10A; (+) strand; PAM type: YTN; PAM sequence: TTT
  source 1..20: mol_type = other DNA
attgttgatcccaattatgc

SEQ ID NO: 67712 - DNA, 20 bp, synthetic construct
  misc_feature 1..20: note = Description of Artificial Sequence: Synthetic oligonucleotide
  misc_feature 1..20: note = Target: SCN10A; (+) strand; PAM type: YTN; PAM sequence: TTA
  source 1..20: mol_type = other DNA
ttgttgatcccaattatgcc

SEQ ID NO: 67713 - DNA, 20 bp, synthetic construct
  misc_feature 1..20: note = Description of Artificial Sequence: Synthetic oligonucleotide
  misc_feature 1..20: note = Target: SCN10A; (+) strand; PAM type: YTN; PAM sequence: TTG
  source 1..20: mol_type = other DNA
ttgatcccaattatgccttc

SEQ ID NO: 67714 - DNA, 20 bp, synthetic construct
  misc_feature 1..20: note = Description of Artificial Sequence: Synthetic oligonucleotide
  misc_feature 1..20: note = Target: SCN10A; (+) strand; PAM type: YTN; PAM sequence: TTG
  source 1..20: mol_type = other DNA
atcccaattatgccttcctc

SEQ ID NO: 67715 - DNA, 20 bp, synthetic construct
  misc_feature 1..20: note = Description of Artificial Sequence: Synthetic oligonucleotide
  misc_feature 1..20: note = Target: SCN10A; (+) strand; PAM type: YTN; PAM sequence: TTA
  source 1..20: mol_type = other DNA
tgccttcctccaggaagcct

SEQ ID NO: 67716 - DNA, 20 bp, synthetic construct
  misc_feature 1..20: note = Description of Artificial Sequence: Synthetic oligonucleotide
  misc_feature 1..20: note = Target: SCN10A; (+) strand; PAM type: YTN; PAM sequence: CTT
  source 1..20: mol_type = other DNA
cctccaggaagccttttctg

SEQ ID NO: 67717 - DNA, 20 bp, synthetic construct
  misc_feature 1..20: note = Description of Artificial Sequence: Synthetic oligonucleotide
  misc_feature 1..20: note = Target: SCN10A; (+) strand; PAM type: YTN; PAM sequence: TTC
  source 1..20: mol_type = other DNA
ctccaggaagccttttctga

SEQ ID NO: 67718 - DNA, 20 bp, synthetic construct
  misc_feature 1..20: note = Description of Artificial Sequence: Synthetic oligonucleotide
  misc_feature 1..20: note = Target: SCN10A; (+) strand; PAM type: YTN; PAM sequence: CTC
  source 1..20: mol_type = other DNA
caggaagccttttctgatac

SEQ ID NO: 67719 - DNA, 20 bp, synthetic construct
  misc_feature 1..20: note = Description of Artificial Sequence: Synthetic oligonucleotide
  misc_feature 1..20: note = Target: SCN10A; (+) strand; PAM type: YTN; PAM sequence: CTT
  source 1..20: mol_type = other DNA
ttctgatacctatccagccc

SEQ ID NO: 67720 - DNA, 20 bp, synthetic construct
  misc_feature 1..20: note = Description of Artificial Sequence: Synthetic oligonucleotide
  misc_feature 1..20: note = Target: SCN10A; (+) strand; PAM type: YTN; PAM sequence: TTT
  source 1..20: mol_type = other DNA
tctgatacctatccagcccc

SEQ ID NO: 67721 - DNA, 20 bp, synthetic construct
  misc_feature 1..20: note = Description of Artificial Sequence: Synthetic oligonucleotide
  misc_feature 1..20: note = Target: SCN10A; (+) strand; PAM type: YTN; PAM sequence: TTT
  source 1..20: mol_type = other DNA
ctgatacctatccagcccca

SEQ ID NO: 67722 - DNA, 20 bp, synthetic construct
  misc_feature 1..20: note = Description of Artificial Sequence: Synthetic oligonucleotide
  misc_feature 1..20: note = Target: SCN10A; (+) strand; PAM type: YTN; PAM sequence: TTC
  source 1..20: mol_type = other DNA
tgatacctatccagccccat

SEQ ID NO: 67723 - DNA, 20 bp, synthetic construct
  misc_feature 1..20: note = Description of Artificial Sequence: Synthetic oligonucleotide
  misc_feature 1..20: note = Target: SCN10A; (+) strand; PAM type: YTN; PAM sequence: CTG
  source 1..20: mol_type = other DNA
atacctatccagccccataa

SEQ ID NO: 67724 - DNA, 20 bp, synthetic construct
  misc_feature 1..20: note = Description of Artificial Sequence: Synthetic oligonucleotide
  misc_feature 1..20: note = Target: SCN10A; (+) strand; PAM type: YTN; PAM sequence: CTA
  source 1..20: mol_type = other DNA
tccagccccataagagtgga

SEQ ID NO: 67725 - DNA, 20 bp, synthetic construct
  misc_feature 1..20: note = Description of Artificial Sequence: Synthetic oligonucleotide
  misc_feature 1..20: note = Target: SCN10A; (+) strand; PAM type: YTN; PAM sequence: TTT
  source 1..20: mol_type = other DNA
cttccctgattctcaaaaca

SEQ ID NO: 67726 - DNA, 20 bp, synthetic construct
  misc_feature 1..20: note = Description of Artificial Sequence: Synthetic oligonucleotide
  misc_feature 1..20: note = Target: SCN10A; (+) strand; PAM type: YTN; PAM sequence: TTC
  source 1..20: mol_type = other DNA
ttccctgattctcaaaacac

SEQ ID NO: 67727 - DNA, 20 bp, synthetic construct
  misc_feature 1..20: note = Description of Artificial Sequence: Synthetic oligonucleotide
  misc_feature 1..20: note = Target: SCN10A; (+) strand; PAM type: YTN; PAM sequence: CTT
  source 1..20: mol_type = other DNA
ccctgattctcaaaacacca

SEQ ID NO: 67728 - DNA, 20 bp, synthetic construct
  misc_feature 1..20: note = Description of Artificial Sequence: Synthetic oligonucleotide
  misc_feature 1..20: note = Target: SCN10A; (+) strand; PAM type: YTN; PAM sequence: TTC
  source 1..20: mol_type = other DNA
cctgattctcaaaacaccat

SEQ ID NO: 67729 - DNA, 20 bp, synthetic construct
  misc_feature 1..20: note = Description of Artificial Sequence: Synthetic oligonucleotide
  misc_feature 1..20: note = Target: SCN10A; (+) strand; PAM type: YTN; PAM sequence: CTG
  source 1..20: mol_type = other DNA
attctcaaaacaccatgtat

SEQ ID NO: 67730 - DNA, 20 bp, synthetic construct
  misc_feature 1..20: note = Description of Artificial Sequence: Synthetic oligonucleotide
  misc_feature 1..20: note = Target: SCN10A; (+) strand; PAM type: YTN; PAM sequence: TTC
  source 1..20: mol_type = other DNA
tcaaaacaccatgtatgtgt

SEQ ID NO: 67731 - DNA, 20 bp, synthetic construct
  misc_feature 1..20: note = Description of Artificial Sequence: Synthetic oligonucleotide
  misc_feature 1..20: note = Target: SCN10A; (+) strand; PAM type: YTN; PAM sequence: CTC
  source 1..20: mol_type = other DNA
aaaacaccatgtatgtgtct

SEQ ID NO: 67732 - DNA, 20 bp, synthetic construct
  misc_feature 1..20: note = Description of Artificial Sequence: Synthetic oligonucleotide
  misc_feature 1..20: note = Target: SCN10A; (+) strand; PAM type: YTN; PAM sequence: CTC
  source 1..20: mol_type = other DNA
taatacactatttaacacat

SEQ ID NO: 67733 - DNA, 20 bp, synthetic construct
  misc_feature 1..20: note = Description of Artificial Sequence: Synthetic oligonucleotide
  misc_feature 1..20: note = Target: SCN10A; (+) strand; PAM type: YTN; PAM sequence: CTA
  source 1..20: mol_type = other DNA
atacactatttaacacatag

SEQ ID NO: 67734 - DNA, 20 bp, synthetic construct
  misc_feature 1..20: note = Description of Artificial Sequence: Synthetic oligonucleotide
  misc_feature 1..20: note = Target: SCN10A; (+) strand; PAM type: YTN; PAM sequence: CTA
  source 1..20: mol_type = other DNA
tttaacacatagctgtgttt

SEQ ID NO: 67735 - DNA, 20 bp, synthetic construct
  misc_feature 1..20: note = Description of Artificial Sequence: Synthetic oligonucleotide
  misc_feature 1..20: note = Target: SCN10A; (+) strand; PAM type: YTN; PAM sequence: TTT
  source 1..20: mol_type = other DNA
aacacatagctgtgtttata

SEQ ID NO: 67736 - DNA, 20 bp, synthetic construct
  misc_feature 1..20: note = Description of Artificial Sequence: Synthetic oligonucleotide
  misc_feature 1..20: note = Target: SCN10A; (+) strand; PAM type: YTN; PAM sequence: TTA
  source 1..20: mol_type = other DNA
acacatagctgtgtttatat

SEQ ID NO: 67737 - DNA, 20 bp, synthetic construct
  misc_feature 1..20: note = Description of Artificial Sequence: Synthetic oligonucleotide
  misc_feature 1..20: note = Target: SCN10A; (+) strand; PAM type: YTN; PAM sequence: CTG
  source 1..20: mol_type = other DNA
tgtttatatctgcctcctcc

SEQ ID NO: 67738 - DNA, 20 bp, synthetic construct
  misc_feature 1..20: note = Description of Artificial Sequence: Synthetic oligonucleotide
  misc_feature 1..20: note = Target: SCN10A; (+) strand; PAM type: YTN; PAM sequence: TTT
  source 1..20: mol_type = other DNA
atatctgcctcctccaccca

SEQ ID NO: 67739 - DNA, 20 bp, synthetic construct
  misc_feature 1..20: note = Description of Artificial Sequence: Synthetic oligonucleotide
  misc_feature 1..20: note = Target: SCN10A; (+) strand; PAM type: YTN; PAM sequence: TTA
  source 1..20: mol_type = other DNA
tatctgcctcctccacccaa

SEQ ID NO: 67740 - DNA, 20 bp, synthetic construct
  misc_feature 1..20: note = Description of Artificial Sequence: Synthetic oligonucleotide
  misc_feature 1..20: note = Target: SCN10A; (+) strand; PAM type: YTN; PAM sequence: CTG
  source 1..20: mol_type = other DNA
cctcctccacccaaatggaa

SEQ ID NO: 67741 - DNA, 20 bp, synthetic construct
  misc_feature 1..20: note = Description of Artificial Sequence: Synthetic oligonucleotide
  misc_feature 1..20: note = Target: SCN10A; (+) strand; PAM type: YTN; PAM sequence: CTC
  source 1..20: mol_type = other DNA
ctccacccaaatggaaatcc

SEQ ID NO: 67742 - DNA, 20 bp, synthetic construct
  misc_feature 1..20: note = Description of Artificial Sequence: Synthetic oligonucleotide
  misc_feature 1..20: note = Target: SCN10A; (+) strand; PAM type: YTN; PAM sequence: CTC
  source 1..20: mol_type = other DNA
cacccaaatggaaatcctta

SEQ ID NO: 67743 - DNA, 20 bp, synthetic construct
  misc_feature 1..20: note = Description of Artificial Sequence: Synthetic oligonucleotide
  misc_feature 1..20: note = Target: SCN10A; (+) strand; PAM type: YTN; PAM sequence: CTT
  source 1..20: mol_type = other DNA
agggaaaagaacatgttcta

SEQ ID NO: 67744 - DNA, 20 bp, synthetic construct
  misc_feature 1..20: note = Description of Artificial Sequence: Synthetic oligonucleotide
  misc_feature 1..20: note = Target: SCN10A; (+) strand; PAM type: YTN; PAM sequence: TTA
  source 1..20: mol_type = other DNA
gggaaaagaacatgttctag

SEQ ID NO: 67745 - DNA, 20 bp, synthetic construct
  misc_feature 1..20: note = Description of Artificial Sequence: Synthetic oligonucleotide
  misc_feature 1..20: note = Target: SCN10A; (+) strand; PAM type: YTN; PAM sequence: TTC
  source 1..20: mol_type = other DNA
tagtcatctctttataccaa

SEQ ID NO: 67746 - DNA, 20 bp, synthetic construct
  misc_feature 1..20: note = Description of Artificial Sequence: Synthetic oligonucleotide
  misc_feature 1..20: note = Target: SCN10A; (+) strand; PAM type: YTN; PAM sequence: CTA
  source 1..20: mol_type = other DNA
gtcatctctttataccaagc

SEQ ID NO: 67747 - DNA, 20 bp, synthetic construct
  misc_feature 1..20: note = Description of Artificial Sequence: Synthetic oligonucleotide
  misc_feature 1..20: note = Target: SCN10A; (+) strand; PAM type: YTN; PAM sequence: CTC
  source 1..20: mol_type = other DNA
tttataccaagcacctagta

SEQ ID NO: 67748 - DNA, 20 bp, synthetic construct
  misc_feature 1..20: note = Description of Artificial Sequence: Synthetic oligonucleotide
  misc_feature 1..20: note = Target: SCN10A; (+) strand; PAM type: YTN; PAM sequence: CTT
  source 1..20: mol_type = other DNA
tataccaagcacctagtatt

SEQ ID NO: 67749 - DNA, 20 bp, synthetic construct
  misc_feature 1..20: note = Description of Artificial Sequence: Synthetic oligonucleotide
  misc_feature 1..20: note = Target: SCN10A; (+) strand; PAM type: YTN; PAM sequence: TTT
  source 1..20: mol_type = other DNA
ataccaagcacctagtattg

SEQ ID NO: 67750 - DNA, 20 bp, synthetic construct
  misc_feature 1..20: note = Description of Artificial Sequence: Synthetic oligonucleotide
  misc_feature 1..20: note = Target: SCN10A; (+) strand; PAM type: YTN; PAM sequence: TTA
  source 1..20: mol_type = other DNA
taccaagcacctagtattgt

SEQ ID NO: 67751 - DNA, 20 bp, synthetic construct
  misc_feature 1..20: note = Description of Artificial Sequence: Synthetic oligonucleotide
  misc_feature 1..20: note = Target: SCN10A; (+) strand; PAM type: YTN; PAM sequence: CTA
  source 1..20: mol_type = other DNA
gtattgttgaatgaacaagt

SEQ ID NO: 67752 - DNA, 20 bp, synthetic construct
  misc_feature 1..20: note = Description of Artificial Sequence: Synthetic oligonucleotide
  misc_feature 1..20: note = Target: SCN10A; (+) strand; PAM type: YTN; PAM sequence: TTG
  source 1..20: mol_type = other DNA
ttgaatgaacaagttacagc

SEQ ID NO: 67753 - DNA, 20 bp, synthetic construct
  misc_feature 1..20: note = Description of Artificial Sequence: Synthetic oligonucleotide
  misc_feature 1..20: note = Target: SCN10A; (+) strand; PAM type: YTN; PAM sequence: TTG
  source 1..20: mol_type = other DNA
aatgaacaagttacagctcc

SEQ ID NO: 67754 - DNA, 20 bp, synthetic construct
  misc_feature 1..20: note = Description of Artificial Sequence: Synthetic oligonucleotide
  misc_feature 1..20: note = Target: SCN10A; (+) strand; PAM type: YTN; PAM sequence: TTA
  source 1..20: mol_type = other DNA
cagctcctcttttttccctt

SEQ ID NO: 67755 - DNA, 20 bp, synthetic construct
  misc_feature 1..20: note = Description of Artificial Sequence: Synthetic oligonucleotide
  misc_feature 1..20: note = Target: SCN10A; (+) strand; PAM type: YTN; PAM sequence: CTC
  source 1..20: mol_type = other DNA
ctcttttttccctttgaaag

SEQ ID NO: 67756 - DNA, 20 bp, synthetic construct
  misc_feature 1..20: note = Description of Artificial Sequence: Synthetic oligonucleotide
  misc_feature 1..20: note = Target: SCN10A; (+) strand; PAM type: YTN; PAM sequence: CTC
  source 1..20: mol_type = other DNA
ttttttccctttgaaagtaa

SEQ ID NO: 67757 - DNA, 20 bp, synthetic construct
  misc_feature 1..20: note = Description of Artificial Sequence: Synthetic oligonucleotide
  misc_feature 1..20: note = Target: SCN10A; (+) strand; PAM type: YTN; PAM sequence: CTT
  source 1..20: mol_type = other DNA
ttttccctttgaaagtaagc

SEQ ID NO: 67758 - DNA, 20 bp, synthetic construct
  misc_feature 1..20: note = Description of Artificial Sequence: Synthetic oligonucleotide
  misc_feature 1..20: note = Target: SCN10A; (+) strand; PAM type: YTN; PAM sequence: TTT
  source 1..20: mol_type = other DNA
tttccctttgaaagtaagca

SEQ ID NO: 67759 - DNA, 20 bp, synthetic construct
  misc_feature 1..20: note = Description of Artificial Sequence: Synthetic oligonucleotide
  misc_feature 1..20: note = Target: SCN10A; (+) strand; PAM type: YTN; PAM sequence: TTT
  source 1..20: mol_type = other DNA
ttccctttgaaagtaagcat

SEQ ID NO: 67760 - DNA, 20 bp, synthetic construct
  misc_feature 1..20: note = Description of Artificial Sequence: Synthetic oligonucleotide
  misc_feature 1..20: note = Target: SCN10A; (+) strand; PAM type: YTN; PAM sequence: TTT
  source 1..20: mol_type = other DNA
tccctttgaaagtaagcatc

SEQ ID NO: 67761 - DNA, 20 bp, synthetic construct
  misc_feature 1..20: note = Description of Artificial Sequence: Synthetic oligonucleotide
  misc_feature 1..20: note = Target: SCN10A; (+) strand; PAM type: YTN; PAM sequence: TTT
  source 1..20: mol_type = other DNA
ccctttgaaagtaagcatca

SEQ ID NO: 67762 - DNA, 20 bp, synthetic construct
  misc_feature 1..20: note = Description of Artificial Sequence: Synthetic oligonucleotide
  misc_feature 1..20: note = Target: SCN10A; (+) strand; PAM type: YTN; PAM sequence: TTC
  source 1..20: mol_type = other DNA
cctttgaaagtaagcatcac

SEQ ID NO: 67763 - DNA, 20 bp, synthetic construct
  misc_feature 1..20: note = Description of Artificial Sequence: Synthetic oligonucleotide
  misc_feature 1..20: note = Target: SCN10A; (+) strand; PAM type: YTN; PAM sequence: CTT
  source 1..20: mol_type = other DNA
tgaaagtaagcatcactgga

SEQ ID NO: 67764 - DNA, 20 bp, synthetic construct
  misc_feature 1..20: note = Description of Artificial Sequence: Synthetic oligonucleotide
  misc_feature 1..20: note = Target: SCN10A; (+) strand; PAM type: YTN; PAM sequence: TTT
  source 1..20: mol_type = other DNA
gaaagtaagcatcactggag

SEQ ID NO: 67765 - DNA, 20 bp, synthetic construct
  misc_feature 1..20: note = Description of Artificial Sequence: Synthetic oligonucleotide
  misc_feature 1..20: note = Target: SCN10A; (+) strand; PAM type: YTN; PAM sequence: TTG
  source 1..20: mol_type = other DNA
aaagtaagcatcactggaga

SEQ ID NO: 67766 - DNA, 20 bp, synthetic construct
  misc_feature 1..20: note = Description of Artificial Sequence: Synthetic oligonucleotide
  misc_feature 1..20: note = Target: SCN10A; (+) strand; PAM type: YTN; PAM sequence: CTG
  source 1..20: mol_type = other DNA
gagagacaagcacacatacc

SEQ ID NO: 67767 - DNA, 20 bp, synthetic construct
  misc_feature 1..20: note = Description of Artificial Sequence: Synthetic oligonucleotide
  misc_feature 1..20: note = Target: SCN10A; (+) strand; PAM type: YTN; PAM sequence: TTA
  source 1..20: mol_type = other DNA
ttggacatccaagtgctaat

SEQ ID NO: 67768 - DNA, 20 bp, synthetic construct
  misc_feature 1..20: note = Description of Artificial Sequence: Synthetic oligonucleotide
  misc_feature 1..20: note = Target: SCN10A; (+) strand; PAM type: YTN; PAM sequence: TTG
  source 1..20: mol_type = other DNA
gacatccaagtgctaatctg

SEQ ID NO: 67769 - DNA, 20 bp, synthetic construct
  misc_feature 1..20: note = Description of Artificial Sequence: Synthetic oligonucleotide
  misc_feature 1..20: note = Target: SCN10A; (+) strand; PAM type: YTN; PAM sequence: CTA
  source 1..20: mol_type = other DNA
atctgtgtggggctgacaga

SEQ ID NO: 67770 - DNA, 20 bp, synthetic construct
  misc_feature 1..20: note = Description of Artificial Sequence: Synthetic oligonucleotide
  misc_feature 1..20: note = Target: SCN10A; (+) strand; PAM type: YTN; PAM sequence: CTG
  source 1..20: mol_type = other DNA
tgtggggctgacagaatggg

SEQ ID NO: 67771 - DNA, 20 bp, synthetic construct
  misc_feature 1..20: note = Description of Artificial Sequence: Synthetic oligonucleotide
  misc_feature 1..20: note = Target: SCN10A; (+) strand; PAM type: YTN; PAM sequence: CTG
  source 1..20: mol_type = other DNA
acagaatgggggaaattaaa

SEQ ID NO: 67772 - DNA, 20 bp, synthetic construct
  misc_feature 1..20: note = Description of Artificial Sequence: Synthetic oligonucleotide
  misc_feature 1..20: note = Target: SCN10A; (+) strand; PAM type: YTN; PAM sequence: TTA
  source 1..20: mol_type = other DNA
aagcccaattcagtgtcatt

SEQ ID NO: 67773 - DNA, 20 bp, synthetic construct
  misc_feature 1..20: note = Description of Artificial Sequence: Synthetic oligonucleotide
  misc_feature 1..20: note = Target: SCN10A; (+) strand; PAM type: YTN; PAM sequence: TTC
  source 1..20: mol_type = other DNA
agtgtcattgacatttccat

SEQ ID NO: 67774 - DNA, 20 bp, synthetic construct
  misc_feature 1..20: note = Description of Artificial Sequence: Synthetic oligonucleotide
  misc_feature 1..20: note = Target: SCN10A; (+) strand; PAM type: YTN; PAM sequence: TTG
  source 1..20: mol_type = other DNA
acatttccatggaagctgtg

SEQ ID NO: 67775 - DNA, 20 bp, synthetic construct
  misc_feature 1..20: note = Description of Artificial Sequence: Synthetic oligonucleotide
  misc_feature 1..20: note = Target: SCN10A; (+) strand; PAM type: YTN; PAM sequence: TTT
  source 1..20: mol_type = other DNA
ccatggaagctgtgattcat

SEQ ID NO: 67776 - DNA, 20 bp, synthetic construct
  misc_feature 1..20: note = Description of Artificial Sequence: Synthetic oligonucleotide
  misc_feature 1..20: note = Target: SCN10A; (+) strand; PAM type: YTN; PAM sequence: TTC
  source 1..20: mol_type = other DNA
catggaagctgtgattcatc

SEQ ID NO: 67777 - DNA, 20 bp, synthetic construct
  misc_feature 1..20: note = Description of Artificial Sequence: Synthetic oligonucleotide
  misc_feature 1..20: note = Target: SCN10A; (+) strand; PAM type: YTN; PAM sequence: CTG
  source 1..20: mol_type = other DNA
tgattcatcctgttctgtga

SEQ ID NO: 67778 - DNA, 20 bp, synthetic construct
  misc_feature 1..20: note = Description of Artificial Sequence: Synthetic oligonucleotide
  misc_feature 1..20: note = Target: SCN10A; (+) strand; PAM type: YTN; PAM sequence: TTC
  source 1..20: mol_type = other DNA
atcctgttctgtgattgtct

SEQ ID NO: 67779 - DNA, 20 bp, synthetic construct
  misc_feature 1..20: note = Description of Artificial Sequence: Synthetic oligonucleotide
  misc_feature 1..20: note = Target: SCN10A; (+) strand; PAM type: YTN; PAM sequence: CTG
  source 1..20: mol_type = other DNA
ttctgtgattgtctgaactg

SEQ ID NO: 67780 - DNA, 20 bp, synthetic construct
  misc_feature 1..20: note = Description of Artificial Sequence: Synthetic oligonucleotide
  misc_feature 1..20: note = Target: SCN10A; (+) strand; PAM type: YTN; PAM sequence: TTC
  source 1..20: mol_type = other DNA
tgtgattgtctgaactgtgc

SEQ ID NO: 67781 - DNA, 20 bp, synthetic construct
  misc_feature 1..20: note = Description of Artificial Sequence: Synthetic oligonucleotide
  misc_feature 1..20: note = Target: SCN10A; (+) strand; PAM type: YTN; PAM sequence: CTG
  source 1..20: mol_type = other DNA
tgattgtctgaactgtgccc

SEQ ID NO: 67782 - DNA, 20 bp, synthetic construct
  misc_feature 1..20: note = Description of Artificial Sequence: Synthetic oligonucleotide
  misc_feature 1..20: note = Target: SCN10A; (+) strand; PAM type: YTN; PAM sequence: TTG
  source 1..20: mol_type = other DNA
tctgaactgtgccccatgta

SEQ ID NO: 67783 - DNA, 20 bp, synthetic construct
  misc_feature 1..20: note = Description of Artificial Sequence: Synthetic oligonucleotide
  misc_feature 1..20: note = Target: SCN10A; (+) strand; PAM type: YTN; PAM sequence: CTG
  source 1..20: mol_type = other DNA
aactgtgccccatgtatgcc

SEQ ID NO: 67784 - DNA, 20 bp, synthetic construct
  misc_feature 1..20: note = Description of Artificial Sequence: Synthetic oligonucleotide
  misc_feature 1..20: note = Target: SCN10A; (+) strand; PAM type: YTN; PAM sequence: CTG
  source 1..20: mol_type = other DNA
tgccccatgtatgccaggtg

SEQ ID NO: 67785 - DNA, 20 bp, synthetic construct
  misc_feature 1..20: note = Description of Artificial Sequence: Synthetic oligonucleotide
  misc_feature 1..20: note = Target: SCN10A; (+) strand; PAM type: YTN; PAM sequence: CTG
  source 1..20: mol_type = other DNA
ctcaaaaggggcaaagcaag

SEQ ID NO: 67786 - DNA, 20 bp, synthetic construct
  misc_feature 1..20: note = Description of Artificial Sequence: Synthetic oligonucleotide
  misc_feature 1..20: note = Target: SCN10A; (+) strand; PAM type: YTN; PAM sequence: CTC
  source 1..20: mol_type = other DNA
aaaaggggcaaagcaagaaa

SEQ ID NO: 67787 - DNA, 20 bp, synthetic construct
  misc_feature 1..20: note = Description of Artificial Sequence: Synthetic oligonucleotide
  misc_feature 1..20: note = Target: SCN10A; (+) strand; PAM type: YTN; PAM sequence: CTG
  source 1..20: mol_type = other DNA
aagtgtggatgtgtcatgag

SEQ ID NO: 67788 - DNA, 20 bp, synthetic construct
  misc_feature 1..20: note = Description of Artificial Sequence: Synthetic oligonucleotide
  misc_feature 1..20: note = Target: SCN10A; (+) strand; PAM type: YTN; PAM sequence: CTG
  source 1..20: mol_type = other DNA
tgtttgtatatgcacacata

SEQ ID NO: 67789 - DNA, 20 bp, synthetic construct
  misc_feature 1..20: note = Description of Artificial Sequence: Synthetic oligonucleotide
  misc_feature 1..20: note = Target: SCN10A; (+) strand; PAM type: YTN; PAM sequence: TTT
  source 1..20: mol_type = other DNA
gtatatgcacacataaatct

SEQ ID NO: 67790 - DNA, 20 bp, synthetic construct
  misc_feature 1..20: note = Description of Artificial Sequence: Synthetic oligonucleotide
  misc_feature 1..20: note = Target: SCN10A; (+) strand; PAM type: YTN; PAM sequence: TTG
  source 1..20: mol_type = other DNA
tatatgcacacataaatctg

SEQ ID NO: 67791 - DNA, 20 bp, synthetic construct
  misc_feature 1..20: note = Description of Artificial Sequence: Synthetic oligonucleotide
  misc_feature 1..20: note = Target: SCN10A; (+) strand; PAM type: YTN; PAM sequence: CTG
  source 1..20: mol_type = other DNA
agggttggagagatggtatt

SEQ ID NO: 67792 - DNA, 20 bp, synthetic construct
  misc_feature 1..20: note = Description of Artificial Sequence: Synthetic oligonucleotide
  misc_feature 1..20: note = Target: SCN10A; (+) strand; PAM type: YTN; PAM sequence: TTG
  source 1..20: mol_type = other DNA
gagagatggtattgcaaaaa

SEQ ID NO: 67793 - DNA, 20 bp, synthetic construct
  misc_feature 1..20: note = Description of Artificial Sequence: Synthetic oligonucleotide
  misc_feature 1..20: note = Target: SCN10A; (+) strand; PAM type: YTN; PAM sequence: TTG
  source 1..20: mol_type = other DNA
caaaaaagtaaaatatcctt

SEQ ID NO: 67794 - DNA, 20 bp, synthetic construct
  misc_feature 1..20: note = Description of Artificial Sequence: Synthetic oligonucleotide
  misc_feature 1..20: note = Target: SCN10A; (+) strand; PAM type: YTN; PAM sequence: CTT
  source 1..20: mol_type = other DNA
cggcttagcacaggaaaaga

SEQ ID NO: 67795 - DNA, 20 bp, synthetic construct
  misc_feature 1..20: note = Description of Artificial Sequence: Synthetic oligonucleotide
  misc_feature 1..20: note = Target: SCN10A; (+) strand; PAM type: YTN; PAM sequence: TTC
  source 1..20: mol_type = other DNA
ggcttagcacaggaaaagag

SEQ ID NO: 67796 - DNA, 20 bp, synthetic construct
  misc_feature 1..20: note = Description of Artificial Sequence: Synthetic oligonucleotide
  misc_feature 1..20: note = Target: SCN10A; (+) strand; PAM type: YTN; PAM sequence: CTT
  source 1..20: mol_type = other DNA
agcacaggaaaagagattga

SEQ ID NO: 67797 - DNA, 20 bp, synthetic construct
  misc_feature 1..20: note = Description of Artificial Sequence: Synthetic oligonucleotide
  misc_feature 1..20: note = Target: SCN10A; (+) strand; PAM type: YTN; PAM sequence: TTA
  source 1..20: mol_type = other DNA
gcacaggaaaagagattgag

SEQ ID NO: 67798 - DNA, 20 bp, synthetic construct
  misc_feature 1..20: note = Description of Artificial Sequence: Synthetic oligonucleotide
  misc_feature 1..20: note = Target: SCN10A; (+) strand; PAM type: YTN; PAM sequence: TTG
  source 1..20: mol_type = other DNA
agagggaagtgagaggtata

SEQ ID NO: 67799 - DNA, 20 bp, synthetic construct
  misc_feature 1..20: note = Description of Artificial Sequence: Synthetic oligonucleotide
  misc_feature 1..20: note = Target: SCN10A; (+) strand; PAM type: YTN; PAM sequence: TTG
  source 1..20: mol_type = other DNA
atccccttttccacactgtt

SEQ ID NO: 67800 - DNA, 20 bp, synthetic construct
  misc_feature 1..20: note = Description of Artificial Sequence: Synthetic oligonucleotide
  misc_feature 1..20: note = Target: SCN10A; (+) strand; PAM type: YTN; PAM sequence: CTT
  source 1..20: mol_type = other DNA
ttccacactgttagtgtgga

SEQ ID NO: 67801 - DNA, 20 bp, synthetic construct
  misc_feature 1..20: note = Description of Artificial Sequence: Synthetic oligonucleotide
  misc_feature 1..20: note = Target: SCN10A; (+) strand; PAM type: YTN; PAM sequence: TTT
  source 1..20: mol_type = other DNA
tccacactgttagtgtggag

SEQ ID NO: 67802 - DNA, 20 bp, synthetic construct
  misc_feature 1..20: note = Description of Artificial Sequence: Synthetic oligonucleotide
  misc_feature 1..20: note = Target: SCN10A; (+) strand; PAM type: YTN; PAM sequence: TTT
  source 1..20: mol_type = other DNA
ccacactgttagtgtggagc

SEQ ID NO: 67803 - DNA, 20 bp, synthetic construct
  misc_feature 1..20: note = Description of Artificial Sequence: Synthetic oligonucleotide
  misc_feature 1..20: note = Target: SCN10A; (+) strand; PAM type: YTN; PAM sequence: TTC
  source 1..20: mol_type = other DNA
cacactgttagtgtggagcc

SEQ ID NO: 67804 - DNA, 20 bp, synthetic construct
  misc_feature 1..20: note = Description of Artificial Sequence: Synthetic oligonucleotide
  misc_feature 1..20: note = Target: SCN10A; (+) strand; PAM type: YTN; PAM sequence: CTG
  source 1..20: mol_type = other DNA
ttagtgtggagccaccctcc

SEQ ID NO: 67805 - DNA, 20 bp, synthetic construct
  misc_feature 1..20: note = Description of Artificial Sequence: Synthetic oligonucleotide
  misc_feature 1..20: note = Target: SCN10A; (+) strand; PAM type: YTN; PAM sequence: TTA
  source 1..20: mol_type = other DNA
gtgtggagccaccctcccac

SEQ ID NO: 67806 - DNA, 20 bp, synthetic construct
  misc_feature 1..20: note = Description of Artificial Sequence: Synthetic oligonucleotide
  misc_feature 1..20: note = Target: SCN10A; (+) strand; PAM type: YTN; PAM sequence: CTC
  source 1..20: mol_type = other DNA
ccacacagcagatattatct

SEQ ID NO: 67807 - DNA, 20 bp, synthetic construct
  misc_feature 1..20: note = Description of Artificial Sequence: Synthetic oligonucleotide
  misc_feature 1..20: note = Target: SCN10A; (+) strand; PAM type: YTN; PAM sequence: TTA
  source 1..20: mol_type = other DNA
tctgtcagacctatagaaag

SEQ ID NO: 67808 - DNA, 20 bp, synthetic construct
  misc_feature 1..20: note = Description of Artificial Sequence: Synthetic oligonucleotide
  misc_feature 1..20: note = Target: SCN10A; (+) strand; PAM type: YTN; PAM sequence: CTG
  source 1..20: mol_type = other DNA
tcagacctatagaaagggca

SEQ ID NO: 67809 - DNA, 20 bp, synthetic construct
  misc_feature 1..20: note = Description of Artificial Sequence: Synthetic oligonucleotide
  misc_feature 1..20: note = Target: SCN10A; (+) strand; PAM type: YTN; PAM sequence: CTA
  source 1..20: mol_type = other DNA
tagaaagggcatatttgggg

SEQ ID NO: 67810 - DNA, 20 bp, synthetic construct
  misc_feature 1..20: note = Description of Artificial Sequence: Synthetic oligonucleotide
  misc_feature 1..20: note = Target: SCN10A; (+) strand; PAM type: YTN; PAM sequence: TTT
  source 1..20: mol_type = other DNA
ggggtaaaaggactttcaag

SEQ ID NO: 67811 - DNA, 20 bp, synthetic construct
  misc_feature 1..20: note = Description of Artificial Sequence: Synthetic oligonucleotide
  misc_feature 1..20: note = Target: SCN10A; (+) strand; PAM type: YTN; PAM sequence: TTG
  source 1..20: mol_type = other DNA
gggtaaaaggactttcaagg

SEQ ID NO: 67812 - DNA, 20 bp, synthetic construct
  misc_feature 1..20: note = Description of Artificial Sequence: Synthetic oligonucleotide
  misc_feature 1..20: note = Target: SCN10A; (+) strand; PAM type: YTN; PAM sequence: CTT
  source 1..20: mol_type = other DNA
tcaaggggcaggaaggtggt

SEQ ID NO: 67813 - DNA, 20 bp, synthetic construct
  misc_feature 1..20: note = Description of Artificial Sequence: Synthetic oligonucleotide
  misc_feature 1..20: note = Target: SCN10A; (+) strand; PAM type: YTN; PAM sequence: TTT
  source 1..20: mol_type = other DNA
caaggggcaggaaggtggtg

SEQ ID NO: 67814 - DNA, 20 bp, synthetic construct
  misc_feature 1..20: note = Description of Artificial Sequence: Synthetic oligonucleotide
  misc_feature 1..20: note = Target: SCN10A; (+) strand; PAM type: YTN; PAM sequence: TTC
  source 1..20: mol_type = other DNA
aaggggcaggaaggtggtgg

SEQ ID NO: 67815 - DNA, 20 bp, synthetic construct
  misc_feature 1..20: note = Description of Artificial Sequence: Synthetic oligonucleotide
  misc_feature 1..20: note = Target: SCN10A; (+) strand; PAM type: YTN; PAM sequence: TTG
  source 1..20: mol_type = other DNA
cagtgcaaattttagagtgg

SEQ ID NO: 67816 - DNA, 20 bp, synthetic construct
  misc_feature 1..20: note = Description of Artificial Sequence: Synthetic oligonucleotide
  misc_feature 1..20: note = Target: SCN10A; (+) strand; PAM type: YTN; PAM sequence: TTT
  source 1..20: mol_type = other DNA
tagagtgggaggcagaaagt

SEQ ID NO: 67817 - DNA, 20 bp, synthetic construct
  misc_feature 1..20: note = Description of Artificial Sequence: Synthetic oligonucleotide
  misc_feature 1..20: note = Target: SCN10A; (+) strand; PAM type: YTN; PAM sequence: TTT
  source 1..20: mol_type = other DNA
agagtgggaggcagaaagtt

SEQ ID NO: 67818 - DNA, 20 bp, synthetic construct
  misc_feature 1..20: note = Description of Artificial Sequence: Synthetic oligonucleotide
  misc_feature 1..20: note = Target: SCN10A; (+) strand; PAM type: YTN; PAM sequence: TTA
  source 1..20: mol_type = other DNA
gagtgggaggcagaaagtta

SEQ ID NO: 67819 - DNA, 20 bp, synthetic construct
  misc_feature 1..20: note = Description of Artificial Sequence: Synthetic oligonucleotide
  misc_feature 1..20: note = Target: SCN10A; (+) strand; PAM type: YTN; PAM sequence: TTA
  source 1..20: mol_type = other DNA
ttatggggggaaaagaattg

SEQ ID NO: 67820 - DNA, 20 bp, synthetic construct
  misc_feature 1..20: note = Description of Artificial Sequence: Synthetic oligonucleotide
  misc_feature 1..20: note = Target: SCN10A; (+) strand; PAM type: YTN; PAM sequence: TTA
  source 1..20: mol_type = other DNA
tggggggaaaagaattgcta

SEQ ID NO: 67821 - DNA, 20 bp, synthetic construct
  misc_feature 1..20: note = Description of Artificial Sequence: Synthetic oligonucleotide
  misc_feature 1..20: note = Target: SCN10A; (+) strand; PAM type: YTN; PAM sequence: TTG
  source 1..20: mol_type = other DNA
ctacagggtctgaggtgagg

SEQ ID NO: 67822 - DNA, 20 bp, synthetic construct
  misc_feature 1..20: note = Description of Artificial Sequence: Synthetic oligonucleotide
  misc_feature 1..20: note = Target: SCN10A; (+) strand; PAM type: YTN; PAM sequence: CTA
  source 1..20: mol_type = other DNA
cagggtctgaggtgaggtgc

SEQ ID NO: 67823 - DNA, 20 bp, synthetic construct
  misc_feature 1..20: note = Description of Artificial Sequence: Synthetic oligonucleotide
  misc_feature 1..20: note = Target: SCN10A; (+) strand; PAM type: YTN; PAM sequence: CTG
  source 1..20: mol_type = other DNA
aggtgaggtgctgaagccat

SEQ ID NO: 67824 - DNA, 20 bp, synthetic construct
  misc_feature 1..20: note = Description of Artificial Sequence: Synthetic oligonucleotide
  misc_feature 1..20: note = Target: SCN10A; (+) strand; PAM type: YTN; PAM sequence: CTG
  source 1..20: mol_type = other DNA
aagccattcccaggctggat

SEQ ID NO: 67825 - DNA, 20 bp, synthetic construct
  misc_feature 1..20: note = Description of Artificial Sequence: Synthetic oligonucleotide
  misc_feature 1..20: note = Target: SCN10A; (+) strand; PAM type: YTN; PAM sequence: TTC
  source 1..20: mol_type = other DNA
ccaggctggattgtgtcaca

SEQ ID NO: 67826 - DNA, 20 bp, synthetic construct
  misc_feature 1..20: note = Description of Artificial Sequence: Synthetic oligonucleotide
  misc_feature 1..20: note = Target: SCN10A; (+) strand; PAM type: YTN; PAM sequence: CTG
  source 1..20: mol_type = other DNA
gattgtgtcacagagatggg

SEQ ID NO: 67827 - DNA, 20 bp, synthetic construct
  misc_feature 1..20: note = Description of Artificial Sequence: Synthetic oligonucleotide
  misc_feature 1..20: note = Target: SCN10A; (+) strand; PAM type: YTN; PAM sequence: TTG
  source 1..20: mol_type = other DNA
tgtcacagagatgggtgctg

SEQ ID NO: 67828 - DNA, 20 bp, synthetic construct
  misc_feature 1..20: note = Description of Artificial Sequence: Synthetic oligonucleotide
  misc_feature 1..20: note = Target: SCN10A; (+) strand; PAM type: YTN; PAM sequence: CTG
  source 1..20: mol_type = other DNA
gaaacttttctgataacaac

SEQ ID NO: 67829 - DNA, 20 bp, synthetic construct
  misc_feature 1..20: note = Description of Artificial Sequence: Synthetic oligonucleotide
  misc_feature 1..20: note = Target: SCN10A; (+) strand; PAM type: YTN; PAM sequence: CTT
  source 1..20: mol_type = other DNA
ttctgataacaacaggtgac

SEQ ID NO: 67830 - DNA, 20 bp, synthetic construct
  misc_feature 1..20: note = Description of Artificial Sequence: Synthetic oligonucleotide
  misc_feature 1..20: note = Target: SCN10A; (+) strand; PAM type: YTN; PAM sequence: TTT
  source 1..20: mol_type = other DNA
tctgataacaacaggtgaca

SEQ ID NO: 67831 - DNA, 20 bp, synthetic construct
  misc_feature 1..20: note = Description of Artificial Sequence: Synthetic oligonucleotide
  misc_feature 1..20: note = Target: SCN10A; (+) strand; PAM type: YTN; PAM sequence: TTT
  source 1..20: mol_type = other DNA
ctgataacaacaggtgacag

SEQ ID NO: 67832 - DNA, 20 bp, synthetic construct
  misc_feature 1..20: note = Description of Artificial Sequence: Synthetic oligonucleotide
  misc_feature 1..20: note = Target: SCN10A; (+) strand; PAM type: YTN; PAM sequence: TTC
  source 1..20: mol_type = other DNA
tgataacaacaggtgacagc

SEQ ID NO: 67833 - DNA, 20 bp, synthetic construct
  misc_feature 1..20: note = Description of Artificial Sequence: Synthetic oligonucleotide
  misc_feature 1..20: note = Target: SCN10A; (+) strand; PAM type: YTN; PAM sequence: CTG
  source 1..20: mol_type = other DNA
ataacaacaggtgacagctt

SEQ ID NO: 67834 - DNA, 20 bp, synthetic construct
  misc_feature 1..20: note = Description of Artificial Sequence: Synthetic oligonucleotide
  misc_feature 1..20: note = Target: SCN10A; (+) strand; PAM type: YTN; PAM sequence: CTT
  source 1..20: mol_type = other DNA
gaattgcaggaccttaggaa

SEQ ID NO: 67835 - DNA, 20 bp, synthetic construct
  misc_feature 1..20: note = Description of Artificial Sequence: Synthetic oligonucleotide
  misc_feature 1..20: note = Target: SCN10A; (+) strand; PAM type: YTN; PAM sequence: TTG
  source 1..20: mol_type = other DNA
aattgcaggaccttaggaag

SEQ ID NO: 67836 - DNA, 20 bp, synthetic construct
  misc_feature 1..20: note = Description of Artificial Sequence: Synthetic oligonucleotide
  misc_feature 1..20: note = Target: SCN10A; (+) strand; PAM type: YTN; PAM sequence: TTG
  source 1..20: mol_type = other DNA
caggaccttaggaaggaggt

SEQ ID NO: 67837 - DNA, 20 bp, synthetic construct
  misc_feature 1..20: note = Description of Artificial Sequence: Synthetic oligonucleotide
  misc_feature 1..20: note = Target: SCN10A; (+) strand; PAM type: YTN; PAM sequence: CTT
  source 1..20: mol_type = other DNA
aggaaggaggtcagaaatta

SEQ ID NO: 67838 - DNA, 20 bp, synthetic construct
  misc_feature 1..20: note = Description of Artificial Sequence: Synthetic oligonucleotide
  misc_feature 1..20: note = Target: SCN10A; (+) strand; PAM type: YTN; PAM sequence: TTA
  source 1..20: mol_type = other DNA
ggaaggaggtcagaaattat

SEQ ID NO: 67839 - DNA, 20 bp, synthetic construct
  misc_feature 1..20: note = Description of Artificial Sequence: Synthetic oligonucleotide
  misc_feature 1..20: note = Target: SCN10A; (+) strand; PAM type: YTN; PAM sequence: TTA
  source 1..20: mol_type = other DNA
tacccaataattatataaaa

SEQ ID NO: 67840 - DNA, 20 bp, synthetic construct
  misc_feature 1..20: note = Description of Artificial Sequence: Synthetic oligonucleotide
  misc_feature 1..20: note = Target: SCN10A; (+) strand; PAM type: YTN; PAM sequence: TTA
  source 1..20: mol_type = other DNA
tataaaattgtgaagtgtca

SEQ ID NO: 67841 - DNA, 20 bp, synthetic construct
  misc_feature 1..20: note = Description of Artificial Sequence: Synthetic oligonucleotide
  misc_feature 1..20: note = Target: SCN10A; (+) strand; PAM type: YTN; PAM sequence: TTG
  source 1..20: mol_type = other DNA
tgaagtgtcaattaaaaaaa

SEQ ID NO: 67842 - DNA, 20 bp, synthetic construct
  misc_feature 1..20: note = Description of Artificial Sequence: Synthetic oligonucleotide
  misc_feature 1..20: note = Target: SCN10A; (+) strand; PAM type: YTN; PAM sequence: TTA
  source 1..20: mol_type = other DNA
aaaaaaactaagtaaaaaaa

SEQ ID NO: 67843 - DNA, 20 bp, synthetic construct
  misc_feature 1..20: note = Description of Artificial Sequence: Synthetic oligonucleotide
  misc_feature 1..20: note = Target: SCN10A; (+) strand; PAM type: YTN; PAM sequence: CTA
  source 1..20: mol_type = other DNA
agtaaaaaaataaaaaccac

SEQ ID NO: 67844 - DNA, 20 bp, synthetic construct
  misc_feature 1..20: note = Description of Artificial Sequence: Synthetic oligonucleotide
  misc_feature 1..20: note = Target: SCN10A; (+) strand; PAM type: YTN; PAM sequence: CTC
  source 1..20: mol_type = other DNA
gacgcatcagaaaaaaaaaa

SEQ ID NO: 67845 - DNA, 20 bp, synthetic construct
  misc_feature 1..20: note = Description of Artificial Sequence: Synthetic oligonucleotide
  misc_feature 1..20: note = Target: SCN10A; (+) strand; PAM type: YTN; PAM sequence: CTC
  source 1..20: mol_type = other DNA
agcaccacggacagggaacc

SEQ ID NO: 67846 - DNA, 20 bp, synthetic construct
  misc_feature 1..20: note = Description of Artificial Sequence: Synthetic oligonucleotide
  misc_feature 1..20: note = Target: SCN10A; (+) strand; PAM type: YTN; PAM sequence: CTT
  source 1..20: mol_type = other DNA
gcactctagaactgcagacc

SEQ ID NO: 67847 - DNA, 20 bp, synthetic construct
  misc_feature 1..20: note = Description of Artificial Sequence: Synthetic oligonucleotide
  misc_feature 1..20: note = Target: SCN10A; (+) strand; PAM type: YTN; PAM sequence: TTG
  source 1..20: mol_type = other DNA
cactctagaactgcagacca

SEQ ID NO: 67848 - DNA, 20 bp, synthetic construct
  misc_feature 1..20: note = Description of Artificial Sequence: Synthetic oligonucleotide
  misc_feature 1..20: note = Target: SCN10A; (+) strand; PAM type: YTN; PAM sequence: CTC
  source 1..20: mol_type = other DNA
tagaactgcagaccagagcc

SEQ ID NO: 67849 - DNA, 20 bp, synthetic construct
  misc_feature 1..20: note = Description of Artificial Sequence: Synthetic oligonucleotide
  misc_feature 1..20: note = Target: SCN10A; (+) strand; PAM type: YTN; PAM sequence: CTA
  source 1..20: mol_type = other DNA
gaactgcagaccagagcctc

SEQ ID NO: 67850 - DNA, 20 bp, synthetic construct
  misc_feature 1..20: note = Description of Artificial Sequence: Synthetic oligonucleotide
  misc_feature 1..20: note = Target: SCN10A; (+) strand; PAM type: YTN; PAM sequence: CTG
  source 1..20: mol_type = other DNA
cagaccagagcctcagaagg

SEQ ID NO: 67851 - DNA, 20 bp, synthetic construct
  misc_feature 1..20: note = Description of Artificial Sequence: Synthetic oligonucleotide
  misc_feature 1..20: note = Target: SCN10A; (+) strand; PAM type: YTN; PAM sequence: CTC
  source 1..20: mol_type = other DNA
agaaggaagctgacctttga

SEQ ID NO: 67852 - DNA, 20 bp, synthetic construct
  misc_feature 1..20: note = Description of Artificial Sequence: Synthetic oligonucleotide
  misc_feature 1..20: note = Target: SCN10A; (+) strand; PAM type: YTN; PAM sequence: CTG
  source 1..20: mol_type = other DNA
acctttgatgtccgcagaca

SEQ ID NO: 67853 - DNA, 20 bp, synthetic construct
  misc_feature 1..20: note = Description of Artificial Sequence: Synthetic oligonucleotide
  misc_feature 1..20: note = Target: SCN10A; (+) strand; PAM type: YTN; PAM sequence: CTT
  source 1..20: mol_type = other DNA
tgatgtccgcagacacctta

SEQ ID NO: 67854 - DNA, 20 bp, synthetic construct
  misc_feature 1..20: note = Description of Artificial Sequence: Synthetic oligonucleotide
  misc_feature 1..20: note = Target: SCN10A; (+) strand; PAM type: YTN; PAM sequence: TTT
  source 1..20: mol_type = other DNA
gatgtccgcagacaccttaa

SEQ ID NO: 67855 - DNA, 20 bp, synthetic construct
  misc_feature 1..20: note = Description of Artificial Sequence: Synthetic oligonucleotide
  misc_feature 1..20: note = Target: SCN10A; (+) strand; PAM type: YTN; PAM sequence: TTG
  source 1..20: mol_type = other DNA
atgtccgcagacaccttaag

SEQ ID NO: 67856 - DNA, 20 bp, synthetic construct
  misc_feature 1..20: note = Description of Artificial Sequence: Synthetic oligonucleotide
  misc_feature 1..20: note = Target: SCN10A; (+) strand; PAM type: YTN; PAM sequence: CTT
  source 1..20: mol_type = other DNA
aagattggcatgttcagtat

SEQ ID NO: 67857 - DNA, 20 bp, synthetic construct
  misc_feature 1..20: note = Description of Artificial Sequence: Synthetic oligonucleotide
  misc_feature 1..20: note = Target: SCN10A; (+) strand; PAM type: YTN; PAM sequence: TTA
  source 1..20: mol_type = other DNA
agattggcatgttcagtatg

SEQ ID NO: 67858 - DNA, 20 bp, synthetic construct
  misc_feature 1..20: note = Description of Artificial Sequence: Synthetic oligonucleotide
  misc_feature 1..20: note = Target: SCN10A; (+) strand; PAM type: YTN; PAM sequence: TTG
  source 1..20: mol_type = other DNA
gcatgttcagtatgggcttc

SEQ ID NO: 67859 - DNA, 20 bp, synthetic construct
  misc_feature 1..20: note = Description of Artificial Sequence: Synthetic oligonucleotide
  misc_feature 1..20: note = Target: SCN10A; (+) strand; PAM type: YTN; PAM sequence: TTC
  source 1..20: mol_type = other DNA
agtatgggcttcccaccttt

SEQ ID NO: 67860 - DNA, 20 bp, synthetic construct
  misc_feature 1..20: note = Description of Artificial Sequence: Synthetic oligonucleotide
  misc_feature 1..20: note = Target: SCN10A; (+) strand; PAM type: YTN; PAM sequence: CTT
  source 1..20: mol_type = other DNA
cccacctttcctacaaaccg

SEQ ID NO: 67861 - DNA, 20 bp, synthetic construct
  misc_feature 1..20: note = Description of Artificial Sequence: Synthetic oligonucleotide
  misc_feature 1..20: note = Target: SCN10A; (+) strand; PAM type: YTN; PAM sequence: TTC
  source 1..20: mol_type = other DNA
ccacctttcctacaaaccgg

SEQ ID NO: 67862 - DNA, 20 bp, synthetic construct
  misc_feature 1..20: note = Description of Artificial Sequence: Synthetic oligonucleotide
  misc_feature 1..20: note = Target: SCN10A; (+) strand; PAM type: YTN; PAM sequence: CTT
  source 1..20: mol_type = other DNA
tcctacaaaccggggttctt

SEQ ID NO: 67863 - DNA, 20 bp, synthetic construct
  misc_feature 1..20: note = Description of Artificial Sequence: Synthetic oligonucleotide
  misc_feature 1..20: note = Target: SCN10A; (+) strand; PAM type: YTN; PAM sequence: TTT
  source 1..20: mol_type = other DNA
cctacaaaccggggttcttc

SEQ ID NO: 67864 - DNA, 20 bp, synthetic construct
  misc_feature 1..20: note = Description of Artificial Sequence: Synthetic oligonucleotide
  misc_feature 1..20: note = Target: SCN10A; (+) strand; PAM type: YTN; PAM sequence: TTC
  source 1..20: mol_type = other DNA
ctacaaaccggggttcttcc

SEQ ID NO: 67865 - DNA, 20 bp, synthetic construct
  misc_feature 1..20: note = Description of Artificial Sequence: Synthetic oligonucleotide
  misc_feature 1..20: note = Target: SCN10A; (+) strand; PAM type: YTN; PAM sequence: CTA
  source 1..20: mol_type = other DNA
caaaccggggttcttcctcc

SEQ ID NO: 67866 - DNA, 20 bp, synthetic construct
  misc_feature 1..20: note = Description of Artificial Sequence: Synthetic oligonucleotide
  misc_feature 1..20: note = Target: SCN10A; (+) strand; PAM type: YTN; PAM sequence: TTC
  source 1..20: mol_type = other DNA
ttcctccagtgtcctcatct

SEQ ID NO: 67867 - DNA, 20 bp, synthetic construct
  misc_feature 1..20: note = Description of Artificial Sequence: Synthetic oligonucleotide
  misc_feature 1..20: note = Target: SCN10A; (+) strand; PAM type: YTN; PAM sequence: CTT
  source 1..20: mol_type = other DNA
cctccagtgtcctcatcttg

SEQ ID NO: 67868 - DNA, 20 bp, synthetic construct
  misc_feature 1..20: note = Description of Artificial Sequence: Synthetic oligonucleotide
  misc_feature 1..20: note = Target: SCN10A; (+) strand; PAM type: YTN; PAM sequence: TTC
  source 1..20: mol_type = other DNA
ctccagtgtcctcatcttgg

SEQ ID NO: 67869 - DNA, 20 bp, synthetic construct
  misc_feature 1..20: note = Description of Artificial Sequence: Synthetic oligonucleotide
  misc_feature 1..20: note = Target: SCN10A; (+) strand; PAM type: YTN; PAM sequence: CTC
  source 1..20: mol_type = other DNA
cagtgtcctcatcttggaat

SEQ ID NO: 67870 - DNA, 20 bp, synthetic construct
  misc_feature 1..20: note = Description of Artificial Sequence: Synthetic oligonucleotide
  misc_feature 1..20: note = Target: SCN10A; (+) strand; PAM type: YTN; PAM sequence: CTC
  source 1..20: mol_type = other DNA
atcttggaatcaccacccat

SEQ ID NO: 67871 - DNA, 20 bp, synthetic construct
  misc_feature 1..20: note = Description of Artificial Sequence: Synthetic oligonucleotide
  misc_feature 1..20: note = Target: SCN10A; (+) strand; PAM type: YTN; PAM sequence: CTT
  source 1..20: mol_type = other DNA
ggaatcaccacccatttgat

SEQ ID NO: 67872 - DNA, 20 bp, synthetic construct
  misc_feature 1..20: note = Description of Artificial Sequence: Synthetic oligonucleotide
  misc_feature 1..20: note = Target: SCN10A; (+) strand; PAM type: YTN; PAM sequence: TTG
  source 1..20: mol_type = other DNA
gaatcaccacccatttgatt

SEQ ID NO: 67873 - DNA, 20 bp, synthetic construct
  misc_feature 1..20: note = Description of Artificial Sequence: Synthetic oligonucleotide
  misc_feature 1..20: note = Target: SCN10A; (+) strand; PAM type: YTN; PAM sequence: TTT
  source 1..20: mol_type = other DNA
gattgcccaatcctgaaacc

SEQ ID NO: 67874 - DNA, 20 bp, synthetic construct
  misc_feature 1..20: note = Description of Artificial Sequence: Synthetic oligonucleotide
  misc_feature 1..20: note = Target: SCN10A; (+) strand; PAM type: YTN; PAM sequence: TTG
  source 1..20: mol_type = other DNA
attgcccaatcctgaaacct

SEQ ID NO: 67875 - DNA, 20 bp, synthetic construct
  misc_feature 1..20: note = Description of Artificial Sequence: Synthetic oligonucleotide
  misc_feature 1..20: note = Target: SCN10A; (+) strand; PAM type: YTN; PAM sequence: TTG
  source 1..20: mol_type = other DNA
cccaatcctgaaacctggga

SEQ ID NO: 67876 - DNA, 20 bp, synthetic construct
  misc_feature 1..20: note = Description of Artificial Sequence: Synthetic oligonucleotide
  misc_feature 1..20: note = Target: SCN10A; (+) strand; PAM type: YTN; PAM sequence: CTG
  source 1..20: mol_type = other DNA
aaacctgggagtcaaattgg

SEQ ID NO: 67877 - DNA, 20 bp, synthetic construct
  misc_feature 1..20: note = Description of Artificial Sequence: Synthetic oligonucleotide
  misc_feature 1..20: note = Target: SCN10A; (+) strand; PAM type: YTN; PAM sequence: CTG
  source 1..20: mol_type = other DNA
ggagtcaaattggactcccc

SEQ ID NO: 67878 - DNA, 20 bp, synthetic construct
  misc_feature 1..20: note = Description of Artificial Sequence: Synthetic oligonucleotide
  misc_feature 1..20: note = Target: SCN10A; (+) strand; PAM type: YTN; PAM sequence: TTG
  source 1..20: mol_type = other DNA
gactcccctttcctttttcc

SEQ ID NO: 67879 - DNA, 20 bp, synthetic construct
  misc_feature 1..20: note = Description of Artificial Sequence: Synthetic oligonucleotide
  misc_feature 1..20: note = Target: SCN10A; (+) strand; PAM type: YTN; PAM sequence: CTC
  source 1..20: mol_type = other DNA
ccctttcctttttccacagt

SEQ ID NO: 67880 - DNA, 20 bp, synthetic construct
  misc_feature 1..20: note = Description of Artificial Sequence: Synthetic oligonucleotide
  misc_feature 1..20: note = Target: SCN10A; (+) strand; PAM type: YTN; PAM sequence: CTT
  source 1..20: mol_type = other DNA
tcctttttccacagtccaca

SEQ ID NO: 67881 - DNA, 20 bp, synthetic construct
  misc_feature 1..20: note = Description of Artificial Sequence: Synthetic oligonucleotide
  misc_feature 1..20: note = Target: SCN10A; (+) strand; PAM type: YTN; PAM sequence: TTT
  source 1..20: mol_type = other DNA
cctttttccacagtccacaa

SEQ ID NO: 67882 - DNA, 20 bp, synthetic construct
  misc_feature 1..20: note = Description of Artificial Sequence: Synthetic oligonucleotide
  misc_feature 1..20: note = Target: SCN10A; (+) strand; PAM type: YTN; PAM sequence: TTC
  source 1..20: mol_type = other DNA
ctttttccacagtccacaat

SEQ ID NO: 67883 - DNA, 20 bp, synthetic construct
  misc_feature 1..20: note = Description of Artificial Sequence: Synthetic oligonucleotide
  misc_feature 1..20: note = Target: SCN10A; (+) strand; PAM type: YTN; PAM sequence: CTT
  source 1..20: mol_type = other DNA
tttccacagtccacaatccc

SEQ ID NO: 67884 - DNA, 20 bp, synthetic construct
  misc_feature 1..20: note = Description of Artificial Sequence: Synthetic oligonucleotide
  misc_feature 1..20: note = Target: SCN10A; (+) strand; PAM type: YTN; PAM sequence: TTT
  source 1..20: mol_type = other DNA
ttccacagtccacaatccca

SEQ ID NO: 67885 - DNA, 20 bp, synthetic construct
  misc_feature 1..20: note = Description of Artificial Sequence: Synthetic oligonucleotide
  misc_feature 1..20: note = Target: SCN10A; (+) strand; PAM type: YTN; PAM sequence: TTT
  source 1..20: mol_type = other DNA
tccacagtccacaatcccaa

SEQ ID NO: 67886 - DNA, 20 bp, synthetic construct
  misc_feature 1..20: note = Description of Artificial Sequence: Synthetic oligonucleotide
  misc_feature 1..20: note = Target: SCN10A; (+) strand; PAM type: YTN; PAM sequence: TTT
  source 1..20: mol_type = other DNA
ccacagtccacaatcccaat

SEQ ID NO: 67887 - DNA, 20 bp, synthetic construct
  misc_feature 1..20: note = Description of Artificial Sequence: Synthetic oligonucleotide
  misc_feature 1..20: note = Target: SCN10A; (+) strand; PAM type: YTN; PAM sequence: TTC
  source 1..20: mol_type = other DNA
cacagtccacaatcccaatc

SEQ ID NO: 67888 - DNA, 20 bp, synthetic construct
  misc_feature 1..20: note = Description of Artificial Sequence: Synthetic oligonucleotide
  misc_feature 1..20: note = Target: SCN10A; (+) strand; PAM type: YTN; PAM sequence: CTT
  source 1..20: mol_type = other DNA
gttgatccacttccctaagg

SEQ ID NO: 67889 - DNA, 20 bp, synthetic construct
  misc_feature 1..20: note = Description of Artificial Sequence: Synthetic oligonucleotide
  misc_feature 1..20: note = Target: SCN10A; (+) strand; PAM type: YTN; PAM sequence: TTG
  source 1..20: mol_type = other DNA
ttgatccacttccctaaggt

SEQ ID NO: 67890 - DNA, 20 bp, synthetic construct
  misc_feature 1..20: note = Description of Artificial Sequence: Synthetic oligonucleotide
  misc_feature 1..20: note = Target: SCN10A; (+) strand; PAM type: YTN; PAM sequence: TTG
  source 1..20: mol_type = other DNA
atccacttccctaaggtgtc

SEQ ID NO: 67891 - DNA, 20 bp, synthetic construct
  misc_feature 1..20: note = Description of Artificial Sequence: Synthetic oligonucleotide
  misc_feature 1..20: note = Target: SCN10A; (+) strand; PAM type: YTN; PAM sequence: CTT
  source 1..20: mol_type = other DNA
ccctaaggtgtccttataat

SEQ ID NO: 67892 - DNA, 20 bp, synthetic construct
  misc_feature 1..20: note = Description of Artificial Sequence: Synthetic oligonucleotide
  misc_feature 1..20: note = Target: SCN10A; (+) strand; PAM type: YTN; PAM sequence: TTC
  source 1..20: mol_type = other DNA
cctaaggtgtccttataatt

SEQ ID NO: 67893 - DNA, 20 bp, synthetic construct
  misc_feature 1..20: note = Description of Artificial Sequence: Synthetic oligonucleotide
  misc_feature 1..20: note = Target: SCN10A; (+) strand; PAM type: YTN; PAM sequence: CTA
  source 1..20: mol_type = other DNA
aggtgtccttataattcacc

SEQ ID NO: 67894 - DNA, 20 bp, synthetic construct
  misc_feature 1..20: note = Description of Artificial Sequence: Synthetic oligonucleotide
  misc_feature 1..20: note = Target: SCN10A; (+) strand; PAM type: YTN; PAM sequence: CTT
  source 1..20: mol_type = other DNA
ataattcaccccttttcccc

SEQ ID NO: 67895 - DNA, 20 bp, synthetic construct
  misc_feature 1..20: note = Description of Artificial Sequence: Synthetic oligonucleotide
  misc_feature 1..20: note = Target: SCN10A; (+) strand; PAM type: YTN; PAM sequence: TTA
  source 1..20: mol_type = other DNA
taattcaccccttttcccca

SEQ ID NO: 67896 - DNA, 20 bp, synthetic construct
  misc_feature 1..20: note = Description of Artificial Sequence: Synthetic oligonucleotide
  misc_feature 1..20: note = Target: SCN10A; (+) strand; PAM type: YTN; PAM sequence: TTC
  source 1..20: mol_type = other DNA
accccttttccccatctata

SEQ ID NO: 67897 - DNA, 20 bp, synthetic construct
  misc_feature 1..20: note = Description of Artificial Sequence: Synthetic oligonucleotide
  misc_feature 1..20: note = Target: SCN10A; (+) strand; PAM type: YTN; PAM sequence: CTT
  source 1..20: mol_type = other DNA
ttccccatctataattacac

SEQ ID NO: 67898 - DNA, 20 bp, synthetic construct
  misc_feature 1..20: note = Description of Artificial Sequence: Synthetic oligonucleotide
  misc_feature 1..20: note = Target: SCN10A; (+) strand; PAM type: YTN; PAM sequence: TTT
  source 1..20: mol_type = other DNA
tccccatctataattacact

SEQ ID NO: 67899 - DNA, 20 bp, synthetic construct
  misc_feature 1..20: note = Description of Artificial Sequence: Synthetic oligonucleotide
  misc_feature 1..20: note = Target: SCN10A; (+) strand; PAM type: YTN; PAM sequence: TTT
  source 1..20: mol_type = other DNA
ccccatctataattacactt

SEQ ID NO: 67900 - DNA, 20 bp, synthetic construct
  misc_feature 1..20: note = Description of Artificial Sequence: Synthetic oligonucleotide
  misc_feature 1..20: note = Target: SCN10A; (+) strand; PAM type: YTN; PAM sequence: TTC
  source 1..20: mol_type = other DNA
cccatctataattacacttt

SEQ ID NO: 67901 - DNA, 20 bp, synthetic construct
  misc_feature 1..20: note = Description of Artificial Sequence: Synthetic oligonucleotide
  misc_feature 1..20: note = Target: SCN10A; (+) strand; PAM type: YTN; PAM sequence: CTA
  source 1..20: mol_type = other DNA
taattacactttcctagttt

SEQ ID NO: 67902 - DNA, 20 bp, synthetic construct
  misc_feature 1..20: note = Description of Artificial Sequence: Synthetic oligonucleotide
  misc_feature 1..20: note = Target: SCN10A; (+) strand; PAM type: YTN; PAM sequence: TTA
  source 1..20: mol_type = other DNA
cactttcctagtttaagaca

SEQ ID NO: 67903 - DNA, 20 bp, synthetic construct
  misc_feature 1..20: note = Description of Artificial Sequence: Synthetic oligonucleotide
  misc_feature 1..20: note = Target: SCN10A; (+) strand; PAM type: YTN; PAM sequence: CTT
  source 1..20: mol_type = other DNA
tcctagtttaagacaccatt

SEQ ID NO: 67904 - DNA, 20 bp, synthetic construct
  misc_feature 1..20: note = Description of Artificial Sequence: Synthetic oligonucleotide
  misc_feature 1..20: note = Target: SCN10A; (+) strand; PAM type: YTN; PAM sequence: TTT
  source 1..20: mol_type = other DNA
cctagtttaagacaccattt

SEQ ID NO: 67905 - DNA, 20 bp, synthetic construct
  misc_feature 1..20: note = Description of Artificial Sequence: Synthetic oligonucleotide
  misc_feature 1..20: note = Target: SCN10A; (+) strand; PAM type: YTN; PAM sequence: TTC
  source 1..20: mol_type = other DNA
ctagtttaagacaccatttt

SEQ ID NO: 67906 - DNA, 20 bp, synthetic construct
  misc_feature 1..20: note = Description of Artificial Sequence: Synthetic oligonucleotide
  misc_feature 1..20: note = Target: SCN10A; (+) strand; PAM type: YTN; PAM sequence: CTA
  source 1..20: mol_type = other DNA
gtttaagacaccattttgga

SEQ ID NO: 67907 - DNA, 20 bp, synthetic construct
  misc_feature 1..20: note = Description of Artificial Sequence: Synthetic oligonucleotide
  misc_feature 1..20: note = Target: SCN10A; (+) strand; PAM type: YTN; PAM sequence: TTT
  source 1..20: mol_type = other DNA
aagacaccattttggagggg

SEQ ID NO: 67908 - DNA, 20 bp, synthetic construct
  misc_feature 1..20: note = Description of Artificial Sequence: Synthetic oligonucleotide
  misc_feature 1..20: note = Target: SCN10A; (+) strand; PAM type: YTN; PAM sequence: TTA
  source 1..20: mol_type = other DNA
agacaccattttggaggggt

SEQ ID NO: 67909 - DNA, 20 bp, synthetic construct
  misc_feature 1..20: note = Description of Artificial Sequence: Synthetic oligonucleotide
  misc_feature 1..20: note = Target: SCN10A; (+) strand; PAM type: YTN; PAM sequence: TTT
  source 1..20: mol_type = other DNA
tggaggggtgtctggatcct

SEQ ID NO: 67910 - DNA, 20 bp, synthetic construct
  misc_feature 1..20: note = Description of Artificial Sequence: Synthetic oligonucleotide
  misc_feature 1..20: note = Target: SCN10A; (+) strand; PAM type: YTN; PAM sequence: TTT
  source 1..20: mol_type = other DNA
ggaggggtgtctggatcctt

SEQ ID NO: 67911 - DNA, 20 bp, synthetic construct
  misc_feature 1..20: note = Description of Artificial Sequence: Synthetic oligonucleotide
  misc_feature 1..20: note = Target: SCN10A; (+) strand; PAM type: YTN; PAM sequence: TTG
  source 1..20: mol_type = other DNA
gaggggtgtctggatccttt

SEQ ID NO: 67912 - DNA, 20 bp, synthetic construct
  misc_feature 1..20: note = Description of Artificial Sequence: Synthetic oligonucleotide
  misc_feature 1..20: note = Target: SCN10A; (+) strand; PAM type: YTN; PAM sequence: CTG
  source 1..20: mol_type = other DNA
gatccttttaggctctatgc

SEQ ID NO: 67913 - DNA, 20 bp, synthetic construct
  misc_feature 1..20: note = Description of Artificial Sequence: Synthetic oligonucleotide
  misc_feature 1..20: note = Target: SCN10A; (+) strand; PAM type: YTN; PAM sequence: CTT
  source 1..20: mol_type = other DNA
ttaggctctatgcctccagc

SEQ ID NO: 67914 - DNA, 20 bp, synthetic construct
  misc_feature 1..20: note = Description of Artificial Sequence: Synthetic oligonucleotide
  misc_feature 1..20: note = Target: SCN10A; (+) strand; PAM type: YTN; PAM sequence: TTT
  source 1..20: mol_type = other DNA
taggctctatgcctccagct

SEQ ID NO: 67915 - DNA, 20 bp, synthetic construct
  misc_feature 1..20: note = Description of Artificial Sequence: Synthetic oligonucleotide
  misc_feature 1..20: note = Target: SCN10A; (+) strand; PAM type: YTN; PAM sequence: TTT
  source 1..20: mol_type = other DNA
aggctctatgcctccagctc

SEQ ID NO: 67916 - DNA, 20 bp, synthetic construct
  misc_feature 1..20: note = Description of Artificial Sequence: Synthetic oligonucleotide
  misc_feature 1..20: note = Target: SCN10A; (+) strand; PAM type: YTN; PAM sequence: TTA
  source 1..20: mol_type = other DNA
ggctctatgcctccagctct

SEQ ID NO: 67917 - DNA, 20 bp, synthetic construct
  misc_feature 1..20: note = Description of Artificial Sequence: Synthetic oligonucleotide
  misc_feature 1..20: note = Target: SCN10A; (+) strand; PAM type: YTN; PAM sequence: CTC
  source 1..20: mol_type = other DNA
tatgcctccagctctttctc

SEQ ID NO: 67918 - DNA, 20 bp, synthetic construct
  misc_feature 1..20: note = Description of Artificial Sequence: Synthetic oligonucleotide
  misc_feature 1..20: note = Target: SCN10A; (+) strand; PAM type: YTN; PAM sequence: CTA
  source 1..20: mol_type = other DNA
tgcctccagctctttctctg

SEQ ID NO: 67919 - DNA, 20 bp, synthetic construct
  misc_feature 1..20: note = Description of Artificial Sequence: Synthetic oligonucleotide
  misc_feature 1..20: note = Target: SCN10A; (+) strand; PAM type: YTN; PAM sequence: CTC
  source 1..20: mol_type = other DNA
cagctctttctctgccacac

SEQ ID NO: 67920 - DNA, 20 bp, synthetic construct
  misc_feature 1..20: note = Description of Artificial Sequence: Synthetic oligonucleotide
  misc_feature 1..20: note = Target: SCN10A; (+) strand; PAM type: YTN; PAM sequence: CTC
  source 1..20: mol_type = other DNA
tttctctgccacacacctct

SEQ ID NO: 67921 - DNA, 20 bp, synthetic construct
  misc_feature 1..20: note = Description of Artificial Sequence: Synthetic oligonucleotide
  misc_feature 1..20: note = Target: SCN10A; (+) strand; PAM type: YTN; PAM sequence: CTT
  source 1..20: mol_type = other DNA
tctctgccacacacctcttc

SEQ ID NO: 67922 - DNA, 20 bp, synthetic construct
  misc_feature 1..20: note = Description of Artificial Sequence: Synthetic oligonucleotide
  misc_feature 1..20: note = Target: SCN10A; (+) strand; PAM type: YTN; PAM sequence: TTT
  source 1..20: mol_type = other DNA
ctctgccacacacctcttcc

SEQ ID NO: 67923 - DNA, 20 bp, synthetic construct
  misc_feature 1..20: note = Description of Artificial Sequence: Synthetic oligonucleotide
  misc_feature 1..20: note = Target: SCN10A; (+) strand; PAM type: YTN; PAM sequence: TTC
  source 1..20: mol_type = other DNA
tctgccacacacctcttccc

SEQ ID NO: 67924 - DNA, 20 bp, synthetic construct
  misc_feature 1..20: note = Description of Artificial Sequence: Synthetic oligonucleotide
  misc_feature 1..20: note = Target: SCN10A; (+) strand; PAM type: YTN; PAM sequence: CTC
  source 1..20: mol_type = other DNA
tgccacacacctcttcccac

SEQ ID NO: 67925 - DNA, 20 bp, synthetic construct
  misc_feature 1..20: note = Description of Artificial Sequence: Synthetic oligonucleotide
  misc_feature 1..20: note = Target: SCN10A; (+) strand; PAM type: YTN; PAM sequence: CTG
  source 1..20: mol_type = other DNA
ccacacacctcttcccactc

SEQ ID NO: 67926 - DNA, 20 bp, synthetic construct
  misc_feature 1..20: note = Description of Artificial Sequence: Synthetic oligonucleotide
  misc_feature 1..20: note = Target: SCN10A; (+) strand; PAM type: YTN; PAM sequence: CTC
  source 1..20: mol_type = other DNA
ttcccactccaactcattgt

SEQ ID NO: 67927 - DNA, 20 bp, synthetic construct
  misc_feature 1..20: note = Description of Artificial Sequence: Synthetic oligonucleotide
  misc_feature 1..20: note = Target: SCN10A; (+) strand; PAM type: YTN; PAM sequence: CTT
  source 1..20: mol_type = other DNA
cccactccaactcattgtct

SEQ ID NO: 67928 - DNA, 20 bp, synthetic construct
  misc_feature 1..20: note = Description of Artificial Sequence: Synthetic oligonucleotide
  misc_feature 1..20: note = Target: SCN10A; (+) strand; PAM type: YTN; PAM sequence: TTC
  source 1..20: mol_type = other DNA
ccactccaactcattgtcta

SEQ ID NO: 67929 - DNA, 20 bp, synthetic construct
  misc_feature 1..20: note = Description of Artificial Sequence: Synthetic oligonucleotide
  misc_feature 1..20: note = Target: SCN10A; (+) strand; PAM type: YTN; PAM sequence: CTC
  source 1..20: mol_type = other DNA
caactcattgtctacggcag

SEQ ID NO: 67930 - DNA, 20 bp, synthetic construct
  misc_feature 1..20: note = Description of Artificial Sequence: Synthetic oligonucleotide
  misc_feature 1..20: note = Target: SCN10A; (+) strand; PAM type: YTN; PAM sequence: CTC
  source 1..20: mol_type = other DNA
attgtctacggcagctgcaa

SEQ ID NO: 67931 - DNA, 20 bp, synthetic construct
  misc_feature 1..20: note = Description of Artificial Sequence: Synthetic oligonucleotide
  misc_feature 1..20: note = Target: SCN10A; (+) strand; PAM type: YTN; PAM sequence: TTG
  source 1..20: mol_type = other DNA
tctacggcagctgcaatggt

SEQ ID NO: 67932 - DNA, 20 bp, synthetic construct
  misc_feature 1..20: note = Description of Artificial Sequence: Synthetic oligonucleotide
  misc_feature 1..20: note = Target: SCN10A; (+) strand; PAM type: YTN; PAM sequence: CTA
  source 1..20: mol_type = other DNA
cggcagctgcaatggtgggt

SEQ ID NO: 67933 - DNA, 20 bp, synthetic construct
  misc_feature 1..20: note = Description of Artificial Sequence: Synthetic oligonucleotide
  misc_feature 1..20: note = Target: SCN10A; (+) strand; PAM type: YTN; PAM sequence: CTG
  source 1..20: mol_type = other DNA
caatggtgggtaatctttag

SEQ ID NO: 67934 - DNA, 20 bp, synthetic construct
  misc_feature 1..20: note = Description of Artificial Sequence: Synthetic oligonucleotide
  misc_feature 1..20: note = Target: SCN10A; (+) strand; PAM type: YTN; PAM sequence: CTT
  source 1..20: mol_type = other DNA
tagagcacaaacctgagcct

SEQ ID NO: 67935 - DNA, 20 bp, synthetic construct
  misc_feature 1..20: note = Description of Artificial Sequence: Synthetic oligonucleotide
  misc_feature 1..20: note = Target: SCN10A; (+) strand; PAM type: YTN; PAM sequence: TTT
  source 1..20: mol_type = other DNA
agagcacaaacctgagcctc

SEQ ID NO: 67936 - DNA, 20 bp, synthetic construct
  misc_feature 1..20: note = Description of Artificial Sequence: Synthetic oligonucleotide
  misc_feature 1..20: note = Target: SCN10A; (+) strand; PAM type: YTN; PAM sequence: TTA
  source 1..20: mol_type = other DNA
gagcacaaacctgagcctct

SEQ ID NO: 67937 - DNA, 20 bp, synthetic construct
  misc_feature 1..20: note = Description of Artificial Sequence: Synthetic oligonucleotide
  misc_feature 1..20: note = Target: SCN10A; (+) strand; PAM type: YTN; PAM sequence: CTG
  source 1..20: mol_type = other DNA
agcctcttaccatcctgcgc

SEQ ID NO: 67938 - DNA, 20 bp, synthetic construct
  misc_feature 1..20: note = Description of Artificial Sequence: Synthetic oligonucleotide
  misc_feature 1..20: note = Target: SCN10A; (+) strand; PAM type: YTN; PAM sequence: CTC
  source 1..20: mol_type = other DNA
ttaccatcctgcgctggttg

SEQ ID NO: 67939 - DNA, 20 bp, synthetic construct
  misc_feature 1..20: note = Description of Artificial Sequence: Synthetic oligonucleotide
  misc_feature 1..20: note = Target: SCN10A; (+) strand; PAM type: YTN; PAM sequence: CTT
  source 1..20: mol_type = other DNA
accatcctgcgctggttgta

SEQ ID NO: 67940 - DNA, 20 bp, synthetic construct
  misc_feature 1..20: note = Description of Artificial Sequence: Synthetic oligonucleotide
  misc_feature 1..20: note = Target: SCN10A; (+) strand; PAM type: YTN; PAM sequence: TTA
  source 1..20: mol_type = other DNA
ccatcctgcgctggttgtaa

SEQ ID NO: 67941 - DNA, 20 bp, synthetic construct
  misc_feature 1..20: note = Description of Artificial Sequence: Synthetic oligonucleotide
  misc_feature 1..20: note = Target: SCN10A; (+) strand; PAM type: YTN; PAM sequence: CTG
  source 1..20: mol_type = other DNA
cgctggttgtaaggatcaga

SEQ ID NO: 67942 - DNA, 20 bp, synthetic construct
  misc_feature 1..20: note = Description of Artificial Sequence: Synthetic oligonucleotide
  misc_feature 1..20: note = Target: SCN10A; (+) strand; PAM type: YTN; PAM sequence: CTG
  source 1..20: mol_type = other DNA
gttgtaaggatcagagcggg

SEQ ID NO: 67943 - DNA, 20 bp, synthetic construct
  misc_feature 1..20: note = Description of Artificial Sequence: Synthetic oligonucleotide
  misc_feature 1..20: note = Target: SCN10A; (+) strand; PAM type: YTN; PAM sequence: TTG
  source 1..20: mol_type = other DNA
taaggatcagagcggggtga

SEQ ID NO: 67944 - DNA, 20 bp, synthetic construct
  misc_feature 1..20: note = Description of Artificial Sequence: Synthetic oligonucleotide
  misc_feature 1..20: note = Target: SCN10A; (+) strand; PAM type: YTN; PAM sequence: TTT
  source 1..20: mol_type = other DNA
gttgtcttctgtggagccct

SEQ ID NO: 67945 - DNA, 20 bp, synthetic construct
  misc_feature 1..20: note = Description of Artificial Sequence: Synthetic oligonucleotide
  misc_feature 1..20: note = Target: SCN10A; (+) strand; PAM type: YTN; PAM sequence: TTG
  source 1..20: mol_type = other DNA
ttgtcttctgtggagccctc

SEQ ID NO: 67946 - DNA, 20 bp, synthetic construct
  misc_feature 1..20: note = Description of Artificial Sequence: Synthetic oligonucleotide
  misc_feature 1..20: note = Target: SCN10A; (+) strand; PAM type: YTN; PAM sequence: TTG
  source 1..20: mol_type = other DNA
tcttctgtggagccctctga

SEQ ID NO: 67947 - DNA, 20 bp, synthetic construct
  misc_feature 1..20: note = Description of Artificial Sequence: Synthetic oligonucleotide
  misc_feature 1..20: note = Target: SCN10A; (+) strand; PAM type: YTN; PAM sequence: CTT
  source 1..20: mol_type = other DNA
ctgtggagccctctgacact

SEQ ID NO: 67948 - DNA, 20 bp, synthetic construct
  misc_feature 1..20: note = Description of Artificial Sequence: Synthetic oligonucleotide
  misc_feature 1..20: note = Target: SCN10A; (+) strand; PAM type: YTN; PAM sequence: TTC
  source 1..20: mol_type = other DNA
tgtggagccctctgacactc

SEQ ID NO: 67949 - DNA, 20 bp, synthetic construct
  misc_feature 1..20: note = Description of Artificial Sequence: Synthetic oligonucleotide
  misc_feature 1..20: note = Target: SCN10A; (+) strand; PAM type: YTN; PAM sequence: CTG
  source 1..20: mol_type = other DNA
tggagccctctgacactctt

SEQ ID NO: 67950 - DNA, 20 bp, synthetic construct
  misc_feature 1..20: note = Description of Artificial Sequence: Synthetic oligonucleotide
  misc_feature 1..20: note = Target: SCN10A; (+) strand; PAM type: YTN; PAM sequence: CTC
  source 1..20: mol_type = other DNA
tgacactcttggctttattc

SEQ ID NO: 67951 - DNA, 20 bp, synthetic construct
  misc_feature 1..20: note = Description of Artificial Sequence: Synthetic oligonucleotide
  misc_feature 1..20: note = Target: SCN10A; (+) strand; PAM type: YTN; PAM sequence: CTG
  source 1..20: mol_type = other DNA
acactcttggctttattcta

SEQ ID NO: 67952 - DNA, 20 bp, synthetic construct
  misc_feature 1..20: note = Description of Artificial Sequence: Synthetic oligonucleotide
  misc_feature 1..20: note = Target: SCN10A; (+) strand; PAM type: YTN; PAM sequence: CTC
  source 1..20: mol_type = other DNA
ttggctttattctatgcctt

SEQ ID NO: 67953 - DNA, 20 bp, synthetic construct
  misc_feature 1..20: note = Description of Artificial Sequence: Synthetic oligonucleotide
  misc_feature 1..20: note = Target: SCN10A; (+) strand; PAM type: YTN; PAM sequence: CTT
  source 1..20: mol_type = other DNA
ggctttattctatgccttct

SEQ ID NO: 67954 - DNA, 20 bp, synthetic construct
  misc_feature 1..20: note = Description of Artificial Sequence: Synthetic oligonucleotide
  misc_feature 1..20: note = Target: SCN10A; (+) strand; PAM type: YTN; PAM sequence: TTG
  source 1..20: mol_type = other DNA
gctttattctatgccttctc

SEQ ID NO: 67955 - DNA, 20 bp, synthetic construct
  misc_feature 1..20: note = Description of Artificial Sequence: Synthetic oligonucleotide
  misc_feature 1..20: note = Target: SCN10A; (+) strand; PAM type: YTN; PAM sequence: CTT
  source 1..20: mol_type = other DNA
tattctatgccttctctcac

SEQ ID NO: 67956 - DNA, 20 bp, synthetic construct
  misc_feature 1..20: note = Description of Artificial Sequence: Synthetic oligonucleotide
  misc_feature 1..20: note = Target: SCN10A; (+) strand; PAM type: YTN; PAM sequence: TTT
  source 1..20: mol_type = other DNA
attctatgccttctctcact

SEQ ID NO: 67957 - DNA, 20 bp, synthetic construct
  misc_feature 1..20: note = Description of Artificial Sequence: Synthetic oligonucleotide
  misc_feature 1..20: note = Target: SCN10A; (+) strand; PAM type: YTN; PAM sequence: TTA
  source 1..20: mol_type = other DNA
ttctatgccttctctcactg

SEQ ID NO: 67958 - DNA, 20 bp, synthetic construct
  misc_feature 1..20: note = Description of Artificial Sequence: Synthetic oligonucleotide
  misc_feature 1..20: note = Target: SCN10A; (+) strand; PAM type: YTN; PAM sequence: TTC
  source 1..20: mol_type = other DNA
tatgccttctctcactggca

SEQ ID NO: 67959 - DNA, 20 bp, synthetic construct
  misc_feature 1..20: note = Description of Artificial Sequence: Synthetic oligonucleotide
  misc_feature 1..20: note = Target: SCN10A; (+) strand; PAM type: YTN; PAM sequence: CTA
  source 1..20: mol_type = other DNA
tgccttctctcactggcatt

SEQ ID NO: 67960 - DNA, 20 bp, synthetic construct
  misc_feature 1..20: note = Description of Artificial Sequence: Synthetic oligonucleotide
  misc_feature 1..20: note = Target: SCN10A; (+) strand; PAM type: YTN; PAM sequence: CTT
  source 1..20: mol_type = other DNA
ctctcactggcatttttgga

SEQ ID NO: 67961 - DNA, 20 bp, synthetic construct
  misc_feature 1..20: note = Description of Artificial Sequence: Synthetic oligonucleotide
  misc_feature 1..20: note = Target: SCN10A; (+) strand; PAM type: YTN; PAM sequence: TTC
  source 1..20: mol_type = other DNA
tctcactggcatttttggag

SEQ ID NO: 67962 - DNA, 20 bp, synthetic construct
  misc_feature 1..20: note = Description of Artificial Sequence: Synthetic oligonucleotide
  misc_feature 1..20: note = Target: SCN10A; (+) strand; PAM type: YTN; PAM sequence: CTC
  source 1..20: mol_type = other DNA
tcactggcatttttggaggt

SEQ ID NO: 67963 - DNA, 20 bp, synthetic construct
  misc_feature 1..20: note = Description of Artificial Sequence: Synthetic oligonucleotide
  misc_feature 1..20: note = Target: SCN10A; (+) strand; PAM type: YTN; PAM sequence: CTC
  source 1..20: mol_type = other DNA
actggcatttttggaggtta

SEQ ID NO: 67964 - DNA, 20 bp, synthetic construct
  misc_feature 1..20: note = Description of Artificial Sequence: Synthetic oligonucleotide
  misc_feature 1..20: note = Target: SCN10A; (+) strand; PAM type: YTN; PAM sequence: CTG
  source 1..20: mol_type = other DNA
gcatttttggaggttaaagg

SEQ ID NO: 67965 - DNA, 20 bp, synthetic construct
  misc_feature 1..20: note = Description of Artificial Sequence: Synthetic oligonucleotide
  misc_feature 1..20: note = Target: SCN10A; (+) strand; PAM type: YTN; PAM sequence: TTT
  source 1..20: mol_type = other DNA
ttggaggttaaaggtgatcc

SEQ ID NO: 67966 - DNA, 20 bp, synthetic construct
  misc_feature 1..20: note = Description of Artificial Sequence: Synthetic oligonucleotide
  misc_feature 1..20: note = Target: SCN10A; (+) strand; PAM type: YTN; PAM sequence: TTT
  source 1..20: mol_type = other DNA
tggaggttaaaggtgatcca

SEQ ID NO: 67967 - DNA, 20 bp, synthetic construct
  misc_feature 1..20: note = Description of Artificial Sequence: Synthetic oligonucleotide
  misc_feature 1..20: note = Target: SCN10A; (+) strand; PAM type: YTN; PAM sequence: TTT
  source 1..20: mol_type = other DNA
ggaggttaaaggtgatccat

SEQ ID NO: 67968 - DNA, 20 bp, synthetic construct
  misc_feature 1..20: note = Description of Artificial Sequence: Synthetic oligonucleotide
  misc_feature 1..20: note = Target: SCN10A; (+) strand; PAM type: YTN; PAM sequence: TTG
  source 1..20: mol_type = other DNA
gaggttaaaggtgatccatt

SEQ ID NO: 67969 - DNA, 20 bp, synthetic construct
  misc_feature 1..20: note = Description of Artificial Sequence: Synthetic oligonucleotide
  misc_feature 1..20: note = Target: SCN10A; (+) strand; PAM type: YTN; PAM sequence: TTA
  source 1..20: mol_type = other DNA
aaggtgatccattgtgggag

SEQ ID NO: 67970 - DNA, 20 bp, synthetic construct
  misc_feature 1..20: note = Description of Artificial Sequence: Synthetic oligonucleotide
  misc_feature 1..20: note = Target: SCN10A; (+) strand; PAM type: YTN; PAM sequence: TTG
  source 1..20: mol_type = other DNA
tgggagtggagagaggttgt

SEQ ID NO: 67971 - DNA, 20 bp, synthetic construct
  misc_feature 1..20: note = Description of Artificial Sequence: Synthetic oligonucleotide
  misc_feature 1..20: note = Target: SCN10A; (+) strand; PAM type: YTN; PAM sequence: TTG
  source 1..20: mol_type = other DNA
tgtcaatccctagtgctgct

SEQ ID NO: 67972 - DNA, 20 bp, synthetic construct
  misc_feature 1..20: note = Description of Artificial Sequence: Synthetic oligonucleotide
  misc_feature 1..20: note = Target: SCN10A; (+) strand; PAM type: YTN; PAM sequence: CTA
  source 1..20: mol_type = other DNA
gtgctgctagcacctgcgaa

SEQ ID NO: 67973 - DNA, 20 bp, synthetic construct
  misc_feature 1..20: note = Description of Artificial Sequence: Synthetic oligonucleotide
  misc_feature 1..20: note = Target: SCN10A; (+) strand; PAM type: YTN; PAM sequence: CTG
  source 1..20: mol_type = other DNA
ctagcacctgcgaagagaga

SEQ ID NO: 67974 - DNA, 20 bp, synthetic construct
  misc_feature 1..20: note = Description of Artificial Sequence: Synthetic oligonucleotide
  misc_feature 1..20: note = Target: SCN10A; (+) strand; PAM type: YTN; PAM sequence: CTA
  source 1..20: mol_type = other DNA
gcacctgcgaagagagaaca

SEQ ID NO: 67975 - DNA, 20 bp, synthetic construct
  misc_feature 1..20: note = Description of Artificial Sequence: Synthetic oligonucleotide
  misc_feature 1..20: note = Target: SCN10A; (+) strand; PAM type: YTN; PAM sequence: CTG
  source 1..20: mol_type = other DNA
cgaagagagaacagcaggtg

SEQ ID NO: 67976 - DNA, 20 bp, synthetic construct
  misc_feature 1..20: note = Description of Artificial Sequence: Synthetic oligonucleotide
  misc_feature 1..20: note = Target: SCN10A; (+) strand; PAM type: YTN; PAM sequence: TTT
  source 1..20: mol_type = other DNA
gcttggacttagcatgaatg

SEQ ID NO: 67977 - DNA, 20 bp, synthetic construct
  misc_feature 1..20: note = Description of Artificial Sequence: Synthetic oligonucleotide
  misc_feature 1..20: note = Target: SCN10A; (+) strand; PAM type: YTN; PAM sequence: TTG
  source 1..20: mol_type = other DNA
cttggacttagcatgaatgt

SEQ ID NO: 67978 - DNA, 20 bp, synthetic construct
  misc_feature 1..20: note = Description of Artificial Sequence: Synthetic oligonucleotide
  misc_feature 1..20: note = Target: SCN10A; (+) strand; PAM type: YTN; PAM sequence: CTT
  source 1..20: mol_type = other DNA
ggacttagcatgaatgtgtc

SEQ ID NO: 67979 - DNA, 20 bp, synthetic construct
  misc_feature 1..20: note = Description of Artificial Sequence: Synthetic oligonucleotide
  misc_feature 1..20: note = Target: SCN10A; (+) strand; PAM type: YTN; PAM sequence: TTG
  source 1..20: mol_type = other DNA
gacttagcatgaatgtgtcc

SEQ ID NO: 67980 - DNA, 20 bp, synthetic construct
  misc_feature 1..20: note = Description of Artificial Sequence: Synthetic oligonucleotide
  misc_feature 1..20: note = Target: SCN10A; (+) strand; PAM type: YTN; PAM sequence: CTT
  source 1..20: mol_type = other DNA
agcatgaatgtgtcccccag

SEQ ID NO: 67981 - DNA, 20 bp, synthetic construct
  misc_feature 1..20: note = Description of Artificial Sequence: Synthetic oligonucleotide
  misc_feature 1..20: note = Target: SCN10A; (+) strand; PAM type: YTN; PAM sequence: TTA
  source 1..20: mol_type = other DNA
gcatgaatgtgtcccccaga

SEQ ID NO: 67982 - DNA, 20 bp, synthetic construct
  misc_feature 1..20: note = Description of Artificial Sequence: Synthetic oligonucleotide
  misc_feature 1..20: note = Target: SCN10A; (+) strand; PAM type: YTN; PAM sequence: CTG
  source 1..20: mol_type = other DNA
aaacagagaagctgaagggt

SEQ ID NO: 67983 - DNA, 20 bp, synthetic construct
  misc_feature 1..20: note = Description of Artificial Sequence: Synthetic oligonucleotide
  misc_feature 1..20: note = Target: SCN10A; (+) strand; PAM type: YTN; PAM sequence: CTG
  source 1..20: mol_type = other DNA
aagggttaggaccagggtgg

SEQ ID NO: 67984 - DNA, 20 bp, synthetic construct
  misc_feature 1..20: note = Description of Artificial Sequence: Synthetic oligonucleotide
  misc_feature 1..20: note = Target: SCN10A; (+) strand; PAM type: YTN; PAM sequence: TTA
  source 1..20: mol_type = other DNA
ggaccagggtggtggtggga

SEQ ID NO: 67985 - DNA, 20 bp, synthetic construct
  misc_feature 1..20: note = Description of Artificial Sequence: Synthetic oligonucleotide
  misc_feature 1..20: note = Target: SCN10A; (+) strand; PAM type: YTN; PAM sequence: TTA
  source 1..20: mol_type = other DNA
ggccatggcaggaacagaca

SEQ ID NO: 67986 - DNA, 20 bp, synthetic construct
  misc_feature 1..20: note = Description of Artificial Sequence: Synthetic oligonucleotide
  misc_feature 1..20: note = Target: SCN10A; (+) strand; PAM type: YTN; PAM sequence: CTC
  source 1..20: mol_type = other DNA
gggtcacccccactcattca

SEQ ID NO: 67987 - DNA, 20 bp, synthetic construct
  misc_feature 1..20: note = Description of Artificial Sequence: Synthetic oligonucleotide
  misc_feature 1..20: note = Target: SCN10A; (+) strand; PAM type: YTN; PAM sequence: CTC
  source 1..20: mol_type = other DNA
attcatggggtactctgttg

SEQ ID NO: 67988 - DNA, 20 bp, synthetic construct
  misc_feature 1..20: note = Description of Artificial Sequence: Synthetic oligonucleotide
  misc_feature 1..20: note = Target: SCN10A; (+) strand; PAM type: YTN; PAM sequence: TTC
  source 1..20: mol_type = other DNA
atggggtactctgttggtgc

SEQ ID NO: 67989 - DNA, 20 bp, synthetic construct
  misc_feature 1..20: note = Description of Artificial Sequence: Synthetic oligonucleotide
  misc_feature 1..20: note = Target: SCN10A; (+) strand; PAM type: YTN; PAM sequence: CTC
  source 1..20: mol_type = other DNA
tgttggtgccccacccagat

SEQ ID NO: 67990 - DNA, 20 bp, synthetic construct
  misc_feature 1..20: note = Description of Artificial Sequence: Synthetic oligonucleotide
  misc_feature 1..20: note = Target: SCN10A; (+) strand; PAM type: YTN; PAM sequence: CTG
  source 1..20: mol_type = other DNA
ttggtgccccacccagatcc

SEQ ID NO: 67991 - DNA, 20 bp, synthetic construct
  misc_feature 1..20: note = Description of Artificial Sequence: Synthetic oligonucleotide
  misc_feature 1..20: note = Target: SCN10A; (+) strand; PAM type: YTN; PAM sequence: TTG
  source 1..20: mol_type = other DNA
gtgccccacccagatccctt

SEQ ID NO: 67992 - DNA, 20 bp, synthetic construct
  misc_feature 1..20: note = Description of Artificial Sequence: Synthetic oligonucleotide
  misc_feature 1..20: note = Target: SCN10A; (+) strand; PAM type: YTN; PAM sequence: CTT
  source 1..20: mol_type = other DNA
tcaccaggtcagcacagcta

SEQ ID NO: 67993 - DNA, 20 bp, synthetic construct
  misc_feature 1..20: note = Description of Artificial Sequence: Synthetic oligonucleotide
  misc_feature 1..20: note = Target: SCN10A; (+) strand; PAM type: YTN; PAM sequence: TTT
  source 1..20: mol_type = other DNA
caccaggtcagcacagctat

SEQ ID NO: 67994 - DNA, 20 bp, synthetic construct
  misc_feature 1..20: note = Description of Artificial Sequence: Synthetic oligonucleotide
  misc_feature 1..20: note = Target: SCN10A; (+) strand; PAM type: YTN; PAM sequence: TTC
  source 1..20: mol_type = other DNA
accaggtcagcacagctatc

SEQ ID NO: 67995 - DNA, 20 bp, synthetic construct
  misc_feature 1..20: note = Description of Artificial Sequence: Synthetic oligonucleotide
  misc_feature 1..20: note = Target: SCN10A; (+) strand; PAM type: YTN; PAM sequence: CTA
  source 1..20: mol_type = other DNA
tcccgagctgcttgcatggc

SEQ ID NO: 67996 - DNA, 20 bp, synthetic construct
  misc_feature 1..20: note = Description of Artificial Sequence: Synthetic oligonucleotide
  misc_feature 1..20: note = Target: SCN10A; (+) strand; PAM type: YTN; PAM sequence: CTG
  source 1..20: mol_type = other DNA
cttgcatggcagcagctgat

SEQ ID NO: 67997 - DNA, 20 bp, synthetic construct
  misc_feature 1..20: note = Description of Artificial Sequence: Synthetic oligonucleotide
  misc_feature 1..20: note = Target: SCN10A; (+) strand; PAM type: YTN; PAM sequence: CTT
  source 1..20: mol_type = other DNA
gcatggcagcagctgatggc

SEQ ID NO: 67998 - DNA, 20 bp, synthetic construct
  misc_feature 1..20: note = Description of Artificial Sequence: Synthetic oligonucleotide
  misc_feature 1..20: note = Target: SCN10A; (+) strand; PAM type: YTN; PAM sequence: TTG
  source 1..20: mol_type = other DNA
catggcagcagctgatggct

SEQ ID NO: 67999 - DNA, 20 bp, synthetic construct
  misc_feature 1..20: note = Description of Artificial Sequence: Synthetic oligonucleotide
  misc_feature 1..20: note = Target: SCN10A; (+) strand; PAM type: YTN; PAM sequence: CTG
  source 1..20: mol_type = other DNA
atggctcatacttgcagcat

SEQ ID NO: 68000 - DNA, 20 bp, synthetic construct
  misc_feature 1..20: note = Description of Artificial Sequence: Synthetic oligonucleotide
  misc_feature 1..20: note = Target: SCN10A; (+) strand; PAM type: YTN; PAM sequence: CTC
  source 1..20: mol_type = other DNA
atacttgcagcattctacaa

SEQ ID NO: 68001 - DNA, 20 bp, synthetic construct
  misc_feature 1..20: note = Description of Artificial Sequence: Synthetic oligonucleotide
  misc_feature 1..20: note = Target: SCN10A; (+) strand; PAM type: YTN; PAM sequence: CTT
  source 1..20: mol_type = other DNA
gcagcattctacaaaaaaag

SEQ ID NO: 68002 - DNA, 20 bp, synthetic construct
  misc_feature 1..20: note = Description of Artificial Sequence: Synthetic oligonucleotide
  misc_feature 1..20: note = Target: SCN10A; (+) strand; PAM type: YTN; PAM sequence: TTG
  source 1..20: mol_type = other DNA
cagcattctacaaaaaaagt

SEQ ID NO: 68003 - DNA, 20 bp, synthetic construct
  misc_feature 1..20: note = Description of Artificial Sequence: Synthetic oligonucleotide
  misc_feature 1..20: note = Target: SCN10A; (+) strand; PAM type: YTN; PAM sequence: TTC
  source 1..20: mol_type = other DNA
tacaaaaaaagtctcttttg

SEQ ID NO: 68004 - DNA, 20 bp, synthetic construct
  misc_feature 1..20: note = Description of Artificial Sequence: Synthetic oligonucleotide
  misc_feature 1..20: note = Target: SCN10A; (+) strand; PAM type: YTN; PAM sequence: CTA
  source 1..20: mol_type = other DNA
caaaaaaagtctcttttggc

SEQ ID NO: 68005 - DNA, 20 bp, synthetic construct
  misc_feature 1..20: note = Description of Artificial Sequence: Synthetic oligonucleotide
  misc_feature 1..20: note = Target: SCN10A; (+) strand; PAM type: YTN; PAM sequence: CTC
  source 1..20: mol_type = other DNA
ttttggctgcctgcttctgg

SEQ ID NO: 68006 - DNA, 20 bp, synthetic construct
  misc_feature 1..20: note = Description of Artificial Sequence: Synthetic oligonucleotide
  misc_feature 1..20: note = Target: SCN10A; (+) strand; PAM type: YTN; PAM sequence: CTT
  source 1..20: mol_type = other DNA
ttggctgcctgcttctggga

SEQ ID NO: 68007 - DNA, 20 bp, synthetic construct
  misc_feature 1..20: note = Description of Artificial Sequence: Synthetic oligonucleotide
  misc_feature 1..20: note = Target: SCN10A; (+) strand; PAM type: YTN; PAM sequence: TTT
  source 1..20: mol_type = other DNA
tggctgcctgcttctgggat

SEQ ID NO: 68008 - DNA, 20 bp, synthetic construct
  misc_feature 1..20: note = Description of Artificial Sequence: Synthetic oligonucleotide
  misc_feature 1..20: note = Target: SCN10A; (+) strand; PAM type: YTN; PAM sequence: TTT
  source 1..20: mol_type = other DNA
ggctgcctgcttctgggata

SEQ ID NO: 68009 - DNA, 20 bp, synthetic construct
  misc_feature 1..20: note = Description of Artificial Sequence: Synthetic oligonucleotide
  misc_feature 1..20: note = Target: SCN10A; (+) strand; PAM type: YTN; PAM sequence: TTG
  source 1..20: mol_type = other DNA
gctgcctgcttctgggatag

SEQ ID NO: 68010 - DNA, 20 bp, synthetic construct
  misc_feature 1..20: note = Description of Artificial Sequence: Synthetic oligonucleotide
  misc_feature 1..20: note = Target: SCN10A; (+) strand; PAM type: YTN; PAM sequence: CTG
  source 1..20: mol_type = other DNA
cctgcttctgggataggtat

SEQ ID NO: 68011 - DNA, 20 bp, synthetic construct
  misc_feature 1..20: note = Description of Artificial Sequence: Synthetic oligonucleotide
  misc_feature 1..20: note = Target: SCN10A; (+) strand; PAM type: YTN; PAM sequence: CTG
  source 1..20: mol_type = other DNA
cttctgggataggtatgggg

SEQ ID NO: 68012 - DNA, 20 bp, synthetic construct
  misc_feature 1..20: note = Description of Artificial Sequence: Synthetic oligonucleotide
  misc_feature 1..20: note = Target: SCN10A; (+) strand; PAM type: YTN; PAM sequence: CTT
  source 1..20: mol_type = other DNA
ctgggataggtatggggagg

SEQ ID NO: 68013 - DNA, 20 bp, synthetic construct
  misc_feature 1..20: note = Description of Artificial Sequence: Synthetic oligonucleotide
  misc_feature 1..20: note = Target: SCN10A; (+) strand; PAM type: YTN; PAM sequence: TTC
  source 1..20: mol_type = other DNA
tgggataggtatggggaggg

SEQ ID NO: 68014 - DNA, 20 bp, synthetic construct
  misc_feature 1..20: note = Description of Artificial Sequence: Synthetic oligonucleotide
  misc_feature 1..20: note = Target: SCN10A; (+) strand; PAM type: YTN; PAM sequence: CTG
  source 1..20: mol_type = other DNA
ggataggtatggggagggta

SEQ ID NO: 68015 - DNA, 20 bp, synthetic construct
  misc_feature 1..20: note = Description of Artificial Sequence: Synthetic oligonucleotide
  misc_feature 1..20: note = Target: SCN10A; (+) strand; PAM type: YTN; PAM sequence: CTG
  source 1..20: mol_type = other DNA
gcccccttgcctcaaggtag

SEQ ID NO: 68016 - DNA, 20 bp, synthetic construct
  misc_feature 1..20: note = Description of Artificial Sequence: Synthetic oligonucleotide
  misc_feature 1..20: note = Target: SCN10A; (+) strand; PAM type: YTN; PAM sequence: CTT
  source 1..20: mol_type = other DNA
gcctcaaggtaggactaact

SEQ ID NO: 68017 - DNA, 20 bp, synthetic construct
  misc_feature 1..20: note = Description of Artificial Sequence: Synthetic oligonucleotide
  misc_feature 1..20: note = Target: SCN10A; (+) strand; PAM type: YTN; PAM sequence: TTG
  source 1..20: mol_type = other DNA
cctcaaggtaggactaactg

SEQ ID NO: 68018 - DNA, 20 bp, synthetic construct
  misc_feature 1..20: note = Description of Artificial Sequence: Synthetic oligonucleotide
  misc_feature 1..20: note = Target: SCN10A; (+) strand; PAM type: YTN; PAM sequence: CTC
  source 1..20: mol_type = other DNA
aaggtaggactaactgtggt

SEQ ID NO: 68019 - DNA, 20 bp, synthetic construct
  misc_feature 1..20: note = Description of Artificial Sequence: Synthetic oligonucleotide
  misc_feature 1..20: note = Target: SCN10A; (+) strand; PAM type: YTN; PAM sequence: CTA
  source 1..20: mol_type = other DNA
actgtggtacaggtcatgcc

SEQ ID NO: 68020 - DNA, 20 bp, synthetic construct
  misc_feature 1..20: note = Description of Artificial Sequence: Synthetic oligonucleotide
  misc_feature 1..20: note = Target: SCN10A; (+) strand; PAM type: YTN; PAM sequence: CTG
  source 1..20: mol_type = other DNA
tggtacaggtcatgccccag

SEQ ID NO: 68021 - DNA, 20 bp, synthetic construct
  misc_feature 1..20: note = Description of Artificial Sequence: Synthetic oligonucleotide
  misc_feature 1..20: note = Target: SCN10A; (+) strand; PAM type: YTN; PAM sequence: TTC
  source 1..20: mol_type = other DNA
cccatgggatcaagctgaag

SEQ ID NO: 68022 - DNA, 20 bp, synthetic construct
  misc_feature 1..20: note = Description of Artificial Sequence: Synthetic oligonucleotide
  misc_feature 1..20: note = Target: SCN10A; (+) strand; PAM type: YTN; PAM sequence: CTG
  source 1..20: mol_type = other DNA
aagctggtctctagctgaga

SEQ ID NO: 68023 - DNA, 20 bp, synthetic construct
  misc_feature 1..20: note = Description of Artificial Sequence: Synthetic oligonucleotide
  misc_feature 1..20: note = Target: SCN10A; (+) strand; PAM type: YTN; PAM sequence: CTG
  source 1..20: mol_type = other DNA
gtctctagctgagaacactc

SEQ ID NO: 68024 - DNA, 20 bp, synthetic construct
  misc_feature 1..20: note = Description of Artificial Sequence: Synthetic oligonucleotide
  misc_feature 1..20: note = Target: SCN10A; (+) strand; PAM type: YTN; PAM sequence: CTC
  source 1..20: mol_type = other DNA
tagctgagaacactccttgt

SEQ ID NO: 68025 - DNA, 20 bp, synthetic construct
  misc_feature 1..20: note = Description of Artificial Sequence: Synthetic oligonucleotide
  misc_feature 1..20: note = Target: SCN10A; (+) strand; PAM type: YTN; PAM sequence: CTA
  source 1..20: mol_type = other DNA
gctgagaacactccttgttt

SEQ ID NO: 68026 - DNA, 20 bp, synthetic construct
  misc_feature 1..20: note = Description of Artificial Sequence: Synthetic oligonucleotide
  misc_feature 1..20: note = Target: SCN10A; (+) strand; PAM type: YTN; PAM sequence: CTG
  source 1..20: mol_type = other DNA
agaacactccttgtttagtt

SEQ ID NO: 68027 - DNA, 20 bp, synthetic construct
  misc_feature 1..20: note = Description of Artificial Sequence: Synthetic oligonucleotide
  misc_feature 1..20: note = Target: SCN10A; (+) strand; PAM type: YTN; PAM sequence: CTC
  source 1..20: mol_type = other DNA
cttgtttagttccaccctct

SEQ ID NO: 68028 - DNA, 20 bp, synthetic construct
  misc_feature 1..20: note = Description of Artificial Sequence: Synthetic oligonucleotide
  misc_feature 1..20: note = Target: SCN10A; (+) strand; PAM type: YTN; PAM sequence: CTT
  source 1..20: mol_type = other DNA
gtttagttccaccctctgcc

SEQ ID NO: 68029 - DNA, 20 bp, synthetic construct
  misc_feature 1..20: note = Description of Artificial Sequence: Synthetic oligonucleotide
  misc_feature 1..20: note = Target: SCN10A; (+) strand; PAM type: YTN; PAM sequence: TTG
  source 1..20: mol_type = other DNA
tttagttccaccctctgccc

SEQ ID NO: 68030 - DNA, 20 bp, synthetic construct
  misc_feature 1..20: note = Description of Artificial Sequence: Synthetic oligonucleotide
  misc_feature 1..20: note = Target: SCN10A; (+) strand; PAM type: YTN; PAM sequence: TTT
  source 1..20: mol_type = other DNA
agttccaccctctgccccat

SEQ ID NO: 68031 - DNA, 20 bp, synthetic construct
  misc_feature 1..20: note = Description of Artificial Sequence: Synthetic oligonucleotide
  misc_feature 1..20: note = Target: SCN10A; (+) strand; PAM type: YTN; PAM sequence: TTA
  source 1..20: mol_type = other DNA
gttccaccctctgccccatt

SEQ ID NO: 68032 - DNA, 20 bp, synthetic construct
  misc_feature 1..20: note = Description of Artificial Sequence: Synthetic oligonucleotide
  misc_feature 1..20: note = Target: SCN10A; (+) strand; PAM type: YTN; PAM sequence: TTC
  source 1..20: mol_type = other DNA
caccctctgccccattctgt

SEQ ID NO: 68033 - DNA, 20 bp, synthetic construct
  misc_feature 1..20: note = Description of Artificial Sequence: Synthetic oligonucleotide
  misc_feature 1..20: note = Target: SCN10A; (+) strand; PAM type: YTN; PAM sequence: CTC
  source 1..20: mol_type = other DNA
tgccccattctgttttgctt

SEQ ID NO: 68034 - DNA, 20 bp, synthetic construct
  misc_feature 1..20: note = Description of Artificial Sequence: Synthetic oligonucleotide
  misc_feature 1..20: note = Target: SCN10A; (+) strand; PAM type: YTN; PAM sequence: CTG
  source 1..20: mol_type = other DNA
ccccattctgttttgcttca

SEQ ID NO: 68035 - DNA, 20 bp, synthetic construct
  misc_feature 1..20: note = Description of Artificial Sequence: Synthetic oligonucleotide
  misc_feature 1..20: note = Target: SCN10A; (+) strand; PAM type: YTN; PAM sequence: TTC
  source 1..20: mol_type = other DNA
tgttttgcttcattcgcttt

SEQ ID NO: 68036 - DNA, 20 bp, synthetic construct
  misc_feature 1..20: note = Description of Artificial Sequence: Synthetic oligonucleotide
  misc_feature 1..20: note = Target: SCN10A; (+) strand; PAM type: YTN; PAM sequence: CTG
  source 1..20: mol_type = other DNA
ttttgcttcattcgctttct

SEQ ID NO: 68037 - DNA, 20 bp, synthetic construct
  misc_feature 1..20: note = Description of Artificial Sequence: Synthetic oligonucleotide
  misc_feature 1..20: note = Target: SCN10A; (+) strand; PAM type: YTN; PAM sequence: TTT
  source 1..20: mol_type = other DNA
tgcttcattcgctttctcct

SEQ ID NO: 68038 - DNA, 20 bp, synthetic construct
  misc_feature 1..20: note = Description of Artificial Sequence: Synthetic oligonucleotide
  misc_feature 1..20: note = Target: SCN10A; (+) strand; PAM type: YTN; PAM sequence: TTT
  source 1..20: mol_type = other DNA
gcttcattcgctttctcctg

SEQ ID NO: 68039 - DNA, 20 bp, synthetic construct
  misc_feature 1..20: note = Description of Artificial Sequence: Synthetic oligonucleotide
  misc_feature 1..20: note = Target: SCN10A; (+) strand; PAM type: YTN; PAM sequence: TTG
  source 1..20: mol_type = other DNA
cttcattcgctttctcctga

SEQ ID NO: 68040 - DNA, 20 bp, synthetic construct
  misc_feature 1..20: note = Description of Artificial Sequence: Synthetic oligonucleotide
  misc_feature 1..20: note = Target: SCN10A; (+) strand; PAM type: YTN; PAM sequence: CTT
  source 1..20: mol_type = other DNA
cattcgctttctcctgagag

SEQ ID NO: 68041 - DNA, 20 bp, synthetic construct
  misc_feature 1..20: note = Description of Artificial Sequence: Synthetic oligonucleotide
  misc_feature 1..20: note = Target: SCN10A; (+) strand; PAM type: YTN; PAM sequence: TTC
  source 1..20: mol_type = other DNA
attcgctttctcctgagagc

SEQ ID NO: 68042 - DNA, 20 bp, synthetic construct
  misc_feature 1..20: note = Description of Artificial Sequence: Synthetic oligonucleotide
  misc_feature 1..20: note = Target: SCN10A; (+) strand; PAM type: YTN; PAM sequence: TTC
  source 1..20: mol_type = other DNA
gctttctcctgagagcactc

SEQ ID NO: 68043 - DNA, 20 bp, synthetic construct
  misc_feature 1..20: note = Description of Artificial Sequence: Synthetic oligonucleotide
  misc_feature 1..20: note = Target: SCN10A; (+) strand; PAM type: YTN; PAM sequence: CTT
  source 1..20: mol_type = other DNA
tctcctgagagcactccctc

SEQ ID NO: 68044 - DNA, 20 bp, synthetic construct
  misc_feature 1..20: note = Description of Artificial Sequence: Synthetic oligonucleotide
  misc_feature 1..20: note = Target: SCN10A; (+) strand; PAM type: YTN; PAM sequence: TTT
  source 1..20: mol_type = other DNA
ctcctgagagcactccctca

SEQ ID NO: 68045 - DNA, 20 bp, synthetic construct
  misc_feature 1..20: note = Description of Artificial Sequence: Synthetic oligonucleotide
  misc_feature 1..20: note = Target: SCN10A; (+) strand; PAM type: YTN; PAM sequence: TTC
  source 1..20: mol_type = other DNA
tcctgagagcactccctcaa

SEQ ID NO: 68046 - DNA, 20 bp, synthetic construct
  misc_feature 1..20: note = Description of Artificial Sequence: Synthetic oligonucleotide
  misc_feature 1..20: note = Target: SCN10A; (+) strand; PAM type: YTN; PAM sequence: CTC
  source 1..20: mol_type = other DNA
ctgagagcactccctcaata

SEQ ID NO: 68047 - DNA, 20 bp, synthetic construct
  misc_feature 1..20: note = Description of Artificial Sequence: Synthetic oligonucleotide
  misc_feature 1..20: note = Target: SCN10A; (+) strand; PAM type: YTN; PAM sequence: CTG
  source 1..20: mol_type = other DNA
agagcactccctcaataggt

SEQ ID NO: 68048 - DNA, 20 bp, synthetic construct
  misc_feature 1..20: note = Description of Artificial Sequence: Synthetic oligonucleotide
  misc_feature 1..20: note = Target: SCN10A; (+) strand; PAM type: YTN; PAM sequence: CTC
  source 1..20: mol_type = other DNA
cctcaataggtcacttgcac

SEQ ID NO: 68049 - DNA, 20 bp, synthetic construct
  misc_feature 1..20: note = Description of Artificial Sequence: Synthetic oligonucleotide
  misc_feature 1..20: note = Target: SCN10A; (+) strand; PAM type: YTN; PAM sequence: CTC
  source 1..20: mol_type = other DNA
aataggtcacttgcacaaga

SEQ ID NO: 68050 - DNA, 20 bp, synthetic construct
  misc_feature 1..20: note = Description of Artificial Sequence: Synthetic oligonucleotide
  misc_feature 1..20: note = Target: SCN10A; (+) strand; PAM type: YTN; PAM sequence: CTT
  source 1..20: mol_type = other DNA
gcacaagaatcctcacttag

SEQ ID NO: 68051 - DNA, 20 bp, synthetic construct
  misc_feature 1..20: note = Description of Artificial Sequence: Synthetic oligonucleotide
  misc_feature 1..20: note = Target: SCN10A; (+) strand; PAM type: YTN; PAM sequence: TTG
  source 1..20: mol_type = other DNA
cacaagaatcctcacttagc

SEQ ID NO: 68052 - DNA, 20 bp, synthetic construct
  misc_feature 1..20: note = Description of Artificial Sequence: Synthetic oligonucleotide
  misc_feature 1..20: note = Target: SCN10A; (+) strand; PAM type: YTN; PAM sequence: CTC
  source 1..20: mol_type = other DNA
acttagcttcttctttgaga

SEQ ID NO: 68053 - DNA, 20 bp, synthetic construct
  misc_feature 1..20: note = Description of Artificial Sequence: Synthetic oligonucleotide
  misc_feature 1..20: note = Target: SCN10A; (+) strand; PAM type: YTN; PAM sequence: CTT
  source 1..20: mol_type = other DNA
agcttcttctttgagaaaac

SEQ ID NO: 68054 - DNA, 20 bp, synthetic construct
  misc_feature 1..20: note = Description of Artificial Sequence: Synthetic oligonucleotide
  misc_feature 1..20: note = Target: SCN10A; (+) strand; PAM type: YTN; PAM sequence: TTA
  source 1..20: mol_type = other DNA
gcttcttctttgagaaaacc

SEQ ID NO: 68055 - DNA, 20 bp, synthetic construct
  misc_feature 1..20: note = Description of Artificial Sequence: Synthetic oligonucleotide
  misc_feature 1..20: note = Target: SCN10A; (+) strand; PAM type: YTN; PAM sequence: CTT
  source 1..20: mol_type = other DNA
cttctttgagaaaacctgat

SEQ ID NO: 68056 - DNA, 20 bp, synthetic construct
  misc_feature 1..20: note = Description of Artificial Sequence: Synthetic oligonucleotide
  misc_feature 1..20: note = Target: SCN10A; (+) strand; PAM type: YTN; PAM sequence: TTC
  source 1..20: mol_type = other DNA
ttctttgagaaaacctgatc

SEQ ID NO: 68057 - DNA, 20 bp, synthetic construct
  misc_feature 1..20: note = Description of Artificial Sequence: Synthetic oligonucleotide
  misc_feature 1..20: note = Target: SCN10A; (+) strand; PAM type: YTN; PAM sequence: CTT
  source 1..20: mol_type = other DNA
ctttgagaaaacctgatcta

SEQ ID NO: 68058 - DNA, 20 bp, synthetic construct
  misc_feature 1..20: note = Description of Artificial Sequence: Synthetic oligonucleotide
  misc_feature 1..20: note = Target: SCN10A; (+) strand; PAM type: YTN; PAM sequence: TTC
  source 1..20: mol_type = other DNA
tttgagaaaacctgatctaa

SEQ ID NO: 68059 - DNA, 20 bp, synthetic construct
  misc_feature 1..20: note = Description of Artificial Sequence: Synthetic oligonucleotide
  misc_feature 1..20: note = Target: SCN10A; (+) strand; PAM type: YTN; PAM sequence: CTT
  source 1..20: mol_type = other DNA
tgagaaaacctgatctaata

SEQ ID NO: 68060 - DNA, 20 bp, synthetic construct
  misc_feature 1..20: note = Description of Artificial Sequence: Synthetic oligonucleotide
  misc_feature 1..20: note = Target: SCN10A; (+) strand; PAM type: YTN; PAM sequence: TTT
  source 1..20: mol_type = other DNA
gagaaaacctgatctaatat

SEQ ID NO: 68061 - DNA, 20 bp, synthetic construct
  misc_feature 1..20: note = Description of Artificial Sequence: Synthetic oligonucleotide
  misc_feature 1..20: note = Target: SCN10A; (+) strand; PAM type: YTN; PAM sequence: TTG
  source 1..20: mol_type = other DNA
agaaaacctgatctaatatg

SEQ ID NO: 68062 - DNA, 20 bp, synthetic construct
  misc_feature 1..20: note = Description of Artificial Sequence: Synthetic oligonucleotide
  misc_feature 1..20: note = Target: SCN10A; (+) strand; PAM type: YTN; PAM sequence: CTG
  source 1..20: mol_type = other DNA
atctaatatggtccctgagg

SEQ ID NO: 68063 - DNA, 20 bp, synthetic construct
  misc_feature 1..20: note = Description of Artificial Sequence: Synthetic oligonucleotide
  misc_feature 1..20: note = Target: SCN10A; (+) strand; PAM type: YTN; PAM sequence: CTA
  source 1..20: mol_type = other DNA
atatggtccctgaggcaaga

SEQ ID NO: 68064 - DNA, 20 bp, synthetic construct
  misc_feature 1..20: note = Description of Artificial Sequence: Synthetic oligonucleotide
  misc_feature 1..20: note = Target: SCN10A; (+) strand; PAM type: YTN; PAM sequence: CTG
  source 1..20: mol_type = other DNA
aggcaagatgattcctccta

SEQ ID NO: 68065 - DNA, 20 bp, synthetic construct
  misc_feature 1..20: note = Description of Artificial Sequence: Synthetic oligonucleotide
  misc_feature 1..20: note = Target: SCN10A; (+) strand; PAM type: YTN; PAM sequence: TTC
  source 1..20: mol_type = other DNA
ctcctatagctccctaaacg

SEQ ID NO: 68066 - DNA, 20 bp, synthetic construct
  misc_feature 1..20: note = Description of Artificial Sequence: Synthetic oligonucleotide
  misc_feature 1..20: note = Target: SCN10A; (+) strand; PAM type: YTN; PAM sequence: CTC
  source 1..20: mol_type = other DNA
ctatagctccctaaacggtg

SEQ ID NO: 68067 - DNA, 20 bp, synthetic construct
  misc_feature 1..20: note = Description of Artificial Sequence: Synthetic oligonucleotide
  misc_feature 1..20: note = Target: SCN10A; (+) strand; PAM type: YTN; PAM sequence: CTA
  source 1..20: mol_type = other DNA
tagctccctaaacggtgccc

SEQ ID NO: 68068 - DNA, 20 bp, synthetic construct
  misc_feature 1..20: note = Description of Artificial Sequence: Synthetic oligonucleotide
  misc_feature 1..20: note = Target: SCN10A; (+) strand; PAM type: YTN; PAM sequence: CTC
  source 1..20: mol_type = other DNA
cctaaacggtgccctaattg

SEQ ID NO: 68069 - DNA, 20 bp, synthetic construct
  misc_feature 1..20: note = Description of Artificial Sequence: Synthetic oligonucleotide
  misc_feature 1..20: note = Target: SCN10A; (+) strand; PAM type: YTN; PAM sequence: CTA
  source 1..20: mol_type = other DNA
aacggtgccctaattgaagt

SEQ ID NO: 68070 - DNA, 20 bp, synthetic construct
  misc_feature 1..20: note = Description of Artificial Sequence: Synthetic oligonucleotide
  misc_feature 1..20: note = Target: SCN10A; (+) strand; PAM type: YTN; PAM sequence: CTA
  source 1..20: mol_type = other DNA
attgaagtggctagtccaga

SEQ ID NO: 68071 - DNA, 20 bp, synthetic construct
  misc_feature 1..20: note = Description of Artificial Sequence: Synthetic oligonucleotide
  misc_feature 1..20: note = Target: SCN10A; (+) strand; PAM type: YTN; PAM sequence: TTG
  source 1..20: mol_type = other DNA
aagtggctagtccagaacag

SEQ ID NO: 68072 - DNA, 20 bp, synthetic construct
  misc_feature 1..20: note = Description of Artificial Sequence: Synthetic oligonucleotide
  misc_feature 1..20: note = Target: SCN10A; (+) strand; PAM type: YTN; PAM sequence: CTA
  source 1..20: mol_type = other DNA
gtccagaacagtatccaaga

SEQ ID NO: 68073 - DNA, 20 bp, synthetic construct
  misc_feature 1..20: note = Description of Artificial Sequence: Synthetic oligonucleotide
  misc_feature 1..20: note = Target: SCN10A; (+) strand; PAM type: YTN; PAM sequence: CTG
  source 1..20: mol_type = other DNA
caaccttcttcacaaagctt

SEQ ID NO: 68074 - DNA, 20 bp, synthetic construct
  misc_feature 1..20: note = Description of Artificial Sequence: Synthetic oligonucleotide
  misc_feature 1..20: note = Target: SCN10A; (+) strand; PAM type: YTN; PAM sequence: CTT
  source 1..20: mol_type = other DNA
cttcacaaagcttccactcc

SEQ ID NO: 68075 - DNA, 20 bp, synthetic construct
  misc_feature 1..20: note = Description of Artificial Sequence: Synthetic oligonucleotide
  misc_feature 1..20: note = Target: SCN10A; (+) strand; PAM type: YTN; PAM sequence: TTC
  source 1..20: mol_type = other DNA
ttcacaaagcttccactcct

SEQ ID NO: 68076 - DNA, 20 bp, synthetic construct
  misc_feature 1..20: note = Description of Artificial Sequence: Synthetic oligonucleotide
  misc_feature 1..20: note = Target: SCN10A; (+) strand; PAM type: YTN; PAM sequence: CTT
  source 1..20: mol_type = other DNA
cacaaagcttccactcctca

SEQ ID NO: 68077 - DNA, 20 bp, synthetic construct
  misc_feature 1..20: note = Description of Artificial Sequence: Synthetic oligonucleotide
  misc_feature 1..20: note = Target: SCN10A; (+) strand; PAM type: YTN; PAM sequence: TTC
  source 1..20: mol_type = other DNA
acaaagcttccactcctcac

SEQ ID NO: 68078 - DNA, 20 bp, synthetic construct
  misc_feature 1..20: note = Description of Artificial Sequence: Synthetic oligonucleotide
  misc_feature 1..20: note = Target: SCN10A; (+) strand; PAM type: YTN; PAM sequence: CTT
  source 1..20: mol_type = other DNA
ccactcctcacaaacctcct

SEQ ID NO: 68079 - DNA, 20 bp, synthetic construct
  misc_feature 1..20: note = Description of Artificial Sequence: Synthetic oligonucleotide
  misc_feature 1..20: note = Target: SCN10A; (+) strand; PAM type: YTN; PAM sequence: TTC
  source 1..20: mol_type = other DNA
cactcctcacaaacctcctg

SEQ ID NO: 68080 - DNA, 20 bp, synthetic construct
  misc_feature 1..20: note = Description of Artificial Sequence: Synthetic oligonucleotide
  misc_feature 1..20: note = Target: SCN10A; (+) strand; PAM type: YTN; PAM sequence: CTC
  source 1..20: mol_type = other DNA
ctcacaaacctcctgctcct

SEQ ID NO: 68081 - DNA, 20 bp, synthetic construct
  misc_feature 1..20: note = Description of Artificial Sequence: Synthetic oligonucleotide
  misc_feature 1..20: note = Target: SCN10A; (+) strand; PAM type: YTN; PAM sequence: CTC
  source 1..20: mol_type = other DNA
acaaacctcctgctccttcc

SEQ ID NO: 68082 - DNA, 20 bp, synthetic construct
  misc_feature 1..20: note = Description of Artificial Sequence: Synthetic oligonucleotide
  misc_feature 1..20: note = Target: SCN10A; (+) strand; PAM type: YTN; PAM sequence: CTC
  source 1..20: mol_type = other DNA
ctgctccttccggagcatct

SEQ ID NO: 68083 - DNA, 20 bp, synthetic construct
  misc_feature 1..20: note = Description of Artificial Sequence: Synthetic oligonucleotide
  misc_feature 1..20: note = Target: SCN10A; (+) strand; PAM type: YTN; PAM sequence: CTG
  source 1..20: mol_type = other DNA
ctccttccggagcatctcga

SEQ ID NO: 68084 - DNA, 20 bp, synthetic construct
  misc_feature 1..20: note = Description of Artificial Sequence: Synthetic oligonucleotide
  misc_feature 1..20: note = Target: SCN10A; (+) strand; PAM type: YTN; PAM sequence: CTC
  source 1..20: mol_type = other DNA
cttccggagcatctcgaggg

SEQ ID NO: 68085 - DNA, 20 bp, synthetic construct
  misc_feature 1..20: note = Description of Artificial Sequence: Synthetic oligonucleotide
  misc_feature 1..20: note = Target: SCN10A; (+) strand; PAM type: YTN; PAM sequence: CTT
  source 1..20: mol_type = other DNA
ccggagcatctcgagggcct

SEQ ID NO: 68086 - DNA, 20 bp, synthetic construct
  misc_feature 1..20: note = Description of Artificial Sequence: Synthetic oligonucleotide
  misc_feature 1..20: note = Target: SCN10A; (+) strand; PAM type: YTN; PAM sequence: TTC
  source 1..20: mol_type = other DNA
cggagcatctcgagggcctc

SEQ ID NO: 68087 - DNA, 20 bp, synthetic construct
  misc_feature 1..20: note = Description of Artificial Sequence: Synthetic oligonucleotide
  misc_feature 1..20: note = Target: SCN10A; (+) strand; PAM type: YTN; PAM sequence: CTC
  source 1..20: mol_type = other DNA
gagggcctcctggaacttct

SEQ ID NO: 68088 - DNA, 20 bp, synthetic construct
  misc_feature 1..20: note = Description of Artificial Sequence: Synthetic oligonucleotide
  misc_feature 1..20: note = Target: SCN10A; (+) strand; PAM type: YTN; PAM sequence: CTC
  source 1..20: mol_type = other DNA
ctggaacttcttctcctttg

SEQ ID NO: 68089 - DNA, 20 bp, synthetic construct
  misc_feature 1..20: note = Description of Artificial Sequence: Synthetic oligonucleotide
  misc_feature 1..20: note = Target: SCN10A; (+) strand; PAM type: YTN; PAM sequence: CTG
  source 1..20: mol_type = other DNA
gaacttcttctcctttgctt

SEQ ID NO: 68090 - DNA, 20 bp, synthetic construct
  misc_feature 1..20: note = Description of Artificial Sequence: Synthetic oligonucleotide
  misc_feature 1..20: note = Target: SCN10A; (+) strand; PAM type: YTN; PAM sequence: CTT
  source 1..20: mol_type = other DNA
cttctcctttgcttcaattt

SEQ ID NO: 68091 - DNA, 20 bp, synthetic construct
  misc_feature 1..20: note = Description of Artificial Sequence: Synthetic oligonucleotide
  misc_feature 1..20: note = Target: SCN10A; (+) strand; PAM type: YTN; PAM sequence: TTC
  source 1..20: mol_type = other DNA
ttctcctttgcttcaatttc

SEQ ID NO: 68092 - DNA, 20 bp, synthetic construct
  misc_feature 1..20: note = Description of Artificial Sequence: Synthetic oligonucleotide
  misc_feature 1..20: note = Target: SCN10A; (+) strand; PAM type: YTN; PAM sequence: CTT
  source 1..20: mol_type = other DNA
ctcctttgcttcaatttcat

SEQ ID NO: 68093 - DNA, 20 bp, synthetic construct
  misc_feature 1..20: note = Description of Artificial Sequence: Synthetic oligonucleotide
  misc_feature 1..20: note = Target: SCN10A; (+) strand; PAM type: YTN; PAM sequence: TTC
  source 1..20: mol_type = other DNA
tcctttgcttcaatttcatc

SEQ ID NO: 68094 - DNA, 20 bp, synthetic construct
  misc_feature 1..20: note = Description of Artificial Sequence: Synthetic oligonucleotide
  misc_feature 1..20: note = Target: SCN10A; (+) strand; PAM type: YTN; PAM sequence: CTC
  source 1..20: mol_type = other DNA
ctttgcttcaatttcatcag

SEQ ID NO: 68095 - DNA, 20 bp, synthetic construct
  misc_feature 1..20: note = Description of Artificial Sequence: Synthetic oligonucleotide
  misc_feature 1..20: note = Target: SCN10A; (+) strand; PAM type: YTN; PAM sequence: CTT
  source 1..20: mol_type = other DNA
tgcttcaatttcatcagtgg

SEQ ID NO: 68096 - DNA, 20 bp, synthetic construct
  misc_feature 1..20: note = Description of Artificial Sequence: Synthetic oligonucleotide
  misc_feature 1..20: note = Target: SCN10A; (+) strand; PAM type: YTN; PAM sequence: TTT
  source 1..20: mol_type = other DNA
gcttcaatttcatcagtggt

SEQ ID NO: 68097 - DNA, 20 bp, synthetic construct
  misc_feature 1..20: note = Description of Artificial Sequence: Synthetic oligonucleotide
  misc_feature 1..20: note = Target: SCN10A; (+) strand; PAM type: YTN; PAM sequence: TTG
  source 1..20: mol_type = other DNA
cttcaatttcatcagtggtt

SEQ ID NO: 68098 - DNA, 20 bp, synthetic construct
  misc_feature 1..20: note = Description of Artificial Sequence: Synthetic oligonucleotide
  misc_feature 1..20: note = Target: SCN10A; (+) strand; PAM type: YTN; PAM sequence: CTT
  source 1..20: mol_type = other DNA
caatttcatcagtggttgcc

SEQ ID NO: 68099 - DNA, 20 bp, synthetic construct
  misc_feature 1..20: note = Description of Artificial Sequence: Synthetic oligonucleotide
  misc_feature 1..20: note = Target: SCN10A; (+) strand; PAM type: YTN; PAM sequence: TTC
  source 1..20: mol_type = other DNA
aatttcatcagtggttgcct

SEQ ID NO: 68100 - DNA, 20 bp, synthetic construct
  misc_feature 1..20: note = Description of Artificial Sequence: Synthetic oligonucleotide
  misc_feature 1..20: note = Target: SCN10A; (+) strand; PAM type: YTN; PAM sequence: TTT
  source 1..20: mol_type = other DNA
catcagtggttgcctggttc

SEQ ID NO: 68101 - DNA, 20 bp, synthetic construct
  misc_feature 1..20: note = Description of Artificial Sequence: Synthetic oligonucleotide
  misc_feature 1..20: note = Target: SCN10A; (+) strand; PAM type: YTN; PAM sequence: TTC
  source 1..20: mol_type = other DNA
atcagtggttgcctggttct

SEQ ID NO: 68102 - DNA, 20 bp, synthetic construct
  misc_feature 1..20: note = Description of Artificial Sequence: Synthetic oligonucleotide
  misc_feature 1..20: note = Target: SCN10A; (+) strand; PAM type: YTN; PAM sequence: TTG
  source 1..20: mol_type = other DNA
cctggttctgctcctcatac

SEQ ID NO: 68103 - DNA, 20 bp, synthetic construct
  misc_feature 1..20: note = Description of Artificial Sequence: Synthetic oligonucleotide
  misc_feature 1..20: note = Target: SCN10A; (+) strand; PAM type: YTN; PAM sequence: CTG
  source 1..20: mol_type = other DNA
gttctgctcctcatacgcca

SEQ ID NO: 68104 - DNA, 20 bp, synthetic construct
  misc_feature 1..20: note = Description of Artificial Sequence: Synthetic oligonucleotide
  misc_feature 1..20: note = Target: SCN10A; (+) strand; PAM type: YTN; PAM sequence: TTC
  source 1..20: mol_type = other DNA
tgctcctcatacgccatggt

SEQ ID NO: 68105 - DNA, 20 bp, synthetic construct
  misc_feature 1..20: note = Description of Artificial Sequence: Synthetic oligonucleotide
  misc_feature 1..20: note = Target: SCN10A; (+) strand; PAM type: YTN; PAM sequence: CTG
  source 1..20: mol_type = other DNA
ctcctcatacgccatggtga

SEQ ID NO: 68106 - DNA, 20 bp, synthetic construct
  misc_feature 1..20: note = Description of Artificial Sequence: Synthetic oligonucleotide
  misc_feature 1..20: note = Target: SCN10A; (+) strand; PAM type: YTN; PAM sequence: CTC
  source 1..20: mol_type = other DNA
ctcatacgccatggtgacta

SEQ ID NO: 68107 - DNA, 20 bp, synthetic construct
  misc_feature 1..20: note = Description of Artificial Sequence: Synthetic oligonucleotide
  misc_feature 1..20: note = Target: SCN10A; (+) strand; PAM type: YTN; PAM sequence: CTC
  source 1..20: mol_type = other DNA
atacgccatggtgactacag

SEQ ID NO: 68108 - DNA, 20 bp, synthetic construct
  misc_feature 1..20: note = Description of Artificial Sequence: Synthetic oligonucleotide
  misc_feature 1..20: note = Target: SCN10A; (+) strand; PAM type: YTN; PAM sequence: CTA
  source 1..20: mol_type = other DNA
cagccaagatcaagttgacc

SEQ ID NO: 68109 - DNA, 20 bp, synthetic construct
  misc_feature 1..20: note = Description of Artificial Sequence: Synthetic oligonucleotide
  misc_feature 1..20: note = Target: SCN10A; (+) strand; PAM type: YTN; PAM sequence: TTG
  source 1..20: mol_type = other DNA
accaggtagaaagatcccag

SEQ ID NO: 68110 - DNA, 20 bp, synthetic construct
  misc_feature 1..20: note = Description of Artificial Sequence: Synthetic oligonucleotide
  misc_feature 1..20: note = Target: SCN10A; (+) strand; PAM type: YTN; PAM sequence: TTA
  source 1..20: mol_type = other DNA
cgagcacaaaaaagatcata

SEQ ID NO: 68111 - DNA, 20 bp, synthetic construct
  misc_feature 1..20: note = Description of Artificial Sequence: Synthetic oligonucleotide
  misc_feature 1..20: note = Target: SCN10A; (+) strand; PAM type: YTN; PAM sequence: TTT
  source 1..20: mol_type = other DNA
tcccagaagtcctcagggtc

SEQ ID NO: 68112 - DNA, 20 bp, synthetic construct
  misc_feature 1..20: note = Description of Artificial Sequence: Synthetic oligonucleotide
  misc_feature 1..20: note = Target: SCN10A; (+) strand; PAM type: YTN; PAM sequence: TTT
  source 1..20: mol_type = other DNA
cccagaagtcctcagggtct

SEQ ID NO: 68113 - DNA, 20 bp, synthetic construct
  misc_feature 1..20: note = Description of Artificial Sequence: Synthetic oligonucleotide
  misc_feature 1..20: note = Target: SCN10A; (+) strand; PAM type: YTN; PAM sequence: TTC
  source 1..20: mol_type = other DNA
ccagaagtcctcagggtctg

SEQ ID NO: 68114 - DNA, 20 bp, synthetic construct
  misc_feature 1..20: note = Description of Artificial Sequence: Synthetic oligonucleotide
  misc_feature 1..20: note = Target: SCN10A; (+) strand; PAM type: YTN; PAM sequence: CTC
  source 1..20: mol_type = other DNA
agggtctgcaggttcaaggg

SEQ ID NO: 68115 - DNA, 20 bp, synthetic construct
  misc_feature 1..20: note = Description of Artificial Sequence: Synthetic oligonucleotide
  misc_feature 1..20: note = Target: SCN10A; (+) strand; PAM type: YTN; PAM sequence: CTG
  source 1..20: mol_type = other DNA
caggttcaagggaaagaaga

SEQ ID NO: 68116 - DNA, 20 bp, synthetic construct
  misc_feature 1..20: note = Description of Artificial Sequence: Synthetic oligonucleotide
  misc_feature 1..20: note = Target: SCN10A; (+) strand; PAM type: YTN; PAM sequence: TTC
  source 1..20: mol_type = other DNA
aagggaaagaagagaaacct

SEQ ID NO: 68117 - DNA, 20 bp, synthetic construct
  misc_feature 1..20: note = Description of Artificial Sequence: Synthetic oligonucleotide
  misc_feature 1..20: note = Target: SCN10A; (+) strand; PAM type: YTN; PAM sequence: CTG
  source 1..20: mol_type = other DNA
tacccatagcacatggaccc

SEQ ID NO: 68118 - DNA, 20 bp, synthetic construct
  misc_feature 1..20: note = Description of Artificial Sequence: Synthetic oligonucleotide
  misc_feature 1..20: note = Target: SCN10A; (+) strand; PAM type: YTN; PAM sequence: CTG
  source 1..20: mol_type = other DNA
aatttaagtcagcctcctcc

SEQ ID NO: 68119 - DNA, 20 bp, synthetic construct
  misc_feature 1..20: note = Description of Artificial Sequence: Synthetic oligonucleotide
  misc_feature 1..20: note = Target: SCN10A; (+) strand; PAM type: YTN; PAM sequence: TTT
  source 1..20: mol_type = other DNA
aagtcagcctcctccaggaa

SEQ ID NO: 68120 - DNA, 20 bp, synthetic construct
  misc_feature 1..20: note = Description of Artificial Sequence: Synthetic oligonucleotide
  misc_feature 1..20: note = Target: SCN10A; (+) strand; PAM type: YTN; PAM sequence: TTA
  source 1..20: mol_type = other DNA
agtcagcctcctccaggaaa

SEQ ID NO: 68121 - DNA, 20 bp, synthetic construct
  misc_feature 1..20: note = Description of Artificial Sequence: Synthetic oligonucleotide
  misc_feature 1..20: note = Target: SCN10A; (+) strand; PAM type: YTN; PAM sequence: CTC
  source 1..20: mol_type = other DNA
ctccaggaaaagcacagcca

SEQ ID NO: 68122 - DNA, 20 bp, synthetic construct
  misc_feature 1..20: note = Description of Artificial Sequence: Synthetic oligonucleotide
  misc_feature 1..20: note = Target: SCN10A; (+) strand; PAM type: YTN; PAM sequence: CTC
  source 1..20: mol_type = other DNA
caggaaaagcacagccatgc

SEQ ID NO: 68123 - DNA, 20 bp, synthetic construct
  misc_feature 1..20: note = Description of Artificial Sequence: Synthetic oligonucleotide
  misc_feature 1..20: note = Target: SCN10A; (+) strand; PAM type: YTN; PAM sequence: CTG
  source 1..20: mol_type = other DNA
acccaccagcctccaaccaa

SEQ ID NO: 68124 - DNA, 20 bp, synthetic construct
  misc_feature 1..20: note = Description of Artificial Sequence: Synthetic oligonucleotide
  misc_feature 1..20: note = Target: SCN10A; (+) strand; PAM type: YTN; PAM sequence: CTC
  source 1..20: mol_type = other DNA
caaccaagtctgcgtggggg

SEQ ID NO: 68125 - DNA, 20 bp, synthetic construct
  misc_feature 1..20: note = Description of Artificial Sequence: Synthetic oligonucleotide
  misc_feature 1..20: note = Target: SCN10A; (+) strand; PAM type: YTN; PAM sequence: CTG
  source 1..20: mol_type = other DNA
cgtgggggaatgcagctcag

SEQ ID NO: 68126 - DNA, 20 bp, synthetic construct
  misc_feature 1..20: note = Description of Artificial Sequence: Synthetic oligonucleotide
  misc_feature 1..20: note = Target: SCN10A; (+) strand; PAM type: YTN; PAM sequence: CTC
  source 1..20: mol_type = other DNA
agtacctgctggtagaggcg

SEQ ID NO: 68127 - DNA, 20 bp, synthetic construct
  misc_feature 1..20: note = Description of Artificial Sequence: Synthetic oligonucleotide
  misc_feature 1..20: note = Target: SCN10A; (+) strand; PAM type: YTN; PAM sequence: CTG
  source 1..20: mol_type = other DNA
ctggtagaggcgttcccagg

SEQ ID NO: 68128 - DNA, 20 bp, synthetic construct
  misc_feature 1..20: note = Description of Artificial Sequence: Synthetic oligonucleotide
  misc_feature 1..20: note = Target: SCN10A; (+) strand; PAM type: YTN; PAM sequence: CTG
  source 1..20: mol_type = other DNA
gtagaggcgttcccaggaat

SEQ ID NO: 68129 - DNA, 20 bp, synthetic construct
  misc_feature 1..20: note = Description of Artificial Sequence: Synthetic oligonucleotide
  misc_feature 1..20: note = Target: SCN10A; (+) strand; PAM type: YTN; PAM sequence: TTC
  source 1..20: mol_type = other DNA
ccaggaatcctgtgtcatga

SEQ ID NO: 68130 - DNA, 20 bp, synthetic construct
  misc_feature 1..20: note = Description of Artificial Sequence: Synthetic oligonucleotide
  misc_feature 1..20: note = Target: SCN10A; (+) strand; PAM type: YTN; PAM sequence: CTG
  source 1..20: mol_type = other DNA
tgtcatgaggcggaacagtg

SEQ ID NO: 68131 - DNA, 20 bp, synthetic construct
  misc_feature 1..20: note = Description of Artificial Sequence: Synthetic oligonucleotide
  misc_feature 1..20: note = Target: SCN10A; (+) strand; PAM type: YTN; PAM sequence: CTG
  source 1..20: mol_type = other DNA
gtgtagttaaaatccgggtt

SEQ ID NO: 68132 - DNA, 20 bp, synthetic construct
  misc_feature 1..20: note = Description of Artificial Sequence: Synthetic oligonucleotide
  misc_feature 1..20: note = Target: SCN10A; (+) strand; PAM type: YTN; PAM sequence: TTA
  source 1..20: mol_type = other DNA
aaatccgggttgtcagaagt

SEQ ID NO: 68133 - DNA, 20 bp, synthetic construct
  misc_feature 1..20: note = Description of Artificial Sequence: Synthetic oligonucleotide
  misc_feature 1..20: note = Target: SCN10A; (+) strand; PAM type: YTN; PAM sequence: TTG
  source 1..20: mol_type = other DNA
tcagaagttttaaggcagat

SEQ ID NO: 68134 - DNA, 20 bp, synthetic construct
  misc_feature 1..20: note = Description of Artificial Sequence: Synthetic oligonucleotide
  misc_feature 1..20: note = Target: SCN10A; (+) strand; PAM type: YTN; PAM sequence: TTT
  source 1..20: mol_type = other DNA
taaggcagatataaccatca

SEQ ID NO: 68135 - DNA, 20 bp, synthetic construct
  misc_feature 1..20: note = Description of Artificial Sequence: Synthetic oligonucleotide
  misc_feature 1..20: note = Target: SCN10A; (+) strand; PAM type: YTN; PAM sequence: TTT
  source 1..20: mol_type = other DNA
aaggcagatataaccatcag

SEQ ID NO: 68136 - DNA, 20 bp, synthetic construct
  misc_feature 1..20: note = Description of Artificial Sequence: Synthetic oligonucleotide
  misc_feature 1..20: note = Target: SCN10A; (+) strand; PAM type: YTN; PAM sequence: TTA
  source 1..20: mol_type = other DNA
aggcagatataaccatcagg

SEQ ID NO: 68137 - DNA, 20 bp, synthetic construct
  misc_feature 1..20: note = Description of Artificial Sequence: Synthetic oligonucleotide
  misc_feature 1..20: note = Target: SCN10A; (+) strand; PAM type: YTN; PAM sequence: CTG
  source 1..20: mol_type = other DNA
cagcaagaacagagaaggtc

SEQ ID NO: 68138 - DNA, 20 bp, synthetic construct
  misc_feature 1..20: note = Description of Artificial Sequence: Synthetic oligonucleotide
  misc_feature 1..20: note = Target: SCN10A; (+) strand; PAM type: YTN; PAM sequence: CTG
  source 1..20: mol_type = other DNA
cttattgcagacaaggtagc

SEQ ID NO: 68139 - DNA, 20 bp, synthetic construct
  misc_feature 1..20: note = Description of Artificial Sequence: Synthetic oligonucleotide
  misc_feature 1..20: note = Target: SCN10A; (+) strand; PAM type: YTN; PAM sequence: CTT
  source 1..20: mol_type = other DNA
attgcagacaaggtagccca

SEQ ID NO: 68140 - DNA, 20 bp, synthetic construct
  misc_feature 1..20: note = Description of Artificial Sequence: Synthetic oligonucleotide
  misc_feature 1..20: note = Target: SCN10A; (+) strand; PAM type: YTN; PAM sequence: TTA
  source 1..20: mol_type = other DNA
ttgcagacaaggtagcccag

SEQ ID NO: 68141 - DNA, 20 bp, synthetic construct
  misc_feature 1..20: note = Description of Artificial Sequence: Synthetic oligonucleotide
  misc_feature 1..20: note = Target: SCN10A; (+) strand; PAM type: YTN; PAM sequence: TTG
  source 1..20: mol_type = other DNA
cagacaaggtagcccagggc

SEQ ID NO: 68142 - DNA, 20 bp, synthetic construct
  misc_feature 1..20: note = Description of Artificial Sequence: Synthetic oligonucleotide
  misc_feature 1..20: note = Target: SCN10A; (+) strand; PAM type: YTN; PAM sequence: CTG
  source 1..20: mol_type = other DNA
cgagacaaccacagagtttt

SEQ ID NO: 68143 - DNA, 20 bp, synthetic construct
  misc_feature 1..20: note = Description of Artificial Sequence: Synthetic oligonucleotide
  misc_feature 1..20: note = Target: SCN10A; (+) strand; PAM type: YTN; PAM sequence: TTT
  source 1..20: mol_type = other DNA
tatgtcagagatcagagttc

SEQ ID NO: 68144 - DNA, 20 bp, synthetic construct
  misc_feature 1..20: note = Description of Artificial Sequence: Synthetic oligonucleotide
  misc_feature 1..20: note = Target: SCN10A; (+) strand; PAM type: YTN; PAM sequence: TTT
  source 1..20: mol_type = other DNA
atgtcagagatcagagttca

SEQ ID NO: 68145 - DNA, 20 bp, synthetic construct
  misc_feature 1..20: note = Description of Artificial Sequence: Synthetic oligonucleotide
  misc_feature 1..20: note = Target: SCN10A; (+) strand; PAM type: YTN; PAM sequence: TTA
  source 1..20: mol_type = other DNA
tgtcagagatcagagttcaa

SEQ ID NO: 68146 - DNA, 20 bp, synthetic construct
  misc_feature 1..20: note = Description of Artificial Sequence: Synthetic oligonucleotide
  misc_feature 1..20: note = Target: SCN10A; (+) strand; PAM type: YTN; PAM sequence: TTC
  source 1..20: mol_type = other DNA
aagacctagtcttcctctta

SEQ ID NO: 68147 - DNA, 20 bp, synthetic construct
  misc_feature 1..20: note = Description of Artificial Sequence: Synthetic oligonucleotide
  misc_feature 1..20: note = Target: SCN10A; (+) strand; PAM type: YTN; PAM sequence: CTA
  source 1..20: mol_type = other DNA
gtcttcctcttattagcagg

SEQ ID NO: 68148 - DNA, 20 bp, synthetic construct
  misc_feature 1..20: note = Description of Artificial Sequence: Synthetic oligonucleotide
  misc_feature 1..20: note = Target: SCN10A; (+) strand; PAM type: YTN; PAM sequence: CTT
  source 1..20: mol_type = other DNA
cctcttattagcaggatgat

SEQ ID NO: 68149 - DNA, 20 bp, synthetic construct
  misc_feature 1..20: note = Description of Artificial Sequence: Synthetic oligonucleotide
  misc_feature 1..20: note = Target: SCN10A; (+) strand; PAM type: YTN; PAM sequence: TTC
  source 1..20: mol_type = other DNA
ctcttattagcaggatgatc

SEQ ID NO: 68150 - DNA, 20 bp, synthetic construct
  misc_feature 1..20: note = Description of Artificial Sequence: Synthetic oligonucleotide
  misc_feature 1..20: note = Target: SCN10A; (+) strand; PAM type: YTN; PAM sequence: CTC
  source 1..20: mol_type = other DNA
ttattagcaggatgatcttg

SEQ ID NO: 68151 - DNA, 20 bp, synthetic construct
  misc_feature 1..20: note = Description of Artificial Sequence: Synthetic oligonucleotide
  misc_feature 1..20: note = Target: SCN10A; (+) strand; PAM type: YTN; PAM sequence: CTT
  source 1..20: mol_type = other DNA
attagcaggatgatcttgga

SEQ ID NO: 68152 - DNA, 20 bp, synthetic construct
  misc_feature 1..20: note = Description of Artificial Sequence: Synthetic oligonucleotide
  misc_feature 1..20: note = Target: SCN10A; (+) strand; PAM type: YTN; PAM sequence: TTA
  source 1..20: mol_type = other DNA
ttagcaggatgatcttggac

SEQ ID NO: 68153 - DNA, 20 bp, synthetic construct
  misc_feature 1..20: note = Description of Artificial Sequence: Synthetic oligonucleotide
  misc_feature 1..20: note = Target: SCN10A; (+) strand; PAM type: YTN; PAM sequence: TTA
  source 1..20: mol_type = other DNA
gcaggatgatcttggacact

SEQ ID NO: 68154 - DNA, 20 bp, synthetic construct
  misc_feature 1..20: note = Description of Artificial Sequence: Synthetic oligonucleotide
  misc_feature 1..20: note = Target: SCN10A; (+) strand; PAM type: YTN; PAM sequence: CTT
  source 1..20: mol_type = other DNA
ggacacttggtctgtttagg

SEQ ID NO: 68155 - DNA, 20 bp, synthetic construct
  misc_feature 1..20: note = Description of Artificial Sequence: Synthetic oligonucleotide
  misc_feature 1..20: note = Target: SCN10A; (+) strand; PAM type: YTN; PAM sequence: TTG
  source 1..20: mol_type = other DNA
gacacttggtctgtttaggt

SEQ ID NO: 68156 - DNA, 20 bp, synthetic construct
  misc_feature 1..20: note = Description of Artificial Sequence: Synthetic oligonucleotide
  misc_feature 1..20: note = Target: SCN10A; (+) strand; PAM type: YTN; PAM sequence: CTT
  source 1..20: mol_type = other DNA
ggtctgtttaggtattggtt

SEQ ID NO: 68157 - DNA, 20 bp, synthetic construct
  misc_feature 1..20: note = Description of Artificial Sequence: Synthetic oligonucleotide
  misc_feature 1..20: note = Target: SCN10A; (+) strand; PAM type: YTN; PAM sequence: TTG
  source 1..20: mol_type = other DNA
gtctgtttaggtattggttt

SEQ ID NO: 68158 - DNA, 20 bp, synthetic construct
  misc_feature 1..20: note = Description of Artificial Sequence: Synthetic oligonucleotide
  misc_feature 1..20: note = Target: SCN10A; (+) strand; PAM type: YTN; PAM sequence: CTG
  source 1..20: mol_type = other DNA
tttaggtattggtttctgtt

SEQ ID NO: 68159 - DNA, 20 bp, synthetic construct
  misc_feature 1..20: note = Description of Artificial Sequence: Synthetic oligonucleotide
  misc_feature 1..20: note = Target: SCN10A; (+) strand; PAM type: YTN; PAM sequence: TTT
  source 1..20: mol_type = other DNA
aggtattggtttctgttatc

SEQ ID NO: 68160 - DNA, 20 bp, synthetic construct
  misc_feature 1..20: note = Description of Artificial Sequence: Synthetic oligonucleotide
  misc_feature 1..20: note = Target: SCN10A; (+) strand; PAM type: YTN; PAM sequence: TTA
  source 1..20: mol_type = other DNA
ggtattggtttctgttatcc

SEQ ID NO: 68161 - DNA, 20 bp, synthetic construct
  misc_feature 1..20: note = Description of Artificial Sequence: Synthetic oligonucleotide
  misc_feature 1..20: note = Target: SCN10A; (+) strand; PAM type: YTN; PAM sequence: TTG
  source 1..20: mol_type = other DNA
gtttctgttatccataaaac

SEQ ID NO: 68162 - DNA, 20 bp, synthetic construct
  misc_feature 1..20: note = Description of Artificial Sequence: Synthetic oligonucleotide
  misc_feature 1..20: note = Target: SCN10A; (+) strand; PAM type: YTN; PAM sequence: TTT
  source 1..20: mol_type = other DNA
ctgttatccataaaacgggg

SEQ ID NO: 68163 - DNA, 20 bp, synthetic construct
  misc_feature 1..20: note = Description of Artificial Sequence: Synthetic oligonucleotide
  misc_feature 1..20: note = Target: SCN10A; (+) strand; PAM type: YTN; PAM sequence: TTC
  source 1..20: mol_type = other DNA
tgttatccataaaacgggga

SEQ ID NO: 68164 - DNA, 20 bp, synthetic construct
  misc_feature 1..20: note = Description of Artificial Sequence: Synthetic oligonucleotide
  misc_feature 1..20: note = Target: SCN10A; (+) strand; PAM type: YTN; PAM sequence: CTG
  source 1..20: mol_type = other DNA
ttatccataaaacggggacg

SEQ ID NO: 68165 - DNA, 20 bp, synthetic construct
  misc_feature 1..20: note = Description of Artificial Sequence: Synthetic oligonucleotide
  misc_feature 1..20: note = Target: SCN10A; (+) strand; PAM type: YTN; PAM sequence: TTA
  source 1..20: mol_type = other DNA
tccataaaacggggacgcta

SEQ ID NO: 68166 - DNA, 20 bp, synthetic construct
  misc_feature 1..20: note = Description of Artificial Sequence: Synthetic oligonucleotide
  misc_feature 1..20: note = Target: SCN10A; (+) strand; PAM type: YTN; PAM sequence: CTA
  source 1..20: mol_type = other DNA
atactttcacgtcagaattt

SEQ ID NO: 68167 - DNA, 20 bp, synthetic construct
  misc_feature 1..20: note = Description of Artificial Sequence: Synthetic oligonucleotide
  misc_feature 1..20: note = Target: SCN10A; (+) strand; PAM type: YTN; PAM sequence: CTT
  source 1..20: mol_type = other DNA
tcacgtcagaatttcataca

SEQ ID NO: 68168 - DNA, 20 bp, synthetic construct
  misc_feature 1..20: note = Description of Artificial Sequence: Synthetic oligonucleotide
  misc_feature 1..20: note = Target: SCN10A; (+) strand; PAM type: YTN; PAM sequence: TTT
  source 1..20: mol_type = other DNA
cacgtcagaatttcatacac

SEQ ID NO: 68169 - DNA, 20 bp, synthetic construct
  misc_feature 1..20: note = Description of Artificial Sequence: Synthetic oligonucleotide
  misc_feature 1..20: note = Target: SCN10A; (+) strand; PAM type: YTN; PAM sequence: TTC
  source 1..20: mol_type = other DNA
acgtcagaatttcatacaca

SEQ ID NO: 68170 - DNA, 20 bp, synthetic construct
  misc_feature 1..20: note = Description of Artificial Sequence: Synthetic oligonucleotide
  misc_feature 1..20: note = Target: SCN10A; (+) strand; PAM type: YTN; PAM sequence: TTT
  source 1..20: mol_type = other DNA
catacacaggggagtggcct

SEQ ID NO: 68171 - DNA, 20 bp, synthetic construct
  misc_feature 1..20: note = Description of Artificial Sequence: Synthetic oligonucleotide
  misc_feature 1..20: note = Target: SCN10A; (+) strand; PAM type: YTN; PAM sequence: TTC
  source 1..20: mol_type = other DNA
atacacaggggagtggcctg

SEQ ID NO: 68172 - DNA, 20 bp, synthetic construct
  misc_feature 1..20: note = Description of Artificial Sequence: Synthetic oligonucleotide
  misc_feature 1..20: note = Target: SCN10A; (+) strand; PAM type: YTN; PAM sequence: CTG
  source 1..20: mol_type = other DNA
gggaaggcagctgactgccc

SEQ ID NO: 68173 - DNA, 20 bp, synthetic construct
  misc_feature 1..20: note = Description of Artificial Sequence: Synthetic oligonucleotide
  misc_feature 1..20: note = Target: SCN10A; (+) strand; PAM type: YTN; PAM sequence: CTG
  source 1..20: mol_type = other DNA
actgcccagacacgatacta

SEQ ID NO: 68174 - DNA, 20 bp, synthetic construct
  misc_feature 1..20: note = Description of Artificial Sequence: Synthetic oligonucleotide
  misc_feature 1..20: note = Target: SCN10A; (+) strand; PAM type: YTN; PAM sequence: CTG
  source 1..20: mol_type = other DNA
cccagacacgatactataag

SEQ ID NO: 68175 - DNA, 20 bp, synthetic construct
  misc_feature 1..20: note = Description of Artificial Sequence: Synthetic oligonucleotide
  misc_feature 1..20: note = Target: SCN10A; (+) strand; PAM type: YTN; PAM sequence: CTA
  source 1..20: mol_type = other DNA
taagctctttgccagttcat

SEQ ID NO: 68176 - DNA, 20 bp, synthetic construct
  misc_feature 1..20: note = Description of Artificial Sequence: Synthetic oligonucleotide
  misc_feature 1..20: note = Target: SCN10A; (+) strand; PAM type: YTN; PAM sequence: CTC
  source 1..20: mol_type = other DNA
tttgccagttcataccaggg

SEQ ID NO: 68177 - DNA, 20 bp, synthetic construct
  misc_feature 1..20: note = Description of Artificial Sequence: Synthetic oligonucleotide
  misc_feature 1..20: note = Target: SCN10A; (+) strand; PAM type: YTN; PAM sequence: CTT
  source 1..20: mol_type = other DNA
tgccagttcataccagggaa

SEQ ID NO: 68178 - DNA, 20 bp, synthetic construct
  misc_feature 1..20: note = Description of Artificial Sequence: Synthetic oligonucleotide
  misc_feature 1..20: note = Target: SCN10A; (+) strand; PAM type: YTN; PAM sequence: TTT
  source 1..20: mol_type = other DNA
gccagttcataccagggaaa

SEQ ID NO: 68179 - DNA, 20 bp, synthetic construct
  misc_feature 1..20: note = Description of Artificial Sequence: Synthetic oligonucleotide
  misc_feature 1..20: note = Target: SCN10A; (+) strand; PAM type: YTN; PAM sequence: TTG
  source 1..20: mol_type = other DNA
ccagttcataccagggaaat

SEQ ID NO: 68180 - DNA, 20 bp, synthetic construct
  misc_feature 1..20: note = Description of Artificial Sequence: Synthetic oligonucleotide
  misc_feature 1..20: note = Target: SCN10A; (+) strand; PAM type: YTN; PAM sequence: TTC
  source 1..20: mol_type = other DNA
ataccagggaaatgagagtc

SEQ ID NO: 68181 - DNA, 20 bp, synthetic construct
  misc_feature 1..20: note = Description of Artificial Sequence: Synthetic oligonucleotide
  misc_feature 1..20: note = Target: SCN10A; (+) strand; PAM type: YTN; PAM sequence: CTT
  source 1..20: mol_type = other DNA
aaaacctgagcctgttggca

SEQ ID NO: 68182 - DNA, 20 bp, synthetic construct
  misc_feature 1..20: note = Description of Artificial Sequence: Synthetic oligonucleotide
  misc_feature 1..20: note = Target: SCN10A; (+) strand; PAM type: YTN; PAM sequence: TTA
  source 1..20: mol_type = other DNA
aaacctgagcctgttggcat

SEQ ID NO: 68183 - DNA, 20 bp, synthetic construct
  misc_feature 1..20: note = Description of Artificial Sequence: Synthetic oligonucleotide
  misc_feature 1..20: note = Target: SCN10A; (+) strand; PAM type: YTN; PAM sequence: CTG
  source 1..20: mol_type = other DNA
agcctgttggcatcatctgc

SEQ ID NO: 68184 - DNA, 20 bp, synthetic construct
  misc_feature 1..20: note = Description of Artificial Sequence: Synthetic oligonucleotide
  misc_feature 1..20: note = Target: SCN10A; (+) strand; PAM type: YTN; PAM sequence: CTG
  source 1..20: mol_type = other DNA
ttggcatcatctgcagagtt

SEQ ID NO: 68185 - DNA, 20 bp, synthetic construct
  misc_feature 1..20: note = Description of Artificial Sequence: Synthetic oligonucleotide
  misc_feature 1..20: note = Target: SCN10A; (+) strand; PAM type: YTN; PAM sequence: TTG
  source 1..20: mol_type = other DNA
gcatcatctgcagagttgtc

SEQ ID NO: 68186 - DNA, 20 bp, synthetic construct
  misc_feature 1..20: note = Description of Artificial Sequence: Synthetic oligonucleotide
  misc_feature 1..20: note = Target: SCN10A; (+) strand; PAM type: YTN; PAM sequence: CTG
  source 1..20: mol_type = other DNA
cagagttgtctatcaaggga

SEQ ID NO: 68187 - DNA, 20 bp, synthetic construct
  misc_feature 1..20: note = Description of Artificial Sequence: Synthetic oligonucleotide
  misc_feature 1..20: note = Target: SCN10A; (+) strand; PAM type: YTN; PAM sequence: TTG
  source 1..20: mol_type = other DNA
tctatcaagggaggtctcac

SEQ ID NO: 68188 - DNA, 20 bp, synthetic construct
  misc_feature 1..20: note = Description of Artificial Sequence: Synthetic oligonucleotide
  misc_feature 1..20: note = Target: SCN10A; (+) strand; PAM type: YTN; PAM sequence: CTA
  source 1..20: mol_type = other DNA
tcaagggaggtctcacatta

SEQ ID NO: 68189 - DNA, 20 bp, synthetic construct
  misc_feature 1..20: note = Description of Artificial Sequence: Synthetic oligonucleotide
  misc_feature 1..20: note = Target: SCN10A; (+) strand; PAM type: YTN; PAM sequence: CTC
  source 1..20: mol_type = other DNA
acattagccaagttcactga

SEQ ID NO: 68190 - DNA, 20 bp, synthetic construct
  misc_feature 1..20: note = Description of Artificial Sequence: Synthetic oligonucleotide
  misc_feature 1..20: note = Target: SCN10A; (+) strand; PAM type: YTN; PAM sequence: TTA
  source 1..20: mol_type = other DNA
gccaagttcactgattaatt

SEQ ID NO: 68191 - DNA, 20 bp, synthetic construct
  misc_feature 1..20: note = Description of Artificial Sequence: Synthetic oligonucleotide
  misc_feature 1..20: note = Target: SCN10A; (+) strand; PAM type: YTN; PAM sequence: TTC
  source 1..20: mol_type = other DNA
actgattaattatatgtaac

SEQ ID NO: 68192 - DNA, 20 bp, synthetic construct
  misc_feature 1..20: note = Description of Artificial Sequence: Synthetic oligonucleotide
  misc_feature 1..20: note = Target: SCN10A; (+) strand; PAM type: YTN; PAM sequence: CTG
  source 1..20: mol_type = other DNA
attaattatatgtaacagtg

SEQ ID NO: 68193 - DNA, 20 bp, synthetic construct
  misc_feature 1..20: note = Description of Artificial Sequence: Synthetic oligonucleotide
  misc_feature 1..20: note = Target: SCN10A; (+) strand; PAM type: YTN; PAM sequence: TTA
  source 1..20: mol_type = other DNA
attatatgtaacagtggaaa

SEQ ID NO: 68194 - DNA, 20 bp, synthetic construct
  misc_feature 1..20: note = Description of Artificial Sequence: Synthetic oligonucleotide
  misc_feature 1..20: note = Target: SCN10A; (+) strand; PAM type: YTN; PAM sequence: TTA
  source 1..20: mol_type = other DNA
tatgtaacagtggaaataac

SEQ ID NO: 68195 - DNA, 20 bp, synthetic construct
  misc_feature 1..20: note = Description of Artificial Sequence: Synthetic oligonucleotide
  misc_feature 1..20: note = Target: SCN10A; (+) strand; PAM type: YTN; PAM sequence: CTT
  source 1..20: mol_type = other DNA
tccacttactgagcactttc

SEQ ID NO: 68196 - DNA, 20 bp, synthetic construct
  misc_feature 1..20: note = Description of Artificial Sequence: Synthetic oligonucleotide
  misc_feature 1..20: note = Target: SCN10A; (+) strand; PAM type: YTN; PAM sequence: TTT
  source 1..20: mol_type = other DNA
ccacttactgagcactttct

SEQ ID NO: 68197 - DNA, 20 bp, synthetic construct
  misc_feature 1..20: note = Description of Artificial Sequence: Synthetic oligonucleotide
  misc_feature 1..20: note = Target: SCN10A; (+) strand; PAM type: YTN; PAM sequence: TTC
  source 1..20: mol_type = other DNA
cacttactgagcactttctg

SEQ ID NO: 68198 - DNA, 20 bp, synthetic construct
  misc_feature 1..20: note = Description of Artificial Sequence: Synthetic oligonucleotide
  misc_feature 1..20: note = Target: SCN10A; (+) strand; PAM type: YTN; PAM sequence: CTT
  source 1..20: mol_type = other DNA
actgagcactttctgtgttc

SEQ ID NO: 68199 - DNA, 20 bp, synthetic construct
  misc_feature 1..20: note = Description of Artificial Sequence: Synthetic oligonucleotide
  misc_feature 1..20: note = Target: SCN10A; (+) strand; PAM type: YTN; PAM sequence: TTA
  source 1..20: mol_type = other DNA
ctgagcactttctgtgttct

SEQ ID NO: 68200 - DNA, 20 bp, synthetic construct
  misc_feature 1..20: note = Description of Artificial Sequence: Synthetic oligonucleotide
  misc_feature 1..20: note = Target: SCN10A; (+) strand; PAM type: YTN; PAM sequence: CTG
  source 1..20: mol_type = other DNA
agcactttctgtgttcttct

SEQ ID NO: 68201 - DNA, 20 bp, synthetic construct
  misc_feature 1..20: note = Description of Artificial Sequence: Synthetic oligonucleotide
  misc_feature 1..20: note = Target: SCN10A; (+) strand; PAM type: YTN; PAM sequence: CTT
  source 1..20: mol_type = other DNA
tctgtgttcttctctctccc

SEQ ID NO: 68202 - DNA, 20 bp, synthetic construct
  misc_feature 1..20: note = Description of Artificial Sequence: Synthetic oligonucleotide
  misc_feature 1..20: note = Target: SCN10A; (+) strand; PAM type: YTN; PAM sequence: TTT
  source 1..20: mol_type = other DNA
ctgtgttcttctctctccct

SEQ ID NO: 68203 - DNA, 20 bp, synthetic construct
  misc_feature 1..20: note = Description of Artificial Sequence: Synthetic oligonucleotide
  misc_feature 1..20: note = Target: SCN10A; (+) strand; PAM type: YTN; PAM sequence: TTC
  source 1..20: mol_type = other DNA
tgtgttcttctctctccctt

SEQ ID NO: 68204 - DNA, 20 bp, synthetic construct
  misc_feature 1..20: note = Description of Artificial Sequence: Synthetic oligonucleotide
  misc_feature 1..20: note = Target: SCN10A; (+) strand; PAM type: YTN; PAM sequence: CTG
  source 1..20: mol_type = other DNA
tgttcttctctctcccttta

SEQ ID NO: 68205 - DNA, 20 bp, synthetic construct
  misc_feature 1..20: note = Description of Artificial Sequence: Synthetic oligonucleotide
  misc_feature 1..20: note = Target: SCN10A; (+) strand; PAM type: YTN; PAM sequence: TTC
  source 1..20: mol_type = other DNA
ttctctctccctttaagtgc

SEQ ID NO: 68206 - DNA, 20 bp, synthetic construct
  misc_feature 1..20: note = Description of Artificial Sequence: Synthetic oligonucleotide
  misc_feature 1..20: note = Target: SCN10A; (+) strand; PAM type: YTN; PAM sequence: CTT
  source 1..20: mol_type = other DNA
ctctctccctttaagtgctt

SEQ ID NO: 68207 - DNA, 20 bp, synthetic construct
  misc_feature 1..20: note = Description of Artificial Sequence: Synthetic oligonucleotide
  misc_feature 1..20: note = Target: SCN10A; (+) strand; PAM type: YTN; PAM sequence: TTC
  source 1..20: mol_type = other DNA
tctctccctttaagtgcttt

SEQ ID NO: 68208 - DNA, 20 bp, synthetic construct
  misc_feature 1..20: note = Description of Artificial Sequence: Synthetic oligonucleotide
  misc_feature 1..20: note = Target: SCN10A; (+) strand; PAM type: YTN; PAM sequence: CTC
  source 1..20: mol_type = other DNA
tctccctttaagtgctttac

SEQ ID NO: 68209 - DNA, 20 bp, synthetic construct
  misc_feature 1..20: note = Description of Artificial Sequence: Synthetic oligonucleotide
  misc_feature 1..20: note = Target: SCN10A; (+) strand; PAM type: YTN; PAM sequence: CTC
  source 1..20: mol_type = other DNA
tccctttaagtgctttacaa

SEQ ID NO: 68210 - DNA, 20 bp, synthetic construct
  misc_feature 1..20: note = Description of Artificial Sequence: Synthetic oligonucleotide
  misc_feature 1..20: note = Target: SCN10A; (+) strand; PAM type: YTN; PAM sequence: CTC
  source 1..20: mol_type = other DNA
cctttaagtgctttacaaac

SEQ ID NO: 68211 - DNA, 20 bp, synthetic construct
  misc_feature 1..20: note = Description of Artificial Sequence: Synthetic oligonucleotide
  misc_feature 1..20: note = Target: SCN10A; (+) strand; PAM type: YTN; PAM sequence: CTT
  source 1..20: mol_type = other DNA
taagtgctttacaaacacta

SEQ ID NO: 68212 - DNA, 20 bp, synthetic construct
  misc_feature 1..20: note = Description of Artificial Sequence: Synthetic oligonucleotide
  misc_feature 1..20: note = Target: SCN10A; (+) strand; PAM type: YTN; PAM sequence: TTT
  source 1..20: mol_type = other DNA
aagtgctttacaaacactat

SEQ ID NO: 68213 - DNA, 20 bp, synthetic construct
  misc_feature 1..20: note = Description of Artificial Sequence: Synthetic oligonucleotide
  misc_feature 1..20: note = Target: SCN10A; (+) strand; PAM type: YTN; PAM sequence: TTA
  source 1..20: mol_type = other DNA
agtgctttacaaacactata

SEQ ID NO: 68214 - DNA, 20 bp, synthetic construct
  misc_feature 1..20: note = Description of Artificial Sequence: Synthetic oligonucleotide
  misc_feature 1..20: note = Target: SCN10A; (+) strand; PAM type: YTN; PAM sequence: CTT
  source 1..20: mol_type = other DNA
tacaaacactataatttaat

SEQ ID NO: 68215 - DNA, 20 bp, synthetic construct
  misc_feature 1..20: note = Description of Artificial Sequence: Synthetic oligonucleotide
  misc_feature 1..20: note = Target: SCN10A; (+) strand; PAM type: YTN; PAM sequence: TTT
  source 1..20: mol_type = other DNA
acaaacactataatttaatc

SEQ ID NO: 68216 - DNA, 20 bp, synthetic construct
  misc_feature 1..20: note = Description of Artificial Sequence: Synthetic oligonucleotide
  misc_feature 1..20: note = Target: SCN10A; (+) strand; PAM type: YTN; PAM sequence: TTA
  source 1..20: mol_type = other DNA
caaacactataatttaatca

SEQ ID NO: 68217 - DNA, 20 bp, synthetic construct
  misc_feature 1..20: note = Description of Artificial Sequence: Synthetic oligonucleotide
  misc_feature 1..20: note = Target: SCN10A; (+) strand; PAM type: YTN; PAM sequence: CTA
  source 1..20: mol_type = other DNA
taatttaatcactcaatgtt

SEQ ID NO: 68218 - DNA, 20 bp, synthetic construct
  misc_feature 1..20: note = Description of Artificial Sequence: Synthetic oligonucleotide
  misc_feature 1..20: note = Target: SCN10A; (+) strand; PAM type: YTN; PAM sequence: TTT
  source 1..20: mol_type = other DNA
aatcactcaatgttctttct

SEQ ID NO: 68219 - DNA, 20 bp, synthetic construct
  misc_feature 1..20: note = Description of Artificial Sequence: Synthetic oligonucleotide
  misc_feature 1..20: note = Target: SCN10A; (+) strand; PAM type: YTN; PAM sequence: TTA
  source 1..20: mol_type = other DNA
atcactcaatgttctttctt

SEQ ID NO: 68220 - DNA, 20 bp, synthetic construct
  misc_feature 1..20: note = Description of Artificial Sequence: Synthetic oligonucleotide
  misc_feature 1..20: note = Target: SCN10A; (+) strand; PAM type: YTN; PAM sequence: CTC
  source 1..20: mol_type = other DNA
aatgttctttctttacagat

SEQ ID NO: 68221 - DNA, 20 bp, synthetic construct
  misc_feature 1..20: note = Description of Artificial Sequence: Synthetic oligonucleotide
  misc_feature 1..20: note = Target: SCN10A; (+) strand; PAM type: YTN; PAM sequence: TTC
  source 1..20: mol_type = other DNA
tttctttacagataaggaat

SEQ ID NO: 68222 - DNA, 20 bp, synthetic construct
  misc_feature 1..20: note = Description of Artificial Sequence: Synthetic oligonucleotide
  misc_feature 1..20: note = Target: SCN10A; (+) strand; PAM type: YTN; PAM sequence: CTT
  source 1..20: mol_type = other DNA
tctttacagataaggaatct

SEQ ID NO: 68223 - DNA, 20 bp, synthetic construct
  misc_feature 1..20: note = Description of Artificial Sequence: Synthetic oligonucleotide
  misc_feature 1..20: note = Target: SCN10A; (+) strand; PAM type: YTN; PAM sequence: TTT
  source 1..20: mol_type = other DNA
ctttacagataaggaatctg

SEQ ID NO: 68224 - DNA, 20 bp, synthetic construct
  misc_feature 1..20: note = Description of Artificial Sequence: Synthetic oligonucleotide
  misc_feature 1..20: note = Target: SCN10A; (+) strand; PAM type: YTN; PAM sequence: TTC
  source 1..20: mol_type = other DNA
tttacagataaggaatctgg

SEQ ID NO: 68225 - DNA, 20 bp, synthetic construct
  misc_feature 1..20: note = Description of Artificial Sequence: Synthetic oligonucleotide
  misc_feature 1..20: note = Target: SCN10A; (+) strand; PAM type: YTN; PAM sequence: CTT
  source 1..20: mol_type = other DNA
tacagataaggaatctgggg

SEQ ID NO: 68226 - DNA, 20 bp, synthetic construct
  misc_feature 1..20: note = Description of Artificial Sequence: Synthetic oligonucleotide
  misc_feature 1..20: note = Target: SCN10A; (+) strand; PAM type: YTN; PAM sequence: TTT
  source 1..20: mol_type = other DNA
acagataaggaatctggggg

SEQ ID NO: 68227 - DNA, 20 bp, synthetic construct
  misc_feature 1..20: note = Description of Artificial Sequence: Synthetic oligonucleotide
  misc_feature 1..20: note = Target: SCN10A; (+) strand; PAM type: YTN; PAM sequence: TTA
  source 1..20: mol_type = other DNA
cagataaggaatctgggggt

SEQ ID NO: 68228 - DNA, 20 bp, synthetic construct
  misc_feature 1..20: note = Description of Artificial Sequence: Synthetic oligonucleotide
  misc_feature 1..20: note = Target: SCN10A; (+) strand; PAM type: YTN; PAM sequence: CTG
  source 1..20: mol_type = other DNA
ggggtcagaaagaagtcagt

SEQ ID NO: 68229 - DNA, 20 bp, synthetic construct
  misc_feature 1..20: note = Description of Artificial Sequence: Synthetic oligonucleotide
  misc_feature 1..20: note = Target: SCN10A; (+) strand; PAM type: YTN; PAM sequence: TTG
  source 1..20: mol_type = other DNA
cctaaaactacgcaggtgtc

SEQ ID NO: 68230 - DNA, 20 bp, synthetic construct
  misc_feature 1..20: note = Description of Artificial Sequence: Synthetic oligonucleotide
  misc_feature 1..20: note = Target: SCN10A; (+) strand; PAM type: YTN; PAM sequence: CTA
  source 1..20: mol_type = other DNA
aaactacgcaggtgtcaata

SEQ ID NO: 68231 - DNA, 20 bp, synthetic construct
  misc_feature 1..20: note = Description of Artificial Sequence: Synthetic oligonucleotide
  misc_feature 1..20: note = Target: SCN10A; (+) strand; PAM type: YTN; PAM sequence: CTA
  source 1..20: mol_type = other DNA
cgcaggtgtcaatatattta

SEQ ID NO: 68232 - DNA, 20 bp, synthetic construct
  misc_feature 1..20: note = Description of Artificial Sequence: Synthetic oligonucleotide
  misc_feature 1..20: note = Target: SCN10A; (+) strand; PAM type: YTN; PAM sequence: TTT
  source 1..20: mol_type = other DNA
attaaaaggagaaatataac

SEQ ID NO: 68233 - DNA, 20 bp, synthetic construct
  misc_feature 1..20: note = Description of Artificial Sequence: Synthetic oligonucleotide
  misc_feature 1..20: note = Target: SCN10A; (+) strand; PAM type: YTN; PAM sequence: TTA
  source 1..20: mol_type = other DNA
ttaaaaggagaaatataact

SEQ ID NO: 68234 - DNA, 20 bp, synthetic construct
  misc_feature 1..20: note = Description of Artificial Sequence: Synthetic oligonucleotide
  misc_feature 1..20: note = Target: SCN10A; (+) strand; PAM type: YTN; PAM sequence: TTA
  source 1..20: mol_type = other DNA
aaaggagaaatataactgtc

SEQ ID NO: 68235 - DNA, 20 bp, synthetic construct
  misc_feature 1..20: note = Description of Artificial Sequence: Synthetic oligonucleotide
  misc_feature 1..20: note = Target: SCN10A; (+) strand; PAM type: YTN; PAM sequence: CTG
  source 1..20: mol_type = other DNA
tcaagtagcccaatacttga

SEQ ID NO: 68236 - DNA, 20 bp, synthetic construct
  misc_feature 1..20: note = Description of Artificial Sequence: Synthetic oligonucleotide
  misc_feature 1..20: note = Target: SCN10A; (+) strand; PAM type: YTN; PAM sequence: CTT
  source 1..20: mol_type = other DNA
gagtcagcctagcctcctcc

SEQ ID NO: 68237 - DNA, 20 bp, synthetic construct
  misc_feature 1..20: note = Description of Artificial Sequence: Synthetic oligonucleotide
  misc_feature 1..20: note = Target: SCN10A; (+) strand; PAM type: YTN; PAM sequence: TTG
  source 1..20: mol_type = other DNA
agtcagcctagcctcctcct

SEQ ID NO: 68238 - DNA, 20 bp, synthetic construct
  misc_feature 1..20: note = Description of Artificial Sequence: Synthetic oligonucleotide
  misc_feature 1..20: note = Target: SCN10A; (+) strand; PAM type: YTN; PAM sequence: CTA
  source 1..20: mol_type = other DNA
gcctcctcctgaagatggcc

SEQ ID NO: 68239 - DNA, 20 bp, synthetic construct
  misc_feature 1..20: note = Description of Artificial Sequence: Synthetic oligonucleotide
  misc_feature 1..20: note = Target: SCN10A; (+) strand; PAM type: YTN; PAM sequence: CTC
  source 1..20: mol_type = other DNA
ctcctgaagatggcctatga

SEQ ID NO: 68240 - DNA, 20 bp, synthetic construct
  misc_feature 1..20: note = Description of Artificial Sequence: Synthetic oligonucleotide
  misc_feature 1..20: note = Target: SCN10A; (+) strand; PAM type: YTN; PAM sequence: CTC
  source 1..20: mol_type = other DNA
ctgaagatggcctatgaagg

SEQ ID NO: 68241 - DNA, 20 bp, synthetic construct
  misc_feature 1..20: note = Description of Artificial Sequence: Synthetic oligonucleotide
  misc_feature 1..20: note = Target: SCN10A; (+) strand; PAM type: YTN; PAM sequence: CTG
  source 1..20: mol_type = other DNA
aagatggcctatgaaggaag

SEQ ID NO: 68242 - DNA, 20 bp, synthetic construct
  misc_feature 1..20: note = Description of Artificial Sequence: Synthetic oligonucleotide
  misc_feature 1..20: note = Target: SCN10A; (+) strand; PAM type: YTN; PAM sequence: CTA
  source 1..20: mol_type = other DNA
tgaaggaaggccagattaaa

SEQ ID NO: 68243 - DNA, 20 bp, synthetic construct
  misc_feature 1..20: note = Description of Artificial Sequence: Synthetic oligonucleotide
  misc_feature 1..20: note = Target: SCN10A; (+) strand; PAM type: YTN; PAM sequence: TTA
  source 1..20: mol_type = other DNA
aaaatgactgcctggtgagt

SEQ ID NO: 68244 - DNA, 20 bp, synthetic construct
  misc_feature 1..20: note = Description of Artificial Sequence: Synthetic oligonucleotide
  misc_feature 1..20: note = Target: SCN10A; (+) strand; PAM type: YTN; PAM sequence: CTG
  source 1..20: mol_type = other DNA
cctggtgagtattgaggtgg

SEQ ID NO: 68245 - DNA, 20 bp, synthetic construct
  misc_feature 1..20: note = Description of Artificial Sequence: Synthetic oligonucleotide
  misc_feature 1..20: note = Target: SCN10A; (+) strand; PAM type: YTN; PAM sequence: CTG
  source 1..20: mol_type = other DNA
gtgagtattgaggtgggaat

SEQ ID NO: 68246 - DNA, 20 bp, synthetic construct
  misc_feature 1..20: note = Description of Artificial Sequence: Synthetic oligonucleotide
  misc_feature 1..20: note = Target: SCN10A; (+) strand; PAM type: YTN; PAM sequence: TTG
  source 1..20: mol_type = other DNA
aggtgggaatgctgaactcc

SEQ ID NO: 68247 - DNA, 20 bp, synthetic construct
  misc_feature 1..20: note = Description of Artificial Sequence: Synthetic oligonucleotide
  misc_feature 1..20: note = Target: SCN10A; (+) strand; PAM type: YTN; PAM sequence: CTG
  source 1..20: mol_type = other DNA
aactccttcctctctctcat

SEQ ID NO: 68248 - DNA, 20 bp, synthetic construct
  misc_feature 1..20: note = Description of Artificial Sequence: Synthetic oligonucleotide
  misc_feature 1..20: note = Target: SCN10A; (+) strand; PAM type: YTN; PAM sequence: CTC
  source 1..20: mol_type = other DNA
cttcctctctctcataatag

SEQ ID NO: 68249 - DNA, 20 bp, synthetic construct
  misc_feature 1..20: note = Description of Artificial Sequence: Synthetic oligonucleotide
  misc_feature 1..20: note = Target: SCN10A; (+) strand; PAM type: YTN; PAM sequence: CTT
  source 1..20: mol_type = other DNA
cctctctctcataataggag

SEQ ID NO: 68250 - DNA, 20 bp, synthetic construct
  misc_feature 1..20: note = Description of Artificial Sequence: Synthetic oligonucleotide
  misc_feature 1..20: note = Target: SCN10A; (+) strand; PAM type: YTN; PAM sequence: TTC
  source 1..20: mol_type = other DNA
ctctctctcataataggagg

SEQ ID NO: 68251 - DNA, 20 bp, synthetic construct
  misc_feature 1..20: note = Description of Artificial Sequence: Synthetic oligonucleotide
  misc_feature 1..20: note = Target: SCN10A; (+) strand; PAM type: YTN; PAM sequence: CTC
  source 1..20: mol_type = other DNA
tctctcataataggaggatg

SEQ ID NO: 68252 - DNA, 20 bp, synthetic construct
  misc_feature 1..20: note = Description of Artificial Sequence: Synthetic oligonucleotide
  misc_feature 1..20: note = Target: SCN10A; (+) strand; PAM type: YTN; PAM sequence: CTC
  source 1..20: mol_type = other DNA
tctcataataggaggatgag

SEQ ID NO: 68253 - DNA, 20 bp, synthetic construct
  misc_feature 1..20: note = Description of Artificial Sequence: Synthetic oligonucleotide
  misc_feature 1..20: note = Target: SCN10A; (+) strand; PAM type: YTN; PAM sequence: CTC
  source 1..20: mol_type = other DNA
tcataataggaggatgagtc

SEQ ID NO: 68254 - DNA, 20 bp, synthetic construct
  misc_feature 1..20: note = Description of Artificial Sequence: Synthetic oligonucleotide
  misc_feature 1..20: note = Target: SCN10A; (+) strand; PAM type: YTN; PAM sequence: CTC
  source 1..20: mol_type = other DNA
ataataggaggatgagtcga

SEQ ID NO: 68255 - DNA, 20 bp, synthetic construct
  misc_feature 1..20: note = Description of Artificial Sequence: Synthetic oligonucleotide
  misc_feature 1..20: note = Target: SCN10A; (+) strand; PAM type: YTN; PAM sequence: CTG
  source 1..20: mol_type = other DNA
tcagctcagggagcgtaaag

SEQ ID NO: 68256 - DNA, 20 bp, synthetic construct
  misc_feature 1..20: note = Description of Artificial Sequence: Synthetic oligonucleotide
  misc_feature 1..20: note = Target: SCN10A; (+) strand; PAM type: YTN; PAM sequence: CTC
  source 1..20: mol_type = other DNA
agggagcgtaaagtgctctc

SEQ ID NO: 68257 - DNA, 20 bp, synthetic construct
  misc_feature 1..20: note = Description of Artificial Sequence: Synthetic oligonucleotide
  misc_feature 1..20: note = Target: SCN10A; (+) strand; PAM type: YTN; PAM sequence: CTC
  source 1..20: mol_type = other DNA
tcatccaccctagcagagat

SEQ ID NO: 68258 - DNA, 20 bp, synthetic construct
  misc_feature 1..20: note = Description of Artificial Sequence: Synthetic oligonucleotide
  misc_feature 1..20: note = Target: SCN10A; (+) strand; PAM type: YTN; PAM sequence: CTC
  source 1..20: mol_type = other DNA
atccaccctagcagagatgg

SEQ ID NO: 68259 - DNA, 20 bp, synthetic construct
  misc_feature 1..20: note = Description of Artificial Sequence: Synthetic oligonucleotide
  misc_feature 1..20: note = Target: SCN10A; (+) strand; PAM type: YTN; PAM sequence: CTA
  source 1..20: mol_type = other DNA
gcagagatggcctgatcaat

SEQ ID NO: 68260 - DNA, 20 bp, synthetic construct
  misc_feature 1..20: note = Description of Artificial Sequence: Synthetic oligonucleotide
  misc_feature 1..20: note = Target: SCN10A; (+) strand; PAM type: YTN; PAM sequence: CTG
  source 1..20: mol_type = other DNA
atcaatgaaacagcaatgcc

SEQ ID NO: 68261 - DNA, 20 bp, synthetic construct
  misc_feature 1..20: note = Description of Artificial Sequence: Synthetic oligonucleotide
  misc_feature 1..20: note = Target: SCN10A; (+) strand; PAM type: YTN; PAM sequence: CTC
  source 1..20: mol_type = other DNA
gtttgaagtccagaattatt

SEQ ID NO: 68262 - DNA, 20 bp, synthetic construct
  misc_feature 1..20: note = Description of Artificial Sequence: Synthetic oligonucleotide
  misc_feature 1..20: note = Target: SCN10A; (+) strand; PAM type: YTN; PAM sequence: TTT
  source 1..20: mol_type = other DNA
gaagtccagaattatttttt

SEQ ID NO: 68263 - DNA, 20 bp, synthetic construct
  misc_feature 1..20: note = Description of Artificial Sequence: Synthetic oligonucleotide
  misc_feature 1..20: note = Target: SCN10A; (+) strand; PAM type: YTN; PAM sequence: TTG
  source 1..20: mol_type = other DNA
aagtccagaattattttttt

SEQ ID NO: 68264 - DNA, 20 bp, synthetic construct
  misc_feature 1..20: note = Description of Artificial Sequence: Synthetic oligonucleotide
  misc_feature 1..20: note = Target: SCN10A; (+) strand; PAM type: YTN; PAM sequence: TTA
  source 1..20: mol_type = other DNA
tttttttaaatttttttctt

SEQ ID NO: 68265 - DNA, 20 bp, synthetic construct
  misc_feature 1..20: note = Description of Artificial Sequence: Synthetic oligonucleotide
  misc_feature 1..20: note = Target: SCN10A; (+) strand; PAM type: YTN; PAM sequence: TTT
  source 1..20: mol_type = other DNA
ttttaaatttttttcttttt

SEQ ID NO: 68266 - DNA, 20 bp, synthetic construct
  misc_feature 1..20: note = Description of Artificial Sequence: Synthetic oligonucleotide
  misc_feature 1..20: note = Target: SCN10A; (+) strand; PAM type: YTN; PAM sequence: TTT
  source 1..20: mol_type = other DNA
tttaaatttttttctttttc

SEQ ID NO: 68267 - DNA, 20 bp, synthetic construct
  misc_feature 1..20: note = Description of Artificial Sequence: Synthetic oligonucleotide
  misc_feature 1..20: note = Target: SCN10A; (+) strand; PAM type: YTN; PAM sequence: TTT
  source 1..20: mol_type = other DNA
ttaaatttttttctttttct

SEQ ID NO: 68268 - DNA, 20 bp, synthetic construct
  misc_feature 1..20: note = Description of Artificial Sequence: Synthetic oligonucleotide
  misc_feature 1..20: note = Target: SCN10A; (+) strand; PAM type: YTN; PAM sequence: TTT
  source 1..20: mol_type = other DNA
taaatttttttctttttctc

SEQ ID NO: 68269 - DNA, 20 bp, synthetic construct
  misc_feature 1..20: note = Description of Artificial Sequence: Synthetic oligonucleotide
  misc_feature 1..20: note = Target: SCN10A; (+) strand; PAM type: YTN; PAM sequence: TTT
  source 1..20: mol_type = other DNA
aaatttttttctttttctcc

SEQ ID NO: 68270 - DNA, 20 bp, synthetic construct
  misc_feature 1..20: note = Description of Artificial Sequence: Synthetic oligonucleotide
  misc_feature 1..20: note = Target: SCN10A; (+) strand; PAM type: YTN; PAM sequence: TTA
  source 1..20: mol_type = other DNA
aatttttttctttttctcct

SEQ ID NO: 68271 - DNA, 20 bp, synthetic construct
  misc_feature 1..20: note = Description of Artificial Sequence: Synthetic oligonucleotide
  misc_feature 1..20: note = Target: SCN10A; (+) strand; PAM type: YTN; PAM sequence: TTT
  source 1..20: mol_type = other DNA
ttttctttttctcctgtttt

SEQ ID NO: 68272 - DNA, 20 bp, synthetic construct
  misc_feature 1..20: note = Description of Artificial Sequence: Synthetic oligonucleotide
  misc_feature 1..20: note = Target: SCN10A; (+) strand; PAM type: YTN; PAM sequence: TTT
  source 1..20: mol_type = other DNA
tttctttttctcctgtttta

SEQ ID NO: 68273 - DNA, 20 bp, synthetic construct
  misc_feature 1..20: note = Description of Artificial Sequence: Synthetic oligonucleotide
  misc_feature 1..20: note = Target: SCN10A; (+) strand; PAM type: YTN; PAM sequence: TTT
  source 1..20: mol_type = other DNA
ttctttttctcctgttttat

SEQ ID NO: 68274 - DNA, 20 bp, synthetic construct
  misc_feature 1..20: note = Description of Artificial Sequence: Synthetic oligonucleotide
  misc_feature 1..20: note = Target: SCN10A; (+) strand; PAM type: YTN; PAM sequence: TTT
  source 1..20: mol_type = other DNA
tctttttctcctgttttatt

SEQ ID NO: 68275 - DNA, 20 bp, synthetic construct
  misc_feature 1..20: note = Description of Artificial Sequence: Synthetic oligonucleotide
  misc_feature 1..20: note = Target: SCN10A; (+) strand; PAM type: YTN; PAM sequence: TTT
  source 1..20: mol_type = other DNA
ctttttctcctgttttattt

SEQ ID NO: 68276 - DNA, 20 bp, synthetic construct
  misc_feature 1..20: note = Description of Artificial Sequence: Synthetic oligonucleotide
  misc_feature 1..20: note = Target: SCN10A; (+) strand; PAM type: YTN; PAM sequence: TTC
  source 1..20: mol_type = other DNA
tttttctcctgttttattta

SEQ ID NO: 68277 - DNA, 20 bp, synthetic construct
  misc_feature 1..20: note = Description of Artificial Sequence: Synthetic oligonucleotide
  misc_feature 1..20: note = Target: SCN10A; (+) strand; PAM type: YTN; PAM sequence: CTT
  source 1..20: mol_type = other DNA
tttctcctgttttatttacc

SEQ ID NO: 68278 - DNA, 20 bp, synthetic construct
  misc_feature 1..20: note = Description of Artificial Sequence: Synthetic oligonucleotide
  misc_feature 1..20: note = Target: SCN10A; (+) strand; PAM type: YTN; PAM sequence: TTT
  source 1..20: mol_type = other DNA
ttctcctgttttatttacct

SEQ ID NO: 68279 - DNA, 20 bp, synthetic construct
  misc_feature 1..20: note = Description of Artificial Sequence: Synthetic oligonucleotide
  misc_feature 1..20: note = Target: SCN10A; (+) strand; PAM type: YTN; PAM sequence: TTT
  source 1..20: mol_type = other DNA
tctcctgttttatttacctg

SEQ ID NO: 68280 - DNA, 20 bp, synthetic construct
  misc_feature 1..20: note = Description of Artificial Sequence: Synthetic oligonucleotide
  misc_feature 1..20: note = Target: SCN10A; (+) strand; PAM type: YTN; PAM sequence: TTT
  source 1..20: mol_type = other DNA
ctcctgttttatttacctgc

SEQ ID NO: 68281 - DNA, 20 bp, synthetic construct
  misc_feature 1..20: note = Description of Artificial Sequence: Synthetic oligonucleotide
  misc_feature 1..20: note = Target: SCN10A; (+) strand; PAM type: YTN; PAM sequence: TTC
  source 1..20: mol_type = other DNA
tcctgttttatttacctgca

SEQ ID NO: 68282 - DNA, 20 bp, synthetic construct
  misc_feature 1..20: note = Description of Artificial Sequence: Synthetic oligonucleotide
  misc_feature 1..20: note = Target: SCN10A; (+) strand; PAM type: YTN; PAM sequence: CTC
  source 1..20: mol_type = other DNA
ctgttttatttacctgcatt

SEQ ID NO: 68283 - DNA, 20 bp, synthetic construct
  misc_feature 1..20: note = Description of Artificial Sequence: Synthetic oligonucleotide
  misc_feature 1..20: note = Target: SCN10A; (+) strand; PAM type: YTN; PAM sequence: CTG
  source 1..20: mol_type = other DNA
ttttatttacctgcattcct

SEQ ID NO: 68284 - DNA, 20 bp, synthetic construct
  misc_feature 1..20: note = Description of Artificial Sequence: Synthetic oligonucleotide
  misc_feature 1..20: note = Target: SCN10A; (+) strand; PAM type: YTN; PAM sequence: TTT
  source 1..20: mol_type = other DNA
tatttacctgcattccttgt

SEQ ID NO: 68285 - DNA, 20 bp, synthetic construct
  misc_feature 1..20: note = Description of Artificial Sequence: Synthetic oligonucleotide
  misc_feature 1..20: note = Target: SCN10A; (+) strand; PAM type: YTN; PAM sequence: TTT
  source 1..20: mol_type = other DNA
atttacctgcattccttgtg

SEQ ID NO: 68286 - DNA, 20 bp, synthetic construct
  misc_feature 1..20: note = Description of Artificial Sequence: Synthetic oligonucleotide
  misc_feature 1..20: note = Target: SCN10A; (+) strand; PAM type: YTN; PAM sequence: TTA
  source 1..20: mol_type = other DNA
tttacctgcattccttgtga

SEQ ID NO: 68287 - DNA, 20 bp, synthetic construct
  misc_feature 1..20: note = Description of Artificial Sequence: Synthetic oligonucleotide
  misc_feature 1..20: note = Target: SCN10A; (+) strand; PAM type: YTN; PAM sequence: TTT
  source 1..20: mol_type = other DNA
acctgcattccttgtgaata

SEQ ID NO: 68288 - DNA, 20 bp, synthetic construct
  misc_feature 1..20: note = Description of Artificial Sequence: Synthetic oligonucleotide
  misc_feature 1..20: note = Target: SCN10A; (+) strand; PAM type: YTN; PAM sequence: TTA
  source 1..20: mol_type = other DNA
cctgcattccttgtgaatac

SEQ ID NO: 68289 - DNA, 20 bp, synthetic construct
  misc_feature 1..20: note = Description of Artificial Sequence: Synthetic oligonucleotide
  misc_feature 1..20: note = Target: SCN10A; (+) strand; PAM type: YTN; PAM sequence: CTG
  source 1..20: mol_type = other DNA
cattccttgtgaatacatgg

SEQ ID NO: 68290 - DNA, 20 bp, synthetic construct
  misc_feature 1..20: note = Description of Artificial Sequence: Synthetic oligonucleotide
  misc_feature 1..20: note = Target: SCN10A; (+) strand; PAM type: YTN; PAM sequence: TTC
  source 1..20: mol_type = other DNA
cttgtgaatacatggaattc

SEQ ID NO: 68291 - DNA, 20 bp, synthetic construct
  misc_feature 1..20: note = Description of Artificial Sequence: Synthetic oligonucleotide
  misc_feature 1..20: note = Target: SCN10A; (+) strand; PAM type: YTN; PAM sequence: CTT
  source 1..20: mol_type = other DNA
gtgaatacatggaattcttt

SEQ ID NO: 68292 - DNA, 20 bp, synthetic construct
  misc_feature 1..20: note = Description of Artificial Sequence: Synthetic oligonucleotide
  misc_feature 1..20: note = Target: SCN10A; (+) strand; PAM type: YTN; PAM sequence: TTG
  source 1..20: mol_type = other DNA
tgaatacatggaattctttt

SEQ ID NO: 68293 - DNA, 20 bp, synthetic construct
  misc_feature 1..20: note = Description of Artificial Sequence: Synthetic oligonucleotide
  misc_feature 1..20: note = Target: SCN10A; (+) strand; PAM type: YTN; PAM sequence: TTC
  source 1..20: mol_type = other DNA
ttttactcccaggatttctc

SEQ ID NO: 68294 - DNA, 20 bp, synthetic construct
  misc_feature 1..20: note = Description of Artificial Sequence: Synthetic oligonucleotide
  misc_feature 1..20: note = Target: SCN10A; (+) strand; PAM type: YTN; PAM sequence: CTT
  source 1..20: mol_type = other DNA
ttactcccaggatttctcca

SEQ ID NO: 68295 - DNA, 20 bp, synthetic construct
  misc_feature 1..20: note = Description of Artificial Sequence: Synthetic oligonucleotide
  misc_feature 1..20: note = Target: SCN10A; (+) strand; PAM type: YTN; PAM sequence: TTT
  source 1..20: mol_type = other DNA
tactcccaggatttctccat

SEQ ID NO: 68296 - DNA, 20 bp, synthetic construct
  misc_feature 1..20: note = Description of Artificial Sequence: Synthetic oligonucleotide
  misc_feature 1..20: note = Target: SCN10A; (+) strand; PAM type: YTN; PAM sequence: TTT
  source 1..20: mol_type = other DNA
actcccaggatttctccatg

SEQ ID NO: 68297 - DNA, 20 bp, synthetic construct
  misc_feature 1..20: note = Description of Artificial Sequence: Synthetic oligonucleotide
  misc_feature 1..20: note = Target: SCN10A; (+) strand; PAM type: YTN; PAM sequence: TTA
  source 1..20: mol_type = other DNA
ctcccaggatttctccatga

SEQ ID NO: 68298 - DNA, 20 bp, synthetic construct
  misc_feature 1..20: note = Description of Artificial Sequence: Synthetic oligonucleotide
  misc_feature 1..20: note = Target: SCN10A; (+) strand; PAM type: YTN; PAM sequence: CTC
  source 1..20: mol_type = other DNA
ccaggatttctccatgaact

SEQ ID NO: 68299 - DNA, 20 bp, synthetic construct
  misc_feature 1..20: note = Description of Artificial Sequence: Synthetic oligonucleotide
  misc_feature 1..20: note = Target: SCN10A; (+) strand; PAM type: YTN; PAM sequence: TTT
  source 1..20: mol_type = other DNA
ctccatgaactccaacctct

SEQ ID NO: 68300 - DNA, 20 bp, synthetic construct
  misc_feature 1..20: note = Description of Artificial Sequence: Synthetic oligonucleotide
  misc_feature 1..20: note = Target: SCN10A; (+) strand; PAM type: YTN; PAM sequence: TTC
  source 1..20: mol_type = other DNA
tccatgaactccaacctctg

SEQ ID NO: 68301 - DNA, 20 bp, synthetic construct
  misc_feature 1..20: note = Description of Artificial Sequence: Synthetic oligonucleotide
  misc_feature 1..20: note = Target: SCN10A; (+) strand; PAM type: YTN; PAM sequence: CTC
  source 1..20: mol_type = other DNA
catgaactccaacctctggg

SEQ ID NO: 68302 - DNA, 20 bp, synthetic construct
  misc_feature 1..20: note = Description of Artificial Sequence: Synthetic oligonucleotide
  misc_feature 1..20: note = Target: SCN10A; (+) strand; PAM type: YTN; PAM sequence: CTC
  source 1..20: mol_type = other DNA
caacctctggggctctcctt

SEQ ID NO: 68303 - DNA, 20 bp, synthetic construct
  misc_feature 1..20: note = Description of Artificial Sequence: Synthetic oligonucleotide
  misc_feature 1..20: note = Target: SCN10A; (+) strand; PAM type: YTN; PAM sequence: CTC
  source 1..20: mol_type = other DNA
tggggctctccttatcccag

SEQ ID NO: 68304 - DNA, 20 bp, synthetic construct
  misc_feature 1..20: note = Description of Artificial Sequence: Synthetic oligonucleotide
  misc_feature 1..20: note = Target: SCN10A; (+) strand; PAM type: YTN; PAM sequence: CTG
  source 1..20: mol_type = other DNA
gggctctccttatcccagac

SEQ ID NO: 68305 - DNA, 20 bp, synthetic construct
  misc_feature 1..20: note = Description of Artificial Sequence: Synthetic oligonucleotide
  misc_feature 1..20: note = Target: SCN10A; (+) strand; PAM type: YTN; PAM sequence: CTC
  source 1..20: mol_type = other DNA
tccttatcccagacatccat

SEQ ID NO: 68306 - DNA, 20 bp, synthetic construct
  misc_feature 1..20: note = Description of Artificial Sequence: Synthetic oligonucleotide
  misc_feature 1..20: note = Target: SCN10A; (+) strand; PAM type: YTN; PAM sequence: CTC
  source 1..20: mol_type = other DNA
cttatcccagacatccatgt

SEQ ID NO: 68307 - DNA, 20 bp, synthetic construct
  misc_feature 1..20: note = Description of Artificial Sequence: Synthetic oligonucleotide
  misc_feature 1..20: note = Target: SCN10A; (+) strand; PAM type: YTN; PAM sequence: CTT
  source 1..20: mol_type = other DNA
atcccagacatccatgtgaa

SEQ ID NO: 68308 - DNA, 20 bp, synthetic construct
  misc_feature 1..20: note = Description of Artificial Sequence: Synthetic oligonucleotide
  misc_feature 1..20: note = Target: SCN10A; (+) strand; PAM type: YTN; PAM sequence: TTA
  source 1..20: mol_type = other DNA
tcccagacatccatgtgaac

SEQ ID NO: 68309 - DNA, 20 bp, synthetic construct
  misc_feature 1..20: note = Description of Artificial Sequence: Synthetic oligonucleotide
  misc_feature 1..20: note = Target: SCN10A; (+) strand; PAM type: YTN; PAM sequence: TTA
  source 1..20: mol_type = other DNA
gagctctgacaacttaattc

SEQ ID NO: 68310 - DNA, 20 bp, synthetic construct
  misc_feature 1..20: note = Description of Artificial Sequence: Synthetic oligonucleotide
  misc_feature 1..20: note = Target: SCN10A; (+) strand; PAM type: YTN; PAM sequence: CTC
  source 1..20: mol_type = other DNA
tgacaacttaattctaatca

SEQ ID NO: 68311 - DNA, 20 bp, synthetic construct
  misc_feature 1..20: note = Description of Artificial Sequence: Synthetic oligonucleotide
  misc_feature 1..20: note = Target: SCN10A; (+) strand; PAM type: YTN; PAM sequence: CTG
  source 1..20: mol_type = other DNA
acaacttaattctaatcagt

SEQ ID NO: 68312 - DNA, 20 bp, synthetic construct
  misc_feature 1..20: note = Description of Artificial Sequence: Synthetic oligonucleotide
  misc_feature 1..20: note = Target: SCN10A; (+) strand; PAM type: YTN; PAM sequence: CTT
  source 1..20: mol_type = other DNA
aattctaatcagttccaagt

SEQ ID NO: 68313 - DNA, 20 bp, synthetic construct
  misc_feature 1..20: note = Description of Artificial Sequence: Synthetic oligonucleotide
  misc_feature 1..20: note = Target: SCN10A; (+) strand; PAM type: YTN; PAM sequence: TTA
  source 1..20: mol_type = other DNA
attctaatcagttccaagtc

SEQ ID NO: 68314 - DNA, 20 bp, synthetic construct
  misc_feature 1..20: note = Description of Artificial Sequence: Synthetic oligonucleotide
  misc_feature 1..20: note = Target: SCN10A; (+) strand; PAM type: YTN; PAM sequence: TTC
  source 1..20: mol_type = other DNA
taatcagttccaagtctatc

SEQ ID NO: 68315 - DNA, 20 bp, synthetic construct
  misc_feature 1..20: note = Description of Artificial Sequence: Synthetic oligonucleotide
  misc_feature 1..20: note = Target: SCN10A; (+) strand; PAM type: YTN; PAM sequence: CTA
  source 1..20: mol_type = other DNA
atcagttccaagtctatctc

SEQ ID NO: 68316 - DNA, 20 bp, synthetic construct
  misc_feature 1..20: note = Description of Artificial Sequence: Synthetic oligonucleotide
  misc_feature 1..20: note = Target: SCN10A; (+) strand; PAM type: YTN; PAM sequence: TTC
  source 1..20: mol_type = other DNA
caagtctatctccacttcga

SEQ ID NO: 68317 - DNA, 20 bp, synthetic construct
  misc_feature 1..20: note = Description of Artificial Sequence: Synthetic oligonucleotide
  misc_feature 1..20: note = Target: SCN10A; (+) strand; PAM type: YTN; PAM sequence: CTA
  source 1..20: mol_type = other DNA
tctccacttcgattgaagat

SEQ ID NO: 68318 - DNA, 20 bp, synthetic construct
  misc_feature 1..20: note = Description of Artificial Sequence: Synthetic oligonucleotide
  misc_feature 1..20: note = Target: SCN10A; (+) strand; PAM type: YTN; PAM sequence: CTC
  source 1..20: mol_type = other DNA
cacttcgattgaagattgca

SEQ ID NO: 68319 - DNA, 20 bp, synthetic construct
  misc_feature 1..20: note = Description of Artificial Sequence: Synthetic oligonucleotide
  misc_feature 1..20: note = Target: SCN10A; (+) strand; PAM type: YTN; PAM sequence: CTT
  source 1..20: mol_type = other DNA
cgattgaagattgcaagttc

SEQ ID NO: 68320 - DNA, 20 bp, synthetic construct
  misc_feature 1..20: note = Description of Artificial Sequence: Synthetic oligonucleotide
  misc_feature 1..20: note = Target: SCN10A; (+) strand; PAM type: YTN; PAM sequence: TTC
  source 1..20: mol_type = other DNA
gattgaagattgcaagttcc

SEQ ID NO: 68321 - DNA, 20 bp, synthetic construct
  misc_feature 1..20: note = Description of Artificial Sequence: Synthetic oligonucleotide
  misc_feature 1..20: note = Target: SCN10A; (+) strand; PAM type: YTN; PAM sequence: TTG
  source 1..20: mol_type = other DNA
aagattgcaagttccctggc

SEQ ID NO: 68322 - DNA, 20 bp, synthetic construct
  misc_feature 1..20: note = Description of Artificial Sequence: Synthetic oligonucleotide
  misc_feature 1..20: note = Target: SCN10A; (+) strand; PAM type: YTN; PAM sequence: TTG
  source 1..20: mol_type = other DNA
caagttccctggctttgtag

SEQ ID NO: 68323 - DNA, 20 bp, synthetic construct
  misc_feature 1..20: note = Description of Artificial Sequence: Synthetic oligonucleotide
  misc_feature 1..20: note = Target: SCN10A; (+) strand; PAM type: YTN; PAM sequence: TTC
  source 1..20: mol_type = other DNA
cctggctttgtagacccaca

SEQ ID NO: 68324 - DNA, 20 bp, synthetic construct
  misc_feature 1..20: note = Description of Artificial Sequence: Synthetic oligonucleotide
  misc_feature 1..20: note = Target: SCN10A; (+) strand; PAM type: YTN; PAM sequence: CTG
  source 1..20: mol_type = other DNA
gctttgtagacccacattta

SEQ ID NO: 68325 - DNA, 20 bp, synthetic construct
  misc_feature 1..20: note = Description of Artificial Sequence: Synthetic oligonucleotide
  misc_feature 1..20: note = Target: SCN10A; (+) strand; PAM type: YTN; PAM sequence: CTT
  source 1..20: mol_type = other DNA
tgtagacccacatttaaaga

SEQ ID NO: 68326 - DNA, 20 bp, synthetic construct
  misc_feature 1..20: note = Description of Artificial Sequence: Synthetic oligonucleotide
  misc_feature 1..20: note = Target: SCN10A; (+) strand; PAM type: YTN; PAM sequence: TTT
  source 1..20: mol_type = other DNA
gtagacccacatttaaagat

SEQ ID NO: 68327 - DNA, 20 bp, synthetic construct
  misc_feature 1..20: note = Description of Artificial Sequence: Synthetic oligonucleotide
  misc_feature 1..20: note = Target: SCN10A; (+) strand; PAM type: YTN; PAM sequence: TTG
  source 1..20: mol_type = other DNA
tagacccacatttaaagata

SEQ ID NO: 68328 - DNA, 20 bp, synthetic construct
  misc_feature 1..20: note = Description of Artificial Sequence: Synthetic oligonucleotide
  misc_feature 1..20: note = Target: SCN10A; (+) strand; PAM type: YTN; PAM sequence: TTT
  source 1..20: mol_type = other DNA
aaagataggctcttggtttg

SEQ ID NO: 68329 - DNA, 20 bp, synthetic construct
  misc_feature 1..20: note = Description of Artificial Sequence: Synthetic oligonucleotide
  misc_feature 1..20: note = Target: SCN10A; (+) strand; PAM type: YTN; PAM sequence: TTA
  source 1..20: mol_type = other DNA
aagataggctcttggtttgc

SEQ ID NO: 68330 - DNA, 20 bp, synthetic construct
  misc_feature 1..20: note = Description of Artificial Sequence: Synthetic oligonucleotide
  misc_feature 1..20: note = Target: SCN10A; (+) strand; PAM type: YTN; PAM sequence: CTC
  source 1..20: mol_type = other DNA
ttggtttgctcttccaaggg

SEQ ID NO: 68331 - DNA, 20 bp, synthetic construct
  misc_feature 1..20: note = Description of Artificial Sequence: Synthetic oligonucleotide
  misc_feature 1..20: note = Target: SCN10A; (+) strand; PAM type: YTN; PAM sequence: CTT
  source 1..20: mol_type = other DNA
ggtttgctcttccaaggggc

SEQ ID NO: 68332 - DNA, 20 bp, synthetic construct
  misc_feature 1..20: note = Description of Artificial Sequence: Synthetic oligonucleotide
  misc_feature 1..20: note = Target: SCN10A; (+) strand; PAM type: YTN; PAM sequence: TTG
  source 1..20: mol_type = other DNA
gtttgctcttccaaggggct

SEQ ID NO: 68333 - DNA, 20 bp, synthetic construct
  misc_feature 1..20: note = Description of Artificial Sequence: Synthetic oligonucleotide
  misc_feature 1..20: note = Target: SCN10A; (+) strand; PAM type: YTN; PAM sequence: TTT
  source 1..20: mol_type = other DNA
gctcttccaaggggctaggc

SEQ ID NO: 68334 - DNA, 20 bp, synthetic construct
  misc_feature 1..20: note = Description of Artificial Sequence: Synthetic oligonucleotide
  misc_feature 1..20: note = Target: SCN10A; (+) strand; PAM type: YTN; PAM sequence: TTG
  source 1..20: mol_type = other DNA
ctcttccaaggggctaggca

SEQ ID NO: 68335 - DNA, 20 bp, synthetic construct
  misc_feature 1..20: note = Description of Artificial Sequence: Synthetic oligonucleotide
  misc_feature 1..20: note = Target: SCN10A; (+) strand; PAM type: YTN; PAM sequence: CTC
  source 1..20: mol_type = other DNA
ttccaaggggctaggcaacc

SEQ ID NO: 68336 - DNA, 20 bp, synthetic construct
  misc_feature 1..20: note = Description of Artificial Sequence: Synthetic oligonucleotide
  misc_feature 1..20: note = Target: SCN10A; (+) strand; PAM type: YTN; PAM sequence: CTT
  source 1..20: mol_type = other DNA
ccaaggggctaggcaaccca

SEQ ID NO: 68337 - DNA, 20 bp, synthetic construct
  misc_feature 1..20: note = Description of Artificial Sequence: Synthetic oligonucleotide
  misc_feature 1..20: note = Target: SCN10A; (+) strand; PAM type: YTN; PAM sequence: TTC
  source 1..20: mol_type = other DNA
caaggggctaggcaacccat

SEQ ID NO: 68338 - DNA, 20 bp, synthetic construct
  misc_feature 1..20: note = Description of Artificial Sequence: Synthetic oligonucleotide
  misc_feature 1..20: note = Target: SCN10A; (+) strand; PAM type: YTN; PAM sequence: CTA
  source 1..20: mol_type = other DNA
ggcaacccatttcctgtagg

SEQ ID NO: 68339 - DNA, 20 bp, synthetic construct
  misc_feature 1..20: note = Description of Artificial Sequence: Synthetic oligonucleotide
  misc_feature 1..20: note = Target: SCN10A; (+) strand; PAM type: YTN; PAM sequence: TTT
  source 1..20: mol_type = other DNA
cctgtaggtttcttaattaa

SEQ ID NO: 68340 - DNA, 20 bp, synthetic construct
  misc_feature 1..20: note = Description of Artificial Sequence: Synthetic oligonucleotide
  misc_feature 1..20: note = Target: SCN10A; (+) strand; PAM type: YTN; PAM sequence: TTC
  source 1..20: mol_type = other DNA
ctgtaggtttcttaattaac

SEQ ID NO: 68341 - DNA, 20 bp, synthetic construct
  misc_feature 1..20: note = Description of Artificial Sequence: Synthetic oligonucleotide
  misc_feature 1..20: note = Target: SCN10A; (+) strand; PAM type: YTN; PAM sequence: CTG
  source 1..20: mol_type = other DNA
taggtttcttaattaactct

SEQ ID NO: 68342 - DNA, 20 bp, synthetic construct
  misc_feature 1..20: note = Description of Artificial Sequence: Synthetic oligonucleotide
  misc_feature 1..20: note = Target: SCN10A; (+) strand; PAM type: YTN; PAM sequence: TTT
  source 1..20: mol_type = other DNA
cttaattaactctgagggca

SEQ ID NO: 68343 - DNA, 20 bp, synthetic construct
  misc_feature 1..20: note = Description of Artificial Sequence: Synthetic oligonucleotide
  misc_feature 1..20: note = Target: SCN10A; (+) strand; PAM type: YTN; PAM sequence: TTC
  source 1..20: mol_type = other DNA
ttaattaactctgagggcag

SEQ ID NO: 68344 - DNA, 20 bp, synthetic construct
  misc_feature 1..20: note = Description of Artificial Sequence: Synthetic oligonucleotide
  misc_feature 1..20: note = Target: SCN10A; (+) strand; PAM type: YTN; PAM sequence: CTT
  source 1..20: mol_type = other DNA
aattaactctgagggcagcc

SEQ ID NO: 68345 - DNA, 20 bp, synthetic construct
  misc_feature 1..20: note = Description of Artificial Sequence: Synthetic oligonucleotide
  misc_feature 1..20: note = Target: SCN10A; (+) strand; PAM type: YTN; PAM sequence: TTA
  source 1..20: mol_type = other DNA
attaactctgagggcagcct

SEQ ID NO: 68346 - DNA, 20 bp, synthetic construct
  misc_feature 1..20: note = Description of Artificial Sequence: Synthetic oligonucleotide
  misc_feature 1..20: note = Target: SCN10A; (+) strand; PAM type: YTN; PAM sequence: TTA
  source 1..20: mol_type = other DNA
actctgagggcagccttgtt

SEQ ID NO: 68347 - DNA, 20 bp, synthetic construct
  misc_feature 1..20: note = Description of Artificial Sequence: Synthetic oligonucleotide
  misc_feature 1..20: note = Target: SCN10A; (+) strand; PAM type: YTN; PAM sequence: CTC
  source 1..20: mol_type = other DNA
tgagggcagccttgtttcta

SEQ ID NO: 68348 - DNA, 20 bp, synthetic construct
  misc_feature 1..20: note = Description of Artificial Sequence: Synthetic oligonucleotide
  misc_feature 1..20: note = Target: SCN10A; (+) strand; PAM type: YTN; PAM sequence: CTG
  source 1..20: mol_type = other DNA
agggcagccttgtttctatg

SEQ ID NO: 68349 - DNA, 20 bp, synthetic construct
  misc_feature 1..20: note = Description of Artificial Sequence: Synthetic oligonucleotide
  misc_feature 1..20: note = Target: SCN10A; (+) strand; PAM type: YTN; PAM sequence: CTT
  source 1..20: mol_type = other DNA
gtttctatgtcttctgtaga

SEQ ID NO: 68350 - DNA, 20 bp, synthetic construct
  misc_feature 1..20: note = Description of Artificial Sequence: Synthetic oligonucleotide
  misc_feature 1..20: note = Target: SCN10A; (+) strand; PAM type: YTN; PAM sequence: TTG
  source 1..20: mol_type = other DNA
tttctatgtcttctgtagaa

SEQ ID NO: 68351 - DNA, 20 bp, synthetic construct
  misc_feature 1..20: note = Description of Artificial Sequence: Synthetic oligonucleotide
  misc_feature 1..20: note = Target: SCN10A; (+) strand; PAM type: YTN; PAM sequence: TTT
  source 1..20: mol_type = other DNA
ctatgtcttctgtagaaatc

SEQ ID NO: 68352 - DNA, 20 bp, synthetic construct
  misc_feature 1..20: note = Description of Artificial Sequence: Synthetic oligonucleotide
  misc_feature 1..20: note = Target: SCN10A; (+) strand; PAM type: YTN; PAM sequence: TTC
  source 1..20: mol_type = other DNA
tatgtcttctgtagaaatcc

SEQ ID NO: 68353 - DNA, 20 bp, synthetic construct
  misc_feature 1..20: note = Description of Artificial Sequence: Synthetic oligonucleotide
  misc_feature 1..20: note = Target: SCN10A; (+) strand; PAM type: YTN; PAM sequence: CTA
  source 1..20: mol_type = other DNA
tgtcttctgtagaaatccac

SEQ ID NO: 68354 - DNA, 20 bp, synthetic construct
  misc_feature 1..20: note = Description of Artificial Sequence: Synthetic oligonucleotide
  misc_feature 1..20: note = Target: SCN10A; (+) strand; PAM type: YTN; PAM sequence: CTT
  source 1..20: mol_type = other DNA
ctgtagaaatccaccatagc

SEQ ID NO: 68355 - DNA, 20 bp, synthetic construct
  misc_feature 1..20: note = Description of Artificial Sequence: Synthetic oligonucleotide
  misc_feature 1..20: note = Target: SCN10A; (+) strand; PAM type: YTN; PAM sequence: TTC
  source 1..20: mol_type = other DNA
tgtagaaatccaccatagcc

SEQ ID NO: 68356 - DNA, 20 bp, synthetic construct
  misc_feature 1..20: note = Description of Artificial Sequence: Synthetic oligonucleotide
  misc_feature 1..20: note = Target: SCN10A; (+) strand; PAM type: YTN; PAM sequence: CTG
  source 1..20: mol_type = other DNA
tagaaatccaccatagccac

SEQ ID NO: 68357 - DNA, 20 bp, synthetic construct
  misc_feature 1..20: note = Description of Artificial Sequence: Synthetic oligonucleotide
  misc_feature 1..20: note = Target: SCN10A; (+) strand; PAM type: YTN; PAM sequence: CTG
  source 1..20: mol_type = other DNA
catataaacagttcactgct

SEQ ID NO: 68358 - DNA, 20 bp, synthetic construct
  misc_feature 1..20: note = Description of Artificial Sequence: Synthetic oligonucleotide
  misc_feature 1..20: note = Target: SCN10A; (+) strand; PAM type: YTN; PAM sequence: TTC
  source 1..20: mol_type = other DNA
actgctctgaggattaaatg

SEQ ID NO: 68359 - DNA, 20 bp, synthetic construct
  misc_feature 1..20: note = Description of Artificial Sequence: Synthetic oligonucleotide
  misc_feature 1..20: note = Target: SCN10A; (+) strand; PAM type: YTN; PAM sequence: CTG
  source 1..20: mol_type = other DNA
ctctgaggattaaatgagat

SEQ ID NO: 68360 - DNA, 20 bp, synthetic construct
  misc_feature 1..20: note = Description of Artificial Sequence: Synthetic oligonucleotide
  misc_feature 1..20: note = Target: SCN10A; (+) strand; PAM type: YTN; PAM sequence: CTC
  source 1..20: mol_type = other DNA
tgaggattaaatgagatcac

SEQ ID NO: 68361 - DNA, 20 bp, synthetic construct
  misc_feature 1..20: note = Description of Artificial Sequence: Synthetic oligonucleotide
  misc_feature 1..20: note = Target: SCN10A; (+) strand; PAM type: YTN; PAM sequence: CTG
  source 1..20: mol_type = other DNA
aggattaaatgagatcactg

SEQ ID NO: 68362 - DNA, 20 bp, synthetic construct
  misc_feature 1..20: note = Description of Artificial Sequence: Synthetic oligonucleotide
  misc_feature 1..20: note = Target: SCN10A; (+) strand; PAM type: YTN; PAM sequence: TTA
  source 1..20: mol_type = other DNA
aatgagatcactgtatagtg

SEQ ID NO: 68363 - DNA, 20 bp, synthetic construct
  misc_feature 1..20: note = Description of Artificial Sequence: Synthetic oligonucleotide
  misc_feature 1..20: note = Target: SCN10A; (+) strand; PAM type: YTN; PAM sequence: CTG
  source 1..20: mol_type = other DNA
tatagtgtcttgcacttctg

SEQ ID NO: 68364 - DNA, 20 bp, synthetic construct
  misc_feature 1..20: note = Description of Artificial Sequence: Synthetic oligonucleotide
  misc_feature 1..20: note = Target: SCN10A; (+) strand; PAM type: YTN; PAM sequence: CTT
  source 1..20: mol_type = other DNA
gcacttctgcatagtaaata

SEQ ID NO: 68365 - DNA, 20 bp, synthetic construct
  misc_feature 1..20: note = Description of Artificial Sequence: Synthetic oligonucleotide
  misc_feature 1..20: note = Target: SCN10A; (+) strand; PAM type: YTN; PAM sequence: TTG
  source 1..20: mol_type = other DNA
cacttctgcatagtaaatat

SEQ ID NO: 68366 - DNA, 20 bp, synthetic construct
  misc_feature 1..20: note = Description of Artificial Sequence: Synthetic oligonucleotide
  misc_feature 1..20: note = Target: SCN10A; (+) strand; PAM type: YTN; PAM sequence: CTT
  source 1..20: mol_type = other DNA
ctgcatagtaaatattgtat

SEQ ID NO: 68367 - DNA, 20 bp, synthetic construct
  misc_feature 1..20: note = Description of Artificial Sequence: Synthetic oligonucleotide
  misc_feature 1..20: note = Target: SCN10A; (+) strand; PAM type: YTN; PAM sequence: TTC
  source 1..20: mol_type = other DNA
tgcatagtaaatattgtata

SEQ ID NO: 68368 - DNA, 20 bp, synthetic construct
  misc_feature 1..20: note = Description of Artificial Sequence: Synthetic oligonucleotide
  misc_feature 1..20: note = Target: SCN10A; (+) strand; PAM type: YTN; PAM sequence: CTG
  source 1..20: mol_type = other DNA
catagtaaatattgtatata

SEQ ID NO: 68369 - DNA, 20 bp, synthetic construct
  misc_feature 1..20: note = Description of Artificial Sequence: Synthetic oligonucleotide
  misc_feature 1..20: note = Target: SCN10A; (+) strand; PAM type: YTN; PAM sequence: TTG
  source 1..20: mol_type = other DNA
tatataaactgcaaaggaaa

SEQ ID NO: 68370 - DNA, 20 bp, synthetic construct
  misc_feature 1..20: note = Description of Artificial Sequence: Synthetic oligonucleotide
  misc_feature 1..20: note = Target: SCN10A; (+) strand; PAM type: YTN; PAM sequence: CTG
  source 1..20: mol_type = other DNA
caaaggaaaattcctattgt

SEQ ID NO: 68371 - DNA, 20 bp, synthetic construct
  misc_feature 1..20: note = Description of Artificial Sequence: Synthetic oligonucleotide
  misc_feature 1..20: note = Target: SCN10A; (+) strand; PAM type: YTN; PAM sequence: TTC
  source 1..20: mol_type = other DNA
ctattgtttttaaccttgga

SEQ ID NO: 68372 - DNA, 20 bp, synthetic construct
  misc_feature 1..20: note = Description of Artificial Sequence: Synthetic oligonucleotide
  misc_feature 1..20: note = Target: SCN10A; (+) strand; PAM type: YTN; PAM sequence: CTA
  source 1..20: mol_type = other DNA
ttgtttttaaccttggaagc

SEQ ID NO: 68373 - DNA, 20 bp, synthetic construct
  misc_feature 1..20: note = Description of Artificial Sequence: Synthetic oligonucleotide
  misc_feature 1..20: note = Target: SCN10A; (+) strand; PAM type: YTN; PAM sequence: TTG
  source 1..20: mol_type = other DNA
tttttaaccttggaagctgc

SEQ ID NO: 68374 - DNA, 20 bp, synthetic construct
  misc_feature 1..20: note = Description of Artificial Sequence: Synthetic oligonucleotide
  misc_feature 1..20: note = Target: SCN10A; (+) strand; PAM type: YTN; PAM sequence: TTT
  source 1..20: mol_type = other DNA
ttaaccttggaagctgctga

SEQ ID NO: 68375 - DNA, 20 bp, synthetic construct
  misc_feature 1..20: note = Description of Artificial Sequence: Synthetic oligonucleotide
  misc_feature 1..20: note = Target: SCN10A; (+) strand; PAM type: YTN; PAM sequence: TTT
  source 1..20: mol_type = other DNA
taaccttggaagctgctgaa

SEQ ID NO: 68376 - DNA, 20 bp, synthetic construct
  misc_feature 1..20: note = Description of Artificial Sequence: Synthetic oligonucleotide
  misc_feature 1..20: note = Target: SCN10A; (+) strand; PAM type: YTN; PAM sequence: TTT
  source 1..20: mol_type = other DNA
aaccttggaagctgctgaaa

SEQ ID NO: 68377 - DNA, 20 bp, synthetic construct
  misc_feature 1..20: note = Description of Artificial Sequence: Synthetic oligonucleotide
  misc_feature 1..20: note = Target: SCN10A; (+) strand; PAM type: YTN; PAM sequence: TTA
  source 1..20: mol_type = other DNA
accttggaagctgctgaaag

SEQ ID NO: 68378 - DNA, 20 bp, synthetic construct
  misc_feature 1..20: note = Description of Artificial Sequence: Synthetic oligonucleotide
  misc_feature 1..20: note = Target: SCN10A; (+) strand; PAM type: YTN; PAM sequence: CTT
  source 1..20: mol_type = other DNA
ggaagctgctgaaaggataa

SEQ ID NO: 68379 - DNA, 20 bp, synthetic construct
  misc_feature 1..20: note = Description of Artificial Sequence: Synthetic oligonucleotide
  misc_feature 1..20: note = Target: SCN10A; (+) strand; PAM type: YTN; PAM sequence: TTG
  source 1..20: mol_type = other DNA
gaagctgctgaaaggataaa

SEQ ID NO: 68380 - DNA, 20 bp, synthetic construct
  misc_feature 1..20: note = Description of Artificial Sequence: Synthetic oligonucleotide
  misc_feature 1..20: note = Target: SCN10A; (+) strand; PAM type: YTN; PAM sequence: CTG
  source 1..20: mol_type = other DNA
ctgaaaggataaactggaat

SEQ ID NO: 68381 - DNA, 20 bp, synthetic construct
  misc_feature 1..20: note = Description of Artificial Sequence: Synthetic oligonucleotide
  misc_feature 1..20: note = Target: SCN10A; (+) strand; PAM type: YTN; PAM sequence: CTG
  source 1..20: mol_type = other DNA
aaaggataaactggaataat

SEQ ID NO: 68382 - DNA, 20 bp, synthetic construct
  misc_feature 1..20: note = Description of Artificial Sequence: Synthetic oligonucleotide
  misc_feature 1..20: note = Target: SCN10A; (+) strand; PAM type: YTN; PAM sequence: CTG
  source 1..20: mol_type = other DNA
gaataatatatgtggaagaa

SEQ ID NO: 68383 - DNA, 20 bp, synthetic construct
  misc_feature 1..20: note = Description of Artificial Sequence: Synthetic oligonucleotide
  misc_feature 1..20: note = Target: SCN10A; (+) strand; PAM type: YTN; PAM sequence: CTG
  source 1..20: mol_type = other DNA
aaaattatcaactattttct

SEQ ID NO: 68384 - DNA, 20 bp, synthetic construct
  misc_feature 1..20: note = Description of Artificial Sequence: Synthetic oligonucleotide
  misc_feature 1..20: note = Target: SCN10A; (+) strand; PAM type: YTN; PAM sequence: TTA
  source 1..20: mol_type = other DNA
tcaactattttctggtatcc

SEQ ID NO: 68385 - DNA, 20 bp, synthetic construct
  misc_feature 1..20: note = Description of Artificial Sequence: Synthetic oligonucleotide
  misc_feature 1..20: note = Target: SCN10A; (+) strand; PAM type: YTN; PAM sequence: CTA
  source 1..20: mol_type = other DNA
ttttctggtatccattttct

SEQ ID NO: 68386 - DNA, 20 bp, synthetic construct
  misc_feature 1..20: note = Description of Artificial Sequence: Synthetic oligonucleotide
  misc_feature 1..20: note = Target: SCN10A; (+) strand; PAM type: YTN; PAM sequence: TTT
  source 1..20: mol_type = other DNA
tctggtatccattttctgcc

SEQ ID NO: 68387 - DNA, 20 bp, synthetic construct
  misc_feature 1..20: note = Description of Artificial Sequence: Synthetic oligonucleotide
  misc_feature 1..20: note = Target: SCN10A; (+) strand; PAM type: YTN; PAM sequence: TTT
  source 1..20: mol_type = other DNA
ctggtatccattttctgcct

SEQ ID NO: 68388 - DNA, 20 bp, synthetic construct
  misc_feature 1..20: note = Description of Artificial Sequence: Synthetic oligonucleotide
  misc_feature 1..20: note = Target: SCN10A; (+) strand; PAM type: YTN; PAM sequence: TTC
  source 1..20: mol_type = other DNA
tggtatccattttctgcctt

SEQ ID NO: 68389 - DNA, 20 bp, synthetic construct
  misc_feature 1..20: note = Description of Artificial Sequence: Synthetic oligonucleotide
  misc_feature 1..20: note = Target: SCN10A; (+) strand; PAM type: YTN; PAM sequence: CTG
  source 1..20: mol_type = other DNA
gtatccattttctgccttga

SEQ ID NO: 68390 - DNA, 20 bp, synthetic construct
  misc_feature 1..20: note = Description of Artificial Sequence: Synthetic oligonucleotide
  misc_feature 1..20: note = Target: SCN10A; (+) strand; PAM type: YTN; PAM sequence: TTT
  source 1..20: mol_type = other DNA
tctgccttgagacccctgac

SEQ ID NO: 68391 - DNA, 20 bp, synthetic construct
  misc_feature 1..20: note = Description of Artificial Sequence: Synthetic oligonucleotide
  misc_feature 1..20: note = Target: SCN10A; (+) strand; PAM type: YTN; PAM sequence: TTT
  source 1..20: mol_type = other DNA
ctgccttgagacccctgacc

SEQ ID NO: 68392 - DNA, 20 bp, synthetic construct
  misc_feature 1..20: note = Description of Artificial Sequence: Synthetic oligonucleotide
  misc_feature 1..20: note = Target: SCN10A; (+) strand; PAM type: YTN; PAM sequence: TTC
  source 1..20: mol_type = other DNA
tgccttgagacccctgacct

SEQ ID NO: 68393 - DNA, 20 bp, synthetic construct
  misc_feature 1..20: note = Description of Artificial Sequence: Synthetic oligonucleotide
  misc_feature 1..20: note = Target: SCN10A; (+) strand; PAM type: YTN; PAM sequence: CTG
  source 1..20: mol_type = other DNA
ccttgagacccctgaccttc

SEQ ID NO: 68394 - DNA, 20 bp, synthetic construct
  misc_feature 1..20: note = Description of Artificial Sequence: Synthetic oligonucleotide
  misc_feature 1..20: note = Target: SCN10A; (+) strand; PAM type: YTN; PAM sequence: CTT
  source 1..20: mol_type = other DNA
gagacccctgaccttcctcc

SEQ ID NO: 68395 - DNA, 20 bp, synthetic construct
  misc_feature 1..20: note = Description of Artificial Sequence: Synthetic oligonucleotide
  misc_feature 1..20: note = Target: SCN10A; (+) strand; PAM type: YTN; PAM sequence: TTG
  source 1..20: mol_type = other DNA
agacccctgaccttcctccc

SEQ ID NO: 68396 - DNA, 20 bp, synthetic construct
  misc_feature 1..20: note = Description of Artificial Sequence: Synthetic oligonucleotide
  misc_feature 1..20: note = Target: SCN10A; (+) strand; PAM type: YTN; PAM sequence: CTG
  source 1..20: mol_type = other DNA
accttcctcccacagtgcca

SEQ ID NO: 68397 - DNA, 20 bp, synthetic construct
  misc_feature 1..20: note = Description of Artificial Sequence: Synthetic oligonucleotide
  misc_feature 1..20: note = Target: SCN10A; (+) strand; PAM type: YTN; PAM sequence: CTT
  source 1..20: mol_type = other DNA
cctcccacagtgccattggc

SEQ ID NO: 68398 - DNA, 20 bp, synthetic construct
  misc_feature 1..20: note = Description of Artificial Sequence: Synthetic oligonucleotide
  misc_feature 1..20: note = Target: SCN10A; (+) strand; PAM type: YTN; PAM sequence: TTC
  source 1..20: mol_type = other DNA
ctcccacagtgccattggcc

SEQ ID NO: 68399 - DNA, 20 bp, synthetic construct
  misc_feature 1..20: note = Description of Artificial Sequence: Synthetic oligonucleotide
  misc_feature 1..20: note = Target: SCN10A; (+) strand; PAM type: YTN; PAM sequence: CTC
  source 1..20: mol_type = other DNA
ccacagtgccattggccaat

SEQ ID NO: 68400 - DNA, 20 bp, synthetic construct
  misc_feature 1..20: note = Description of Artificial Sequence: Synthetic oligonucleotide
  misc_feature 1..20: note = Target: SCN10A; (+) strand; PAM type: YTN; PAM sequence: TTG
  source 1..20: mol_type = other DNA
gccaatgtgggcctttcctc

SEQ ID NO: 68401 - DNA, 20 bp, synthetic construct
  misc_feature 1..20: note = Description of Artificial Sequence: Synthetic oligonucleotide
  misc_feature 1..20: note = Target: SCN10A; (+) strand; PAM type: YTN; PAM sequence: CTT
  source 1..20: mol_type = other DNA
tcctcaggactctggcttct

SEQ ID NO: 68402 - DNA, 20 bp, synthetic construct
  misc_feature 1..20: note = Description of Artificial Sequence: Synthetic oligonucleotide
  misc_feature 1..20: note = Target: SCN10A; (+) strand; PAM type: YTN; PAM sequence: TTT
  source 1..20: mol_type = other DNA
cctcaggactctggcttctc

SEQ ID NO: 68403 - DNA, 20 bp, synthetic construct
  misc_feature 1..20: note = Description of Artificial Sequence: Synthetic oligonucleotide
  misc_feature 1..20: note = Target: SCN10A; (+) strand; PAM type: YTN; PAM sequence: TTC
  source 1..20: mol_type = other DNA
ctcaggactctggcttctct

SEQ ID NO: 68404 - DNA, 20 bp, synthetic construct
  misc_feature 1..20: note = Description of Artificial Sequence: Synthetic oligonucleotide
  misc_feature 1..20: note = Target: SCN10A; (+) strand; PAM type: YTN; PAM sequence: CTC
  source 1..20: mol_type = other DNA
aggactctggcttctctgca

SEQ ID NO: 68405 - DNA, 20 bp, synthetic construct
  misc_feature 1..20: note = Description of Artificial Sequence: Synthetic oligonucleotide
  misc_feature 1..20: note = Target: SCN10A; (+) strand; PAM type: YTN; PAM sequence: CTC
  source 1..20: mol_type = other DNA
tggcttctctgcagccccac

SEQ ID NO: 68406 - DNA, 20 bp, synthetic construct
  misc_feature 1..20: note = Description of Artificial Sequence: Synthetic oligonucleotide
  misc_feature 1..20: note = Target: SCN10A; (+) strand; PAM type: YTN; PAM sequence: CTG
  source 1..20: mol_type = other DNA
gcttctctgcagccccacag

SEQ ID NO: 68407 - DNA, 20 bp, synthetic construct
  misc_feature 1..20: note = Description of Artificial Sequence: Synthetic oligonucleotide
  misc_feature 1..20: note = Target: SCN10A; (+) strand; PAM type: YTN; PAM sequence: CTT
  source 1..20: mol_type = other DNA
ctctgcagccccacagagga

SEQ ID NO: 68408 - DNA, 20 bp, synthetic construct
  misc_feature 1..20: note = Description of Artificial Sequence: Synthetic oligonucleotide
  misc_feature 1..20: note = Target: SCN10A; (+) strand; PAM type: YTN; PAM sequence: TTC
  source 1..20: mol_type = other DNA
tctgcagccccacagaggac

SEQ ID NO: 68409 - DNA, 20 bp, synthetic construct
  misc_feature 1..20: note = Description of Artificial Sequence: Synthetic oligonucleotide
  misc_feature 1..20: note = Target: SCN10A; (+) strand; PAM type: YTN; PAM sequence: CTC
  source 1..20: mol_type = other DNA
tgcagccccacagaggaccc

SEQ ID NO: 68410 - DNA, 20 bp, synthetic construct
  misc_feature 1..20: note = Description of Artificial Sequence: Synthetic oligonucleotide
  misc_feature 1..20: note = Target: SCN10A; (+) strand; PAM type: YTN; PAM sequence: CTG
  source 1..20: mol_type = other DNA
cagccccacagaggacccag

SEQ ID NO: 68411 - DNA, 20 bp, synthetic construct
  misc_feature 1..20: note = Description of Artificial Sequence: Synthetic oligonucleotide
  misc_feature 1..20: note = Target: SCN10A; (+) strand; PAM type: YTN; PAM sequence: TTT
  source 1..20: mol_type = other DNA
agctttcacggcatgccccg

SEQ ID NO: 68412 - DNA, 20 bp, synthetic construct
  misc_feature 1..20: note = Description of Artificial Sequence: Synthetic oligonucleotide
  misc_feature 1..20: note = Target: SCN10A; (+) strand; PAM type: YTN; PAM sequence: TTA
  source 1..20: mol_type = other DNA
gctttcacggcatgccccgg

SEQ ID NO: 68413 - DNA, 20 bp, synthetic construct
  misc_feature 1..20: note = Description of Artificial Sequence: Synthetic oligonucleotide
  misc_feature 1..20: note = Target: SCN10A; (+) strand; PAM type: YTN; PAM sequence: CTT
  source 1..20: mol_type = other DNA
tcacggcatgccccggcagg

SEQ ID NO: 68414 - DNA, 20 bp, synthetic construct
  misc_feature 1..20: note = Description of Artificial Sequence: Synthetic oligonucleotide
  misc_feature 1..20: note = Target: SCN10A; (+) strand; PAM type: YTN; PAM sequence: TTT
  source 1..20: mol_type = other DNA
cacggcatgccccggcaggg

SEQ ID NO: 68415 - DNA, 20 bp, synthetic construct
  misc_feature 1..20: note = Description of Artificial Sequence: Synthetic oligonucleotide
  misc_feature 1..20: note = Target: SCN10A; (+) strand; PAM type: YTN; PAM sequence: TTC
  source 1..20: mol_type = other DNA
acggcatgccccggcagggt

SEQ ID NO: 68416 - DNA, 20 bp, synthetic construct
  misc_feature 1..20: note = Description of Artificial Sequence: Synthetic oligonucleotide
  misc_feature 1..20: note = Target: SCN10A; (+) strand; PAM type: YTN; PAM sequence: TTC
  source 1..20: mol_type = other DNA
actctgtccgttatcctgag

SEQ ID NO: 68417 - DNA, 20 bp, synthetic construct
  misc_feature 1..20: note = Description of Artificial Sequence: Synthetic oligonucleotide
  misc_feature 1..20: note = Target: SCN10A; (+) strand; PAM type: YTN; PAM sequence: CTC
  source 1..20: mol_type = other DNA
tgtccgttatcctgagctgg

SEQ ID NO: 68418 - DNA, 20 bp, synthetic construct
  misc_feature 1..20: note = Description of Artificial Sequence: Synthetic oligonucleotide
  misc_feature 1..20: note = Target: SCN10A; (+) strand; PAM type: YTN; PAM sequence: CTG
  source 1..20: mol_type = other DNA
tccgttatcctgagctggcc

SEQ ID NO: 68419 - DNA, 20 bp, synthetic construct
  misc_feature 1..20: note = Description of Artificial Sequence: Synthetic oligonucleotide
  misc_feature 1..20: note = Target: SCN10A; (+) strand; PAM type: YTN; PAM sequence: TTA
  source 1..20: mol_type = other DNA
tcctgagctggcctctctct

SEQ ID NO: 68420 - DNA, 20 bp, synthetic construct
  misc_feature 1..20: note = Description of Artificial Sequence: Synthetic oligonucleotide
  misc_feature 1..20: note = Target: SCN10A; (+) strand; PAM type: YTN; PAM sequence: CTG
  source 1..20: mol_type = other DNA
agctggcctctctctgccat

SEQ ID NO: 68421 - DNA, 20 bp, synthetic construct
  misc_feature 1..20: note = Description of Artificial Sequence: Synthetic oligonucleotide
  misc_feature 1..20: note = Target: SCN10A; (+) strand; PAM type: YTN; PAM sequence: CTG
  source 1..20: mol_type = other DNA
gcctctctctgccatcccag

SEQ ID NO: 68422 - DNA, 20 bp, synthetic construct
  misc_feature 1..20: note = Description of Artificial Sequence: Synthetic oligonucleotide
  misc_feature 1..20: note = Target: SCN10A; (+) strand; PAM type: YTN; PAM sequence: CTC
  source 1..20: mol_type = other DNA
tctctgccatcccagcctgg

SEQ ID NO: 68423 - DNA, 20 bp, synthetic construct
  misc_feature 1..20: note = Description of Artificial Sequence: Synthetic oligonucleotide
  misc_feature 1..20: note = Target: SCN10A; (+) strand; PAM type: YTN; PAM sequence: CTC
  source 1..20: mol_type = other DNA
tctgccatcccagcctggtc

SEQ ID NO: 68424 - DNA, 20 bp, synthetic construct
  misc_feature 1..20: note = Description of Artificial Sequence: Synthetic oligonucleotide
  misc_feature 1..20: note = Target: SCN10A; (+) strand; PAM type: YTN; PAM sequence: CTC
  source 1..20: mol_type = other DNA
tgccatcccagcctggtcca

SEQ ID NO: 68425 - DNA, 20 bp, synthetic construct
  misc_feature 1..20: note = Description of Artificial Sequence: Synthetic oligonucleotide
  misc_feature 1..20: note = Target: SCN10A; (+) strand; PAM type: YTN; PAM sequence: CTG
  source 1..20: mol_type = other DNA
ccatcccagcctggtccact

SEQ ID NO: 68426 - DNA, 20 bp, synthetic construct
  misc_feature 1..20: note = Description of Artificial Sequence: Synthetic oligonucleotide
  misc_feature 1..20: note = Target: SCN10A; (+) strand; PAM type: YTN; PAM sequence: CTG
  source 1..20: mol_type = other DNA
gtccactcccccactgcctg

SEQ ID NO: 68427 - DNA, 20 bp, synthetic construct
  misc_feature 1..20: note = Description of Artificial Sequence: Synthetic oligonucleotide
  misc_feature 1..20: note = Target: SCN10A; (+) strand; PAM type: YTN; PAM sequence: CTC
  source 1..20: mol_type = other DNA
ccccactgcctggctggcac

SEQ ID NO: 68428 - DNA, 20 bp, synthetic construct
  misc_feature 1..20: note = Description of Artificial Sequence: Synthetic oligonucleotide
  misc_feature 1..20: note = Target: SCN10A; (+) strand; PAM type: YTN; PAM sequence: CTG
  source 1..20: mol_type = other DNA
cctggctggcacctgcccaa

SEQ ID NO: 68429 - DNA, 20 bp, synthetic construct
  misc_feature 1..20: note = Description of Artificial Sequence: Synthetic oligonucleotide
  misc_feature 1..20: note = Target: SCN10A; (+) strand; PAM type: YTN; PAM sequence: CTG
  source 1..20: mol_type = other DNA
gctggcacctgcccaatagc

SEQ ID NO: 68430 - DNA, 20 bp, synthetic construct
  misc_feature 1..20: note = Description of Artificial Sequence: Synthetic oligonucleotide
  misc_feature 1..20: note = Target: SCN10A; (+) strand; PAM type: YTN; PAM sequence: CTG
  source 1..20: mol_type = other DNA
gcacctgcccaatagcaggc

SEQ ID NO: 68431 - DNA, 20 bp, synthetic construct
  misc_feature 1..20: note = Description of Artificial Sequence: Synthetic oligonucleotide
  misc_feature 1..20: note = Target: SCN10A; (+) strand; PAM type: YTN; PAM sequence: CTG
  source 1..20: mol_type = other DNA
cccaatagcaggcctggcct

SEQ ID NO: 68432 - DNA, 20 bp, synthetic construct
  misc_feature 1..20: note = Description of Artificial Sequence: Synthetic oligonucleotide
  misc_feature 1..20: note = Target: SCN10A; (+) strand; PAM type: YTN; PAM sequence: CTG
  source 1..20: mol_type = other DNA
gcctctcagggagctgagct

SEQ ID NO: 68433 - DNA, 20 bp, synthetic construct
  misc_feature 1..20: note = Description of Artificial Sequence: Synthetic oligonucleotide
  misc_feature 1..20: note = Target: SCN10A; (+) strand; PAM type: YTN; PAM sequence: CTC
  source 1..20: mol_type = other DNA
tcagggagctgagctgtaga

SEQ ID NO: 68434 - DNA, 20 bp, synthetic construct
  misc_feature 1..20: note = Description of Artificial Sequence: Synthetic oligonucleotide
  misc_feature 1..20: note = Target: SCN10A; (+) strand; PAM type: YTN; PAM sequence: CTC
  source 1..20: mol_type = other DNA
agggagctgagctgtagagg

SEQ ID NO: 68435 - DNA, 20 bp, synthetic construct
  misc_feature 1..20: note = Description of Artificial Sequence: Synthetic oligonucleotide
  misc_feature 1..20: note = Target: SCN10A; (+) strand; PAM type: YTN; PAM sequence: CTG
  source 1..20: mol_type = other DNA
agctgtagaggtgtgtagat

SEQ ID NO: 68436 - DNA, 20 bp, synthetic construct
  misc_feature 1..20: note = Description of Artificial Sequence: Synthetic oligonucleotide
  misc_feature 1..20: note = Target: SCN10A; (+) strand; PAM type: YTN; PAM sequence: CTG
  source 1..20: mol_type = other DNA
tagaggtgtgtagatggacc

SEQ ID NO: 68437 - DNA, 20 bp, synthetic construct
  misc_feature 1..20: note = Description of Artificial Sequence: Synthetic oligonucleotide
  misc_feature 1..20: note = Target: SCN10A; (+) strand; PAM type: YTN; PAM sequence: CTT
  source 1..20: mol_type = other DNA
taccacaaaaaggacttgag

SEQ ID NO: 68438 - DNA, 20 bp, synthetic construct
  misc_feature 1..20: note = Description of Artificial Sequence: Synthetic oligonucleotide
  misc_feature 1..20: note = Target: SCN10A; (+) strand; PAM type: YTN; PAM sequence: TTT
  source 1..20: mol_type = other DNA
accacaaaaaggacttgagc

SEQ ID NO: 68439 - DNA, 20 bp, synthetic construct
  misc_feature 1..20: note = Description of Artificial Sequence: Synthetic oligonucleotide
  misc_feature 1..20: note = Target: SCN10A; (+) strand; PAM type: YTN; PAM sequence: TTA
  source 1..20: mol_type = other DNA
ccacaaaaaggacttgagct

SEQ ID NO: 68440 - DNA, 20 bp, synthetic construct
  misc_feature 1..20: note = Description of Artificial Sequence: Synthetic oligonucleotide
  misc_feature 1..20: note = Target: SCN10A; (+) strand; PAM type: YTN; PAM sequence: CTT
  source 1..20: mol_type = other DNA
gagctgctctggagccattg

SEQ ID NO: 68441 - DNA, 20 bp, synthetic construct
  misc_feature 1..20: note = Description of Artificial Sequence: Synthetic oligonucleotide
  misc_feature 1..20: note = Target: SCN10A; (+) strand; PAM type: YTN; PAM sequence: TTG
  source 1..20: mol_type = other DNA
agctgctctggagccattgc

SEQ ID NO: 68442 - DNA, 20 bp, synthetic construct
  misc_feature 1..20: note = Description of Artificial Sequence: Synthetic oligonucleotide
  misc_feature 1..20: note = Target: SCN10A; (+) strand; PAM type: YTN; PAM sequence: CTG
  source 1..20: mol_type = other DNA
ctctggagccattgccttga

SEQ ID NO: 68443 - DNA, 20 bp, synthetic construct
  misc_feature 1..20: note = Description of Artificial Sequence: Synthetic oligonucleotide
  misc_feature 1..20: note = Target: SCN10A; (+) strand; PAM type: YTN; PAM sequence: CTC
  source 1..20: mol_type = other DNA
tggagccattgccttgagaa

SEQ ID NO: 68444 - DNA, 20 bp, synthetic construct
  misc_feature 1..20: note = Description of Artificial Sequence: Synthetic oligonucleotide
  misc_feature 1..20: note = Target: SCN10A; (+) strand; PAM type: YTN; PAM sequence: CTG
  source 1..20: mol_type = other DNA
gagccattgccttgagaaat

SEQ ID NO: 68445 - DNA, 20 bp, synthetic construct
  misc_feature 1..20: note = Description of Artificial Sequence: Synthetic oligonucleotide
  misc_feature 1..20: note = Target: SCN10A; (+) strand; PAM type: YTN; PAM sequence: TTG
  source 1..20: mol_type = other DNA
ccttgagaaatgccattatc

SEQ ID NO: 68446 - DNA, 20 bp, synthetic construct
  misc_feature 1..20: note = Description of Artificial Sequence: Synthetic oligonucleotide
  misc_feature 1..20: note = Target: SCN10A; (+) strand; PAM type: YTN; PAM sequence: CTT
  source 1..20: mol_type = other DNA
gagaaatgccattatctaga

SEQ ID NO: 68447 - DNA, 20 bp, synthetic construct
  misc_feature 1..20: note = Description of Artificial Sequence: Synthetic oligonucleotide
  misc_feature 1..20: note = Target: SCN10A; (+) strand; PAM type: YTN; PAM sequence: TTG
  source 1..20: mol_type = other DNA
agaaatgccattatctagac

SEQ ID NO: 68448 - DNA, 20 bp, synthetic construct
  misc_feature 1..20: note = Description of Artificial Sequence: Synthetic oligonucleotide
  misc_feature 1..20: note = Target: SCN10A; (+) strand; PAM type: YTN; PAM sequence: TTA
  source 1..20: mol_type = other DNA
tctagacagaaggatgctga

SEQ ID NO: 68449 - DNA, 20 bp, synthetic construct
  misc_feature 1..20: note = Description of Artificial Sequence: Synthetic oligonucleotide
  misc_feature 1..20: note = Target: SCN10A; (+) strand; PAM type: YTN; PAM sequence: CTA
  source 1..20: mol_type = other DNA
gacagaaggatgctgagggg

SEQ ID NO: 68450 - DNA, 20 bp, synthetic construct
  misc_feature 1..20: note = Description of Artificial Sequence: Synthetic oligonucleotide
  misc_feature 1..20: note = Target: SCN10A; (+) strand; PAM type: YTN; PAM sequence: CTG
  source 1..20: mol_type = other DNA
aggggctcttggtttacatt

SEQ ID NO: 68451 - DNA, 20 bp, synthetic construct
  misc_feature 1..20: note = Description of Artificial Sequence: Synthetic oligonucleotide
  misc_feature 1..20: note = Target: SCN10A; (+) strand; PAM type: YTN; PAM sequence: CTC
  source 1..20: mol_type = other DNA
ttggtttacatttaagtcaa

SEQ ID NO: 68452 - DNA, 20 bp, synthetic construct
  misc_feature 1..20: note = Description of Artificial Sequence: Synthetic oligonucleotide
  misc_feature 1..20: note = Target: SCN10A; (+) strand; PAM type: YTN; PAM sequence: CTT
  source 1..20: mol_type = other DNA
ggtttacatttaagtcaaag

SEQ ID NO: 68453 - DNA, 20 bp, synthetic construct
  misc_feature 1..20: note = Description of Artificial Sequence: Synthetic oligonucleotide
  misc_feature 1..20: note = Target: SCN10A; (+) strand; PAM type: YTN; PAM sequence: TTG
  source 1..20: mol_type = other DNA
gtttacatttaagtcaaagg

SEQ ID NO: 68454 - DNA, 20 bp, synthetic construct
  misc_feature 1..20: note = Description of Artificial Sequence: Synthetic oligonucleotide
  misc_feature 1..20: note = Target: SCN10A; (+) strand; PAM type: YTN; PAM sequence: TTT
  source 1..20: mol_type = other DNA
acatttaagtcaaaggcaaa

SEQ ID NO: 68455 - DNA, 20 bp, synthetic construct
  misc_feature 1..20: note = Description of Artificial Sequence: Synthetic oligonucleotide
  misc_feature 1..20: note = Target: SCN10A; (+) strand; PAM type: YTN; PAM sequence: TTA
  source 1..20: mol_type = other DNA
catttaagtcaaaggcaaat

SEQ ID NO: 68456 - DNA, 20 bp, synthetic construct
  misc_feature 1..20: note = Description of Artificial Sequence: Synthetic oligonucleotide
  misc_feature 1..20: note = Target: SCN10A; (+) strand; PAM type: YTN; PAM sequence: TTT
  source 1..20: mol_type = other DNA
aagtcaaaggcaaatgaaaa

SEQ ID NO: 68457 - DNA, 20 bp, synthetic construct
  misc_feature 1..20: note = Description of Artificial Sequence: Synthetic oligonucleotide
  misc_feature 1..20: note = Target: SCN10A; (+) strand; PAM type: YTN; PAM sequence: TTA
  source 1..20: mol_type = other DNA
agtcaaaggcaaatgaaaac

SEQ ID NO: 68458 - DNA, 20 bp, synthetic construct
  misc_feature 1..20: note = Description of Artificial Sequence: Synthetic oligonucleotide
  misc_feature 1..20: note = Target: SCN10A; (+) strand; PAM type: YTN; PAM sequence: CTG
  source 1..20: mol_type = other DNA
atgtcagaacaaccctctca

SEQ ID NO: 68459 - DNA, 20 bp, synthetic construct
  misc_feature 1..20: note = Description of Artificial Sequence: Synthetic oligonucleotide
  misc_feature 1..20: note = Target: SCN10A; (+) strand; PAM type: YTN; PAM sequence: CTC
  source 1..20: mol_type = other DNA
tcatgagccaaagaaccaaa

SEQ ID NO: 68460 - DNA, 20 bp, synthetic construct
  misc_feature 1..20: note = Description of Artificial Sequence: Synthetic oligonucleotide
  misc_feature 1..20: note = Target: SCN10A; (+) strand; PAM type: YTN; PAM sequence: CTC
  source 1..20: mol_type = other DNA
atgagccaaagaaccaaatg

SEQ ID NO: 68461 - DNA, 20 bp, synthetic construct
  misc_feature 1..20: note = Description of Artificial Sequence: Synthetic oligonucleotide
  misc_feature 1..20: note = Target: SCN10A; (+) strand; PAM type: YTN; PAM sequence: TTT
  source 1..20: mol_type = other DNA
gtgaaagaacagtccaagga

SEQ ID NO: 68462 - DNA, 20 bp, synthetic construct
  misc_feature 1..20: note = Description of Artificial Sequence: Synthetic oligonucleotide
  misc_feature 1..20: note = Target: SCN10A; (+) strand; PAM type: YTN; PAM sequence: TTG
  source 1..20: mol_type = other DNA
tgaaagaacagtccaaggaa

SEQ ID NO: 68463 - DNA, 20 bp, synthetic construct
  misc_feature 1..20: note = Description of Artificial Sequence: Synthetic oligonucleotide
  misc_feature 1..20: note = Target: SCN10A; (+) strand; PAM type: YTN; PAM sequence: CTG
  source 1..20: mol_type = other DNA
atgttgaccaaatgctcctg

SEQ ID NO: 68464 - DNA, 20 bp, synthetic construct
  misc_feature 1..20: note = Description of Artificial Sequence: Synthetic oligonucleotide
  misc_feature 1..20: note = Target: SCN10A; (+) strand; PAM type: YTN; PAM sequence: TTG
  source 1..20: mol_type = other DNA
accaaatgctcctgcttgtt

SEQ ID NO: 68465 - DNA, 20 bp, synthetic construct
  misc_feature 1..20: note = Description of Artificial Sequence: Synthetic oligonucleotide
  misc_feature 1..20: note = Target: SCN10A; (+) strand; PAM type: YTN; PAM sequence: CTC
  source 1..20: mol_type = other DNA
ctgcttgtttccagtcctca

SEQ ID NO: 68466 - DNA, 20 bp, synthetic construct
  misc_feature 1..20: note = Description of Artificial Sequence: Synthetic oligonucleotide
  misc_feature 1..20: note = Target: SCN10A; (+) strand; PAM type: YTN; PAM sequence: CTG
  source 1..20: mol_type = other DNA
cttgtttccagtcctcagct

SEQ ID NO: 68467 - DNA, 20 bp, synthetic construct
  misc_feature 1..20: note = Description of Artificial Sequence: Synthetic oligonucleotide
  misc_feature 1..20: note = Target: SCN10A; (+) strand; PAM type: YTN; PAM sequence: CTT
  source 1..20: mol_type = other DNA
gtttccagtcctcagctcca

SEQ ID NO: 68468 - DNA, 20 bp, synthetic construct
  misc_feature 1..20: note = Description of Artificial Sequence: Synthetic oligonucleotide
  misc_feature 1..20: note = Target: SCN10A; (+) strand; PAM type: YTN; PAM sequence: TTG
  source 1..20: mol_type = other DNA
tttccagtcctcagctccaa

SEQ ID NO: 68469 - DNA, 20 bp, synthetic construct
  misc_feature 1..20: note = Description of Artificial Sequence: Synthetic oligonucleotide
  misc_feature 1..20: note = Target: SCN10A; (+) strand; PAM type: YTN; PAM sequence: TTT
  source 1..20: mol_type = other DNA
ccagtcctcagctccaactg

SEQ ID NO: 68470 - DNA, 20 bp, synthetic construct
  misc_feature 1..20: note = Description of Artificial Sequence: Synthetic oligonucleotide
  misc_feature 1..20: note = Target: SCN10A; (+) strand; PAM type: YTN; PAM sequence: TTC
  source 1..20: mol_type = other DNA
cagtcctcagctccaactga

SEQ ID NO: 68471 - DNA, 20 bp, synthetic construct
  misc_feature 1..20: note = Description of Artificial Sequence: Synthetic oligonucleotide
  misc_feature 1..20: note = Target: SCN10A; (+) strand; PAM type: YTN; PAM sequence: CTC
  source 1..20: mol_type = other DNA
agctccaactgagatagttt

SEQ ID NO: 68472 - DNA, 20 bp, synthetic construct
  misc_feature 1..20: note = Description of Artificial Sequence: Synthetic oligonucleotide
  misc_feature 1..20: note = Target: SCN10A; (+) strand; PAM type: YTN; PAM sequence: CTC
  source 1..20: mol_type = other DNA
caactgagatagttttccta

SEQ ID NO: 68473 - DNA, 20 bp, synthetic construct
  misc_feature 1..20: note = Description of Artificial Sequence: Synthetic oligonucleotide
  misc_feature 1..20: note = Target: SCN10A; (+) strand; PAM type: YTN; PAM sequence: CTG
  source 1..20: mol_type = other DNA
agatagttttcctagtgagc

SEQ ID NO: 68474 - DNA, 20 bp, synthetic construct
  misc_feature 1..20: note = Description of Artificial Sequence: Synthetic oligonucleotide
  misc_feature 1..20: note = Target: SCN10A; (+) strand; PAM type: YTN; PAM sequence: TTT
  source 1..20: mol_type = other DNA
tcctagtgagctgatgaagg

SEQ ID NO: 68475 - DNA, 20 bp, synthetic construct
  misc_feature 1..20: note = Description of Artificial Sequence: Synthetic oligonucleotide
  misc_feature 1..20: note = Target: SCN10A; (+) strand; PAM type: YTN; PAM sequence: TTT
  source 1..20: mol_type = other DNA
cctagtgagctgatgaaggt

SEQ ID NO: 68476 - DNA, 20 bp, synthetic construct
  misc_feature 1..20: note = Description of Artificial Sequence: Synthetic oligonucleotide
  misc_feature 1..20: note = Target: SCN10A; (+) strand; PAM type: YTN; PAM sequence: TTC
  source 1..20: mol_type = other DNA
ctagtgagctgatgaaggtg

SEQ ID NO: 68477 - DNA, 20 bp, synthetic construct
  misc_feature 1..20: note = Description of Artificial Sequence: Synthetic oligonucleotide
  misc_feature 1..20: note = Target: SCN10A; (+) strand; PAM type: YTN; PAM sequence: CTA
  source 1..20: mol_type = other DNA
gtgagctgatgaaggtggag

SEQ ID NO: 68478 - DNA, 20 bp, synthetic construct
  misc_feature 1..20: note = Description of Artificial Sequence: Synthetic oligonucleotide
  misc_feature 1..20: note = Target: SCN10A; (+) strand; PAM type: YTN; PAM sequence: CTG
  source 1..20: mol_type = other DNA
atgaaggtggagcctcatgc

SEQ ID NO: 68479 - DNA, 20 bp, synthetic construct
  misc_feature 1..20: note = Description of Artificial Sequence: Synthetic oligonucleotide
  misc_feature 1..20: note = Target: SCN10A; (+) strand; PAM type: YTN; PAM sequence: CTC
  source 1..20: mol_type = other DNA
atgcaggctccacacaggtc

SEQ ID NO: 68480 - DNA, 20 bp, synthetic construct
  misc_feature 1..20: note = Description of Artificial Sequence: Synthetic oligonucleotide
  misc_feature 1..20: note = Target: SCN10A; (+) strand; PAM type: YTN; PAM sequence: CTC
  source 1..20: mol_type = other DNA
cacacaggtcgacctgggca

SEQ ID NO: 68481 - DNA, 20 bp, synthetic construct
  misc_feature 1..20: note = Description of Artificial Sequence: Synthetic oligonucleotide
  misc_feature 1..20: note = Target: SCN10A; (+) strand; PAM type: YTN; PAM sequence: CTG
  source 1..20: mol_type = other DNA
ggcaacatggagccgtcagc

SEQ ID NO: 68482 - DNA, 20 bp, synthetic construct
  misc_feature 1..20: note = Description of Artificial Sequence: Synthetic oligonucleotide
  misc_feature 1..20: note = Target: SCN10A; (+) strand; PAM type: YTN; PAM sequence: CTC
  source 1..20: mol_type = other DNA
tcaggcactgggggtgttgt

SEQ ID NO: 68483 - DNA, 20 bp, synthetic construct
  misc_feature 1..20: note = Description of Artificial Sequence: Synthetic oligonucleotide
  misc_feature 1..20: note = Target: SCN10A; (+) strand; PAM type: YTN; PAM sequence: CTC
  source 1..20: mol_type = other DNA
aggcactgggggtgttgtga

SEQ ID NO: 68484 - DNA, 20 bp, synthetic construct
  misc_feature 1..20: note = Description of Artificial Sequence: Synthetic oligonucleotide
  misc_feature 1..20: note = Target: SCN10A; (+) strand; PAM type: YTN; PAM sequence: CTG
  source 1..20: mol_type = other DNA
ggggtgttgtgagctctgct

SEQ ID NO: 68485 - DNA, 20 bp, synthetic construct
  misc_feature 1..20: note = Description of Artificial Sequence: Synthetic oligonucleotide
  misc_feature 1..20: note = Target: SCN10A; (+) strand; PAM type: YTN; PAM sequence: TTG
  source 1..20: mol_type = other DNA
tgagctctgcttttccaagc

SEQ ID NO: 68486 - DNA, 20 bp, synthetic construct
  misc_feature 1..20: note = Description of Artificial Sequence: Synthetic oligonucleotide
  misc_feature 1..20: note = Target: SCN10A; (+) strand; PAM type: YTN; PAM sequence: CTC
  source 1..20: mol_type = other DNA
tgcttttccaagctctcagc

SEQ ID NO: 68487 - DNA, 20 bp, synthetic construct
  misc_feature 1..20: note = Description of Artificial Sequence: Synthetic oligonucleotide
  misc_feature 1..20: note = Target: SCN10A; (+) strand; PAM type: YTN; PAM sequence: CTG
  source 1..20: mol_type = other DNA
cttttccaagctctcagcca

SEQ ID NO: 68488 - DNA, 20 bp, synthetic construct
  misc_feature 1..20: note = Description of Artificial Sequence: Synthetic oligonucleotide
  misc_feature 1..20: note = Target: SCN10A; (+) strand; PAM type: YTN; PAM sequence: CTT
  source 1..20: mol_type = other DNA
ttccaagctctcagccatgg

SEQ ID NO: 68489 - DNA, 20 bp, synthetic construct
  misc_feature 1..20: note = Description of Artificial Sequence: Synthetic oligonucleotide
  misc_feature 1..20: note = Target: SCN10A; (+) strand; PAM type: YTN; PAM sequence: TTT
  source 1..20: mol_type = other DNA
tccaagctctcagccatgga

SEQ ID NO: 68490 - DNA, 20 bp, synthetic construct
  misc_feature 1..20: note = Description of Artificial Sequence: Synthetic oligonucleotide
  misc_feature 1..20: note = Target: SCN10A; (+) strand; PAM type: YTN; PAM sequence: TTT
  source 1..20: mol_type = other DNA
ccaagctctcagccatggag

SEQ ID NO: 68491 - DNA, 20 bp, synthetic construct
  misc_feature 1..20: note = Description of Artificial Sequence: Synthetic oligonucleotide
  misc_feature 1..20: note = Target: SCN10A; (+) strand; PAM type: YTN; PAM sequence: TTC
  source 1..20: mol_type = other DNA
caagctctcagccatggagg

SEQ ID NO: 68492 - DNA, 20 bp, synthetic construct
  misc_feature 1..20: note = Description of Artificial Sequence: Synthetic oligonucleotide
  misc_feature 1..20: note = Target: SCN10A; (+) strand; PAM type: YTN; PAM sequence: CTC
  source 1..20: mol_type = other DNA
tcagccatggaggtgggtga

SEQ ID NO: 68493 - DNA, 20 bp, synthetic construct
  misc_feature 1..20: note = Description of Artificial Sequence: Synthetic oligonucleotide
  misc_feature 1..20: note = Target: SCN10A; (+) strand; PAM type: YTN; PAM sequence: CTC
  source 1..20: mol_type = other DNA
agccatggaggtgggtgaga

SEQ ID NO: 68494 - DNA, 20 bp, synthetic construct
  misc_feature 1..20: note = Description of Artificial Sequence: Synthetic oligonucleotide
  misc_feature 1..20: note = Target: SCN10A; (+) strand; PAM type: YTN; PAM sequence: CTT
  source 1..20: mol_type = other DNA
tttgatcttttgcctaaagt

SEQ ID NO: 68495 - DNA, 20 bp, synthetic construct
  misc_feature 1..20: note = Description of Artificial Sequence: Synthetic oligonucleotide
  misc_feature 1..20: note = Target: SCN10A; (+) strand; PAM type: YTN; PAM sequence: TTT
  source 1..20: mol_type = other DNA
ttgatcttttgcctaaagtc

SEQ ID NO: 68496 - DNA, 20 bp, synthetic construct
  misc_feature 1..20: note = Description of Artificial Sequence: Synthetic oligonucleotide
  misc_feature 1..20: note = Target: SCN10A; (+) strand; PAM type: YTN; PAM sequence: TTT
  source 1..20: mol_type = other DNA
tgatcttttgcctaaagtct

SEQ ID NO: 68497 - DNA, 20 bp, synthetic construct
  misc_feature 1..20: note = Description of Artificial Sequence: Synthetic oligonucleotide
  misc_feature 1..20: note = Target: SCN10A; (+) strand; PAM type: YTN; PAM sequence: TTT
  source 1..20: mol_type = other DNA
gatcttttgcctaaagtctt

SEQ ID NO: 68498 - DNA, 20 bp, synthetic construct
  misc_feature 1..20: note = Description of Artificial Sequence: Synthetic oligonucleotide
  misc_feature 1..20: note = Target: SCN10A; (+) strand; PAM type: YTN; PAM sequence: TTG
  source 1..20: mol_type = other DNA
atcttttgcctaaagtcttt

SEQ ID NO: 68499 - DNA, 20 bp, synthetic construct
  misc_feature 1..20: note = Description of Artificial Sequence: Synthetic oligonucleotide
  misc_feature 1..20: note = Target: SCN10A; (+) strand; PAM type: YTN; PAM sequence: CTT
  source 1..20: mol_type = other DNA
ttgcctaaagtctttctgct

SEQ ID NO: 68500 - DNA, 20 bp, synthetic construct
  misc_feature 1..20: note = Description of Artificial Sequence: Synthetic oligonucleotide
  misc_feature 1..20: note = Target: SCN10A; (+) strand; PAM type: YTN; PAM sequence: TTT
  source 1..20: mol_type = other DNA
tgcctaaagtctttctgctc

SEQ ID NO: 68501 - DNA, 20 bp, synthetic construct
  misc_feature 1..20: note = Description of Artificial Sequence: Synthetic oligonucleotide
  misc_feature 1..20: note = Target: SCN10A; (+) strand; PAM type: YTN; PAM sequence: TTT
  source 1..20: mol_type = other DNA
gcctaaagtctttctgctca

SEQ ID NO: 68502 - DNA, 20 bp, synthetic construct
  misc_feature 1..20: note = Description of Artificial Sequence: Synthetic oligonucleotide
  misc_feature 1..20: note = Target: SCN10A; (+) strand; PAM type: YTN; PAM sequence: TTG
  source 1..20: mol_type = other DNA
cctaaagtctttctgctcat

SEQ ID NO: 68503 - DNA, 20 bp, synthetic construct
  misc_feature 1..20: note = Description of Artificial Sequence: Synthetic oligonucleotide
  misc_feature 1..20: note = Target: SCN10A; (+) strand; PAM type: YTN; PAM sequence: CTA
  source 1..20: mol_type = other DNA
aagtctttctgctcatgcct

SEQ ID NO: 68504 - DNA, 20 bp, synthetic construct
  misc_feature 1..20: note = Description of Artificial Sequence: Synthetic oligonucleotide
  misc_feature 1..20: note = Target: SCN10A; (+) strand; PAM type: YTN; PAM sequence: CTT
  source 1..20: mol_type = other DNA
tctgctcatgccttcctcca

SEQ ID NO: 68505 - DNA, 20 bp, synthetic construct
  misc_feature 1..20: note = Description of Artificial Sequence: Synthetic oligonucleotide
  misc_feature 1..20: note = Target: SCN10A; (+) strand; PAM type: YTN; PAM sequence: TTT
  source 1..20: mol_type = other DNA
ctgctcatgccttcctccag

SEQ ID NO: 68506 - DNA, 20 bp, synthetic construct
  misc_feature 1..20: note = Description of Artificial Sequence: Synthetic oligonucleotide
  misc_feature 1..20: note = Target: SCN10A; (+) strand; PAM type: YTN; PAM sequence: TTC
  source 1..20: mol_type = other DNA
tgctcatgccttcctccagt

SEQ ID NO: 68507 - DNA, 20 bp, synthetic construct
  misc_feature 1..20: note = Description of Artificial Sequence: Synthetic oligonucleotide
  misc_feature 1..20: note = Target: SCN10A; (+) strand; PAM type: YTN; PAM sequence: CTG
  source 1..20: mol_type = other DNA
ctcatgccttcctccagtgg

SEQ ID NO: 68508 - DNA, 20 bp, synthetic construct
  misc_feature 1..20: note = Description of Artificial Sequence: Synthetic oligonucleotide
  misc_feature 1..20: note = Target: SCN10A; (+) strand; PAM type: YTN; PAM sequence: CTC
  source 1..20: mol_type = other DNA
atgccttcctccagtggcca

SEQ ID NO: 68509 - DNA, 20 bp, synthetic construct
  misc_feature 1..20: note = Description of Artificial Sequence: Synthetic oligonucleotide
  misc_feature 1..20: note = Target: SCN10A; (+) strand; PAM type: YTN; PAM sequence: CTT
  source 1..20: mol_type = other DNA
cctccagtggccaaagcagc

SEQ ID NO: 68510 - DNA, 20 bp, synthetic construct
  misc_feature 1..20: note = Description of Artificial Sequence: Synthetic oligonucleotide
  misc_feature 1..20: note = Target: SCN10A; (+) strand; PAM type: YTN; PAM sequence: TTC
  source 1..20: mol_type = other DNA
ctccagtggccaaagcagca

SEQ ID NO: 68511 - DNA, 20 bp, synthetic construct
  misc_feature 1..20: note = Description of Artificial Sequence: Synthetic oligonucleotide
  misc_feature 1..20: note = Target: SCN10A; (+) strand; PAM type: YTN; PAM sequence: CTC
  source 1..20: mol_type = other DNA
cagtggccaaagcagcaggc

SEQ ID NO: 68512 - DNA, 20 bp, synthetic construct
  misc_feature 1..20: note = Description of Artificial Sequence: Synthetic oligonucleotide
  misc_feature 1..20: note = Target: SCN10A; (+) strand; PAM type: YTN; PAM sequence: CTG
  source 1..20: mol_type = other DNA
aggggtcctcatcccttagc

SEQ ID NO: 68513 - DNA, 20 bp, synthetic construct
  misc_feature 1..20: note = Description of Artificial Sequence: Synthetic oligonucleotide
  misc_feature 1..20: note = Target: SCN10A; (+) strand; PAM type: YTN; PAM sequence: CTC
  source 1..20: mol_type = other DNA
atcccttagctttgtctcac

SEQ ID NO: 68514 - DNA, 20 bp, synthetic construct
  misc_feature 1..20: note = Description of Artificial Sequence: Synthetic oligonucleotide
  misc_feature 1..20: note = Target: SCN10A; (+) strand; PAM type: YTN; PAM sequence: CTT
  source 1..20: mol_type = other DNA
agctttgtctcacattctgt

SEQ ID NO: 68515 - DNA, 20 bp, synthetic construct
  misc_feature 1..20: note = Description of Artificial Sequence: Synthetic oligonucleotide
  misc_feature 1..20: note = Target: SCN10A; (+) strand; PAM type: YTN; PAM sequence: TTA
  source 1..20: mol_type = other DNA
gctttgtctcacattctgtt

SEQ ID NO: 68516 - DNA, 20 bp, synthetic construct
  misc_feature 1..20: note = Description of Artificial Sequence: Synthetic oligonucleotide
  misc_feature 1..20: note = Target: SCN10A; (+) strand; PAM type: YTN; PAM sequence: CTT
  source 1..20: mol_type = other DNA
tgtctcacattctgttctgc

SEQ ID NO: 68517 - DNA, 20 bp, synthetic construct
  misc_feature 1..20: note = Description of Artificial Sequence: Synthetic oligonucleotide
  misc_feature 1..20: note = Target: SCN10A; (+) strand; PAM type: YTN; PAM sequence: TTT
  source 1..20: mol_type = other DNA
gtctcacattctgttctgcc

SEQ ID NO: 68518 - DNA, 20 bp, synthetic construct
  misc_feature 1..20: note = Description of Artificial Sequence: Synthetic oligonucleotide
  misc_feature 1..20: note = Target: SCN10A; (+) strand; PAM type: YTN; PAM sequence: TTG
  source 1..20: mol_type = other DNA
tctcacattctgttctgcca

SEQ ID NO: 68519 - DNA, 20 bp, synthetic construct
  misc_feature 1..20: note = Description of Artificial Sequence: Synthetic oligonucleotide
  misc_feature 1..20: note = Target: SCN10A; (+) strand; PAM type: YTN; PAM sequence: CTC
  source 1..20: mol_type = other DNA
acattctgttctgccacctg

SEQ ID NO: 68520 - DNA, 20 bp, synthetic construct
  misc_feature 1..20: note = Description of Artificial Sequence: Synthetic oligonucleotide
  misc_feature 1..20: note = Target: SCN10A; (+) strand; PAM type: YTN; PAM sequence: TTC
  source 1..20: mol_type = other DNA
tgttctgccacctggaatgg

SEQ ID NO: 68521 - DNA, 20 bp, synthetic construct
  misc_feature 1..20: note = Description of Artificial Sequence: Synthetic oligonucleotide
  misc_feature 1..20: note = Target: SCN10A; (+) strand; PAM type: YTN; PAM sequence: CTG
  source 1..20: mol_type = other DNA
ttctgccacctggaatggtc

SEQ ID NO: 68522 - DNA, 20 bp, synthetic construct
  misc_feature 1..20: note = Description of Artificial Sequence: Synthetic oligonucleotide
  misc_feature 1..20: note = Target: SCN10A; (+) strand; PAM type: YTN; PAM sequence: TTC
  source 1..20: mol_type = other DNA
tgccacctggaatggtcttc

SEQ ID NO: 68523 - DNA, 20 bp, synthetic construct
  misc_feature 1..20: note = Description of Artificial Sequence: Synthetic oligonucleotide
  misc_feature 1..20: note = Target: SCN10A; (+) strand; PAM type: YTN; PAM sequence: CTG
  source 1..20: mol_type = other DNA
ccacctggaatggtcttcgc

SEQ ID NO: 68524 - DNA, 20 bp, synthetic construct
  misc_feature 1..20: note = Description of Artificial Sequence: Synthetic oligonucleotide
  misc_feature 1..20: note = Target: SCN10A; (+) strand; PAM type: YTN; PAM sequence: CTG
  source 1..20: mol_type = other DNA
gaatggtcttcgctgaaact

SEQ ID NO: 68525 - DNA, 20 bp, synthetic construct
  misc_feature 1..20: note = Description of Artificial Sequence: Synthetic oligonucleotide
  misc_feature 1..20: note = Target: SCN10A; (+) strand; PAM type: YTN; PAM sequence: CTT
  source 1..20: mol_type = other DNA
cgctgaaactatctcgtatt

SEQ ID NO: 68526 - DNA, 20 bp, synthetic construct
  misc_feature 1..20: note = Description of Artificial Sequence: Synthetic oligonucleotide
  misc_feature 1..20: note = Target: SCN10A; (+) strand; PAM type: YTN; PAM sequence: TTC
  source 1..20: mol_type = other DNA
gctgaaactatctcgtattc

SEQ ID NO: 68527 - DNA, 20 bp, synthetic construct
  misc_feature 1..20: note = Description of Artificial Sequence: Synthetic oligonucleotide
  misc_feature 1..20: note = Target: SCN10A; (+) strand; PAM type: YTN; PAM sequence: CTG
  source 1..20: mol_type = other DNA
aaactatctcgtattcaccc

SEQ ID NO: 68528 - DNA, 20 bp, synthetic construct
  misc_feature 1..20: note = Description of Artificial Sequence: Synthetic oligonucleotide
  misc_feature 1..20: note = Target: SCN10A; (+) strand; PAM type: YTN; PAM sequence: CTA
  source 1..20: mol_type = other DNA
tctcgtattcacccagcctg

SEQ ID NO: 68529 - DNA, 20 bp, synthetic construct
  misc_feature 1..20: note = Description of Artificial Sequence: Synthetic oligonucleotide
  misc_feature 1..20: note = Target: SCN10A; (+) strand; PAM type: YTN; PAM sequence: CTC
  source 1..20: mol_type = other DNA
gtattcacccagcctggaga

SEQ ID NO: 68530 - DNA, 20 bp, synthetic construct
  misc_feature 1..20: note = Description of Artificial Sequence: Synthetic oligonucleotide
  misc_feature 1..20: note = Target: SCN10A; (+) strand; PAM type: YTN; PAM sequence: TTC
  source 1..20: mol_type = other DNA
acccagcctggagacatcct

SEQ ID NO: 68531 - DNA, 20 bp, synthetic construct
  misc_feature 1..20: note = Description of Artificial Sequence: Synthetic oligonucleotide
  misc_feature 1..20: note = Target: SCN10A; (+) strand; PAM type: YTN; PAM sequence: CTG
  source 1..20: mol_type = other DNA
gagacatcctacctgccctt

SEQ ID NO: 68532 - DNA, 20 bp, synthetic construct
  misc_feature 1..20: note = Description of Artificial Sequence: Synthetic oligonucleotide
  misc_feature 1..20: note = Target: SCN10A; (+) strand; PAM type: YTN; PAM sequence: CTA
  source 1..20: mol_type = other DNA
cctgcccttgaaagctcacc

SEQ ID NO: 68533 - DNA, 20 bp, synthetic construct
  misc_feature 1..20: note = Description of Artificial Sequence: Synthetic oligonucleotide
  misc_feature 1..20: note = Target: SCN10A; (+) strand; PAM type: YTN; PAM sequence: CTG
  source 1..20: mol_type = other DNA
cccttgaaagctcacctcaa

SEQ ID NO: 68534 - DNA, 20 bp, synthetic construct
  misc_feature 1..20: note = Description of Artificial Sequence: Synthetic oligonucleotide
  misc_feature 1..20: note = Target: SCN10A; (+) strand; PAM type: YTN; PAM sequence: CTT
  source 1..20: mol_type = other DNA
gaaagctcacctcaaacacc

SEQ ID NO: 68535 - DNA, 20 bp, synthetic construct
  misc_feature 1..20: note = Description of Artificial Sequence: Synthetic oligonucleotide
  misc_feature 1..20: note = Target: SCN10A; (+) strand; PAM type: YTN; PAM sequence: TTG
  source 1..20: mol_type = other DNA
aaagctcacctcaaacacca

SEQ ID NO: 68536 - DNA, 20 bp, synthetic construct
  misc_feature 1..20: note = Description of Artificial Sequence: Synthetic oligonucleotide
  misc_feature 1..20: note = Target: SCN10A; (+) strand; PAM type: YTN; PAM sequence: CTC
  source 1..20: mol_type = other DNA
acctcaaacaccacctccag

SEQ ID NO: 68537 - DNA, 20 bp, synthetic construct
  misc_feature 1..20: note = Description of Artificial Sequence: Synthetic oligonucleotide
  misc_feature 1..20: note = Target: SCN10A; (+) strand; PAM type: YTN; PAM sequence: CTC
  source 1..20: mol_type = other DNA
aaacaccacctccaggaagc

SEQ ID NO: 68538 - DNA, 20 bp, synthetic construct
  misc_feature 1..20: note = Description of Artificial Sequence: Synthetic oligonucleotide
  misc_feature 1..20: note = Target: SCN10A; (+) strand; PAM type: YTN; PAM sequence: CTC
  source 1..20: mol_type = other DNA
caggaagccttccctacttt

SEQ ID NO: 68539 - DNA, 20 bp, synthetic construct
  misc_feature 1..20: note = Description of Artificial Sequence: Synthetic oligonucleotide
  misc_feature 1..20: note = Target: SCN10A; (+) strand; PAM type: YTN; PAM sequence: CTT
  source 1..20: mol_type = other DNA
ccctactttctctcttgcct

SEQ ID NO: 68540 - DNA, 20 bp, synthetic construct
  misc_feature 1..20: note = Description of Artificial Sequence: Synthetic oligonucleotide
  misc_feature 1..20: note = Target: SCN10A; (+) strand; PAM type: YTN; PAM sequence: TTC
  source 1..20: mol_type = other DNA
cctactttctctcttgcctc

SEQ ID NO: 68541 - DNA, 20 bp, synthetic construct
  misc_feature 1..20: note = Description of Artificial Sequence: Synthetic oligonucleotide
  misc_feature 1..20: note = Target: SCN10A; (+) strand; PAM type: YTN; PAM sequence: CTA
  source 1..20: mol_type = other DNA
ctttctctcttgcctcacac

SEQ ID NO: 68542 - DNA, 20 bp, synthetic construct
  misc_feature 1..20: note = Description of Artificial Sequence: Synthetic oligonucleotide
  misc_feature 1..20: note = Target: SCN10A; (+) strand; PAM type: YTN; PAM sequence: CTT
  source 1..20: mol_type = other DNA
tctctcttgcctcacaccgc

SEQ ID NO: 68543 - DNA, 20 bp, synthetic construct
  misc_feature 1..20: note = Description of Artificial Sequence: Synthetic oligonucleotide
  misc_feature 1..20: note = Target: SCN10A; (+) strand; PAM type: YTN; PAM sequence: TTT
  source 1..20: mol_type = other DNA
ctctcttgcctcacaccgcc

SEQ ID NO: 68544 - DNA, 20 bp, synthetic construct
  misc_feature 1..20: note = Description of Artificial Sequence: Synthetic oligonucleotide
  misc_feature 1..20: note = Target: SCN10A; (+) strand; PAM type: YTN; PAM sequence: TTC
  source 1..20: mol_type = other DNA
tctcttgcctcacaccgcca

SEQ ID NO: 68545 - DNA, 20 bp, synthetic construct
  misc_feature 1..20: note = Description of Artificial Sequence: Synthetic oligonucleotide
  misc_feature 1..20: note = Target: SCN10A; (+) strand; PAM type: YTN; PAM sequence: CTC
  source 1..20: mol_type = other DNA
tcttgcctcacaccgccacc

SEQ ID NO: 68546 - DNA, 20 bp, synthetic construct
  misc_feature 1..20: note = Description of Artificial Sequence: Synthetic oligonucleotide
  misc_feature 1..20: note = Target: SCN10A; (+) strand; PAM type: YTN; PAM sequence: CTC
  source 1..20: mol_type = other DNA
ttgcctcacaccgccacctc

SEQ ID NO: 68547 - DNA, 20 bp, synthetic construct
  misc_feature 1..20: note = Description of Artificial Sequence: Synthetic oligonucleotide
  misc_feature 1..20: note = Target: SCN10A; (+) strand; PAM type: YTN; PAM sequence: CTT
  source 1..20: mol_type = other DNA
gcctcacaccgccacctcac

SEQ ID NO: 68548 - DNA, 20 bp, synthetic construct
  misc_feature 1..20: note = Description of Artificial Sequence: Synthetic oligonucleotide
  misc_feature 1..20: note = Target: SCN10A; (+) strand; PAM type: YTN; PAM sequence: TTG
  source 1..20: mol_type = other DNA
cctcacaccgccacctcact

SEQ ID NO: 68549 - DNA, 20 bp, synthetic construct
  misc_feature 1..20: note = Description of Artificial Sequence: Synthetic oligonucleotide
  misc_feature 1..20: note = Target: SCN10A; (+) strand; PAM type: YTN; PAM sequence: CTC
  source 1..20: mol_type = other DNA
acaccgccacctcactgtgt

SEQ ID NO: 68550 - DNA, 20 bp, synthetic construct
  misc_feature 1..20: note = Description of Artificial Sequence: Synthetic oligonucleotide
  misc_feature 1..20: note = Target: SCN10A; (+) strand; PAM type: YTN; PAM sequence: CTC
  source 1..20: mol_type = other DNA
actgtgtttgcccagcctat

SEQ ID NO: 68551 - DNA, 20 bp, synthetic construct
  misc_feature 1..20: note = Description of Artificial Sequence: Synthetic oligonucleotide
  misc_feature 1..20: note = Target: SCN10A; (+) strand; PAM type: YTN; PAM sequence: CTG
  source 1..20: mol_type = other DNA
tgtttgcccagcctatgaag

SEQ ID NO: 68552 - DNA, 20 bp, synthetic construct
  misc_feature 1..20: note = Description of Artificial Sequence: Synthetic oligonucleotide
  misc_feature 1..20: note = Target: SCN10A; (+) strand; PAM type: YTN; PAM sequence: TTT
  source 1..20: mol_type = other DNA
gcccagcctatgaagcctct

SEQ ID NO: 68553 - DNA, 20 bp, synthetic construct
  misc_feature 1..20: note = Description of Artificial Sequence: Synthetic oligonucleotide
  misc_feature 1..20: note = Target: SCN10A; (+) strand; PAM type: YTN; PAM sequence: TTG
  source 1..20: mol_type = other DNA
cccagcctatgaagcctcta

SEQ ID NO: 68554 - DNA, 20 bp, synthetic construct
  misc_feature 1..20: note = Description of Artificial Sequence: Synthetic oligonucleotide
  misc_feature 1..20: note = Target: SCN10A; (+) strand; PAM type: YTN; PAM sequence: CTA
  source 1..20: mol_type = other DNA
tgaagcctctagtaaagaac

SEQ ID NO: 68555 - DNA, 20 bp, synthetic construct
  misc_feature 1..20: note = Description of Artificial Sequence: Synthetic oligonucleotide
  misc_feature 1..20: note = Target: SCN10A; (+) strand; PAM type: YTN; PAM sequence: CTC
  source 1..20: mol_type = other DNA
tagtaaagaacttgttttcc

SEQ ID NO: 68556 - DNA, 20 bp, synthetic construct
  misc_feature 1..20: note = Description of Artificial Sequence: Synthetic oligonucleotide
  misc_feature 1..20: note = Target: SCN10A; (+) strand; PAM type: YTN; PAM sequence: CTA
  source 1..20: mol_type = other DNA
gtaaagaacttgttttccac

SEQ ID NO: 68557 - DNA, 20 bp, synthetic construct
  misc_feature 1..20: note = Description of Artificial Sequence: Synthetic oligonucleotide
  misc_feature 1..20: note = Target: SCN10A; (+) strand; PAM type: YTN; PAM sequence: CTT
  source 1..20: mol_type = other DNA
gttttccacagggtagcatc

SEQ ID NO: 68558 - DNA, 20 bp, synthetic construct
  misc_feature 1..20: note = Description of Artificial Sequence: Synthetic oligonucleotide
  misc_feature 1..20: note = Target: SCN10A; (+) strand; PAM type: YTN; PAM sequence: TTG
  source 1..20: mol_type = other DNA
ttttccacagggtagcatct

SEQ ID NO: 68559 - DNA, 20 bp, synthetic construct
  misc_feature 1..20: note = Description of Artificial Sequence: Synthetic oligonucleotide
  misc_feature 1..20: note = Target: SCN10A; (+) strand; PAM type: YTN; PAM sequence: TTT
  source 1..20: mol_type = other DNA
tccacagggtagcatcttta

SEQ ID NO: 68560 - DNA, 20 bp, synthetic construct
  misc_feature 1..20: note = Description of Artificial Sequence: Synthetic oligonucleotide
  misc_feature 1..20: note = Target: SCN10A; (+) strand; PAM type: YTN; PAM sequence: TTT
  source 1..20: mol_type = other DNA
ccacagggtagcatctttat

SEQ ID NO: 68561 - DNA, 20 bp, synthetic construct
  misc_feature 1..20: note = Description of Artificial Sequence: Synthetic oligonucleotide
  misc_feature 1..20: note = Target: SCN10A; (+) strand; PAM type: YTN; PAM sequence: TTC
  source 1..20: mol_type = other DNA
cacagggtagcatctttatg

SEQ ID NO: 68562 - DNA, 20 bp, synthetic construct
  misc_feature 1..20: note = Description of Artificial Sequence: Synthetic oligonucleotide
  misc_feature 1..20: note = Target: SCN10A; (+) strand; PAM type: YTN; PAM sequence: CTT
  source 1..20: mol_type = other DNA
tatgtctatgaatgagaaat

SEQ ID NO: 68563 - DNA, 20 bp, synthetic construct
  misc_feature 1..20: note = Description of Artificial Sequence: Synthetic oligonucleotide
  misc_feature 1..20: note = Target: SCN10A; (+) strand; PAM type: YTN; PAM sequence: TTT
  source 1..20: mol_type = other DNA
atgtctatgaatgagaaatt

SEQ ID NO: 68564 - DNA, 20 bp, synthetic construct
  misc_feature 1..20: note = Description of Artificial Sequence: Synthetic oligonucleotide
  misc_feature 1..20: note = Target: SCN10A; (+) strand; PAM type: YTN; PAM sequence: TTA
  source 1..20: mol_type = other DNA
tgtctatgaatgagaaattg

SEQ ID NO: 68565 - DNA, 20 bp, synthetic construct
  misc_feature 1..20: note = Description of Artificial Sequence: Synthetic oligonucleotide
  misc_feature 1..20: note = Target: SCN10A; (+) strand; PAM type: YTN; PAM sequence: CTA
  source 1..20: mol_type = other DNA
tgaatgagaaattgcaaact

SEQ ID NO: 68566 - DNA, 20 bp, synthetic construct
  misc_feature 1..20: note = Description of Artificial Sequence: Synthetic oligonucleotide
  misc_feature 1..20: note = Target: SCN10A; (+) strand; PAM type: YTN; PAM sequence: TTG
  source 1..20: mol_type = other DNA
caaactagcagcttataggc

SEQ ID NO: 68567 - DNA, 20 bp, synthetic construct
  misc_feature 1..20: note = Description of Artificial Sequence: Synthetic oligonucleotide
  misc_feature 1..20: note = Target: SCN10A; (+) strand; PAM type: YTN; PAM sequence: CTA
  source 1..20: mol_type = other DNA
gcagcttataggctggattt

SEQ ID NO: 68568 - DNA, 20 bp, synthetic construct
  misc_feature 1..20: note = Description of Artificial Sequence: Synthetic oligonucleotide
  misc_feature 1..20: note = Target: SCN10A; (+) strand; PAM type: YTN; PAM sequence: CTT
  source 1..20: mol_type = other DNA
ataggctggatttggcccac

SEQ ID NO: 68569 - DNA, 20 bp, synthetic construct
  misc_feature 1..20: note = Description of Artificial Sequence: Synthetic oligonucleotide
  misc_feature 1..20: note = Target: SCN10A; (+) strand; PAM type: YTN; PAM sequence: TTA
  source 1..20: mol_type = other DNA
taggctggatttggcccaca

SEQ ID NO: 68570 - DNA, 20 bp, synthetic construct
  misc_feature 1..20: note = Description of Artificial Sequence: Synthetic oligonucleotide
  misc_feature 1..20: note = Target: SCN10A; (+) strand; PAM type: YTN; PAM sequence: CTG
  source 1..20: mol_type = other DNA
gatttggcccacagaaatat

SEQ ID NO: 68571 - DNA, 20 bp, synthetic construct
  misc_feature 1..20: note = Description of Artificial Sequence: Synthetic oligonucleotide
  misc_feature 1..20: note = Target: SCN10A; (+) strand; PAM type: YTN; PAM sequence: TTT
  source 1..20: mol_type = other DNA
ggcccacagaaatattttgt

SEQ ID NO: 68572 - DNA, 20 bp, synthetic construct
  misc_feature 1..20: note = Description of Artificial Sequence: Synthetic oligonucleotide
  misc_feature 1..20: note = Target: SCN10A; (+) strand; PAM type: YTN; PAM sequence: TTG
  source 1..20: mol_type = other DNA
gcccacagaaatattttgtt

SEQ ID NO: 68573 - DNA, 20 bp, synthetic construct
  misc_feature 1..20: note = Description of Artificial Sequence: Synthetic oligonucleotide
  misc_feature 1..20: note = Target: SCN10A; (+) strand; PAM type: YTN; PAM sequence: TTT
  source 1..20: mol_type = other DNA
tgtttggcccaacaatatgt

SEQ ID NO: 68574 - DNA, 20 bp, synthetic construct
  misc_feature 1..20: note = Description of Artificial Sequence: Synthetic oligonucleotide
  misc_feature 1..20: note = Target: SCN10A; (+) strand; PAM type: YTN; PAM sequence: TTT
  source 1..20: mol_type = other DNA
gtttggcccaacaatatgta

SEQ ID NO: 68575 - DNA, 20 bp, synthetic construct
  misc_feature 1..20: note = Description of Artificial Sequence: Synthetic oligonucleotide
  misc_feature 1..20: note = Target: SCN10A; (+) strand; PAM type: YTN; PAM sequence: TTG
  source 1..20: mol_type = other DNA
tttggcccaacaatatgtag

SEQ ID NO: 68576 - DNA, 20 bp, synthetic construct
  misc_feature 1..20: note = Description of Artificial Sequence: Synthetic oligonucleotide
  misc_feature 1..20: note = Target: SCN10A; (+) strand; PAM type: YTN; PAM sequence: TTT
  source 1..20: mol_type = other DNA
ggcccaacaatatgtagaca

SEQ ID NO: 68577 - DNA, 20 bp, synthetic construct
  misc_feature 1..20: note = Description of Artificial Sequence: Synthetic oligonucleotide
  misc_feature 1..20: note = Target: SCN10A; (+) strand; PAM type: YTN; PAM sequence: TTG
  source 1..20: mol_type = other DNA
gcccaacaatatgtagacat

SEQ ID NO: 68578 - DNA, 20 bp, synthetic construct
  misc_feature 1..20: note = Description of Artificial Sequence: Synthetic oligonucleotide
  misc_feature 1..20: note = Target: SCN10A; (+) strand; PAM type: YTN; PAM sequence: TTT
  source 1..20: mol_type = other DNA
tttggaataggtagccaatg

SEQ ID NO: 68579 - DNA, 20 bp, synthetic construct
  misc_feature 1..20: note = Description of Artificial Sequence: Synthetic oligonucleotide
  misc_feature 1..20: note = Target: SCN10A; (+) strand; PAM type: YTN; PAM sequence: TTT
  source 1..20: mol_type = other DNA
ttggaataggtagccaatgt

SEQ ID NO: 68580 - DNA, 20 bp, synthetic construct
  misc_feature 1..20: note = Description of Artificial Sequence: Synthetic oligonucleotide
  misc_feature 1..20: note = Target: SCN10A; (+) strand; PAM type: YTN; PAM sequence: TTT
  source 1..20: mol_type = other DNA
tggaataggtagccaatgtt

SEQ ID NO: 68581 - DNA, 20 bp, synthetic construct
  misc_feature 1..20: note = Description of Artificial Sequence: Synthetic oligonucleotide
  misc_feature 1..20: note = Target: SCN10A; (+) strand; PAM type: YTN; PAM sequence: TTT
  source 1..20: mol_type = other DNA
ggaataggtagccaatgttt

SEQ ID NO: 68582 - DNA, 20 bp, synthetic construct
  misc_feature 1..20: note = Description of Artificial Sequence: Synthetic oligonucleotide
  misc_feature 1..20: note = Target: SCN10A; (+) strand; PAM type: YTN; PAM sequence: TTG
  source 1..20: mol_type = other DNA
gaataggtagccaatgttta

SEQ ID NO: 68583 - DNA, 20 bp, synthetic construct
  misc_feature 1..20: note = Description of Artificial Sequence: Synthetic oligonucleotide
  misc_feature 1..20: note = Target: SCN10A; (+) strand; PAM type: YTN; PAM sequence: TTT
  source 1..20: mol_type = other DNA
acggttgggagattttatat

SEQ ID NO: 68584 - DNA, 20 bp, synthetic construct
  misc_feature 1..20: note = Description of Artificial Sequence: Synthetic oligonucleotide
  misc_feature 1..20: note = Target: SCN10A; (+) strand; PAM type: YTN; PAM sequence: TTA
  source 1..20: mol_type = other DNA
cggttgggagattttatata

SEQ ID NO: 68585 - DNA, 20 bp, synthetic construct
  misc_feature 1..20: note = Description of Artificial Sequence: Synthetic oligonucleotide
  misc_feature 1..20: note = Target: SCN10A; (+) strand; PAM type: YTN; PAM sequence: TTG
  source 1..20: mol_type = other DNA
ggagattttatataaaaatc

SEQ ID NO: 68586 - DNA, 20 bp, synthetic construct
  misc_feature 1..20: note = Description of Artificial Sequence: Synthetic oligonucleotide
  misc_feature 1..20: note = Target: SCN10A; (+) strand; PAM type: YTN; PAM sequence: TTT
  source 1..20: mol_type = other DNA
tatataaaaatctaaatttc

SEQ ID NO: 68587 - DNA, 20 bp, synthetic construct
  misc_feature 1..20: note = Description of Artificial Sequence: Synthetic oligonucleotide
  misc_feature 1..20: note = Target: SCN10A; (+) strand; PAM type: YTN; PAM sequence: TTT
  source 1..20: mol_type = other DNA
atataaaaatctaaatttcc

SEQ ID NO: 68588 - DNA, 20 bp, synthetic construct
  misc_feature 1..20: note = Description of Artificial Sequence: Synthetic oligonucleotide
  misc_feature 1..20: note = Target: SCN10A; (+) strand; PAM type: YTN; PAM sequence: TTA
  source 1..20: mol_type = other DNA
tataaaaatctaaatttcct

SEQ ID NO: 68589 - DNA, 20 bp, synthetic construct
  misc_feature 1..20: note = Description of Artificial Sequence: Synthetic oligonucleotide
  misc_feature 1..20: note = Target: SCN10A; (+) strand; PAM type: YTN; PAM sequence: CTA
  source 1..20: mol_type = other DNA
aatttcctatctctatttta

SEQ ID NO: 68590 - DNA, 20 bp, synthetic construct
  misc_feature 1..20: note = Description of Artificial Sequence: Synthetic oligonucleotide
  misc_feature 1..20: note = Target: SCN10A; (+) strand; PAM type: YTN; PAM sequence: TTT
  source 1..20: mol_type = other DNA
cctatctctattttaaaagt

SEQ ID NO: 68591 - DNA, 20 bp, synthetic construct
  misc_feature 1..20: note = Description of Artificial Sequence: Synthetic oligonucleotide
  misc_feature 1..20: note = Target: SCN10A; (+) strand; PAM type: YTN; PAM sequence: TTC
  source 1..20: mol_type = other DNA
ctatctctattttaaaagtt

SEQ ID NO: 68592 - DNA, 20 bp, synthetic construct
  misc_feature 1..20: note = Description of Artificial Sequence: Synthetic oligonucleotide
  misc_feature 1..20: note = Target: SCN10A; (+) strand; PAM type: YTN; PAM sequence: CTA
  source 1..20: mol_type = other DNA
tctctattttaaaagttgga

SEQ ID NO: 68593 - DNA, 20 bp, synthetic construct
  misc_feature 1..20: note = Description of Artificial Sequence: Synthetic oligonucleotide
  misc_feature 1..20: note = Target: SCN10A; (+) strand; PAM type: YTN; PAM sequence: CTC
  source 1..20: mol_type = other DNA
tattttaaaagttggaagag

SEQ ID NO: 68594 - DNA, 20 bp, synthetic construct
  misc_feature 1..20: note = Description of Artificial Sequence: Synthetic oligonucleotide
  misc_feature 1..20: note = Target: SCN10A; (+) strand; PAM type: YTN; PAM sequence: CTA
  source 1..20: mol_type = other DNA
ttttaaaagttggaagagct

SEQ ID NO: 68595 - DNA, 20 bp, synthetic construct
  misc_feature 1..20: note = Description of Artificial Sequence: Synthetic oligonucleotide
  misc_feature 1..20: note = Target: SCN10A; (+) strand; PAM type: YTN; PAM sequence: TTT
  source 1..20: mol_type = other DNA
taaaagttggaagagctgga

SEQ ID NO: 68596 - DNA, 20 bp, synthetic construct
  misc_feature 1..20: note = Description of Artificial Sequence: Synthetic oligonucleotide
  misc_feature 1..20: note = Target: SCN10A; (+) strand; PAM type: YTN; PAM sequence: TTT
  source 1..20: mol_type = other DNA
aaaagttggaagagctggaa

SEQ ID NO: 68597 - DNA, 20 bp, synthetic construct
  misc_feature 1..20: note = Description of Artificial Sequence: Synthetic oligonucleotide
  misc_feature 1..20: note = Target: SCN10A; (+) strand; PAM type: YTN; PAM sequence: TTA
  source 1..20: mol_type = other DNA
aaagttggaagagctggaaa

SEQ ID NO: 68598 - DNA, 20 bp, synthetic construct
  misc_feature 1..20: note = Description of Artificial Sequence: Synthetic oligonucleotide
  misc_feature 1..20: note = Target: SCN10A; (+) strand; PAM type: YTN; PAM sequence: TTG
  source 1..20: mol_type = other DNA
gaagagctggaaacagtgaa

SEQ ID NO: 68599 - DNA, 20 bp, synthetic construct
  misc_feature 1..20: note = Description of Artificial Sequence: Synthetic oligonucleotide
  misc_feature 1..20: note = Target: SCN10A; (+) strand; PAM type: YTN; PAM sequence: CTG
  source 1..20: mol_type = other DNA
gaaacagtgaacccacattt

SEQ ID NO: 68600 - DNA, 20 bp, synthetic construct
  misc_feature 1..20: note = Description of Artificial Sequence: Synthetic oligonucleotide
  misc_feature 1..20: note = Target: SCN10A; (+) strand; PAM type: YTN; PAM sequence: TTT
  source 1..20: mol_type = other DNA
ccacatggcaaccaaaagct

SEQ ID NO: 68601 - DNA, 20 bp, synthetic construct
  misc_feature 1..20: note = Description of Artificial Sequence: Synthetic oligonucleotide
  misc_feature 1..20: note = Target: SCN10A; (+) strand; PAM type: YTN; PAM sequence: TTC
  source 1..20: mol_type = other DNA
cacatggcaaccaaaagctg

SEQ ID NO: 68602 - DNA, 20 bp, synthetic construct
  misc_feature 1..20: note = Description of Artificial Sequence: Synthetic oligonucleotide
  misc_feature 1..20: note = Target: SCN10A; (+) strand; PAM type: YTN; PAM sequence: CTG
  source 1..20: mol_type = other DNA
gaccgagcagtggggctgtc

SEQ ID NO: 68603 - DNA, 20 bp, synthetic construct
  misc_feature 1..20: note = Description of Artificial Sequence: Synthetic oligonucleotide
  misc_feature 1..20: note = Target: SCN10A; (+) strand; PAM type: YTN; PAM sequence: CTG
  source 1..20: mol_type = other DNA
tcccctttagaggaggcatg

SEQ ID NO: 68604 - DNA, 20 bp, synthetic construct
  misc_feature 1..20: note = Description of Artificial Sequence: Synthetic oligonucleotide
  misc_feature 1..20: note = Target: SCN10A; (+) strand; PAM type: YTN; PAM sequence: CTT
  source 1..20: mol_type = other DNA
tagaggaggcatgaactctc

SEQ ID NO: 68605 - DNA, 20 bp, synthetic construct
  misc_feature 1..20: note = Description of Artificial Sequence: Synthetic oligonucleotide
  misc_feature 1..20: note = Target: SCN10A; (+) strand; PAM type: YTN; PAM sequence: TTT
  source 1..20: mol_type = other DNA
agaggaggcatgaactctca

SEQ ID NO: 68606 - DNA, 20 bp, synthetic construct
  misc_feature 1..20: note = Description of Artificial Sequence: Synthetic oligonucleotide
  misc_feature 1..20: note = Target: SCN10A; (+) strand; PAM type: YTN; PAM sequence: TTA
  source 1..20: mol_type = other DNA
gaggaggcatgaactctcag

SEQ ID NO: 68607 - DNA, 20 bp, synthetic construct
  misc_feature 1..20: note = Description of Artificial Sequence: Synthetic oligonucleotide
  misc_feature 1..20: note = Target: SCN10A; (+) strand; PAM type: YTN; PAM sequence: CTC
  source 1..20: mol_type = other DNA
tcagctcctaggttccctcc

SEQ ID NO: 68608 - DNA, 20 bp, synthetic construct
  misc_feature 1..20: note = Description of Artificial Sequence: Synthetic oligonucleotide
  misc_feature 1..20: note = Target: SCN10A; (+) strand; PAM type: YTN; PAM sequence: CTC
  source 1..20: mol_type = other DNA
agctcctaggttccctcctg

SEQ ID NO: 68609 - DNA, 20 bp, synthetic construct
  misc_feature 1..20: note = Description of Artificial Sequence: Synthetic oligonucleotide
  misc_feature 1..20: note = Target: SCN10A; (+) strand; PAM type: YTN; PAM sequence: CTC
  source 1..20: mol_type = other DNA
ctaggttccctcctggccca

SEQ ID NO: 68610 - DNA, 20 bp, synthetic construct
  misc_feature 1..20: note = Description of Artificial Sequence: Synthetic oligonucleotide
  misc_feature 1..20: note = Target: SCN10A; (+) strand; PAM type: YTN; PAM sequence: CTA
  source 1..20: mol_type = other DNA
ggttccctcctggcccactc

SEQ ID NO: 68611 - DNA, 20 bp, synthetic construct
  misc_feature 1..20: note = Description of Artificial Sequence: Synthetic oligonucleotide
  misc_feature 1..20: note = Target: SCN10A; (+) strand; PAM type: YTN; PAM sequence: TTC
  source 1..20: mol_type = other DNA
cctcctggcccactccactc

SEQ ID NO: 68612 - DNA, 20 bp, synthetic construct
  misc_feature 1..20: note = Description of Artificial Sequence: Synthetic oligonucleotide
  misc_feature 1..20: note = Target: SCN10A; (+) strand; PAM type: YTN; PAM sequence: CTC
  source 1..20: mol_type = other DNA
ctggcccactccactcattt

SEQ ID NO: 68613 - DNA, 20 bp, synthetic construct
  misc_feature 1..20: note = Description of Artificial Sequence: Synthetic oligonucleotide
  misc_feature 1..20: note = Target: SCN10A; (+) strand; PAM type: YTN; PAM sequence: CTG
  source 1..20: mol_type = other DNA
gcccactccactcatttgtt

SEQ ID NO: 68614 - DNA, 20 bp, synthetic construct
  misc_feature 1..20: note = Description of Artificial Sequence: Synthetic oligonucleotide
  misc_feature 1..20: note = Target: SCN10A; (+) strand; PAM type: YTN; PAM sequence: CTC
  source 1..20: mol_type = other DNA
cactcatttgttgttatgaa

SEQ ID NO: 68615 - DNA, 20 bp, synthetic construct
  misc_feature 1..20: note = Description of Artificial Sequence: Synthetic oligonucleotide
  misc_feature 1..20: note = Target: SCN10A; (+) strand; PAM type: YTN; PAM sequence: CTC
  source 1..20: mol_type = other DNA
atttgttgttatgaatctgg

SEQ ID NO: 68616 - DNA, 20 bp, synthetic construct
  misc_feature 1..20: note = Description of Artificial Sequence: Synthetic oligonucleotide
  misc_feature 1..20: note = Target: SCN10A; (+) strand; PAM type: YTN; PAM sequence: TTT
  source 1..20: mol_type = other DNA
gttgttatgaatctggcctc

SEQ ID NO: 68617 - DNA, 20 bp, synthetic construct
  misc_feature 1..20: note = Description of Artificial Sequence: Synthetic oligonucleotide
  misc_feature 1..20: note = Target: SCN10A; (+) strand; PAM type: YTN; PAM sequence: TTG
  source 1..20: mol_type = other DNA
ttgttatgaatctggcctct

SEQ ID NO: 68618 - DNA, 20 bp, synthetic construct
  misc_feature 1..20: note = Description of Artificial Sequence: Synthetic oligonucleotide
  misc_feature 1..20: note = Target: SCN10A; (+) strand; PAM type: YTN; PAM sequence: TTG
  source 1..20: mol_type = other DNA
ttatgaatctggcctctgta

SEQ ID NO: 68619 - DNA, 20 bp, synthetic construct
  misc_feature 1..20: note = Description of Artificial Sequence: Synthetic oligonucleotide
  misc_feature 1..20: note = Target: SCN10A; (+) strand; PAM type: YTN; PAM sequence: TTA
  source 1..20: mol_type = other DNA
tgaatctggcctctgtaaga

SEQ ID NO: 68620 - DNA, 20 bp, synthetic construct
  misc_feature 1..20: note = Description of Artificial Sequence: Synthetic oligonucleotide
  misc_feature 1..20: note = Target: SCN10A; (+) strand; PAM type: YTN; PAM sequence: CTG
  source 1..20: mol_type = other DNA
gcctctgtaagaattcgaaa

SEQ ID NO: 68621 - DNA, 20 bp, synthetic construct
  misc_feature 1..20: note = Description of Artificial Sequence: Synthetic oligonucleotide
  misc_feature 1..20: note = Target: SCN10A; (+) strand; PAM type: YTN; PAM sequence: CTC
  source 1..20: mol_type = other DNA
tgtaagaattcgaaattgca

SEQ ID NO: 68622 - DNA, 20 bp, synthetic construct
  misc_feature 1..20: note = Description of Artificial Sequence: Synthetic oligonucleotide
  misc_feature 1..20: note = Target: SCN10A; (+) strand; PAM type: YTN; PAM sequence: CTG
  source 1..20: mol_type = other DNA
taagaattcgaaattgcaaa

SEQ ID NO: 68623 - DNA, 20 bp, synthetic construct
  misc_feature 1..20: note = Description of Artificial Sequence: Synthetic oligonucleotide
  misc_feature 1..20: note = Target: SCN10A; (+) strand; PAM type: YTN; PAM sequence: TTC
  source 1..20: mol_type = other DNA
gaaattgcaaagtctgatac

SEQ ID NO: 68624 - DNA, 20 bp, synthetic construct
  misc_feature 1..20: note = Description of Artificial Sequence: Synthetic oligonucleotide
  misc_feature 1..20: note = Target: SCN10A; (+) strand; PAM type: YTN; PAM sequence: TTG
  source 1..20: mol_type = other DNA
caaagtctgatacatgtgtt

SEQ ID NO: 68625 - DNA, 20 bp, synthetic construct
  misc_feature 1..20: note = Description of Artificial Sequence: Synthetic oligonucleotide
  misc_feature 1..20: note = Target: SCN10A; (+) strand; PAM type: YTN; PAM sequence: CTG
  source 1..20: mol_type = other DNA
atacatgtgttttttcctct

SEQ ID NO: 68626 - DNA, 20 bp, synthetic construct
  misc_feature 1..20: note = Description of Artificial Sequence: Synthetic oligonucleotide
  misc_feature 1..20: note = Target: SCN10A; (+) strand; PAM type: YTN; PAM sequence: TTT
  source 1..20: mol_type = other DNA
tttcctctacttgtgagggt

SEQ ID NO: 68627 - DNA, 20 bp, synthetic construct
  misc_feature 1..20: note = Description of Artificial Sequence: Synthetic oligonucleotide
  misc_feature 1..20: note = Target: SCN10A; (+) strand; PAM type: YTN; PAM sequence: TTT
  source 1..20: mol_type = other DNA
ttcctctacttgtgagggta

SEQ ID NO: 68628 - DNA, 20 bp, synthetic construct
  misc_feature 1..20: note = Description of Artificial Sequence: Synthetic oligonucleotide
  misc_feature 1..20: note = Target: SCN10A; (+) strand; PAM type: YTN; PAM sequence: TTT
  source 1..20: mol_type = other DNA
tcctctacttgtgagggtaa

SEQ ID NO: 68629 - DNA, 20 bp, synthetic construct
  misc_feature 1..20: note = Description of Artificial Sequence: Synthetic oligonucleotide
  misc_feature 1..20: note = Target: SCN10A; (+) strand; PAM type: YTN; PAM sequence: TTT
  source 1..20: mol_type = other DNA
cctctacttgtgagggtaat

SEQ ID NO: 68630 - DNA, 20 bp, synthetic construct
  misc_feature 1..20: note = Description of Artificial Sequence: Synthetic oligonucleotide
  misc_feature 1..20: note = Target: SCN10A; (+) strand; PAM type: YTN; PAM sequence: TTC
  source 1..20: mol_type = other DNA
ctctacttgtgagggtaatg

SEQ ID NO: 68631 - DNA, 20 bp, synthetic construct
  misc_feature 1..20: note = Description of Artificial Sequence: Synthetic oligonucleotide
  misc_feature 1..20: note = Target: SCN10A; (+) strand; PAM type: YTN; PAM sequence: CTC
  source 1..20: mol_type = other DNA
tacttgtgagggtaatgtgg

SEQ ID NO: 68632 - DNA, 20 bp, synthetic construct
  misc_feature 1..20: note = Description of Artificial Sequence: Synthetic oligonucleotide
  misc_feature 1..20: note = Target: SCN10A; (+) strand; PAM type: YTN; PAM sequence: CTA
  source 1..20: mol_type = other DNA
cttgtgagggtaatgtggct

SEQ ID NO: 68633 - DNA, 20 bp, synthetic construct
  misc_feature 1..20: note = Description of Artificial Sequence: Synthetic oligonucleotide
  misc_feature 1..20: note = Target: SCN10A; (+) strand; PAM type: YTN; PAM sequence: CTT
  source 1..20: mol_type = other DNA
gtgagggtaatgtggctata

SEQ ID NO: 68634 - DNA, 20 bp, synthetic construct
  misc_feature 1..20: note = Description of Artificial Sequence: Synthetic oligonucleotide
  misc_feature 1..20: note = Target: SCN10A; (+) strand; PAM type: YTN; PAM sequence: TTG
  source 1..20: mol_type = other DNA
tgagggtaatgtggctatag

SEQ ID NO: 68635 - DNA, 20 bp, synthetic construct
  misc_feature 1..20: note = Description of Artificial Sequence: Synthetic oligonucleotide
  misc_feature 1..20: note = Target: SCN10A; (+) strand; PAM type: YTN; PAM sequence: CTA
  source 1..20: mol_type = other DNA
tagaatggagttagctgtga

SEQ ID NO: 68636 - DNA, 20 bp, synthetic construct
  misc_feature 1..20: note = Description of Artificial Sequence: Synthetic oligonucleotide
  misc_feature 1..20: note = Target: SCN10A; (+) strand; PAM type: YTN; PAM sequence: TTA
  source 1..20: mol_type = other DNA
gctgtgatgattaagtgtag

SEQ ID NO: 68637 - DNA, 20 bp, synthetic construct
  misc_feature 1..20: note = Description of Artificial Sequence: Synthetic oligonucleotide
  misc_feature 1..20: note = Target: SCN10A; (+) strand; PAM type: YTN; PAM sequence: CTG
  source 1..20: mol_type = other DNA
tgatgattaagtgtagagca

SEQ ID NO: 68638 - DNA, 20 bp, synthetic construct
  misc_feature 1..20: note = Description of Artificial Sequence: Synthetic oligonucleotide
  misc_feature 1..20: note = Target: SCN10A; (+) strand; PAM type: YTN; PAM sequence: TTA
  source 1..20: mol_type = other DNA
agtgtagagcatttgacaca

SEQ ID NO: 68639 - DNA, 20 bp, synthetic construct
  misc_feature 1..20: note = Description of Artificial Sequence: Synthetic oligonucleotide
  misc_feature 1..20: note = Target: SCN10A; (+) strand; PAM type: YTN; PAM sequence: TTT
  source 1..20: mol_type = other DNA
gacacaaataagtattggtt

SEQ ID NO: 68640 - DNA, 20 bp, synthetic construct
  misc_feature 1..20: note = Description of Artificial Sequence: Synthetic oligonucleotide
  misc_feature 1..20: note = Target: SCN10A; (+) strand; PAM type: YTN; PAM sequence: TTG
  source 1..20: mol_type = other DNA
acacaaataagtattggttc

SEQ ID NO: 68641 - DNA, 20 bp, synthetic construct
  misc_feature 1..20: note = Description of Artificial Sequence: Synthetic oligonucleotide
  misc_feature 1..20: note = Target: SCN10A; (+) strand; PAM type: YTN; PAM sequence: TTG
  source 1..20: mol_type = other DNA
gttccttcctggggtagatt

SEQ ID NO: 68642 - DNA, 20 bp, synthetic construct
  misc_feature 1..20: note = Description of Artificial Sequence: Synthetic oligonucleotide
  misc_feature 1..20: note = Target: SCN10A; (+) strand; PAM type: YTN; PAM sequence: TTC
  source 1..20: mol_type = other DNA
cttcctggggtagattattt

SEQ ID NO: 68643 - DNA, 20 bp, synthetic construct
  misc_feature 1..20: note = Description of Artificial Sequence: Synthetic oligonucleotide
  misc_feature 1..20: note = Target: SCN10A; (+) strand; PAM type: YTN; PAM sequence: CTT
  source 1..20: mol_type = other DNA
cctggggtagattatttatt

SEQ ID NO: 68644 - DNA, 20 bp, synthetic construct
  misc_feature 1..20: note = Description of Artificial Sequence: Synthetic oligonucleotide
  misc_feature 1..20: note = Target: SCN10A; (+) strand; PAM type: YTN; PAM sequence: TTC
  source 1..20: mol_type = other DNA
ctggggtagattatttatta

SEQ ID NO: 68645 - DNA, 20 bp, synthetic construct
  misc_feature 1..20: note = Description of Artificial Sequence: Synthetic oligonucleotide
  misc_feature 1..20: note = Target: SCN10A; (+) strand; PAM type: YTN; PAM sequence: CTG
  source 1..20: mol_type = other DNA
gggtagattatttattaaaa

SEQ ID NO: 68646 - DNA, 20 bp, synthetic construct
  misc_feature 1..20: note = Description of Artificial Sequence: Synthetic oligonucleotide
  misc_feature 1..20: note = Target: SCN10A; (+) strand; PAM type: YTN; PAM sequence: TTA
  source 1..20: mol_type = other DNA
tttattaaaatggctataat

SEQ ID NO: 68647 - DNA, 20 bp, synthetic construct
  misc_feature 1..20: note = Description of Artificial Sequence: Synthetic oligonucleotide
  misc_feature 1..20: note = Target: SCN10A; (+) strand; PAM type: YTN; PAM sequence: TTT
  source 1..20: mol_type = other DNA
attaaaatggctataattct

SEQ ID NO: 68648 - DNA, 20 bp, synthetic construct
  misc_feature 1..20: note = Description of Artificial Sequence: Synthetic oligonucleotide
  misc_feature 1..20: note = Target: SCN10A; (+) strand; PAM type: YTN; PAM sequence: TTA
  source 1..20: mol_type = other DNA
ttaaaatggctataattctt

SEQ ID NO: 68649 - DNA, 20 bp, synthetic construct
  misc_feature 1..20: note = Description of Artificial Sequence: Synthetic oligonucleotide
  misc_feature 1..20: note = Target: SCN10A; (+) strand; PAM type: YTN; PAM sequence: TTA
  source 1..20: mol_type = other DNA
aaatggctataattcttgtc

SEQ ID NO: 68650 - DNA, 20 bp, synthetic construct
  misc_feature 1..20: note = Description of Artificial Sequence: Synthetic oligonucleotide
  misc_feature 1..20: note = Target: SCN10A; (+) strand; PAM type: YTN; PAM sequence: CTA
  source 1..20: mol_type = other DNA
taattcttgtctctatgtat

SEQ ID NO: 68651 - DNA, 20 bp, synthetic construct
  misc_feature 1..20: note = Description of Artificial Sequence: Synthetic oligonucleotide
  misc_feature 1..20: note = Target: SCN10A; (+) strand; PAM type: YTN; PAM sequence: TTC
  source 1..20: mol_type = other DNA
ttgtctctatgtatccacac

SEQ ID NO: 68652 - DNA, 20 bp, synthetic construct
  misc_feature 1..20: note = Description of Artificial Sequence: Synthetic oligonucleotide
  misc_feature 1..20: note = Target: SCN10A; (+) strand; PAM type: YTN; PAM sequence: CTT
  source 1..20: mol_type = other DNA
gtctctatgtatccacaccc

SEQ ID NO: 68653 - DNA, 20 bp, synthetic construct
  misc_feature 1..20: note = Description of Artificial Sequence: Synthetic oligonucleotide
  misc_feature 1..20: note = Target: SCN10A; (+) strand; PAM type: YTN; PAM sequence: TTG
  source 1..20: mol_type = other DNA
tctctatgtatccacaccct

SEQ ID NO: 68654 - DNA, 20 bp, synthetic construct
  misc_feature 1..20: note = Description of Artificial Sequence: Synthetic oligonucleotide
  misc_feature 1..20: note = Target: SCN10A; (+) strand; PAM type: YTN; PAM sequence: CTC
  source 1..20: mol_type = other DNA
tatgtatccacaccctttcc

SEQ ID NO: 68655 - DNA, 20 bp, synthetic construct
  misc_feature 1..20: note = Description of Artificial Sequence: Synthetic oligonucleotide
  misc_feature 1..20: note = Target: SCN10A; (+) strand; PAM type: YTN; PAM sequence: CTA
  source 1..20: mol_type = other DNA
tgtatccacaccctttccaa

SEQ ID NO: 68656 - DNA, 20 bp, synthetic construct
  misc_feature 1..20: note = Description of Artificial Sequence: Synthetic oligonucleotide
  misc_feature 1..20: note = Target: SCN10A; (+) strand; PAM type: YTN; PAM sequence: CTT
  source 1..20: mol_type = other DNA
tccaatgtgacttttcagct

SEQ ID NO: 68657 - DNA, 20 bp, synthetic construct
  misc_feature 1..20: note = Description of Artificial Sequence: Synthetic oligonucleotide
  misc_feature 1..20: note = Target: SCN10A; (+) strand; PAM type: YTN; PAM sequence: TTT
  source 1..20: mol_type = other DNA
ccaatgtgacttttcagctc

SEQ ID NO: 68658 - DNA, 20 bp, synthetic construct
  misc_feature 1..20: note = Description of Artificial Sequence: Synthetic oligonucleotide
  misc_feature 1..20: note = Target: SCN10A; (+) strand; PAM type: YTN; PAM sequence: TTC
  source 1..20: mol_type = other DNA
caatgtgacttttcagctct

SEQ ID NO: 68659 - DNA, 20 bp, synthetic construct
  misc_feature 1..20: note = Description of Artificial Sequence: Synthetic oligonucleotide
  misc_feature 1..20: note = Target: SCN10A; (+) strand; PAM type: YTN; PAM sequence: CTT
  source 1..20: mol_type = other DNA
ttcagctctttccattgagt

SEQ ID NO: 68660 - DNA, 20 bp, synthetic construct
  misc_feature 1..20: note = Description of Artificial Sequence: Synthetic oligonucleotide
  misc_feature 1..20: note = Target: SCN10A; (+) strand; PAM type: YTN; PAM sequence: TTT
  source 1..20: mol_type = other DNA
tcagctctttccattgagtg

SEQ ID NO: 68661 - DNA, 20 bp, synthetic construct
  misc_feature 1..20: note = Description of Artificial Sequence: Synthetic oligonucleotide
  misc_feature 1..20: note = Target: SCN10A; (+) strand; PAM type: YTN; PAM sequence: TTT
  source 1..20: mol_type = other DNA
cagctctttccattgagtga

SEQ ID NO: 68662 - DNA, 20 bp, synthetic construct
  misc_feature 1..20: note = Description of Artificial Sequence: Synthetic oligonucleotide
  misc_feature 1..20: note = Target: SCN10A; (+) strand; PAM type: YTN; PAM sequence: TTC
  source 1..20: mol_type = other DNA
agctctttccattgagtgat

SEQ ID NO: 68663 - DNA, 20 bp, synthetic construct
  misc_feature 1..20: note = Description of Artificial Sequence: Synthetic oligonucleotide
  misc_feature 1..20: note = Target: SCN10A; (+) strand; PAM type: YTN; PAM sequence: CTC
  source 1..20: mol_type = other DNA
tttccattgagtgatgaagt

SEQ ID NO: 68664 - DNA, 20 bp, synthetic construct
  misc_feature 1..20: note = Description of Artificial Sequence: Synthetic oligonucleotide
  misc_feature 1..20: note = Target: SCN10A; (+) strand; PAM type: YTN; PAM sequence: CTT
  source 1..20: mol_type = other DNA
tccattgagtgatgaagtct

SEQ ID NO: 68665 - DNA, 20 bp, synthetic construct
  misc_feature 1..20: note = Description of Artificial Sequence: Synthetic oligonucleotide
  misc_feature 1..20: note = Target: SCN10A; (+) strand; PAM type: YTN; PAM sequence: TTT
  source 1..20: mol_type = other DNA
ccattgagtgatgaagtcta

SEQ ID NO: 68666 - DNA, 20 bp, synthetic construct
  misc_feature 1..20: note = Description of Artificial Sequence: Synthetic oligonucleotide
  misc_feature 1..20: note = Target: SCN10A; (+) strand; PAM type: YTN; PAM sequence: TTC
  source 1..20: mol_type = other DNA
cattgagtgatgaagtctat

SEQ ID NO: 68667 - DNA, 20 bp, synthetic construct
  misc_feature 1..20: note = Description of Artificial Sequence: Synthetic oligonucleotide
  misc_feature 1..20: note = Target: SCN10A; (+) strand; PAM type: YTN; PAM sequence: TTG
  source 1..20: mol_type = other DNA
agtgatgaagtctatttctc

SEQ ID NO: 68668 - DNA, 20 bp, synthetic construct
  misc_feature 1..20: note = Description of Artificial Sequence: Synthetic oligonucleotide
  misc_feature 1..20: note = Target: SCN10A; (+) strand; PAM type: YTN; PAM sequence: CTA
  source 1..20: mol_type = other DNA
tttctctgtctcttggatct

SEQ ID NO: 68669 - DNA, 20 bp, synthetic construct
  misc_feature 1..20: note = Description of Artificial Sequence: Synthetic oligonucleotide
  misc_feature 1..20: note = Target: SCN10A; (+) strand; PAM type: YTN; PAM sequence: TTT
  source 1..20: mol_type = other DNA
ctctgtctcttggatctcta

SEQ ID NO: 68670 - DNA, 20 bp, synthetic construct
  misc_feature 1..20: note = Description of Artificial Sequence: Synthetic oligonucleotide
  misc_feature 1..20: note = Target: SCN10A; (+) strand; PAM type: YTN; PAM sequence: TTC
  source 1..20: mol_type = other DNA
tctgtctcttggatctctac

SEQ ID NO: 68671 - DNA, 20 bp, synthetic construct
  misc_feature 1..20: note = Description of Artificial Sequence: Synthetic oligonucleotide
  misc_feature 1..20: note = Target: SCN10A; (+) strand; PAM type: YTN; PAM sequence: CTC
  source 1..20: mol_type = other DNA
tgtctcttggatctctactg

SEQ ID NO: 68672 - DNA, 20 bp, synthetic construct
  misc_feature 1..20: note = Description of Artificial Sequence: Synthetic oligonucleotide
  misc_feature 1..20: note = Target: SCN10A; (+) strand; PAM type: YTN; PAM sequence: CTG
  source 1..20: mol_type = other DNA
tctcttggatctctactgga

SEQ ID NO: 68673 - DNA, 20 bp, synthetic construct
  misc_feature 1..20: note = Description of Artificial Sequence: Synthetic oligonucleotide
  misc_feature 1..20: note = Target: SCN10A; (+) strand; PAM type: YTN; PAM sequence: CTC
  source 1..20: mol_type = other DNA
ttggatctctactggactgc

SEQ ID NO: 68674 - DNA, 20 bp, synthetic construct
  misc_feature 1..20: note = Description of Artificial Sequence: Synthetic oligonucleotide
  misc_feature 1..20: note = Target: SCN10A; (+) strand; PAM type: YTN; PAM sequence: CTT
  source 1..20: mol_type = other DNA
ggatctctactggactgcaa

SEQ ID NO: 68675 - DNA, 20 bp, synthetic construct
  misc_feature 1..20: note = Description of Artificial Sequence: Synthetic oligonucleotide
  misc_feature 1..20: note = Target: SCN10A; (+) strand; PAM type: YTN; PAM sequence: TTG
  source 1..20: mol_type = other DNA
gatctctactggactgcaac

SEQ ID NO: 68676 - DNA, 20 bp, synthetic construct
  misc_feature 1..20: note = Description of Artificial Sequence: Synthetic oligonucleotide
  misc_feature 1..20: note = Target: SCN10A; (+) strand; PAM type: YTN; PAM sequence: CTC
  source 1..20: mol_type = other DNA
tactggactgcaacttgctt

SEQ ID NO: 68677 - DNA, 20 bp, synthetic construct
  misc_feature 1..20: note = Description of Artificial Sequence: Synthetic oligonucleotide
  misc_feature 1..20: note = Target: SCN10A; (+) strand; PAM type: YTN; PAM sequence: CTA
  source 1..20: mol_type = other DNA
ctggactgcaacttgcttta

SEQ ID NO: 68678 - DNA, 20 bp, synthetic construct
  misc_feature 1..20: note = Description of Artificial Sequence: Synthetic oligonucleotide
  misc_feature 1..20: note = Target: SCN10A; (+) strand; PAM type: YTN; PAM sequence: CTG
  source 1..20: mol_type = other DNA
gactgcaacttgctttagtc

SEQ ID NO: 68679 - DNA, 20 bp, synthetic construct
  misc_feature 1..20: note = Description of Artificial Sequence: Synthetic oligonucleotide
  misc_feature 1..20: note = Target: SCN10A; (+) strand; PAM type: YTN; PAM sequence: CTG
  source 1..20: mol_type = other DNA
caacttgctttagtcaagaa

SEQ ID NO: 68680 - DNA, 20 bp, synthetic construct
  misc_feature 1..20: note = Description of Artificial Sequence: Synthetic oligonucleotide
  misc_feature 1..20: note = Target: SCN10A; (+) strand; PAM type: YTN; PAM sequence: CTT
  source 1..20: mol_type = other DNA
gctttagtcaagaatgtatc

SEQ ID NO: 68681 - DNA, 20 bp, synthetic construct
  misc_feature 1..20: note = Description of Artificial Sequence: Synthetic oligonucleotide
  misc_feature 1..20: note = Target: SCN10A; (+) strand; PAM type: YTN; PAM sequence: TTG
  source 1..20: mol_type = other DNA
ctttagtcaagaatgtatca

SEQ ID NO: 68682 - DNA, 20 bp, synthetic construct
  misc_feature 1..20: note = Description of Artificial Sequence: Synthetic oligonucleotide
  misc_feature 1..20: note = Target: SCN10A; (+) strand; PAM type: YTN; PAM sequence: CTT
  source 1..20: mol_type = other DNA
tagtcaagaatgtatcagaa

SEQ ID NO: 68683 - DNA, 20 bp, synthetic construct
  misc_feature 1..20: note = Description of Artificial Sequence: Synthetic oligonucleotide
  misc_feature 1..20: note = Target: SCN10A; (+) strand; PAM type: YTN; PAM sequence: TTT
  source 1..20: mol_type = other DNA
agtcaagaatgtatcagaat

SEQ ID NO: 68684 - DNA, 20 bp, synthetic construct
  misc_feature 1..20: note = Description of Artificial Sequence: Synthetic oligonucleotide
  misc_feature 1..20: note = Target: SCN10A; (+) strand; PAM type: YTN; PAM sequence: TTA
  source 1..20: mol_type = other DNA
gtcaagaatgtatcagaatg

SEQ ID NO: 68685 - DNA, 20 bp, synthetic construct
  misc_feature 1..20: note = Description of Artificial Sequence: Synthetic oligonucleotide
  misc_feature 1..20: note = Target: SCN10A; (+) strand; PAM type: YTN; PAM sequence: TTG
  source 1..20: mol_type = other DNA
tgttggttctaagcctaggc

SEQ ID NO: 68686 - DNA, 20 bp, synthetic construct
  misc_feature 1..20: note = Description of Artificial Sequence: Synthetic oligonucleotide
  misc_feature 1..20: note = Target: SCN10A; (+) strand; PAM type: YTN; PAM sequence: TTG
  source 1..20: mol_type = other DNA
gttctaagcctaggcctgaa

SEQ ID NO: 68687 - DNA, 20 bp, synthetic construct
  misc_feature 1..20: note = Description of Artificial Sequence: Synthetic oligonucleotide
  misc_feature 1..20: note = Target: SCN10A; (+) strand; PAM type: YTN; PAM sequence: TTC
  source 1..20: mol_type = other DNA
taagcctaggcctgaagaag

SEQ ID NO: 68688 - DNA, 20 bp, synthetic construct
  misc_feature 1..20: note = Description of Artificial Sequence: Synthetic oligonucleotide
  misc_feature 1..20: note = Target: SCN10A; (+) strand; PAM type: YTN; PAM sequence: CTA
  source 1..20: mol_type = other DNA
agcctaggcctgaagaagcc

SEQ ID NO: 68689 - DNA, 20 bp, synthetic construct
  misc_feature 1..20: note = Description of Artificial Sequence: Synthetic oligonucleotide
  misc_feature 1..20: note = Target: SCN10A; (+) strand; PAM type: YTN; PAM sequence: CTA
  source 1..20: mol_type = other DNA
ggcctgaagaagccttgcaa

SEQ ID NO: 68690 - DNA, 20 bp, synthetic construct
  misc_feature 1..20: note = Description of Artificial Sequence: Synthetic oligonucleotide
  misc_feature 1..20: note = Target: SCN10A; (+) strand; PAM type: YTN; PAM sequence: CTG
  source 1..20: mol_type = other DNA
aagaagccttgcaaacttcc

SEQ ID NO: 68691 - DNA, 20 bp, synthetic construct
  misc_feature 1..20: note = Description of Artificial Sequence: Synthetic oligonucleotide
  misc_feature 1..20: note = Target: SCN10A; (+) strand; PAM type: YTN; PAM sequence: CTT
  source 1..20: mol_type = other DNA
gcaaacttccactgtttttc

SEQ ID NO: 68692 - DNA, 20 bp, synthetic construct
  misc_feature 1..20: note = Description of Artificial Sequence: Synthetic oligonucleotide
  misc_feature 1..20: note = Target: SCN10A; (+) strand; PAM type: YTN; PAM sequence: TTG
  source 1..20: mol_type = other DNA
caaacttccactgtttttct

SEQ ID NO: 68693 - DNA, 20 bp, synthetic construct
  misc_feature 1..20: note = Description of Artificial Sequence: Synthetic oligonucleotide
  misc_feature 1..20: note = Target: SCN10A; (+) strand; PAM type: YTN; PAM sequence: CTT
  source 1..20: mol_type = other DNA
ccactgtttttctgggaaca

SEQ ID NO: 68694 - DNA, 20 bp, synthetic construct
  misc_feature 1..20: note = Description of Artificial Sequence: Synthetic oligonucleotide
  misc_feature 1..20: note = Target: SCN10A; (+) strand; PAM type: YTN; PAM sequence: TTC
  source 1..20: mol_type = other DNA
cactgtttttctgggaacac

SEQ ID NO: 68695 - DNA, 20 bp, synthetic construct
  misc_feature 1..20: note = Description of Artificial Sequence: Synthetic oligonucleotide
  misc_feature 1..20: note = Target: SCN10A; (+) strand; PAM type: YTN; PAM sequence: CTG
  source 1..20: mol_type = other DNA
tttttctgggaacactgcca

SEQ ID NO: 68696 - DNA, 20 bp, synthetic construct
  misc_feature 1..20: note = Description of Artificial Sequence: Synthetic oligonucleotide
  misc_feature 1..20: note = Target: SCN10A; (+) strand; PAM type: YTN; PAM sequence: TTT
  source 1..20: mol_type = other DNA
ttctgggaacactgccatga

SEQ ID NO: 68697 - DNA, 20 bp, synthetic construct
  misc_feature 1..20: note = Description of Artificial Sequence: Synthetic oligonucleotide
  misc_feature 1..20: note = Target: SCN10A; (+) strand; PAM type: YTN; PAM sequence: TTT
  source 1..20: mol_type = other DNA
tctgggaacactgccatgag

SEQ ID NO: 68698 - DNA, 20 bp, synthetic construct
  misc_feature 1..20: note = Description of Artificial Sequence: Synthetic oligonucleotide
  misc_feature 1..20: note = Target: SCN10A; (+) strand; PAM type: YTN; PAM sequence: TTT
  source 1..20: mol_type = other DNA
ctgggaacactgccatgaga

SEQ ID NO: 68699 - DNA, 20 bp, synthetic construct
  misc_feature 1..20: note = Description of Artificial Sequence: Synthetic oligonucleotide
  misc_feature 1..20: note = Target: SCN10A; (+) strand; PAM type: YTN; PAM sequence: TTC
  source 1..20: mol_type = other DNA
tgggaacactgccatgagaa

SEQ ID NO: 68700 - DNA, 20 bp, synthetic construct
  misc_feature 1..20: note = Description of Artificial Sequence: Synthetic oligonucleotide
  misc_feature 1..20: note = Target: SCN10A; (+) strand; PAM type: YTN; PAM sequence: CTG
  source 1..20: mol_type = other DNA
ggaacactgccatgagaaca

SEQ ID NO: 68701 - DNA, 20 bp, synthetic construct
  misc_feature 1..20: note = Description of Artificial Sequence: Synthetic oligonucleotide
  misc_feature 1..20: note = Target: SCN10A; (+) strand; PAM type: YTN; PAM sequence: CTG
  source 1..20: mol_type = other DNA
ccatgagaacaggcccaggc

SEQ ID NO: 68702 - DNA, 20 bp, synthetic construct
  misc_feature 1..20: note = Description of Artificial Sequence: Synthetic oligonucleotide
  misc_feature 1..20: note = Target: SCN10A; (+) strand; PAM type: YTN; PAM sequence: CTA
  source 1..20: mol_type = other DNA
acctgtttgggggtgagagg

SEQ ID NO: 68703 - DNA, 20 bp, synthetic construct
  misc_feature 1..20: note = Description of Artificial Sequence: Synthetic oligonucleotide
  misc_feature 1..20: note = Target: SCN10A; (+) strand; PAM type: YTN; PAM sequence: CTG
  source 1..20: mol_type = other DNA
tttgggggtgagaggccaca

SEQ ID NO: 68704 - DNA, 20 bp, synthetic construct
  misc_feature 1..20: note = Description of Artificial Sequence: Synthetic oligonucleotide
  misc_feature 1..20: note = Target: SCN10A; (+) strand; PAM type: YTN; PAM sequence: TTT
  source 1..20: mol_type = other DNA
gggggtgagaggccacatga

SEQ ID NO: 68705 - DNA, 20 bp, synthetic construct
  misc_feature 1..20: note = Description of Artificial Sequence: Synthetic oligonucleotide
  misc_feature 1..20: note = Target: SCN10A; (+) strand; PAM type: YTN; PAM sequence: TTG
  source 1..20: mol_type = other DNA
ggggtgagaggccacatgag

SEQ ID NO: 68706 - DNA, 20 bp, synthetic construct
  misc_feature 1..20: note = Description of Artificial Sequence: Synthetic oligonucleotide
  misc_feature 1..20: note = Target: SCN10A; (+) strand; PAM type: YTN; PAM sequence: CTA
  source 1..20: mol_type = other DNA
gaccagccatctccaagtta

SEQ ID NO: 68707 - DNA, 20 bp, synthetic construct
  misc_feature 1..20: note = Description of Artificial Sequence: Synthetic oligonucleotide
  misc_feature 1..20: note = Target: SCN10A; (+) strand; PAM type: YTN; PAM sequence: CTC
  source 1..20: mol_type = other DNA
caagttaatatgctgtctgc

SEQ ID NO: 68708 - DNA, 20 bp, synthetic construct
  misc_feature 1..20: note = Description of Artificial Sequence: Synthetic oligonucleotide
  misc_feature 1..20: note = Target: SCN10A; (+) strand; PAM type: YTN; PAM sequence: TTA
  source 1..20: mol_type = other DNA
atatgctgtctgcatatgca

SEQ ID NO: 68709 - DNA, 20 bp, synthetic construct
  misc_feature 1..20: note = Description of Artificial Sequence: Synthetic oligonucleotide
  misc_feature 1..20: note = Target: SCN10A; (+) strand; PAM type: YTN; PAM sequence: CTG
  source 1..20: mol_type = other DNA
tctgcatatgcatgaatgag

SEQ ID NO: 68710 - DNA, 20 bp, synthetic construct
  misc_feature 1..20: note = Description of Artificial Sequence: Synthetic oligonucleotide
  misc_feature 1..20: note = Target: SCN10A; (+) strand; PAM type: YTN; PAM sequence: CTG
  source 1..20: mol_type = other DNA
catatgcatgaatgagccta

SEQ ID NO: 68711 - DNA, 20 bp, synthetic construct
  misc_feature 1..20: note = Description of Artificial Sequence: Synthetic oligonucleotide
  misc_feature 1..20: note = Target: SCN10A; (+) strand; PAM type: YTN; PAM sequence: CTA
  source 1..20: mol_type = other DNA
gtcaatgtcacccaatgccc

SEQ ID NO: 68712 - DNA, 20 bp, synthetic construct
  misc_feature 1..20: note = Description of Artificial Sequence: Synthetic oligonucleotide
  misc_feature 1..20: note = Target: SCN10A; (+) strand; PAM type: YTN; PAM sequence: CTG
  source 1..20: mol_type = other DNA
atcccagtccaaaatgctga

SEQ ID NO: 68713 - DNA, 20 bp, synthetic construct
  misc_feature 1..20: note = Description of Artificial Sequence: Synthetic oligonucleotide
  misc_feature 1..20: note = Target: SCN10A; (+) strand; PAM type: YTN; PAM sequence: CTG
  source 1..20: mol_type = other DNA
atgcacagaatcatgaatta

SEQ ID NO: 68714 - DNA, 20 bp, synthetic construct
  misc_feature 1..20: note = Description of Artificial Sequence: Synthetic oligonucleotide
  misc_feature 1..20: note = Target: SCN10A; (+) strand; PAM type: YTN; PAM sequence: TTA
  source 1..20: mol_type = other DNA
aatacattgttgttttaatt

SEQ ID NO: 68715 - DNA, 20 bp, synthetic construct
  misc_feature 1..20: note = Description of Artificial Sequence: Synthetic oligonucleotide
  misc_feature 1..20: note = Target: SCN10A; (+) strand; PAM type: YTN; PAM sequence: TTG
  source 1..20: mol_type = other DNA
ttgttttaattcacaaaatt

SEQ ID NO: 68716 - DNA, 20 bp, synthetic construct
  misc_feature 1..20: note = Description of Artificial Sequence: Synthetic oligonucleotide
  misc_feature 1..20: note = Target: SCN10A; (+) strand; PAM type: YTN; PAM sequence: TTG
  source 1..20: mol_type = other DNA
ttttaattcacaaaattttg

SEQ ID NO: 68717 - DNA, 20 bp, synthetic construct
  misc_feature 1..20: note = Description of Artificial Sequence: Synthetic oligonucleotide
  misc_feature 1..20: note = Target: SCN10A; (+) strand; PAM type: YTN; PAM sequence: TTT
  source 1..20: mol_type = other DNA
taattcacaaaattttgggg

SEQ ID NO: 68718 - DNA, 20 bp, synthetic construct
  misc_feature 1..20: note = Description of Artificial Sequence: Synthetic oligonucleotide
  misc_feature 1..20: note = Target: SCN10A; (+) strand; PAM type: YTN; PAM sequence: TTT
  source 1..20: mol_type = other DNA
aattcacaaaattttggggt

SEQ ID NO: 68719 - DNA, 20 bp, synthetic construct
  misc_feature 1..20: note = Description of Artificial Sequence: Synthetic oligonucleotide
  misc_feature 1..20: note = Target: SCN10A; (+) strand; PAM type: YTN; PAM sequence: TTA
  source 1..20: mol_type = other DNA
attcacaaaattttggggtc

SEQ ID NO: 68720 - DNA, 20 bp, synthetic construct
  misc_feature 1..20: note = Description of Artificial Sequence: Synthetic oligonucleotide
  misc_feature 1..20: note = Target: SCN10A; (+) strand; PAM type: YTN; PAM sequence: TTC
  source 1..20: mol_type = other DNA
acaaaattttggggtcattt

SEQ ID NO: 68721 - DNA, 20 bp, synthetic construct
  misc_feature 1..20: note = Description of Artificial Sequence: Synthetic oligonucleotide
  misc_feature 1..20: note = Target: SCN10A; (+) strand; PAM type: YTN; PAM sequence: TTT
  source 1..20: mol_type = other DNA
tggggtcatttgttacacag

SEQ ID NO: 68722 - DNA, 20 bp, synthetic construct
  misc_feature 1..20: note = Description of Artificial Sequence: Synthetic oligonucleotide
  misc_feature 1..20: note = Target: SCN10A; (+) strand; PAM type: YTN; PAM sequence: TTT
  source 1..20: mol_type = other DNA
ggggtcatttgttacacagc

SEQ ID NO: 68723 - DNA, 20 bp, synthetic construct
  misc_feature 1..20: note = Description of Artificial Sequence: Synthetic oligonucleotide
  misc_feature 1..20: note = Target: SCN10A; (+) strand; PAM type: YTN; PAM sequence: TTG
  source 1..20: mol_type = other DNA
gggtcatttgttacacagcg

SEQ ID NO: 68724 - DNA, 20 bp, synthetic construct
  misc_feature 1..20: note = Description of Artificial Sequence: Synthetic oligonucleotide
  misc_feature 1..20: note = Target: SCN10A; (+) strand; PAM type: YTN; PAM sequence: TTT
  source 1..20: mol_type = other DNA
gttacacagcgaaagctaac

SEQ ID NO: 68725 - DNA, 20 bp, synthetic construct
  misc_feature 1..20: note = Description of Artificial Sequence: Synthetic oligonucleotide
  misc_feature 1..20: note = Target: SCN10A; (+) strand; PAM type: YTN; PAM sequence: TTG
  source 1..20: mol_type = other DNA
ttacacagcgaaagctaact

SEQ ID NO: 68726 - DNA, 20 bp, synthetic construct
  misc_feature 1..20: note = Description of Artificial Sequence: Synthetic oligonucleotide
  misc_feature 1..20: note = Target: SCN10A; (+) strand; PAM type: YTN; PAM sequence: TTA
  source 1..20: mol_type = other DNA
cacagcgaaagctaactcat

SEQ ID NO: 68727 - DNA, 20 bp, synthetic construct
  misc_feature 1..20: note = Description of Artificial Sequence: Synthetic oligonucleotide
  misc_feature 1..20: note = Target: SCN10A; (+) strand; PAM type: YTN; PAM sequence: CTA
  source 1..20: mol_type = other DNA
actcatacattccctcccca

SEQ ID NO: 68728 - DNA, 20 bp, synthetic construct
  misc_feature 1..20: note = Description of Artificial Sequence: Synthetic oligonucleotide
  misc_feature 1..20: note = Target: SCN10A; (+) strand; PAM type: YTN; PAM sequence: CTC
  source 1..20: mol_type = other DNA
atacattccctccccatgag

SEQ ID NO: 68729 - DNA, 20 bp, synthetic construct
  misc_feature 1..20: note = Description of Artificial Sequence: Synthetic oligonucleotide
  misc_feature 1..20: note = Target: SCN10A; (+) strand; PAM type: YTN; PAM sequence: TTC
  source 1..20: mol_type = other DNA
cctccccatgagctctgggt

SEQ ID NO: 68730 - DNA, 20 bp, synthetic construct
  misc_feature 1..20: note = Description of Artificial Sequence: Synthetic oligonucleotide
  misc_feature 1..20: note = Target: SCN10A; (+) strand; PAM type: YTN; PAM sequence: CTC
  source 1..20: mol_type = other DNA
cccatgagctctgggttggc

SEQ ID NO: 68731 - DNA, 20 bp, synthetic construct
  misc_feature 1..20: note = Description of Artificial Sequence: Synthetic oligonucleotide
  misc_feature 1..20: note = Target: SCN10A; (+) strand; PAM type: YTN; PAM sequence: CTC
  source 1..20: mol_type = other DNA
tgggttggcaaaggccatga

SEQ ID NO: 68732 - DNA, 20 bp, synthetic construct
  misc_feature 1..20: note = Description of Artificial Sequence: Synthetic oligonucleotide
  misc_feature 1..20: note = Target: SCN10A; (+) strand; PAM type: YTN; PAM sequence: CTG
  source 1..20: mol_type = other DNA
ggttggcaaaggccatgatt

SEQ ID NO: 68733 - DNA, 20 bp, synthetic construct
  misc_feature 1..20: note = Description of Artificial Sequence: Synthetic oligonucleotide
  misc_feature 1..20: note = Target: SCN10A; (+) strand; PAM type: YTN; PAM sequence: TTG
  source 1..20: mol_type = other DNA
gcaaaggccatgatttattt

SEQ ID NO: 68734 - DNA, 20 bp, synthetic construct
  misc_feature 1..20: note = Description of Artificial Sequence: Synthetic oligonucleotide
  misc_feature 1..20: note = Target: SCN10A; (+) strand; PAM type: YTN; PAM sequence: TTT
  source 1..20: mol_type = other DNA
atttatttatacatctttcc

SEQ ID NO: 68735 - DNA, 20 bp, synthetic construct
  misc_feature 1..20: note = Description of Artificial Sequence: Synthetic oligonucleotide
  misc_feature 1..20: note = Target: SCN10A; (+) strand; PAM type: YTN; PAM sequence: TTA
  source 1..20: mol_type = other DNA
tttatttatacatctttccc

SEQ ID NO: 68736 - DNA, 20 bp, synthetic construct
  misc_feature 1..20: note = Description of Artificial Sequence: Synthetic oligonucleotide
  misc_feature 1..20: note = Target: SCN10A; (+) strand; PAM type: YTN; PAM sequence: TTT
  source 1..20: mol_type = other DNA
atttatacatctttcccagg

SEQ ID NO: 68737 - DNA, 20 bp, synthetic construct
  misc_feature 1..20: note = Description of Artificial Sequence: Synthetic oligonucleotide
  misc_feature 1..20: note = Target: SCN10A; (+) strand; PAM type: YTN; PAM sequence: TTA
  source 1..20: mol_type = other DNA
tttatacatctttcccagga

SEQ ID NO: 68738 - DNA, 20 bp, synthetic construct
  misc_feature 1..20: note = Description of Artificial Sequence: Synthetic oligonucleotide
  misc_feature 1..20: note = Target: SCN10A; (+) strand; PAM type: YTN; PAM sequence: TTT
  source 1..20: mol_type = other DNA
atacatctttcccaggacct

SEQ ID NO: 68739 - DNA, 20 bp, synthetic construct
  misc_feature 1..20: note = Description of Artificial Sequence: Synthetic oligonucleotide
  misc_feature 1..20: note = Target: SCN10A; (+) strand; PAM type: YTN; PAM sequence: TTA
  source 1..20: mol_type = other DNA
tacatctttcccaggacctg

SEQ ID NO: 68740 - DNA, 20 bp, synthetic construct
  misc_feature 1..20: note = Description of Artificial Sequence: Synthetic oligonucleotide
  misc_feature 1..20: note = Target: SCN10A; (+) strand; PAM type: YTN; PAM sequence: CTT
  source 1..20: mol_type = other DNA
tcccaggacctgcaacccca

SEQ ID NO: 68741 - DNA, 20 bp, synthetic construct
  misc_feature 1..20: note = Description of Artificial Sequence: Synthetic oligonucleotide
  misc_feature 1..20: note = Target: SCN10A; (+) strand; PAM type: YTN; PAM sequence: TTT
  source 1..20: mol_type = other DNA
cccaggacctgcaaccccat

SEQ ID NO: 68742 - DNA, 20 bp, synthetic construct
  misc_feature 1..20: note = Description of Artificial Sequence: Synthetic oligonucleotide
  misc_feature 1..20: note = Target: SCN10A; (+) strand; PAM type: YTN; PAM sequence: TTC
  source 1..20: mol_type = other DNA
ccaggacctgcaaccccatc

SEQ ID NO: 68743 - DNA, 20 bp, synthetic construct
  misc_feature 1..20: note = Description of Artificial Sequence: Synthetic oligonucleotide
  misc_feature 1..20: note = Target: SCN10A; (+) strand; PAM type: YTN; PAM sequence: CTG
  source 1..20: mol_type = other DNA
caaccccatctgtgcccata

SEQ ID NO: 68744 - DNA, 20 bp, synthetic construct
  misc_feature 1..20: note = Description of Artificial Sequence: Synthetic oligonucleotide
  misc_feature 1..20: note = Target: SCN10A; (+) strand; PAM type: YTN; PAM sequence: CTG
  source 1..20: mol_type = other DNA
tgcccataatatgccaagga

SEQ ID NO: 68745 - DNA, 20 bp, synthetic construct
  misc_feature 1..20: note = Description of Artificial Sequence: Synthetic oligonucleotide
  misc_feature 1..20: note = Target: SCN10A; (+) strand; PAM type: YTN; PAM sequence: TTG
  source 1..20: mol_type = other DNA
ttgggcactcgtgctttgtc

SEQ ID NO: 68746 - DNA, 20 bp, synthetic construct
  misc_feature 1..20: note = Description of Artificial Sequence: Synthetic oligonucleotide
  misc_feature 1..20: note = Target: SCN10A; (+) strand; PAM type: YTN; PAM sequence: TTG
  source 1..20: mol_type = other DNA
ggcactcgtgctttgtcata

SEQ ID NO: 68747 - DNA, 20 bp, synthetic construct
  misc_feature 1..20: note = Description of Artificial Sequence: Synthetic oligonucleotide
  misc_feature 1..20: note = Target: SCN10A; (+) strand; PAM type: YTN; PAM sequence: CTC
  source 1..20: mol_type = other DNA
gtgctttgtcataagttggg

SEQ ID NO: 68748 - DNA, 20 bp, synthetic construct
  misc_feature 1..20: note = Description of Artificial Sequence: Synthetic oligonucleotide
  misc_feature 1..20: note = Target: SCN10A; (+) strand; PAM type: YTN; PAM sequence: CTT
  source 1..20: mol_type = other DNA
tgtcataagttgggaactca

SEQ ID NO: 68749 - DNA, 20 bp, synthetic construct
  misc_feature 1..20: note = Description of Artificial Sequence: Synthetic oligonucleotide
  misc_feature 1..20: note = Target: SCN10A; (+) strand; PAM type: YTN; PAM sequence: TTT
  source 1..20: mol_type = other DNA
gtcataagttgggaactcac

SEQ ID NO: 68750 - DNA, 20 bp, synthetic construct
  misc_feature 1..20: note = Description of Artificial Sequence: Synthetic oligonucleotide
  misc_feature 1..20: note = Target: SCN10A; (+) strand; PAM type: YTN; PAM sequence: TTG
  source 1..20: mol_type = other DNA
tcataagttgggaactcacc

SEQ ID NO: 68751 - DNA, 20 bp, synthetic construct
  misc_feature 1..20: note = Description of Artificial Sequence: Synthetic oligonucleotide
  misc_feature 1..20: note = Target: SCN10A; (+) strand; PAM type: YTN; PAM sequence: TTG
  source 1..20: mol_type = other DNA
ggaactcaccctgagtcaga

SEQ ID NO: 68752 - DNA, 20 bp, synthetic construct
  misc_feature 1..20: note = Description of Artificial Sequence: Synthetic oligonucleotide
  misc_feature 1..20: note = Target: SCN10A; (+) strand; PAM type: YTN; PAM sequence: CTC
  source 1..20: mol_type = other DNA
accctgagtcagatccattg

SEQ ID NO: 68753 - DNA, 20 bp, synthetic construct
  misc_feature 1..20: note = Description of Artificial Sequence: Synthetic oligonucleotide
  misc_feature 1..20: note = Target: SCN10A; (+) strand; PAM type: YTN; PAM sequence: CTG
  source 1..20: mol_type = other DNA
agtcagatccattgccacac

SEQ ID NO: 68754 - DNA, 20 bp, synthetic construct
  misc_feature 1..20: note = Description of Artificial Sequence: Synthetic oligonucleotide
  misc_feature 1..20: note = Target: SCN10A; (+) strand; PAM type: YTN; PAM sequence: TTG
  source 1..20: mol_type = other DNA
ccacacagtaaggggtcaga

SEQ ID NO: 68755 - DNA, 20 bp, synthetic construct
  misc_feature 1..20: note = Description of Artificial Sequence: Synthetic oligonucleotide
  misc_feature 1..20: note = Target: SCN10A; (+) strand; PAM type: YTN; PAM sequence: CTC
  source 1..20: mol_type = other DNA
gcttatttatgtagatatct

SEQ ID NO: 68756 - DNA, 20 bp, synthetic construct
  misc_feature 1..20: note = Description of Artificial Sequence: Synthetic oligonucleotide
  misc_feature 1..20: note = Target: SCN10A; (+) strand; PAM type: YTN; PAM sequence: CTT
  source 1..20: mol_type = other DNA
atttatgtagatatctgctg

SEQ ID NO: 68757 - DNA, 20 bp, synthetic construct
  misc_feature 1..20: note = Description of Artificial Sequence: Synthetic oligonucleotide
  misc_feature 1..20: note = Target: SCN10A; (+) strand; PAM type: YTN; PAM sequence: TTA
  source 1..20: mol_type = other DNA
tttatgtagatatctgctga

SEQ ID NO: 68758 - DNA, 20 bp, synthetic construct
  misc_feature 1..20: note = Description of Artificial Sequence: Synthetic oligonucleotide
  misc_feature 1..20: note = Target: SCN10A; (+) strand; PAM type: YTN; PAM sequence: TTT
  source 1..20: mol_type = other DNA
atgtagatatctgctgaaga

SEQ ID NO: 68759 - DNA, 20 bp, synthetic construct
  misc_feature 1..20: note = Description of Artificial Sequence: Synthetic oligonucleotide
  misc_feature 1..20: note = Target: SCN10A; (+) strand; PAM type: YTN; PAM sequence: TTA
  source 1..20: mol_type = other DNA
tgtagatatctgctgaagaa

SEQ ID NO: 68760 - DNA, 20 bp, synthetic construct
  misc_feature 1..20: note = Description of Artificial Sequence: Synthetic oligonucleotide
  misc_feature 1..20: note = Target: SCN10A; (+) strand; PAM type: YTN; PAM sequence: CTG
  source 1..20: mol_type = other DNA
ctgaagaaaggaagaaaaga

SEQ ID NO: 68761 - DNA, 20 bp, synthetic construct
  misc_feature 1..20: note = Description of Artificial Sequence: Synthetic oligonucleotide
  misc_feature 1..20: note = Target: SCN10A; (+) strand; PAM type: YTN; PAM sequence: CTG
  source 1..20: mol_type = other DNA
aagaaaggaagaaaagaaag

SEQ ID NO: 68762 - DNA, 20 bp, synthetic construct
  misc_feature 1..20: note = Description of Artificial Sequence: Synthetic oligonucleotide
  misc_feature 1..20: note = Target: SCN10A; (+) strand; PAM type: YTN; PAM sequence: CTC
  source 1..20: mol_type = other DNA
acagatggttctgaaccctc

SEQ ID NO: 68763 - DNA, 20 bp, synthetic construct
  misc_feature 1..20: note = Description of Artificial Sequence: Synthetic oligonucleotide
  misc_feature 1..20: note = Target: SCN10A; (+) strand; PAM type: YTN; PAM sequence: TTC
  source 1..20: mol_type = other DNA
tgaaccctccaacccaagcc

SEQ ID NO: 68764 - DNA, 20 bp, synthetic construct
  misc_feature 1..20: note = Description of Artificial Sequence: Synthetic oligonucleotide
  misc_feature 1..20: note = Target: SCN10A; (+) strand; PAM type: YTN; PAM sequence: CTG
  source 1..20: mol_type = other DNA
aaccctccaacccaagcctt

SEQ ID NO: 68765 - DNA, 20 bp, synthetic construct
  misc_feature 1..20: note = Description of Artificial Sequence: Synthetic oligonucleotide
  misc_feature 1..20: note = Target: SCN10A; (+) strand; PAM type: YTN; PAM sequence: CTC
  source 1..20: mol_type = other DNA
caacccaagccttgtgtggt

SEQ ID NO: 68766 - DNA, 20 bp, synthetic construct
  misc_feature 1..20: note = Description of Artificial Sequence: Synthetic oligonucleotide
  misc_feature 1..20: note = Target: SCN10A; (+) strand; PAM type: YTN; PAM sequence: CTT
  source 1..20: mol_type = other DNA
gtgtggtgaatgcaatattc

SEQ ID NO: 68767 - DNA, 20 bp, synthetic construct
  misc_feature 1..20: note = Description of Artificial Sequence: Synthetic oligonucleotide
  misc_feature 1..20: note = Target: SCN10A; (+) strand; PAM type: YTN; PAM sequence: TTG
  source 1..20: mol_type = other DNA
tgtggtgaatgcaatattcc

SEQ ID NO: 68768 - DNA, 20 bp, synthetic construct
  misc_feature 1..20: note = Description of Artificial Sequence: Synthetic oligonucleotide
  misc_feature 1..20: note = Target: SCN10A; (+) strand; PAM type: YTN; PAM sequence: TTC
  source 1..20: mol_type = other DNA
ccaagtcttccaaagtgagc

SEQ ID NO: 68769 - DNA, 20 bp, synthetic construct
  misc_feature 1..20: note = Description of Artificial Sequence: Synthetic oligonucleotide
  misc_feature 1..20: note = Target: SCN10A; (+) strand; PAM type: YTN; PAM sequence: CTT
  source 1..20: mol_type = other DNA
ccaaagtgagctcctttggc

SEQ ID NO: 68770 - DNA, 20 bp, synthetic construct
  misc_feature 1..20: note = Description of Artificial Sequence: Synthetic oligonucleotide
  misc_feature 1..20: note = Target: SCN10A; (+) strand; PAM type: YTN; PAM sequence: TTC
  source 1..20: mol_type = other DNA
caaagtgagctcctttggct

SEQ ID NO: 68771 - DNA, 20 bp, synthetic construct
  misc_feature 1..20: note = Description of Artificial Sequence: Synthetic oligonucleotide
  misc_feature 1..20: note = Target: SCN10A; (+) strand; PAM type: YTN; PAM sequence: CTC
  source 1..20: mol_type = other DNA
ctttggctacatgtactcag

SEQ ID NO: 68772 - DNA, 20 bp, synthetic construct
  misc_feature 1..20: note = Description of Artificial Sequence: Synthetic oligonucleotide
  misc_feature 1..20: note = Target: SCN10A; (+) strand; PAM type: YTN; PAM sequence: CTT
  source 1..20: mol_type = other DNA
tggctacatgtactcagtgg

SEQ ID NO: 68773 - DNA, 20 bp, synthetic construct
  misc_feature 1..20: note = Description of Artificial Sequence: Synthetic oligonucleotide
  misc_feature 1..20: note = Target: SCN10A; (+) strand; PAM type: YTN; PAM sequence: TTT
  source 1..20: mol_type = other DNA
ggctacatgtactcagtggg

SEQ ID NO: 68774 - DNA, 20 bp, synthetic construct
  misc_feature 1..20: note = Description of Artificial Sequence: Synthetic oligonucleotide
  misc_feature 1..20: note = Target: SCN10A; (+) strand; PAM type: YTN; PAM sequence: TTG
  source 1..20: mol_type = other DNA
gctacatgtactcagtgggc

SEQ ID NO: 68775 - DNA, 20 bp, synthetic construct
  misc_feature 1..20: note = Description of Artificial Sequence: Synthetic oligonucleotide
  misc_feature 1..20: note = Target: SCN10A; (+) strand; PAM type: YTN; PAM sequence: CTA
  source 1..20: mol_type = other DNA
catgtactcagtgggcatgc

SEQ ID NO: 68776 - DNA, 20 bp, synthetic construct
  misc_feature 1..20: note = Description of Artificial Sequence: Synthetic oligonucleotide
  misc_feature 1..20: note = Target: SCN10A; (+) strand; PAM type: YTN; PAM sequence: CTC
  source 1..20: mol_type = other DNA
agtgggcatgctgggccaca

SEQ ID NO: 68777 - DNA, 20 bp, synthetic construct
  misc_feature 1..20: note = Description of Artificial Sequence: Synthetic oligonucleotide
  misc_feature 1..20: note = Target: SCN10A; (+) strand; PAM type: YTN; PAM sequence: CTG
  source 1..20: mol_type = other DNA
ggccacatggaagttgtaaa

SEQ ID NO: 68778 - DNA, 20 bp, synthetic construct
  misc_feature 1..20: note = Description of Artificial Sequence: Synthetic oligonucleotide
  misc_feature 1..20: note = Target: SCN10A; (+) strand; PAM type: YTN; PAM sequence: TTG
  source 1..20: mol_type = other DNA
taaagtcacatctgaaaaga

SEQ ID NO: 68779 - DNA, 20 bp, synthetic construct
  misc_feature 1..20: note = Description of Artificial Sequence: Synthetic oligonucleotide
  misc_feature 1..20: note = Target: SCN10A; (+) strand; PAM type: YTN; PAM sequence: CTG
  source 1..20: mol_type = other DNA
aaaagagaagagctaagcag

SEQ ID NO: 68780 - DNA, 20 bp, synthetic construct
  misc_feature 1..20: note = Description of Artificial Sequence: Synthetic oligonucleotide
  misc_feature 1..20: note = Target: SCN10A; (+) strand; PAM type: YTN; PAM sequence: CTA
  source 1..20: mol_type = other DNA
agcagtgacttcggctctca

SEQ ID NO: 68781 - DNA, 20 bp, synthetic construct
  misc_feature 1..20: note = Description of Artificial Sequence: Synthetic oligonucleotide
  misc_feature 1..20: note = Target: SCN10A; (+) strand; PAM type: YTN; PAM sequence: CTT
  source 1..20: mol_type = other DNA
cggctctcaatctcccccag

SEQ ID NO: 68782 - DNA, 20 bp, synthetic construct
  misc_feature 1..20: note = Description of Artificial Sequence: Synthetic oligonucleotide
  misc_feature 1..20: note = Target: SCN10A; (+) strand; PAM type: YTN; PAM sequence: TTC
  source 1..20: mol_type = other DNA
ggctctcaatctcccccagc

SEQ ID NO: 68783 - DNA, 20 bp, synthetic construct
  misc_feature 1..20: note = Description of Artificial Sequence: Synthetic oligonucleotide
  misc_feature 1..20: note = Target: SCN10A; (+) strand; PAM type: YTN; PAM sequence: CTC
  source 1..20: mol_type = other DNA
tcaatctcccccagcagagg

SEQ ID NO: 68784 - DNA, 20 bp, synthetic construct
  misc_feature 1..20: note = Description of Artificial Sequence: Synthetic oligonucleotide
  misc_feature 1..20: note = Target: SCN10A; (+) strand; PAM type: YTN; PAM sequence: CTC
  source 1..20: mol_type = other DNA
aatctcccccagcagaggta

SEQ ID NO: 68785 - DNA, 20 bp, synthetic construct
  misc_feature 1..20: note = Description of Artificial Sequence: Synthetic oligonucleotide
  misc_feature 1..20: note = Target: SCN10A; (+) strand; PAM type: YTN; PAM sequence: CTC
  source 1..20: mol_type = other DNA
ccccagcagaggtagaatga

SEQ ID NO: 68786 - DNA, 20 bp, synthetic construct
  misc_feature 1..20: note = Description of Artificial Sequence: Synthetic oligonucleotide
  misc_feature 1..20: note = Target: SCN10A; (+) strand; PAM type: YTN; PAM sequence: CTT
  source 1..20: mol_type = other DNA
gcctctagatttatggctca

SEQ ID NO: 68787 - DNA, 20 bp, synthetic construct
  misc_feature 1..20: note = Description of Artificial Sequence: Synthetic oligonucleotide
  misc_feature 1..20: note = Target: SCN10A; (+) strand; PAM type: YTN; PAM sequence: TTG
  source 1..20: mol_type = other DNA
cctctagatttatggctcat

SEQ ID NO: 68788 - DNA, 20 bp, synthetic construct
  misc_feature 1..20: note = Description of Artificial Sequence: Synthetic oligonucleotide
  misc_feature 1..20: note = Target: SCN10A; (+) strand; PAM type: YTN; PAM sequence: CTC
  source 1..20: mol_type = other DNA
tagatttatggctcatttcc

SEQ ID NO: 68789 - DNA, 20 bp, synthetic construct
  misc_feature 1..20: note = Description of Artificial Sequence: Synthetic oligonucleotide
  misc_feature 1..20: note = Target: SCN10A; (+) strand; PAM type: YTN; PAM sequence: CTA
  source 1..20: mol_type = other DNA
gatttatggctcatttcctt

SEQ ID NO: 68790 - DNA, 20 bp, synthetic construct
  misc_feature 1..20: note = Description of Artificial Sequence: Synthetic oligonucleotide
  misc_feature 1..20: note = Target: SCN10A; (+) strand; PAM type: YTN; PAM sequence: TTT
  source 1..20: mol_type = other DNA
atggctcatttccttgcaag

SEQ ID NO: 68791 - DNA, 20 bp, synthetic construct
  misc_feature 1..20: note = Description of Artificial Sequence: Synthetic oligonucleotide
  misc_feature 1..20: note = Target: SCN10A; (+) strand; PAM type: YTN; PAM sequence: TTA
  source 1..20: mol_type = other DNA
tggctcatttccttgcaaga

SEQ ID NO: 68792 - DNA, 20 bp, synthetic construct
  misc_feature 1..20: note = Description of Artificial Sequence: Synthetic oligonucleotide
  misc_feature 1..20: note = Target: SCN10A; (+) strand; PAM type: YTN; PAM sequence: CTC
  source 1..20: mol_type = other DNA
atttccttgcaagagggatg

SEQ ID NO: 68793 - DNA, 20 bp, synthetic construct
  misc_feature 1..20: note = Description of Artificial Sequence: Synthetic oligonucleotide
  misc_feature 1..20: note = Target: SCN10A; (+) strand; PAM type: YTN; PAM sequence: TTT
  source 1..20: mol_type = other DNA
ccttgcaagagggatgctga

SEQ ID NO: 68794 - DNA, 20 bp, synthetic construct
  misc_feature 1..20: note = Description of Artificial Sequence: Synthetic oligonucleotide
  misc_feature 1..20: note = Target: SCN10A; (+) strand; PAM type: YTN; PAM sequence: TTC
  source 1..20: mol_type = other DNA
cttgcaagagggatgctgag

SEQ ID NO: 68795 - DNA, 20 bp, synthetic construct
  misc_feature 1..20: note = Description of Artificial Sequence: Synthetic oligonucleotide
  misc_feature 1..20: note = Target: SCN10A; (+) strand; PAM type: YTN; PAM sequence: CTT
  source 1..20: mol_type = other DNA
gcaagagggatgctgagcaa

SEQ ID NO: 68796 - DNA, 20 bp, synthetic construct
  misc_feature 1..20: note = Description of Artificial Sequence: Synthetic oligonucleotide
  misc_feature 1..20: note = Target: SCN10A; (+) strand; PAM type: YTN; PAM sequence: TTG
  source 1..20: mol_type = other DNA
caagagggatgctgagcaac

SEQ ID NO: 68797 - DNA, 20 bp, synthetic construct
  misc_feature 1..20: note = Description of Artificial Sequence: Synthetic oligonucleotide
  misc_feature 1..20: note = Target: SCN10A; (+) strand; PAM type: YTN; PAM sequence: CTG
  source 1..20: mol_type = other DNA
agcaacaggaaatagaatac

SEQ ID NO: 68798 - DNA, 20 bp, synthetic construct
  misc_feature 1..20: note = Description of Artificial Sequence: Synthetic oligonucleotide
  misc_feature 1..20: note = Target: SCN10A; (+) strand; PAM type: YTN; PAM sequence: CTC
  source 1..20: mol_type = other DNA
aagagaaccattttggcagg

SEQ ID NO: 68799 - DNA, 20 bp, synthetic construct
  misc_feature 1..20: note = Description of Artificial Sequence: Synthetic oligonucleotide
  misc_feature 1..20: note = Target: SCN10A; (+) strand; PAM type: YTN; PAM sequence: TTT
  source 1..20: mol_type = other DNA
tggcaggaaaggggagtcaa

SEQ ID NO: 68800 - DNA, 20 bp, synthetic construct
  misc_feature 1..20: note = Description of Artificial Sequence: Synthetic oligonucleotide
  misc_feature 1..20: note = Target: SCN10A; (+) strand; PAM type: YTN; PAM sequence: TTT
  source 1..20: mol_type = other DNA
ggcaggaaaggggagtcaaa

SEQ ID NO: 68801 - DNA, 20 bp, synthetic construct
  misc_feature 1..20: note = Description of Artificial Sequence: Synthetic oligonucleotide
  misc_feature 1..20: note = Target: SCN10A; (+) strand; PAM type: YTN; PAM sequence: TTG
  source 1..20: mol_type = other DNA
gcaggaaaggggagtcaaaa

SEQ ID NO: 68802 - DNA, 20 bp, synthetic construct
  misc_feature 1..20: note = Description of Artificial Sequence: Synthetic oligonucleotide
  misc_feature 1..20: note = Target: SCN10A; (+) strand; PAM type: YTN; PAM sequence: CTA
  source 1..20: mol_type = other DNA
tacacacacacaggggctcc

SEQ ID NO: 68803 - DNA, 20 bp, synthetic construct
  misc_feature 1..20: note = Description of Artificial Sequence: Synthetic oligonucleotide
  misc_feature 1..20: note = Target: SCN10A; (+) strand; PAM type: YTN; PAM sequence: CTC
  source 1..20: mol_type = other DNA
catatcccctgtccctatat

SEQ ID NO: 68804 - DNA, 20 bp, synthetic construct
  misc_feature 1..20: note = Description of Artificial Sequence: Synthetic oligonucleotide
  misc_feature 1..20: note = Target: SCN10A; (+) strand; PAM type: YTN; PAM sequence: CTG
  source 1..20: mol_type = other DNA
tccctatatgataccaaggg

SEQ ID NO: 68805 - DNA, 20 bp, synthetic construct
  misc_feature 1..20: note = Description of Artificial Sequence: Synthetic oligonucleotide
  misc_feature 1..20: note = Target: SCN10A; (+) strand; PAM type: YTN; PAM sequence: CTA
  source 1..20: mol_type = other DNA
tatgataccaagggtccaac

SEQ ID NO: 68806 - DNA, 20 bp, synthetic construct
  misc_feature 1..20: note = Description of Artificial Sequence: Synthetic oligonucleotide
  misc_feature 1..20: note = Target: SCN10A; (+) strand; PAM type: YTN; PAM sequence: CTT
  source 1..20: mol_type = other DNA
ggtccctatggaagagactc

SEQ ID NO: 68807 - DNA, 20 bp, synthetic construct
  misc_feature 1..20: note = Description of Artificial Sequence: Synthetic oligonucleotide
  misc_feature 1..20: note = Target: SCN10A; (+) strand; PAM type: YTN; PAM sequence: TTG
  source 1..20: mol_type = other DNA
gtccctatggaagagactcc

SEQ ID NO: 68808 - DNA, 20 bp, synthetic construct
  misc_feature 1..20: note = Description of Artificial Sequence: Synthetic oligonucleotide
  misc_feature 1..20: note = Target: SCN10A; (+) strand; PAM type: YTN; PAM sequence: CTA
  source 1..20: mol_type = other DNA
tggaagagactccactcacg

SEQ ID NO: 68809 - DNA, 20 bp, synthetic construct
  misc_feature 1..20: note = Description of Artificial Sequence: Synthetic oligonucleotide
  misc_feature 1..20: note = Target: SCN10A; (+) strand; PAM type: YTN; PAM sequence: CTC
  source 1..20: mol_type = other DNA
cactcacgttttctgtgaga

SEQ ID NO: 68810 - DNA, 20 bp, synthetic construct
  misc_feature 1..20: note = Description of Artificial Sequence: Synthetic oligonucleotide
  misc_feature 1..20: note = Target: SCN10A; (+) strand; PAM type: YTN; PAM sequence: CTC
  source 1..20: mol_type = other DNA
acgttttctgtgagatgagt

SEQ ID NO: 68811 - DNA, 20 bp, synthetic construct
  misc_feature 1..20: note = Description of Artificial Sequence: Synthetic oligonucleotide
  misc_feature 1..20: note = Target: SCN10A; (+) strand; PAM type: YTN; PAM sequence: TTT
  source 1..20: mol_type = other DNA
tctgtgagatgagtagttgg

SEQ ID NO: 68812 - DNA, 20 bp, synthetic construct
  misc_feature 1..20: note = Description of Artificial Sequence: Synthetic oligonucleotide
  misc_feature 1..20: note = Target: SCN10A; (+) strand; PAM type: YTN; PAM sequence: TTT
  source 1..20: mol_type = other DNA
ctgtgagatgagtagttggt

SEQ ID NO: 68813 - DNA, 20 bp, synthetic construct
  misc_feature 1..20: note = Description of Artificial Sequence: Synthetic oligonucleotide
  misc_feature 1..20: note = Target: SCN10A; (+) strand; PAM type: YTN; PAM sequence: TTC
  source 1..20: mol_type = other DNA
tgtgagatgagtagttggtt

SEQ ID NO: 68814 - DNA, 20 bp, synthetic construct
  misc_feature 1..20: note = Description of Artificial Sequence: Synthetic oligonucleotide
  misc_feature 1..20: note = Target: SCN10A; (+) strand; PAM type: YTN; PAM sequence: CTG
  source 1..20: mol_type = other DNA
tgagatgagtagttggttgt

SEQ ID NO: 68815 - DNA, 20 bp, synthetic construct
  misc_feature 1..20: note = Description of Artificial Sequence: Synthetic oligonucleotide
  misc_feature 1..20: note = Target: SCN10A; (+) strand; PAM type: YTN; PAM sequence: TTG
  source 1..20: mol_type = other DNA
gttgtctcattgacagccat

SEQ ID NO: 68816 - DNA, 20 bp, synthetic construct
  misc_feature 1..20: note = Description of Artificial Sequence: Synthetic oligonucleotide
  misc_feature 1..20: note = Target: SCN10A; (+) strand; PAM type: YTN; PAM sequence: TTG
  source 1..20: mol_type = other DNA
tctcattgacagccatgtca

SEQ ID NO: 68817 - DNA, 20 bp, synthetic construct
  misc_feature 1..20: note = Description of Artificial Sequence: Synthetic oligonucleotide
  misc_feature 1..20: note = Target: SCN10A; (+) strand; PAM type: YTN; PAM sequence: CTC
  source 1..20: mol_type = other DNA
attgacagccatgtcattct

SEQ ID NO: 68818 - DNA, 20 bp, synthetic construct
  misc_feature 1..20: note = Description of Artificial Sequence: Synthetic oligonucleotide
  misc_feature 1..20: note = Target: SCN10A; (+) strand; PAM type: YTN; PAM sequence: TTG
  source 1..20: mol_type = other DNA
acagccatgtcattcttgac

SEQ ID NO: 68819 - DNA, 20 bp, synthetic construct
  misc_feature 1..20: note = Description of Artificial Sequence: Synthetic oligonucleotide
  misc_feature 1..20: note = Target: SCN10A; (+) strand; PAM type: YTN; PAM sequence: TTC
  source 1..20: mol_type = other DNA
ttgacacatttatttttgag

SEQ ID NO: 68820 - DNA, 20 bp, synthetic construct
  misc_feature 1..20: note = Description of Artificial Sequence: Synthetic oligonucleotide
  misc_feature 1..20: note = Target: SCN10A; (+) strand; PAM type: YTN; PAM sequence: CTT
  source 1..20: mol_type = other DNA
gacacatttatttttgaggt

SEQ ID NO: 68821 - DNA, 20 bp, synthetic construct
  misc_feature 1..20: note = Description of Artificial Sequence: Synthetic oligonucleotide
  misc_feature 1..20: note = Target: SCN10A; (+) strand; PAM type: YTN; PAM sequence: TTG
  source 1..20: mol_type = other DNA
acacatttatttttgaggtt

SEQ ID NO: 68822 - DNA, 20 bp, synthetic construct
  misc_feature 1..20: note = Description of Artificial Sequence: Synthetic oligonucleotide
  misc_feature 1..20: note = Target: SCN10A; (+) strand; PAM type: YTN; PAM sequence: TTT
  source 1..20: mol_type = other DNA
atttttgaggttgcccttga

SEQ ID NO: 68823 - DNA, 20 bp, synthetic construct
  misc_feature 1..20: note = Description of Artificial Sequence: Synthetic oligonucleotide
  misc_feature 1..20: note = Target: SCN10A; (+) strand; PAM type: YTN; PAM sequence: TTA
  source 1..20: mol_type = other DNA
tttttgaggttgcccttgaa

SEQ ID NO: 68824 - DNA, 20 bp, synthetic construct
  misc_feature 1..20: note = Description of Artificial Sequence: Synthetic oligonucleotide
  misc_feature 1..20: note = Target: SCN10A; (+) strand; PAM type: YTN; PAM sequence: TTT
  source 1..20: mol_type = other DNA
ttgaggttgcccttgaagag

SEQ ID NO: 68825 - DNA, 20 bp, synthetic construct
  misc_feature 1..20: note = Description of Artificial Sequence: Synthetic oligonucleotide
  misc_feature 1..20: note = Target: SCN10A; (+) strand; PAM type: YTN; PAM sequence: TTT
  source 1..20: mol_type = other DNA
tgaggttgcccttgaagagt

SEQ ID NO: 68826 - DNA, 20 bp, synthetic construct
  misc_feature 1..20: note = Description of Artificial Sequence: Synthetic oligonucleotide
  misc_feature 1..20: note = Target: SCN10A; (+) strand; PAM type: YTN; PAM sequence: TTT
  source 1..20: mol_type = other DNA
gaggttgcccttgaagagtt

SEQ ID NO: 68827 - DNA, 20 bp, synthetic construct
  misc_feature 1..20: note = Description of Artificial Sequence: Synthetic oligonucleotide
  misc_feature 1..20: note = Target: SCN10A; (+) strand; PAM type: YTN; PAM sequence: TTG
  source 1..20: mol_type = other DNA
aggttgcccttgaagagttg

SEQ ID NO: 68828 - DNA, 20 bp, synthetic construct
  misc_feature 1..20: note = Description of Artificial Sequence: Synthetic oligonucleotide
  misc_feature 1..20: note = Target: SCN10A; (+) strand; PAM type: YTN; PAM sequence: TTG
  source 1..20: mol_type = other DNA
cccttgaagagttgcagccc

SEQ ID NO: 68829 - DNA, 20 bp, synthetic construct
  misc_feature 1..20: note = Description of Artificial Sequence: Synthetic oligonucleotide
  misc_feature 1..20: note = Target: SCN10A; (+) strand; PAM type: YTN; PAM sequence: CTT
  source 1..20: mol_type = other DNA
gaagagttgcagccccacca

SEQ ID NO: 68830 - DNA, 20 bp, synthetic construct
  misc_feature 1..20: note = Description of Artificial Sequence: Synthetic oligonucleotide
  misc_feature 1..20: note = Target: SCN10A; (+) strand; PAM type: YTN; PAM sequence: TTG
  source 1..20: mol_type = other DNA
aagagttgcagccccaccaa

SEQ ID NO: 68831 - DNA, 20 bp, synthetic construct
  misc_feature 1..20: note = Description of Artificial Sequence: Synthetic oligonucleotide
  misc_feature 1..20: note = Target: SCN10A; (+) strand; PAM type: YTN; PAM sequence: TTG
  source 1..20: mol_type = other DNA
cagccccaccaaggcaaaaa

SEQ ID NO: 68832 - DNA, 20 bp, synthetic construct
  misc_feature 1..20: note = Description of Artificial Sequence: Synthetic oligonucleotide
  misc_feature 1..20: note = Target: SCN10A; (+) strand; PAM type: YTN; PAM sequence: CTT
  source 1..20: mol_type = other DNA
aggcagaagatggtgaggat

SEQ ID NO: 68833 - DNA, 20 bp, synthetic construct
  misc_feature 1..20: note = Description of Artificial Sequence: Synthetic oligonucleotide
  misc_feature 1..20: note = Target: SCN10A; (+) strand; PAM type: YTN; PAM sequence: TTA
  source 1..20: mol_type = other DNA
ggcagaagatggtgaggatg

SEQ ID NO: 68834 - DNA, 20 bp, synthetic construct
  misc_feature 1..20: note = Description of Artificial Sequence: Synthetic oligonucleotide
  misc_feature 1..20: note = Target: SCN10A; (+) strand; PAM type: YTN; PAM sequence: TTT
  source 1..20: mol_type = other DNA
cttcactgagtgaatcaggg

SEQ ID NO: 68835 - DNA, 20 bp, synthetic construct
  misc_feature 1..20: note = Description of Artificial Sequence: Synthetic oligonucleotide
  misc_feature 1..20: note = Target: SCN10A; (+) strand; PAM type: YTN; PAM sequence: TTC
  source 1..20: mol_type = other DNA
ttcactgagtgaatcagggc

SEQ ID NO: 68836 - DNA, 20 bp, synthetic construct
  misc_feature 1..20: note = Description of Artificial Sequence: Synthetic oligonucleotide
  misc_feature 1..20: note = Target: SCN10A; (+) strand; PAM type: YTN; PAM sequence: CTT
  source 1..20: mol_type = other DNA
cactgagtgaatcagggccc

SEQ ID NO: 68837 - DNA, 20 bp, synthetic construct
  misc_feature 1..20: note = Description of Artificial Sequence: Synthetic oligonucleotide
  misc_feature 1..20: note = Target: SCN10A; (+) strand; PAM type: YTN; PAM sequence: TTC
  source 1..20: mol_type = other DNA
actgagtgaatcagggcccc

SEQ ID NO: 68838 - DNA, 20 bp, synthetic construct
  misc_feature 1..20: note = Description of Artificial Sequence: Synthetic oligonucleotide
  misc_feature 1..20: note = Target: SCN10A; (+) strand; PAM type: YTN; PAM sequence: CTG
  source 1..20: mol_type = other DNA
agtgaatcagggcccccaca

SEQ ID NO: 68839 - DNA, 20 bp, synthetic construct
  misc_feature 1..20: note = Description of Artificial Sequence: Synthetic oligonucleotide
  misc_feature 1..20: note = Target: SCN10A; (+) strand; PAM type: YTN; PAM sequence: CTT
  source 1..20: mol_type = other DNA
caggcctgcgggaagatgac

SEQ ID NO: 68840 - DNA, 20 bp, synthetic construct
  misc_feature 1..20: note = Description of Artificial Sequence: Synthetic oligonucleotide
  misc_feature 1..20: note = Target: SCN10A; (+) strand; PAM type: YTN; PAM sequence: TTC
  source 1..20: mol_type = other DNA
aggcctgcgggaagatgaca

SEQ ID NO: 68841 - DNA, 20 bp, synthetic construct
  misc_feature 1..20: note = Description of Artificial Sequence: Synthetic oligonucleotide
  misc_feature 1..20: note = Target: SCN10A; (+) strand; PAM type: YTN; PAM sequence: CTG
  source 1..20: mol_type = other DNA
cgggaagatgacagtggtat

SEQ ID NO: 68842 - DNA, 20 bp, synthetic construct
  misc_feature 1..20: note = Description of Artificial Sequence: Synthetic oligonucleotide
  misc_feature 1..20: note = Target: SCN10A; (+) strand; PAM type: YTN; PAM sequence: CTT
  source 1..20: mol_type = other DNA
cttcatcttagccatcctcc

SEQ ID NO: 68843 - DNA, 20 bp, synthetic construct
  misc_feature 1..20: note = Description of Artificial Sequence: Synthetic oligonucleotide
  misc_feature 1..20: note = Target: SCN10A; (+) strand; PAM type: YTN; PAM sequence: TTC
  source 1..20: mol_type = other DNA
ttcatcttagccatcctcct

SEQ ID NO: 68844 - DNA, 20 bp, synthetic construct
  misc_feature 1..20: note = Description of Artificial Sequence: Synthetic oligonucleotide
  misc_feature 1..20: note = Target: SCN10A; (+) strand; PAM type: YTN; PAM sequence: CTT
  source 1..20: mol_type = other DNA
catcttagccatcctccttc

SEQ ID NO: 68845 - DNA, 20 bp, synthetic construct
  misc_feature 1..20: note = Description of Artificial Sequence: Synthetic oligonucleotide
  misc_feature 1..20: note = Target: SCN10A; (+) strand; PAM type: YTN; PAM sequence: TTC
  source 1..20: mol_type = other DNA
atcttagccatcctccttca

SEQ ID NO: 68846 - DNA, 20 bp, synthetic construct
  misc_feature 1..20: note = Description of Artificial Sequence: Synthetic oligonucleotide
  misc_feature 1..20: note = Target: SCN10A; (+) strand; PAM type: YTN; PAM sequence: CTT
  source 1..20: mol_type = other DNA
agccatcctccttcatctct

SEQ ID NO: 68847 - DNA, 20 bp, synthetic construct
  misc_feature 1..20: note = Description of Artificial Sequence: Synthetic oligonucleotide
  misc_feature 1..20: note = Target: SCN10A; (+) strand; PAM type: YTN; PAM sequence: TTA
  source 1..20: mol_type = other DNA
gccatcctccttcatctcta

SEQ ID NO: 68848 - DNA, 20 bp, synthetic construct
  misc_feature 1..20: note = Description of Artificial Sequence: Synthetic oligonucleotide
  misc_feature 1..20: note = Target: SCN10A; (+) strand; PAM type: YTN; PAM sequence: CTC
  source 1..20: mol_type = other DNA
cttcatctctacatacagga

SEQ ID NO: 68849 - DNA, 20 bp, synthetic construct
  misc_feature 1..20: note = Description of Artificial Sequence: Synthetic oligonucleotide
  misc_feature 1..20: note = Target: SCN10A; (+) strand; PAM type: YTN; PAM sequence: CTT
  source 1..20: mol_type = other DNA
catctctacatacaggagtg

SEQ ID NO: 68850 - DNA, 20 bp, synthetic construct
  misc_feature 1..20: note = Description of Artificial Sequence: Synthetic oligonucleotide
  misc_feature 1..20: note = Target: SCN10A; (+) strand; PAM type: YTN; PAM sequence: TTC
  source 1..20: mol_type = other DNA
atctctacatacaggagtga

SEQ ID NO: 68851 - DNA, 20 bp, synthetic construct
  misc_feature 1..20: note = Description of Artificial Sequence: Synthetic oligonucleotide
  misc_feature 1..20: note = Target: SCN10A; (+) strand; PAM type: YTN; PAM sequence: CTC
  source 1..20: mol_type = other DNA
tacatacaggagtgaagtat

SEQ ID NO: 68852 - DNA, 20 bp, synthetic construct
  misc_feature 1..20: note = Description of Artificial Sequence: Synthetic oligonucleotide
  misc_feature 1..20: note = Target: SCN10A; (+) strand; PAM type: YTN; PAM sequence: CTA
  source 1..20: mol_type = other DNA
catacaggagtgaagtatgt

SEQ ID NO: 68853 - DNA, 20 bp, synthetic construct
  misc_feature 1..20: note = Description of Artificial Sequence: Synthetic oligonucleotide
  misc_feature 1..20: note = Target: SCN10A; (+) strand; PAM type: YTN; PAM sequence: CTC
  source 1..20: mol_type = other DNA
cagggcagttccaagacctt

SEQ ID NO: 68854 - DNA, 20 bp, synthetic construct
  misc_feature 1..20: note = Description of Artificial Sequence: Synthetic oligonucleotide
  misc_feature 1..20: note = Target: SCN10A; (+) strand; PAM type: YTN; PAM sequence: TTC
  source 1..20: mol_type = other DNA
caagacctttctcatccgaa

SEQ ID NO: 68855 - DNA, 20 bp, synthetic construct
  misc_feature 1..20: note = Description of Artificial Sequence: Synthetic oligonucleotide
  misc_feature 1..20: note = Target: SCN10A; (+) strand; PAM type: YTN; PAM sequence: CTT
  source 1..20: mol_type = other DNA
tctcatccgaagcttgcatt

SEQ ID NO: 68856 - DNA, 20 bp, synthetic construct
  misc_feature 1..20: note = Description of Artificial Sequence: Synthetic oligonucleotide
  misc_feature 1..20: note = Target: SCN10A; (+) strand; PAM type: YTN; PAM sequence: TTT
  source 1..20: mol_type = other DNA
ctcatccgaagcttgcattt

SEQ ID NO: 68857 - DNA, 20 bp, synthetic construct
  misc_feature 1..20: note = Description of Artificial Sequence: Synthetic oligonucleotide
  misc_feature 1..20: note = Target: SCN10A; (+) strand; PAM type: YTN; PAM sequence: TTC
  source 1..20: mol_type = other DNA
tcatccgaagcttgcattta

SEQ ID NO: 68858 - DNA, 20 bp, synthetic construct
  misc_feature 1..20: note = Description of Artificial Sequence: Synthetic oligonucleotide
  misc_feature 1..20: note = Target: SCN10A; (+) strand; PAM type: YTN; PAM sequence: CTC
  source 1..20: mol_type = other DNA
atccgaagcttgcatttact

SEQ ID NO: 68859 - DNA, 20 bp, synthetic construct
  misc_feature 1..20: note = Description of Artificial Sequence: Synthetic oligonucleotide
  misc_feature 1..20: note = Target: SCN10A; (+) strand; PAM type: YTN; PAM sequence: CTT
  source 1..20: mol_type = other DNA
gcatttactctgagaggcag

SEQ ID NO: 68860 - DNA, 20 bp, synthetic construct
  misc_feature 1..20: note = Description of Artificial Sequence: Synthetic oligonucleotide
  misc_feature 1..20: note = Target: SCN10A; (+) strand; PAM type: YTN; PAM sequence: TTG
  source 1..20: mol_type = other DNA
catttactctgagaggcagg

SEQ ID NO: 68861 - DNA, 20 bp, synthetic construct
  misc_feature 1..20: note = Description of Artificial Sequence: Synthetic oligonucleotide
  misc_feature 1..20: note = Target: SCN10A; (+) strand; PAM type: YTN; PAM sequence: TTT
  source 1..20: mol_type = other DNA
actctgagaggcaggcagag

SEQ ID NO: 68862 - DNA, 20 bp, synthetic construct
  misc_feature 1..20: note = Description of Artificial Sequence: Synthetic oligonucleotide
  misc_feature 1..20: note = Target: SCN10A; (+) strand; PAM type: YTN; PAM sequence: TTA
  source 1..20: mol_type = other DNA
ctctgagaggcaggcagaga

SEQ ID NO: 68863 - DNA, 20 bp, synthetic construct
  misc_feature 1..20: note = Description of Artificial Sequence: Synthetic oligonucleotide
  misc_feature 1..20: note = Target: SCN10A; (+) strand; PAM type: YTN; PAM sequence: CTC
  source 1..20: mol_type = other DNA
tgagaggcaggcagagagtc

SEQ ID NO: 68864 - DNA, 20 bp, synthetic construct
  misc_feature 1..20: note = Description of Artificial Sequence: Synthetic oligonucleotide
  misc_feature 1..20: note = Target: SCN10A; (+) strand; PAM type: YTN; PAM sequence: CTG
  source 1..20: mol_type = other DNA
agaggcaggcagagagtcag

SEQ ID NO: 68865 - DNA, 20 bp, synthetic construct
  misc_feature 1..20: note = Description of Artificial Sequence: Synthetic oligonucleotide
  misc_feature 1..20: note = Target: SCN10A; (+) strand; PAM type: YTN; PAM sequence: CTA
  source 1..20: mol_type = other DNA
ttctcattataaagacgatg

SEQ ID NO: 68866 - DNA, 20 bp, synthetic construct
  misc_feature 1..20: note = Description of Artificial Sequence: Synthetic oligonucleotide
  misc_feature 1..20: note = Target: SCN10A; (+) strand; PAM type: YTN; PAM sequence: TTC
  source 1..20: mol_type = other DNA
tcattataaagacgatgcaa

SEQ ID NO: 68867 - DNA, 20 bp, synthetic construct
  misc_feature 1..20: note = Description of Artificial Sequence: Synthetic oligonucleotide
  misc_feature 1..20: note = Target: SCN10A; (+) strand; PAM type: YTN; PAM sequence: CTC
  source 1..20: mol_type = other DNA
attataaagacgatgcaact

SEQ ID NO: 68868 - DNA, 20 bp, synthetic construct
  misc_feature 1..20: note = Description of Artificial Sequence: Synthetic oligonucleotide
  misc_feature 1..20: note = Target: SCN10A; (+) strand; PAM type: YTN; PAM sequence: TTA
  source 1..20: mol_type = other DNA
taaagacgatgcaactgaga

SEQ ID NO: 68869 - DNA, 20 bp, synthetic construct
  misc_feature 1..20: note = Description of Artificial Sequence: Synthetic oligonucleotide
  misc_feature 1..20: note = Target: SCN10A; (+) strand; PAM type: YTN; PAM sequence: CTG
  source 1..20: mol_type = other DNA
agacccaggcaatgcatttt

SEQ ID NO: 68870 - DNA, 20 bp, synthetic construct
  misc_feature 1..20: note = Description of Artificial Sequence: Synthetic oligonucleotide
  misc_feature 1..20: note = Target: SCN10A; (+) strand; PAM type: YTN; PAM sequence: TTT
  source 1..20: mol_type = other DNA
tttatcatcttgaggctaat

SEQ ID NO: 68871 - DNA, 20 bp, synthetic construct
  misc_feature 1..20: note = Description of Artificial Sequence: Synthetic oligonucleotide
  misc_feature 1..20: note = Target: SCN10A; (+) strand; PAM type: YTN; PAM sequence: TTT
  source 1..20: mol_type = other DNA
ttatcatcttgaggctaata

SEQ ID NO: 68872 - DNA, 20 bp, synthetic construct
  misc_feature 1..20: note = Description of Artificial Sequence: Synthetic oligonucleotide
  misc_feature 1..20: note = Target: SCN10A; (+) strand; PAM type: YTN; PAM sequence: TTT
  source 1..20: mol_type = other DNA
tatcatcttgaggctaataa

SEQ ID NO: 68873 - DNA, 20 bp, synthetic construct
  misc_feature 1..20: note = Description of Artificial Sequence: Synthetic oligonucleotide
  misc_feature 1..20: note = Target: SCN10A; (+) strand; PAM type: YTN; PAM sequence: TTT
  source 1..20: mol_type = other DNA
atcatcttgaggctaataaa

SEQ ID NO: 68874 - DNA, 20 bp, synthetic construct
  misc_feature 1..20: note = Description of Artificial Sequence: Synthetic oligonucleotide
  misc_feature 1..20: note = Target: SCN10A; (+) strand; PAM type: YTN; PAM sequence: TTA
  source 1..20: mol_type = other DNA
tcatcttgaggctaataaaa

SEQ ID NO: 68875 - DNA, 20 bp, synthetic construct
  misc_feature 1..20: note = Description of Artificial Sequence: Synthetic oligonucleotide
  misc_feature 1..20: note = Target: SCN10A; (+) strand; PAM type: YTN; PAM sequence: CTT
  source 1..20: mol_type = other DNA
gaggctaataaaattcctga

SEQ ID NO: 68876 - DNA, 20 bp, synthetic construct
  misc_feature 1..20: note = Description of Artificial Sequence: Synthetic oligonucleotide
  misc_feature 1..20: note = Target: SCN10A; (+) strand; PAM type: YTN; PAM sequence: TTG
  source 1..20: mol_type = other DNA
aggctaataaaattcctgac

SEQ ID NO: 68877 - DNA, 20 bp, synthetic construct
  misc_feature 1..20: note = Description of Artificial Sequence: Synthetic oligonucleotide
  misc_feature 1..20: note = Target: SCN10A; (+) strand; PAM type: YTN; PAM sequence: CTA
  source 1..20: mol_type = other DNA
ataaaattcctgacactagc

SEQ ID NO: 68878 - DNA, 20 bp, synthetic construct
  misc_feature 1..20: note = Description of Artificial Sequence: Synthetic oligonucleotide
  misc_feature 1..20: note = Target: SCN10A; (+) strand; PAM type: YTN; PAM sequence: TTC
  source 1..20: mol_type = other DNA
ctgacactagcaattcaatt

SEQ ID NO: 68879 - DNA, 20 bp, synthetic construct
  misc_feature 1..20: note = Description of Artificial Sequence: Synthetic oligonucleotide
  misc_feature 1..20: note = Target: SCN10A; (+) strand; PAM type: YTN; PAM sequence: CTG
  source 1..20: mol_type = other DNA
acactagcaattcaatttaa

SEQ ID NO: 68880 - DNA, 20 bp, synthetic construct
  misc_feature 1..20: note = Description of Artificial Sequence: Synthetic oligonucleotide
  misc_feature 1..20: note = Target: SCN10A; (+) strand; PAM type: YTN; PAM sequence: CTA
  source 1..20: mol_type = other DNA
gcaattcaatttaaataatt

SEQ ID NO: 68881 - DNA, 20 bp, synthetic construct
  misc_feature 1..20: note = Description of Artificial Sequence: Synthetic oligonucleotide
  misc_feature 1..20: note = Target: SCN10A; (+) strand; PAM type: YTN; PAM sequence: TTC
  source 1..20: mol_type = other DNA
aatttaaataatttatgctg

SEQ ID NO: 68882 - DNA, 20 bp, synthetic construct
  misc_feature 1..20: note = Description of Artificial Sequence: Synthetic oligonucleotide
  misc_feature 1..20: note = Target: SCN10A; (+) strand; PAM type: YTN; PAM sequence: TTT
  source 1..20: mol_type = other DNA
aaataatttatgctgagtac

SEQ ID NO: 68883 - DNA, 20 bp, synthetic construct
  misc_feature 1..20: note = Description of Artificial Sequence: Synthetic oligonucleotide
  misc_feature 1..20: note = Target: SCN10A; (+) strand; PAM type: YTN; PAM sequence: TTA
  source 1..20: mol_type = other DNA
aataatttatgctgagtacc

SEQ ID NO: 68884 - DNA, 20 bp, synthetic construct
  misc_feature 1..20: note = Description of Artificial Sequence: Synthetic oligonucleotide
  misc_feature 1..20: note = Target: SCN10A; (+) strand; PAM type: YTN; PAM sequence: TTT
  source 1..20: mol_type = other DNA
atgctgagtacctacttttt

SEQ ID NO: 68885 - DNA, 20 bp, synthetic construct
  misc_feature 1..20: note = Description of Artificial Sequence: Synthetic oligonucleotide
  misc_feature 1..20: note = Target: SCN10A; (+) strand; PAM type: YTN; PAM sequence: TTA
  source 1..20: mol_type = other DNA
tgctgagtacctactttttc

SEQ ID NO: 68886 - DNA, 20 bp, synthetic construct
  misc_feature 1..20: note = Description of Artificial Sequence: Synthetic oligonucleotide
  misc_feature 1..20: note = Target: SCN10A; (+) strand; PAM type: YTN; PAM sequence: CTG
  source 1..20: mol_type = other DNA
agtacctactttttccaggc

SEQ ID NO: 68887 - DNA, 20 bp, synthetic construct
  misc_feature 1..20: note = Description of Artificial Sequence: Synthetic oligonucleotide
  misc_feature 1..20: note = Target: SCN10A; (+) strand; PAM type: YTN; PAM sequence: CTA
  source 1..20: mol_type = other DNA
ctttttccaggcactgtgct

SEQ ID NO: 68888 - DNA, 20 bp, synthetic construct
  misc_feature 1..20: note = Description of Artificial Sequence: Synthetic oligonucleotide
  misc_feature 1..20: note = Target: SCN10A; (+) strand; PAM type: YTN; PAM sequence: CTT
  source 1..20: mol_type = other DNA
tttccaggcactgtgctagg

SEQ ID NO: 68889 - DNA, 20 bp, synthetic construct
  misc_feature 1..20: note = Description of Artificial Sequence: Synthetic oligonucleotide
  misc_feature 1..20: note = Target: SCN10A; (+) strand; PAM type: YTN; PAM sequence: TTT
  source 1..20: mol_type = other DNA
ttccaggcactgtgctaggc

SEQ ID NO: 68890 - DNA, 20 bp, synthetic construct
  misc_feature 1..20: note = Description of Artificial Sequence: Synthetic oligonucleotide
  misc_feature 1..20: note = Target: SCN10A; (+) strand; PAM type: YTN; PAM sequence: TTT
  source 1..20: mol_type = other DNA
tccaggcactgtgctaggca

SEQ ID NO: 68891 - DNA, 20 bp, synthetic construct
  misc_feature 1..20: note = Description of Artificial Sequence: Synthetic oligonucleotide
  misc_feature 1..20: note = Target: SCN10A; (+) strand; PAM type: YTN; PAM sequence: TTT
  source 1..20: mol_type = other DNA
ccaggcactgtgctaggcat

SEQ ID NO: 68892 - DNA, 20 bp, synthetic construct
  misc_feature 1..20: note = Description of Artificial Sequence: Synthetic oligonucleotide
  misc_feature 1..20: note = Target: SCN10A; (+) strand; PAM type: YTN; PAM sequence: TTC
  source 1..20: mol_type = other DNA
caggcactgtgctaggcatg

SEQ ID NO: 68893 - DNA, 20 bp, synthetic construct
  misc_feature 1..20: note = Description of Artificial Sequence: Synthetic oligonucleotide
  misc_feature 1..20: note = Target: SCN10A; (+) strand; PAM type: YTN; PAM sequence: CTG
  source 1..20: mol_type = other DNA
tgctaggcatgaagctacta

SEQ ID NO: 68894 - DNA, 20 bp, synthetic construct
  misc_feature 1..20: note = Description of Artificial Sequence: Synthetic oligonucleotide
  misc_feature 1..20: note = Target: SCN10A; (+) strand; PAM type: YTN; PAM sequence: CTA
  source 1..20: mol_type = other DNA
ggcatgaagctactaacttc

SEQ ID NO: 68895 - DNA, 20 bp, synthetic construct
  misc_feature 1..20: note = Description of Artificial Sequence: Synthetic oligonucleotide
  misc_feature 1..20: note = Target: SCN10A; (+) strand; PAM type: YTN; PAM sequence: CTA
  source 1..20: mol_type = other DNA
ctaacttcaccccagtaatt

SEQ ID NO: 68896 - DNA, 20 bp, synthetic construct
  misc_feature 1..20: note = Description of Artificial Sequence: Synthetic oligonucleotide
  misc_feature 1..20: note = Target: SCN10A; (+) strand; PAM type: YTN; PAM sequence: CTA
  source 1..20: mol_type = other DNA
acttcaccccagtaatttgg

SEQ ID NO: 68897 - DNA, 20 bp, synthetic construct
  misc_feature 1..20: note = Description of Artificial Sequence: Synthetic oligonucleotide
  misc_feature 1..20: note = Target: SCN10A; (+) strand; PAM type: YTN; PAM sequence: CTT
  source 1..20: mol_type = other DNA
caccccagtaatttggcatc

SEQ ID NO: 68898 - DNA, 20 bp, synthetic construct
  misc_feature 1..20: note = Description of Artificial Sequence: Synthetic oligonucleotide
  misc_feature 1..20: note = Target: SCN10A; (+) strand; PAM type: YTN; PAM sequence: TTC
  source 1..20: mol_type = other DNA
accccagtaatttggcatct

SEQ ID NO: 68899 - DNA, 20 bp, synthetic construct
  misc_feature 1..20: note = Description of Artificial Sequence: Synthetic oligonucleotide
  misc_feature 1..20: note = Target: SCN10A; (+) strand; PAM type: YTN; PAM sequence: TTT
  source 1..20: mol_type = other DNA
ggcatctgtctttctgcatg

SEQ ID NO: 68900 - DNA, 20 bp, synthetic construct
  misc_feature 1..20: note = Description of Artificial Sequence: Synthetic oligonucleotide
  misc_feature 1..20: note = Target: SCN10A; (+) strand; PAM type: YTN; PAM sequence: TTG
  source 1..20: mol_type = other DNA
gcatctgtctttctgcatgc

SEQ ID NO: 68901 - DNA, 20 bp, synthetic construct
  misc_feature 1..20: note = Description of Artificial Sequence: Synthetic oligonucleotide
  misc_feature 1..20: note = Target: SCN10A; (+) strand; PAM type: YTN; PAM sequence: CTG
  source 1..20: mol_type = other DNA
tctttctgcatgcatctggg

SEQ ID NO: 68902 - DNA, 20 bp, synthetic construct
  misc_feature 1..20: note = Description of Artificial Sequence: Synthetic oligonucleotide
  misc_feature 1..20: note = Target: SCN10A; (+) strand; PAM type: YTN; PAM sequence: CTT
  source 1..20: mol_type = other DNA
tctgcatgcatctgggaggc

SEQ ID NO: 68903 - DNA, 20 bp, synthetic construct
  misc_feature 1..20: note = Description of Artificial Sequence: Synthetic oligonucleotide
  misc_feature 1..20: note = Target: SCN10A; (+) strand; PAM type: YTN; PAM sequence: TTT
  source 1..20: mol_type = other DNA
ctgcatgcatctgggaggca

SEQ ID NO: 68904 - DNA, 20 bp, synthetic construct
  misc_feature 1..20: note = Description of Artificial Sequence: Synthetic oligonucleotide
  misc_feature 1..20: note = Target: SCN10A; (+) strand; PAM type: YTN; PAM sequence: TTC
  source 1..20: mol_type = other DNA
tgcatgcatctgggaggcag

SEQ ID NO: 68905 - DNA, 20 bp, synthetic construct
  misc_feature 1..20: note = Description of Artificial Sequence: Synthetic oligonucleotide
  misc_feature 1..20: note = Target: SCN10A; (+) strand; PAM type: YTN; PAM sequence: CTG
  source 1..20: mol_type = other DNA
catgcatctgggaggcagct

SEQ ID NO: 68906 - DNA, 20 bp, synthetic construct
  misc_feature 1..20: note = Description of Artificial Sequence: Synthetic oligonucleotide
  misc_feature 1..20: note = Target: SCN10A; (+) strand; PAM type: YTN; PAM sequence: CTG
  source 1..20: mol_type = other DNA
ggaggcagcttgagacttgg

SEQ ID NO: 68907 - DNA, 20 bp, synthetic construct
  misc_feature 1..20: note = Description of Artificial Sequence: Synthetic oligonucleotide
  misc_feature 1..20: note = Target: SCN10A; (+) strand; PAM type: YTN; PAM sequence: CTT
  source 1..20: mol_type = other DNA
gagacttgggacacatgaac

SEQ ID NO: 68908 - DNA, 20 bp, synthetic construct
  misc_feature 1..20: note = Description of Artificial Sequence: Synthetic oligonucleotide
  misc_feature 1..20: note = Target: SCN10A; (+) strand; PAM type: YTN; PAM sequence: TTG
  source 1..20: mol_type = other DNA
agacttgggacacatgaacc

SEQ ID NO: 68909 - DNA, 20 bp, synthetic construct
  misc_feature 1..20: note = Description of Artificial Sequence: Synthetic oligonucleotide
  misc_feature 1..20: note = Target: SCN10A; (+) strand; PAM type: YTN; PAM sequence: CTT
  source 1..20: mol_type = other DNA
gggacacatgaacctcactg

SEQ ID NO: 68910 - DNA, 20 bp, synthetic construct
  misc_feature 1..20: note = Description of Artificial Sequence: Synthetic oligonucleotide
  misc_feature 1..20: note = Target: SCN10A; (+) strand; PAM type: YTN; PAM sequence: TTG
  source 1..20: mol_type = other DNA
ggacacatgaacctcactgt

SEQ ID NO: 68911 - DNA, 20 bp, synthetic construct
  misc_feature 1..20: note = Description of Artificial Sequence: Synthetic oligonucleotide
  misc_feature 1..20: note = Target: SCN10A; (+) strand; PAM type: YTN; PAM sequence: CTC
  source 1..20: mol_type = other DNA
actgtgtgtgagtgtgtgtg

SEQ ID NO: 68912 - DNA, 20 bp, synthetic construct
  misc_feature 1..20: note = Description of Artificial Sequence: Synthetic oligonucleotide
  misc_feature 1..20: note = Target: SCN10A; (+) strand; PAM type: YTN; PAM sequence: CTG
  source 1..20: mol_type = other DNA
tgtgtgagtgtgtgtgtgtg

SEQ ID NO: 68913 - DNA, 20 bp, synthetic construct
  misc_feature 1..20: note = Description of Artificial Sequence: Synthetic oligonucleotide
  misc_feature 1..20: note = Target: SCN10A; (+) strand; PAM type: YTN; PAM sequence: TTT
  source 1..20: mol_type = other DNA
agcaatagaaagagactata

SEQ ID NO: 68914 - DNA, 20 bp, synthetic construct
  misc_feature 1..20: note = Description of Artificial Sequence: Synthetic oligonucleotide
  misc_feature 1..20: note = Target: SCN10A; (+) strand; PAM type: YTN; PAM sequence: TTA
  source 1..20: mol_type = other DNA
gcaatagaaagagactataa

SEQ ID NO: 68915 - DNA, 20 bp, synthetic construct
  misc_feature 1..20: note = Description of Artificial Sequence: Synthetic oligonucleotide
  misc_feature 1..20: note = Target: SCN10A; (+) strand; PAM type: YTN; PAM sequence: CTA
  source 1..20: mol_type = other DNA
taagaaacactgagacagtc

SEQ ID NO: 68916 - DNA, 20 bp, synthetic construct
  misc_feature 1..20: note = Description of Artificial Sequence: Synthetic oligonucleotide
  misc_feature 1..20: note = Target: SCN10A; (+) strand; PAM type: YTN; PAM sequence: CTG
  source 1..20: mol_type = other DNA
agacagtcactggggcataa

SEQ ID NO: 68917 - DNA, 20 bp, synthetic construct
  misc_feature 1..20: note = Description of Artificial Sequence: Synthetic oligonucleotide
  misc_feature 1..20: note = Target: SCN10A; (+) strand; PAM type: YTN; PAM sequence: CTG
  source 1..20: mol_type = other DNA
gggcataaatagaacttgtg

SEQ ID NO: 68918 - DNA, 20 bp, synthetic construct
  misc_feature 1..20: note = Description of Artificial Sequence: Synthetic oligonucleotide
  misc_feature 1..20: note = Target: SCN10A; (+) strand; PAM type: YTN; PAM sequence: CTT
  source 1..20: mol_type = other DNA
gtgccaagcacagctggcag

SEQ ID NO: 68919 - DNA, 20 bp, synthetic construct
  misc_feature 1..20: note = Description of Artificial Sequence: Synthetic oligonucleotide
  misc_feature 1..20: note = Target: SCN10A; (+) strand; PAM type: YTN; PAM sequence: TTG
  source 1..20: mol_type = other DNA
tgccaagcacagctggcagc

SEQ ID NO: 68920 - DNA, 20 bp, synthetic construct
  misc_feature 1..20: note = Description of Artificial Sequence: Synthetic oligonucleotide
  misc_feature 1..20: note = Target: SCN10A; (+) strand; PAM type: YTN; PAM sequence: CTG
  source 1..20: mol_type = other DNA
gcagcaaagaaggatacacc

SEQ ID NO: 68921 - DNA, 20 bp, synthetic construct
  misc_feature 1..20: note = Description of Artificial Sequence: Synthetic oligonucleotide
  misc_feature 1..20: note = Target: SCN10A; (+) strand; PAM type: YTN; PAM sequence: CTG
  source 1..20: mol_type = other DNA
cttgtttaaggagggatgat

SEQ ID NO: 68922 - DNA, 20 bp, synthetic construct
  misc_feature 1..20: note = Description of Artificial Sequence: Synthetic oligonucleotide
  misc_feature 1..20: note = Target: SCN10A; (+) strand; PAM type: YTN; PAM sequence: CTT
  source 1..20: mol_type = other DNA
gtttaaggagggatgatttg

SEQ ID NO: 68923 - DNA, 20 bp, synthetic construct
  misc_feature 1..20: note = Description of Artificial Sequence: Synthetic oligonucleotide
  misc_feature 1..20: note = Target: SCN10A; (+) strand; PAM type: YTN; PAM sequence: TTG
  source 1..20: mol_type = other DNA
tttaaggagggatgatttgt

SEQ ID NO: 68924 - DNA, 20 bp, synthetic construct
  misc_feature 1..20: note = Description of Artificial Sequence: Synthetic oligonucleotide
  misc_feature 1..20: note = Target: SCN10A; (+) strand; PAM type: YTN; PAM sequence: TTT
  source 1..20: mol_type = other DNA
aaggagggatgatttgttgc

SEQ ID NO: 68925 - DNA, 20 bp, synthetic construct
  misc_feature 1..20: note = Description of Artificial Sequence: Synthetic oligonucleotide
  misc_feature 1..20: note = Target: SCN10A; (+) strand; PAM type: YTN; PAM sequence: TTA
  source 1..20: mol_type = other DNA
aggagggatgatttgttgct

SEQ ID NO: 68926 - DNA, 20 bp, synthetic construct
  misc_feature 1..20: note = Description of Artificial Sequence: Synthetic oligonucleotide
  misc_feature 1..20: note = Target: SCN10A; (+) strand; PAM type: YTN; PAM sequence: TTT
  source 1..20: mol_type = other DNA
gttgctctggtaagtaaaat

SEQ ID NO: 68927 - DNA, 20 bp, synthetic construct
  misc_feature 1..20: note = Description of Artificial Sequence: Synthetic oligonucleotide
  misc_feature 1..20: note = Target: SCN10A; (+) strand; PAM type: YTN; PAM sequence: TTG
  source 1..20: mol_type = other DNA
ttgctctggtaagtaaaatc

SEQ ID NO: 68928 - DNA, 20 bp, synthetic construct
  misc_feature 1..20: note = Description of Artificial Sequence: Synthetic oligonucleotide
  misc_feature 1..20: note = Target: SCN10A; (+) strand; PAM type: YTN; PAM sequence: TTG
  source 1..20: mol_type = other DNA
ctctggtaagtaaaatcaac

SEQ ID NO: 68929 - DNA, 20 bp, synthetic construct
  misc_feature 1..20: note = Description of Artificial Sequence: Synthetic oligonucleotide
  misc_feature 1..20: note = Target: SCN10A; (+) strand; PAM type: YTN; PAM sequence: CTC
  source 1..20: mol_type = other DNA
tggtaagtaaaatcaacttc

SEQ ID NO: 68930 - DNA, 20 bp, synthetic construct
  misc_feature 1..20: note = Description of Artificial Sequence: Synthetic oligonucleotide
  misc_feature 1..20: note = Target: SCN10A; (+) strand; PAM type: YTN; PAM sequence: CTG
  source 1..20: mol_type = other DNA
gtaagtaaaatcaacttctt

SEQ ID NO: 68931 - DNA, 20 bp, synthetic construct
  misc_feature 1..20: note = Description of Artificial Sequence: Synthetic oligonucleotide
  misc_feature 1..20: note = Target: SCN10A; (+) strand; PAM type: YTN; PAM sequence: CTT
  source 1..20: mol_type = other DNA
ctttgggagagcagcttcgc

SEQ ID NO: 68932 - DNA, 20 bp, synthetic construct
  misc_feature 1..20: note = Description of Artificial Sequence: Synthetic oligonucleotide
  misc_feature 1..20: note = Target: SCN10A; (+) strand; PAM type: YTN; PAM sequence: TTC
  source 1..20: mol_type = other DNA
tttgggagagcagcttcgca

SEQ ID NO: 68933 - DNA, 20 bp, synthetic construct
  misc_feature 1..20: note = Description of Artificial Sequence: Synthetic oligonucleotide
  misc_feature 1..20: note = Target: SCN10A; (+) strand; PAM type: YTN; PAM sequence: CTT
  source 1..20: mol_type = other DNA
tgggagagcagcttcgcagg

SEQ ID NO: 68934 - DNA, 20 bp, synthetic construct
  misc_feature 1..20: note = Description of Artificial Sequence: Synthetic oligonucleotide
  misc_feature 1..20: note = Target: SCN10A; (+) strand; PAM type: YTN; PAM sequence: TTT
  source 1..20: mol_type = other DNA
gggagagcagcttcgcaggt

SEQ ID NO: 68935 - DNA, 20 bp, synthetic construct
  misc_feature 1..20: note = Description of Artificial Sequence: Synthetic oligonucleotide
  misc_feature 1..20: note = Target: SCN10A; (+) strand; PAM type: YTN; PAM sequence: TTG
  source 1..20: mol_type = other DNA
ggagagcagcttcgcaggta

SEQ ID NO: 68936 - DNA, 20 bp, synthetic construct
  misc_feature 1..20: note = Description of Artificial Sequence: Synthetic oligonucleotide
  misc_feature 1..20: note = Target: SCN10A; (+) strand; PAM type: YTN; PAM sequence: CTT
  source 1..20: mol_type = other DNA
cgcaggtagcagaaagagct

SEQ ID NO: 68937 - DNA, 20 bp, synthetic construct
  misc_feature 1..20: note = Description of Artificial Sequence: Synthetic oligonucleotide
  misc_feature 1..20: note = Target: SCN10A; (+) strand; PAM type: YTN; PAM sequence: TTC
  source 1..20: mol_type = other DNA
gcaggtagcagaaagagctc

SEQ ID NO: 68938 - DNA, 20 bp, synthetic construct
  misc_feature 1..20: note = Description of Artificial Sequence: Synthetic oligonucleotide
  misc_feature 1..20: note = Target: SCN10A; (+) strand; PAM type: YTN; PAM sequence: CTC
  source 1..20: mol_type = other DNA
tgaccagggaagcaatctag

SEQ ID NO: 68939 - DNA, 20 bp, synthetic construct
  misc_feature 1..20: note = Description of Artificial Sequence: Synthetic oligonucleotide
  misc_feature 1..20: note = Target: SCN10A; (+) strand; PAM type: YTN; PAM sequence: CTG
  source 1..20: mol_type = other DNA
accagggaagcaatctagga

SEQ ID NO: 68940 - DNA, 20 bp, synthetic construct
  misc_feature 1..20: note = Description of Artificial Sequence: Synthetic oligonucleotide
  misc_feature 1..20: note = Target: SCN10A; (+) strand; PAM type: YTN; PAM sequence: CTA
  source 1..20: mol_type = other DNA
ggatttatttttggttagtc

SEQ ID NO: 68941 - DNA, 20 bp, synthetic construct
  misc_feature 1..20: note = Description of Artificial Sequence: Synthetic oligonucleotide
  misc_feature 1..20: note = Target: SCN10A; (+) strand; PAM type: YTN; PAM sequence: TTT
  source 1..20: mol_type = other DNA
atttttggttagtcattttg

SEQ ID NO: 68942 - DNA, 20 bp, synthetic construct
  misc_feature 1..20: note = Description of Artificial Sequence: Synthetic oligonucleotide
  misc_feature 1..20: note = Target: SCN10A; (+) strand; PAM type: YTN; PAM sequence: TTA
  source 1..20: mol_type = other DNA
tttttggttagtcattttgg

SEQ ID NO: 68943 - DNA, 20 bp, synthetic construct
  misc_feature 1..20: note = Description of Artificial Sequence: Synthetic oligonucleotide
  misc_feature 1..20: note = Target: SCN10A; (+) strand; PAM type: YTN; PAM sequence: TTT
  source 1..20: mol_type = other DNA
ttggttagtcattttggtca

SEQ ID NO: 68944 - DNA, 20 bp, synthetic construct
  misc_feature 1..20: note = Description of Artificial Sequence: Synthetic oligonucleotide
  misc_feature 1..20: note = Target: SCN10A; (+) strand; PAM type: YTN; PAM sequence: TTT
  source 1..20: mol_type = other DNA
tggttagtcattttggtcag

SEQ ID NO: 68945 - DNA, 20 bp, synthetic construct
  misc_feature 1..20: note = Description of Artificial Sequence: Synthetic oligonucleotide
  misc_feature 1..20: note = Target: SCN10A; (+) strand; PAM type: YTN; PAM sequence: TTT
  source 1..20: mol_type = other DNA
ggttagtcattttggtcagc

SEQ ID NO: 68946 - DNA, 20 bp, synthetic construct
  misc_feature 1..20: note = Description of Artificial Sequence: Synthetic oligonucleotide
  misc_feature 1..20: note = Target: SCN10A; (+) strand; PAM type: YTN; PAM sequence: TTG
  source 1..20: mol_type = other DNA
gttagtcattttggtcagca

SEQ ID NO: 68947 - DNA, 20 bp, synthetic construct
  misc_feature 1..20: note = Description of Artificial Sequence: Synthetic oligonucleotide
  misc_feature 1..20: note = Target: SCN10A; (+) strand; PAM type: YTN; PAM sequence: TTA
  source 1..20: mol_type = other DNA
gtcattttggtcagcaaata

SEQ ID NO: 68948 - DNA, 20 bp, synthetic construct
  misc_feature 1..20: note = Description of Artificial Sequence: Synthetic oligonucleotide
  misc_feature 1..20: note = Target: SCN10A; (+) strand; PAM type: YTN; PAM sequence: TTT
  source 1..20: mol_type = other DNA
tggtcagcaaataatccact

SEQ ID NO: 68949 - DNA, 20 bp, synthetic construct
  misc_feature 1..20: note = Description of Artificial Sequence: Synthetic oligonucleotide
  misc_feature 1..20: note = Target: SCN10A; (+) strand; PAM type: YTN; PAM sequence: TTT
  source 1..20: mol_type = other DNA
ggtcagcaaataatccactg

SEQ ID NO: 68950 - DNA, 20 bp, synthetic construct
  misc_feature 1..20: note = Description of Artificial Sequence: Synthetic oligonucleotide
  misc_feature 1..20: note = Target: SCN10A; (+) strand; PAM type: YTN; PAM sequence: TTG
  source 1..20: mol_type = other DNA
gtcagcaaataatccactga

SEQ ID NO: 68951 - DNA, 20 bp, synthetic construct
  misc_feature 1..20: note = Description of Artificial Sequence: Synthetic oligonucleotide
  misc_feature 1..20: note = Target: SCN10A; (+) strand; PAM type: YTN; PAM sequence: CTG
  source 1..20: mol_type = other DNA
agcactacatgtgtcagtcc

SEQ ID NO: 68952 - DNA, 20 bp, synthetic construct
  misc_feature 1..20: note = Description of Artificial Sequence: Synthetic oligonucleotide
  misc_feature 1..20: note = Target: SCN10A; (+) strand; PAM type: YTN; PAM sequence: CTA
  source 1..20: mol_type = other DNA
catgtgtcagtccctggact

SEQ ID NO: 68953 - DNA, 20 bp, synthetic construct
  misc_feature 1..20: note = Description of Artificial Sequence: Synthetic oligonucleotide
  misc_feature 1..20: note = Target: SCN10A; (+) strand; PAM type: YTN; PAM sequence: CTG
  source 1..20: mol_type = other DNA
gactgggagctgagtgatgg

SEQ ID NO: 68954 - DNA, 20 bp, synthetic construct
  misc_feature 1..20: note = Description of Artificial Sequence: Synthetic oligonucleotide
  misc_feature 1..20: note = Target: SCN10A; (+) strand; PAM type: YTN; PAM sequence: CTG
  source 1..20: mol_type = other DNA
ggagctgagtgatggctaag

SEQ ID NO: 68955 - DNA, 20 bp, synthetic construct
  misc_feature 1..20: note = Description of Artificial Sequence: Synthetic oligonucleotide
  misc_feature 1..20: note = Target: SCN10A; (+) strand; PAM type: YTN; PAM sequence: CTG
  source 1..20: mol_type = other DNA
agtgatggctaaggcagcag

SEQ ID NO: 68956 - DNA, 20 bp, synthetic construct
  misc_feature 1..20: note = Description of Artificial Sequence: Synthetic oligonucleotide
  misc_feature 1..20: note = Target: SCN10A; (+) strand; PAM type: YTN; PAM sequence: CTA
  source 1..20: mol_type = other DNA
aggcagcagcatgtcgagtg

SEQ ID NO: 68957 - DNA, 20 bp, synthetic construct
  misc_feature 1..20: note = Description of Artificial Sequence: Synthetic oligonucleotide
  misc_feature 1..20: note = Target: SCN10A; (+) strand; PAM type: YTN; PAM sequence: TTG
  source 1..20: mol_type = other DNA
tctgacaattgaggggaaag

SEQ ID NO: 68958 - DNA, 20 bp, synthetic construct
  misc_feature 1..20: note = Description of Artificial Sequence: Synthetic oligonucleotide
  misc_feature 1..20: note = Target: SCN10A; (+) strand; PAM type: YTN; PAM sequence: CTG
  source 1..20: mol_type = other DNA
acaattgaggggaaagtctg

SEQ ID NO: 68959 - DNA, 20 bp, synthetic construct
  misc_feature 1..20: note = Description of Artificial Sequence: Synthetic oligonucleotide
  misc_feature 1..20: note = Target: SCN10A; (+) strand; PAM type: YTN; PAM sequence: TTG
  source 1..20: mol_type = other DNA
aggggaaagtctgtagcatt

SEQ ID NO: 68960 - DNA, 20 bp, synthetic construct
  misc_feature 1..20: note = Description of Artificial Sequence: Synthetic oligonucleotide
  misc_feature 1..20: note = Target: SCN10A; (+) strand; PAM type: YTN; PAM sequence: CTG
  source 1..20: mol_type = other DNA
tagcattactgagcagatgg

SEQ ID NO: 68961 - DNA, 20 bp, synthetic construct
  misc_feature 1..20: note = Description of Artificial Sequence: Synthetic oligonucleotide
  misc_feature 1..20: note = Target: SCN10A; (+) strand; PAM type: YTN; PAM sequence: TTA
  source 1..20: mol_type = other DNA
ctgagcagatgggcacacag

SEQ ID NO: 68962 - DNA, 20 bp, synthetic construct
  misc_feature 1..20: note = Description of Artificial Sequence: Synthetic oligonucleotide
  misc_feature 1..20: note = Target: SCN10A; (+) strand; PAM type: YTN; PAM sequence: CTG
  source 1..20: mol_type = other DNA
agcagatgggcacacagggg

SEQ ID NO: 68963 - DNA, 20 bp, synthetic construct
  misc_feature 1..20: note = Description of Artificial Sequence: Synthetic oligonucleotide
  misc_feature 1..20: note = Target: SCN10A; (+) strand; PAM type: YTN; PAM sequence: CTT
  source 1..20: mol_type = other DNA
aactgaagttccagaggtgg

SEQ ID NO: 68964 - DNA, 20 bp, synthetic construct
  misc_feature 1..20: note = Description of Artificial Sequence: Synthetic oligonucleotide
  misc_feature 1..20: note = Target: SCN10A; (+) strand; PAM type: YTN; PAM sequence: TTA
  source 1..20: mol_type = other DNA
actgaagttccagaggtggg

SEQ ID NO: 68965 - DNA, 20 bp, synthetic construct
  misc_feature 1..20: note = Description of Artificial Sequence: Synthetic oligonucleotide
  misc_feature 1..20: note = Target: SCN10A; (+) strand; PAM type: YTN; PAM sequence: CTG
  source 1..20: mol_type = other DNA
aagttccagaggtgggaatg

SEQ ID NO: 68966 - DNA, 20 bp, synthetic construct
  misc_feature 1..20: note = Description of Artificial Sequence: Synthetic oligonucleotide
  misc_feature 1..20: note = Target: SCN10A; (+) strand; PAM type: YTN; PAM sequence: TTC
  source 1..20: mol_type = other DNA
cagaggtgggaatggggtgg

SEQ ID NO: 68967 - DNA, 20 bp, synthetic construct
  misc_feature 1..20: note = Description of Artificial Sequence: Synthetic oligonucleotide
  misc_feature 1..20: note = Target: SCN10A; (+) strand; PAM type: YTN; PAM sequence: CTT
  source 1..20: mol_type = other DNA
ggcagagccctgaggaatga

SEQ ID NO: 68968 - DNA, 20 bp, synthetic construct
  misc_feature 1..20: note = Description of Artificial Sequence: Synthetic oligonucleotide
  misc_feature 1..20: note = Target: SCN10A; (+) strand; PAM type: YTN; PAM sequence: TTG
  source 1..20: mol_type = other DNA
gcagagccctgaggaatgag

SEQ ID NO: 68969 - DNA, 20 bp, synthetic construct
  misc_feature 1..20: note = Description of Artificial Sequence: Synthetic oligonucleotide
  misc_feature 1..20: note = Target: SCN10A; (+) strand; PAM type: YTN; PAM sequence: CTG
  source 1..20: mol_type = other DNA
aggaatgagtgtgagttgag

SEQ ID NO: 68970 - DNA, 20 bp, synthetic construct
  misc_feature 1..20: note = Description of Artificial Sequence: Synthetic oligonucleotide
  misc_feature 1..20: note = Target: SCN10A; (+) strand; PAM type: YTN; PAM sequence: TTG
  source 1..20: mol_type = other DNA
agtaaagagaggaggaagga

SEQ ID NO: 68971 - DNA, 20 bp, synthetic construct
  misc_feature 1..20: note = Description of Artificial Sequence: Synthetic oligonucleotide
  misc_feature 1..20: note = Target: SCN10A; (+) strand; PAM type: YTN; PAM sequence: CTG
  source 1..20: mol_type = other DNA
ggaggtgagcaatggtgtgg

SEQ ID NO: 68972 - DNA, 20 bp, synthetic construct
  misc_feature 1..20: note = Description of Artificial Sequence: Synthetic oligonucleotide
  misc_feature 1..20: note = Target: SCN10A; (+) strand; PAM type: YTN; PAM sequence: TTT
  source 1..20: mol_type = other DNA
gcagaaccgtaggtggattc

SEQ ID NO: 68973 - DNA, 20 bp, synthetic construct
  misc_feature 1..20: note = Description of Artificial Sequence: Synthetic oligonucleotide
  misc_feature 1..20: note = Target: SCN10A; (+) strand; PAM type: YTN; PAM sequence: TTG
  source 1..20: mol_type = other DNA
cagaaccgtaggtggattcc

SEQ ID NO: 68974 - DNA, 20 bp, synthetic construct
  misc_feature 1..20: note = Description of Artificial Sequence: Synthetic oligonucleotide
  misc_feature 1..20: note = Target: SCN10A; (+) strand; PAM type: YTN; PAM sequence: TTC
  source 1..20: mol_type = other DNA
cagagcatggtgagatgtga

SEQ ID NO: 68975 - DNA, 20 bp, synthetic construct
  misc_feature 1..20: note = Description of Artificial Sequence: Synthetic oligonucleotide
  misc_feature 1..20: note = Target: SCN10A; (+) strand; PAM type: YTN; PAM sequence: CTT
  source 1..20: mol_type = other DNA
gcaaataagactcagggtct

SEQ ID NO: 68976 - DNA, 20 bp, synthetic construct
  misc_feature 1..20: note = Description of Artificial Sequence: Synthetic oligonucleotide
  misc_feature 1..20: note = Target: SCN10A; (+) strand; PAM type: YTN; PAM sequence: TTG
  source 1..20: mol_type = other DNA
caaataagactcagggtctt

SEQ ID NO: 68977 - DNA, 20 bp, synthetic construct
  misc_feature 1..20: note = Description of Artificial Sequence: Synthetic oligonucleotide
  misc_feature 1..20: note = Target: SCN10A; (+) strand; PAM type: YTN; PAM sequence: CTC
  source 1..20: mol_type = other DNA
agggtcttcccagttgagag

SEQ ID NO: 68978 - DNA, 20 bp, synthetic construct
  misc_feature 1..20: note = Description of Artificial Sequence: Synthetic oligonucleotide
  misc_feature 1..20: note = Target: SCN10A; (+) strand; PAM type: YTN; PAM sequence: CTT
  source 1..20: mol_type = other DNA
cccagttgagagtaagtgag

SEQ ID NO: 68979 - DNA, 20 bp, synthetic construct
  misc_feature 1..20: note = Description of Artificial Sequence: Synthetic oligonucleotide
  misc_feature 1..20: note = Target: SCN10A; (+) strand; PAM type: YTN; PAM sequence: TTC
  source 1..20: mol_type = other DNA
ccagttgagagtaagtgaga

SEQ ID NO: 68980 - DNA, 20 bp, synthetic construct
  misc_feature 1..20: note = Description of Artificial Sequence: Synthetic oligonucleotide
  misc_feature 1..20: note = Target: SCN10A; (+) strand; PAM type: YTN; PAM sequence: TTG
  source 1..20: mol_type = other DNA
agagtaagtgagagagatat

SEQ ID NO: 68981 - DNA, 20 bp, synthetic construct
  misc_feature 1..20: note = Description of Artificial Sequence: Synthetic oligonucleotide
  misc_feature 1..20: note = Target: SCN10A; (+) strand; PAM type: YTN; PAM sequence: CTC
  source 1..20: mol_type = other DNA
tcttcaagaggtgtgtccag

SEQ ID NO: 68982 - DNA, 20 bp, synthetic construct
  misc_feature 1..20: note = Description of Artificial Sequence: Synthetic oligonucleotide
  misc_feature 1..20: note = Target: SCN10A; (+) strand; PAM type: YTN; PAM sequence: CTC
  source 1..20: mol_type = other DNA
ttcaagaggtgtgtccagtg

SEQ ID NO: 68983 - DNA, 20 bp, synthetic construct
  misc_feature 1..20: note = Description of Artificial Sequence: Synthetic oligonucleotide
  misc_feature 1..20: note = Target: SCN10A; (+) strand; PAM type: YTN; PAM sequence: CTT
  source 1..20: mol_type = other DNA
caagaggtgtgtccagtggg

SEQ ID NO: 68984 - DNA, 20 bp, synthetic construct
  misc_feature 1..20: note = Description of Artificial Sequence: Synthetic oligonucleotide
  misc_feature 1..20: note = Target: SCN10A; (+) strand; PAM type: YTN; PAM sequence: TTC
  source 1..20: mol_type = other DNA
aagaggtgtgtccagtggga

SEQ ID NO: 68985 - DNA, 20 bp, synthetic construct
  misc_feature 1..20: note = Description of Artificial Sequence: Synthetic oligonucleotide
  misc_feature 1..20: note = Target: SCN10A; (+) strand; PAM type: YTN; PAM sequence: TTG
  source 1..20: mol_type = other DNA
gcagagagtttcctatcttt

SEQ ID NO: 68986 - DNA, 20 bp, synthetic construct
  misc_feature 1..20: note = Description of Artificial Sequence: Synthetic oligonucleotide
  misc_feature 1..20: note = Target: SCN10A; (+) strand; PAM type: YTN; PAM sequence: TTT
  source 1..20: mol_type = other DNA
cctatctttccctgcagagc

SEQ ID NO: 68987 - DNA, 20 bp, synthetic construct
  misc_feature 1..20: note = Description of Artificial Sequence: Synthetic oligonucleotide
  misc_feature 1..20: note = Target: SCN10A; (+) strand; PAM type: YTN; PAM sequence: TTC
  source 1..20: mol_type = other DNA
ctatctttccctgcagagcc

SEQ ID NO: 68988 - DNA, 20 bp, synthetic construct
  misc_feature 1..20: note = Description of Artificial Sequence: Synthetic oligonucleotide
  misc_feature 1..20: note = Target: SCN10A; (+) strand; PAM type: YTN; PAM sequence: CTA
  source 1..20: mol_type = other DNA
tctttccctgcagagccaga

SEQ ID NO: 68989 - DNA, 20 bp, synthetic construct
  misc_feature 1..20: note = Description of Artificial Sequence: Synthetic oligonucleotide
  misc_feature 1..20: note = Target: SCN10A; (+) strand; PAM type: YTN; PAM sequence: CTT
  source 1..20: mol_type = other DNA
tccctgcagagccagacaag

SEQ ID NO: 68990 - DNA, 20 bp, synthetic construct
  misc_feature 1..20: note = Description of Artificial Sequence: Synthetic oligonucleotide
  misc_feature 1..20: note = Target: SCN10A; (+) strand; PAM type: YTN; PAM sequence: TTT
  source 1..20: mol_type = other DNA
ccctgcagagccagacaaga

SEQ ID NO: 68991 - DNA, 20 bp, synthetic construct
  misc_feature 1..20: note = Description of Artificial Sequence: Synthetic oligonucleotide
  misc_feature 1..20: note = Target: SCN10A; (+) strand; PAM type: YTN; PAM sequence: TTC
  source 1..20: mol_type = other DNA
cctgcagagccagacaagaa

SEQ ID NO: 68992 - DNA, 20 bp, synthetic construct
  misc_feature 1..20: note = Description of Artificial Sequence: Synthetic oligonucleotide
  misc_feature 1..20: note = Target: SCN10A; (+) strand; PAM type: YTN; PAM sequence: CTG
  source 1..20: mol_type = other DNA
cagagccagacaagaaatgg

SEQ ID NO: 68993 - DNA, 20 bp, synthetic construct
  misc_feature 1..20: note = Description of Artificial Sequence: Synthetic oligonucleotide
  misc_feature 1..20: note = Target: SCN10A; (+) strand; PAM type: YTN; PAM sequence: CTT
  source 1..20: mol_type = other DNA
ccactctagaatgggtgttt

SEQ ID NO: 68994 - DNA, 20 bp, synthetic construct
  misc_feature 1..20: note = Description of Artificial Sequence: Synthetic oligonucleotide
  misc_feature 1..20: note = Target: SCN10A; (+) strand; PAM type: YTN; PAM sequence: TTC
  source 1..20: mol_type = other DNA
cactctagaatgggtgtttc

SEQ ID NO: 68995 - DNA, 20 bp, synthetic construct
  misc_feature 1..20: note = Description of Artificial Sequence: Synthetic oligonucleotide
  misc_feature 1..20: note = Target: SCN10A; (+) strand; PAM type: YTN; PAM sequence: CTC
  source 1..20: mol_type = other DNA
tagaatgggtgtttctgttt

SEQ ID NO: 68996 - DNA, 20 bp, synthetic construct
  misc_feature 1..20: note = Description of Artificial Sequence: Synthetic oligonucleotide
  misc_feature 1..20: note = Target: SCN10A; (+) strand; PAM type: YTN; PAM sequence: CTA
  source 1..20: mol_type = other DNA
gaatgggtgtttctgtttac

SEQ ID NO: 68997 - DNA, 20 bp, synthetic construct
  misc_feature 1..20: note = Description of Artificial Sequence: Synthetic oligonucleotide
  misc_feature 1..20: note = Target: SCN10A; (+) strand; PAM type: YTN; PAM sequence: TTT
  source 1..20: mol_type = other DNA
ctgtttacagataagagaac

SEQ ID NO: 68998 - DNA, 20 bp, synthetic construct
  misc_feature 1..20: note = Description of Artificial Sequence: Synthetic oligonucleotide
  misc_feature 1..20: note = Target: SCN10A; (+) strand; PAM type: YTN; PAM sequence: TTC
  source 1..20: mol_type = other DNA
tgtttacagataagagaacg

SEQ ID NO: 68999 - DNA, 20 bp, synthetic construct
  misc_feature 1..20: note = Description of Artificial Sequence: Synthetic oligonucleotide
  misc_feature 1..20: note = Target: SCN10A; (+) strand; PAM type: YTN; PAM sequence: CTG
  source 1..20: mol_type = other DNA
tttacagataagagaacgaa

SEQ ID NO: 69000 - DNA, 20 bp, synthetic construct
  misc_feature 1..20: note = Description of Artificial Sequence: Synthetic oligonucleotide
  misc_feature 1..20: note = Target: SCN10A; (+) strand; PAM type: YTN; PAM sequence: TTT
  source 1..20: mol_type = other DNA
acagataagagaacgaattc

SEQ ID NO: 69001 - DNA, 20 bp, synthetic construct
  misc_feature 1..20: note = Description of Artificial Sequence: Synthetic oligonucleotide
  misc_feature 1..20: note = Target: SCN10A; (+) strand; PAM type: YTN; PAM sequence: TTA
  source 1..20: mol_type = other DNA
cagataagagaacgaattct

SEQ ID NO: 69002 - DNA, 20 bp, synthetic construct
  misc_feature 1..20: note = Description of Artificial Sequence: Synthetic oligonucleotide
  misc_feature 1..20: note = Target: SCN10A; (+) strand; PAM type: YTN; PAM sequence: TTC
  source 1..20: mol_type = other DNA
ttggggtgagaggagagaac

SEQ ID NO: 69003 - DNA, 20 bp, synthetic construct
  misc_feature 1..20: note = Description of Artificial Sequence: Synthetic oligonucleotide
  misc_feature 1..20: note = Target: SCN10A; (+) strand; PAM type: YTN; PAM sequence: CTT
  source 1..20: mol_type = other DNA
ggggtgagaggagagaacct

SEQ ID NO: 69004 - DNA, 20 bp, synthetic construct
  misc_feature 1..20: note = Description of Artificial Sequence: Synthetic oligonucleotide
  misc_feature 1..20: note = Target: SCN10A; (+) strand; PAM type: YTN; PAM sequence: TTG
  source 1..20: mol_type = other DNA
gggtgagaggagagaaccta

SEQ ID NO: 69005 - DNA, 20 bp, synthetic construct
  misc_feature 1..20: note = Description of Artificial Sequence: Synthetic oligonucleotide
  misc_feature 1..20: note = Target: SCN10A; (+) strand; PAM type: YTN; PAM sequence: CTA
  source 1..20: mol_type = other DNA
tcaggccacagaggggaagc

SEQ ID NO: 69006 - DNA, 20 bp, synthetic construct
  misc_feature 1..20: note = Description of Artificial Sequence: Synthetic oligonucleotide
  misc_feature 1..20: note = Target: SCN10A; (+) strand; PAM type: YTN; PAM sequence: TTT
  source 1..20: mol_type = other DNA
cagaaagtttgccttgtctc

SEQ ID NO: 69007 - DNA, 20 bp, synthetic construct
  misc_feature 1..20: note = Description of Artificial Sequence: Synthetic oligonucleotide
  misc_feature 1..20: note = Target: SCN10A; (+) strand; PAM type: YTN; PAM sequence: TTC
  source 1..20: mol_type = other DNA
agaaagtttgccttgtctct

SEQ ID NO: 69008 - DNA, 20 bp, synthetic construct
  misc_feature 1..20: note = Description of Artificial Sequence: Synthetic oligonucleotide
  misc_feature 1..20: note = Target: SCN10A; (+) strand; PAM type: YTN; PAM sequence: TTT
  source 1..20: mol_type = other DNA
gccttgtctctggcctcccc

SEQ ID NO: 69009 - DNA, 20 bp, synthetic construct
  misc_feature 1..20: note = Description of Artificial Sequence: Synthetic oligonucleotide
  misc_feature 1..20: note = Target: SCN10A; (+) strand; PAM type: YTN; PAM sequence: TTG
  source 1..20: mol_type = other DNA
ccttgtctctggcctcccca

SEQ ID NO: 69010 - DNA, 20 bp, synthetic construct
  misc_feature 1..20: note = Description of Artificial Sequence: Synthetic oligonucleotide
  misc_feature 1..20: note = Target: SCN10A; (+) strand; PAM type: YTN; PAM sequence: CTT
  source 1..20: mol_type = other DNA
gtctctggcctccccatcct

SEQ ID NO: 69011 - DNA, 20 bp, synthetic construct
  misc_feature 1..20: note = Description of Artificial Sequence: Synthetic oligonucleotide
  misc_feature 1..20: note = Target: SCN10A; (+) strand; PAM type: YTN; PAM sequence: TTG
  source 1..20: mol_type = other DNA
tctctggcctccccatcctc

SEQ ID NO: 69012 - DNA, 20 bp, synthetic construct
  misc_feature 1..20: note = Description of Artificial Sequence: Synthetic oligonucleotide
  misc_feature 1..20: note = Target: SCN10A; (+) strand; PAM type: YTN; PAM sequence: CTC
  source 1..20: mol_type = other DNA
tggcctccccatcctcacca

SEQ ID NO: 69013 - DNA, 20 bp, synthetic construct
  misc_feature 1..20: note = Description of Artificial Sequence: Synthetic oligonucleotide
  misc_feature 1..20: note = Target: SCN10A; (+) strand; PAM type: YTN; PAM sequence: CTG
  source 1..20: mol_type = other DNA
gcctccccatcctcaccatc

SEQ ID NO: 69014 - DNA, 20 bp, synthetic construct
  misc_feature 1..20: note = Description of Artificial Sequence: Synthetic oligonucleotide
  misc_feature 1..20: note = Target: SCN10A; (+) strand; PAM type: YTN; PAM sequence: CTC
  source 1..20: mol_type = other DNA
cccatcctcaccatcaacct

SEQ ID NO: 69015 - DNA, 20 bp, synthetic construct
  misc_feature 1..20: note = Description of Artificial Sequence: Synthetic oligonucleotide
  misc_feature 1..20: note = Target: SCN10A; (+) strand; PAM type: YTN; PAM sequence: CTC
  source 1..20: mol_type = other DNA
accatcaacctcatgggggc

SEQ ID NO: 69016 - DNA, 20 bp, synthetic construct
  misc_feature 1..20: note = Description of Artificial Sequence: Synthetic oligonucleotide
  misc_feature 1..20: note = Target: SCN10A; (+) strand; PAM type: YTN; PAM sequence: CTC
  source 1..20: mol_type = other DNA
atgggggctgaagagtagtc

SEQ ID NO: 69017 - DNA, 20 bp, synthetic construct
  misc_feature 1..20: note = Description of Artificial Sequence: Synthetic oligonucleotide
  misc_feature 1..20: note = Target: SCN10A; (+) strand; PAM type: YTN; PAM sequence: CTG
  source 1..20: mol_type = other DNA
aagagtagtcgctgggctac

SEQ ID NO: 69018 - DNA, 20 bp, synthetic construct
  misc_feature 1..20: note = Description of Artificial Sequence: Synthetic oligonucleotide
  misc_feature 1..20: note = Target: SCN10A; (+) strand; PAM type: YTN; PAM sequence: CTG
  source 1..20: mol_type = other DNA
ggctactggtgacagtggag

SEQ ID NO: 69019 - DNA, 20 bp, synthetic construct
  misc_feature 1..20: note = Description of Artificial Sequence: Synthetic oligonucleotide
  misc_feature 1..20: note = Target: SCN10A; (+) strand; PAM type: YTN; PAM sequence: CTA
  source 1..20: mol_type = other DNA
ctggtgacagtggagatctt

SEQ ID NO: 69020 - DNA, 20 bp, synthetic construct
  misc_feature 1..20: note = Description of Artificial Sequence: Synthetic oligonucleotide
  misc_feature 1..20: note = Target: SCN10A; (+) strand; PAM type: YTN; PAM sequence: CTG
  source 1..20: mol_type = other DNA
gtgacagtggagatcttaga

SEQ ID NO: 69021 - DNA, 20 bp, synthetic construct
  misc_feature 1..20: note = Description of Artificial Sequence: Synthetic oligonucleotide
  misc_feature 1..20: note = Target: SCN10A; (+) strand; PAM type: YTN; PAM sequence: CTT
  source 1..20: mol_type = other DNA
agaggccccacacaatgagc

SEQ ID NO: 69022 - DNA, 20 bp, synthetic construct
  misc_feature 1..20: note = Description of Artificial Sequence: Synthetic oligonucleotide
  misc_feature 1..20: note = Target: SCN10A; (+) strand; PAM type: YTN; PAM sequence: TTA
  source 1..20: mol_type = other DNA
gaggccccacacaatgagct

SEQ ID NO: 69023 - DNA, 20 bp, synthetic construct
  misc_feature 1..20: note = Description of Artificial Sequence: Synthetic oligonucleotide
  misc_feature 1..20: note = Target: SCN10A; (+) strand; PAM type: YTN; PAM sequence: CTT
  source 1..20: mol_type = other DNA
tgatggactacttttgtttc

SEQ ID NO: 69024 - DNA, 20 bp, synthetic construct
  misc_feature 1..20: note = Description of Artificial Sequence: Synthetic oligonucleotide
  misc_feature 1..20: note = Target: SCN10A; (+) strand; PAM type: YTN; PAM sequence: TTT
  source 1..20: mol_type = other DNA
gatggactacttttgtttct

SEQ ID NO: 69025 - DNA, 20 bp, synthetic construct
  misc_feature 1..20: note = Description of Artificial Sequence: Synthetic oligonucleotide
  misc_feature 1..20: note = Target: SCN10A; (+) strand; PAM type: YTN; PAM sequence: TTG
  source 1..20: mol_type = other DNA
atggactacttttgtttctg

SEQ ID NO: 69026 - DNA, 20 bp, synthetic construct
  misc_feature 1..20: note = Description of Artificial Sequence: Synthetic oligonucleotide
  misc_feature 1..20: note = Target: SCN10A; (+) strand; PAM type: YTN; PAM sequence: CTA
  source 1..20: mol_type = other DNA
cttttgtttctgaattctca

SEQ ID NO: 69027 - DNA, 20 bp, synthetic construct
  misc_feature 1..20: note = Description of Artificial Sequence: Synthetic oligonucleotide
  misc_feature 1..20: note = Target: SCN10A; (+) strand; PAM type: YTN; PAM sequence: CTT
  source 1..20: mol_type = other DNA
ttgtttctgaattctcagta

SEQ ID NO: 69028 - DNA, 20 bp, synthetic construct
  misc_feature 1..20: note = Description of Artificial Sequence: Synthetic oligonucleotide
  misc_feature 1..20: note = Target: SCN10A; (+) strand; PAM type: YTN; PAM sequence: TTT
  source 1..20: mol_type = other DNA
tgtttctgaattctcagtaa

SEQ ID NO: 69029 - DNA, 20 bp, synthetic construct
  misc_feature 1..20: note = Description of Artificial Sequence: Synthetic oligonucleotide
  misc_feature 1..20: note = Target: SCN10A; (+) strand; PAM type: YTN; PAM sequence: TTT
  source 1..20: mol_type = other DNA
gtttctgaattctcagtaat

SEQ ID NO: 69030 - DNA, 20 bp, synthetic construct
  misc_feature 1..20: note = Description of Artificial Sequence: Synthetic oligonucleotide
  misc_feature 1..20: note = Target: SCN10A; (+) strand; PAM type: YTN; PAM sequence: TTG
  source 1..20: mol_type = other DNA
tttctgaattctcagtaatc

SEQ ID NO: 69031 - DNA, 20 bp, synthetic construct
  misc_feature 1..20: note = Description of Artificial Sequence: Synthetic oligonucleotide
  misc_feature 1..20: note = Target: SCN10A; (+) strand; PAM type: YTN; PAM sequence: TTT
  source 1..20: mol_type = other DNA
ctgaattctcagtaatcaag

SEQ ID NO: 69032 - DNA, 20 bp, synthetic construct
  misc_feature 1..20: note = Description of Artificial Sequence: Synthetic oligonucleotide
  misc_feature 1..20: note = Target: SCN10A; (+) strand; PAM type: YTN; PAM sequence: TTC
  source 1..20: mol_type = other DNA
tgaattctcagtaatcaaga

SEQ ID NO: 69033 - DNA, 20 bp, synthetic construct
  misc_feature 1..20: note = Description of Artificial Sequence: Synthetic oligonucleotide
  misc_feature 1..20: note = Target: SCN10A; (+) strand; PAM type: YTN; PAM sequence: CTG
  source 1..20: mol_type = other DNA
aattctcagtaatcaagaat

SEQ ID NO: 69034 - DNA, 20 bp, synthetic construct
  misc_feature 1..20: note = Description of Artificial Sequence: Synthetic oligonucleotide
  misc_feature 1..20: note = Target: SCN10A; (+) strand; PAM type: YTN; PAM sequence: TTC
  source 1..20: mol_type = other DNA
tcagtaatcaagaattgcct

SEQ ID NO: 69035 - DNA, 20 bp, synthetic construct
  misc_feature 1..20: note = Description of Artificial Sequence: Synthetic oligonucleotide
  misc_feature 1..20: note = Target: SCN10A; (+) strand; PAM type: YTN; PAM sequence: CTC
  source 1..20: mol_type = other DNA
agtaatcaagaattgcctaa

SEQ ID NO: 69036 - DNA, 20 bp, synthetic construct
  misc_feature 1..20: note = Description of Artificial Sequence: Synthetic oligonucleotide
  misc_feature 1..20: note = Target: SCN10A; (+) strand; PAM type: YTN; PAM sequence: TTG
  source 1..20: mol_type = other DNA
cctaattcttttttcctctg

SEQ ID NO: 69037 - DNA, 20 bp, synthetic construct
  misc_feature 1..20: note = Description of Artificial Sequence: Synthetic oligonucleotide
  misc_feature 1..20: note = Target: SCN10A; (+) strand; PAM type: YTN; PAM sequence: CTA
  source 1..20: mol_type = other DNA
attcttttttcctctgggtg

SEQ ID NO: 69038 - DNA, 20 bp, synthetic construct
  misc_feature 1..20: note = Description of Artificial Sequence: Synthetic oligonucleotide
  misc_feature 1..20: note = Target: SCN10A; (+) strand; PAM type: YTN; PAM sequence: TTC
  source 1..20: mol_type = other DNA
ttttttcctctgggtgtcta

SEQ ID NO: 69039 - DNA, 20 bp, synthetic construct
  misc_feature 1..20: note = Description of Artificial Sequence: Synthetic oligonucleotide
  misc_feature 1..20: note = Target: SCN10A; (+) strand; PAM type: YTN; PAM sequence: CTT
  source 1..20: mol_type = other DNA
ttttcctctgggtgtctaaa

SEQ ID NO: 69040 - DNA, 20 bp, synthetic construct
  misc_feature 1..20: note = Description of Artificial Sequence: Synthetic oligonucleotide
  misc_feature 1..20: note = Target: SCN10A; (+) strand; PAM type: YTN; PAM sequence: TTT
  source 1..20: mol_type = other DNA
tttcctctgggtgtctaaag

SEQ ID NO: 69041 - DNA, 20 bp, synthetic construct
  misc_feature 1..20: note = Description of Artificial Sequence: Synthetic oligonucleotide
  misc_feature 1..20: note = Target: SCN10A; (+) strand; PAM type: YTN; PAM sequence: TTT
  source 1..20: mol_type = other DNA
ttcctctgggtgtctaaaga

SEQ ID NO: 69042 - DNA, 20 bp, synthetic construct
  misc_feature 1..20: note = Description of Artificial Sequence: Synthetic oligonucleotide
  misc_feature 1..20: note = Target: SCN10A; (+) strand; PAM type: YTN; PAM sequence: TTT
  source 1..20: mol_type = other DNA
tcctctgggtgtctaaagac

SEQ ID NO: 69043 - DNA, 20 bp, synthetic construct
  misc_feature 1..20: note = Description of Artificial Sequence: Synthetic oligonucleotide
  misc_feature 1..20: note = Target: SCN10A; (+) strand; PAM type: YTN; PAM sequence: TTT
  source 1..20: mol_type = other DNA
cctctgggtgtctaaagaca

SEQ ID NO: 69044 - DNA, 20 bp, synthetic construct
  misc_feature 1..20: note = Description of Artificial Sequence: Synthetic oligonucleotide
  misc_feature 1..20: note = Target: SCN10A; (+) strand; PAM type: YTN; PAM sequence: TTC
  source 1..20: mol_type = other DNA
ctctgggtgtctaaagacag

SEQ ID NO: 69045 - DNA, 20 bp, synthetic construct
  misc_feature 1..20: note = Description of Artificial Sequence: Synthetic oligonucleotide
  misc_feature 1..20: note = Target: SCN10A; (+) strand; PAM type: YTN; PAM sequence: CTC
  source 1..20: mol_type = other DNA
tgggtgtctaaagacaggat

SEQ ID NO: 69046 - DNA, 20 bp, synthetic construct
  misc_feature 1..20: note = Description of Artificial Sequence: Synthetic oligonucleotide
  misc_feature 1..20: note = Target: SCN10A; (+) strand; PAM type: YTN; PAM sequence: CTG
  source 1..20: mol_type = other DNA
ggtgtctaaagacaggattt

SEQ ID NO: 69047 - DNA, 20 bp, synthetic construct
  misc_feature 1..20: note = Description of Artificial Sequence: Synthetic oligonucleotide
  misc_feature 1..20: note = Target: SCN10A; (+) strand; PAM type: YTN; PAM sequence: CTA
  source 1..20: mol_type = other DNA
aagacaggattttagaccta

SEQ ID NO: 69048 - DNA, 20 bp, synthetic construct
  misc_feature 1..20: note = Description of Artificial Sequence: Synthetic oligonucleotide
  misc_feature 1..20: note = Target: SCN10A; (+) strand; PAM type: YTN; PAM sequence: TTT
  source 1..20: mol_type = other DNA
tagacctacggaaacagtga

SEQ ID NO: 69049 - DNA, 20 bp, synthetic construct
  misc_feature 1..20: note = Description of Artificial Sequence: Synthetic oligonucleotide
  misc_feature 1..20: note = Target: SCN10A; (+) strand; PAM type: YTN; PAM sequence: TTT
  source 1..20: mol_type = other DNA
agacctacggaaacagtgaa

SEQ ID NO: 69050 - DNA, 20 bp, synthetic construct
  misc_feature 1..20: note = Description of Artificial Sequence: Synthetic oligonucleotide
  misc_feature 1..20: note = Target: SCN10A; (+) strand; PAM type: YTN; PAM sequence: TTA
  source 1..20: mol_type = other DNA
gacctacggaaacagtgaag

SEQ ID NO: 69051 - DNA, 20 bp, synthetic construct
  misc_feature 1..20: note = Description of Artificial Sequence: Synthetic oligonucleotide
  misc_feature 1..20: note = Target: SCN10A; (+) strand; PAM type: YTN; PAM sequence: CTA
  source 1..20: mol_type = other DNA
cggaaacagtgaagatactg

SEQ ID NO: 69052 - DNA, 20 bp, synthetic construct
  misc_feature 1..20: note = Description of Artificial Sequence: Synthetic oligonucleotide
  misc_feature 1..20: note = Target: SCN10A; (+) strand; PAM type: YTN; PAM sequence: CTG
  source 1..20: mol_type = other DNA
ggactgctttctcccttcct

SEQ ID NO: 69053 - DNA, 20 bp, synthetic construct
  misc_feature 1..20: note = Description of Artificial Sequence: Synthetic oligonucleotide
  misc_feature 1..20: note = Target: SCN10A; (+) strand; PAM type: YTN; PAM sequence: CTG
  source 1..20: mol_type = other DNA
ctttctcccttcctccccat

SEQ ID NO: 69054 - DNA, 20 bp, synthetic construct
  misc_feature 1..20: note = Description of Artificial Sequence: Synthetic oligonucleotide
  misc_feature 1..20: note = Target: SCN10A; (+) strand; PAM type: YTN; PAM sequence: CTT
  source 1..20: mol_type = other DNA
tctcccttcctccccatttc

SEQ ID NO: 69055 - DNA, 20 bp, synthetic construct
  misc_feature 1..20: note = Description of Artificial Sequence: Synthetic oligonucleotide
  misc_feature 1..20: note = Target: SCN10A; (+) strand; PAM type: YTN; PAM sequence: TTT
  source 1..20: mol_type = other DNA
ctcccttcctccccatttcc

SEQ ID NO: 69056 - DNA, 20 bp, synthetic construct
  misc_feature 1..20: note = Description of Artificial Sequence: Synthetic oligonucleotide
  misc_feature 1..20: note = Target: SCN10A; (+) strand; PAM type: YTN; PAM sequence: TTC
  source 1..20: mol_type = other DNA
tcccttcctccccatttcca

SEQ ID NO: 69057 - DNA, 20 bp, synthetic construct
  misc_feature 1..20: note = Description of Artificial Sequence: Synthetic oligonucleotide
  misc_feature 1..20: note = Target: SCN10A; (+) strand; PAM type: YTN; PAM sequence: CTC
  source 1..20: mol_type = other DNA
ccttcctccccatttccaag

SEQ ID NO: 69058 - DNA, 20 bp, synthetic construct
  misc_feature 1..20: note = Description of Artificial Sequence: Synthetic oligonucleotide
  misc_feature 1..20: note = Target: SCN10A; (+) strand; PAM type: YTN; PAM sequence: CTT
  source 1..20: mol_type = other DNA
cctccccatttccaagttta

SEQ ID NO: 69059 - DNA, 20 bp, synthetic construct
  misc_feature 1..20: note = Description of Artificial Sequence: Synthetic oligonucleotide
  misc_feature 1..20: note = Target: SCN10A; (+) strand; PAM type: YTN; PAM sequence: TTC
  source 1..20: mol_type = other DNA
ctccccatttccaagtttaa

SEQ ID NO: 69060 - DNA, 20 bp, synthetic construct
  misc_feature 1..20: note = Description of Artificial Sequence: Synthetic oligonucleotide
  misc_feature 1..20: note = Target: SCN10A; (+) strand; PAM type: YTN; PAM sequence: CTC
  source 1..20: mol_type = other DNA
cccatttccaagtttaatcc

SEQ ID NO: 69061 - DNA, 20 bp, synthetic construct
  misc_feature 1..20: note = Description of Artificial Sequence: Synthetic oligonucleotide
  misc_feature 1..20: note = Target: SCN10A; (+) strand; PAM type: YTN; PAM sequence: TTT
  source 1..20: mol_type = other DNA
ccaagtttaatcctttagtt

SEQ ID NO: 69062 - DNA, 20 bp, synthetic construct
  misc_feature 1..20: note = Description of Artificial Sequence: Synthetic oligonucleotide
  misc_feature 1..20: note = Target: SCN10A; (+) strand; PAM type: YTN; PAM sequence: TTC
  source 1..20: mol_type = other DNA
caagtttaatcctttagttt

SEQ ID NO: 69063 - DNA, 20 bp, synthetic construct
  misc_feature 1..20: note = Description of Artificial Sequence: Synthetic oligonucleotide
  misc_feature 1..20: note = Target: SCN10A; (+) strand; PAM type: YTN; PAM sequence: TTT
  source 1..20: mol_type = other DNA
aatcctttagtttaaggtat

SEQ ID NO: 69064 - DNA, 20 bp, synthetic construct
  misc_feature 1..20: note = Description of Artificial Sequence: Synthetic oligonucleotide
  misc_feature 1..20: note = Target: SCN10A; (+) strand; PAM type: YTN; PAM sequence: TTA
  source 1..20: mol_type = other DNA
atcctttagtttaaggtata

SEQ ID NO: 69065 - DNA, 20 bp, synthetic construct
  misc_feature 1..20: note = Description of Artificial Sequence: Synthetic oligonucleotide
  misc_feature 1..20: note = Target: SCN10A; (+) strand; PAM type: YTN; PAM sequence: CTT
  source 1..20: mol_type = other DNA
tagtttaaggtataaataaa

SEQ ID NO: 69066 - DNA, 20 bp, synthetic construct
  misc_feature 1..20: note = Description of Artificial Sequence: Synthetic oligonucleotide
  misc_feature 1..20: note = Target: SCN10A; (+) strand; PAM type: YTN; PAM sequence: TTT
  source 1..20: mol_type = other DNA
agtttaaggtataaataaaa

SEQ ID NO: 69067 - DNA, 20 bp, synthetic construct
  misc_feature 1..20: note = Description of Artificial Sequence: Synthetic oligonucleotide
  misc_feature 1..20: note = Target: SCN10A; (+) strand; PAM type: YTN; PAM sequence: TTA
  source 1..20: mol_type = other DNA
gtttaaggtataaataaaaa

SEQ ID NO: 69068 - DNA, 20 bp, synthetic construct
  misc_feature 1..20: note = Description of Artificial Sequence: Synthetic oligonucleotide
  misc_feature 1..20: note = Target: SCN10A; (+) strand; PAM type: YTN; PAM sequence: TTT
  source 1..20: mol_type = other DNA
aaggtataaataaaaattca

SEQ ID NO: 69069 - DNA, 20 bp, synthetic construct
  misc_feature 1..20: note = Description of Artificial Sequence: Synthetic oligonucleotide
  misc_feature 1..20: note = Target: SCN10A; (+) strand; PAM type: YTN; PAM sequence: TTA
  source 1..20: mol_type = other DNA
aggtataaataaaaattcaa

SEQ ID NO: 69070 - DNA, 20 bp, synthetic construct
  misc_feature 1..20: note = Description of Artificial Sequence: Synthetic oligonucleotide
  misc_feature 1..20: note = Target: SCN10A; (+) strand; PAM type: YTN; PAM sequence: TTC
  source 1..20: mol_type = other DNA
aactgaggggtcttgcctga

SEQ ID NO: 69071 - DNA, 20 bp, synthetic construct
  misc_feature 1..20: note = Description of Artificial Sequence: Synthetic oligonucleotide
  misc_feature 1..20: note = Target: SCN10A; (+) strand; PAM type: YTN; PAM sequence: CTG
  source 1..20: mol_type = other DNA
aggggtcttgcctgaatccc

SEQ ID NO: 69072 - DNA, 20 bp, synthetic construct
  misc_feature 1..20: note = Description of Artificial Sequence: Synthetic oligonucleotide
  misc_feature 1..20: note = Target: SCN10A; (+) strand; PAM type: YTN; PAM sequence: CTT
  source 1..20: mol_type = other DNA
gcctgaatcccacaaccaga

SEQ ID NO: 69073 - DNA, 20 bp, synthetic construct
  misc_feature 1..20: note = Description of Artificial Sequence: Synthetic oligonucleotide
  misc_feature 1..20: note = Target: SCN10A; (+) strand; PAM type: YTN; PAM sequence: TTG
  source 1..20: mol_type = other DNA
cctgaatcccacaaccagaa

SEQ ID NO: 69074 - DNA, 20 bp, synthetic construct
  misc_feature 1..20: note = Description of Artificial Sequence: Synthetic oligonucleotide
  misc_feature 1..20: note = Target: SCN10A; (+) strand; PAM type: YTN; PAM sequence: CTG
  source 1..20: mol_type = other DNA
aatcccacaaccagaacaga

SEQ ID NO: 69075 - DNA, 20 bp, synthetic construct
  misc_feature 1..20: note = Description of Artificial Sequence: Synthetic oligonucleotide
  misc_feature 1..20: note = Target: SCN10A; (+) strand; PAM type: YTN; PAM sequence: CTC
  source 1..20: mol_type = other DNA
ctgttacgtattgattgtga

SEQ ID NO: 69076 - DNA, 20 bp, synthetic construct
  misc_feature 1..20: note = Description of Artificial Sequence: Synthetic oligonucleotide
  misc_feature 1..20: note = Target: SCN10A; (+) strand; PAM type: YTN; PAM sequence: CTG
  source 1..20: mol_type = other DNA
ttacgtattgattgtgaggc

SEQ ID NO: 69077 - DNA, 20 bp, synthetic construct
  misc_feature 1..20: note = Description of Artificial Sequence: Synthetic oligonucleotide
  misc_feature 1..20: note = Target: SCN10A; (+) strand; PAM type: YTN; PAM sequence: TTA
  source 1..20: mol_type = other DNA
cgtattgattgtgaggccat

SEQ ID NO: 69078 - DNA, 20 bp, synthetic construct
  misc_feature 1..20: note = Description of Artificial Sequence: Synthetic oligonucleotide
  misc_feature 1..20: note = Target: SCN10A; (+) strand; PAM type: YTN; PAM sequence: TTG
  source 1..20: mol_type = other DNA
attgtgaggccatgtggtat

SEQ ID NO: 69079 - DNA, 20 bp, synthetic construct
  misc_feature 1..20: note = Description of Artificial Sequence: Synthetic oligonucleotide
  misc_feature 1..20: note = Target: SCN10A; (+) strand; PAM type: YTN; PAM sequence: TTG
  source 1..20: mol_type = other DNA
tgaggccatgtggtatgtgg

SEQ ID NO: 69080 - DNA, 20 bp, synthetic construct
  misc_feature 1..20: note = Description of Artificial Sequence: Synthetic oligonucleotide
  misc_feature 1..20: note = Target: SCN10A; (+) strand; PAM type: YTN; PAM sequence: CTG
  source 1..20: mol_type = other DNA
gcctaggagttgggacaata

SEQ ID NO: 69081 - DNA, 20 bp, synthetic construct
  misc_feature 1..20: note = Description of Artificial Sequence: Synthetic oligonucleotide
  misc_feature 1..20: note = Target: SCN10A; (+) strand; PAM type: YTN; PAM sequence: CTA
  source 1..20: mol_type = other DNA
ggagttgggacaataggctt

SEQ ID NO: 69082 - DNA, 20 bp, synthetic construct
  misc_feature 1..20: note = Description of Artificial Sequence: Synthetic oligonucleotide
  misc_feature 1..20: note = Target: SCN10A; (+) strand; PAM type: YTN; PAM sequence: TTG
  source 1..20: mol_type = other DNA
ggacaataggcttccaggtc

SEQ ID NO: 69083 - DNA, 20 bp, synthetic construct
  misc_feature 1..20: note = Description of Artificial Sequence: Synthetic oligonucleotide
  misc_feature 1..20: note = Target: SCN10A; (+) strand; PAM type: YTN; PAM sequence: CTT
  source 1..20: mol_type = other DNA
ccaggtcacactgtctctta

SEQ ID NO: 69084 - DNA, 20 bp, synthetic construct
  misc_feature 1..20: note = Description of Artificial Sequence: Synthetic oligonucleotide
  misc_feature 1..20: note = Target: SCN10A; (+) strand; PAM type: YTN; PAM sequence: TTC
  source 1..20: mol_type = other DNA
caggtcacactgtctcttac

SEQ ID NO: 69085 - DNA, 20 bp, synthetic construct
  misc_feature 1..20: note = Description of Artificial Sequence: Synthetic oligonucleotide
  misc_feature 1..20: note = Target: SCN10A; (+) strand; PAM type: YTN; PAM sequence: CTG
  source 1..20: mol_type = other DNA
tctcttactagtgaagaggc

SEQ ID NO: 69086 - DNA, 20 bp, synthetic construct
  misc_feature 1..20: note = Description of Artificial Sequence: Synthetic oligonucleotide
  misc_feature 1..20: note = Target: SCN10A; (+) strand; PAM type: YTN; PAM sequence: CTC
  source 1..20: mol_type = other DNA
ttactagtgaagaggccttg

SEQ ID NO: 69087 - DNA, 20 bp, synthetic construct
  misc_feature 1..20: note = Description of Artificial Sequence: Synthetic oligonucleotide
  misc_feature 1..20: note = Target: SCN10A; (+) strand; PAM type: YTN; PAM sequence: CTT
  source 1..20: mol_type = other DNA
actagtgaagaggccttggg

SEQ ID NO: 69088 - DNA, 20 bp, synthetic construct
  misc_feature 1..20: note = Description of Artificial Sequence: Synthetic oligonucleotide
  misc_feature 1..20: note = Target: SCN10A; (+) strand; PAM type: YTN; PAM sequence: TTA
  source 1..20: mol_type = other DNA
ctagtgaagaggccttgggt

SEQ ID NO: 69089 - DNA, 20 bp, synthetic construct
  misc_feature 1..20: note = Description of Artificial Sequence: Synthetic oligonucleotide
  misc_feature 1..20: note = Target: SCN10A; (+) strand; PAM type: YTN; PAM sequence: CTA
  source 1..20: mol_type = other DNA
gtgaagaggccttgggttta

SEQ ID NO: 69090 - DNA, 20 bp, synthetic construct
  misc_feature 1..20: note = Description of Artificial Sequence: Synthetic oligonucleotide
  misc_feature 1..20: note = Target: SCN10A; (+) strand; PAM type: YTN; PAM sequence: CTT
  source 1..20: mol_type = other DNA
gggtttatgtttcctatact

SEQ ID NO: 69091 - DNA, 20 bp, synthetic construct
  misc_feature 1..20: note = Description of Artificial Sequence: Synthetic oligonucleotide
  misc_feature 1..20: note = Target: SCN10A; (+) strand; PAM type: YTN; PAM sequence: TTG
  source 1..20: mol_type = other DNA
ggtttatgtttcctatactc

SEQ ID NO: 69092 - DNA, 20 bp, synthetic construct
  misc_feature 1..20: note = Description of Artificial Sequence: Synthetic oligonucleotide
  misc_feature 1..20: note = Target: SCN10A; (+) strand; PAM type: YTN; PAM sequence: TTT
  source 1..20: mol_type = other DNA
atgtttcctatactccaggc

SEQ ID NO: 69093 - DNA, 20 bp, synthetic construct
  misc_feature 1..20: note = Description of Artificial Sequence: Synthetic oligonucleotide
  misc_feature 1..20: note = Target: SCN10A; (+) strand; PAM type: YTN; PAM sequence: TTA
  source 1..20: mol_type = other DNA
tgtttcctatactccaggcc

SEQ ID NO: 69094 - DNA, 20 bp, synthetic construct
  misc_feature 1..20: note = Description of Artificial Sequence: Synthetic oligonucleotide
  misc_feature 1..20: note = Target: SCN10A; (+) strand; PAM type: YTN; PAM sequence: TTT
  source 1..20: mol_type = other DNA
cctatactccaggcctcagt

SEQ ID NO: 69095 - DNA, 20 bp, synthetic construct
  misc_feature 1..20: note = Description of Artificial Sequence: Synthetic oligonucleotide
  misc_feature 1..20: note = Target: SCN10A; (+) strand; PAM type: YTN; PAM sequence: TTC
  source 1..20: mol_type = other DNA
ctatactccaggcctcagtt

SEQ ID NO: 69096 - DNA, 20 bp, synthetic construct
  misc_feature 1..20: note = Description of Artificial Sequence: Synthetic oligonucleotide
  misc_feature 1..20: note = Target: SCN10A; (+) strand; PAM type: YTN; PAM sequence: CTA
  source 1..20: mol_type = other DNA
tactccaggcctcagttcct

SEQ ID NO: 69097 - DNA, 20 bp, synthetic construct
  misc_feature 1..20: note = Description of Artificial Sequence: Synthetic oligonucleotide
  misc_feature 1..20: note = Target: SCN10A; (+) strand; PAM type: YTN; PAM sequence: CTC
  source 1..20: mol_type = other DNA
caggcctcagttcctttgtc

SEQ ID NO: 69098 - DNA, 20 bp, synthetic construct
  misc_feature 1..20: note = Description of Artificial Sequence: Synthetic oligonucleotide
  misc_feature 1..20: note = Target: SCN10A; (+) strand; PAM type: YTN; PAM sequence: CTC
  source 1..20: mol_type = other DNA
agttcctttgtcttgtaagt

SEQ ID NO: 69099 - DNA, 20 bp, synthetic construct
  misc_feature 1..20: note = Description of Artificial Sequence: Synthetic oligonucleotide
  misc_feature 1..20: note = Target: SCN10A; (+) strand; PAM type: YTN; PAM sequence: TTC
  source 1..20: mol_type = other DNA
ctttgtcttgtaagtgggga

SEQ ID NO: 69100 - DNA, 20 bp, synthetic construct
  misc_feature 1..20: note = Description of Artificial Sequence: Synthetic oligonucleotide
  misc_feature 1..20: note = Target: SCN10A; (+) strand; PAM type: YTN; PAM sequence: CTT
  source 1..20: mol_type = other DNA
tgtcttgtaagtggggacaa

SEQ ID NO: 69101 - DNA, 20 bp, synthetic construct
  misc_feature 1..20: note = Description of Artificial Sequence: Synthetic oligonucleotide
  misc_feature 1..20: note = Target: SCN10A; (+) strand; PAM type: YTN; PAM sequence: TTT
  source 1..20: mol_type = other DNA
gtcttgtaagtggggacaat

SEQ ID NO: 69102 - DNA, 20 bp, synthetic construct
  misc_feature 1..20: note = Description of Artificial Sequence: Synthetic oligonucleotide
  misc_feature 1..20: note = Target: SCN10A; (+) strand; PAM type: YTN; PAM sequence: TTG
  source 1..20: mol_type = other DNA
tcttgtaagtggggacaata

SEQ ID NO: 69103 - DNA, 20 bp, synthetic construct
  misc_feature 1..20: note = Description of Artificial Sequence: Synthetic oligonucleotide
  misc_feature 1..20: note = Target: SCN10A; (+) strand; PAM type: YTN; PAM sequence: CTT
  source 1..20: mol_type = other DNA
gtaagtggggacaatagtct

SEQ ID NO: 69104 - DNA, 20 bp, synthetic construct
  misc_feature 1..20: note = Description of Artificial Sequence: Synthetic oligonucleotide
  misc_feature 1..20: note = Target: SCN10A; (+) strand; PAM type: YTN; PAM sequence: TTG
  source 1..20: mol_type = other DNA
taagtggggacaatagtctt

SEQ ID NO: 69105 - DNA, 20 bp, synthetic construct
  misc_feature 1..20: note = Description of Artificial Sequence: Synthetic oligonucleotide
  misc_feature 1..20: note = Target: SCN10A; (+) strand; PAM type: YTN; PAM sequence: CTT
  source 1..20: mol_type = other DNA
tgccctggaaccttacaggg

SEQ ID NO: 69106 - DNA, 20 bp, synthetic construct
  misc_feature 1..20: note = Description of Artificial Sequence: Synthetic oligonucleotide
  misc_feature 1..20: note = Target: SCN10A; (+) strand; PAM type: YTN; PAM sequence: TTT
  source 1..20: mol_type = other DNA
gccctggaaccttacagggt

SEQ ID NO: 69107 - DNA, 20 bp, synthetic construct
  misc_feature 1..20: note = Description of Artificial Sequence: Synthetic oligonucleotide
  misc_feature 1..20: note = Target: SCN10A; (+) strand; PAM type: YTN; PAM sequence: TTG
  source 1..20: mol_type = other DNA
ccctggaaccttacagggtt

SEQ ID NO: 69108 - DNA, 20 bp, synthetic construct
  misc_feature 1..20: note = Description of Artificial Sequence: Synthetic oligonucleotide
  misc_feature 1..20: note = Target: SCN10A; (+) strand; PAM type: YTN; PAM sequence: CTG
  source 1..20: mol_type = other DNA
gaaccttacagggttcttgt

SEQ ID NO: 69109 - DNA, 20 bp, synthetic construct
  misc_feature 1..20: note = Description of Artificial Sequence: Synthetic oligonucleotide
  misc_feature 1..20: note = Target: SCN10A; (+) strand; PAM type: YTN; PAM sequence: CTT
  source 1..20: mol_type = other DNA
acagggttcttgtgaaaatt

SEQ ID NO: 69110 - DNA, 20 bp, synthetic construct
  misc_feature 1..20: note = Description of Artificial Sequence: Synthetic oligonucleotide
  misc_feature 1..20: note = Target: SCN10A; (+) strand; PAM type: YTN; PAM sequence: TTA
  source 1..20: mol_type = other DNA
cagggttcttgtgaaaatta

SEQ ID NO: 69111 - DNA, 20 bp, synthetic construct
  misc_feature 1..20: note = Description of Artificial Sequence: Synthetic oligonucleotide
  misc_feature 1..20: note = Target: SCN10A; (+) strand; PAM type: YTN; PAM sequence: TTC
  source 1..20: mol_type = other DNA
ttgtgaaaattagagaaggg

SEQ ID NO: 69112 - DNA, 20 bp, synthetic construct
  misc_feature 1..20: note = Description of Artificial Sequence: Synthetic oligonucleotide
  misc_feature 1..20: note = Target: SCN10A; (+) strand; PAM type: YTN; PAM sequence: CTT
  source 1..20: mol_type = other DNA
gtgaaaattagagaagggag

SEQ ID NO: 69113 - DNA, 20 bp, synthetic construct
  misc_feature 1..20: note = Description of Artificial Sequence: Synthetic oligonucleotide
  misc_feature 1..20: note = Target: SCN10A; (+) strand; PAM type: YTN; PAM sequence: TTG
  source 1..20: mol_type = other DNA
tgaaaattagagaagggagt

SEQ ID NO: 69114 - DNA, 20 bp, synthetic construct
  misc_feature 1..20: note = Description of Artificial Sequence: Synthetic oligonucleotide
  misc_feature 1..20: note = Target: SCN10A; (+) strand; PAM type: YTN; PAM sequence: TTA
  source 1..20: mol_type = other DNA
gagaagggagttaggctgtg

SEQ ID NO: 69115 - DNA, 20 bp, synthetic construct
  misc_feature 1..20: note = Description of Artificial Sequence: Synthetic oligonucleotide
  misc_feature 1..20: note = Target: SCN10A; (+) strand; PAM type: YTN; PAM sequence: TTA
  source 1..20: mol_type = other DNA
ggctgtgaaaaccaacatat

SEQ ID NO: 69116 - DNA, 20 bp, synthetic construct
  misc_feature 1..20: note = Description of Artificial Sequence: Synthetic oligonucleotide
  misc_feature 1..20: note = Target: SCN10A; (+) strand; PAM type: YTN; PAM sequence: CTG
  source 1..20: mol_type = other DNA
tgaaaaccaacatatgctct

SEQ ID NO: 69117 - DNA, 20 bp, synthetic construct
  misc_feature 1..20: note = Description of Artificial Sequence: Synthetic oligonucleotide
  misc_feature 1..20: note = Target: SCN10A; (+) strand; PAM type: YTN; PAM sequence: CTC
  source 1..20: mol_type = other DNA
tgtgaataaatgctcacctg

SEQ ID NO: 69118 - DNA, 20 bp, synthetic construct
  misc_feature 1..20: note = Description of Artificial Sequence: Synthetic oligonucleotide
  misc_feature 1..20: note = Target: SCN10A; (+) strand; PAM type: YTN; PAM sequence: CTG
  source 1..20: mol_type = other DNA
tgaataaatgctcacctggg

SEQ ID NO: 69119 - DNA, 20 bp, synthetic construct
  misc_feature 1..20: note = Description of Artificial Sequence: Synthetic oligonucleotide
  misc_feature 1..20: note = Target: SCN10A; (+) strand; PAM type: YTN; PAM sequence: CTC
  source 1..20: mol_type = other DNA
acctgggatcacagaaactg

SEQ ID NO: 69120 - DNA, 20 bp, synthetic construct
  misc_feature 1..20: note = Description of Artificial Sequence: Synthetic oligonucleotide
  misc_feature 1..20: note = Target: SCN10A; (+) strand; PAM type: YTN; PAM sequence: CTG
  source 1..20: mol_type = other DNA
ggatcacagaaactgttttt

SEQ ID NO: 69121 - DNA, 20 bp, synthetic construct
  misc_feature 1..20: note = Description of Artificial Sequence: Synthetic oligonucleotide
  misc_feature 1..20: note = Target: SCN10A; (+) strand; PAM type: YTN; PAM sequence: CTG
  source 1..20: mol_type = other DNA
tttttaatgctctaagaact

SEQ ID NO: 69122 - DNA, 20 bp, synthetic construct
  misc_feature 1..20: note = Description of Artificial Sequence: Synthetic oligonucleotide
  misc_feature 1..20: note = Target: SCN10A; (+) strand; PAM type: YTN; PAM sequence: TTT
  source 1..20: mol_type = other DNA
ttaatgctctaagaactctg

SEQ ID NO: 69123 - DNA, 20 bp, synthetic construct
  misc_feature 1..20: note = Description of Artificial Sequence: Synthetic oligonucleotide
  misc_feature 1..20: note = Target: SCN10A; (+) strand; PAM type: YTN; PAM sequence: TTT
  source 1..20: mol_type = other DNA
taatgctctaagaactctga

SEQ ID NO: 69124 - DNA, 20 bp, synthetic construct
  misc_feature 1..20: note = Description of Artificial Sequence: Synthetic oligonucleotide
  misc_feature 1..20: note = Target: SCN10A; (+) strand; PAM type: YTN; PAM sequence: TTT
  source 1..20: mol_type = other DNA
aatgctctaagaactctgaa

SEQ ID NO: 69125 - DNA, 20 bp, synthetic construct
  misc_feature 1..20: note = Description of Artificial Sequence: Synthetic oligonucleotide
  misc_feature 1..20: note = Target: SCN10A; (+) strand; PAM type: YTN; PAM sequence: TTA
  source 1..20: mol_type = other DNA
atgctctaagaactctgaat

SEQ ID NO: 69126 - DNA, 20 bp, synthetic construct
  misc_feature 1..20: note = Description of Artificial Sequence: Synthetic oligonucleotide
  misc_feature 1..20: note = Target: SCN10A; (+) strand; PAM type: YTN; PAM sequence: CTC
  source 1..20: mol_type = other DNA
taagaactctgaatgtccgc

SEQ ID NO: 69127 - DNA, 20 bp, synthetic construct
  misc_feature 1..20: note = Description of Artificial Sequence: Synthetic oligonucleotide
  misc_feature 1..20: note = Target: SCN10A; (+) strand; PAM type: YTN; PAM sequence: CTA
  source 1..20: mol_type = other DNA
agaactctgaatgtccgcag

SEQ ID NO: 69128 - DNA, 20 bp, synthetic construct
  misc_feature 1..20: note = Description of Artificial Sequence: Synthetic oligonucleotide
  misc_feature 1..20: note = Target: SCN10A; (+) strand; PAM type: YTN; PAM sequence: CTC
  source 1..20: mol_type = other DNA
tgaatgtccgcaggcctgag

SEQ ID NO: 69129 - DNA, 20 bp, synthetic construct
  misc_feature 1..20: note = Description of Artificial Sequence: Synthetic oligonucleotide
  misc_feature 1..20: note = Target: SCN10A; (+) strand; PAM type: YTN; PAM sequence: CTG
  source 1..20: mol_type = other DNA
aatgtccgcaggcctgagat

SEQ ID NO: 69130 - DNA, 20 bp, synthetic construct
  misc_feature 1..20: note = Description of Artificial Sequence: Synthetic oligonucleotide
  misc_feature 1..20: note = Target: SCN10A; (+) strand; PAM type: YTN; PAM sequence: CTG
  source 1..20: mol_type = other DNA
agatcccacggagatctatt

SEQ ID NO: 69131 - DNA, 20 bp, synthetic construct
  misc_feature 1..20: note = Description of Artificial Sequence: Synthetic oligonucleotide
  misc_feature 1..20: note = Target: SCN10A; (+) strand; PAM type: YTN; PAM sequence: CTA
  source 1..20: mol_type = other DNA
ttgctgtgccaacatatctg

SEQ ID NO: 69132 - DNA, 20 bp, synthetic construct
  misc_feature 1..20: note = Description of Artificial Sequence: Synthetic oligonucleotide
  misc_feature 1..20: note = Target: SCN10A; (+) strand; PAM type: YTN; PAM sequence: TTG
  source 1..20: mol_type = other DNA
ctgtgccaacatatctgtag

SEQ ID NO: 69133 - DNA, 20 bp, synthetic construct
  misc_feature 1..20: note = Description of Artificial Sequence: Synthetic oligonucleotide
  misc_feature 1..20: note = Target: SCN10A; (+) strand; PAM type: YTN; PAM sequence: CTG
  source 1..20: mol_type = other DNA
tgccaacatatctgtaggac

SEQ ID NO: 69134 - DNA, 20 bp, synthetic construct
  misc_feature 1..20: note = Description of Artificial Sequence: Synthetic oligonucleotide
  misc_feature 1..20: note = Target: SCN10A; (+) strand; PAM type: YTN; PAM sequence: CTG
  source 1..20: mol_type = other DNA
taggaccagaagttagtcag

SEQ ID NO: 69135 - DNA, 20 bp, synthetic construct
  misc_feature 1..20: note = Description of Artificial Sequence: Synthetic oligonucleotide
  misc_feature 1..20: note = Target: SCN10A; (+) strand; PAM type: YTN; PAM sequence: TTA
  source 1..20: mol_type = other DNA
gtcagcatctctgcaagcaa

SEQ ID NO: 69136 - DNA, 20 bp, synthetic construct
  misc_feature 1..20: note = Description of Artificial Sequence: Synthetic oligonucleotide
  misc_feature 1..20: note = Target: SCN10A; (+) strand; PAM type: YTN; PAM sequence: CTC
  source 1..20: mol_type = other DNA
tgcaagcaagggtcctgggg

SEQ ID NO: 69137 - DNA, 20 bp, synthetic construct
  misc_feature 1..20: note = Description of Artificial Sequence: Synthetic oligonucleotide
  misc_feature 1..20: note = Target: SCN10A; (+) strand; PAM type: YTN; PAM sequence: CTG
  source 1..20: mol_type = other DNA
caagcaagggtcctggggat

SEQ ID NO: 69138 - DNA, 20 bp, synthetic construct
  misc_feature 1..20: note = Description of Artificial Sequence: Synthetic oligonucleotide
  misc_feature 1..20: note = Target: SCN10A; (+) strand; PAM type: YTN; PAM sequence: CTG
  source 1..20: mol_type = other DNA
gggatgcatgcagcataaat

SEQ ID NO: 69139 - DNA, 20 bp, synthetic construct
  misc_feature 1..20: note = Description of Artificial Sequence: Synthetic oligonucleotide
  misc_feature 1..20: note = Target: SCN10A; (+) strand; PAM type: YTN; PAM sequence: CTG
  source 1..20: mol_type = other DNA
gggtatcattagcctagaaa

SEQ ID NO: 69140 - DNA, 20 bp, synthetic construct
  misc_feature 1..20: note = Description of Artificial Sequence: Synthetic oligonucleotide
  misc_feature 1..20: note = Target: SCN10A; (+) strand; PAM type: YTN; PAM sequence: TTA
  source 1..20: mol_type = other DNA
gcctagaaaggatgcagaat

SEQ ID NO: 69141 - DNA, 20 bp, synthetic construct
  misc_feature 1..20: note = Description of Artificial Sequence: Synthetic oligonucleotide
  misc_feature 1..20: note = Target: SCN10A; (+) strand; PAM type: YTN; PAM sequence: CTA
  source 1..20: mol_type = other DNA
gaaaggatgcagaatggaca

SEQ ID NO: 69142 - DNA, 20 bp, synthetic construct
  misc_feature 1..20: note = Description of Artificial Sequence: Synthetic oligonucleotide
  misc_feature 1..20: note = Target: SCN10A; (+) strand; PAM type: YTN; PAM sequence: CTT
  source 1..20: mol_type = other DNA
agaatctagtgacactgcca

SEQ ID NO: 69143 - DNA, 20 bp, synthetic construct
  misc_feature 1..20: note = Description of Artificial Sequence: Synthetic oligonucleotide
  misc_feature 1..20: note = Target: SCN10A; (+) strand; PAM type: YTN; PAM sequence: TTA
  source 1..20: mol_type = other DNA
gaatctagtgacactgccat

SEQ ID NO: 69144 - DNA, 20 bp, synthetic construct
  misc_feature 1..20: note = Description of Artificial Sequence: Synthetic oligonucleotide
  misc_feature 1..20: note = Target: SCN10A; (+) strand; PAM type: YTN; PAM sequence: CTA
  source 1..20: mol_type = other DNA
gtgacactgccatctataga

SEQ ID NO: 69145 - DNA, 20 bp, synthetic construct
  misc_feature 1..20: note = Description of Artificial Sequence: Synthetic oligonucleotide
  misc_feature 1..20: note = Target: SCN10A; (+) strand; PAM type: YTN; PAM sequence: CTG
  source 1..20: mol_type = other DNA
ccatctatagactgacactg

SEQ ID NO: 69146 - DNA, 20 bp, synthetic construct
  misc_feature 1..20: note = Description of Artificial Sequence: Synthetic oligonucleotide
  misc_feature 1..20: note = Target: SCN10A; (+) strand; PAM type: YTN; PAM sequence: CTA
  source 1..20: mol_type = other DNA
tagactgacactgacactga

SEQ ID NO: 69147 - DNA, 20 bp, synthetic construct
  misc_feature 1..20: note = Description of Artificial Sequence: Synthetic oligonucleotide
  misc_feature 1..20: note = Target: SCN10A; (+) strand; PAM type: YTN; PAM sequence: CTG
  source 1..20: mol_type = other DNA
acactgacactgatttcatt

SEQ ID NO: 69148 - DNA, 20 bp, synthetic construct
  misc_feature 1..20: note = Description of Artificial Sequence: Synthetic oligonucleotide
  misc_feature 1..20: note = Target: SCN10A; (+) strand; PAM type: YTN; PAM sequence: CTG
  source 1..20: mol_type = other DNA
acactgatttcattattgca

SEQ ID NO: 69149 - DNA, 20 bp, synthetic construct
  misc_feature 1..20: note = Description of Artificial Sequence: Synthetic oligonucleotide
  misc_feature 1..20: note = Target: SCN10A; (+) strand; PAM type: YTN; PAM sequence: CTG
  source 1..20: mol_type = other DNA
atttcattattgcaacatct

SEQ ID NO: 69150 - DNA, 20 bp, synthetic construct
  misc_feature 1..20: note = Description of Artificial Sequence: Synthetic oligonucleotide
  misc_feature 1..20: note = Target: SCN10A; (+) strand; PAM type: YTN; PAM sequence: TTT
  source 1..20: mol_type = other DNA
cattattgcaacatctttca

SEQ ID NO: 69151 - DNA, 20 bp, synthetic construct
  misc_feature 1..20: note = Description of Artificial Sequence: Synthetic oligonucleotide
  misc_feature 1..20: note = Target: SCN10A; (+) strand; PAM type: YTN; PAM sequence: TTC
  source 1..20: mol_type = other DNA
attattgcaacatctttcag

SEQ ID NO: 69152 - DNA, 20 bp, synthetic construct
  misc_feature 1..20: note = Description of Artificial Sequence: Synthetic oligonucleotide
  misc_feature 1..20: note = Target: SCN10A; (+) strand; PAM type: YTN; PAM sequence: TTA
  source 1..20: mol_type = other DNA
ttgcaacatctttcagagtg

SEQ ID NO: 69153 - DNA, 20 bp, synthetic construct
  misc_feature 1..20: note = Description of Artificial Sequence: Synthetic oligonucleotide
  misc_feature 1..20: note = Target: SCN10A; (+) strand; PAM type: YTN; PAM sequence: TTG
  source 1..20: mol_type = other DNA
caacatctttcagagtggac

SEQ ID NO: 69154 - DNA, 20 bp, synthetic construct
  misc_feature 1..20: note = Description of Artificial Sequence: Synthetic oligonucleotide
  misc_feature 1..20: note = Target: SCN10A; (+) strand; PAM type: YTN; PAM sequence: CTT
  source 1..20: mol_type = other DNA
tcagagtggaccctttgaga

SEQ ID NO: 69155 - DNA, 20 bp, synthetic construct
  misc_feature 1..20: note = Description of Artificial Sequence: Synthetic oligonucleotide
  misc_feature 1..20: note = Target: SCN10A; (+) strand; PAM type: YTN; PAM sequence: TTT
  source 1..20: mol_type = other DNA
cagagtggaccctttgagaa

SEQ ID NO: 69156 - DNA, 20 bp, synthetic construct
  misc_feature 1..20: note = Description of Artificial Sequence: Synthetic oligonucleotide
  misc_feature 1..20: note = Target: SCN10A; (+) strand; PAM type: YTN; PAM sequence: TTC
  source 1..20: mol_type = other DNA
agagtggaccctttgagaag

SEQ ID NO: 69157 - DNA, 20 bp, synthetic construct
  misc_feature 1..20: note = Description of Artificial Sequence: Synthetic oligonucleotide
  misc_feature 1..20: note = Target: SCN10A; (+) strand; PAM type: YTN; PAM sequence: CTT
  source 1..20: mol_type = other DNA
tgagaagatgcattgtgatc

SEQ ID NO: 69158 - DNA, 20 bp, synthetic construct
  misc_feature 1..20: note = Description of Artificial Sequence: Synthetic oligonucleotide
  misc_feature 1..20: note = Target: SCN10A; (+) strand; PAM type: YTN; PAM sequence: TTT
  source 1..20: mol_type = other DNA
gagaagatgcattgtgatct

SEQ ID NO: 69159 - DNA, 20 bp, synthetic construct
  misc_feature 1..20: note = Description of Artificial Sequence: Synthetic oligonucleotide
  misc_feature 1..20: note = Target: SCN10A; (+) strand; PAM type: YTN; PAM sequence: TTG
  source 1..20: mol_type = other DNA
agaagatgcattgtgatcta

SEQ ID NO: 69160 - DNA, 20 bp, synthetic construct
  misc_feature 1..20: note = Description of Artificial Sequence: Synthetic oligonucleotide
  misc_feature 1..20: note = Target: SCN10A; (+) strand; PAM type: YTN; PAM sequence: TTG
  source 1..20: mol_type = other DNA
tgatctaggcaacactgcat

SEQ ID NO: 69161 - DNA, 20 bp, synthetic construct
  misc_feature 1..20: note = Description of Artificial Sequence: Synthetic oligonucleotide
  misc_feature 1..20: note = Target: SCN10A; (+) strand; PAM type: YTN; PAM sequence: CTA
  source 1..20: mol_type = other DNA
ggcaacactgcatgtggacg

SEQ ID NO: 69162 - DNA, 20 bp, synthetic construct
  misc_feature 1..20: note = Description of Artificial Sequence: Synthetic oligonucleotide
  misc_feature 1..20: note = Target: SCN10A; (+) strand; PAM type: YTN; PAM sequence: CTG
  source 1..20: mol_type = other DNA
catgtggacggatcttcaaa

SEQ ID NO: 69163 - DNA, 20 bp, synthetic construct
  misc_feature 1..20: note = Description of Artificial Sequence: Synthetic oligonucleotide
  misc_feature 1..20: note = Target: SCN10A; (+) strand; PAM type: YTN; PAM sequence: CTT
  source 1..20: mol_type = other DNA
caaacacaggagtttgacca

SEQ ID NO: 69164 - DNA, 20 bp, synthetic construct
  misc_feature 1..20: note = Description of Artificial Sequence: Synthetic oligonucleotide
  misc_feature 1..20: note = Target: SCN10A; (+) strand; PAM type: YTN; PAM sequence: TTC
  source 1..20: mol_type = other DNA
aaacacaggagtttgaccaa

SEQ ID NO: 69165 - DNA, 20 bp, synthetic construct
  misc_feature 1..20: note = Description of Artificial Sequence: Synthetic oligonucleotide
  misc_feature 1..20: note = Target: SCN10A; (+) strand; PAM type: YTN; PAM sequence: TTT
  source 1..20: mol_type = other DNA
gaccaaccagtctcctcaga

SEQ ID NO: 69166 - DNA, 20 bp, synthetic construct
  misc_feature 1..20: note = Description of Artificial Sequence: Synthetic oligonucleotide
  misc_feature 1..20: note = Target: SCN10A; (+) strand; PAM type: YTN; PAM sequence: TTG
  source 1..20: mol_type = other DNA
accaaccagtctcctcagac

SEQ ID NO: 69167 - DNA, 20 bp, synthetic construct
  misc_feature 1..20: note = Description of Artificial Sequence: Synthetic oligonucleotide
  misc_feature 1..20: note = Target: SCN10A; (+) strand; PAM type: YTN; PAM sequence: CTC
  source 1..20: mol_type = other DNA
ctcagacactgatttctcag

SEQ ID NO: 69168 - DNA, 20 bp, synthetic construct
  misc_feature 1..20: note = Description of Artificial Sequence: Synthetic oligonucleotide
  misc_feature 1..20: note = Target: SCN10A; (+) strand; PAM type: YTN; PAM sequence: CTC
  source 1..20: mol_type = other DNA
agacactgatttctcagaag

SEQ ID NO: 69169 - DNA, 20 bp, synthetic construct
  misc_feature 1..20: note = Description of Artificial Sequence: Synthetic oligonucleotide
  misc_feature 1..20: note = Target: SCN10A; (+) strand; PAM type: YTN; PAM sequence: CTG
  source 1..20: mol_type = other DNA
atttctcagaaggagaccgc

SEQ ID NO: 69170 - DNA, 20 bp, synthetic construct
  misc_feature 1..20: note = Description of Artificial Sequence: Synthetic oligonucleotide
  misc_feature 1..20: note = Target: SCN10A; (+) strand; PAM type: YTN; PAM sequence: TTT
  source 1..20: mol_type = other DNA
ctcagaaggagaccgccatg

SEQ ID NO: 69171 - DNA, 20 bp, synthetic construct
  misc_feature 1..20: note = Description of Artificial Sequence: Synthetic oligonucleotide
  misc_feature 1..20: note = Target: SCN10A; (+) strand; PAM type: YTN; PAM sequence: TTC
  source 1..20: mol_type = other DNA
tcagaaggagaccgccatgt

SEQ ID NO: 69172 - DNA, 20 bp, synthetic construct
  misc_feature 1..20: note = Description of Artificial Sequence: Synthetic oligonucleotide
  misc_feature 1..20: note = Target: SCN10A; (+) strand; PAM type: YTN; PAM sequence: CTC
  source 1..20: mol_type = other DNA
agaaggagaccgccatgtca

SEQ ID NO: 69173 - DNA, 20 bp, synthetic construct
  misc_feature 1..20: note = Description of Artificial Sequence: Synthetic oligonucleotide
  misc_feature 1..20: note = Target: SCN10A; (+) strand; PAM type: YTN; PAM sequence: CTG
  source 1..20: mol_type = other DNA
ggccttttctgatccactgt

SEQ ID NO: 69174 - DNA, 20 bp, synthetic construct
  misc_feature 1..20: note = Description of Artificial Sequence: Synthetic oligonucleotide
  misc_feature 1..20: note = Target: SCN10A; (+) strand; PAM type: YTN; PAM sequence: CTT
  source 1..20: mol_type = other DNA
ttctgatccactgtgacagg

SEQ ID NO: 69175 - DNA, 20 bp, synthetic construct
  misc_feature 1..20: note = Description of Artificial Sequence: Synthetic oligonucleotide
  misc_feature 1..20: note = Target: SCN10A; (+) strand; PAM type: YTN; PAM sequence: TTT
  source 1..20: mol_type = other DNA
tctgatccactgtgacaggc

SEQ ID NO: 69176 - DNA, 20 bp, synthetic construct
  misc_feature 1..20: note = Description of Artificial Sequence: Synthetic oligonucleotide
  misc_feature 1..20: note = Target: SCN10A; (+) strand; PAM type: YTN; PAM sequence: TTT
  source 1..20: mol_type = other DNA
ctgatccactgtgacaggct

SEQ ID NO: 69177 - DNA, 20 bp, synthetic construct
  misc_feature 1..20: note = Description of Artificial Sequence: Synthetic oligonucleotide
  misc_feature 1..20: note = Target: SCN10A; (+) strand; PAM type: YTN; PAM sequence: TTC
  source 1..20: mol_type = other DNA
tgatccactgtgacaggcta

SEQ ID NO: 69178 - DNA, 20 bp, synthetic construct
  misc_feature 1..20: note = Description of Artificial Sequence: Synthetic oligonucleotide
  misc_feature 1..20: note = Target: SCN10A; (+) strand; PAM type: YTN; PAM sequence: CTG
  source 1..20: mol_type = other DNA
atccactgtgacaggctaac

SEQ ID NO: 69179 - DNA, 20 bp, synthetic construct
  misc_feature 1..20: note = Description of Artificial Sequence: Synthetic oligonucleotide
  misc_feature 1..20: note = Target: SCN10A; (+) strand; PAM type: YTN; PAM sequence: CTG
  source 1..20: mol_type = other DNA
tgacaggctaactgttatct

SEQ ID NO: 69180 - DNA, 20 bp, synthetic construct
  misc_feature 1..20: note = Description of Artificial Sequence: Synthetic oligonucleotide
  misc_feature 1..20: note = Target: SCN10A; (+) strand; PAM type: YTN; PAM sequence: CTA
  source 1..20: mol_type = other DNA
actgttatctcagatttgag

SEQ ID NO: 69181 - DNA, 20 bp, synthetic construct
  misc_feature 1..20: note = Description of Artificial Sequence: Synthetic oligonucleotide
  misc_feature 1..20: note = Target: SCN10A; (+) strand; PAM type: YTN; PAM sequence: CTG
  source 1..20: mol_type = other DNA
ttatctcagatttgaggtct

SEQ ID NO: 69182 - DNA, 20 bp, synthetic construct
  misc_feature 1..20: note = Description of Artificial Sequence: Synthetic oligonucleotide
  misc_feature 1..20: note = Target: SCN10A; (+) strand; PAM type: YTN; PAM sequence: TTA
  source 1..20: mol_type = other DNA
tctcagatttgaggtctctg

SEQ ID NO: 69183 - DNA, 20 bp, synthetic construct
  misc_feature 1..20: note = Description of Artificial Sequence: Synthetic oligonucleotide
  misc_feature 1..20: note = Target: SCN10A; (+) strand; PAM type: YTN; PAM sequence: CTC
  source 1..20: mol_type = other DNA
agatttgaggtctctgacat

SEQ ID NO: 69184 - DNA, 20 bp, synthetic construct
  misc_feature 1..20: note = Description of Artificial Sequence: Synthetic oligonucleotide
  misc_feature 1..20: note = Target: SCN10A; (+) strand; PAM type: YTN; PAM sequence: TTT
  source 1..20: mol_type = other DNA
gaggtctctgacatctcctc

SEQ ID NO: 69185 - DNA, 20 bp, synthetic construct
  misc_feature 1..20: note = Description of Artificial Sequence: Synthetic oligonucleotide
  misc_feature 1..20: note = Target: SCN10A; (+) strand; PAM type: YTN; PAM sequence: TTG
  source 1..20: mol_type = other DNA
aggtctctgacatctcctca

SEQ ID NO: 69186 - DNA, 20 bp, synthetic construct
  misc_feature 1..20: note = Description of Artificial Sequence: Synthetic oligonucleotide
  misc_feature 1..20: note = Target: SCN10A; (+) strand; PAM type: YTN; PAM sequence: CTC
  source 1..20: mol_type = other DNA
tgacatctcctcatgggcat

SEQ ID NO: 69187 - DNA, 20 bp, synthetic construct
  misc_feature 1..20: note = Description of Artificial Sequence: Synthetic oligonucleotide
  misc_feature 1..20: note = Target: SCN10A; (+) strand; PAM type: YTN; PAM sequence: CTG
  source 1..20: mol_type = other DNA
acatctcctcatgggcatgg

SEQ ID NO: 69188 - DNA, 20 bp, synthetic construct
  misc_feature 1..20: note = Description of Artificial Sequence: Synthetic oligonucleotide
  misc_feature 1..20: note = Target: SCN10A; (+) strand; PAM type: YTN; PAM sequence: CTC
  source 1..20: mol_type = other DNA
ctcatgggcatgggactaat

SEQ ID NO: 69189 - DNA, 20 bp, synthetic construct
  misc_feature 1..20: note = Description of Artificial Sequence: Synthetic oligonucleotide
  misc_feature 1..20: note = Target: SCN10A; (+) strand; PAM type: YTN; PAM sequence: CTC
  source 1..20: mol_type = other DNA
atgggcatgggactaatctt

SEQ ID NO: 69190 - DNA, 20 bp, synthetic construct
  misc_feature 1..20: note = Description of Artificial Sequence: Synthetic oligonucleotide
  misc_feature 1..20: note = Target: SCN10A; (+) strand; PAM type: YTN; PAM sequence: CTA
  source 1..20: mol_type = other DNA
atcttggaaagcaacccccg

SEQ ID NO: 69191 - DNA, 20 bp, synthetic construct
  misc_feature 1..20: note = Description of Artificial Sequence: Synthetic oligonucleotide
  misc_feature 1..20: note = Target: SCN10A; (+) strand; PAM type: YTN; PAM sequence: CTT
  source 1..20: mol_type = other DNA
ggaaagcaacccccgaagcg

SEQ ID NO: 69192 - DNA, 20 bp, synthetic construct
  misc_feature 1..20: note = Description of Artificial Sequence: Synthetic oligonucleotide
  misc_feature 1..20: note = Target: SCN10A; (+) strand; PAM type: YTN; PAM sequence: TTG
  source 1..20: mol_type = other DNA
gaaagcaacccccgaagcgg

SEQ ID NO: 69193 - DNA, 20 bp, synthetic construct
  misc_feature 1..20: note = Description of Artificial Sequence: Synthetic oligonucleotide
  misc_feature 1..20: note = Target: SCN10A; (+) strand; PAM type: YTN; PAM sequence: CTC
  source 1..20: mol_type = other DNA
tgtggcaagaaccccaggcc

SEQ ID NO: 69194 - DNA, 20 bp, synthetic construct
  misc_feature 1..20: note = Description of Artificial Sequence: Synthetic oligonucleotide
  misc_feature 1..20: note = Target: SCN10A; (+) strand; PAM type: YTN; PAM sequence: CTG
  source 1..20: mol_type = other DNA
tggcaagaaccccaggccat

SEQ ID NO: 69195 - DNA, 20 bp, synthetic construct
  misc_feature 1..20: note = Description of Artificial Sequence: Synthetic oligonucleotide
  misc_feature 1..20: note = Target: SCN10A; (+) strand; PAM type: YTN; PAM sequence: TTC
  source 1..20: mol_type = other DNA
caaatgaggaagctgaactg

SEQ ID NO: 69196 - DNA, 20 bp, synthetic construct
  misc_feature 1..20: note = Description of Artificial Sequence: Synthetic oligonucleotide
  misc_feature 1..20: note = Target: SCN10A; (+) strand; PAM type: YTN; PAM sequence: CTG
  source 1..20: mol_type = other DNA
aactgagatgaagaaccttc

SEQ ID NO: 69197 - DNA, 20 bp, synthetic construct
  misc_feature 1..20: note = Description of Artificial Sequence: Synthetic oligonucleotide
  misc_feature 1..20: note = Target: SCN10A; (+) strand; PAM type: YTN; PAM sequence: CTG
  source 1..20: mol_type = other DNA
agatgaagaaccttcttcag

SEQ ID NO: 69198 - DNA, 20 bp, synthetic construct
  misc_feature 1..20: note = Description of Artificial Sequence: Synthetic oligonucleotide
  misc_feature 1..20: note = Target: SCN10A; (+) strand; PAM type: YTN; PAM sequence: CTT
  source 1..20: mol_type = other DNA
cttcagagtgtgagcctgga

SEQ ID NO: 69199 - DNA, 20 bp, synthetic construct
  misc_feature 1..20: note = Description of Artificial Sequence: Synthetic oligonucleotide
  misc_feature 1..20: note = Target: SCN10A; (+) strand; PAM type: YTN; PAM sequence: TTC
  source 1..20: mol_type = other DNA
ttcagagtgtgagcctggat

SEQ ID NO: 69200 - DNA, 20 bp, synthetic construct
  misc_feature 1..20: note = Description of Artificial Sequence: Synthetic oligonucleotide
  misc_feature 1..20: note = Target: SCN10A; (+) strand; PAM type: YTN; PAM sequence: CTT
  source 1..20: mol_type = other DNA
cagagtgtgagcctggatac

SEQ ID NO: 69201 - DNA, 20 bp, synthetic construct
  misc_feature 1..20: note = Description of Artificial Sequence: Synthetic oligonucleotide
  misc_feature 1..20: note = Target: SCN10A; (+) strand; PAM type: YTN; PAM sequence: TTC
  source 1..20: mol_type = other DNA
agagtgtgagcctggataca

SEQ ID NO: 69202 - DNA, 20 bp, synthetic construct
  misc_feature 1..20: note = Description of Artificial Sequence: Synthetic oligonucleotide
  misc_feature 1..20: note = Target: SCN10A; (+) strand; PAM type: YTN; PAM sequence: CTG
  source 1..20: mol_type = other DNA
gatacacccataagccccac

SEQ ID NO: 69203 - DNA, 20 bp, synthetic construct
  misc_feature 1..20: note = Description of Artificial Sequence: Synthetic oligonucleotide
  misc_feature 1..20: note = Target: SCN10A; (+) strand; PAM type: YTN; PAM sequence: CTT
  source 1..20: mol_type = other DNA
tttattttattttatttcaa

SEQ ID NO: 69204 - DNA, 20 bp, synthetic construct
  misc_feature 1..20: note = Description of Artificial Sequence: Synthetic oligonucleotide
  misc_feature 1..20: note = Target: SCN10A; (+) strand; PAM type: YTN; PAM sequence: TTT
  source 1..20: mol_type = other DNA
ttattttattttatttcaat

SEQ ID NO: 69205 - DNA, 20 bp, synthetic construct
  misc_feature 1..20: note = Description of Artificial Sequence: Synthetic oligonucleotide
  misc_feature 1..20: note = Target: SCN10A; (+) strand; PAM type: YTN; PAM sequence: TTT
  source 1..20: mol_type = other DNA
tattttattttatttcaata

SEQ ID NO: 69206 - DNA, 20 bp, synthetic construct
  misc_feature 1..20: note = Description of Artificial Sequence: Synthetic oligonucleotide
  misc_feature 1..20: note = Target: SCN10A; (+) strand; PAM type: YTN; PAM sequence: TTT
  source 1..20: mol_type = other DNA
attttattttatttcaatag

SEQ ID NO: 69207 - DNA, 20 bp, synthetic construct
  misc_feature 1..20: note = Description of Artificial Sequence: Synthetic oligonucleotide
  misc_feature 1..20: note = Target: SCN10A; (+) strand; PAM type: YTN; PAM sequence: TTA
  source 1..20: mol_type = other DNA
ttttattttatttcaatagt

SEQ ID NO: 69208 - DNA, 20 bp, synthetic construct
  misc_feature 1..20: note = Description of Artificial Sequence: Synthetic oligonucleotide
  misc_feature 1..20: note = Target: SCN10A; (+) strand; PAM type: YTN; PAM sequence: TTT
  source 1..20: mol_type = other DNA
tattttatttcaatagtttt

SEQ ID NO: 69209 - DNA, 20 bp, synthetic construct
  misc_feature 1..20: note = Description of Artificial Sequence: Synthetic oligonucleotide
  misc_feature 1..20: note = Target: SCN10A; (+) strand; PAM type: YTN; PAM sequence: TTT
  source 1..20: mol_type = other DNA
attttatttcaatagttttg

SEQ ID NO: 69210 - DNA, 20 bp, synthetic construct
  misc_feature 1..20: note = Description of Artificial Sequence: Synthetic oligonucleotide
  misc_feature 1..20: note = Target: SCN10A; (+) strand; PAM type: YTN; PAM sequence: TTA
  source 1..20: mol_type = other DNA
ttttatttcaatagttttga

SEQ ID NO: 69211 - DNA, 20 bp, synthetic construct
  misc_feature 1..20: note = Description of Artificial Sequence: Synthetic oligonucleotide
  misc_feature 1..20: note = Target: SCN10A; (+) strand; PAM type: YTN; PAM sequence: TTT
  source 1..20: mol_type = other DNA
tatttcaatagttttgaggg

SEQ ID NO: 69212 - DNA, 20 bp, synthetic construct
  misc_feature 1..20: note = Description of Artificial Sequence: Synthetic oligonucleotide
  misc_feature 1..20: note = Target: SCN10A; (+) strand; PAM type: YTN; PAM sequence: TTT
  source 1..20: mol_type = other DNA
atttcaatagttttgaggga

SEQ ID NO: 69213 - DNA, 20 bp, synthetic construct
  misc_feature 1..20: note = Description of Artificial Sequence: Synthetic oligonucleotide
  misc_feature 1..20: note = Target: SCN10A; (+) strand; PAM type: YTN; PAM sequence: TTA
  source 1..20: mol_type = other DNA
tttcaatagttttgagggaa

SEQ ID NO: 69214 - DNA, 20 bp, synthetic construct
  misc_feature 1..20: note = Description of Artificial Sequence: Synthetic oligonucleotide
  misc_feature 1..20: note = Target: SCN10A; (+) strand; PAM type: YTN; PAM sequence: TTT
  source 1..20: mol_type = other DNA
caatagttttgagggaacag

SEQ ID NO: 69215 - DNA, 20 bp, synthetic construct
  misc_feature 1..20: note = Description of Artificial Sequence: Synthetic oligonucleotide
  misc_feature 1..20: note = Target: SCN10A; (+) strand; PAM type: YTN; PAM sequence: TTC
  source 1..20: mol_type = other DNA
aatagttttgagggaacagg

SEQ ID NO: 69216 - DNA, 20 bp, synthetic construct
  misc_feature 1..20: note = Description of Artificial Sequence: Synthetic oligonucleotide
  misc_feature 1..20: note = Target: SCN10A; (+) strand; PAM type: YTN; PAM sequence: TTT
  source 1..20: mol_type = other DNA
tgagggaacaggtggttttt

SEQ ID NO: 69217 - DNA, 20 bp, synthetic construct
  misc_feature 1..20: note = Description of Artificial Sequence: Synthetic oligonucleotide
  misc_feature 1..20: note = Target: SCN10A; (+) strand; PAM type: YTN; PAM sequence: TTT
  source 1..20: mol_type = other DNA
gagggaacaggtggtttttg

SEQ ID NO: 69218 - DNA, 20 bp, synthetic construct
  misc_feature 1..20: note = Description of Artificial Sequence: Synthetic oligonucleotide
  misc_feature 1..20: note = Target: SCN10A; (+) strand; PAM type: YTN; PAM sequence: TTG
  source 1..20: mol_type = other DNA
agggaacaggtggtttttgg

SEQ ID NO: 69219 - DNA, 20 bp, synthetic construct
  misc_feature 1..20: note = Description of Artificial Sequence: Synthetic oligonucleotide
  misc_feature 1..20: note = Target: SCN10A; (+) strand; PAM type: YTN; PAM sequence: TTT
  source 1..20: mol_type = other DNA
ttggttacatgaataagttc

SEQ ID NO: 69220 - DNA, 20 bp, synthetic construct
  misc_feature 1..20: note = Description of Artificial Sequence: Synthetic oligonucleotide
  misc_feature 1..20: note = Target: SCN10A; (+) strand; PAM type: YTN; PAM sequence: TTT
  source 1..20: mol_type = other DNA
tggttacatgaataagttct

SEQ ID NO: 69221 - DNA, 20 bp, synthetic construct
  misc_feature 1..20: note = Description of Artificial Sequence: Synthetic oligonucleotide
  misc_feature 1..20: note = Target: SCN10A; (+) strand; PAM type: YTN; PAM sequence: TTT
  source 1..20: mol_type = other DNA
ggttacatgaataagttctt

SEQ ID NO: 69222 - DNA, 20 bp, synthetic construct
  misc_feature 1..20: note = Description of Artificial Sequence: Synthetic oligonucleotide
  misc_feature 1..20: note = Target: SCN10A; (+) strand; PAM type: YTN; PAM sequence: TTG
  source 1..20: mol_type = other DNA
gttacatgaataagttcttt

SEQ ID NO: 69223 - DNA, 20 bp, synthetic construct
  misc_feature 1..20: note = Description of Artificial Sequence: Synthetic oligonucleotide
  misc_feature 1..20: note = Target: SCN10A; (+) strand; PAM type: YTN; PAM sequence: TTA
  source 1..20: mol_type = other DNA
catgaataagttctttattt

SEQ ID NO: 69224 - DNA, 20 bp, synthetic construct
  misc_feature 1..20: note = Description of Artificial Sequence: Synthetic oligonucleotide
  misc_feature 1..20: note = Target: SCN10A; (+) strand; PAM type: YTN; PAM sequence: TTC
  source 1..20: mol_type = other DNA
tttatttgtatttcaatagt

SEQ ID NO: 69225 - DNA, 20 bp, synthetic construct
  misc_feature 1..20: note = Description of Artificial Sequence: Synthetic oligonucleotide
  misc_feature 1..20: note = Target: SCN10A; (+) strand; PAM type: YTN; PAM sequence: CTT
  source 1..20: mol_type = other DNA
tatttgtatttcaatagttt

SEQ ID NO: 69226 - DNA, 20 bp, synthetic construct
  misc_feature 1..20: note = Description of Artificial Sequence: Synthetic oligonucleotide
  misc_feature 1..20: note = Target: SCN10A; (+) strand; PAM type: YTN; PAM sequence: TTT
  source 1..20: mol_type = other DNA
atttgtatttcaatagtttt

SEQ ID NO: 69227 - DNA, 20 bp, synthetic construct
  misc_feature 1..20: note = Description of Artificial Sequence: Synthetic oligonucleotide
  misc_feature 1..20: note = Target: SCN10A; (+) strand; PAM type: YTN; PAM sequence: TTA
  source 1..20: mol_type = other DNA
tttgtatttcaatagttttg

SEQ ID NO: 69228 - DNA, 20 bp, synthetic construct
  misc_feature 1..20: note = Description of Artificial Sequence: Synthetic oligonucleotide
  misc_feature 1..20: note = Target: SCN10A; (+) strand; PAM type: YTN; PAM sequence: TTT
  source 1..20: mol_type = other DNA
gtatttcaatagttttggga

SEQ ID NO: 69229 - DNA, 20 bp, synthetic construct
  misc_feature 1..20: note = Description of Artificial Sequence: Synthetic oligonucleotide
  misc_feature 1..20: note = Target: SCN10A; (+) strand; PAM type: YTN; PAM sequence: TTG
  source 1..20: mol_type = other DNA
tatttcaatagttttgggaa

SEQ ID NO: 69230 - DNA, 20 bp, synthetic construct
  misc_feature 1..20: note = Description of Artificial Sequence: Synthetic oligonucleotide
  misc_feature 1..20: note = Target: SCN10A; (+) strand; PAM type: YTN; PAM sequence: TTT
  source 1..20: mol_type = other DNA
caatagttttgggaaacagg

SEQ ID NO: 69231 - DNA, 20 bp, synthetic construct
  misc_feature 1..20: note = Description of Artificial Sequence: Synthetic oligonucleotide
  misc_feature 1..20: note = Target: SCN10A; (+) strand; PAM type: YTN; PAM sequence: TTC
  source 1..20: mol_type = other DNA
aatagttttgggaaacaggt

SEQ ID NO: 69232 - DNA, 20 bp, synthetic construct
  misc_feature 1..20: note = Description of Artificial Sequence: Synthetic oligonucleotide
  misc_feature 1..20: note = Target: SCN10A; (+) strand; PAM type: YTN; PAM sequence: TTT
  source 1..20: mol_type = other DNA
tgggaaacaggtggtgttgg

SEQ ID NO: 69233 - DNA, 20 bp, synthetic construct
  misc_feature 1..20: note = Description of Artificial Sequence: Synthetic oligonucleotide
  misc_feature 1..20: note = Target: SCN10A; (+) strand; PAM type: YTN; PAM sequence: TTT
  source 1..20: mol_type = other DNA
gggaaacaggtggtgttggg

SEQ ID NO: 69234 - DNA, 20 bp, synthetic construct
  misc_feature 1..20: note = Description of Artificial Sequence: Synthetic oligonucleotide
  misc_feature 1..20: note = Target: SCN10A; (+) strand; PAM type: YTN; PAM sequence: TTG
  source 1..20: mol_type = other DNA
ggaaacaggtggtgttgggt

SEQ ID NO: 69235 - DNA, 20 bp, synthetic construct
  misc_feature 1..20: note = Description of Artificial Sequence: Synthetic oligonucleotide
  misc_feature 1..20: note = Target: SCN10A; (+) strand; PAM type: YTN; PAM sequence: TTG
  source 1..20: mol_type = other DNA
ggttgcacagaaaaattctt

SEQ ID NO: 69236 - DNA, 20 bp, synthetic construct
  misc_feature 1..20: note = Description of Artificial Sequence: Synthetic oligonucleotide
  misc_feature 1..20: note = Target: SCN10A; (+) strand; PAM type: YTN; PAM sequence: TTG
  source 1..20: mol_type = other DNA
cacagaaaaattctttaacg

SEQ ID NO: 69237 - DNA, 20 bp, synthetic construct
  misc_feature 1..20: note = Description of Artificial Sequence: Synthetic oligonucleotide
  misc_feature 1..20: note = Target: SCN10A; (+) strand; PAM type: YTN; PAM sequence: TTC
  source 1..20: mol_type = other DNA
tttaacgctgatttctgaga

SEQ ID NO: 69238 - DNA, 20 bp, synthetic construct
  misc_feature 1..20: note = Description of Artificial Sequence: Synthetic oligonucleotide
  misc_feature 1..20: note = Target: SCN10A; (+) strand; PAM type: YTN; PAM sequence: CTT
  source 1..20: mol_type = other DNA
taacgctgatttctgagatt

SEQ ID NO: 69239 - DNA, 20 bp, synthetic construct
  misc_feature 1..20: note = Description of Artificial Sequence: Synthetic oligonucleotide
  misc_feature 1..20: note = Target: SCN10A; (+) strand; PAM type: YTN; PAM sequence: TTT
  source 1..20: mol_type = other DNA
aacgctgatttctgagattt

SEQ ID NO: 69240 - DNA, 20 bp, synthetic construct
  misc_feature 1..20: note = Description of Artificial Sequence: Synthetic oligonucleotide
  misc_feature 1..20: note = Target: SCN10A; (+) strand; PAM type: YTN; PAM sequence: TTA
  source 1..20: mol_type = other DNA
acgctgatttctgagatttt

SEQ ID NO: 69241 - DNA, 20 bp, synthetic construct
  misc_feature 1..20: note = Description of Artificial Sequence: Synthetic oligonucleotide
  misc_feature 1..20: note = Target: SCN10A; (+) strand; PAM type: YTN; PAM sequence: CTG
  source 1..20: mol_type = other DNA
atttctgagattttggtgca

SEQ ID NO: 69242 - DNA, 20 bp, synthetic construct
  misc_feature 1..20: note = Description of Artificial Sequence: Synthetic oligonucleotide
  misc_feature 1..20: note = Target: SCN10A; (+) strand; PAM type: YTN; PAM sequence: TTT
  source 1..20: mol_type = other DNA
ctgagattttggtgcaccat

SEQ ID NO: 69243 - DNA, 20 bp, synthetic construct
  misc_feature 1..20: note = Description of Artificial Sequence: Synthetic oligonucleotide
  misc_feature 1..20: note = Target: SCN10A; (+) strand; PAM type: YTN; PAM sequence: TTC
  source 1..20: mol_type = other DNA
tgagattttggtgcaccatc

SEQ ID NO: 69244 - DNA, 20 bp, synthetic construct
  misc_feature 1..20: note = Description of Artificial Sequence: Synthetic oligonucleotide
  misc_feature 1..20: note = Target: SCN10A; (+) strand; PAM type: YTN; PAM sequence: CTG
  source 1..20: mol_type = other DNA
agattttggtgcaccatcac

SEQ ID NO: 69245 - DNA, 20 bp, synthetic construct
  misc_feature 1..20: note = Description of Artificial Sequence: Synthetic oligonucleotide
  misc_feature 1..20: note = Target: SCN10A; (+) strand; PAM type: YTN; PAM sequence: TTT
  source 1..20: mol_type = other DNA
tggtgcaccatcacccgagc

SEQ ID NO: 69246 - DNA, 20 bp, synthetic construct
  misc_feature 1..20: note = Description of Artificial Sequence: Synthetic oligonucleotide
  misc_feature 1..20: note = Target: SCN10A; (+) strand; PAM type: YTN; PAM sequence: TTT
  source 1..20: mol_type = other DNA
ggtgcaccatcacccgagca

SEQ ID NO: 69247 - DNA, 20 bp, synthetic construct
  misc_feature 1..20: note = Description of Artificial Sequence: Synthetic oligonucleotide
  misc_feature 1..20: note = Target: SCN10A; (+) strand; PAM type: YTN; PAM sequence: TTG
  source 1..20: mol_type = other DNA
gtgcaccatcacccgagcag

SEQ ID NO: 69248 - DNA, 20 bp, synthetic construct
  misc_feature 1..20: note = Description of Artificial Sequence: Synthetic oligonucleotide
  misc_feature 1..20: note = Target: SCN10A; (+) strand; PAM type: YTN; PAM sequence: CTG
  source 1..20: mol_type = other DNA
tacccagtgtgtagtctctt

SEQ ID NO: 69249 - DNA, 20 bp, synthetic construct
  misc_feature 1..20: note = Description of Artificial Sequence: Synthetic oligonucleotide
  misc_feature 1..20: note = Target: SCN10A; (+) strand; PAM type: YTN; PAM sequence: CTC
  source 1..20: mol_type = other DNA
ttatcccttaccttcgtctc

SEQ ID NO: 69250 - DNA, 20 bp, synthetic construct
  misc_feature 1..20: note = Description of Artificial Sequence: Synthetic oligonucleotide
  misc_feature 1..20: note = Target: SCN10A; (+) strand; PAM type: YTN; PAM sequence: CTT
  source 1..20: mol_type = other DNA
atcccttaccttcgtctcac

SEQ ID NO: 69251 - DNA, 20 bp, synthetic construct
  misc_feature 1..20: note = Description of Artificial Sequence: Synthetic oligonucleotide
  misc_feature 1..20: note = Target: SCN10A; (+) strand; PAM type: YTN; PAM sequence: TTA
  source 1..20: mol_type = other DNA
tcccttaccttcgtctcacc

SEQ ID NO: 69252 - DNA, 20 bp, synthetic construct
  misc_feature 1..20: note = Description of Artificial Sequence: Synthetic oligonucleotide
  misc_feature 1..20: note = Target: SCN10A; (+) strand; PAM type: YTN; PAM sequence: CTT
  source 1..20: mol_type = other DNA
accttcgtctcacctttcct

SEQ ID NO: 69253 - DNA, 20 bp, synthetic construct
  misc_feature 1..20: note = Description of Artificial Sequence: Synthetic oligonucleotide
  misc_feature 1..20: note = Target: SCN10A; (+) strand; PAM type: YTN; PAM sequence: TTA
  source 1..20: mol_type = other DNA
ccttcgtctcacctttcctc

SEQ ID NO: 69254 - DNA, 20 bp, synthetic construct
  misc_feature 1..20: note = Description of Artificial Sequence: Synthetic oligonucleotide
  misc_feature 1..20: note = Target: SCN10A; (+) strand; PAM type: YTN; PAM sequence: CTT
  source 1..20: mol_type = other DNA
cgtctcacctttcctcccaa

SEQ ID NO: 69255 - DNA, 20 bp, synthetic construct
  misc_feature 1..20: note = Description of Artificial Sequence: Synthetic oligonucleotide
  misc_feature 1..20: note = Target: SCN10A; (+) strand; PAM type: YTN; PAM sequence: TTC
  source 1..20: mol_type = other DNA
gtctcacctttcctcccaag

SEQ ID NO: 69256 - DNA, 20 bp, synthetic construct
  misc_feature 1..20: note = Description of Artificial Sequence: Synthetic oligonucleotide
  misc_feature 1..20: note = Target: SCN10A; (+) strand; PAM type: YTN; PAM sequence: CTC
  source 1..20: mol_type = other DNA
acctttcctcccaagtcccc

SEQ ID NO: 69257 - DNA, 20 bp, synthetic construct
  misc_feature 1..20: note = Description of Artificial Sequence: Synthetic oligonucleotide
  misc_feature 1..20: note = Target: SCN10A; (+) strand; PAM type: YTN; PAM sequence: CTT
  source 1..20: mol_type = other DNA
tcctcccaagtccccaaagt

SEQ ID NO: 69258 - DNA, 20 bp, synthetic construct
  misc_feature 1..20: note = Description of Artificial Sequence: Synthetic oligonucleotide
  misc_feature 1..20: note = Target: SCN10A; (+) strand; PAM type: YTN; PAM sequence: TTT
  source 1..20: mol_type = other DNA
cctcccaagtccccaaagtc

SEQ ID NO: 69259 - DNA, 20 bp, synthetic construct
  misc_feature 1..20: note = Description of Artificial Sequence: Synthetic oligonucleotide
  misc_feature 1..20: note = Target: SCN10A; (+) strand; PAM type: YTN; PAM sequence: TTC
  source 1..20: mol_type = other DNA
ctcccaagtccccaaagtcc

SEQ ID NO: 69260 - DNA, 20 bp, synthetic construct
  misc_feature 1..20: note = Description of Artificial Sequence: Synthetic oligonucleotide
  misc_feature 1..20: note = Target: SCN10A; (+) strand; PAM type: YTN; PAM sequence: CTC
  source 1..20: mol_type = other DNA
ccaagtccccaaagtccatt

SEQ ID NO: 69261 - DNA, 20 bp, synthetic construct
  misc_feature 1..20: note = Description of Artificial Sequence: Synthetic oligonucleotide
  misc_feature 1..20: note = Target: SCN10A; (+) strand; PAM type: YTN; PAM sequence: TTA
  source 1..20: mol_type = other DNA
tgtcattgttatgcctttgc

SEQ ID NO: 69262 - DNA, 20 bp, synthetic construct
  misc_feature 1..20: note = Description of Artificial Sequence: Synthetic oligonucleotide
  misc_feature 1..20: note = Target: SCN10A; (+) strand; PAM type: YTN; PAM sequence: TTG
  source 1..20: mol_type = other DNA
ttatgcctttgcatcctcac

SEQ ID NO: 69263 - DNA, 20 bp, synthetic construct
  misc_feature 1..20: note = Description of Artificial Sequence: Synthetic oligonucleotide
  misc_feature 1..20: note = Target: SCN10A; (+) strand; PAM type: YTN; PAM sequence: TTA
  source 1..20: mol_type = other DNA
tgcctttgcatcctcacagc

SEQ ID NO: 69264 - DNA, 20 bp, synthetic construct
  misc_feature 1..20: note = Description of Artificial Sequence: Synthetic oligonucleotide
  misc_feature 1..20: note = Target: SCN10A; (+) strand; PAM type: YTN; PAM sequence: CTT
  source 1..20: mol_type = other DNA
tgcatcctcacagcttagct

SEQ ID NO: 69265 - DNA, 20 bp, synthetic construct
  misc_feature 1..20: note = Description of Artificial Sequence: Synthetic oligonucleotide
  misc_feature 1..20: note = Target: SCN10A; (+) strand; PAM type: YTN; PAM sequence: TTT
  source 1..20: mol_type = other DNA
gcatcctcacagcttagctc

SEQ ID NO: 69266 - DNA, 20 bp, synthetic construct
  misc_feature 1..20: note = Description of Artificial Sequence: Synthetic oligonucleotide
  misc_feature 1..20: note = Target: SCN10A; (+) strand; PAM type: YTN; PAM sequence: TTG
  source 1..20: mol_type = other DNA
catcctcacagcttagctcc

SEQ ID NO: 69267 - DNA, 20 bp, synthetic construct
  misc_feature 1..20: note = Description of Artificial Sequence: Synthetic oligonucleotide
  misc_feature 1..20: note = Target: SCN10A; (+) strand; PAM type: YTN; PAM sequence: CTC
  source 1..20: mol_type = other DNA
acagcttagctcctgcttgt

SEQ ID NO: 69268 - DNA, 20 bp, synthetic construct
  misc_feature 1..20: note = Description of Artificial Sequence: Synthetic oligonucleotide
  misc_feature 1..20: note = Target: SCN10A; (+) strand; PAM type: YTN; PAM sequence: CTT
  source 1..20: mol_type = other DNA
agctcctgcttgtaattaag

SEQ ID NO: 69269 - DNA, 20 bp, synthetic construct
  misc_feature 1..20: note = Description of Artificial Sequence: Synthetic oligonucleotide
  misc_feature 1..20: note = Target: SCN10A; (+) strand; PAM type: YTN; PAM sequence: TTA
  source 1..20: mol_type = other DNA
gctcctgcttgtaattaaga

SEQ ID NO: 69270 - DNA, 20 bp, synthetic construct
  misc_feature 1..20: note = Description of Artificial Sequence: Synthetic oligonucleotide
  misc_feature 1..20: note = Target: SCN10A; (+) strand; PAM type: YTN; PAM sequence: CTC
  source 1..20: mol_type = other DNA
ctgcttgtaattaagaacac

SEQ ID NO: 69271 - DNA, 20 bp, synthetic construct
  misc_feature 1..20: note = Description of Artificial Sequence: Synthetic oligonucleotide
  misc_feature 1..20: note = Target: SCN10A; (+) strand; PAM type: YTN; PAM sequence: CTG
  source 1..20: mol_type = other DNA
cttgtaattaagaacacatg

SEQ ID NO: 69272 - DNA, 20 bp, synthetic construct
  misc_feature 1..20: note = Description of Artificial Sequence: Synthetic oligonucleotide
  misc_feature 1..20: note = Target: SCN10A; (+) strand; PAM type: YTN; PAM sequence: CTT
  source 1..20: mol_type = other DNA
gtaattaagaacacatgatg

SEQ ID NO: 69273 - DNA, 20 bp, synthetic construct
  misc_feature 1..20: note = Description of Artificial Sequence: Synthetic oligonucleotide
  misc_feature 1..20: note = Target: SCN10A; (+) strand; PAM type: YTN; PAM sequence: TTG
  source 1..20: mol_type = other DNA
taattaagaacacatgatgc

SEQ ID NO: 69274 - DNA, 20 bp, synthetic construct
  misc_feature 1..20: note = Description of Artificial Sequence: Synthetic oligonucleotide
  misc_feature 1..20: note = Target: SCN10A; (+) strand; PAM type: YTN; PAM sequence: TTA
  source 1..20: mol_type = other DNA
agaacacatgatgcttgact

SEQ ID NO: 69275 - DNA, 20 bp, synthetic construct
  misc_feature 1..20: note = Description of Artificial Sequence: Synthetic oligonucleotide
  misc_feature 1..20: note = Target: SCN10A; (+) strand; PAM type: YTN; PAM sequence: CTT
  source 1..20: mol_type = other DNA
gactttctattcctgagtta

SEQ ID NO: 69276 - DNA, 20 bp, synthetic construct
  misc_feature 1..20: note = Description of Artificial Sequence: Synthetic oligonucleotide
  misc_feature 1..20: note = Target: SCN10A; (+) strand; PAM type: YTN; PAM sequence: TTG
  source 1..20: mol_type = other DNA
actttctattcctgagttac

SEQ ID NO: 69277 - DNA, 20 bp, synthetic construct
  misc_feature 1..20: note = Description of Artificial Sequence: Synthetic oligonucleotide
  misc_feature 1..20: note = Target: SCN10A; (+) strand; PAM type: YTN; PAM sequence: CTT
  source 1..20: mol_type = other DNA
tctattcctgagttacttca

SEQ ID NO: 69278 - DNA, 20 bp, synthetic construct
  misc_feature 1..20: note = Description of Artificial Sequence: Synthetic oligonucleotide
  misc_feature 1..20: note = Target: SCN10A; (+) strand; PAM type: YTN; PAM sequence: TTT
  source 1..20: mol_type = other DNA
ctattcctgagttacttcat

SEQ ID NO: 69279 - DNA, 20 bp, synthetic construct
  misc_feature 1..20: note = Description of Artificial Sequence: Synthetic oligonucleotide
  misc_feature 1..20: note = Target: SCN10A; (+) strand; PAM type: YTN; PAM sequence: TTC
  source 1..20: mol_type = other DNA
tattcctgagttacttcatt

SEQ ID NO: 69280 - DNA, 20 bp, synthetic construct
  misc_feature 1..20: note = Description of Artificial Sequence: Synthetic oligonucleotide
  misc_feature 1..20: note = Target: SCN10A; (+) strand; PAM type: YTN; PAM sequence: CTA
  source 1..20: mol_type = other DNA
ttcctgagttacttcattta

SEQ ID NO: 69281 - DNA, 20 bp, synthetic construct
  misc_feature 1..20: note = Description of Artificial Sequence: Synthetic oligonucleotide
  misc_feature 1..20: note = Target: SCN10A; (+) strand; PAM type: YTN; PAM sequence: TTC
  source 1..20: mol_type = other DNA
ctgagttacttcatttagaa

SEQ ID NO: 69282 - DNA, 20 bp, synthetic construct
  misc_feature 1..20: note = Description of Artificial Sequence: Synthetic oligonucleotide
  misc_feature 1..20: note = Target: SCN10A; (+) strand; PAM type: YTN; PAM sequence: CTG
  source 1..20: mol_type = other DNA
agttacttcatttagaataa

SEQ ID NO: 69283 - DNA, 20 bp, synthetic construct
  misc_feature 1..20: note = Description of Artificial Sequence: Synthetic oligonucleotide
  misc_feature 1..20: note = Target: SCN10A; (+) strand; PAM type: YTN; PAM sequence: TTA
  source 1..20: mol_type = other DNA
cttcatttagaataatagtc

SEQ ID NO: 69284 - DNA, 20 bp, synthetic construct
  misc_feature 1..20: note = Description of Artificial Sequence: Synthetic oligonucleotide
  misc_feature 1..20: note = Target: SCN10A; (+) strand; PAM type: YTN; PAM sequence: CTT
  source 1..20: mol_type = other DNA
catttagaataatagtctcc

SEQ ID NO: 69285 - DNA, 20 bp, synthetic construct
  misc_feature 1..20: note = Description of Artificial Sequence: Synthetic oligonucleotide
  misc_feature 1..20: note = Target: SCN10A; (+) strand; PAM type: YTN; PAM sequence: TTC
  source 1..20: mol_type = other DNA
atttagaataatagtctcca

SEQ ID NO: 69286 - DNA, 20 bp, synthetic construct
  misc_feature 1..20: note = Description of Artificial Sequence: Synthetic oligonucleotide
  misc_feature 1..20: note = Target: SCN10A; (+) strand; PAM type: YTN; PAM sequence: TTT
  source 1..20: mol_type = other DNA
agaataatagtctccaactc

SEQ ID NO: 69287 - DNA, 20 bp, synthetic construct
  misc_feature 1..20: note = Description of Artificial Sequence: Synthetic oligonucleotide
  misc_feature 1..20: note = Target: SCN10A; (+) strand; PAM type: YTN; PAM sequence: TTA
  source 1..20: mol_type = other DNA
gaataatagtctccaactcc

SEQ ID NO: 69288 - DNA, 20 bp, synthetic construct
  misc_feature 1..20: note = Description of Artificial Sequence: Synthetic oligonucleotide
  misc_feature 1..20: note = Target: SCN10A; (+) strand; PAM type: YTN; PAM sequence: CTC
  source 1..20: mol_type = other DNA
caactccatccagcttgctg

SEQ ID NO: 69289 - DNA, 20 bp, synthetic construct
  misc_feature 1..20: note = Description of Artificial Sequence: Synthetic oligonucleotide
  misc_feature 1..20: note = Target: SCN10A; (+) strand; PAM type: YTN; PAM sequence: CTC
  source 1..20: mol_type = other DNA
catccagcttgctgccaatg

SEQ ID NO: 69290 - DNA, 20 bp, synthetic construct
  misc_feature 1..20: note = Description of Artificial Sequence: Synthetic oligonucleotide
  misc_feature 1..20: note = Target: SCN10A; (+) strand; PAM type: YTN; PAM sequence: CTT
  source 1..20: mol_type = other DNA
gctgccaatgccattatttc

SEQ ID NO: 69291 - DNA, 20 bp, synthetic construct
  misc_feature 1..20: note = Description of Artificial Sequence: Synthetic oligonucleotide
  misc_feature 1..20: note = Target: SCN10A; (+) strand; PAM type: YTN; PAM sequence: TTG
  source 1..20: mol_type = other DNA
ctgccaatgccattatttca

SEQ ID NO: 69292 - DNA, 20 bp, synthetic construct
  misc_feature 1..20: note = Description of Artificial Sequence: Synthetic oligonucleotide
  misc_feature 1..20: note = Target: SCN10A; (+) strand; PAM type: YTN; PAM sequence: CTG
  source 1..20: mol_type = other DNA
ccaatgccattatttcattc

SEQ ID NO: 69293 - DNA, 20 bp, synthetic construct
  misc_feature 1..20: note = Description of Artificial Sequence: Synthetic oligonucleotide
  misc_feature 1..20: note = Target: SCN10A; (+) strand; PAM type: YTN; PAM sequence: TTA
  source 1..20: mol_type = other DNA
tttcattcctttttacaact

SEQ ID NO: 69294 - DNA, 20 bp, synthetic construct
  misc_feature 1..20: note = Description of Artificial Sequence: Synthetic oligonucleotide
  misc_feature 1..20: note = Target: SCN10A; (+) strand; PAM type: YTN; PAM sequence: TTT
  source 1..20: mol_type = other DNA
cattcctttttacaactgag

SEQ ID NO: 69295 - DNA, 20 bp, synthetic construct
  misc_feature 1..20: note = Description of Artificial Sequence: Synthetic oligonucleotide
  misc_feature 1..20: note = Target: SCN10A; (+) strand; PAM type: YTN; PAM sequence: TTC
  source 1..20: mol_type = other DNA
attcctttttacaactgagt

SEQ ID NO: 69296 - DNA, 20 bp, synthetic construct
  misc_feature 1..20: note = Description of Artificial Sequence: Synthetic oligonucleotide
  misc_feature 1..20: note = Target: SCN10A; (+) strand; PAM type: YTN; PAM sequence: TTC
  source 1..20: mol_type = other DNA
ctttttacaactgagtagta

SEQ ID NO: 69297 - DNA, 20 bp, synthetic construct
  misc_feature 1..20: note = Description of Artificial Sequence: Synthetic oligonucleotide
  misc_feature 1..20: note = Target: SCN10A; (+) strand; PAM type: YTN; PAM sequence: CTT
  source 1..20: mol_type = other DNA
tttacaactgagtagtattc

SEQ ID NO: 69298 - DNA, 20 bp, synthetic construct
  misc_feature 1..20: note = Description of Artificial Sequence: Synthetic oligonucleotide
  misc_feature 1..20: note = Target: SCN10A; (+) strand; PAM type: YTN; PAM sequence: TTT
  source 1..20: mol_type = other DNA
ttacaactgagtagtattcc

SEQ ID NO: 69299 - DNA, 20 bp, synthetic construct
  misc_feature 1..20: note = Description of Artificial Sequence: Synthetic oligonucleotide
  misc_feature 1..20: note = Target: SCN10A; (+) strand; PAM type: YTN; PAM sequence: TTT
  source 1..20: mol_type = other DNA
tacaactgagtagtattcca

SEQ ID NO: 69300 - DNA, 20 bp, synthetic construct
  misc_feature 1..20: note = Description of Artificial Sequence: Synthetic oligonucleotide
  misc_feature 1..20: note = Target: SCN10A; (+) strand; PAM type: YTN; PAM sequence: TTT
  source 1..20: mol_type = other DNA
acaactgagtagtattccat

SEQ ID NO: 69301 - DNA, 20 bp, synthetic construct
  misc_feature 1..20: note = Description of Artificial Sequence: Synthetic oligonucleotide
  misc_feature 1..20: note = Target: SCN10A; (+) strand; PAM type: YTN; PAM sequence: TTA
  source 1..20: mol_type = other DNA
caactgagtagtattccatg

SEQ ID NO: 69302 - DNA, 20 bp, synthetic construct
  misc_feature 1..20: note = Description of Artificial Sequence: Synthetic oligonucleotide
  misc_feature 1..20: note = Target: SCN10A; (+) strand; PAM type: YTN; PAM sequence: CTG
  source 1..20: mol_type = other DNA
agtagtattccatggtatgc

SEQ ID NO: 69303 - DNA, 20 bp, synthetic construct
  misc_feature 1..20: note = Description of Artificial Sequence: Synthetic oligonucleotide
  misc_feature 1..20: note = Target: SCN10A; (+) strand; PAM type: YTN; PAM sequence: TTC
  source 1..20: mol_type = other DNA
catggtatgcatacaccata

SEQ ID NO: 69304 - DNA, 20 bp, synthetic construct
  misc_feature 1..20: note = Description of Artificial Sequence: Synthetic oligonucleotide
  misc_feature 1..20: note = Target: SCN10A; (+) strand; PAM type: YTN; PAM sequence: TTT
  source 1..20: mol_type = other DNA
tctttatgcacttgttggtt

SEQ ID NO: 69305 - DNA, 20 bp, synthetic construct
  misc_feature 1..20: note = Description of Artificial Sequence: Synthetic oligonucleotide
  misc_feature 1..20: note = Target: SCN10A; (+) strand; PAM type: YTN; PAM sequence: TTT
  source 1..20: mol_type = other DNA
ctttatgcacttgttggttg

SEQ ID NO: 69306 - DNA, 20 bp, synthetic construct
  misc_feature 1..20: note = Description of Artificial Sequence: Synthetic oligonucleotide
  misc_feature 1..20: note = Target: SCN10A; (+) strand; PAM type: YTN; PAM sequence: TTC
  source 1..20: mol_type = other DNA
tttatgcacttgttggttga

SEQ ID NO: 69307 - DNA, 20 bp, synthetic construct
  misc_feature 1..20: note = Description of Artificial Sequence: Synthetic oligonucleotide
  misc_feature 1..20: note = Target: SCN10A; (+) strand; PAM type: YTN; PAM sequence: CTT
  source 1..20: mol_type = other DNA
tatgcacttgttggttgatg

SEQ ID NO: 69308 - DNA, 20 bp, synthetic construct
  misc_feature 1..20: note = Description of Artificial Sequence: Synthetic oligonucleotide
  misc_feature 1..20: note = Target: SCN10A; (+) strand; PAM type: YTN; PAM sequence: TTT
  source 1..20: mol_type = other DNA
atgcacttgttggttgatgg

SEQ ID NO: 69309 - DNA, 20 bp, synthetic construct
  misc_feature 1..20: note = Description of Artificial Sequence: Synthetic oligonucleotide
  misc_feature 1..20: note = Target: SCN10A; (+) strand; PAM type: YTN; PAM sequence: TTA
  source 1..20: mol_type = other DNA
tgcacttgttggttgatggg

SEQ ID NO: 69310 - DNA, 20 bp, synthetic construct
  misc_feature 1..20: note = Description of Artificial Sequence: Synthetic oligonucleotide
  misc_feature 1..20: note = Target: SCN10A; (+) strand; PAM type: YTN; PAM sequence: CTT
  source 1..20: mol_type = other DNA
gttggttgatgggcatttag

SEQ ID NO: 69311 - DNA, 20 bp, synthetic construct
  misc_feature 1..20: note = Description of Artificial Sequence: Synthetic oligonucleotide
  misc_feature 1..20: note = Target: SCN10A; (+) strand; PAM type: YTN; PAM sequence: TTG
  source 1..20: mol_type = other DNA
ttggttgatgggcatttagg

SEQ ID NO: 69312 - DNA, 20 bp, synthetic construct
  misc_feature 1..20: note = Description of Artificial Sequence: Synthetic oligonucleotide
  misc_feature 1..20: note = Target: SCN10A; (+) strand; PAM type: YTN; PAM sequence: TTG
  source 1..20: mol_type = other DNA
gttgatgggcatttaggctg

SEQ ID NO: 69313 - DNA, 20 bp, synthetic construct
  misc_feature 1..20: note = Description of Artificial Sequence: Synthetic oligonucleotide
  misc_feature 1..20: note = Target: SCN10A; (+) strand; PAM type: YTN; PAM sequence: TTG
  source 1..20: mol_type = other DNA
atgggcatttaggctggttc

SEQ ID NO: 69314 - DNA, 20 bp, synthetic construct
  misc_feature 1..20: note = Description of Artificial Sequence: Synthetic oligonucleotide
  misc_feature 1..20: note = Target: SCN10A; (+) strand; PAM type: YTN; PAM sequence: TTT
  source 1..20: mol_type = other DNA
aggctggttccatatttttg

SEQ ID NO: 69315 - DNA, 20 bp, synthetic construct
  misc_feature 1..20: note = Description of Artificial Sequence: Synthetic oligonucleotide
  misc_feature 1..20: note = Target: SCN10A; (+) strand; PAM type: YTN; PAM sequence: TTA
  source 1..20: mol_type = other DNA
ggctggttccatatttttgc

SEQ ID NO: 69316 - DNA, 20 bp, synthetic construct
  misc_feature 1..20: note = Description of Artificial Sequence: Synthetic oligonucleotide
  misc_feature 1..20: note = Target: SCN10A; (+) strand; PAM type: YTN; PAM sequence: CTG
  source 1..20: mol_type = other DNA
gttccatatttttgcagttg

SEQ ID NO: 69317 - DNA, 20 bp, synthetic construct
  misc_feature 1..20: note = Description of Artificial Sequence: Synthetic oligonucleotide
  misc_feature 1..20: note = Target: SCN10A; (+) strand; PAM type: YTN; PAM sequence: TTC
  source 1..20: mol_type = other DNA
catatttttgcagttgtaaa

SEQ ID NO: 69318 - DNA, 20 bp, synthetic construct
  misc_feature 1..20: note = Description of Artificial Sequence: Synthetic oligonucleotide
  misc_feature 1..20: note = Target: SCN10A; (+) strand; PAM type: YTN; PAM sequence: TTT
  source 1..20: mol_type = other DNA
ttgcagttgtaaactgtgct

SEQ ID NO: 69319 - DNA, 20 bp, synthetic construct
  misc_feature 1..20: note = Description of Artificial Sequence: Synthetic oligonucleotide
  misc_feature 1..20: note = Target: SCN10A; (+) strand; PAM type: YTN; PAM sequence: TTT
  source 1..20: mol_type = other DNA
tgcagttgtaaactgtgctg

SEQ ID NO: 69320 - DNA, 20 bp, synthetic construct
  misc_feature 1..20: note = Description of Artificial Sequence: Synthetic oligonucleotide
  misc_feature 1..20: note = Target: SCN10A; (+) strand; PAM type: YTN; PAM sequence: TTT
  source 1..20: mol_type = other DNA
gcagttgtaaactgtgctgc

SEQ ID NO: 69321 - DNA, 20 bp, synthetic construct
  misc_feature 1..20: note = Description of Artificial Sequence: Synthetic oligonucleotide
  misc_feature 1..20: note = Target: SCN10A; (+) strand; PAM type: YTN; PAM sequence: TTG
  source 1..20: mol_type = other DNA
cagttgtaaactgtgctgct

SEQ ID NO: 69322 - DNA, 20 bp, synthetic construct
  misc_feature 1..20: note = Description of Artificial Sequence: Synthetic oligonucleotide
  misc_feature 1..20: note = Target: SCN10A; (+) strand; PAM type: YTN; PAM sequence: TTG
  source 1..20: mol_type = other DNA
taaactgtgctgctataagc

SEQ ID NO: 69323 - DNA, 20 bp, synthetic construct
  misc_feature 1..20: note = Description of Artificial Sequence: Synthetic oligonucleotide
  misc_feature 1..20: note = Target: SCN10A; (+) strand; PAM type: YTN; PAM sequence: CTG
  source 1..20: mol_type = other DNA
tgctgctataagcatgcata

SEQ ID NO: 69324 - DNA, 20 bp, synthetic construct
  misc_feature 1..20: note = Description of Artificial Sequence: Synthetic oligonucleotide
  misc_feature 1..20: note = Target: SCN10A; (+) strand; PAM type: YTN; PAM sequence: CTG
  source 1..20: mol_type = other DNA
ctataagcatgcatatgcaa

SEQ ID NO: 69325 - DNA, 20 bp, synthetic construct
  misc_feature 1..20: note = Description of Artificial Sequence: Synthetic oligonucleotide
  misc_feature 1..20: note = Target: SCN10A; (+) strand; PAM type: YTN; PAM sequence: CTA
  source 1..20: mol_type = other DNA
taagcatgcatatgcaagtg

SEQ ID NO: 69326 - DNA, 20 bp, synthetic construct
  misc_feature 1..20: note = Description of Artificial Sequence: Synthetic oligonucleotide
  misc_feature 1..20: note = Target: SCN10A; (+) strand; PAM type: YTN; PAM sequence: CTT
  source 1..20: mol_type = other DNA
tttaataatggcttattttc

SEQ ID NO: 69327 - DNA, 20 bp, synthetic construct
  misc_feature 1..20: note = Description of Artificial Sequence: Synthetic oligonucleotide
  misc_feature 1..20: note = Target: SCN10A; (+) strand; PAM type: YTN; PAM sequence: TTT
  source 1..20: mol_type = other DNA
ttaataatggcttattttcc

SEQ ID NO: 69328 - DNA, 20 bp, synthetic construct
  misc_feature 1..20: note = Description of Artificial Sequence: Synthetic oligonucleotide
  misc_feature 1..20: note = Target: SCN10A; (+) strand; PAM type: YTN; PAM sequence: TTT
  source 1..20: mol_type = other DNA
taataatggcttattttcct

SEQ ID NO: 69329 - DNA, 20 bp, synthetic construct
  misc_feature 1..20: note = Description of Artificial Sequence: Synthetic oligonucleotide
  misc_feature 1..20: note = Target: SCN10A; (+) strand; PAM type: YTN; PAM sequence: TTT
  source 1..20: mol_type = other DNA
aataatggcttattttcctc

SEQ ID NO: 69330 - DNA, 20 bp, synthetic construct
  misc_feature 1..20: note = Description of Artificial Sequence: Synthetic oligonucleotide
  misc_feature 1..20: note = Target: SCN10A; (+) strand; PAM type: YTN; PAM sequence: TTA
  source 1..20: mol_type = other DNA
ataatggcttattttcctct

SEQ ID NO: 69331 - DNA, 20 bp, synthetic construct
  misc_feature 1..20: note = Description of Artificial Sequence: Synthetic oligonucleotide
  misc_feature 1..20: note = Target: SCN10A; (+) strand; PAM type: YTN; PAM sequence: CTT
  source 1..20: mol_type = other DNA
attttcctctgggtagatac

SEQ ID NO: 69332 - DNA, 20 bp, synthetic construct
  misc_feature 1..20: note = Description of Artificial Sequence: Synthetic oligonucleotide
  misc_feature 1..20: note = Target: SCN10A; (+) strand; PAM type: YTN; PAM sequence: TTA
  source 1..20: mol_type = other DNA
ttttcctctgggtagatacc

SEQ ID NO: 69333 - DNA, 20 bp, synthetic construct
  misc_feature 1..20: note = Description of Artificial Sequence: Synthetic oligonucleotide
  misc_feature 1..20: note = Target: SCN10A; (+) strand; PAM type: YTN; PAM sequence: TTT
  source 1..20: mol_type = other DNA
tcctctgggtagatacccag

SEQ ID NO: 69334 - DNA, 20 bp, synthetic construct
  misc_feature 1..20: note = Description of Artificial Sequence: Synthetic oligonucleotide
  misc_feature 1..20: note = Target: SCN10A; (+) strand; PAM type: YTN; PAM sequence: TTT
  source 1..20: mol_type = other DNA
cctctgggtagatacccagt

SEQ ID NO: 69335 - DNA, 20 bp, synthetic construct
  misc_feature 1..20: note = Description of Artificial Sequence: Synthetic oligonucleotide
  misc_feature 1..20: note = Target: SCN10A; (+) strand; PAM type: YTN; PAM sequence: TTC
  source 1..20: mol_type = other DNA
ctctgggtagatacccagta

SEQ ID NO: 69336 - DNA, 20 bp, synthetic construct
  misc_feature 1..20: note = Description of Artificial Sequence: Synthetic oligonucleotide
  misc_feature 1..20: note = Target: SCN10A; (+) strand; PAM type: YTN; PAM sequence: CTC
  source 1..20: mol_type = other DNA
tgggtagatacccagtagtg

SEQ ID NO: 69337 - DNA, 20 bp, synthetic construct
  misc_feature 1..20: note = Description of Artificial Sequence: Synthetic oligonucleotide
  misc_feature 1..20: note = Target: SCN10A; (+) strand; PAM type: YTN; PAM sequence: CTG
  source 1..20: mol_type = other DNA
ggtagatacccagtagtggg

SEQ ID NO: 69338 - DNA, 20 bp, synthetic construct
  misc_feature 1..20: note = Description of Artificial Sequence: Synthetic oligonucleotide
  misc_feature 1..20: note = Target: SCN10A; (+) strand; PAM type: YTN; PAM sequence: TTG
  source 1..20: mol_type = other DNA
ctggaccaaatggtagttct

SEQ ID NO: 69339 - DNA, 20 bp, synthetic construct
  misc_feature 1..20: note = Description of Artificial Sequence: Synthetic oligonucleotide
  misc_feature 1..20: note = Target: SCN10A; (+) strand; PAM type: YTN; PAM sequence: CTG
  source 1..20: mol_type = other DNA
gaccaaatggtagttctact

SEQ ID NO: 69340 - DNA, 20 bp, synthetic construct
  misc_feature 1..20: note = Description of Artificial Sequence: Synthetic oligonucleotide
  misc_feature 1..20: note = Target: SCN10A; (+) strand; PAM type: YTN; PAM sequence: TTC
  source 1..20: mol_type = other DNA
tacttttagttctttaagga

SEQ ID NO: 69341 - DNA, 20 bp, synthetic construct
  misc_feature 1..20: note = Description of Artificial Sequence: Synthetic oligonucleotide
  misc_feature 1..20: note = Target: SCN10A; (+) strand; PAM type: YTN; PAM sequence: CTA
  source 1..20: mol_type = other DNA
cttttagttctttaaggaat

SEQ ID NO: 69342 - DNA, 20 bp, synthetic construct
  misc_feature 1..20: note = Description of Artificial Sequence: Synthetic oligonucleotide
  misc_feature 1..20: note = Target: SCN10A; (+) strand; PAM type: YTN; PAM sequence: CTT
  source 1..20: mol_type = other DNA
ttagttctttaaggaatctc

SEQ ID NO: 69343 - DNA, 20 bp, synthetic construct
  misc_feature 1..20: note = Description of Artificial Sequence: Synthetic oligonucleotide
  misc_feature 1..20: note = Target: SCN10A; (+) strand; PAM type: YTN; PAM sequence: TTT
  source 1..20: mol_type = other DNA
tagttctttaaggaatctcc

SEQ ID NO: 69344 - DNA, 20 bp, synthetic construct
  misc_feature 1..20: note = Description of Artificial Sequence: Synthetic oligonucleotide
  misc_feature 1..20: note = Target: SCN10A; (+) strand; PAM type: YTN; PAM sequence: TTT
  source 1..20: mol_type = other DNA
agttctttaaggaatctcca

SEQ ID NO: 69345 - DNA, 20 bp, synthetic construct
  misc_feature 1..20: note = Description of Artificial Sequence: Synthetic oligonucleotide
  misc_feature 1..20: note = Target: SCN10A; (+) strand; PAM type: YTN; PAM sequence: TTA
  source 1..20: mol_type = other DNA
gttctttaaggaatctccat

SEQ ID NO: 69346 - DNA, 20 bp, synthetic construct
  misc_feature 1..20: note = Description of Artificial Sequence: Synthetic oligonucleotide
  misc_feature 1..20: note = Target: SCN10A; (+) strand; PAM type: YTN; PAM sequence: TTC
  source 1..20: mol_type = other DNA
tttaaggaatctccataacg

SEQ ID NO: 69347 - DNA, 20 bp, synthetic construct
  misc_feature 1..20: note = Description of Artificial Sequence: Synthetic oligonucleotide
  misc_feature 1..20: note = Target: SCN10A; (+) strand; PAM type: YTN; PAM sequence: CTT
  source 1..20: mol_type = other DNA
taaggaatctccataacgtt

SEQ ID NO: 69348 - DNA, 20 bp, synthetic construct
  misc_feature 1..20: note = Description of Artificial Sequence: Synthetic oligonucleotide
  misc_feature 1..20: note = Target: SCN10A; (+) strand; PAM type: YTN; PAM sequence: TTT
  source 1..20: mol_type = other DNA
aaggaatctccataacgttt

SEQ ID NO: 69349 - DNA, 20 bp, synthetic construct
  misc_feature 1..20: note = Description of Artificial Sequence: Synthetic oligonucleotide
  misc_feature 1..20: note = Target: SCN10A; (+) strand; PAM type: YTN; PAM sequence: TTA
  source 1..20: mol_type = other DNA
aggaatctccataacgtttt

SEQ ID NO: 69350 - DNA, 20 bp, synthetic construct
  misc_feature 1..20: note = Description of Artificial Sequence: Synthetic oligonucleotide
  misc_feature 1..20: note = Target: SCN10A; (+) strand; PAM type: YTN; PAM sequence: CTC
  source 1..20: mol_type = other DNA
cataacgttttccttagtgg

SEQ ID NO: 69351 - DNA, 20 bp, synthetic construct
  misc_feature 1..20: note = Description of Artificial Sequence: Synthetic oligonucleotide
  misc_feature 1..20: note = Target: SCN10A; (+) strand; PAM type: YTN; PAM sequence: TTT
  source 1..20: mol_type = other DNA
tccttagtggttgtactagt

SEQ ID NO: 69352 - DNA, 20 bp, synthetic construct
  misc_feature 1..20: note = Description of Artificial Sequence: Synthetic oligonucleotide
  misc_feature 1..20: note = Target: SCN10A; (+) strand; PAM type: YTN; PAM sequence: TTT
  source 1..20: mol_type = other DNA
ccttagtggttgtactagtt

SEQ ID NO: 69353 - DNA, 20 bp, synthetic construct
  misc_feature 1..20: note = Description of Artificial Sequence: Synthetic oligonucleotide
  misc_feature 1..20: note = Target: SCN10A; (+) strand; PAM type: YTN; PAM sequence: TTC
  source 1..20: mol_type = other DNA
cttagtggttgtactagttt

SEQ ID NO: 69354 - DNA, 20 bp, synthetic construct
  misc_feature 1..20: note = Description of Artificial Sequence: Synthetic oligonucleotide
  misc_feature 1..20: note = Target: SCN10A; (+) strand; PAM type: YTN; PAM sequence: CTT
  source 1..20: mol_type = other DNA
agtggttgtactagtttaca

SEQ ID NO: 69355 - DNA, 20 bp, synthetic construct
  misc_feature 1..20: note = Description of Artificial Sequence: Synthetic oligonucleotide
  misc_feature 1..20: note = Target: SCN10A; (+) strand; PAM type: YTN; PAM sequence: TTA
  source 1..20: mol_type = other DNA
gtggttgtactagtttacat

SEQ ID NO: 69356 - DNA, 20 bp, synthetic construct
  misc_feature 1..20: note = Description of Artificial Sequence: Synthetic oligonucleotide
  misc_feature 1..20: note = Target: SCN10A; (+) strand; PAM type: YTN; PAM sequence: TTG
  source 1..20: mol_type = other DNA
tactagtttacattcccacc

SEQ ID NO: 69357 - DNA, 20 bp, synthetic construct
  misc_feature 1..20: note = Description of Artificial Sequence: Synthetic oligonucleotide
  misc_feature 1..20: note = Target: SCN10A; (+) strand; PAM type: YTN; PAM sequence: CTA
  source 1..20: mol_type = other DNA
gtttacattcccaccagcag

SEQ ID NO: 69358 - DNA, 20 bp, synthetic construct
  misc_feature 1..20: note = Description of Artificial Sequence: Synthetic oligonucleotide
  misc_feature 1..20: note = Target: SCN10A; (+) strand; PAM type: YTN; PAM sequence: TTT
  source 1..20: mol_type = other DNA
acattcccaccagcagtgta

SEQ ID NO: 69359 - DNA, 20 bp, synthetic construct
  misc_feature 1..20: note = Description of Artificial Sequence: Synthetic oligonucleotide
  misc_feature 1..20: note = Target: SCN10A; (+) strand; PAM type: YTN; PAM sequence: TTA
  source 1..20: mol_type = other DNA
cattcccaccagcagtgtaa

SEQ ID NO: 69360 - DNA, 20 bp, synthetic construct
  misc_feature 1..20: note = Description of Artificial Sequence: Synthetic oligonucleotide
  misc_feature 1..20: note = Target: SCN10A; (+) strand; PAM type: YTN; PAM sequence: TTC
  source 1..20: mol_type = other DNA
ccaccagcagtgtaaaattg

SEQ ID NO: 69361 - DNA, 20 bp, synthetic construct
  misc_feature 1..20: note = Description of Artificial Sequence: Synthetic oligonucleotide
  misc_feature 1..20: note = Target: SCN10A; (+) strand; PAM type: YTN; PAM sequence: TTG
  source 1..20: mol_type = other DNA
tttccttttcattacatcca

SEQ ID NO: 69362 - DNA, 20 bp, synthetic construct
  misc_feature 1..20: note = Description of Artificial Sequence: Synthetic oligonucleotide
  misc_feature 1..20: note = Target: SCN10A; (+) strand; PAM type: YTN; PAM sequence: TTT
  source 1..20: mol_type = other DNA
ccttttcattacatccatgc

SEQ ID NO: 69363 - DNA, 20 bp, synthetic construct
  misc_feature 1..20: note = Description of Artificial Sequence: Synthetic oligonucleotide
  misc_feature 1..20: note = Target: SCN10A; (+) strand; PAM type: YTN; PAM sequence: TTC
  source 1..20: mol_type = other DNA
cttttcattacatccatgcc

SEQ ID NO: 69364 - DNA, 20 bp, synthetic construct
  misc_feature 1..20: note = Description of Artificial Sequence: Synthetic oligonucleotide
  misc_feature 1..20: note = Target: SCN10A; (+) strand; PAM type: YTN; PAM sequence: CTT
  source 1..20: mol_type = other DNA
ttcattacatccatgccaac

SEQ ID NO: 69365 - DNA, 20 bp, synthetic construct
  misc_feature 1..20: note = Description of Artificial Sequence: Synthetic oligonucleotide
  misc_feature 1..20: note = Target: SCN10A; (+) strand; PAM type: YTN; PAM sequence: TTT
  source 1..20: mol_type = other DNA
tcattacatccatgccaaca

SEQ ID NO: 69366 - DNA, 20 bp, synthetic construct
  misc_feature 1..20: note = Description of Artificial Sequence: Synthetic oligonucleotide
  misc_feature 1..20: note = Target: SCN10A; (+) strand; PAM type: YTN; PAM sequence: TTT
  source 1..20: mol_type = other DNA
cattacatccatgccaacat

SEQ ID NO: 69367 - DNA, 20 bp, synthetic construct
  misc_feature 1..20: note = Description of Artificial Sequence: Synthetic oligonucleotide
  misc_feature 1..20: note = Target: SCN10A; (+) strand; PAM type: YTN; PAM sequence: TTC
  source 1..20: mol_type = other DNA
attacatccatgccaacatc

SEQ ID NO: 69368 - DNA, 20 bp, synthetic construct
  misc_feature 1..20: note = Description of Artificial Sequence: Synthetic oligonucleotide
  misc_feature 1..20: note = Target: SCN10A; (+) strand; PAM type: YTN; PAM sequence: TTA
  source 1..20: mol_type = other DNA
catccatgccaacatctatt

SEQ ID NO: 69369 - DNA, 20 bp, synthetic construct
  misc_feature 1..20: note = Description of Artificial Sequence: Synthetic oligonucleotide
  misc_feature 1..20: note = Target: SCN10A; (+) strand; PAM type: YTN; PAM sequence: CTA
  source 1..20: mol_type = other DNA
ttattttttggttatggcca

SEQ ID NO: 69370 - DNA, 20 bp, synthetic construct
  misc_feature 1..20: note = Description of Artificial Sequence: Synthetic oligonucleotide
  misc_feature 1..20: note = Target: SCN10A; (+) strand; PAM type: YTN; PAM sequence: TTA
  source 1..20: mol_type = other DNA
ttttttggttatggccattc

SEQ ID NO: 69371 - DNA, 20 bp, synthetic construct
  misc_feature 1..20: note = Description of Artificial Sequence: Synthetic oligonucleotide
  misc_feature 1..20: note = Target: SCN10A; (+) strand; PAM type: YTN; PAM sequence: TTT
  source 1..20: mol_type = other DNA
tttggttatggccattcttg

SEQ ID NO: 69372 - DNA, 20 bp, synthetic construct
  misc_feature 1..20: note = Description of Artificial Sequence: Synthetic oligonucleotide
  misc_feature 1..20: note = Target: SCN10A; (+) strand; PAM type: YTN; PAM sequence: TTT
  source 1..20: mol_type = other DNA
ttggttatggccattcttgc

SEQ ID NO: 69373 - DNA, 20 bp, synthetic construct
  misc_feature 1..20: note = Description of Artificial Sequence: Synthetic oligonucleotide
  misc_feature 1..20: note = Target: SCN10A; (+) strand; PAM type: YTN; PAM sequence: TTT
  source 1..20: mol_type = other DNA
tggttatggccattcttgca

SEQ ID NO: 69374 - DNA, 20 bp, synthetic construct
  misc_feature 1..20: note = Description of Artificial Sequence: Synthetic oligonucleotide
  misc_feature 1..20: note = Target: SCN10A; (+) strand; PAM type: YTN; PAM sequence: TTT
  source 1..20: mol_type = other DNA
ggttatggccattcttgcag

SEQ ID NO: 69375 - DNA, 20 bp, synthetic construct
  misc_feature 1..20: note = Description of Artificial Sequence: Synthetic oligonucleotide
  misc_feature 1..20: note = Target: SCN10A; (+) strand; PAM type: YTN; PAM sequence: TTG
  source 1..20: mol_type = other DNA
gttatggccattcttgcagg

SEQ ID NO: 69376 - DNA, 20 bp, synthetic construct
  misc_feature 1..20: note = Description of Artificial Sequence: Synthetic oligonucleotide
  misc_feature 1..20: note = Target: SCN10A; (+) strand; PAM type: YTN; PAM sequence: TTA
  source 1..20: mol_type = other DNA
tggccattcttgcaggagta

SEQ ID NO: 69377 - DNA, 20 bp, synthetic construct
  misc_feature 1..20: note = Description of Artificial Sequence: Synthetic oligonucleotide
  misc_feature 1..20: note = Target: SCN10A; (+) strand; PAM type: YTN; PAM sequence: TTC
  source 1..20: mol_type = other DNA
ttgcaggagtaaggtggtat

SEQ ID NO: 69378 - DNA, 20 bp, synthetic construct
  misc_feature 1..20: note = Description of Artificial Sequence: Synthetic oligonucleotide
  misc_feature 1..20: note = Target: SCN10A; (+) strand; PAM type: YTN; PAM sequence: CTT
  source 1..20: mol_type = other DNA
gcaggagtaaggtggtatct

SEQ ID NO: 69379 - DNA, 20 bp, synthetic construct
  misc_feature 1..20: note = Description of Artificial Sequence: Synthetic oligonucleotide
  misc_feature 1..20: note = Target: SCN10A; (+) strand; PAM type: YTN; PAM sequence: TTG
  source 1..20: mol_type = other DNA
caggagtaaggtggtatctc

SEQ ID NO: 69380 - DNA, 20 bp, synthetic construct
  misc_feature 1..20: note = Description of Artificial Sequence: Synthetic oligonucleotide
  misc_feature 1..20: note = Target: SCN10A; (+) strand; PAM type: YTN; PAM sequence: CTC
  source 1..20: mol_type = other DNA
attgtggttttaatttgcat

SEQ ID NO: 69381 - DNA, 20 bp, synthetic construct
  misc_feature 1..20: note = Description of Artificial Sequence: Synthetic oligonucleotide
  misc_feature 1..20: note = Target: SCN10A; (+) strand; PAM type: YTN; PAM sequence: TTG
  source 1..20: mol_type = other DNA
tggttttaatttgcatttcc

SEQ ID NO: 69382 - DNA, 20 bp, synthetic construct
  misc_feature 1..20: note = Description of Artificial Sequence: Synthetic oligonucleotide
  misc_feature 1..20: note = Target: SCN10A; (+) strand; PAM type: YTN; PAM sequence: TTT
  source 1..20: mol_type = other DNA
taatttgcatttccctgata

SEQ ID NO: 69383 - DNA, 20 bp, synthetic construct
  misc_feature 1..20: note = Description of Artificial Sequence: Synthetic oligonucleotide
  misc_feature 1..20: note = Target: SCN10A; (+) strand; PAM type: YTN; PAM sequence: TTT
  source 1..20: mol_type = other DNA
aatttgcatttccctgataa

SEQ ID NO: 69384 - DNA, 20 bp, synthetic construct
  misc_feature 1..20: note = Description of Artificial Sequence: Synthetic oligonucleotide
  misc_feature 1..20: note = Target: SCN10A; (+) strand; PAM type: YTN; PAM sequence: TTA
  source 1..20: mol_type = other DNA
atttgcatttccctgataat

SEQ ID NO: 69385 - DNA, 20 bp, synthetic construct
  misc_feature 1..20: note = Description of Artificial Sequence: Synthetic oligonucleotide
  misc_feature 1..20: note = Target: SCN10A; (+) strand; PAM type: YTN; PAM sequence: TTT
  source 1..20: mol_type = other DNA
gcatttccctgataattaat

SEQ ID NO: 69386 - DNA, 20 bp, synthetic construct
  misc_feature 1..20: note = Description of Artificial Sequence: Synthetic oligonucleotide
  misc_feature 1..20: note = Target: SCN10A; (+) strand; PAM type: YTN; PAM sequence: TTG
  source 1..20: mol_type = other DNA
catttccctgataattaatg

SEQ ID NO: 69387 - DNA, 20 bp, synthetic construct
  misc_feature 1..20: note = Description of Artificial Sequence: Synthetic oligonucleotide
  misc_feature 1..20: note = Target: SCN10A; (+) strand; PAM type: YTN; PAM sequence: TTT
  source 1..20: mol_type = other DNA
ccctgataattaatgatgtt

SEQ ID NO: 69388 - DNA, 20 bp, synthetic construct
  misc_feature 1..20: note = Description of Artificial Sequence: Synthetic oligonucleotide
  misc_feature 1..20: note = Target: SCN10A; (+) strand; PAM type: YTN; PAM sequence: TTC
  source 1..20: mol_type = other DNA
cctgataattaatgatgttg

SEQ ID NO: 69389 - DNA, 20 bp, synthetic construct
  misc_feature 1..20: note = Description of Artificial Sequence: Synthetic oligonucleotide
  misc_feature 1..20: note = Target: SCN10A; (+) strand; PAM type: YTN; PAM sequence: CTG
  source 1..20: mol_type = other DNA
ataattaatgatgttgagca

SEQ ID NO: 69390 - DNA, 20 bp, synthetic construct
  misc_feature 1..20: note = Description of Artificial Sequence: Synthetic oligonucleotide
  misc_feature 1..20: note = Target: SCN10A; (+) strand; PAM type: YTN; PAM sequence: TTA
  source 1..20: mol_type = other DNA
atgatgttgagcattttttt

SEQ ID NO: 69391 - DNA, 20 bp, synthetic construct
  misc_feature 1..20: note = Description of Artificial Sequence: Synthetic oligonucleotide
  misc_feature 1..20: note = Target: SCN10A; (+) strand; PAM type: YTN; PAM sequence: TTG
  source 1..20: mol_type = other DNA
agcatttttttttcctgttc

SEQ ID NO: 69392 - DNA, 20 bp, synthetic construct
  misc_feature 1..20: note = Description of Artificial Sequence: Synthetic oligonucleotide
  misc_feature 1..20: note = Target: SCN10A; (+) strand; PAM type: YTN; PAM sequence: TTT
  source 1..20: mol_type = other DNA
ttttttcctgttcattggcc

SEQ ID NO: 69393 - DNA, 20 bp, synthetic construct
  misc_feature 1..20: note = Description of Artificial Sequence: Synthetic oligonucleotide
  misc_feature 1..20: note = Target: SCN10A; (+) strand; PAM type: YTN; PAM sequence: TTT
  source 1..20: mol_type = other DNA
tttttcctgttcattggcca

SEQ ID NO: 69394 - DNA, 20 bp, synthetic construct
  misc_feature 1..20: note = Description of Artificial Sequence: Synthetic oligonucleotide
  misc_feature 1..20: note = Target: SCN10A; (+) strand; PAM type: YTN; PAM sequence: TTT
  source 1..20: mol_type = other DNA
ttttcctgttcattggccat

SEQ ID NO: 69395 - DNA, 20 bp, synthetic construct
  misc_feature 1..20: note = Description of Artificial Sequence: Synthetic oligonucleotide
  misc_feature 1..20: note = Target: SCN10A; (+) strand; PAM type: YTN; PAM sequence: TTT
  source 1..20: mol_type = other DNA
tttcctgttcattggccatt

SEQ ID NO: 69396 - DNA, 20 bp, synthetic construct
  misc_feature 1..20: note = Description of Artificial Sequence: Synthetic oligonucleotide
  misc_feature 1..20: note = Target: SCN10A; (+) strand; PAM type: YTN; PAM sequence: TTT
  source 1..20: mol_type = other DNA
ttcctgttcattggccattt

SEQ ID NO: 69397 - DNA, 20 bp, synthetic construct
  misc_feature 1..20: note = Description of Artificial Sequence: Synthetic oligonucleotide
  misc_feature 1..20: note = Target: SCN10A; (+) strand; PAM type: YTN; PAM sequence: TTT
  source 1..20: mol_type = other DNA
tcctgttcattggccattta

SEQ ID NO: 69398 - DNA, 20 bp, synthetic construct
  misc_feature 1..20: note = Description of Artificial Sequence: Synthetic oligonucleotide
  misc_feature 1..20: note = Target: SCN10A; (+) strand; PAM type: YTN; PAM sequence: TTT
  source 1..20: mol_type = other DNA
cctgttcattggccatttat

SEQ ID NO: 69399 - DNA, 20 bp, synthetic construct
  misc_feature 1..20: note = Description of Artificial Sequence: Synthetic oligonucleotide
  misc_feature 1..20: note = Target: SCN10A; (+) strand; PAM type: YTN; PAM sequence: TTC
  source 1..20: mol_type = other DNA
ctgttcattggccatttata

SEQ ID NO: 69400 - DNA, 20 bp, synthetic construct
  misc_feature 1..20: note = Description of Artificial Sequence: Synthetic oligonucleotide
  misc_feature 1..20: note = Target: SCN10A; (+) strand; PAM type: YTN; PAM sequence: CTG
  source 1..20: mol_type = other DNA
ttcattggccatttatatat

SEQ ID NO: 69401 - DNA, 20 bp, synthetic construct
  misc_feature 1..20: note = Description of Artificial Sequence: Synthetic oligonucleotide
  misc_feature 1..20: note = Target: SCN10A; (+) strand; PAM type: YTN; PAM sequence: TTC
  source 1..20: mol_type = other DNA
attggccatttatatatctt

SEQ ID NO: 69402 - DNA, 20 bp, synthetic construct
  misc_feature 1..20: note = Description of Artificial Sequence: Synthetic oligonucleotide
  misc_feature 1..20: note = Target: SCN10A; (+) strand; PAM type: YTN; PAM sequence: TTG
  source 1..20: mol_type = other DNA
gccatttatatatcttcttt

SEQ ID NO: 69403 - DNA, 20 bp, synthetic construct
  misc_feature 1..20: note = Description of Artificial Sequence: Synthetic oligonucleotide
  misc_feature 1..20: note = Target: SCN10A; (+) strand; PAM type: YTN; PAM sequence: TTT
  source 1..20: mol_type = other DNA
atatatcttcttttgagaat

SEQ ID NO: 69404 - DNA, 20 bp, synthetic construct
  misc_feature 1..20: note = Description of Artificial Sequence: Synthetic oligonucleotide
  misc_feature 1..20: note = Target: SCN10A; (+) strand; PAM type: YTN; PAM sequence: TTA
  source 1..20: mol_type = other DNA
tatatcttcttttgagaatt

SEQ ID NO: 69405 - DNA, 20 bp, synthetic construct
  misc_feature 1..20: note = Description of Artificial Sequence: Synthetic oligonucleotide
  misc_feature 1..20: note = Target: SCN10A; (+) strand; PAM type: YTN; PAM sequence: CTT
  source 1..20: mol_type = other DNA
cttttgagaattgcgtattc

SEQ ID NO: 69406 - DNA, 20 bp, synthetic construct
  misc_feature 1..20: note = Description of Artificial Sequence: Synthetic oligonucleotide
  misc_feature 1..20: note = Target: SCN10A; (+) strand; PAM type: YTN; PAM sequence: TTC
  source 1..20: mol_type = other DNA
ttttgagaattgcgtattct

SEQ ID NO: 69407 - DNA, 20 bp, synthetic construct
  misc_feature 1..20: note = Description of Artificial Sequence: Synthetic oligonucleotide
  misc_feature 1..20: note = Target: SCN10A; (+) strand; PAM type: YTN; PAM sequence: CTT
  source 1..20: mol_type = other DNA
ttgagaattgcgtattcttg

SEQ ID NO: 69408 - DNA, 20 bp, synthetic construct
  misc_feature 1..20: note = Description of Artificial Sequence: Synthetic oligonucleotide
  misc_feature 1..20: note = Target: SCN10A; (+) strand; PAM type: YTN; PAM sequence: TTT
  source 1..20: mol_type = other DNA
tgagaattgcgtattcttgt

SEQ ID NO: 69409 - DNA, 20 bp, synthetic construct
  misc_feature 1..20: note = Description of Artificial Sequence: Synthetic oligonucleotide
  misc_feature 1..20: note = Target: SCN10A; (+) strand; PAM type: YTN; PAM sequence: TTT
  source 1..20: mol_type = other DNA
gagaattgcgtattcttgtc

SEQ ID NO: 69410 - DNA, 20 bp, synthetic construct
  misc_feature 1..20: note = Description of Artificial Sequence: Synthetic oligonucleotide
  misc_feature 1..20: note = Target: SCN10A; (+) strand; PAM type: YTN; PAM sequence: TTG
  source 1..20: mol_type = other DNA
agaattgcgtattcttgtcc

SEQ ID NO: 69411 - DNA, 20 bp, synthetic construct
  misc_feature 1..20: note = Description of Artificial Sequence: Synthetic oligonucleotide
  misc_feature 1..20: note = Target: SCN10A; (+) strand; PAM type: YTN; PAM sequence: TTG
  source 1..20: mol_type = other DNA
cgtattcttgtcctttgccc

SEQ ID NO: 69412 - DNA, 20 bp, synthetic construct
  misc_feature 1..20: note = Description of Artificial Sequence: Synthetic oligonucleotide
  misc_feature 1..20: note = Target: SCN10A; (+) strand; PAM type: YTN; PAM sequence: TTC
  source 1..20: mol_type = other DNA
ttgtcctttgcccacttttg

SEQ ID NO: 69413 - DNA, 20 bp, synthetic construct
  misc_feature 1..20: note = Description of Artificial Sequence: Synthetic oligonucleotide
  misc_feature 1..20: note = Target: SCN10A; (+) strand; PAM type: YTN; PAM sequence: CTT
  source 1..20: mol_type = other DNA
gtcctttgcccacttttgga

SEQ ID NO: 69414 - DNA, 20 bp, synthetic construct
  misc_feature 1..20: note = Description of Artificial Sequence: Synthetic oligonucleotide
  misc_feature 1..20: note = Target: SCN10A; (+) strand; PAM type: YTN; PAM sequence: TTG
  source 1..20: mol_type = other DNA
tcctttgcccacttttggat

SEQ ID NO: 69415 - DNA, 20 bp, synthetic construct
  misc_feature 1..20: note = Description of Artificial Sequence: Synthetic oligonucleotide
  misc_feature 1..20: note = Target: SCN10A; (+) strand; PAM type: YTN; PAM sequence: CTT
  source 1..20: mol_type = other DNA
tgcccacttttggatgggat

SEQ ID NO: 69416 - DNA, 20 bp, synthetic construct
  misc_feature 1..20: note = Description of Artificial Sequence: Synthetic oligonucleotide
  misc_feature 1..20: note = Target: SCN10A; (+) strand; PAM type: YTN; PAM sequence: TTT
  source 1..20: mol_type = other DNA
gcccacttttggatgggatt

SEQ ID NO: 69417 - DNA, 20 bp, synthetic construct
  misc_feature 1..20: note = Description of Artificial Sequence: Synthetic oligonucleotide
  misc_feature 1..20: note = Target: SCN10A; (+) strand; PAM type: YTN; PAM sequence: TTG
  source 1..20: mol_type = other DNA
cccacttttggatgggatta

SEQ ID NO: 69418 - DNA, 20 bp, synthetic construct
  misc_feature 1..20: note = Description of Artificial Sequence: Synthetic oligonucleotide
  misc_feature 1..20: note = Target: SCN10A; (+) strand; PAM type: YTN; PAM sequence: CTT
  source 1..20: mol_type = other DNA
ttggatgggattatttgttt

SEQ ID NO: 69419 - DNA, 20 bp, synthetic construct
  misc_feature 1..20: note = Description of Artificial Sequence: Synthetic oligonucleotide
  misc_feature 1..20: note = Target: SCN10A; (+) strand; PAM type: YTN; PAM sequence: TTT
  source 1..20: mol_type = other DNA
tggatgggattatttgtttg

SEQ ID NO: 69420 - DNA, 20 bp, synthetic construct
  misc_feature 1..20: note = Description of Artificial Sequence: Synthetic oligonucleotide
  misc_feature 1..20: note = Target: SCN10A; (+) strand; PAM type: YTN; PAM sequence: TTT
  source 1..20: mol_type = other DNA
ggatgggattatttgtttgt

SEQ ID NO: 69421 - DNA, 20 bp, synthetic construct
  misc_feature 1..20: note = Description of Artificial Sequence: Synthetic oligonucleotide
  misc_feature 1..20: note = Target: SCN10A; (+) strand; PAM type: YTN; PAM sequence: TTG
  source 1..20: mol_type = other DNA
gatgggattatttgtttgtt

SEQ ID NO: 69422 - DNA, 20 bp, synthetic construct
  misc_feature 1..20: note = Description of Artificial Sequence: Synthetic oligonucleotide
  misc_feature 1..20: note = Target: SCN10A; (+) strand; PAM type: YTN; PAM sequence: TTA
  source 1..20: mol_type = other DNA
tttgtttgttttcttgctga

SEQ ID NO: 69423 - DNA, 20 bp, synthetic construct
  misc_feature 1..20: note = Description of Artificial Sequence: Synthetic oligonucleotide
  misc_feature 1..20: note = Target: SCN10A; (+) strand; PAM type: YTN; PAM sequence: TTT
  source 1..20: mol_type = other DNA
gtttgttttcttgctgattt

SEQ ID NO: 69424 - DNA, 20 bp, synthetic construct
  misc_feature 1..20: note = Description of Artificial Sequence: Synthetic oligonucleotide
  misc_feature 1..20: note = Target: SCN10A; (+) strand; PAM type: YTN; PAM sequence: TTG
  source 1..20: mol_type = other DNA
tttgttttcttgctgattta

SEQ ID NO: 69425 - DNA, 20 bp, synthetic construct
  misc_feature 1..20: note = Description of Artificial Sequence: Synthetic oligonucleotide
  misc_feature 1..20: note = Target: SCN10A; (+) strand; PAM type: YTN; PAM sequence: TTT
  source 1..20: mol_type = other DNA
gttttcttgctgatttattt

SEQ ID NO: 69426 - DNA, 20 bp, synthetic construct
  misc_feature 1..20: note = Description of Artificial Sequence: Synthetic oligonucleotide
  misc_feature 1..20: note = Target: SCN10A; (+) strand; PAM type: YTN; PAM sequence: TTG
  source 1..20: mol_type = other DNA
ttttcttgctgatttatttg

SEQ ID NO: 69427 - DNA, 20 bp, synthetic construct
  misc_feature 1..20: note = Description of Artificial Sequence: Synthetic oligonucleotide
  misc_feature 1..20: note = Target: SCN10A; (+) strand; PAM type: YTN; PAM sequence: TTT
  source 1..20: mol_type = other DNA
tcttgctgatttatttgtgt

SEQ ID NO: 69428 - DNA, 20 bp, synthetic construct
  misc_feature 1..20: note = Description of Artificial Sequence: Synthetic oligonucleotide
  misc_feature 1..20: note = Target: SCN10A; (+) strand; PAM type: YTN; PAM sequence: TTT
  source 1..20: mol_type = other DNA
cttgctgatttatttgtgtt

SEQ ID NO: 69429 - DNA, 20 bp, synthetic construct
  misc_feature 1..20: note = Description of Artificial Sequence: Synthetic oligonucleotide
  misc_feature 1..20: note = Target: SCN10A; (+) strand; PAM type: YTN; PAM sequence: TTC
  source 1..20: mol_type = other DNA
ttgctgatttatttgtgttt

SEQ ID NO: 69430 - DNA, 20 bp, synthetic construct
  misc_feature 1..20: note = Description of Artificial Sequence: Synthetic oligonucleotide
  misc_feature 1..20: note = Target: SCN10A; (+) strand; PAM type: YTN; PAM sequence: CTT
  source 1..20: mol_type = other DNA
gctgatttatttgtgtttct

SEQ ID NO: 69431 - DNA, 20 bp, synthetic construct
  misc_feature 1..20: note = Description of Artificial Sequence: Synthetic oligonucleotide
  misc_feature 1..20: note = Target: SCN10A; (+) strand; PAM type: YTN; PAM sequence: TTG
  source 1..20: mol_type = other DNA
ctgatttatttgtgtttctt

SEQ ID NO: 69432 - DNA, 20 bp, synthetic construct
  misc_feature 1..20: note = Description of Artificial Sequence: Synthetic oligonucleotide
  misc_feature 1..20: note = Target: SCN10A; (+) strand; PAM type: YTN; PAM sequence: CTG
  source 1..20: mol_type = other DNA
atttatttgtgtttcttata

SEQ ID NO: 69433 - DNA, 20 bp, synthetic construct
  misc_feature 1..20: note = Description of Artificial Sequence: Synthetic oligonucleotide
  misc_feature 1..20: note = Target: SCN10A; (+) strand; PAM type: YTN; PAM sequence: TTT
  source 1..20: mol_type = other DNA
atttgtgtttcttatagatg

SEQ ID NO: 69434 - DNA, 20 bp, synthetic construct
  misc_feature 1..20: note = Description of Artificial Sequence: Synthetic oligonucleotide
  misc_feature 1..20: note = Target: SCN10A; (+) strand; PAM type: YTN; PAM sequence: TTA
  source 1..20: mol_type = other DNA
tttgtgtttcttatagatgc

SEQ ID NO: 69435 - DNA, 20 bp, synthetic construct
  misc_feature 1..20: note = Description of Artificial Sequence: Synthetic oligonucleotide
  misc_feature 1..20: note = Target: SCN10A; (+) strand; PAM type: YTN; PAM sequence: TTT
  source 1..20: mol_type = other DNA
gtgtttcttatagatgctgg

SEQ ID NO: 69436 - DNA, 20 bp, synthetic construct
  misc_feature 1..20: note = Description of Artificial Sequence: Synthetic oligonucleotide
  misc_feature 1..20: note = Target: SCN10A; (+) strand; PAM type: YTN; PAM sequence: TTG
  source 1..20: mol_type = other DNA
tgtttcttatagatgctgga

SEQ ID NO: 69437 - DNA, 20 bp, synthetic construct
  misc_feature 1..20: note = Description of Artificial Sequence: Synthetic oligonucleotide
  misc_feature 1..20: note = Target: SCN10A; (+) strand; PAM type: YTN; PAM sequence: TTT
  source 1..20: mol_type = other DNA
cttatagatgctggatatta

SEQ ID NO: 69438 - DNA, 20 bp, synthetic construct
  misc_feature 1..20: note = Description of Artificial Sequence: Synthetic oligonucleotide
  misc_feature 1..20: note = Target: SCN10A; (+) strand; PAM type: YTN; PAM sequence: TTC
  source 1..20: mol_type = other DNA
ttatagatgctggatattag

SEQ ID NO: 69439 - DNA, 20 bp, synthetic construct
  misc_feature 1..20: note = Description of Artificial Sequence: Synthetic oligonucleotide
  misc_feature 1..20: note = Target: SCN10A; (+) strand; PAM type: YTN; PAM sequence: CTT
  source 1..20: mol_type = other DNA
atagatgctggatattagtc

SEQ ID NO: 69440 - DNA, 20 bp, synthetic construct
  misc_feature 1..20: note = Description of Artificial Sequence: Synthetic oligonucleotide
  misc_feature 1..20: note = Target: SCN10A; (+) strand; PAM type: YTN; PAM sequence: TTA
  source 1..20: mol_type = other DNA
tagatgctggatattagtct

SEQ ID NO: 69441 - DNA, 20 bp, synthetic construct
  misc_feature 1..20: note = Description of Artificial Sequence: Synthetic oligonucleotide
  misc_feature 1..20: note = Target: SCN10A; (+) strand; PAM type: YTN; PAM sequence: CTG
  source 1..20: mol_type = other DNA
gatattagtcttttgctgga

SEQ ID NO: 69442 - DNA, 20 bp, synthetic construct
  misc_feature 1..20: note = Description of Artificial Sequence: Synthetic oligonucleotide
  misc_feature 1..20: note = Target: SCN10A; (+) strand; PAM type: YTN; PAM sequence: TTA
  source 1..20: mol_type = other DNA
gtcttttgctggaagcatag

SEQ ID NO: 69443 - DNA, 20 bp, synthetic construct
  misc_feature 1..20: note = Description of Artificial Sequence: Synthetic oligonucleotide
  misc_feature 1..20: note = Target: SCN10A; (+) strand; PAM type: YTN; PAM sequence: CTT
  source 1..20: mol_type = other DNA
ttgctggaagcatagataac

SEQ ID NO: 69444 - DNA, 20 bp, synthetic construct
  misc_feature 1..20: note = Description of Artificial Sequence: Synthetic oligonucleotide
  misc_feature 1..20: note = Target: SCN10A; (+) strand; PAM type: YTN; PAM sequence: TTT
  source 1..20: mol_type = other DNA
tgctggaagcatagataaca

SEQ ID NO: 69445 - DNA, 20 bp, synthetic construct
  misc_feature 1..20: note = Description of Artificial Sequence: Synthetic oligonucleotide
  misc_feature 1..20: note = Target: SCN10A; (+) strand; PAM type: YTN; PAM sequence: TTT
  source 1..20: mol_type = other DNA
gctggaagcatagataacaa

SEQ ID NO: 69446 - DNA, 20 bp, synthetic construct
  misc_feature 1..20: note = Description of Artificial Sequence: Synthetic oligonucleotide
  misc_feature 1..20: note = Target: SCN10A; (+) strand; PAM type: YTN; PAM sequence: TTG
  source 1..20: mol_type = other DNA
ctggaagcatagataacaaa

SEQ ID NO: 69447 - DNA, 20 bp, synthetic construct
  misc_feature 1..20: note = Description of Artificial Sequence: Synthetic oligonucleotide
  misc_feature 1..20: note = Target: SCN10A; (+) strand; PAM type: YTN; PAM sequence: CTG
  source 1..20: mol_type = other DNA
gaagcatagataacaaagat

SEQ ID NO: 69448 - DNA, 20 bp, synthetic construct
  misc_feature 1..20: note = Description of Artificial Sequence: Synthetic oligonucleotide
  misc_feature 1..20: note = Target: SCN10A; (+) strand; PAM type: YTN; PAM sequence: TTT
  source 1..20: mol_type = other DNA
ttctctcatcctatgggttg

SEQ ID NO: 69449 - DNA, 20 bp, synthetic construct
  misc_feature 1..20: note = Description of Artificial Sequence: Synthetic oligonucleotide
  misc_feature 1..20: note = Target: SCN10A; (+) strand; PAM type: YTN; PAM sequence: TTT
  source 1..20: mol_type = other DNA
tctctcatcctatgggttgt

SEQ ID NO: 69450 - DNA, 20 bp, synthetic construct
  misc_feature 1..20: note = Description of Artificial Sequence: Synthetic oligonucleotide
  misc_feature 1..20: note = Target: SCN10A; (+) strand; PAM type: YTN; PAM sequence: TTT
  source 1..20: mol_type = other DNA
ctctcatcctatgggttgtc

SEQ ID NO: 69451 - DNA, 20 bp, synthetic construct
  misc_feature 1..20: note = Description of Artificial Sequence: Synthetic oligonucleotide
  misc_feature 1..20: note = Target: SCN10A; (+) strand; PAM type: YTN; PAM sequence: TTC
  source 1..20: mol_type = other DNA
tctcatcctatgggttgtct

SEQ ID NO: 69452 - DNA, 20 bp, synthetic construct
  misc_feature 1..20: note = Description of Artificial Sequence: Synthetic oligonucleotide
  misc_feature 1..20: note = Target: SCN10A; (+) strand; PAM type: YTN; PAM sequence: CTC
  source 1..20: mol_type = other DNA
tcatcctatgggttgtctgt

SEQ ID NO: 69453 - DNA, 20 bp, synthetic construct
  misc_feature 1..20: note = Description of Artificial Sequence: Synthetic oligonucleotide
  misc_feature 1..20: note = Target: SCN10A; (+) strand; PAM type: YTN; PAM sequence: CTC
  source 1..20: mol_type = other DNA
atcctatgggttgtctgttt

SEQ ID NO: 69454 - DNA, 20 bp, synthetic construct
  misc_feature 1..20: note = Description of Artificial Sequence: Synthetic oligonucleotide
  misc_feature 1..20: note = Target: SCN10A; (+) strand; PAM type: YTN; PAM sequence: CTA
  source 1..20: mol_type = other DNA
tgggttgtctgtttacttgg

SEQ ID NO: 69455 - DNA, 20 bp, synthetic construct
  misc_feature 1..20: note = Description of Artificial Sequence: Synthetic oligonucleotide
  misc_feature 1..20: note = Target: SCN10A; (+) strand; PAM type: YTN; PAM sequence: TTG
  source 1..20: mol_type = other DNA
tctgtttacttggatgatta

SEQ ID NO: 69456 - DNA, 20 bp, synthetic construct
  misc_feature 1..20: note = Description of Artificial Sequence: Synthetic oligonucleotide
  misc_feature 1..20: note = Target: SCN10A; (+) strand; PAM type: YTN; PAM sequence: CTG
  source 1..20: mol_type = other DNA
tttacttggatgattatttc

SEQ ID NO: 69457 - DNA, 20 bp, synthetic construct
  misc_feature 1..20: note = Description of Artificial Sequence: Synthetic oligonucleotide
  misc_feature 1..20: note = Target: SCN10A; (+) strand; PAM type: YTN; PAM sequence: TTT
  source 1..20: mol_type = other DNA
acttggatgattatttctct

SEQ ID NO: 69458 - DNA, 20 bp, synthetic construct
  misc_feature 1..20: note = Description of Artificial Sequence: Synthetic oligonucleotide
  misc_feature 1..20: note = Target: SCN10A; (+) strand; PAM type: YTN; PAM sequence: TTA
  source 1..20: mol_type = other DNA
cttggatgattatttctctt

SEQ ID NO: 69459 - DNA, 20 bp, synthetic construct
  misc_feature 1..20: note = Description of Artificial Sequence: Synthetic oligonucleotide
  misc_feature 1..20: note = Target: SCN10A; (+) strand; PAM type: YTN; PAM sequence: CTT
  source 1..20: mol_type = other DNA
ggatgattatttctcttgct

SEQ ID NO: 69460 - DNA, 20 bp, synthetic construct
  misc_feature 1..20: note = Description of Artificial Sequence: Synthetic oligonucleotide
  misc_feature 1..20: note = Target: SCN10A; (+) strand; PAM type: YTN; PAM sequence: TTG
  source 1..20: mol_type = other DNA
gatgattatttctcttgctg

SEQ ID NO: 69461 - DNA, 20 bp, synthetic construct
  misc_feature 1..20: note = Description of Artificial Sequence: Synthetic oligonucleotide
  misc_feature 1..20: note = Target: SCN10A; (+) strand; PAM type: YTN; PAM sequence: TTA
  source 1..20: mol_type = other DNA
tttctcttgctgtgcaacag

SEQ ID NO: 69462 - DNA, 20 bp, synthetic construct
  misc_feature 1..20: note = Description of Artificial Sequence: Synthetic oligonucleotide
  misc_feature 1..20: note = Target: SCN10A; (+) strand; PAM type: YTN; PAM sequence: TTT
  source 1..20: mol_type = other DNA
ctcttgctgtgcaacagctt

SEQ ID NO: 69463 - DNA, 20 bp, synthetic construct
  misc_feature 1..20: note = Description of Artificial Sequence: Synthetic oligonucleotide
  misc_feature 1..20: note = Target: SCN10A; (+) strand; PAM type: YTN; PAM sequence: TTC
  source 1..20: mol_type = other DNA
tcttgctgtgcaacagcttt

SEQ ID NO: 69464 - DNA, 20 bp, synthetic construct
  misc_feature 1..20: note = Description of Artificial Sequence: Synthetic oligonucleotide
  misc_feature 1..20: note = Target: SCN10A; (+) strand; PAM type: YTN; PAM sequence: CTC
  source 1..20: mol_type = other DNA
ttgctgtgcaacagcttttt

SEQ ID NO: 69465 - DNA, 20 bp, synthetic construct
  misc_feature 1..20: note = Description of Artificial Sequence: Synthetic oligonucleotide
  misc_feature 1..20: note = Target: SCN10A; (+) strand; PAM type: YTN; PAM sequence: CTT
  source 1..20: mol_type = other DNA
gctgtgcaacagctttttag

SEQ ID NO: 69466 - DNA, 20 bp, synthetic construct
  misc_feature 1..20: note = Description of Artificial Sequence: Synthetic oligonucleotide
  misc_feature 1..20: note = Target: SCN10A; (+) strand; PAM type: YTN; PAM sequence: TTG
  source 1..20: mol_type = other DNA
ctgtgcaacagctttttagt

SEQ ID NO: 69467 - DNA, 20 bp, synthetic construct
  misc_feature 1..20: note = Description of Artificial Sequence: Synthetic oligonucleotide
  misc_feature 1..20: note = Target: SCN10A; (+) strand; PAM type: YTN; PAM sequence: CTG
  source 1..20: mol_type = other DNA
tgcaacagctttttagttta

SEQ ID NO: 69468 - DNA, 20 bp, synthetic construct
  misc_feature 1..20: note = Description of Artificial Sequence: Synthetic oligonucleotide
  misc_feature 1..20: note = Target: SCN10A; (+) strand; PAM type: YTN; PAM sequence: CTT
  source 1..20: mol_type = other DNA
tttagtttaattagatccca

SEQ ID NO: 69469 - DNA, 20 bp, synthetic construct
  misc_feature 1..20: note = Description of Artificial Sequence: Synthetic oligonucleotide
  misc_feature 1..20: note = Target: SCN10A; (+) strand; PAM type: YTN; PAM sequence: TTT
  source 1..20: mol_type = other DNA
ttagtttaattagatcccat

SEQ ID NO: 69470 - DNA, 20 bp, synthetic construct
  misc_feature 1..20: note = Description of Artificial Sequence: Synthetic oligonucleotide
  misc_feature 1..20: note = Target: SCN10A; (+) strand; PAM type: YTN; PAM sequence: TTT
  source 1..20: mol_type = other DNA
tagtttaattagatcccatc

SEQ ID NO: 69471 - DNA, 20 bp, synthetic construct
  misc_feature 1..20: note = Description of Artificial Sequence: Synthetic oligonucleotide
  misc_feature 1..20: note = Target: SCN10A; (+) strand; PAM type: YTN; PAM sequence: TTT
  source 1..20: mol_type = other DNA
agtttaattagatcccatct

SEQ ID NO: 69472 - DNA, 20 bp, synthetic construct
  misc_feature 1..20: note = Description of Artificial Sequence: Synthetic oligonucleotide
  misc_feature 1..20: note = Target: SCN10A; (+) strand; PAM type: YTN; PAM sequence: TTA
  source 1..20: mol_type = other DNA
gtttaattagatcccatcta

SEQ ID NO: 69473 - DNA, 20 bp, synthetic construct
  misc_feature 1..20: note = Description of Artificial Sequence: Synthetic oligonucleotide
  misc_feature 1..20: note = Target: SCN10A; (+) strand; PAM type: YTN; PAM sequence: TTT
  source 1..20: mol_type = other DNA
aattagatcccatctattta

SEQ ID NO: 69474 - DNA, 20 bp, synthetic construct
  misc_feature 1..20: note = Description of Artificial Sequence: Synthetic oligonucleotide
  misc_feature 1..20: note = Target: SCN10A; (+) strand; PAM type: YTN; PAM sequence: TTA
  source 1..20: mol_type = other DNA
attagatcccatctatttat

SEQ ID NO: 69475 - DNA, 20 bp, synthetic construct
  misc_feature 1..20: note = Description of Artificial Sequence: Synthetic oligonucleotide
  misc_feature 1..20: note = Target: SCN10A; (+) strand; PAM type: YTN; PAM sequence: TTA
  source 1..20: mol_type = other DNA
gatcccatctatttattttt

SEQ ID NO: 69476 - DNA, 20 bp, synthetic construct
  misc_feature 1..20: note = Description of Artificial Sequence: Synthetic oligonucleotide
  misc_feature 1..20: note = Target: SCN10A; (+) strand; PAM type: YTN; PAM sequence: CTA
  source 1..20: mol_type = other DNA
tttatttttgtttttgttgg

SEQ ID NO: 69477 - DNA, 20 bp, synthetic construct
  misc_feature 1..20: note = Description of Artificial Sequence: Synthetic oligonucleotide
  misc_feature 1..20: note = Target: SCN10A; (+) strand; PAM type: YTN; PAM sequence: TTT
  source 1..20: mol_type = other DNA
atttttgtttttgttggatt

SEQ ID NO: 69478 - DNA, 20 bp, synthetic construct
  misc_feature 1..20: note = Description of Artificial Sequence: Synthetic oligonucleotide
  misc_feature 1..20: note = Target: SCN10A; (+) strand; PAM type: YTN; PAM sequence: TTA
  source 1..20: mol_type = other DNA
tttttgtttttgttggattt

SEQ ID NO: 69479 - DNA, 20 bp, synthetic construct
  misc_feature 1..20: note = Description of Artificial Sequence: Synthetic oligonucleotide
  misc_feature 1..20: note = Target: SCN10A; (+) strand; PAM type: YTN; PAM sequence: TTT
  source 1..20: mol_type = other DNA
ttgtttttgttggatttgct

SEQ ID NO: 69480 - DNA, 20 bp, synthetic construct
  misc_feature 1..20: note = Description of Artificial Sequence: Synthetic oligonucleotide
  misc_feature 1..20: note = Target: SCN10A; (+) strand; PAM type: YTN; PAM sequence: TTT
  source 1..20: mol_type = other DNA
tgtttttgttggatttgctt

SEQ ID NO: 69481 - DNA, 20 bp, synthetic construct
  misc_feature 1..20: note = Description of Artificial Sequence: Synthetic oligonucleotide
  misc_feature 1..20: note = Target: SCN10A; (+) strand; PAM type: YTN; PAM sequence: TTT
  source 1..20: mol_type = other DNA
gtttttgttggatttgcttt

SEQ ID NO: 69482 - DNA, 20 bp, synthetic construct
  misc_feature 1..20: note = Description of Artificial Sequence: Synthetic oligonucleotide
  misc_feature 1..20: note = Target: SCN10A; (+) strand; PAM type: YTN; PAM sequence: TTG
  source 1..20: mol_type = other DNA
tttttgttggatttgctttg

SEQ ID NO: 69483 - DNA, 20 bp, synthetic construct
  misc_feature 1..20: note = Description of Artificial Sequence: Synthetic oligonucleotide
  misc_feature 1..20: note = Target: SCN10A; (+) strand; PAM type: YTN; PAM sequence: TTT
  source 1..20: mol_type = other DNA
ttgttggatttgctttgggt

SEQ ID NO: 69484 - DNA, 20 bp, synthetic construct
  misc_feature 1..20: note = Description of Artificial Sequence: Synthetic oligonucleotide
  misc_feature 1..20: note = Target: SCN10A; (+) strand; PAM type: YTN; PAM sequence: TTT
  source 1..20: mol_type = other DNA
tgttggatttgctttgggtc

SEQ ID NO: 69485 - DNA, 20 bp, synthetic construct
  misc_feature 1..20: note = Description of Artificial Sequence: Synthetic oligonucleotide
  misc_feature 1..20: note = Target: SCN10A; (+) strand; PAM type: YTN; PAM sequence: TTT
  source 1..20: mol_type = other DNA
gttggatttgctttgggtcc

SEQ ID NO: 69486 - DNA, 20 bp, synthetic construct
  misc_feature 1..20: note = Description of Artificial Sequence: Synthetic oligonucleotide
  misc_feature 1..20: note = Target: SCN10A; (+) strand; PAM type: YTN; PAM sequence: TTG
  source 1..20: mol_type = other DNA
ttggatttgctttgggtcct

SEQ ID NO: 69487 - DNA, 20 bp, synthetic construct
  misc_feature 1..20: note = Description of Artificial Sequence: Synthetic oligonucleotide
  misc_feature 1..20: note = Target: SCN10A; (+) strand; PAM type: YTN; PAM sequence: TTG
  source 1..20: mol_type = other DNA
gatttgctttgggtccttgg

SEQ ID NO: 69488 - DNA, 20 bp, synthetic construct
  misc_feature 1..20: note = Description of Artificial Sequence: Synthetic oligonucleotide
  misc_feature 1..20: note = Target: SCN10A; (+) strand; PAM type: YTN; PAM sequence: TTT
  source 1..20: mol_type = other DNA
gctttgggtccttggtcagg

SEQ ID NO: 69489 - DNA, 20 bp, synthetic construct
  misc_feature 1..20: note = Description of Artificial Sequence: Synthetic oligonucleotide
  misc_feature 1..20: note = Target: SCN10A; (+) strand; PAM type: YTN; PAM sequence: TTG
  source 1..20: mol_type = other DNA
ctttgggtccttggtcagga

SEQ ID NO: 69490 - DNA, 20 bp, synthetic construct
  misc_feature 1..20: note = Description of Artificial Sequence: Synthetic oligonucleotide
  misc_feature 1..20: note = Target: SCN10A; (+) strand; PAM type: YTN; PAM sequence: CTT
  source 1..20: mol_type = other DNA
tgggtccttggtcaggaacg

SEQ ID NO: 69491 - DNA, 20 bp, synthetic construct
  misc_feature 1..20: note = Description of Artificial Sequence: Synthetic oligonucleotide
  misc_feature 1..20: note = Target: SCN10A; (+) strand; PAM type: YTN; PAM sequence: TTT
  source 1..20: mol_type = other DNA
gggtccttggtcaggaacgt

SEQ ID NO: 69492 - DNA, 20 bp, synthetic construct
  misc_feature 1..20: note = Description of Artificial Sequence: Synthetic oligonucleotide
  misc_feature 1..20: note = Target: SCN10A; (+) strand; PAM type: YTN; PAM sequence: TTG
  source 1..20: mol_type = other DNA
ggtccttggtcaggaacgtt

SEQ ID NO: 69493 - DNA, 20 bp, synthetic construct
  misc_feature 1..20: note = Description of Artificial Sequence: Synthetic oligonucleotide
  misc_feature 1..20: note = Target: SCN10A; (+) strand; PAM type: YTN; PAM sequence: CTT
  source 1..20: mol_type = other DNA
ggtcaggaacgttttgccta

SEQ ID NO: 69494 - DNA, 20 bp, synthetic construct
  misc_feature 1..20: note = Description of Artificial Sequence: Synthetic oligonucleotide
  misc_feature 1..20: note = Target: SCN10A; (+) strand; PAM type: YTN; PAM sequence: TTG
  source 1..20: mol_type = other DNA
gtcaggaacgttttgcctaa

SEQ ID NO: 69495 - DNA, 20 bp, synthetic construct
  misc_feature 1..20: note = Description of Artificial Sequence: Synthetic oligonucleotide
  misc_feature 1..20: note = Target: SCN10A; (+) strand; PAM type: YTN; PAM sequence: TTT
  source 1..20: mol_type = other DNA
tgcctaagccaatgtctaga

SEQ ID NO: 69496 - DNA, 20 bp, synthetic construct
  misc_feature 1..20: note = Description of Artificial Sequence: Synthetic oligonucleotide
  misc_feature 1..20: note = Target: SCN10A; (+) strand; PAM type: YTN; PAM sequence: TTT
  source 1..20: mol_type = other DNA
gcctaagccaatgtctagaa

SEQ ID NO: 69497 - DNA, 20 bp, synthetic construct
  misc_feature 1..20: note = Description of Artificial Sequence: Synthetic oligonucleotide
  misc_feature 1..20: note = Target: SCN10A; (+) strand; PAM type: YTN; PAM sequence: TTG
  source 1..20: mol_type = other DNA
cctaagccaatgtctagaag

SEQ ID NO: 69498 - DNA, 20 bp, synthetic construct
  misc_feature 1..20: note = Description of Artificial Sequence: Synthetic oligonucleotide
  misc_feature 1..20: note = Target: SCN10A; (+) strand; PAM type: YTN; PAM sequence: CTA
  source 1..20: mol_type = other DNA
agccaatgtctagaagagtt

SEQ ID NO: 69499 - DNA, 20 bp, synthetic construct
  misc_feature 1..20: note = Description of Artificial Sequence: Synthetic oligonucleotide
  misc_feature 1..20: note = Target: SCN10A; (+) strand; PAM type: YTN; PAM sequence: CTA
  source 1..20: mol_type = other DNA
gaagagtttttccaatgtta

SEQ ID NO: 69500 - DNA, 20 bp, synthetic construct
  misc_feature 1..20: note = Description of Artificial Sequence: Synthetic oligonucleotide
  misc_feature 1..20: note = Target: SCN10A; (+) strand; PAM type: YTN; PAM sequence: TTT
  source 1..20: mol_type = other DNA
ttccaatgttatcttctaga

SEQ ID NO: 69501 - DNA, 20 bp, synthetic construct
  misc_feature 1..20: note = Description of Artificial Sequence: Synthetic oligonucleotide
  misc_feature 1..20: note = Target: SCN10A; (+) strand; PAM type: YTN; PAM sequence: TTT
  source 1..20: mol_type = other DNA
tccaatgttatcttctagaa

SEQ ID NO: 69502 - DNA, 20 bp, synthetic construct
  misc_feature 1..20: note = Description of Artificial Sequence: Synthetic oligonucleotide
  misc_feature 1..20: note = Target: SCN10A; (+) strand; PAM type: YTN; PAM sequence: TTT
  source 1..20: mol_type = other DNA
ccaatgttatcttctagaat

SEQ ID NO: 69503 - DNA, 20 bp, synthetic construct
  misc_feature 1..20: note = Description of Artificial Sequence: Synthetic oligonucleotide
  misc_feature 1..20: note = Target: SCN10A; (+) strand; PAM type: YTN; PAM sequence: TTC
  source 1..20: mol_type = other DNA
caatgttatcttctagaatt

SEQ ID NO: 69504 - DNA, 20 bp, synthetic construct
  misc_feature 1..20: note = Description of Artificial Sequence: Synthetic oligonucleotide
  misc_feature 1..20: note = Target: SCN10A; (+) strand; PAM type: YTN; PAM sequence: TTA
  source 1..20: mol_type = other DNA
tcttctagaattttttataa

SEQ ID NO: 69505 - DNA, 20 bp, synthetic construct
  misc_feature 1..20: note = Description of Artificial Sequence: Synthetic oligonucleotide
  misc_feature 1..20: note = Target: SCN10A; (+) strand; PAM type: YTN; PAM sequence: CTT
  source 1..20: mol_type = other DNA
ctagaattttttataatttc

SEQ ID NO: 69506 - DNA, 20 bp, synthetic construct
  misc_feature 1..20: note = Description of Artificial Sequence: Synthetic oligonucleotide
  misc_feature 1..20: note = Target: SCN10A; (+) strand; PAM type: YTN; PAM sequence: TTC
  source 1..20: mol_type = other DNA
tagaattttttataatttca

SEQ ID NO: 69507 - DNA, 20 bp, synthetic construct
  misc_feature 1..20: note = Description of Artificial Sequence: Synthetic oligonucleotide
  misc_feature 1..20: note = Target: SCN10A; (+) strand; PAM type: YTN; PAM sequence: CTA
  source 1..20: mol_type = other DNA
gaattttttataatttcagg

SEQ ID NO: 69508 - DNA, 20 bp, synthetic construct
  misc_feature 1..20: note = Description of Artificial Sequence: Synthetic oligonucleotide
  misc_feature 1..20: note = Target: SCN10A; (+) strand; PAM type: YTN; PAM sequence: TTT
  source 1..20: mol_type = other DNA
tttataatttcaggtcttag

SEQ ID NO: 69509 - DNA, 20 bp, synthetic construct
  misc_feature 1..20: note = Description of Artificial Sequence: Synthetic oligonucleotide
  misc_feature 1..20: note = Target: SCN10A; (+) strand; PAM type: YTN; PAM sequence: TTT
  source 1..20: mol_type = other DNA
ttataatttcaggtcttaga

SEQ ID NO: 69510 - DNA, 20 bp, synthetic construct
  misc_feature 1..20: note = Description of Artificial Sequence: Synthetic oligonucleotide
  misc_feature 1..20: note = Target: SCN10A; (+) strand; PAM type: YTN; PAM sequence: TTT
  source 1..20: mol_type = other DNA
tataatttcaggtcttagat

SEQ ID NO: 69511 - DNA, 20 bp, synthetic construct
  misc_feature 1..20: note = Description of Artificial Sequence: Synthetic oligonucleotide
  misc_feature 1..20: note = Target: SCN10A; (+) strand; PAM type: YTN; PAM sequence: TTT
  source 1..20: mol_type = other DNA
ataatttcaggtcttagatt

SEQ ID NO: 69512 - DNA, 20 bp, synthetic construct
  misc_feature 1..20: note = Description of Artificial Sequence: Synthetic oligonucleotide
  misc_feature 1..20: note = Target: SCN10A; (+) strand; PAM type: YTN; PAM sequence: TTA
  source 1..20: mol_type = other DNA
taatttcaggtcttagattt

SEQ ID NO: 69513 - DNA, 20 bp, synthetic construct
  misc_feature 1..20: note = Description of Artificial Sequence: Synthetic oligonucleotide
  misc_feature 1..20: note = Target: SCN10A; (+) strand; PAM type: YTN; PAM sequence: TTT
  source 1..20: mol_type = other DNA
caggtcttagatttaagcct

SEQ ID NO: 69514 - DNA, 20 bp, synthetic construct
  misc_feature 1..20: note = Description of Artificial Sequence: Synthetic oligonucleotide
  misc_feature 1..20: note = Target: SCN10A; (+) strand; PAM type: YTN; PAM sequence: TTC
  source 1..20: mol_type = other DNA
aggtcttagatttaagcctt

SEQ ID NO: 69515 - DNA, 20 bp, synthetic construct
  misc_feature 1..20: note = Description of Artificial Sequence: Synthetic oligonucleotide
  misc_feature 1..20: note = Target: SCN10A; (+) strand; PAM type: YTN; PAM sequence: CTT
  source 1..20: mol_type = other DNA
agatttaagccttttatcca

SEQ ID NO: 69516 - DNA, 20 bp, synthetic construct
  misc_feature 1..20: note = Description of Artificial Sequence: Synthetic oligonucleotide
  misc_feature 1..20: note = Target: SCN10A; (+) strand; PAM type: YTN; PAM sequence: TTA
  source 1..20: mol_type = other DNA
gatttaagccttttatccat

SEQ ID NO: 69517 - DNA, 20 bp, synthetic construct
  misc_feature 1..20: note = Description of Artificial Sequence: Synthetic oligonucleotide
  misc_feature 1..20: note = Target: SCN10A; (+) strand; PAM type: YTN; PAM sequence: TTT
  source 1..20: mol_type = other DNA
aagccttttatccatcttga

SEQ ID NO: 69518 - DNA, 20 bp, synthetic construct
  misc_feature 1..20: note = Description of Artificial Sequence: Synthetic oligonucleotide
  misc_feature 1..20: note = Target: SCN10A; (+) strand; PAM type: YTN; PAM sequence: TTA
  source 1..20: mol_type = other DNA
agccttttatccatcttgaa

SEQ ID NO: 69519 - DNA, 20 bp, synthetic construct
  misc_feature 1..20: note = Description of Artificial Sequence: Synthetic oligonucleotide
  misc_feature 1..20: note = Target: SCN10A; (+) strand; PAM type: YTN; PAM sequence: CTT
  source 1..20: mol_type = other DNA
ttatccatcttgaattgatt

SEQ ID NO: 69520 - DNA, 20 bp, synthetic construct
  misc_feature 1..20: note = Description of Artificial Sequence: Synthetic oligonucleotide
  misc_feature 1..20: note = Target: SCN10A; (+) strand; PAM type: YTN; PAM sequence: TTT
  source 1..20: mol_type = other DNA
tatccatcttgaattgattt

SEQ ID NO: 69521 - DNA, 20 bp, synthetic construct
  misc_feature 1..20: note = Description of Artificial Sequence: Synthetic oligonucleotide
  misc_feature 1..20: note = Target: SCN10A; (+) strand; PAM type: YTN; PAM sequence: TTT
  source 1..20: mol_type = other DNA
atccatcttgaattgatttt

SEQ ID NO: 69522 - DNA, 20 bp, synthetic construct
  misc_feature 1..20: note = Description of Artificial Sequence: Synthetic oligonucleotide
  misc_feature 1..20: note = Target: SCN10A; (+) strand; PAM type: YTN; PAM sequence: TTA
  source 1..20: mol_type = other DNA
tccatcttgaattgattttt

SEQ ID NO: 69523 - DNA, 20 bp, synthetic construct
  misc_feature 1..20: note = Description of Artificial Sequence: Synthetic oligonucleotide
  misc_feature 1..20: note = Target: SCN10A; (+) strand; PAM type: YTN; PAM sequence: CTT
  source 1..20: mol_type = other DNA
gaattgatttttgtataagg

SEQ ID NO: 69524 - DNA, 20 bp, synthetic construct
  misc_feature 1..20: note = Description of Artificial Sequence: Synthetic oligonucleotide
  misc_feature 1..20: note = Target: SCN10A; (+) strand; PAM type: YTN; PAM sequence: TTG
  source 1..20: mol_type = other DNA
aattgatttttgtataaggt

SEQ ID NO: 69525 - DNA, 20 bp, synthetic construct
  misc_feature 1..20: note = Description of Artificial Sequence: Synthetic oligonucleotide
  misc_feature 1..20: note = Target: SCN10A; (+) strand; PAM type: YTN; PAM sequence: TTG
  source 1..20: mol_type = other DNA
atttttgtataaggtgagag

SEQ ID NO: 69526 - DNA, 20 bp, synthetic construct
  misc_feature 1..20: note = Description of Artificial Sequence: Synthetic oligonucleotide
  misc_feature 1..20: note = Target: SCN10A; (+) strand; PAM type: YTN; PAM sequence: TTT
  source 1..20: mol_type = other DNA
ttgtataaggtgagagatga

SEQ ID NO: 69527 - DNA, 20 bp, synthetic construct
  misc_feature 1..20: note = Description of Artificial Sequence: Synthetic oligonucleotide
  misc_feature 1..20: note = Target: SCN10A; (+) strand; PAM type: YTN; PAM sequence: TTT
  source 1..20: mol_type = other DNA
tgtataaggtgagagatgaa

SEQ ID NO: 69528 - DNA, 20 bp, synthetic construct
  misc_feature 1..20: note = Description of Artificial Sequence: Synthetic oligonucleotide
  misc_feature 1..20: note = Target: SCN10A; (+) strand; PAM type: YTN; PAM sequence: TTT
  source 1..20: mol_type = other DNA
gtataaggtgagagatgaag

SEQ ID NO: 69529 - DNA, 20 bp, synthetic construct
  misc_feature 1..20: note = Description of Artificial Sequence: Synthetic oligonucleotide
  misc_feature 1..20: note = Target: SCN10A; (+) strand; PAM type: YTN; PAM sequence: TTG
  source 1..20: mol_type = other DNA
tataaggtgagagatgaaga

SEQ ID NO: 69530 - DNA, 20 bp, synthetic construct
  misc_feature 1..20: note = Description of Artificial Sequence: Synthetic oligonucleotide
  misc_feature 1..20: note = Target: SCN10A; (+) strand; PAM type: YTN; PAM sequence: TTC
  source 1..20: mol_type = other DNA
agtttctttcttccacatgt

SEQ ID NO: 69531 - DNA, 20 bp, synthetic construct
  misc_feature 1..20: note = Description of Artificial Sequence: Synthetic oligonucleotide
  misc_feature 1..20: note = Target: SCN10A; (+) strand; PAM type: YTN; PAM sequence: TTT
  source 1..20: mol_type = other DNA
ctttcttccacatgtggctt

SEQ ID NO: 69532 - DNA, 20 bp, synthetic construct
  misc_feature 1..20: note = Description of Artificial Sequence: Synthetic oligonucleotide
  misc_feature 1..20: note = Target: SCN10A; (+) strand; PAM type: YTN; PAM sequence: TTC
  source 1..20: mol_type = other DNA
tttcttccacatgtggcttg

SEQ ID NO: 69533 - DNA, 20 bp, synthetic construct
  misc_feature 1..20: note = Description of Artificial Sequence: Synthetic oligonucleotide
  misc_feature 1..20: note = Target: SCN10A; (+) strand; PAM type: YTN; PAM sequence: CTT
  source 1..20: mol_type = other DNA
tcttccacatgtggcttgct

SEQ ID NO: 69534 - DNA, 20 bp, synthetic construct
  misc_feature 1..20: note = Description of Artificial Sequence: Synthetic oligonucleotide
  misc_feature 1..20: note = Target: SCN10A; (+) strand; PAM type: YTN; PAM sequence: TTT
  source 1..20: mol_type = other DNA
cttccacatgtggcttgcta

SEQ ID NO: 69535 - DNA, 20 bp, synthetic construct
  misc_feature 1..20: note = Description of Artificial Sequence: Synthetic oligonucleotide
  misc_feature 1..20: note = Target: SCN10A; (+) strand; PAM type: YTN; PAM sequence: TTC
  source 1..20: mol_type = other DNA
ttccacatgtggcttgctaa

SEQ ID NO: 69536 - DNA, 20 bp, synthetic construct
  misc_feature 1..20: note = Description of Artificial Sequence: Synthetic oligonucleotide
  misc_feature 1..20: note = Target: SCN10A; (+) strand; PAM type: YTN; PAM sequence: CTT
  source 1..20: mol_type = other DNA
ccacatgtggcttgctaatt

SEQ ID NO: 69537 - DNA, 20 bp, synthetic construct
  misc_feature 1..20: note = Description of Artificial Sequence: Synthetic oligonucleotide
  misc_feature 1..20: note = Target: SCN10A; (+) strand; PAM type: YTN; PAM sequence: TTC
  source 1..20: mol_type = other DNA
cacatgtggcttgctaatta

SEQ ID NO: 69538 - DNA, 20 bp, synthetic construct
  misc_feature 1..20: note = Description of Artificial Sequence: Synthetic oligonucleotide
  misc_feature 1..20: note = Target: SCN10A; (+) strand; PAM type: YTN; PAM sequence: CTT
  source 1..20: mol_type = other DNA
gctaattatcccagcaccat

SEQ ID NO: 69539 - DNA, 20 bp, synthetic construct
  misc_feature 1..20: note = Description of Artificial Sequence: Synthetic oligonucleotide
  misc_feature 1..20: note = Target: SCN10A; (+) strand; PAM type: YTN; PAM sequence: TTG
  source 1..20: mol_type = other DNA
ctaattatcccagcaccatt

SEQ ID NO: 69540 - DNA, 20 bp, synthetic construct
  misc_feature 1..20: note = Description of Artificial Sequence: Synthetic oligonucleotide
  misc_feature 1..20: note = Target: SCN10A; (+) strand; PAM type: YTN; PAM sequence: CTA
  source 1..20: mol_type = other DNA
attatcccagcaccatttgt

SEQ ID NO: 69541 - DNA, 20 bp, synthetic construct
  misc_feature 1..20: note = Description of Artificial Sequence: Synthetic oligonucleotide
  misc_feature 1..20: note = Target: SCN10A; (+) strand; PAM type: YTN; PAM sequence: TTA
  source 1..20: mol_type = other DNA
tcccagcaccatttgttgaa

SEQ ID NO: 69542 - DNA, 20 bp, synthetic construct
  misc_feature 1..20: note = Description of Artificial Sequence: Synthetic oligonucleotide
  misc_feature 1..20: note = Target: SCN10A; (+) strand; PAM type: YTN; PAM sequence: TTT
  source 1..20: mol_type = other DNA
gttgaatagggtgtcctttc

SEQ ID NO: 69543 - DNA, 20 bp, synthetic construct
  misc_feature 1..20: note = Description of Artificial Sequence: Synthetic oligonucleotide
  misc_feature 1..20: note = Target: SCN10A; (+) strand; PAM type: YTN; PAM sequence: TTG
  source 1..20: mol_type = other DNA
ttgaatagggtgtcctttcc

SEQ ID NO: 69544 - DNA, 20 bp, synthetic construct
  misc_feature 1..20: note = Description of Artificial Sequence: Synthetic oligonucleotide
  misc_feature 1..20: note = Target: SCN10A; (+) strand; PAM type: YTN; PAM sequence: TTG
  source 1..20: mol_type = other DNA
aatagggtgtcctttcccca

SEQ ID NO: 69545 - DNA, 20 bp, synthetic construct
  misc_feature 1..20: note = Description of Artificial Sequence: Synthetic oligonucleotide
  misc_feature 1..20: note = Target: SCN10A; (+) strand; PAM type: YTN; PAM sequence: CTT
  source 1..20: mol_type = other DNA
tccccacttacgtttttgtt

SEQ ID NO: 69546 - DNA, 20 bp, synthetic construct
  misc_feature 1..20: note = Description of Artificial Sequence: Synthetic oligonucleotide
  misc_feature 1..20: note = Target: SCN10A; (+) strand; PAM type: YTN; PAM sequence: TTT
  source 1..20: mol_type = other DNA
ccccacttacgtttttgttt

SEQ ID NO: 69547 - DNA, 20 bp, synthetic construct
  misc_feature 1..20: note = Description of Artificial Sequence: Synthetic oligonucleotide
  misc_feature 1..20: note = Target: SCN10A; (+) strand; PAM type: YTN; PAM sequence: TTC
  source 1..20: mol_type = other DNA
cccacttacgtttttgtttg

SEQ ID NO: 69548 - DNA, 20 bp, synthetic construct
  misc_feature 1..20: note = Description of Artificial Sequence: Synthetic oligonucleotide
  misc_feature 1..20: note = Target: SCN10A; (+) strand; PAM type: YTN; PAM sequence: CTT
  source 1..20: mol_type = other DNA
acgtttttgtttgctttttc

SEQ ID NO: 69549 - DNA, 20 bp, synthetic construct
  misc_feature 1..20: note = Description of Artificial Sequence: Synthetic oligonucleotide
  misc_feature 1..20: note = Target: SCN10A; (+) strand; PAM type: YTN; PAM sequence: TTA
  source 1..20: mol_type = other DNA
cgtttttgtttgctttttca

SEQ ID NO: 69550 - DNA, 20 bp, synthetic construct
  misc_feature 1..20: note = Description of Artificial Sequence: Synthetic oligonucleotide
  misc_feature 1..20: note = Target: SCN10A; (+) strand; PAM type: YTN; PAM sequence: TTT
  source 1..20: mol_type = other DNA
ttgtttgctttttcaaagat

SEQ ID NO: 69551 - DNA, 20 bp, synthetic construct
  misc_feature 1..20: note = Description of Artificial Sequence: Synthetic oligonucleotide
  misc_feature 1..20: note = Target: SCN10A; (+) strand; PAM type: YTN; PAM sequence: TTT
  source 1..20: mol_type = other DNA
tgtttgctttttcaaagatc

SEQ ID NO: 69552 - DNA, 20 bp, synthetic construct
  misc_feature 1..20: note = Description of Artificial Sequence: Synthetic oligonucleotide
  misc_feature 1..20: note = Target: SCN10A; (+) strand; PAM type: YTN; PAM sequence: TTT
  source 1..20: mol_type = other DNA
gtttgctttttcaaagatca

SEQ ID NO: 69553 - DNA, 20 bp, synthetic construct
  misc_feature 1..20: note = Description of Artificial Sequence: Synthetic oligonucleotide
  misc_feature 1..20: note = Target: SCN10A; (+) strand; PAM type: YTN; PAM sequence: TTG
  source 1..20: mol_type = other DNA
tttgctttttcaaagatcag

SEQ ID NO: 69554 - DNA, 20 bp, synthetic construct
  misc_feature 1..20: note = Description of Artificial Sequence: Synthetic oligonucleotide
  misc_feature 1..20: note = Target: SCN10A; (+) strand; PAM type: YTN; PAM sequence: TTT
  source 1..20: mol_type = other DNA
gctttttcaaagatcagttg

SEQ ID NO: 69555 - DNA, 20 bp, synthetic construct
  misc_feature 1..20: note = Description of Artificial Sequence: Synthetic oligonucleotide
  misc_feature 1..20: note = Target: SCN10A; (+) strand; PAM type: YTN; PAM sequence: TTG
  source 1..20: mol_type = other DNA
ctttttcaaagatcagttgc

SEQ ID NO: 69556 - DNA, 20 bp, synthetic construct
  misc_feature 1..20: note = Description of Artificial Sequence: Synthetic oligonucleotide
  misc_feature 1..20: note = Target: SCN10A; (+) strand; PAM type: YTN; PAM sequence: CTT
  source 1..20: mol_type = other DNA
tttcaaagatcagttgcttg

SEQ ID NO: 69557 - DNA, 20 bp, synthetic construct
  misc_feature 1..20: note = Description of Artificial Sequence: Synthetic oligonucleotide
  misc_feature 1..20: note = Target: SCN10A; (+) strand; PAM type: YTN; PAM sequence: TTT
  source 1..20: mol_type = other DNA
ttcaaagatcagttgcttgt

SEQ ID NO: 69558 - DNA, 20 bp, synthetic construct
  misc_feature 1..20: note = Description of Artificial Sequence: Synthetic oligonucleotide
  misc_feature 1..20: note = Target: SCN10A; (+) strand; PAM type: YTN; PAM sequence: TTT
  source 1..20: mol_type = other DNA
tcaaagatcagttgcttgta

SEQ ID NO: 69559 - DNA, 20 bp, synthetic construct
  misc_feature 1..20: note = Description of Artificial Sequence: Synthetic oligonucleotide
  misc_feature 1..20: note = Target: SCN10A; (+) strand; PAM type: YTN; PAM sequence: TTT
  source 1..20: mol_type = other DNA
caaagatcagttgcttgtaa

SEQ ID NO: 69560 - DNA, 20 bp, synthetic construct
  misc_feature 1..20: note = Description of Artificial Sequence: Synthetic oligonucleotide
  misc_feature 1..20: note = Target: SCN10A; (+) strand; PAM type: YTN; PAM sequence: TTC
  source 1..20: mol_type = other DNA
aaagatcagttgcttgtaag

SEQ ID NO: 69561 - DNA, 20 bp, synthetic construct
  misc_feature 1..20: note = Description of Artificial Sequence: Synthetic oligonucleotide
  misc_feature 1..20: note = Target: SCN10A; (+) strand; PAM type: YTN; PAM sequence: TTG
  source 1..20: mol_type = other DNA
cttgtaagtatttggcttta

SEQ ID NO: 69562 - DNA, 20 bp, synthetic construct
  misc_feature 1..20: note = Description of Artificial Sequence: Synthetic oligonucleotide
  misc_feature 1..20: note = Target: SCN10A; (+) strand; PAM type: YTN; PAM sequence: CTT
  source 1..20: mol_type = other DNA
gtaagtatttggctttattt

SEQ ID NO: 69563 - DNA, 20 bp, synthetic construct
  misc_feature 1..20: note = Description of Artificial Sequence: Synthetic oligonucleotide
  misc_feature 1..20: note = Target: SCN10A; (+) strand; PAM type: YTN; PAM sequence: TTG
  source 1..20: mol_type = other DNA
taagtatttggctttatttc

SEQ ID NO: 69564 - DNA, 20 bp, synthetic construct
  misc_feature 1..20: note = Description of Artificial Sequence: Synthetic oligonucleotide
  misc_feature 1..20: note = Target: SCN10A; (+) strand; PAM type: YTN; PAM sequence: TTT
  source 1..20: mol_type = other DNA
ggctttatttctgagttctc

SEQ ID NO: 69565 - DNA, 20 bp, synthetic construct
  misc_feature 1..20: note = Description of Artificial Sequence: Synthetic oligonucleotide
  misc_feature 1..20: note = Target: SCN10A; (+) strand; PAM type: YTN; PAM sequence: TTG
  source 1..20: mol_type = other DNA
gctttatttctgagttctct

SEQ ID NO: 69566 - DNA, 20 bp, synthetic construct
  misc_feature 1..20: note = Description of Artificial Sequence: Synthetic oligonucleotide
  misc_feature 1..20: note = Target: SCN10A; (+) strand; PAM type: YTN; PAM sequence: CTT
  source 1..20: mol_type = other DNA
tatttctgagttctctattc

SEQ ID NO: 69567 - DNA, 20 bp, synthetic construct
  misc_feature 1..20: note = Description of Artificial Sequence: Synthetic oligonucleotide
  misc_feature 1..20: note = Target: SCN10A; (+) strand; PAM type: YTN; PAM sequence: TTT
  source 1..20: mol_type = other DNA
atttctgagttctctattct

SEQ ID NO: 69568 - DNA, 20 bp, synthetic construct
  misc_feature 1..20: note = Description of Artificial Sequence: Synthetic oligonucleotide
  misc_feature 1..20: note = Target: SCN10A; (+) strand; PAM type: YTN; PAM sequence: TTA
  source 1..20: mol_type = other DNA
tttctgagttctctattctt

SEQ ID NO: 69569 - DNA, 20 bp, synthetic construct
  misc_feature 1..20: note = Description of Artificial Sequence: Synthetic oligonucleotide
  misc_feature 1..20: note = Target: SCN10A; (+) strand; PAM type: YTN; PAM sequence: TTT
  source 1..20: mol_type = other DNA
ctgagttctctattcttttc

SEQ ID NO: 69570 - DNA, 20 bp, synthetic construct
  misc_feature 1..20: note = Description of Artificial Sequence: Synthetic oligonucleotide
  misc_feature 1..20: note = Target: SCN10A; (+) strand; PAM type: YTN; PAM sequence: TTC
  source 1..20: mol_type = other DNA
tgagttctctattcttttcc

SEQ ID NO: 69571 - DNA, 20 bp, synthetic construct
  misc_feature 1..20: note = Description of Artificial Sequence: Synthetic oligonucleotide
  misc_feature 1..20: note = Target: SCN10A; (+) strand; PAM type: YTN; PAM sequence: CTG
  source 1..20: mol_type = other DNA
agttctctattcttttccat

SEQ ID NO: 69572 - DNA, 20 bp, synthetic construct
  misc_feature 1..20: note = Description of Artificial Sequence: Synthetic oligonucleotide
  misc_feature 1..20: note = Target: SCN10A; (+) strand; PAM type: YTN; PAM sequence: TTC
  source 1..20: mol_type = other DNA
tctattcttttccattggtc

SEQ ID NO: 69573 - DNA, 20 bp, synthetic construct
  misc_feature 1..20: note = Description of Artificial Sequence: Synthetic oligonucleotide
  misc_feature 1..20: note = Target: SCN10A; (+) strand; PAM type: YTN; PAM sequence: CTC
  source 1..20: mol_type = other DNA
tattcttttccattggtcta

SEQ ID NO: 69574 - DNA, 20 bp, synthetic construct
  misc_feature 1..20: note = Description of Artificial Sequence: Synthetic oligonucleotide
  misc_feature 1..20: note = Target: SCN10A; (+) strand; PAM type: YTN; PAM sequence: CTA
  source 1..20: mol_type = other DNA
ttcttttccattggtctatg

SEQ ID NO: 69575 - DNA, 20 bp, synthetic construct
  misc_feature 1..20: note = Description of Artificial Sequence: Synthetic oligonucleotide
  misc_feature 1..20: note = Target: SCN10A; (+) strand; PAM type: YTN; PAM sequence: TTC
  source 1..20: mol_type = other DNA
ttttccattggtctatgtgc

SEQ ID NO: 69576 - DNA, 20 bp, synthetic construct
  misc_feature 1..20: note = Description of Artificial Sequence: Synthetic oligonucleotide
  misc_feature 1..20: note = Target: SCN10A; (+) strand; PAM type: YTN; PAM sequence: CTT
  source 1..20: mol_type = other DNA
ttccattggtctatgtgctt

SEQ ID NO: 69577 - DNA, 20 bp, synthetic construct
  misc_feature 1..20: note = Description of Artificial Sequence: Synthetic oligonucleotide
  misc_feature 1..20: note = Target: SCN10A; (+) strand; PAM type: YTN; PAM sequence: TTT
  source 1..20: mol_type = other DNA
tccattggtctatgtgctta

SEQ ID NO: 69578 - DNA, 20 bp, synthetic construct
  misc_feature 1..20: note = Description of Artificial Sequence: Synthetic oligonucleotide
  misc_feature 1..20: note = Target: SCN10A; (+) strand; PAM type: YTN; PAM sequence: TTT
  source 1..20: mol_type = other DNA
ccattggtctatgtgcttat

SEQ ID NO: 69579 - DNA, 20 bp, synthetic construct
  misc_feature 1..20: note = Description of Artificial Sequence: Synthetic oligonucleotide
  misc_feature 1..20: note = Target: SCN10A; (+) strand; PAM type: YTN; PAM sequence: TTC
  source 1..20: mol_type = other DNA
cattggtctatgtgcttatt

SEQ ID NO: 69580 - DNA, 20 bp, synthetic construct
  misc_feature 1..20: note = Description of Artificial Sequence: Synthetic oligonucleotide
  misc_feature 1..20: note = Target: SCN10A; (+) strand; PAM type: YTN; PAM sequence: TTG
  source 1..20: mol_type = other DNA
gtctatgtgcttatttttat

SEQ ID NO: 69581 - DNA, 20 bp, synthetic construct
  misc_feature 1..20: note = Description of Artificial Sequence: Synthetic oligonucleotide
  misc_feature 1..20: note = Target: SCN10A; (+) strand; PAM type: YTN; PAM sequence: CTA
  source 1..20: mol_type = other DNA
tgtgcttatttttataccag

SEQ ID NO: 69582 - DNA, 20 bp, synthetic construct
  misc_feature 1..20: note = Description of Artificial Sequence: Synthetic oligonucleotide
  misc_feature 1..20: note = Target: SCN10A; (+) strand; PAM type: YTN; PAM sequence: CTT
  source 1..20: mol_type = other DNA
atttttataccagtatcatg

SEQ ID NO: 69583 - DNA, 20 bp, synthetic construct
  misc_feature 1..20: note = Description of Artificial Sequence: Synthetic oligonucleotide
  misc_feature 1..20: note = Target: SCN10A; (+) strand; PAM type: YTN; PAM sequence: TTA
  source 1..20: mol_type = other DNA
tttttataccagtatcatgc

SEQ ID NO: 69584 - DNA, 20 bp, synthetic construct
  misc_feature 1..20: note = Description of Artificial Sequence: Synthetic oligonucleotide
  misc_feature 1..20: note = Target: SCN10A; (+) strand; PAM type: YTN; PAM sequence: TTT
  source 1..20: mol_type = other DNA
ttataccagtatcatgctgt

SEQ ID NO: 69585 - DNA, 20 bp, synthetic construct
  misc_feature 1..20: note = Description of Artificial Sequence: Synthetic oligonucleotide
  misc_feature 1..20: note = Target: SCN10A; (+) strand; PAM type: YTN; PAM sequence: TTT
  source 1..20: mol_type = other DNA
tataccagtatcatgctgtt

SEQ ID NO: 69586 - DNA, 20 bp, synthetic construct
  misc_feature 1..20: note = Description of Artificial Sequence: Synthetic oligonucleotide
  misc_feature 1..20: note = Target: SCN10A; (+) strand; PAM type: YTN; PAM sequence: TTT
  source 1..20: mol_type = other DNA
ataccagtatcatgctgttt

SEQ ID NO: 69587 - DNA, 20 bp, synthetic construct
  misc_feature 1..20: note = Description of Artificial Sequence: Synthetic oligonucleotide
  misc_feature 1..20: note = Target: SCN10A; (+) strand; PAM type: YTN; PAM sequence: TTA
  source 1..20: mol_type = other DNA
taccagtatcatgctgtttt

SEQ ID NO: 69588 - DNA, 20 bp, synthetic construct
  misc_feature 1..20: note = Description of Artificial Sequence: Synthetic oligonucleotide
  misc_feature 1..20: note = Target: SCN10A; (+) strand; PAM type: YTN; PAM sequence: CTG
  source 1..20: mol_type = other DNA
ttttggtacaggctatacta

SEQ ID NO: 69589 - DNA, 20 bp, synthetic construct
  misc_feature 1..20: note = Description of Artificial Sequence: Synthetic oligonucleotide
  misc_feature 1..20: note = Target: SCN10A; (+) strand; PAM type: YTN; PAM sequence: TTT
  source 1..20: mol_type = other DNA
tggtacaggctatactatag

SEQ ID NO: 69590 - DNA, 20 bp, synthetic construct
  misc_feature 1..20: note = Description of Artificial Sequence: Synthetic oligonucleotide
  misc_feature 1..20: note = Target: SCN10A; (+) strand; PAM type: YTN; PAM sequence: TTT
  source 1..20: mol_type = other DNA
ggtacaggctatactatagc

SEQ ID NO: 69591 - DNA, 20 bp, synthetic construct
  misc_feature 1..20: note = Description of Artificial Sequence: Synthetic oligonucleotide
  misc_feature 1..20: note = Target: SCN10A; (+) strand; PAM type: YTN; PAM sequence: TTG
  source 1..20: mol_type = other DNA
gtacaggctatactatagcc

SEQ ID NO: 69592 - DNA, 20 bp, synthetic construct
  misc_feature 1..20: note = Description of Artificial Sequence: Synthetic oligonucleotide
  misc_feature 1..20: note = Target: SCN10A; (+) strand; PAM type: YTN; PAM sequence: CTA
  source 1..20: mol_type = other DNA
tactatagccttgtagtata

SEQ ID NO: 69593 - DNA, 20 bp, synthetic construct
  misc_feature 1..20: note = Description of Artificial Sequence: Synthetic oligonucleotide
  misc_feature 1..20: note = Target: SCN10A; (+) strand; PAM type: YTN; PAM sequence: CTA
  source 1..20: mol_type = other DNA
tagccttgtagtatagtttg

SEQ ID NO: 69594 - DNA, 20 bp, synthetic construct
  misc_feature 1..20: note = Description of Artificial Sequence: Synthetic oligonucleotide
  misc_feature 1..20: note = Target: SCN10A; (+) strand; PAM type: YTN; PAM sequence: CTT
  source 1..20: mol_type = other DNA
gtagtatagtttgaaatcag

SEQ ID NO: 69595 - DNA, 20 bp, synthetic construct
  misc_feature 1..20: note = Description of Artificial Sequence: Synthetic oligonucleotide
  misc_feature 1..20: note = Target: SCN10A; (+) strand; PAM type: YTN; PAM sequence: TTG
  source 1..20: mol_type = other DNA
tagtatagtttgaaatcagc

SEQ ID NO: 69596 - DNA, 20 bp, synthetic construct
  misc_feature 1..20: note = Description of Artificial Sequence: Synthetic oligonucleotide
  misc_feature 1..20: note = Target: SCN10A; (+) strand; PAM type: YTN; PAM sequence: TTT
  source 1..20: mol_type = other DNA
gaaatcagctaaggtgatgc

SEQ ID NO: 69597 - DNA, 20 bp, synthetic construct
  misc_feature 1..20: note = Description of Artificial Sequence: Synthetic oligonucleotide
  misc_feature 1..20: note = Target: SCN10A; (+) strand; PAM type: YTN; PAM sequence: TTG
  source 1..20: mol_type = other DNA
aaatcagctaaggtgatgcc

SEQ ID NO: 69598 - DNA, 20 bp, synthetic construct
  misc_feature 1..20: note = Description of Artificial Sequence: Synthetic oligonucleotide
  misc_feature 1..20: note = Target: SCN10A; (+) strand; PAM type: YTN; PAM sequence: CTA
  source 1..20: mol_type = other DNA
aggtgatgcctccagatttg

SEQ ID NO: 69599 - DNA, 20 bp, synthetic construct
  misc_feature 1..20: note = Description of Artificial Sequence: Synthetic oligonucleotide
  misc_feature 1..20: note = Target: SCN10A; (+) strand; PAM type: YTN; PAM sequence: CTC
  source 1..20: mol_type = other DNA
cagatttgttattcttgctt

SEQ ID NO: 69600 - DNA, 20 bp, synthetic construct
  misc_feature 1..20: note = Description of Artificial Sequence: Synthetic oligonucleotide
  misc_feature 1..20: note = Target: SCN10A; (+) strand; PAM type: YTN; PAM sequence: TTT
  source 1..20: mol_type = other DNA
gttattcttgcttagtcttg

SEQ ID NO: 69601 - DNA, 20 bp, synthetic construct
  misc_feature 1..20: note = Description of Artificial Sequence: Synthetic oligonucleotide
  misc_feature 1..20: note = Target: SCN10A; (+) strand; PAM type: YTN; PAM sequence: TTG
  source 1..20: mol_type = other DNA
ttattcttgcttagtcttgc

SEQ ID NO: 69602 - DNA, 20 bp, synthetic construct
  misc_feature 1..20: note = Description of Artificial Sequence: Synthetic oligonucleotide
  misc_feature 1..20: note = Target: SCN10A; (+) strand; PAM type: YTN; PAM sequence: TTA
  source 1..20: mol_type = other DNA
ttcttgcttagtcttgcttt

SEQ ID NO: 69603 - DNA, 20 bp, synthetic construct
  misc_feature 1..20: note = Description of Artificial Sequence: Synthetic oligonucleotide
  misc_feature 1..20: note = Target: SCN10A; (+) strand; PAM type: YTN; PAM sequence: TTC
  source 1..20: mol_type = other DNA
ttgcttagtcttgctttggc

SEQ ID NO: 69604 - DNA, 20 bp, synthetic construct
  misc_feature 1..20: note = Description of Artificial Sequence: Synthetic oligonucleotide
  misc_feature 1..20: note = Target: SCN10A; (+) strand; PAM type: YTN; PAM sequence: CTT
  source 1..20: mol_type = other DNA
gcttagtcttgctttggcta

SEQ ID NO: 69605 - DNA, 20 bp, synthetic construct
  misc_feature 1..20: note = Description of Artificial Sequence: Synthetic oligonucleotide
  misc_feature 1..20: note = Target: SCN10A; (+) strand; PAM type: YTN; PAM sequence: TTG
  source 1..20: mol_type = other DNA
cttagtcttgctttggctat

SEQ ID NO: 69606 - DNA, 20 bp, synthetic construct
  misc_feature 1..20: note = Description of Artificial Sequence: Synthetic oligonucleotide
  misc_feature 1..20: note = Target: SCN10A; (+) strand; PAM type: YTN; PAM sequence: CTT
  source 1..20: mol_type = other DNA
agtcttgctttggctatgtg

SEQ ID NO: 69607 - DNA, 20 bp, synthetic construct
  misc_feature 1..20: note = Description of Artificial Sequence: Synthetic oligonucleotide
  misc_feature 1..20: note = Target: SCN10A; (+) strand; PAM type: YTN; PAM sequence: TTA
  source 1..20: mol_type = other DNA
gtcttgctttggctatgtgg

SEQ ID NO: 69608 - DNA, 20 bp, synthetic construct
  misc_feature 1..20: note = Description of Artificial Sequence: Synthetic oligonucleotide
  misc_feature 1..20: note = Target: SCN10A; (+) strand; PAM type: YTN; PAM sequence: CTT
  source 1..20: mol_type = other DNA
gctttggctatgtggattcc

SEQ ID NO: 69609 - DNA, 20 bp, synthetic construct
  misc_feature 1..20: note = Description of Artificial Sequence: Synthetic oligonucleotide
  misc_feature 1..20: note = Target: SCN10A; (+) strand; PAM type: YTN; PAM sequence: TTG
  source 1..20: mol_type = other DNA
ctttggctatgtggattcct

SEQ ID NO: 69610 - DNA, 20 bp, synthetic construct
  misc_feature 1..20: note = Description of Artificial Sequence: Synthetic oligonucleotide
  misc_feature 1..20: note = Target: SCN10A; (+) strand; PAM type: YTN; PAM sequence: CTT
  source 1..20: mol_type = other DNA
tggctatgtggattcctttt

SEQ ID NO: 69611 - DNA, 20 bp, synthetic construct
  misc_feature 1..20: note = Description of Artificial Sequence: Synthetic oligonucleotide
  misc_feature 1..20: note = Target: SCN10A; (+) strand; PAM type: YTN; PAM sequence: TTT
  source 1..20: mol_type = other DNA
ggctatgtggattccttttt

SEQ ID NO: 69612 - DNA, 20 bp, synthetic construct
  misc_feature 1..20: note = Description of Artificial Sequence: Synthetic oligonucleotide
  misc_feature 1..20: note = Target: SCN10A; (+) strand; PAM type: YTN; PAM sequence: TTG
  source 1..20: mol_type = other DNA
gctatgtggattcctttttg

SEQ ID NO: 69613 - DNA, 20 bp, synthetic construct
  misc_feature 1..20: note = Description of Artificial Sequence: Synthetic oligonucleotide
  misc_feature 1..20: note = Target: SCN10A; (+) strand; PAM type: YTN; PAM sequence: CTA
  source 1..20: mol_type = other DNA
tgtggattcctttttggttc

SEQ ID NO: 69614 - DNA, 20 bp, synthetic construct
  misc_feature 1..20: note = Description of Artificial Sequence: Synthetic oligonucleotide
  misc_feature 1..20: note = Target: SCN10A; (+) strand; PAM type: YTN; PAM sequence: TTC
  source 1..20: mol_type = other DNA
ctttttggttccctatgaat

SEQ ID NO: 69615 - DNA, 20 bp, synthetic construct
  misc_feature 1..20: note = Description of Artificial Sequence: Synthetic oligonucleotide
  misc_feature 1..20: note = Target: SCN10A; (+) strand; PAM type: YTN; PAM sequence: CTT
  source 1..20: mol_type = other DNA
tttggttccctatgaatttt

SEQ ID NO: 69616 - DNA, 20 bp, synthetic construct
  misc_feature 1..20: note = Description of Artificial Sequence: Synthetic oligonucleotide
  misc_feature 1..20: note = Target: SCN10A; (+) strand; PAM type: YTN; PAM sequence: TTT
  source 1..20: mol_type = other DNA
ttggttccctatgaatttta

SEQ ID NO: 69617 - DNA, 20 bp, synthetic construct
  misc_feature 1..20: note = Description of Artificial Sequence: Synthetic oligonucleotide
  misc_feature 1..20: note = Target: SCN10A; (+) strand; PAM type: YTN; PAM sequence: TTT
  source 1..20: mol_type = other DNA
tggttccctatgaattttag

SEQ ID NO: 69618 - DNA, 20 bp, synthetic construct
  misc_feature 1..20: note = Description of Artificial Sequence: Synthetic oligonucleotide
  misc_feature 1..20: note = Target: SCN10A; (+) strand; PAM type: YTN; PAM sequence: TTT
  source 1..20: mol_type = other DNA
ggttccctatgaattttagg

SEQ ID NO: 69619 - DNA, 20 bp, synthetic construct
  misc_feature 1..20: note = Description of Artificial Sequence: Synthetic oligonucleotide
  misc_feature 1..20: note = Target: SCN10A; (+) strand; PAM type: YTN; PAM sequence: TTG
  source 1..20: mol_type = other DNA
gttccctatgaattttaggg

SEQ ID NO: 69620 - DNA, 20 bp, synthetic construct
  misc_feature 1..20: note = Description of Artificial Sequence: Synthetic oligonucleotide
  misc_feature 1..20: note = Target: SCN10A; (+) strand; PAM type: YTN; PAM sequence: TTC
  source 1..20: mol_type = other DNA
cctatgaattttagggttgt

SEQ ID NO: 69621 - DNA, 20 bp, synthetic construct
  misc_feature 1..20: note = Description of Artificial Sequence: Synthetic oligonucleotide
  misc_feature 1..20: note = Target: SCN10A; (+) strand; PAM type: YTN; PAM sequence: CTA
  source 1..20: mol_type = other DNA
tgaattttagggttgttatt

SEQ ID NO: 69622 - DNA, 20 bp, synthetic construct
  misc_feature 1..20: note = Description of Artificial Sequence: Synthetic oligonucleotide
  misc_feature 1..20: note = Target: SCN10A; (+) strand; PAM type: YTN; PAM sequence: TTT
  source 1..20: mol_type = other DNA
tagggttgttatttctattt

SEQ ID NO: 69623 - DNA, 20 bp, synthetic construct
  misc_feature 1..20: note = Description of Artificial Sequence: Synthetic oligonucleotide
  misc_feature 1..20: note = Target: SCN10A; (+) strand; PAM type: YTN; PAM sequence: TTT
  source 1..20: mol_type = other DNA
agggttgttatttctatttc

SEQ ID NO: 69624 - DNA, 20 bp, synthetic construct
  misc_feature 1..20: note = Description of Artificial Sequence: Synthetic oligonucleotide
  misc_feature 1..20: note = Target: SCN10A; (+) strand; PAM type: YTN; PAM sequence: TTA
  source 1..20: mol_type = other DNA
gggttgttatttctatttct

SEQ ID NO: 69625 - DNA, 20 bp, synthetic construct
  misc_feature 1..20: note = Description of Artificial Sequence: Synthetic oligonucleotide
  misc_feature 1..20: note = Target: SCN10A; (+) strand; PAM type: YTN; PAM sequence: TTG
  source 1..20: mol_type = other DNA
ttatttctatttctgtgaag

SEQ ID NO: 69626 - DNA, 20 bp, synthetic construct
  misc_feature 1..20: note = Description of Artificial Sequence: Synthetic oligonucleotide
  misc_feature 1..20: note = Target: SCN10A; (+) strand; PAM type: YTN; PAM sequence: TTA
  source 1..20: mol_type = other DNA
tttctatttctgtgaagaat

SEQ ID NO: 69627 - DNA, 20 bp, synthetic construct
  misc_feature 1..20: note = Description of Artificial Sequence: Synthetic oligonucleotide
  misc_feature 1..20: note = Target: SCN10A; (+) strand; PAM type: YTN; PAM sequence: TTT
  source 1..20: mol_type = other DNA
ctatttctgtgaagaatgat

SEQ ID NO: 69628 - DNA, 20 bp, synthetic construct
  misc_feature 1..20: note = Description of Artificial Sequence: Synthetic oligonucleotide
  misc_feature 1..20: note = Target: SCN10A; (+) strand; PAM type: YTN; PAM sequence: TTC
  source 1..20: mol_type = other DNA
tatttctgtgaagaatgatg

SEQ ID NO: 69629 - DNA, 20 bp, synthetic construct
  misc_feature 1..20: note = Description of Artificial Sequence: Synthetic oligonucleotide
  misc_feature 1..20: note = Target: SCN10A; (+) strand; PAM type: YTN; PAM sequence: CTA
  source 1..20: mol_type = other DNA
tttctgtgaagaatgatgtg

SEQ ID NO: 69630 - DNA, 20 bp, synthetic construct
  misc_feature 1..20: note = Description of Artificial Sequence: Synthetic oligonucleotide
  misc_feature 1..20: note = Target: SCN10A; (+) strand; PAM type: YTN; PAM sequence: TTT
  source 1..20: mol_type = other DNA
ctgtgaagaatgatgtggta

SEQ ID NO: 69631 - DNA, 20 bp, synthetic construct
  misc_feature 1..20: note = Description of Artificial Sequence: Synthetic oligonucleotide
  misc_feature 1..20: note = Target: SCN10A; (+) strand; PAM type: YTN; PAM sequence: TTC
  source 1..20: mol_type = other DNA
tgtgaagaatgatgtggtac

SEQ ID NO: 69632 - DNA, 20 bp, synthetic construct
  misc_feature 1..20: note = Description of Artificial Sequence: Synthetic oligonucleotide
  misc_feature 1..20: note = Target: SCN10A; (+) strand; PAM type: YTN; PAM sequence: CTG
  source 1..20: mol_type = other DNA
tgaagaatgatgtggtactt

SEQ ID NO: 69633 - DNA, 20 bp, synthetic construct
  misc_feature 1..20: note = Description of Artificial Sequence: Synthetic oligonucleotide
  misc_feature 1..20: note = Target: SCN10A; (+) strand; PAM type: YTN; PAM sequence: CTT
  source 1..20: mol_type = other DNA
caatggaaattgtattgaat

SEQ ID NO: 69634 - DNA, 20 bp, synthetic construct
  misc_feature 1..20: note = Description of Artificial Sequence: Synthetic oligonucleotide
  misc_feature 1..20: note = Target: SCN10A; (+) strand; PAM type: YTN; PAM sequence: TTC
  source 1..20: mol_type = other DNA
aatggaaattgtattgaatc

SEQ ID NO: 69635 - DNA, 20 bp, synthetic construct
  misc_feature 1..20: note = Description of Artificial Sequence: Synthetic oligonucleotide
  misc_feature 1..20: note = Target: SCN10A; (+) strand; PAM type: YTN; PAM sequence: TTG
  source 1..20: mol_type = other DNA
tattgaatctgtatattgct

SEQ ID NO: 69636 - DNA, 20 bp, synthetic construct
  misc_feature 1..20: note = Description of Artificial Sequence: Synthetic oligonucleotide
  misc_feature 1..20: note = Target: SCN10A; (+) strand; PAM type: YTN; PAM sequence: TTG
  source 1..20: mol_type = other DNA
aatctgtatattgcttttgg

SEQ ID NO: 69637 - DNA, 20 bp, synthetic construct
  misc_feature 1..20: note = Description of Artificial Sequence: Synthetic oligonucleotide
  misc_feature 1..20: note = Target: SCN10A; (+) strand; PAM type: YTN; PAM sequence: CTG
  source 1..20: mol_type = other DNA
tatattgcttttggcagtaa

SEQ ID NO: 69638 - DNA, 20 bp, synthetic construct
  misc_feature 1..20: note = Description of Artificial Sequence: Synthetic oligonucleotide
  misc_feature 1..20: note = Target: SCN10A; (+) strand; PAM type: YTN; PAM sequence: TTG
  source 1..20: mol_type = other DNA
cttttggcagtaaggtcatt

SEQ ID NO: 69639 - DNA, 20 bp, synthetic construct
  misc_feature 1..20: note = Description of Artificial Sequence: Synthetic oligonucleotide
  misc_feature 1..20: note = Target: SCN10A; (+) strand; PAM type: YTN; PAM sequence: CTT
  source 1..20: mol_type = other DNA
ttggcagtaaggtcattttc

SEQ ID NO: 69640 - DNA, 20 bp, synthetic construct
  misc_feature 1..20: note = Description of Artificial Sequence: Synthetic oligonucleotide
  misc_feature 1..20: note = Target: SCN10A; (+) strand; PAM type: YTN; PAM sequence: TTT
  source 1..20: mol_type = other DNA
tggcagtaaggtcattttca

SEQ ID NO: 69641 - DNA, 20 bp, synthetic construct
  misc_feature 1..20: note = Description of Artificial Sequence: Synthetic oligonucleotide
  misc_feature 1..20: note = Target: SCN10A; (+) strand; PAM type: YTN; PAM sequence: TTT
  source 1..20: mol_type = other DNA
ggcagtaaggtcattttcac

SEQ ID NO: 69642 - DNA, 20 bp, synthetic construct
  misc_feature 1..20: note = Description of Artificial Sequence: Synthetic oligonucleotide
  misc_feature 1..20: note = Target: SCN10A; (+) strand; PAM type: YTN; PAM sequence: TTG
  source 1..20: mol_type = other DNA
gcagtaaggtcattttcaca

SEQ ID NO: 69643 - DNA, 20 bp, synthetic construct
  misc_feature 1..20: note = Description of Artificial Sequence: Synthetic oligonucleotide
  misc_feature 1..20: note = Target: SCN10A; (+) strand; PAM type: YTN; PAM sequence: TTT
  source 1..20: mol_type = other DNA
tcacaatattgattttatcc

SEQ ID NO: 69644 - DNA, 20 bp, synthetic construct
  misc_feature 1..20: note = Description of Artificial Sequence: Synthetic oligonucleotide
  misc_feature 1..20: note = Target: SCN10A; (+) strand; PAM type: YTN; PAM sequence: TTT
  source 1..20: mol_type = other DNA
cacaatattgattttatcca

SEQ ID NO: 69645 - DNA, 20 bp, synthetic construct
  misc_feature 1..20: note = Description of Artificial Sequence: Synthetic oligonucleotide
  misc_feature 1..20: note = Target: SCN10A; (+) strand; PAM type: YTN; PAM sequence: TTC
  source 1..20: mol_type = other DNA
acaatattgattttatccat

SEQ ID NO: 69646 - DNA, 20 bp, synthetic construct
  misc_feature 1..20: note = Description of Artificial Sequence: Synthetic oligonucleotide
  misc_feature 1..20: note = Target: SCN10A; (+) strand; PAM type: YTN; PAM sequence: TTG
  source 1..20: mol_type = other DNA
attttatccatccatgagca

SEQ ID NO: 69647 - DNA, 20 bp, synthetic construct
  misc_feature 1..20: note = Description of Artificial Sequence: Synthetic oligonucleotide
  misc_feature 1..20: note = Target: SCN10A; (+) strand; PAM type: YTN; PAM sequence: TTT
  source 1..20: mol_type = other DNA
tatccatccatgagcatggg

SEQ ID NO: 69648 - DNA, 20 bp, synthetic construct
  misc_feature 1..20: note = Description of Artificial Sequence: Synthetic oligonucleotide
  misc_feature 1..20: note = Target: SCN10A; (+) strand; PAM type: YTN; PAM sequence: TTT
  source 1..20: mol_type = other DNA
atccatccatgagcatggga

SEQ ID NO: 69649 - DNA, 20 bp, synthetic construct
  misc_feature 1..20: note = Description of Artificial Sequence: Synthetic oligonucleotide
  misc_feature 1..20: note = Target: SCN10A; (+) strand; PAM type: YTN; PAM sequence: TTA
  source 1..20: mol_type = other DNA
tccatccatgagcatgggat

SEQ ID NO: 69650 - DNA, 20 bp, synthetic construct
  misc_feature 1..20: note = Description of Artificial Sequence: Synthetic oligonucleotide
  misc_feature 1..20: note = Target: SCN10A; (+) strand; PAM type: YTN; PAM sequence: TTC
  source 1..20: mol_type = other DNA
ccatttgtttgtgtcatctg

SEQ ID NO: 69651 - DNA, 20 bp, synthetic construct
  misc_feature 1..20: note = Description of Artificial Sequence: Synthetic oligonucleotide
  misc_feature 1..20: note = Target: SCN10A; (+) strand; PAM type: YTN; PAM sequence: TTT
  source 1..20: mol_type = other DNA
gtttgtgtcatctgtgattt

SEQ ID NO: 69652 - DNA, 20 bp, synthetic construct
  misc_feature 1..20: note = Description of Artificial Sequence: Synthetic oligonucleotide
  misc_feature 1..20: note = Target: SCN10A; (+) strand; PAM type: YTN; PAM sequence: TTG
  source 1..20: mol_type = other DNA
tttgtgtcatctgtgattta

SEQ ID NO: 69653 - DNA, 20 bp, synthetic construct
  misc_feature 1..20: note = Description of Artificial Sequence: Synthetic oligonucleotide
  misc_feature 1..20: note = Target: SCN10A; (+) strand; PAM type: YTN; PAM sequence: TTT
  source 1..20: mol_type = other DNA
gtgtcatctgtgatttattt

SEQ ID NO: 69654 - DNA, 20 bp, synthetic construct
  misc_feature 1..20: note = Description of Artificial Sequence: Synthetic oligonucleotide
  misc_feature 1..20: note = Target: SCN10A; (+) strand; PAM type: YTN; PAM sequence: TTG
  source 1..20: mol_type = other DNA
tgtcatctgtgatttatttt

SEQ ID NO: 69655 - DNA, 20 bp, synthetic construct
  misc_feature 1..20: note = Description of Artificial Sequence: Synthetic oligonucleotide
  misc_feature 1..20: note = Target: SCN10A; (+) strand; PAM type: YTN; PAM sequence: CTG
  source 1..20: mol_type = other DNA
tgatttattttagcagtgtt

SEQ ID NO: 69656 - DNA, 20 bp, synthetic construct
  misc_feature 1..20: note = Description of Artificial Sequence: Synthetic oligonucleotide
  misc_feature 1..20: note = Target: SCN10A; (+) strand; PAM type: YTN; PAM sequence: TTT
  source 1..20: mol_type = other DNA
attttagcagtgttttgtag

SEQ ID NO: 69657 - DNA, 20 bp, synthetic construct
  misc_feature 1..20: note = Description of Artificial Sequence: Synthetic oligonucleotide
  misc_feature 1..20: note = Target: SCN10A; (+) strand; PAM type: YTN; PAM sequence: TTA
  source 1..20: mol_type = other DNA
ttttagcagtgttttgtagt

SEQ ID NO: 69658 - DNA, 20 bp, synthetic construct
  misc_feature 1..20: note = Description of Artificial Sequence: Synthetic oligonucleotide
  misc_feature 1..20: note = Target: SCN10A; (+) strand; PAM type: YTN; PAM sequence: TTT
  source 1..20: mol_type = other DNA
tagcagtgttttgtagtttt

SEQ ID NO: 69659 - DNA, 20 bp, synthetic construct
  misc_feature 1..20: note = Description of Artificial Sequence: Synthetic oligonucleotide
  misc_feature 1..20: note = Target: SCN10A; (+) strand; PAM type: YTN; PAM sequence: TTT
  source 1..20: mol_type = other DNA
agcagtgttttgtagttttc

SEQ ID NO: 69660 - DNA, 20 bp, synthetic construct
  misc_feature 1..20: note = Description of Artificial Sequence: Synthetic oligonucleotide
  misc_feature 1..20: note = Target: SCN10A; (+) strand; PAM type: YTN; PAM sequence: TTA
  source 1..20: mol_type = other DNA
gcagtgttttgtagttttcc

SEQ ID NO: 69661 - DNA, 20 bp, synthetic construct
  misc_feature 1..20: note = Description of Artificial Sequence: Synthetic oligonucleotide
  misc_feature 1..20: note = Target: SCN10A; (+) strand; PAM type: YTN; PAM sequence: TTT
  source 1..20: mol_type = other DNA
tgtagttttccttgtagaaa

SEQ ID NO: 69662 - DNA, 20 bp, synthetic construct
  misc_feature 1..20: note = Description of Artificial Sequence: Synthetic oligonucleotide
  misc_feature 1..20: note = Target: SCN10A; (+) strand; PAM type: YTN; PAM sequence: TTT
  source 1..20: mol_type = other DNA
gtagttttccttgtagaaat

SEQ ID NO: 69663 - DNA, 20 bp, synthetic construct
  misc_feature 1..20: note = Description of Artificial Sequence: Synthetic oligonucleotide
  misc_feature 1..20: note = Target: SCN10A; (+) strand; PAM type: YTN; PAM sequence: TTG
  source 1..20: mol_type = other DNA
tagttttccttgtagaaatc

SEQ ID NO: 69664 - DNA, 20 bp, synthetic construct
  misc_feature 1..20: note = Description of Artificial Sequence: Synthetic oligonucleotide
  misc_feature 1..20: note = Target: SCN10A; (+) strand; PAM type: YTN; PAM sequence: TTT
  source 1..20: mol_type = other DNA
tccttgtagaaatctttcac

SEQ ID NO: 69665 - DNA, 20 bp, synthetic construct
  misc_feature 1..20: note = Description of Artificial Sequence: Synthetic oligonucleotide
  misc_feature 1..20: note = Target: SCN10A; (+) strand; PAM type: YTN; PAM sequence: TTT
  source 1..20: mol_type = other DNA
ccttgtagaaatctttcacc

SEQ ID NO: 69666 - DNA, 20 bp, synthetic construct
  misc_feature 1..20: note = Description of Artificial Sequence: Synthetic oligonucleotide
  misc_feature 1..20: note = Target: SCN10A; (+) strand; PAM type: YTN; PAM sequence: TTC
  source 1..20: mol_type = other DNA
cttgtagaaatctttcacct

SEQ ID NO: 69667 - DNA, 20 bp, synthetic construct
  misc_feature 1..20: note = Description of Artificial Sequence: Synthetic oligonucleotide
  misc_feature 1..20: note = Target: SCN10A; (+) strand; PAM type: YTN; PAM sequence: CTT
  source 1..20: mol_type = other DNA
gtagaaatctttcacctttt

SEQ ID NO: 69668 - DNA, 20 bp, synthetic construct
  misc_feature 1..20: note = Description of Artificial Sequence: Synthetic oligonucleotide
  misc_feature 1..20: note = Target: SCN10A; (+) strand; PAM type: YTN; PAM sequence: TTG
  source 1..20: mol_type = other DNA
tagaaatctttcaccttttt

SEQ ID NO: 69669 - DNA, 20 bp, synthetic construct
  misc_feature 1..20: note = Description of Artificial Sequence: Synthetic oligonucleotide
  misc_feature 1..20: note = Target: SCN10A; (+) strand; PAM type: YTN; PAM sequence: CTT
  source 1..20: mol_type = other DNA
tcacctttttggttaggtat

SEQ ID NO: 69670 - DNA, 20 bp, synthetic construct
  misc_feature 1..20: note = Description of Artificial Sequence: Synthetic oligonucleotide
  misc_feature 1..20: note = Target: SCN10A; (+) strand; PAM type: YTN; PAM sequence: TTT
  source 1..20: mol_type = other DNA
cacctttttggttaggtata

SEQ ID NO: 69671 - DNA, 20 bp, synthetic construct
  misc_feature 1..20: note = Description of Artificial Sequence: Synthetic oligonucleotide
  misc_feature 1..20: note = Target: SCN10A; (+) strand; PAM type: YTN; PAM sequence: TTC
  source 1..20: mol_type = other DNA
acctttttggttaggtatat

SEQ ID NO: 69672 - DNA, 20 bp, synthetic construct
  misc_feature 1..20: note = Description of Artificial Sequence: Synthetic oligonucleotide
  misc_feature 1..20: note = Target: SCN10A; (+) strand; PAM type: YTN; PAM sequence: CTT
  source 1..20: mol_type = other DNA
tttggttaggtatattccta

SEQ ID NO: 69673 - DNA, 20 bp, synthetic construct
  misc_feature 1..20: note = Description of Artificial Sequence: Synthetic oligonucleotide
  misc_feature 1..20: note = Target: SCN10A; (+) strand; PAM type: YTN; PAM sequence: TTT
  source 1..20: mol_type = other DNA
ttggttaggtatattcctaa

SEQ ID NO: 69674 - DNA, 20 bp, synthetic construct
  misc_feature 1..20: note = Description of Artificial Sequence: Synthetic oligonucleotide
  misc_feature 1..20: note = Target: SCN10A; (+) strand; PAM type: YTN; PAM sequence: TTT
  source 1..20: mol_type = other DNA
tggttaggtatattcctaag

SEQ ID NO: 69675 - DNA, 20 bp, synthetic construct
  misc_feature 1..20: note = Description of Artificial Sequence: Synthetic oligonucleotide
  misc_feature 1..20: note = Target: SCN10A; (+) strand; PAM type: YTN; PAM sequence: TTT
  source 1..20: mol_type = other DNA
ggttaggtatattcctaaga

SEQ ID NO: 69676 - DNA, 20 bp, synthetic construct
  misc_feature 1..20: note = Description of Artificial Sequence: Synthetic oligonucleotide
  misc_feature 1..20: note = Target: SCN10A; (+) strand; PAM type: YTN; PAM sequence: TTG
  source 1..20: mol_type = other DNA
gttaggtatattcctaagat

SEQ ID NO: 69677 - DNA, 20 bp, synthetic construct
  misc_feature 1..20: note = Description of Artificial Sequence: Synthetic oligonucleotide
  misc_feature 1..20: note = Target: SCN10A; (+) strand; PAM type: YTN; PAM sequence: TTA
  source 1..20: mol_type = other DNA
ggtatattcctaagattttt

SEQ ID NO: 69678 - DNA, 20 bp, synthetic construct
  misc_feature 1..20: note = Description of Artificial Sequence: Synthetic oligonucleotide
  misc_feature 1..20: note = Target: SCN10A; (+) strand; PAM type: YTN; PAM sequence: TTC
  source 1..20: mol_type = other DNA
ctaagatttttttgttttta

SEQ ID NO: 69679 - DNA, 20 bp, synthetic construct
  misc_feature 1..20: note = Description of Artificial Sequence: Synthetic oligonucleotide
  misc_feature 1..20: note = Target: SCN10A; (+) strand; PAM type: YTN; PAM sequence: CTA
  source 1..20: mol_type = other DNA
agatttttttgtttttattt

SEQ ID NO: 69680 - DNA, 20 bp, synthetic construct
  misc_feature 1..20: note = Description of Artificial Sequence: Synthetic oligonucleotide
  misc_feature 1..20: note = Target: SCN10A; (+) strand; PAM type: YTN; PAM sequence: TTT
  source 1..20: mol_type = other DNA
ttttgtttttatttttgttt

SEQ ID NO: 69681 - DNA, 20 bp, synthetic construct
  misc_feature 1..20: note = Description of Artificial Sequence: Synthetic oligonucleotide
  misc_feature 1..20: note = Target: SCN10A; (+) strand; PAM type: YTN; PAM sequence: TTT
  source 1..20: mol_type = other DNA
tttgtttttatttttgtttt

SEQ ID NO: 69682 - DNA, 20 bp, synthetic construct
  misc_feature 1..20: note = Description of Artificial Sequence: Synthetic oligonucleotide
  misc_feature 1..20: note = Target: SCN10A; (+) strand; PAM type: YTN; PAM sequence: TTT
  source 1..20: mol_type = other DNA
ttgtttttatttttgttttt

SEQ ID NO: 69683 - DNA, 20 bp, synthetic construct
  misc_feature 1..20: note = Description of Artificial Sequence: Synthetic oligonucleotide
  misc_feature 1..20: note = Target: SCN10A; (+) strand; PAM type: YTN; PAM sequence: TTT
  source 1..20: mol_type = other DNA
tgtttttatttttgtttttt

SEQ ID NO: 69684 - DNA, 20 bp, synthetic construct
  misc_feature 1..20: note = Description of Artificial Sequence: Synthetic oligonucleotide
  misc_feature 1..20: note = Target: SCN10A; (+) strand; PAM type: YTN; PAM sequence: TTT
  source 1..20: mol_type = other DNA
gtttttatttttgttttttt

SEQ ID NO: 69685 - DNA, 20 bp, synthetic construct
  misc_feature 1..20: note = Description of Artificial Sequence: Synthetic oligonucleotide
  misc_feature 1..20: note = Target: SCN10A; (+) strand; PAM type: YTN; PAM sequence: TTG
  source 1..20: mol_type = other DNA
tttttatttttgtttttttt

SEQ ID NO: 69686 - DNA, 20 bp, synthetic construct
  misc_feature 1..20: note = Description of Artificial Sequence: Synthetic oligonucleotide
  misc_feature 1..20: note = Target: SCN10A; (+) strand; PAM type: YTN; PAM sequence: TTT
  source 1..20: mol_type = other DNA
ttatttttgttttttttttg

SEQ ID NO: 69687 - DNA, 20 bp, synthetic construct
  misc_feature 1..20: note = Description of Artificial Sequence: Synthetic oligonucleotide
  misc_feature 1..20: note = Target: SCN10A; (+) strand; PAM type: YTN; PAM sequence: TTT
  source 1..20: mol_type = other DNA
tatttttgttttttttttgc

SEQ ID NO: 69688 - DNA, 20 bp, synthetic construct
  misc_feature 1..20: note = Description of Artificial Sequence: Synthetic oligonucleotide
  misc_feature 1..20: note = Target: SCN10A; (+) strand; PAM type: YTN; PAM sequence: TTT
  source 1..20: mol_type = other DNA
atttttgttttttttttgca

SEQ ID NO: 69689 - DNA, 20 bp, synthetic construct
  misc_feature 1..20: note = Description of Artificial Sequence: Synthetic oligonucleotide
  misc_feature 1..20: note = Target: SCN10A; (+) strand; PAM type: YTN; PAM sequence: TTA
  source 1..20: mol_type = other DNA
tttttgttttttttttgcag

SEQ ID NO: 69690 - DNA, 20 bp, synthetic construct
  misc_feature 1..20: note = Description of Artificial Sequence: Synthetic oligonucleotide
  misc_feature 1..20: note = Target: SCN10A; (+) strand; PAM type: YTN; PAM sequence: TTT
  source 1..20: mol_type = other DNA
ttgttttttttttgcagctg

SEQ ID NO: 69691 - DNA, 20 bp, synthetic construct
  misc_feature 1..20: note = Description of Artificial Sequence: Synthetic oligonucleotide
  misc_feature 1..20: note = Target: SCN10A; (+) strand; PAM type: YTN; PAM sequence: TTT
  source 1..20: mol_type = other DNA
tgttttttttttgcagctgt

SEQ ID NO: 69692 - DNA, 20 bp, synthetic construct
  misc_feature 1..20: note = Description of Artificial Sequence: Synthetic oligonucleotide
  misc_feature 1..20: note = Target: SCN10A; (+) strand; PAM type: YTN; PAM sequence: TTT
  source 1..20: mol_type = other DNA
gttttttttttgcagctgtt

SEQ ID NO: 69693 - DNA, 20 bp, synthetic construct
  misc_feature 1..20: note = Description of Artificial Sequence: Synthetic oligonucleotide
  misc_feature 1..20: note = Target: SCN10A; (+) strand; PAM type: YTN; PAM sequence: TTG
  source 1..20: mol_type = other DNA
ttttttttttgcagctgttg

SEQ ID NO: 69694 - DNA, 20 bp, synthetic construct
  misc_feature 1..20: note = Description of Artificial Sequence: Synthetic oligonucleotide
  misc_feature 1..20: note = Target: SCN10A; (+) strand; PAM type: YTN; PAM sequence: TTT
  source 1..20: mol_type = other DNA
tttttttgcagctgttgtaa

SEQ ID NO: 69695 - DNA, 20 bp, synthetic construct
  misc_feature 1..20: note = Description of Artificial Sequence: Synthetic oligonucleotide
  misc_feature 1..20: note = Target: SCN10A; (+) strand; PAM type: YTN; PAM sequence: TTT
  source 1..20: mol_type = other DNA
ttttttgcagctgttgtaaa

SEQ ID NO: 69696 - DNA, 20 bp, synthetic construct
  misc_feature 1..20: note = Description of Artificial Sequence: Synthetic oligonucleotide
  misc_feature 1..20: note = Target: SCN10A; (+) strand; PAM type: YTN; PAM sequence: TTT
  source 1..20: mol_type = other DNA
tttttgcagctgttgtaaaa

SEQ ID NO: 69697 - DNA, 20 bp, synthetic construct
  misc_feature 1..20: note = Description of Artificial Sequence: Synthetic oligonucleotide
  misc_feature 1..20: note = Target: SCN10A; (+) strand; PAM type: YTN; PAM sequence: TTT
  source 1..20: mol_type = other DNA
ttttgcagctgttgtaaaag

SEQ ID NO: 69698 - DNA, 20 bp, synthetic construct
  misc_feature 1..20: note = Description of Artificial Sequence: Synthetic oligonucleotide
  misc_feature 1..20: note = Target: SCN10A; (+) strand; PAM type: YTN; PAM sequence: TTT
  source 1..20: mol_type = other DNA
tttgcagctgttgtaaaagg

SEQ ID NO: 69699 - DNA, 20 bp, synthetic construct
  misc_feature 1..20: note = Description of Artificial Sequence: Synthetic oligonucleotide
  misc_feature 1..20: note = Target: SCN10A; (+) strand; PAM type: YTN; PAM sequence: TTT
  source 1..20: mol_type = other DNA
ttgcagctgttgtaaaaggg

SEQ ID NO: 69700 - DNA, 20 bp, synthetic construct
  misc_feature 1..20: note = Description of Artificial Sequence: Synthetic oligonucleotide
  misc_feature 1..20: note = Target: SCN10A; (+) strand; PAM type: YTN; PAM sequence: TTT
  source 1..20: mol_type = other DNA
tgcagctgttgtaaaaggga

SEQ ID NO: 69701 - DNA, 20 bp, synthetic construct
  misc_feature 1..20: note = Description of Artificial Sequence: Synthetic oligonucleotide
  misc_feature 1..20: note = Target: SCN10A; (+) strand; PAM type: YTN; PAM sequence: TTT
  source 1..20: mol_type = other DNA
gcagctgttgtaaaagggat

SEQ ID NO: 69702 - DNA, 20 bp, synthetic construct
  misc_feature 1..20: note = Description of Artificial Sequence: Synthetic oligonucleotide
  misc_feature 1..20: note = Target: SCN10A; (+) strand; PAM type: YTN; PAM sequence: TTG
  source 1..20: mol_type = other DNA
cagctgttgtaaaagggatt

SEQ ID NO: 69703 - DNA, 20 bp, synthetic construct
  misc_feature 1..20: note = Description of Artificial Sequence: Synthetic oligonucleotide
  misc_feature 1..20: note = Target: SCN10A; (+) strand; PAM type: YTN; PAM sequence: CTG
  source 1..20: mol_type = other DNA
ttgtaaaagggattgagttc

SEQ ID NO: 69704 - DNA, 20 bp, synthetic construct
  misc_feature 1..20: note = Description of Artificial Sequence: Synthetic oligonucleotide
  misc_feature 1..20: note = Target: SCN10A; (+) strand; PAM type: YTN; PAM sequence: TTG
  source 1..20: mol_type = other DNA
taaaagggattgagttcttg

SEQ ID NO: 69705 - DNA, 20 bp, synthetic construct
  misc_feature 1..20: note = Description of Artificial Sequence: Synthetic oligonucleotide
  misc_feature 1..20: note = Target: SCN10A; (+) strand; PAM type: YTN; PAM sequence: TTG
  source 1..20: mol_type = other DNA
agttcttgatttgttcctca

SEQ ID NO: 69706 - DNA, 20 bp, synthetic construct
  misc_feature 1..20: note = Description of Artificial Sequence: Synthetic oligonucleotide
  misc_feature 1..20: note = Target: SCN10A; (+) strand; PAM type: YTN; PAM sequence: TTC
  source 1..20: mol_type = other DNA
ttgatttgttcctcagcttg

SEQ ID NO: 69707 - DNA, 20 bp, synthetic construct
  misc_feature 1..20: note = Description of Artificial Sequence: Synthetic oligonucleotide
  misc_feature 1..20: note = Target: SCN10A; (+) strand; PAM type: YTN; PAM sequence: CTT
  source 1..20: mol_type = other DNA
gatttgttcctcagcttggt

SEQ ID NO: 69708 - DNA, 20 bp, synthetic construct
  misc_feature 1..20: note = Description of Artificial Sequence: Synthetic oligonucleotide
  misc_feature 1..20: note = Target: SCN10A; (+) strand; PAM type: YTN; PAM sequence: TTG
  source 1..20: mol_type = other DNA
atttgttcctcagcttggtt

SEQ ID NO: 69709 - DNA, 20 bp, synthetic construct
  misc_feature 1..20: note = Description of Artificial Sequence: Synthetic oligonucleotide
  misc_feature 1..20: note = Target: SCN10A; (+) strand; PAM type: YTN; PAM sequence: TTT
  source 1..20: mol_type = other DNA
gttcctcagcttggtttctg

SEQ ID NO: 69710 - DNA, 20 bp, synthetic construct
  misc_feature 1..20: note = Description of Artificial Sequence: Synthetic oligonucleotide
  misc_feature 1..20: note = Target: SCN10A; (+) strand; PAM type: YTN; PAM sequence: TTG
  source 1..20: mol_type = other DNA
ttcctcagcttggtttctgg

SEQ ID NO: 69711 - DNA, 20 bp, synthetic construct
  misc_feature 1..20: note = Description of Artificial Sequence: Synthetic oligonucleotide
  misc_feature 1..20: note = Target: SCN10A; (+) strand; PAM type: YTN; PAM sequence: TTC
  source 1..20: mol_type = other DNA
ctcagcttggtttctggtgg

SEQ ID NO: 69712 - DNA, 20 bp, synthetic construct
  misc_feature 1..20: note = Description of Artificial Sequence: Synthetic oligonucleotide
  misc_feature 1..20: note = Target: SCN10A; (+) strand; PAM type: YTN; PAM sequence: CTC
  source 1..20: mol_type = other DNA
agcttggtttctggtggtgt

SEQ ID NO: 69713 - DNA, 20 bp, synthetic construct
  misc_feature 1..20: note = Description of Artificial Sequence: Synthetic oligonucleotide
  misc_feature 1..20: note = Target: SCN10A; (+) strand; PAM type: YTN; PAM sequence: CTT
  source 1..20: mol_type = other DNA
ggtttctggtggtgtacagt

SEQ ID NO: 69714 - DNA, 20 bp, synthetic construct
  misc_feature 1..20: note = Description of Artificial Sequence: Synthetic oligonucleotide
  misc_feature 1..20: note = Target: SCN10A; (+) strand; PAM type: YTN; PAM sequence: TTG
  source 1..20: mol_type = other DNA
gtttctggtggtgtacagta

SEQ ID NO: 69715 - DNA, 20 bp, synthetic construct
  misc_feature 1..20: note = Description of Artificial Sequence: Synthetic oligonucleotide
  misc_feature 1..20: note = Target: SCN10A; (+) strand; PAM type: YTN; PAM sequence: TTT
  source 1..20: mol_type = other DNA
ctggtggtgtacagtagtgc

SEQ ID NO: 69716 - DNA, 20 bp, synthetic construct
  misc_feature 1..20: note = Description of Artificial Sequence: Synthetic oligonucleotide
  misc_feature 1..20: note = Target: SCN10A; (+) strand; PAM type: YTN; PAM sequence: TTC
  source 1..20: mol_type = other DNA
tggtggtgtacagtagtgct

SEQ ID NO: 69717 - DNA, 20 bp, synthetic construct
  misc_feature 1..20: note = Description of Artificial Sequence: Synthetic oligonucleotide
  misc_feature 1..20: note = Target: SCN10A; (+) strand; PAM type: YTN; PAM sequence: CTG
  source 1..20: mol_type = other DNA
gtggtgtacagtagtgctgc

SEQ ID NO: 69718 - DNA, 20 bp, synthetic construct
  misc_feature 1..20: note = Description of Artificial Sequence: Synthetic oligonucleotide
  misc_feature 1..20: note = Target: SCN10A; (+) strand; PAM type: YTN; PAM sequence: CTG
  source 1..20: mol_type = other DNA
ctgatttgtatacattgttt

SEQ ID NO: 69719 - DNA, 20 bp, synthetic construct
  misc_feature 1..20: note = Description of Artificial Sequence: Synthetic oligonucleotide
  misc_feature 1..20: note = Target: SCN10A; (+) strand; PAM type: YTN; PAM sequence: CTG
  source 1..20: mol_type = other DNA
atttgtatacattgtttttg

SEQ ID NO: 69720 - DNA, 20 bp, synthetic construct
  misc_feature 1..20: note = Description of Artificial Sequence: Synthetic oligonucleotide
  misc_feature 1..20: note = Target: SCN10A; (+) strand; PAM type: YTN; PAM sequence: TTT
  source 1..20: mol_type = other DNA
gtatacattgtttttgtatc

SEQ ID NO: 69721 - DNA, 20 bp, synthetic construct
  misc_feature 1..20: note = Description of Artificial Sequence: Synthetic oligonucleotide
  misc_feature 1..20: note = Target: SCN10A; (+) strand; PAM type: YTN; PAM sequence: TTG
  source 1..20: mol_type = other DNA
tatacattgtttttgtatcc

SEQ ID NO: 69722 - DNA, 20 bp, synthetic construct
  misc_feature 1..20: note = Description of Artificial Sequence: Synthetic oligonucleotide
  misc_feature 1..20: note = Target: SCN10A; (+) strand; PAM type: YTN; PAM sequence: TTG
  source 1..20: mol_type = other DNA
tttttgtatcctgaaacttt

SEQ ID NO: 69723 - DNA, 20 bp, synthetic construct
  misc_feature 1..20: note = Description of Artificial Sequence: Synthetic oligonucleotide
  misc_feature 1..20: note = Target: SCN10A; (+) strand; PAM type: YTN; PAM sequence: TTT
  source 1..20: mol_type = other DNA
ttgtatcctgaaactttact

SEQ ID NO: 69724 - DNA, 20 bp, synthetic construct
  misc_feature 1..20: note = Description of Artificial Sequence: Synthetic oligonucleotide
  misc_feature 1..20: note = Target: SCN10A; (+) strand; PAM type: YTN; PAM sequence: TTT
  source 1..20: mol_type = other DNA
tgtatcctgaaactttactg

SEQ ID NO: 69725 - DNA, 20 bp, synthetic construct
  misc_feature 1..20: note = Description of Artificial Sequence: Synthetic oligonucleotide
  misc_feature 1..20: note = Target: SCN10A; (+) strand; PAM type: YTN; PAM sequence: TTT
  source 1..20: mol_type = other DNA
gtatcctgaaactttactga

SEQ ID NO: 69726 - DNA, 20 bp, synthetic construct
  misc_feature 1..20: note = Description of Artificial Sequence: Synthetic oligonucleotide
  misc_feature 1..20: note = Target: SCN10A; (+) strand; PAM type: YTN; PAM sequence: TTG
  source 1..20: mol_type = other DNA
tatcctgaaactttactgaa

SEQ ID NO: 69727 - DNA, 20 bp, synthetic construct
  misc_feature 1..20: note = Description of Artificial Sequence: Synthetic oligonucleotide
  misc_feature 1..20: note = Target: SCN10A; (+) strand; PAM type: YTN; PAM sequence: CTG
  source 1..20: mol_type = other DNA
aaactttactgaattcattt

SEQ ID NO: 69728 - DNA, 20 bp, synthetic construct
  misc_feature 1..20: note = Description of Artificial Sequence: Synthetic oligonucleotide
  misc_feature 1..20: note = Target: SCN10A; (+) strand; PAM type: YTN; PAM sequence: CTT
  source 1..20: mol_type = other DNA
tactgaattcatttattaga

SEQ ID NO: 69729 - DNA, 20 bp, synthetic construct
  misc_feature 1..20: note = Description of Artificial Sequence: Synthetic oligonucleotide
  misc_feature 1..20: note = Target: SCN10A; (+) strand; PAM type: YTN; PAM sequence: TTT
  source 1..20: mol_type = other DNA
actgaattcatttattagat

SEQ ID NO: 69730 - DNA, 20 bp, synthetic construct
  misc_feature 1..20: note = Description of Artificial Sequence: Synthetic oligonucleotide
  misc_feature 1..20: note = Target: SCN10A; (+) strand; PAM type: YTN; PAM sequence: TTA
  source 1..20: mol_type = other DNA
ctgaattcatttattagatc

SEQ ID NO: 69731 - DNA, 20 bp, synthetic construct
  misc_feature 1..20: note = Description of Artificial Sequence: Synthetic oligonucleotide
  misc_feature 1..20: note = Target: SCN10A; (+) strand; PAM type: YTN; PAM sequence: CTG
  source 1..20: mol_type = other DNA
aattcatttattagatctag

SEQ ID NO: 69732 - DNA, 20 bp, synthetic construct
  misc_feature 1..20: note = Description of Artificial Sequence: Synthetic oligonucleotide
  misc_feature 1..20: note = Target: SCN10A; (+) strand; PAM type: YTN; PAM sequence: TTC
  source 1..20: mol_type = other DNA
atttattagatctaggagct

SEQ ID NO: 69733 - DNA, 20 bp, synthetic construct
  misc_feature 1..20: note = Description of Artificial Sequence: Synthetic oligonucleotide
  misc_feature 1..20: note = Target: SCN10A; (+) strand; PAM type: YTN; PAM sequence: TTT
  source 1..20: mol_type = other DNA
attagatctaggagcttttt

SEQ ID NO: 69734 - DNA, 20 bp, synthetic construct
  misc_feature 1..20: note = Description of Artificial Sequence: Synthetic oligonucleotide
  misc_feature 1..20: note = Target: SCN10A; (+) strand; PAM type: YTN; PAM sequence: TTA
  source 1..20: mol_type = other DNA
ttagatctaggagctttttg

SEQ ID NO: 69735 - DNA, 20 bp, synthetic construct
  misc_feature 1..20: note = Description of Artificial Sequence: Synthetic oligonucleotide
  misc_feature 1..20: note = Target: SCN10A; (+) strand; PAM type: YTN; PAM sequence: TTA
  source 1..20: mol_type = other DNA
gatctaggagctttttggat

SEQ ID NO: 69736 - DNA, 20 bp, synthetic construct
  misc_feature 1..20: note = Description of Artificial Sequence: Synthetic oligonucleotide
  misc_feature 1..20: note = Target: SCN10A; (+) strand; PAM type: YTN; PAM sequence: CTA
  source 1..20: mol_type = other DNA
ggagctttttggatgagtct

SEQ ID NO: 69737 - DNA, 20 bp, synthetic construct
  misc_feature 1..20: note = Description of Artificial Sequence: Synthetic oligonucleotide
  misc_feature 1..20: note = Target: SCN10A; (+) strand; PAM type: YTN; PAM sequence: CTT
  source 1..20: mol_type = other DNA
tttggatgagtctttagggt

SEQ ID NO: 69738 - DNA, 20 bp, synthetic construct
  misc_feature 1..20: note = Description of Artificial Sequence: Synthetic oligonucleotide
  misc_feature 1..20: note = Target: SCN10A; (+) strand; PAM type: YTN; PAM sequence: TTT
  source 1..20: mol_type = other DNA
ttggatgagtctttagggtt

SEQ ID NO: 69739 - DNA, 20 bp, synthetic construct
  misc_feature 1..20: note = Description of Artificial Sequence: Synthetic oligonucleotide
  misc_feature 1..20: note = Target: SCN10A; (+) strand; PAM type: YTN; PAM sequence: TTT
  source 1..20: mol_type = other DNA
tggatgagtctttagggttt

SEQ ID NO: 69740 - DNA, 20 bp, synthetic construct
  misc_feature 1..20: note = Description of Artificial Sequence: Synthetic oligonucleotide
  misc_feature 1..20: note = Target: SCN10A; (+) strand; PAM type: YTN; PAM sequence: TTT
  source 1..20: mol_type = other DNA
ggatgagtctttagggtttc

SEQ ID NO: 69741 - DNA, 20 bp, synthetic construct
  misc_feature 1..20: note = Description of Artificial Sequence: Synthetic oligonucleotide
  misc_feature 1..20: note = Target: SCN10A; (+) strand; PAM type: YTN; PAM sequence: TTG
  source 1..20: mol_type = other DNA
gatgagtctttagggtttcc

SEQ ID NO: 69742 - DNA, 20 bp, synthetic construct
  misc_feature 1..20: note = Description of Artificial Sequence: Synthetic oligonucleotide
  misc_feature 1..20: note = Target: SCN10A; (+) strand; PAM type: YTN; PAM sequence: CTT
  source 1..20: mol_type = other DNA
tagggtttcctaggcatacg

SEQ ID NO: 69743 - DNA, 20 bp, synthetic construct
  misc_feature 1..20: note = Description of Artificial Sequence: Synthetic oligonucleotide
  misc_feature 1..20: note = Target: SCN10A; (+) strand; PAM type: YTN; PAM sequence: TTT
  source 1..20: mol_type = other DNA
agggtttcctaggcatacga

SEQ ID NO: 69744 - DNA, 20 bp, synthetic construct
  misc_feature 1..20: note = Description of Artificial Sequence: Synthetic oligonucleotide
  misc_feature 1..20: note = Target: SCN10A; (+) strand; PAM type: YTN; PAM sequence: TTA
  source 1..20: mol_type = other DNA
gggtttcctaggcatacgat

SEQ ID NO: 69745 - DNA, 20 bp, synthetic construct
  misc_feature 1..20: note = Description of Artificial Sequence: Synthetic oligonucleotide
  misc_feature 1..20: note = Target: SCN10A; (+) strand; PAM type: YTN; PAM sequence: TTT
  source 1..20: mol_type = other DNA
cctaggcatacgatcatatc

SEQ ID NO: 69746 - DNA, 20 bp, synthetic construct
  misc_feature 1..20: note = Description of Artificial Sequence: Synthetic oligonucleotide
  misc_feature 1..20: note = Target: SCN10A; (+) strand; PAM type: YTN; PAM sequence: TTC
  source 1..20: mol_type = other DNA
ctaggcatacgatcatatca

SEQ ID NO: 69747 - DNA, 20 bp, synthetic construct
  misc_feature 1..20: note = Description of Artificial Sequence: Synthetic oligonucleotide
  misc_feature 1..20: note = Target: SCN10A; (+) strand; PAM type: YTN; PAM sequence: CTA
  source 1..20: mol_type = other DNA
ggcatacgatcatatcattg

SEQ ID NO: 69748 - DNA, 20 bp, synthetic construct
  misc_feature 1..20: note = Description of Artificial Sequence: Synthetic oligonucleotide
  misc_feature 1..20: note = Target: SCN10A; (+) strand; PAM type: YTN; PAM sequence: TTG
  source 1..20: mol_type = other DNA
gtgaacagcaacagtttgac

SEQ ID NO: 69749 - DNA, 20 bp, synthetic construct
  misc_feature 1..20: note = Description of Artificial Sequence: Synthetic oligonucleotide
  misc_feature 1..20: note = Target: SCN10A; (+) strand; PAM type: YTN; PAM sequence: TTT
  source 1..20: mol_type = other DNA
gacttcccctttactgattt

SEQ ID NO: 69750 - DNA, 20 bp, synthetic construct
  misc_feature 1..20: note = Description of Artificial Sequence: Synthetic oligonucleotide
  misc_feature 1..20: note = Target: SCN10A; (+) strand; PAM type: YTN; PAM sequence: TTG
  source 1..20: mol_type = other DNA
acttcccctttactgatttg

SEQ ID NO: 69751 - DNA, 20 bp, synthetic construct
  misc_feature 1..20: note = Description of Artificial Sequence: Synthetic oligonucleotide
  misc_feature 1..20: note = Target: SCN10A; (+) strand; PAM type: YTN; PAM sequence: CTT
  source 1..20: mol_type = other DNA
cccctttactgatttggatt

SEQ ID NO: 69752 - DNA, 20 bp, synthetic construct
  misc_feature 1..20: note = Description of Artificial Sequence: Synthetic oligonucleotide
  misc_feature 1..20: note = Target: SCN10A; (+) strand; PAM type: YTN; PAM sequence: TTC
  source 1..20: mol_type = other DNA
ccctttactgatttggattc

SEQ ID NO: 69753 - DNA, 20 bp, synthetic construct
  misc_feature 1..20: note = Description of Artificial Sequence: Synthetic oligonucleotide
  misc_feature 1..20: note = Target: SCN10A; (+) strand; PAM type: YTN; PAM sequence: CTT
  source 1..20: mol_type = other DNA
tactgatttggattcccttt

SEQ ID NO: 69754 - DNA, 20 bp, synthetic construct
  misc_feature 1..20: note = Description of Artificial Sequence: Synthetic oligonucleotide
  misc_feature 1..20: note = Target: SCN10A; (+) strand; PAM type: YTN; PAM sequence: TTT
  source 1..20: mol_type = other DNA
actgatttggattcccttta

SEQ ID NO: 69755 - DNA, 20 bp, synthetic construct
  misc_feature 1..20: note = Description of Artificial Sequence: Synthetic oligonucleotide
  misc_feature 1..20: note = Target: SCN10A; (+) strand; PAM type: YTN; PAM sequence: TTA
  source 1..20: mol_type = other DNA
ctgatttggattccctttat

SEQ ID NO: 69756 - DNA, 20 bp, synthetic construct
  misc_feature 1..20: note = Description of Artificial Sequence: Synthetic oligonucleotide
  misc_feature 1..20: note = Target: SCN10A; (+) strand; PAM type: YTN; PAM sequence: CTG
  source 1..20: mol_type = other DNA
atttggattccctttattta

SEQ ID NO: 69757 - DNA, 20 bp, synthetic construct
  misc_feature 1..20: note = Description of Artificial Sequence: Synthetic oligonucleotide
  misc_feature 1..20: note = Target: SCN10A; (+) strand; PAM type: YTN; PAM sequence: TTT
  source 1..20: mol_type = other DNA
ggattccctttatttatttc

SEQ ID NO: 69758 - DNA, 20 bp, synthetic construct
  misc_feature 1..20: note = Description of Artificial Sequence: Synthetic oligonucleotide
  misc_feature 1..20: note = Target: SCN10A; (+) strand; PAM type: YTN; PAM sequence: TTG
  source 1..20: mol_type = other DNA
gattccctttatttatttct

SEQ ID NO: 69759 - DNA, 20 bp, synthetic construct
  misc_feature 1..20: note = Description of Artificial Sequence: Synthetic oligonucleotide
  misc_feature 1..20: note = Target: SCN10A; (+) strand; PAM type: YTN; PAM sequence: TTC
  source 1..20: mol_type = other DNA
cctttatttatttctcttgt

SEQ ID NO: 69760 - DNA, 20 bp, synthetic construct
  misc_feature 1..20: note = Description of Artificial Sequence: Synthetic oligonucleotide
  misc_feature 1..20: note = Target: SCN10A; (+) strand; PAM type: YTN; PAM sequence: CTT
  source 1..20: mol_type = other DNA
tatttatttctcttgtctga

SEQ ID NO: 69761 - DNA, 20 bp, synthetic construct
  misc_feature 1..20: note = Description of Artificial Sequence: Synthetic oligonucleotide
  misc_feature 1..20: note = Target: SCN10A; (+) strand; PAM type: YTN; PAM sequence: TTT
  source 1..20: mol_type = other DNA
atttatttctcttgtctgat

SEQ ID NO: 69762 - DNA, 20 bp, synthetic construct
  misc_feature 1..20: note = Description of Artificial Sequence: Synthetic oligonucleotide
  misc_feature 1..20: note = Target: SCN10A; (+) strand; PAM type: YTN; PAM sequence: TTA
  source 1..20: mol_type = other DNA
tttatttctcttgtctgatt

SEQ ID NO: 69763 - DNA, 20 bp, synthetic construct
  misc_feature 1..20: note = Description of Artificial Sequence: Synthetic oligonucleotide
  misc_feature 1..20: note = Target: SCN10A; (+) strand; PAM type: YTN; PAM sequence: TTT
  source 1..20: mol_type = other DNA
atttctcttgtctgattgct

SEQ ID NO: 69764 - DNA, 20 bp, synthetic construct
  misc_feature 1..20: note = Description of Artificial Sequence: Synthetic oligonucleotide
  misc_feature 1..20: note = Target: SCN10A; (+) strand; PAM type: YTN; PAM sequence: TTA
  source 1..20: mol_type = other DNA
tttctcttgtctgattgctc

SEQ ID NO: 69765 - DNA, 20 bp, synthetic construct
  misc_feature 1..20: note = Description of Artificial Sequence: Synthetic oligonucleotide
  misc_feature 1..20: note = Target: SCN10A; (+) strand; PAM type: YTN; PAM sequence: TTT
  source 1..20: mol_type = other DNA
ctcttgtctgattgctctgg

SEQ ID NO: 69766 - DNA, 20 bp, synthetic construct
  misc_feature 1..20: note = Description of Artificial Sequence: Synthetic oligonucleotide
  misc_feature 1..20: note = Target: SCN10A; (+) strand; PAM type: YTN; PAM sequence: TTC
  source 1..20: mol_type = other DNA
tcttgtctgattgctctggc

SEQ ID NO: 69767 - DNA, 20 bp, synthetic construct
  misc_feature 1..20: note = Description of Artificial Sequence: Synthetic oligonucleotide
  misc_feature 1..20: note = Target: SCN10A; (+) strand; PAM type: YTN; PAM sequence: CTC
  source 1..20: mol_type = other DNA
ttgtctgattgctctggcta

SEQ ID NO: 69768 - DNA, 20 bp, synthetic construct
  misc_feature 1..20: note = Description of Artificial Sequence: Synthetic oligonucleotide
  misc_feature 1..20: note = Target: SCN10A; (+) strand; PAM type: YTN; PAM sequence: CTT
  source 1..20: mol_type = other DNA
gtctgattgctctggctagg

SEQ ID NO: 69769 - DNA, 20 bp, synthetic construct
  misc_feature 1..20: note = Description of Artificial Sequence: Synthetic oligonucleotide
  misc_feature 1..20: note = Target: SCN10A; (+) strand; PAM type: YTN; PAM sequence: TTG
  source 1..20: mol_type = other DNA
tctgattgctctggctagga

SEQ ID NO: 69770 - DNA, 20 bp, synthetic construct
  misc_feature 1..20: note = Description of Artificial Sequence: Synthetic oligonucleotide
  misc_feature 1..20: note = Target: SCN10A; (+) strand; PAM type: YTN; PAM sequence: CTG
  source 1..20: mol_type = other DNA
attgctctggctaggacttc

SEQ ID NO: 69771 - DNA, 20 bp, synthetic construct
  misc_feature 1..20: note = Description of Artificial Sequence: Synthetic oligonucleotide
  misc_feature 1..20: note = Target: SCN10A; (+) strand; PAM type: YTN; PAM sequence: TTG
  source 1..20: mol_type = other DNA
ctctggctaggacttccagt

SEQ ID NO: 69772 - DNA, 20 bp, synthetic construct
  misc_feature 1..20: note = Description of Artificial Sequence: Synthetic oligonucleotide
  misc_feature 1..20: note = Target: SCN10A; (+) strand; PAM type: YTN; PAM sequence: CTC
  source 1..20: mol_type = other DNA
tggctaggacttccagtact

SEQ ID NO: 69773 - DNA, 20 bp, synthetic construct
  misc_feature 1..20: note = Description of Artificial Sequence: Synthetic oligonucleotide
  misc_feature 1..20: note = Target: SCN10A; (+) strand; PAM type: YTN; PAM sequence: CTG
  source 1..20: mol_type = other DNA
gctaggacttccagtactat

SEQ ID NO: 69774 - DNA, 20 bp, synthetic construct
  misc_feature 1..20: note = Description of Artificial Sequence: Synthetic oligonucleotide
  misc_feature 1..20: note = Target: SCN10A; (+) strand; PAM type: YTN; PAM sequence: CTA
  source 1..20: mol_type = other DNA
ggacttccagtactatgttg

SEQ ID NO: 69775 - DNA, 20 bp, synthetic construct
  misc_feature 1..20: note = Description of Artificial Sequence: Synthetic oligonucleotide
  misc_feature 1..20: note = Target: SCN10A; (+) strand; PAM type: YTN; PAM sequence: CTT
  source 1..20: mol_type = other DNA
ccagtactatgttggataga

SEQ ID NO: 69776 - DNA, 20 bp, synthetic construct
  misc_feature 1..20: note = Description of Artificial Sequence: Synthetic oligonucleotide
  misc_feature 1..20: note = Target: SCN10A; (+) strand; PAM type: YTN; PAM sequence: TTC
  source 1..20: mol_type = other DNA
cagtactatgttggatagaa

SEQ ID NO: 69777 - DNA, 20 bp, synthetic construct
  misc_feature 1..20: note = Description of Artificial Sequence: Synthetic oligonucleotide
  misc_feature 1..20: note = Target: SCN10A; (+) strand; PAM type: YTN; PAM sequence: CTA
  source 1..20: mol_type = other DNA
tgttggatagaaatggtgaa

SEQ ID NO: 69778 - DNA, 20 bp, synthetic construct
  misc_feature 1..20: note = Description of Artificial Sequence: Synthetic oligonucleotide
  misc_feature 1..20: note = Target: SCN10A; (+) strand; PAM type: YTN; PAM sequence: TTG
  source 1..20: mol_type = other DNA
gatagaaatggtgaaagtgg

SEQ ID NO: 69779 - DNA, 20 bp, synthetic construct
  misc_feature 1..20: note = Description of Artificial Sequence: Synthetic oligonucleotide
  misc_feature 1..20: note = Target: SCN10A; (+) strand; PAM type: YTN; PAM sequence: CTT
  source 1..20: mol_type = other DNA
gtcttgtttcagttctcagg

SEQ ID NO: 69780 - DNA, 20 bp, synthetic construct
  misc_feature 1..20: note = Description of Artificial Sequence: Synthetic oligonucleotide
  misc_feature 1..20: note = Target: SCN10A; (+) strand; PAM type: YTN; PAM sequence: TTG
  source 1..20: mol_type = other DNA
tcttgtttcagttctcaggg

SEQ ID NO: 69781 - DNA, 20 bp, synthetic construct
  misc_feature 1..20: note = Description of Artificial Sequence: Synthetic oligonucleotide
  misc_feature 1..20: note = Target: SCN10A; (+) strand; PAM type: YTN; PAM sequence: CTT
  source 1..20: mol_type = other DNA
gtttcagttctcagggggaa

SEQ ID NO: 69782 - DNA, 20 bp, synthetic construct
  misc_feature 1..20: note = Description of Artificial Sequence: Synthetic oligonucleotide
  misc_feature 1..20: note = Target: SCN10A; (+) strand; PAM type: YTN; PAM sequence: TTG
  source 1..20: mol_type = other DNA
tttcagttctcagggggaat

SEQ ID NO: 69783 - DNA, 20 bp, synthetic construct
  misc_feature 1..20: note = Description of Artificial Sequence: Synthetic oligonucleotide
  misc_feature 1..20: note = Target: SCN10A; (+) strand; PAM type: YTN; PAM sequence: TTT
  source 1..20: mol_type = other DNA
cagttctcagggggaatgct

SEQ ID NO: 69784 - DNA, 20 bp, synthetic construct
  misc_feature 1..20: note = Description of Artificial Sequence: Synthetic oligonucleotide
  misc_feature 1..20: note = Target: SCN10A; (+) strand; PAM type: YTN; PAM sequence: TTC
  source 1..20: mol_type = other DNA
agttctcagggggaatgctt

SEQ ID NO: 69785 - DNA, 20 bp, synthetic construct
  misc_feature 1..20: note = Description of Artificial Sequence: Synthetic oligonucleotide
  misc_feature 1..20: note = Target: SCN10A; (+) strand; PAM type: YTN; PAM sequence: TTC
  source 1..20: mol_type = other DNA
tcagggggaatgctttcaac

SEQ ID NO: 69786 - DNA, 20 bp, synthetic construct
  misc_feature 1..20: note = Description of Artificial Sequence: Synthetic oligonucleotide
  misc_feature 1..20: note = Target: SCN10A; (+) strand; PAM type: YTN; PAM sequence: CTC
  source 1..20: mol_type = other DNA
agggggaatgctttcaactt

SEQ ID NO: 69787 - DNA, 20 bp, synthetic construct
  misc_feature 1..20: note = Description of Artificial Sequence: Synthetic oligonucleotide
  misc_feature 1..20: note = Target: SCN10A; (+) strand; PAM type: YTN; PAM sequence: CTT
  source 1..20: mol_type = other DNA
tcaacttttccctgtttggt

SEQ ID NO: 69788 - DNA, 20 bp, synthetic construct
  misc_feature 1..20: note = Description of Artificial Sequence: Synthetic oligonucleotide
  misc_feature 1..20: note = Target: SCN10A; (+) strand; PAM type: YTN; PAM sequence: TTT
  source 1..20: mol_type = other DNA
caacttttccctgtttggta

SEQ ID NO: 69789 - DNA, 20 bp, synthetic construct
  misc_feature 1..20: note = Description of Artificial Sequence: Synthetic oligonucleotide
  misc_feature 1..20: note = Target: SCN10A; (+) strand; PAM type: YTN; PAM sequence: TTC
  source 1..20: mol_type = other DNA
aacttttccctgtttggtat

SEQ ID NO: 69790 - DNA, 20 bp, synthetic construct
  misc_feature 1..20: note = Description of Artificial Sequence: Synthetic oligonucleotide
  misc_feature 1..20: note = Target: SCN10A; (+) strand; PAM type: YTN; PAM sequence: CTT
  source 1..20: mol_type = other DNA
ttccctgtttggtataatgt

SEQ ID NO: 69791 - DNA, 20 bp, synthetic construct
  misc_feature 1..20: note = Description of Artificial Sequence: Synthetic oligonucleotide
  misc_feature 1..20: note = Target: SCN10A; (+) strand; PAM type: YTN; PAM sequence: TTT
  source 1..20: mol_type = other DNA
tccctgtttggtataatgtt

SEQ ID NO: 69792 - DNA, 20 bp, synthetic construct
  misc_feature 1..20: note = Description of Artificial Sequence: Synthetic oligonucleotide
  misc_feature 1..20: note = Target: SCN10A; (+) strand; PAM type: YTN; PAM sequence: TTT
  source 1..20: mol_type = other DNA
ccctgtttggtataatgttg

SEQ ID NO: 69793 - DNA, 20 bp, synthetic construct
  misc_feature 1..20: note = Description of Artificial Sequence: Synthetic oligonucleotide
  misc_feature 1..20: note = Target: SCN10A; (+) strand; PAM type: YTN; PAM sequence: TTC
  source 1..20: mol_type = other DNA
cctgtttggtataatgttgg

SEQ ID NO: 69794 - DNA, 20 bp, synthetic construct
  misc_feature 1..20: note = Description of Artificial Sequence: Synthetic oligonucleotide
  misc_feature 1..20: note = Target: SCN10A; (+) strand; PAM type: YTN; PAM sequence: CTG
  source 1..20: mol_type = other DNA
tttggtataatgttggctgt

SEQ ID NO: 69795 - DNA, 20 bp, synthetic construct
  misc_feature 1..20: note = Description of Artificial Sequence: Synthetic oligonucleotide
  misc_feature 1..20: note = Target: SCN10A; (+) strand; PAM type: YTN; PAM sequence: TTT
  source 1..20: mol_type = other DNA
ggtataatgttggctgtgga

SEQ ID NO: 69796 - DNA, 20 bp, synthetic construct
  misc_feature 1..20: note = Description of Artificial Sequence: Synthetic oligonucleotide
  misc_feature 1..20: note = Target: SCN10A; (+) strand; PAM type: YTN; PAM sequence: TTG
  source 1..20: mol_type = other DNA
gtataatgttggctgtggat

SEQ ID NO: 69797 - DNA, 20 bp, synthetic construct
  misc_feature 1..20: note = Description of Artificial Sequence: Synthetic oligonucleotide
  misc_feature 1..20: note = Target: SCN10A; (+) strand; PAM type: YTN; PAM sequence: TTG
  source 1..20: mol_type = other DNA
gctgtggatttgtcatagat

SEQ ID NO: 69798 - DNA, 20 bp, synthetic construct
  misc_feature 1..20: note = Description of Artificial Sequence: Synthetic oligonucleotide
  misc_feature 1..20: note = Target: SCN10A; (+) strand; PAM type: YTN; PAM sequence: CTG
  source 1..20: mol_type = other DNA
tggatttgtcatagatggct

SEQ ID NO: 69799 - DNA, 20 bp, synthetic construct
  misc_feature 1..20: note = Description of Artificial Sequence: Synthetic oligonucleotide
  misc_feature 1..20: note = Target: SCN10A; (+) strand; PAM type: YTN; PAM sequence: TTT
  source 1..20: mol_type = other DNA
gtcatagatggcttttatta

SEQ ID NO: 69800 - DNA, 20 bp, synthetic construct
  misc_feature 1..20: note = Description of Artificial Sequence: Synthetic oligonucleotide
  misc_feature 1..20: note = Target: SCN10A; (+) strand; PAM type: YTN; PAM sequence: TTG
  source 1..20: mol_type = other DNA
tcatagatggcttttattac

SEQ ID NO: 69801 - DNA, 20 bp, synthetic construct
  misc_feature 1..20: note = Description of Artificial Sequence: Synthetic oligonucleotide
  misc_feature 1..20: note = Target: SCN10A; (+) strand; PAM type: YTN; PAM sequence: CTT
  source 1..20: mol_type = other DNA
ttattaccttggagtatgtc

SEQ ID NO: 69802 - DNA, 20 bp, synthetic construct
  misc_feature 1..20: note = Description of Artificial Sequence: Synthetic oligonucleotide
  misc_feature 1..20: note = Target: SCN10A; (+) strand; PAM type: YTN; PAM sequence: TTT
  source 1..20: mol_type = other DNA
tattaccttggagtatgtcc

SEQ ID NO: 69803 - DNA, 20 bp, synthetic construct
  misc_feature 1..20: note = Description of Artificial Sequence: Synthetic oligonucleotide
  misc_feature 1..20: note = Target: SCN10A; (+) strand; PAM type: YTN; PAM sequence: TTT
  source 1..20: mol_type = other DNA
attaccttggagtatgtccc

SEQ ID NO: 69804 - DNA, 20 bp, synthetic construct
  misc_feature 1..20: note = Description of Artificial Sequence: Synthetic oligonucleotide
  misc_feature 1..20: note = Target: SCN10A; (+) strand; PAM type: YTN; PAM sequence: TTA
  source 1..20: mol_type = other DNA
ttaccttggagtatgtccct

SEQ ID NO: 69805 - DNA, 20 bp, synthetic construct
  misc_feature 1..20: note = Description of Artificial Sequence: Synthetic oligonucleotide
  misc_feature 1..20: note = Target: SCN10A; (+) strand; PAM type: YTN; PAM sequence: TTA
  source 1..20: mol_type = other DNA
ccttggagtatgtcccttct

SEQ ID NO: 69806 - DNA, 20 bp, synthetic construct
  misc_feature 1..20: note = Description of Artificial Sequence: Synthetic oligonucleotide
  misc_feature 1..20: note = Target: SCN10A; (+) strand; PAM type: YTN; PAM sequence: CTT
  source 1..20: mol_type = other DNA
ggagtatgtcccttctatgc

SEQ ID NO: 69807 - DNA, 20 bp, synthetic construct
  misc_feature 1..20: note = Description of Artificial Sequence: Synthetic oligonucleotide
  misc_feature 1..20: note = Target: SCN10A; (+) strand; PAM type: YTN; PAM sequence: TTG
  source 1..20: mol_type = other DNA
gagtatgtcccttctatgcc

SEQ ID NO: 69808 - DNA, 20 bp, synthetic construct
  misc_feature 1..20: note = Description of Artificial Sequence: Synthetic oligonucleotide
  misc_feature 1..20: note = Target: SCN10A; (+) strand; PAM type: YTN; PAM sequence: CTT
  source 1..20: mol_type = other DNA
ctatgccaatttggttgagg

SEQ ID NO: 69809 - DNA, 20 bp, synthetic construct
  misc_feature 1..20: note = Description of Artificial Sequence: Synthetic oligonucleotide
  misc_feature 1..20: note = Target: SCN10A; (+) strand; PAM type: YTN; PAM sequence: TTC
  source 1..20: mol_type = other DNA
tatgccaatttggttgaggg

SEQ ID NO: 69810 - DNA, 20 bp, synthetic construct
  misc_feature 1..20: note = Description of Artificial Sequence: Synthetic oligonucleotide
  misc_feature 1..20: note = Target: SCN10A; (+) strand; PAM type: YTN; PAM sequence: CTA
  source 1..20: mol_type = other DNA
tgccaatttggttgagggtt

SEQ ID NO: 69811 - DNA, 20 bp, synthetic construct
  misc_feature 1..20: note = Description of Artificial Sequence: Synthetic oligonucleotide
  misc_feature 1..20: note = Target: SCN10A; (+) strand; PAM type: YTN; PAM sequence: TTT
  source 1..20: mol_type = other DNA
ggttgagggttttaatcata

SEQ ID NO: 69812 - DNA, 20 bp, synthetic construct
  misc_feature 1..20: note = Description of Artificial Sequence: Synthetic oligonucleotide
  misc_feature 1..20: note = Target: SCN10A; (+) strand; PAM type: YTN; PAM sequence: TTG
  source 1..20: mol_type = other DNA
gttgagggttttaatcataa

SEQ ID NO: 69813 - DNA, 20 bp, synthetic construct
  misc_feature 1..20: note = Description of Artificial Sequence: Synthetic oligonucleotide
  misc_feature 1..20: note = Target: SCN10A; (+) strand; PAM type: YTN; PAM sequence: TTG
  source 1..20: mol_type = other DNA
agggttttaatcataatggg

SEQ ID NO: 69814 - DNA, 20 bp, synthetic construct
  misc_feature 1..20: note = Description of Artificial Sequence: Synthetic oligonucleotide
  misc_feature 1..20: note = Target: SCN10A; (+) strand; PAM type: YTN; PAM sequence: TTT
  source 1..20: mol_type = other DNA
taatcataatgggatgctgg

SEQ ID NO: 69815 - DNA, 20 bp, synthetic construct
  misc_feature 1..20: note = Description of Artificial Sequence: Synthetic oligonucleotide
  misc_feature 1..20: note = Target: SCN10A; (+) strand; PAM type: YTN; PAM sequence: TTT
  source 1..20: mol_type = other DNA
aatcataatgggatgctgga

SEQ ID NO: 69816 - DNA, 20 bp, synthetic construct
  misc_feature 1..20: note = Description of Artificial Sequence: Synthetic oligonucleotide
  misc_feature 1..20: note = Target: SCN10A; (+) strand; PAM type: YTN; PAM sequence: TTA
  source 1..20: mol_type = other DNA
atcataatgggatgctggat

SEQ ID NO: 69817 - DNA, 20 bp, synthetic construct
  misc_feature 1..20: note = Description of Artificial Sequence: Synthetic oligonucleotide
  misc_feature 1..20: note = Target: SCN10A; (+) strand; PAM type: YTN; PAM sequence: CTG
  source 1..20: mol_type = other DNA
gattttgtcaaatgcttttc

SEQ ID NO: 69818 - DNA, 20 bp, synthetic construct
  misc_feature 1..20: note = Description of Artificial Sequence: Synthetic oligonucleotide
  misc_feature 1..20: note = Target: SCN10A; (+) strand; PAM type: YTN; PAM sequence: TTT
  source 1..20: mol_type = other DNA
tgtcaaatgcttttcctgca

SEQ ID NO: 69819 - DNA, 20 bp, synthetic construct
  misc_feature 1..20: note = Description of Artificial Sequence: Synthetic oligonucleotide
  misc_feature 1..20: note = Target: SCN10A; (+) strand; PAM type: YTN; PAM sequence: TTT
  source 1..20: mol_type = other DNA
gtcaaatgcttttcctgcac

SEQ ID NO: 69820 - DNA, 20 bp, synthetic construct
  misc_feature 1..20: note = Description of Artificial Sequence: Synthetic oligonucleotide
  misc_feature 1..20: note = Target: SCN10A; (+) strand; PAM type: YTN; PAM sequence: TTG
  source 1..20: mol_type = other DNA
tcaaatgcttttcctgcacc

SEQ ID NO: 69821 - DNA, 20 bp, synthetic construct
  misc_feature 1..20: note = Description of Artificial Sequence: Synthetic oligonucleotide
  misc_feature 1..20: note = Target: SCN10A; (+) strand; PAM type: YTN; PAM sequence: CTT
  source 1..20: mol_type = other DNA
ttcctgcacctattgagatg

SEQ ID NO: 69822 - DNA, 20 bp, synthetic construct
  misc_feature 1..20: note = Description of Artificial Sequence: Synthetic oligonucleotide
  misc_feature 1..20: note = Target: SCN10A; (+) strand; PAM type: YTN; PAM sequence: TTT
  source 1..20: mol_type = other DNA
tcctgcacctattgagatga

SEQ ID NO: 69823 - DNA, 20 bp, synthetic construct
  misc_feature 1..20: note = Description of Artificial Sequence: Synthetic oligonucleotide
  misc_feature 1..20: note = Target: SCN10A; (+) strand; PAM type: YTN; PAM sequence: TTT
  source 1..20: mol_type = other DNA
cctgcacctattgagatgat

SEQ ID NO: 69824 - DNA, 20 bp, synthetic construct
  misc_feature 1..20: note = Description of Artificial Sequence: Synthetic oligonucleotide
  misc_feature 1..20: note = Target: SCN10A; (+) strand; PAM type: YTN; PAM sequence: TTC
  source 1..20: mol_type = other DNA
ctgcacctattgagatgatc

SEQ ID NO: 69825 - DNA, 20 bp, synthetic construct
  misc_feature 1..20: note = Description of Artificial Sequence: Synthetic oligonucleotide
  misc_feature 1..20: note = Target: SCN10A; (+) strand; PAM type: YTN; PAM sequence: CTG
  source 1..20: mol_type = other DNA
cacctattgagatgatcata

SEQ ID NO: 69826 - DNA, 20 bp, synthetic construct
  misc_feature 1..20: note = Description of Artificial Sequence: Synthetic oligonucleotide
  misc_feature 1..20: note = Target: SCN10A; (+) strand; PAM type: YTN; PAM sequence: CTA
  source 1..20: mol_type = other DNA
ttgagatgatcatatgattt

SEQ ID NO: 69827 - DNA, 20 bp, synthetic construct
  misc_feature 1..20: note = Description of Artificial Sequence: Synthetic oligonucleotide
  misc_feature 1..20: note = Target: SCN10A; (+) strand; PAM type: YTN; PAM sequence: TTG
  source 1..20: mol_type = other DNA
agatgatcatatgatttttg

SEQ ID NO: 69828 - DNA, 20 bp, synthetic construct
  misc_feature 1..20: note = Description of Artificial Sequence: Synthetic oligonucleotide
  misc_feature 1..20: note = Target: SCN10A; (+) strand; PAM type: YTN; PAM sequence: TTT
  source 1..20: mol_type = other DNA
ttgtttttaattctgtttat

SEQ ID NO: 69829 - DNA, 20 bp, synthetic construct
  misc_feature 1..20: note = Description of Artificial Sequence: Synthetic oligonucleotide
  misc_feature 1..20: note = Target: SCN10A; (+) strand; PAM type: YTN; PAM sequence: TTT
  source 1..20: mol_type = other DNA
tgtttttaattctgtttatg

SEQ ID NO: 69830 - DNA, 20 bp, synthetic construct
  misc_feature 1..20: note = Description of Artificial Sequence: Synthetic oligonucleotide
  misc_feature 1..20: note = Target: SCN10A; (+) strand; PAM type: YTN; PAM sequence: TTT
  source 1..20: mol_type = other DNA
gtttttaattctgtttatgt

SEQ ID NO: 69831 - DNA, 20 bp, synthetic construct
  misc_feature 1..20: note = Description of Artificial Sequence: Synthetic oligonucleotide
  misc_feature 1..20: note = Target: SCN10A; (+) strand; PAM type: YTN; PAM sequence: TTG
  source 1..20: mol_type = other DNA
tttttaattctgtttatgtg

SEQ ID NO: 69832 - DNA, 20 bp, synthetic construct
  misc_feature 1..20: note = Description of Artificial Sequence: Synthetic oligonucleotide
  misc_feature 1..20: note = Target: SCN10A; (+) strand; PAM type: YTN; PAM sequence: TTT
  source 1..20: mol_type = other DNA
ttaattctgtttatgtgacg

SEQ ID NO: 69833 - DNA, 20 bp, synthetic construct
  misc_feature 1..20: note = Description of Artificial Sequence: Synthetic oligonucleotide
  misc_feature 1..20: note = Target: SCN10A; (+) strand; PAM type: YTN; PAM sequence: TTT
  source 1..20: mol_type = other DNA
taattctgtttatgtgacgt

SEQ ID NO: 69834 - DNA, 20 bp, synthetic construct
  misc_feature 1..20: note = Description of Artificial Sequence: Synthetic oligonucleotide
  misc_feature 1..20: note = Target: SCN10A; (+) strand; PAM type: YTN; PAM sequence: TTT
  source 1..20: mol_type = other DNA
aattctgtttatgtgacgtg

SEQ ID NO: 69835 - DNA, 20 bp, synthetic construct
  misc_feature 1..20: note = Description of Artificial Sequence: Synthetic oligonucleotide
  misc_feature 1..20: note = Target: SCN10A; (+) strand; PAM type: YTN; PAM sequence: TTA
  source 1..20: mol_type = other DNA
attctgtttatgtgacgtgc

SEQ ID NO: 69836 - DNA, 20 bp, synthetic construct
  misc_feature 1..20: note = Description of Artificial Sequence: Synthetic oligonucleotide
  misc_feature 1..20: note = Target: SCN10A; (+) strand; PAM type: YTN; PAM sequence: TTC
  source 1..20: mol_type = other DNA
tgtttatgtgacgtgcagca

SEQ ID NO: 69837 - DNA, 20 bp, synthetic construct
  misc_feature 1..20: note = Description of Artificial Sequence: Synthetic oligonucleotide
  misc_feature 1..20: note = Target: SCN10A; (+) strand; PAM type: YTN; PAM sequence: CTG
  source 1..20: mol_type = other DNA
tttatgtgacgtgcagcatt

SEQ ID NO: 69838 - DNA, 20 bp, synthetic construct
  misc_feature 1..20: note = Description of Artificial Sequence: Synthetic oligonucleotide
  misc_feature 1..20: note = Target: SCN10A; (+) strand; PAM type: YTN; PAM sequence: TTT
  source 1..20: mol_type = other DNA
atgtgacgtgcagcatttat

SEQ ID NO: 69839 - DNA, 20 bp, synthetic construct
  misc_feature 1..20: note = Description of Artificial Sequence: Synthetic oligonucleotide
  misc_feature 1..20: note = Target: SCN10A; (+) strand; PAM type: YTN; PAM sequence: TTA
  source 1..20: mol_type = other DNA
tgtgacgtgcagcatttatt

SEQ ID NO: 69840 - DNA, 20 bp, synthetic construct
  misc_feature 1..20: note = Description of Artificial Sequence: Synthetic oligonucleotide
  misc_feature 1..20: note = Target: SCN10A; (+) strand; PAM type: YTN; PAM sequence: TTT
  source 1..20: mol_type = other DNA
attgacttgtgtatgttaaa

SEQ ID NO: 69841 - DNA, 20 bp, synthetic construct
  misc_feature 1..20: note = Description of Artificial Sequence: Synthetic oligonucleotide
  misc_feature 1..20: note = Target: SCN10A; (+) strand; PAM type: YTN; PAM sequence: TTA
  source 1..20: mol_type = other DNA
ttgacttgtgtatgttaaat

SEQ ID NO: 69842 - DNA, 20 bp, synthetic construct
  misc_feature 1..20: note = Description of Artificial Sequence: Synthetic oligonucleotide
  misc_feature 1..20: note = Target: SCN10A; (+) strand; PAM type: YTN; PAM sequence: TTG
  source 1..20: mol_type = other DNA
acttgtgtatgttaaatcat

SEQ ID NO: 69843 - DNA, 20 bp, synthetic construct
  misc_feature 1..20: note = Description of Artificial Sequence: Synthetic oligonucleotide
  misc_feature 1..20: note = Target: SCN10A; (+) strand; PAM type: YTN; PAM sequence: CTT
  source 1..20: mol_type = other DNA
gtgtatgttaaatcatccct

SEQ ID NO: 69844 - DNA, 20 bp, synthetic construct
  misc_feature 1..20: note = Description of Artificial Sequence: Synthetic oligonucleotide
  misc_feature 1..20: note = Target: SCN10A; (+) strand; PAM type: YTN; PAM sequence: TTG
  source 1..20: mol_type = other DNA
tgtatgttaaatcatcccta

SEQ ID NO: 69845 - DNA, 20 bp, synthetic construct
  misc_feature 1..20: note = Description of Artificial Sequence: Synthetic oligonucleotide
  misc_feature 1..20: note = Target: SCN10A; (+) strand; PAM type: YTN; PAM sequence: TTA
  source 1..20: mol_type = other DNA
aatcatccctacctccctgg

SEQ ID NO: 69846 - DNA, 20 bp, synthetic construct
  misc_feature 1..20: note = Description of Artificial Sequence: Synthetic oligonucleotide
  misc_feature 1..20: note = Target: SCN10A; (+) strand; PAM type: YTN; PAM sequence: CTA
  source 1..20: mol_type = other DNA
cctccctggtatgaaacccc

SEQ ID NO: 69847 - DNA, 20 bp, synthetic construct
  misc_feature 1..20: note = Description of Artificial Sequence: Synthetic oligonucleotide
  misc_feature 1..20: note = Target: SCN10A; (+) strand; PAM type: YTN; PAM sequence: CTC
  source 1..20: mol_type = other DNA
cctggtatgaaacccccttg

SEQ ID NO: 69848 - DNA, 20 bp, synthetic construct
  misc_feature 1..20: note = Description of Artificial Sequence: Synthetic oligonucleotide
  misc_feature 1..20: note = Target: SCN10A; (+) strand; PAM type: YTN; PAM sequence: CTG
  source 1..20: mol_type = other DNA
gtatgaaacccccttgatca

SEQ ID NO: 69849 - DNA, 20 bp, synthetic construct
  misc_feature 1..20: note = Description of Artificial Sequence: Synthetic oligonucleotide
  misc_feature 1..20: note = Target: SCN10A; (+) strand; PAM type: YTN; PAM sequence: CTT
  source 1..20: mol_type = other DNA
gatcatggtgtgttatcttt

SEQ ID NO: 69850 - DNA, 20 bp, synthetic construct
  misc_feature 1..20: note = Description of Artificial Sequence: Synthetic oligonucleotide
  misc_feature 1..20: note = Target: SCN10A; (+) strand; PAM type: YTN; PAM sequence: TTG
  source 1..20: mol_type = other DNA
atcatggtgtgttatctttt

SEQ ID NO: 69851 - DNA, 20 bp, synthetic construct
  misc_feature 1..20: note = Description of Artificial Sequence: Synthetic oligonucleotide
  misc_feature 1..20: note = Target: SCN10A; (+) strand; PAM type: YTN; PAM sequence: TTA
  source 1..20: mol_type = other DNA
tcttttggatatgtgttgga

SEQ ID NO: 69852 - DNA, 20 bp, synthetic construct
  misc_feature 1..20: note = Description of Artificial Sequence: Synthetic oligonucleotide
  misc_feature 1..20: note = Target: SCN10A; (+) strand; PAM type: YTN; PAM sequence: CTT
  source 1..20: mol_type = other DNA
ttggatatgtgttggattca

SEQ ID NO: 69853 - DNA, 20 bp, synthetic construct
  misc_feature 1..20: note = Description of Artificial Sequence: Synthetic oligonucleotide
  misc_feature 1..20: note = Target: SCN10A; (+) strand; PAM type: YTN; PAM sequence: TTT
  source 1..20: mol_type = other DNA
tggatatgtgttggattcaa

SEQ ID NO: 69854 - DNA, 20 bp, synthetic construct
  misc_feature 1..20: note = Description of Artificial Sequence: Synthetic oligonucleotide
  misc_feature 1..20: note = Target: SCN10A; (+) strand; PAM type: YTN; PAM sequence: TTT
  source 1..20: mol_type = other DNA
ggatatgtgttggattcaat

SEQ ID NO: 69855 - DNA, 20 bp, synthetic construct
  misc_feature 1..20: note = Description of Artificial Sequence: Synthetic oligonucleotide
  misc_feature 1..20: note = Target: SCN10A; (+) strand; PAM type: YTN; PAM sequence: TTG
  source 1..20: mol_type = other DNA
gatatgtgttggattcaatt

SEQ ID NO: 69856 - DNA, 20 bp, synthetic construct
  misc_feature 1..20: note = Description of Artificial Sequence: Synthetic oligonucleotide
  misc_feature 1..20: note = Target: SCN10A; (+) strand; PAM type: YTN; PAM sequence: TTG
  source 1..20: mol_type = other DNA
gattcaattagctagcattt

SEQ ID NO: 69857 - DNA, 20 bp, synthetic construct
  misc_feature 1..20: note = Description of Artificial Sequence: Synthetic oligonucleotide
  misc_feature 1..20: note = Target: SCN10A; (+) strand; PAM type: YTN; PAM sequence: TTC
  source 1..20: mol_type = other DNA
aattagctagcattttgttg

SEQ ID NO: 69858 - DNA, 20 bp, synthetic construct
  misc_feature 1..20: note = Description of Artificial Sequence: Synthetic oligonucleotide
  misc_feature 1..20: note = Target: SCN10A; (+) strand; PAM type: YTN; PAM sequence: TTA
  source 1..20: mol_type = other DNA
gctagcattttgttgaggat

SEQ ID NO: 69859 - DNA, 20 bp, synthetic construct
  misc_feature 1..20: note = Description of Artificial Sequence: Synthetic oligonucleotide
  misc_feature 1..20: note = Target: SCN10A; (+) strand; PAM type: YTN; PAM sequence: CTA
  source 1..20: mol_type = other DNA
gcattttgttgaggattttt

SEQ ID NO: 69860 - DNA, 20 bp, synthetic construct
  misc_feature 1..20: note = Description of Artificial Sequence: Synthetic oligonucleotide
  misc_feature 1..20: note = Target: SCN10A; (+) strand; PAM type: YTN; PAM sequence: TTT
  source 1..20: mol_type = other DNA
tgttgaggatttttgcatct

SEQ ID NO: 69861 - DNA, 20 bp, synthetic construct
  misc_feature 1..20: note = Description of Artificial Sequence: Synthetic oligonucleotide
  misc_feature 1..20: note = Target: SCN10A; (+) strand; PAM type: YTN; PAM sequence: TTT
  source 1..20: mol_type = other DNA
gttgaggatttttgcatcta

SEQ ID NO: 69862 - DNA, 20 bp, synthetic construct
  misc_feature 1..20: note = Description of Artificial Sequence: Synthetic oligonucleotide
  misc_feature 1..20: note = Target: SCN10A; (+) strand; PAM type: YTN; PAM sequence: TTG
  source 1..20: mol_type = other DNA
ttgaggatttttgcatctat

SEQ ID NO: 69863 - DNA, 20 bp, synthetic construct
  misc_feature 1..20: note = Description of Artificial Sequence: Synthetic oligonucleotide
  misc_feature 1..20: note = Target: SCN10A; (+) strand; PAM type: YTN; PAM sequence: TTG
  source 1..20: mol_type = other DNA
aggatttttgcatctatgtt

SEQ ID NO: 69864 - DNA, 20 bp, synthetic construct
  misc_feature 1..20: note = Description of Artificial Sequence: Synthetic oligonucleotide
  misc_feature 1..20: note = Target: SCN10A; (+) strand; PAM type: YTN; PAM sequence: TTT
  source 1..20: mol_type = other DNA
ttgcatctatgttcatcagg

SEQ ID NO: 69865 - DNA, 20 bp, synthetic construct
  misc_feature 1..20: note = Description of Artificial Sequence: Synthetic oligonucleotide
  misc_feature 1..20: note = Target: SCN10A; (+) strand; PAM type: YTN; PAM sequence: TTT
  source 1..20: mol_type = other DNA
tgcatctatgttcatcaggg

SEQ ID NO: 69866 - DNA, 20 bp, synthetic construct
  misc_feature 1..20: note = Description of Artificial Sequence: Synthetic oligonucleotide
  misc_feature 1..20: note = Target: SCN10A; (+) strand; PAM type: YTN; PAM sequence: TTT
  source 1..20: mol_type = other DNA
gcatctatgttcatcaggga

SEQ ID NO: 69867 - DNA, 20 bp, synthetic construct
  misc_feature 1..20: note = Description of Artificial Sequence: Synthetic oligonucleotide
  misc_feature 1..20: note = Target: SCN10A; (+) strand; PAM type: YTN; PAM sequence: TTG
  source 1..20: mol_type = other DNA
catctatgttcatcagggat

SEQ ID NO: 69868 - DNA, 20 bp, synthetic construct
  misc_feature 1..20: note = Description of Artificial Sequence: Synthetic oligonucleotide
  misc_feature 1..20: note = Target: SCN10A; (+) strand; PAM type: YTN; PAM sequence: CTA
  source 1..20: mol_type = other DNA
tgttcatcagggatattgtc

SEQ ID NO: 69869 - DNA, 20 bp, synthetic construct
  misc_feature 1..20: note = Description of Artificial Sequence: Synthetic oligonucleotide
  misc_feature 1..20: note = Target: SCN10A; (+) strand; PAM type: YTN; PAM sequence: TTC
  source 1..20: mol_type = other DNA
atcagggatattgtctgtag

SEQ ID NO: 69870 - DNA, 20 bp, synthetic construct
  misc_feature 1..20: note = Description of Artificial Sequence: Synthetic oligonucleotide
  misc_feature 1..20: note = Target: SCN10A; (+) strand; PAM type: YTN; PAM sequence: TTG
  source 1..20: mol_type = other DNA
tctgtagttcttttttaaaa

SEQ ID NO: 69871 - DNA, 20 bp, synthetic construct
  misc_feature 1..20: note = Description of Artificial Sequence: Synthetic oligonucleotide
  misc_feature 1..20: note = Target: SCN10A; (+) strand; PAM type: YTN; PAM sequence: CTG
  source 1..20: mol_type = other DNA
tagttcttttttaaaagtcc

SEQ ID NO: 69872 - DNA, 20 bp, synthetic construct
  misc_feature 1..20: note = Description of Artificial Sequence: Synthetic oligonucleotide
  misc_feature 1..20: note = Target: SCN10A; (+) strand; PAM type: YTN; PAM sequence: TTC
  source 1..20: mol_type = other DNA
ttttttaaaagtccttttct

SEQ ID NO: 69873 - DNA, 20 bp, synthetic construct
  misc_feature 1..20: note = Description of Artificial Sequence: Synthetic oligonucleotide
  misc_feature 1..20: note = Target: SCN10A; (+) strand; PAM type: YTN; PAM sequence: CTT
  source 1..20: mol_type = other DNA
ttttaaaagtccttttctgg

SEQ ID NO: 69874 - DNA, 20 bp, synthetic construct
  misc_feature 1..20: note = Description of Artificial Sequence: Synthetic oligonucleotide
  misc_feature 1..20: note = Target: SCN10A; (+) strand; PAM type: YTN; PAM sequence: TTT
  source 1..20: mol_type = other DNA
tttaaaagtccttttctggt

SEQ ID NO: 69875 - DNA, 20 bp, synthetic construct
  misc_feature 1..20: note = Description of Artificial Sequence: Synthetic oligonucleotide
  misc_feature 1..20: note = Target: SCN10A; (+) strand; PAM type: YTN; PAM sequence: TTT
  source 1..20: mol_type = other DNA
ttaaaagtccttttctggtt

SEQ ID NO: 69876 - DNA, 20 bp, synthetic construct
  misc_feature 1..20: note = Description of Artificial Sequence: Synthetic oligonucleotide
  misc_feature 1..20: note = Target: SCN10A; (+) strand; PAM type: YTN; PAM sequence: TTT
  source 1..20: mol_type = other DNA
taaaagtccttttctggttt

SEQ ID NO: 69877 - DNA, 20 bp, synthetic construct
  misc_feature 1..20: note = Description of Artificial Sequence: Synthetic oligonucleotide
  misc_feature 1..20: note = Target: SCN10A; (+) strand; PAM type: YTN; PAM sequence: TTT
  source 1..20: mol_type = other DNA
aaaagtccttttctggtttt

SEQ ID NO: 69878 - DNA, 20 bp, synthetic construct
  misc_feature 1..20: note = Description of Artificial Sequence: Synthetic oligonucleotide
  misc_feature 1..20: note = Target: SCN10A; (+) strand; PAM type: YTN; PAM sequence: TTA
  source 1..20: mol_type = other DNA
aaagtccttttctggttttg

SEQ ID NO: 69879 - DNA, 20 bp, synthetic construct
  misc_feature 1..20: note = Description of Artificial Sequence: Synthetic oligonucleotide
  misc_feature 1..20: note = Target: SCN10A; (+) strand; PAM type: YTN; PAM sequence: CTT
  source 1..20: mol_type = other DNA
ttctggttttggtattaggg

SEQ ID NO: 69880 - DNA, 20 bp, synthetic construct
  misc_feature 1..20: note = Description of Artificial Sequence: Synthetic oligonucleotide
  misc_feature 1..20: note = Target: SCN10A; (+) strand; PAM type: YTN; PAM sequence: TTT
  source 1..20: mol_type = other DNA
tctggttttggtattagggt

SEQ ID NO: 69881 - DNA, 20 bp, synthetic construct
  misc_feature 1..20: note = Description of Artificial Sequence: Synthetic oligonucleotide
  misc_feature 1..20: note = Target: SCN10A; (+) strand; PAM type: YTN; PAM sequence: TTT
  source 1..20: mol_type = other DNA
ctggttttggtattagggtg

SEQ ID NO: 69882 - DNA, 20 bp, synthetic construct
  misc_feature 1..20: note = Description of Artificial Sequence: Synthetic oligonucleotide
  misc_feature 1..20: note = Target: SCN10A; (+) strand; PAM type: YTN; PAM sequence: TTC
  source 1..20: mol_type = other DNA
tggttttggtattagggtga

SEQ ID NO: 69883 - DNA, 20 bp, synthetic construct
  misc_feature 1..20: note = Description of Artificial Sequence: Synthetic oligonucleotide
  misc_feature 1..20: note = Target: SCN10A; (+) strand; PAM type: YTN; PAM sequence: CTG
  source 1..20: mol_type = other DNA
gttttggtattagggtgata

SEQ ID NO: 69884 - DNA, 20 bp, synthetic construct
  misc_feature 1..20: note = Description of Artificial Sequence: Synthetic oligonucleotide
  misc_feature 1..20: note = Target: SCN10A; (+) strand; PAM type: YTN; PAM sequence: TTT
  source 1..20: mol_type = other DNA
tggtattagggtgatactgg

SEQ ID NO: 69885 - DNA, 20 bp, synthetic construct
  misc_feature 1..20: note = Description of Artificial Sequence: Synthetic oligonucleotide
  misc_feature 1..20: note = Target: SCN10A; (+) strand; PAM type: YTN; PAM sequence: TTT
  source 1..20: mol_type = other DNA
ggtattagggtgatactggc

SEQ ID NO: 69886 - DNA, 20 bp, synthetic construct
  misc_feature 1..20: note = Description of Artificial Sequence: Synthetic oligonucleotide
  misc_feature 1..20: note = Target: SCN10A; (+) strand; PAM type: YTN; PAM sequence: TTG
  source 1..20: mol_type = other DNA
gtattagggtgatactggct

SEQ ID NO: 69887 - DNA, 20 bp, synthetic construct
  misc_feature 1..20: note = Description of Artificial Sequence: Synthetic oligonucleotide
  misc_feature 1..20: note = Target: SCN10A; (+) strand; PAM type: YTN; PAM sequence: TTA
  source 1..20: mol_type = other DNA
gggtgatactggcttcataa

SEQ ID NO: 69888 - DNA, 20 bp, synthetic construct
  misc_feature 1..20: note = Description of Artificial Sequence: Synthetic oligonucleotide
  misc_feature 1..20: note = Target: SCN10A; (+) strand; PAM type: YTN; PAM sequence: CTG
  source 1..20: mol_type = other DNA
gcttcataaaatgatttagg

SEQ ID NO: 69889 - DNA, 20 bp, synthetic construct
  misc_feature 1..20: note = Description of Artificial Sequence: Synthetic oligonucleotide
  misc_feature 1..20: note = Target: SCN10A; (+) strand; PAM type: YTN; PAM sequence: CTT
  source 1..20: mol_type = other DNA
cataaaatgatttaggagga

SEQ ID NO: 69890 - DNA, 20 bp, synthetic construct
  misc_feature 1..20: note = Description of Artificial Sequence: Synthetic oligonucleotide
  misc_feature 1..20: note = Target: SCN10A; (+) strand; PAM type: YTN; PAM sequence: TTC
  source 1..20: mol_type = other DNA
ataaaatgatttaggaggat

SEQ ID NO: 69891 - DNA, 20 bp, synthetic construct
  misc_feature 1..20: note = Description of Artificial Sequence: Synthetic oligonucleotide
  misc_feature 1..20: note = Target: SCN10A; (+) strand; PAM type: YTN; PAM sequence: TTT
  source 1..20: mol_type = other DNA
aggaggattccctctttctg

SEQ ID NO: 69892 - DNA, 20 bp, synthetic construct
  misc_feature 1..20: note = Description of Artificial Sequence: Synthetic oligonucleotide
  misc_feature 1..20: note = Target: SCN10A; (+) strand; PAM type: YTN; PAM sequence: TTA
  source 1..20: mol_type = other DNA
ggaggattccctctttctgc

SEQ ID NO: 69893 - DNA, 20 bp, synthetic construct
  misc_feature 1..20: note = Description of Artificial Sequence: Synthetic oligonucleotide
  misc_feature 1..20: note = Target: SCN10A; (+) strand; PAM type: YTN; PAM sequence: TTC
  source 1..20: mol_type = other DNA
cctctttctgcatcttttgg

SEQ ID NO: 69894 - DNA, 20 bp, synthetic construct
  misc_feature 1..20: note = Description of Artificial Sequence: Synthetic oligonucleotide
  misc_feature 1..20: note = Target: SCN10A; (+) strand; PAM type: YTN; PAM sequence: CTC
  source 1..20: mol_type = other DNA
tttctgcatcttttggaata

SEQ ID NO: 69895 - DNA, 20 bp, synthetic construct
  misc_feature 1..20: note = Description of Artificial Sequence: Synthetic oligonucleotide
  misc_feature 1..20: note = Target: SCN10A; (+) strand; PAM type: YTN; PAM sequence: CTT
  source 1..20: mol_type = other DNA
tctgcatcttttggaatagt

SEQ ID NO: 69896 - DNA, 20 bp, synthetic construct
  misc_feature 1..20: note = Description of Artificial Sequence: Synthetic oligonucleotide
  misc_feature 1..20: note = Target: SCN10A; (+) strand; PAM type: YTN; PAM sequence: TTT
  source 1..20: mol_type = other DNA
ctgcatcttttggaatagtt

SEQ ID NO: 69897 - DNA, 20 bp, synthetic construct
  misc_feature 1..20: note = Description of Artificial Sequence: Synthetic oligonucleotide
  misc_feature 1..20: note = Target: SCN10A; (+) strand; PAM type: YTN; PAM sequence: TTC
  source 1..20: mol_type = other DNA
tgcatcttttggaatagttt

SEQ ID NO: 69898 - DNA, 20 bp, synthetic construct
  misc_feature 1..20: note = Description of Artificial Sequence: Synthetic oligonucleotide
  misc_feature 1..20: note = Target: SCN10A; (+) strand; PAM type: YTN; PAM sequence: CTG
  source 1..20: mol_type = other DNA
catcttttggaatagtttca

SEQ ID NO: 69899 - DNA, 20 bp, synthetic construct
  misc_feature 1..20: note = Description of Artificial Sequence: Synthetic oligonucleotide
  misc_feature 1..20: note = Target: SCN10A; (+) strand; PAM type: YTN; PAM sequence: CTT
  source 1..20: mol_type = other DNA
ttggaatagtttcaataaaa

SEQ ID NO: 69900 - DNA, 20 bp, synthetic construct
  misc_feature 1..20: note = Description of Artificial Sequence: Synthetic oligonucleotide
  misc_feature 1..20: note = Target: SCN10A; (+) strand; PAM type: YTN; PAM sequence: TTT
  source 1..20: mol_type = other DNA
tggaatagtttcaataaaat

SEQ ID NO: 69901 - DNA, 20 bp, synthetic construct
  misc_feature 1..20: note = Description of Artificial Sequence: Synthetic oligonucleotide
  misc_feature 1..20: note = Target: SCN10A; (+) strand; PAM type: YTN; PAM sequence: TTT
  source 1..20: mol_type = other DNA
ggaatagtttcaataaaatt

SEQ ID NO: 69902 - DNA, 20 bp, synthetic construct
  misc_feature 1..20: note = Description of Artificial Sequence: Synthetic oligonucleotide
  misc_feature 1..20: note = Target: SCN10A; (+) strand; PAM type: YTN; PAM sequence: TTG
  source 1..20: mol_type = other DNA
gaatagtttcaataaaattg

SEQ ID NO: 69903 - DNA, 20 bp, synthetic construct
  misc_feature 1..20: note = Description of Artificial Sequence: Synthetic oligonucleotide
  misc_feature 1..20: note = Target: SCN10A; (+) strand; PAM type: YTN; PAM sequence: TTT
  source 1..20: mol_type = other DNA
caataaaattggtaccaatt

SEQ ID NO: 69904 - DNA, 20 bp, synthetic construct
  misc_feature 1..20: note = Description of Artificial Sequence: Synthetic oligonucleotide
  misc_feature 1..20: note = Target: SCN10A; (+) strand; PAM type: YTN; PAM sequence: TTC
  source 1..20: mol_type = other DNA
aataaaattggtaccaattc

SEQ ID NO: 69905 - DNA, 20 bp, synthetic construct
  misc_feature 1..20: note = Description of Artificial Sequence: Synthetic oligonucleotide
  misc_feature 1..20: note = Target: SCN10A; (+) strand; PAM type: YTN; PAM sequence: TTG
  source 1..20: mol_type = other DNA
gtaccaattcttctttgaat

SEQ ID NO: 69906 - DNA, 20 bp, synthetic construct
  misc_feature 1..20: note = Description of Artificial Sequence: Synthetic oligonucleotide
  misc_feature 1..20: note = Target: SCN10A; (+) strand; PAM type: YTN; PAM sequence: TTC
  source 1..20: mol_type = other DNA
ttctttgaatgtctgataga

SEQ ID NO: 69907 - DNA, 20 bp, synthetic construct
  misc_feature 1..20: note = Description of Artificial Sequence: Synthetic oligonucleotide
  misc_feature 1..20: note = Target: SCN10A; (+) strand; PAM type: YTN; PAM sequence: CTT
  source 1..20: mol_type = other DNA
ctttgaatgtctgatagaat

SEQ ID NO: 69908 - DNA, 20 bp, synthetic construct
  misc_feature 1..20: note = Description of Artificial Sequence: Synthetic oligonucleotide
  misc_feature 1..20: note = Target: SCN10A; (+) strand; PAM type: YTN; PAM sequence: TTC
  source 1..20: mol_type = other DNA
tttgaatgtctgatagaatt

SEQ ID NO: 69909 - DNA, 20 bp, synthetic construct
  misc_feature 1..20: note = Description of Artificial Sequence: Synthetic oligonucleotide
  misc_feature 1..20: note = Target: SCN10A; (+) strand; PAM type: YTN; PAM sequence: CTT
  source 1..20: mol_type = other DNA
tgaatgtctgatagaattca

SEQ ID NO: 69910 - DNA, 20 bp, synthetic construct
  misc_feature 1..20: note = Description of Artificial Sequence: Synthetic oligonucleotide
  misc_feature 1..20: note = Target: SCN10A; (+) strand; PAM type: YTN; PAM sequence: TTT
  source 1..20: mol_type = other DNA
gaatgtctgatagaattcag

SEQ ID NO: 69911 - DNA, 20 bp, synthetic construct
  misc_feature 1..20: note = Description of Artificial Sequence: Synthetic oligonucleotide
  misc_feature 1..20: note = Target: SCN10A; (+) strand; PAM type: YTN; PAM sequence: TTG
  source 1..20: mol_type = other DNA
aatgtctgatagaattcagc

SEQ ID NO: 69912 - DNA, 20 bp, synthetic construct
  misc_feature 1..20: note = Description of Artificial Sequence: Synthetic oligonucleotide
  misc_feature 1..20: note = Target: SCN10A; (+) strand; PAM type: YTN; PAM sequence: CTG
  source 1..20: mol_type = other DNA
atagaattcagctgtgaatc

SEQ ID NO: 69913 - DNA, 20 bp, synthetic construct
  misc_feature 1..20: note = Description of Artificial Sequence: Synthetic oligonucleotide
  misc_feature 1..20: note = Target: SCN10A; (+) strand; PAM type: YTN; PAM sequence: TTC
  source 1..20: mol_type = other DNA
agctgtgaatccagtctgct

SEQ ID NO: 69914 - DNA, 20 bp, synthetic construct
  misc_feature 1..20: note = Description of Artificial Sequence: Synthetic oligonucleotide
  misc_feature 1..20: note = Target: SCN10A; (+) strand; PAM type: YTN; PAM sequence: CTG
  source 1..20: mol_type = other DNA
tgaatccagtctgctcctgg

SEQ ID NO: 69915 - DNA, 20 bp, synthetic construct
  misc_feature 1..20: note = Description of Artificial Sequence: Synthetic oligonucleotide
  misc_feature 1..20: note = Target: SCN10A; (+) strand; PAM type: YTN; PAM sequence: CTG
  source 1..20: mol_type = other DNA
ctcctggactttttttcctt

SEQ ID NO: 69916 - DNA, 20 bp, synthetic construct
  misc_feature 1..20: note = Description of Artificial Sequence: Synthetic oligonucleotide
  misc_feature 1..20: note = Target: SCN10A; (+) strand; PAM type: YTN; PAM sequence: CTC
  source 1..20: mol_type = other DNA
ctggactttttttccttggc

SEQ ID NO: 69917 - DNA, 20 bp, synthetic construct
  misc_feature 1..20: note = Description of Artificial Sequence: Synthetic oligonucleotide
  misc_feature 1..20: note = Target: SCN10A; (+) strand; PAM type: YTN; PAM sequence: CTG
  source 1..20: mol_type = other DNA
gactttttttccttggcaat

SEQ ID NO: 69918 - DNA, 20 bp, synthetic construct
  misc_feature 1..20: note = Description of Artificial Sequence: Synthetic oligonucleotide
  misc_feature 1..20: note = Target: SCN10A; (+) strand; PAM type: YTN; PAM sequence: CTT
  source 1..20: mol_type = other DNA
tttttccttggcaatttttg

SEQ ID NO: 69919 - DNA, 20 bp, synthetic construct
  misc_feature 1..20: note = Description of Artificial Sequence: Synthetic oligonucleotide
  misc_feature 1..20: note = Target: SCN10A; (+) strand; PAM type: YTN; PAM sequence: TTT
  source 1..20: mol_type = other DNA
ttttccttggcaatttttga

SEQ ID NO: 69920 - DNA, 20 bp, synthetic construct
  misc_feature 1..20: note = Description of Artificial Sequence: Synthetic oligonucleotide
  misc_feature 1..20: note = Target: SCN10A; (+) strand; PAM type: YTN; PAM sequence: TTT
  source 1..20: mol_type = other DNA
tttccttggcaatttttgaa

SEQ ID NO: 69921 - DNA, 20 bp, synthetic construct
  misc_feature 1..20: note = Description of Artificial Sequence: Synthetic oligonucleotide
  misc_feature 1..20: note = Target: SCN10A; (+) strand; PAM type: YTN; PAM sequence: TTT
  source 1..20: mol_type = other DNA
ttccttggcaatttttgaat

SEQ ID NO: 69922 - DNA, 20 bp, synthetic construct
  misc_feature 1..20: note = Description of Artificial Sequence: Synthetic oligonucleotide
  misc_feature 1..20: note = Target: SCN10A; (+) strand; PAM type: YTN; PAM sequence: TTT
  source 1..20: mol_type = other DNA
tccttggcaatttttgaatt

SEQ ID NO: 69923 - DNA, 20 bp, synthetic construct
  misc_feature 1..20: note = Description of Artificial Sequence: Synthetic oligonucleotide
  misc_feature 1..20: note = Target: SCN10A; (+) strand; PAM type: YTN; PAM sequence: TTT
  source 1..20: mol_type = other DNA
ccttggcaatttttgaatta

SEQ ID NO: 69924 - DNA, 20 bp, synthetic construct
  misc_feature 1..20: note = Description of Artificial Sequence: Synthetic oligonucleotide
  misc_feature 1..20: note = Target: SCN10A; (+) strand; PAM type: YTN; PAM sequence: TTC
  source 1..20: mol_type = other DNA
cttggcaatttttgaattac

SEQ ID NO: 69925 - DNA, 20 bp, synthetic construct
  misc_feature 1..20: note = Description of Artificial Sequence: Synthetic oligonucleotide
  misc_feature 1..20: note = Target: SCN10A; (+) strand; PAM type: YTN; PAM sequence: CTT
  source 1..20: mol_type = other DNA
ggcaatttttgaattactgt

SEQ ID NO: 69926 - DNA, 20 bp, synthetic construct
  misc_feature 1..20: note = Description of Artificial Sequence: Synthetic oligonucleotide
  misc_feature 1..20: note = Target: SCN10A; (+) strand; PAM type: YTN; PAM sequence: TTG
  source 1..20: mol_type = other DNA
gcaatttttgaattactgtt

SEQ ID NO: 69927 - DNA, 20 bp, synthetic construct
  misc_feature 1..20: note = Description of Artificial Sequence: Synthetic oligonucleotide
  misc_feature 1..20: note = Target: SCN10A; (+) strand; PAM type: YTN; PAM sequence: TTT
  source 1..20: mol_type = other DNA
ttgaattactgtttcaatct

SEQ ID NO: 69928 - DNA, 20 bp, synthetic construct
  misc_feature 1..20: note = Description of Artificial Sequence: Synthetic oligonucleotide
  misc_feature 1..20: note = Target: SCN10A; (+) strand; PAM type: YTN; PAM sequence: TTT
  source 1..20: mol_type = other DNA
tgaattactgtttcaatctc

SEQ ID NO: 69929 - DNA, 20 bp, synthetic construct
  misc_feature 1..20: note = Description of Artificial Sequence: Synthetic oligonucleotide
  misc_feature 1..20: note = Target: SCN10A; (+) strand; PAM type: YTN; PAM sequence: TTT
  source 1..20: mol_type = other DNA
gaattactgtttcaatctcg

SEQ ID NO: 69930 - DNA, 20 bp, synthetic construct
  misc_feature 1..20: note = Description of Artificial Sequence: Synthetic oligonucleotide
  misc_feature 1..20: note = Target: SCN10A; (+) strand; PAM type: YTN; PAM sequence: TTG
  source 1..20: mol_type = other DNA
aattactgtttcaatctcgc

SEQ ID NO: 69931 - DNA, 20 bp, synthetic construct
  misc_feature 1..20: note = Description of Artificial Sequence: Synthetic oligonucleotide
  misc_feature 1..20: note = Target: SCN10A; (+) strand; PAM type: YTN; PAM sequence: TTA
  source 1..20: mol_type = other DNA
ctgtttcaatctcgctactt

SEQ ID NO: 69932 - DNA, 20 bp, synthetic construct
  misc_feature 1..20: note = Description of Artificial Sequence: Synthetic oligonucleotide
  misc_feature 1..20: note = Target: SCN10A; (+) strand; PAM type: YTN; PAM sequence: CTG
  source 1..20: mol_type = other DNA
tttcaatctcgctacttgtt

SEQ ID NO: 69933 - DNA, 20 bp, synthetic construct
  misc_feature 1..20: note = Description of Artificial Sequence: Synthetic oligonucleotide
  misc_feature 1..20: note = Target: SCN10A; (+) strand; PAM type: YTN; PAM sequence: TTT
  source 1..20: mol_type = other DNA
caatctcgctacttgttatt

SEQ ID NO: 69934 - DNA, 20 bp, synthetic construct
  misc_feature 1..20: note = Description of Artificial Sequence: Synthetic oligonucleotide
  misc_feature 1..20: note = Target: SCN10A; (+) strand; PAM type: YTN; PAM sequence: TTC
  source 1..20: mol_type = other DNA
aatctcgctacttgttattg

SEQ ID NO: 69935 - DNA, 20 bp, synthetic construct
  misc_feature 1..20: note = Description of Artificial Sequence: Synthetic oligonucleotide
  misc_feature 1..20: note = Target: SCN10A; (+) strand; PAM type: YTN; PAM sequence: CTC
  source 1..20: mol_type = other DNA
gctacttgttattggtctgt

SEQ ID NO: 69936 - DNA, 20 bp, synthetic construct
  misc_feature 1..20: note = Description of Artificial Sequence: Synthetic oligonucleotide
  misc_feature 1..20: note = Target: SCN10A; (+) strand; PAM type: YTN; PAM sequence: CTA
  source 1..20: mol_type = other DNA
cttgttattggtctgtttag

SEQ ID NO: 69937 - DNA, 20 bp, synthetic construct
  misc_feature 1..20: note = Description of Artificial Sequence: Synthetic oligonucleotide
  misc_feature 1..20: note = Target: SCN10A; (+) strand; PAM type: YTN; PAM sequence: CTT
  source 1..20: mol_type = other DNA
gttattggtctgtttagagt

SEQ ID NO: 69938 - DNA, 20 bp, synthetic construct
  misc_feature 1..20: note = Description of Artificial Sequence: Synthetic oligonucleotide
  misc_feature 1..20: note = Target: SCN10A; (+) strand; PAM type: YTN; PAM sequence: TTG
  source 1..20: mol_type = other DNA
ttattggtctgtttagagtt

SEQ ID NO: 69939 - DNA, 20 bp, synthetic construct
  misc_feature 1..20: note = Description of Artificial Sequence: Synthetic oligonucleotide
  misc_feature 1..20: note = Target: SCN10A; (+) strand; PAM type: YTN; PAM sequence: TTA
  source 1..20: mol_type = other DNA
ttggtctgtttagagtttct

SEQ ID NO: 69940 - DNA, 20 bp, synthetic construct
  misc_feature 1..20: note = Description of Artificial Sequence: Synthetic oligonucleotide
  misc_feature 1..20: note = Target: SCN10A; (+) strand; PAM type: YTN; PAM sequence: TTG
  source 1..20: mol_type = other DNA
gtctgtttagagtttctatt

SEQ ID NO: 69941 - DNA, 20 bp, synthetic construct
  misc_feature 1..20: note = Description of Artificial Sequence: Synthetic oligonucleotide
  misc_feature 1..20: note = Target: SCN10A; (+) strand; PAM type: YTN; PAM sequence: CTG
  source 1..20: mol_type = other DNA
tttagagtttctattacttt

SEQ ID NO: 69942 - DNA, 20 bp, synthetic construct
  misc_feature 1..20: note = Description of Artificial Sequence: Synthetic oligonucleotide
  misc_feature 1..20: note = Target: SCN10A; (+) strand; PAM type: YTN; PAM sequence: TTT
  source 1..20: mol_type = other DNA
agagtttctattactttctg

SEQ ID NO: 69943 - DNA, 20 bp, synthetic construct
  misc_feature 1..20: note = Description of Artificial Sequence: Synthetic oligonucleotide
  misc_feature 1..20: note = Target: SCN10A; (+) strand; PAM type: YTN; PAM sequence: TTA
  source 1..20: mol_type = other DNA
gagtttctattactttctga

SEQ ID NO: 69944 - DNA, 20 bp, synthetic construct
  misc_feature 1..20: note = Description of Artificial Sequence: Synthetic oligonucleotide
  misc_feature 1..20: note = Target: SCN10A; (+) strand; PAM type: YTN; PAM sequence: TTT
  source 1..20: mol_type = other DNA
ctattactttctgatttaat

SEQ ID NO: 69945 - DNA, 20 bp, synthetic construct
  misc_feature 1..20: note = Description of Artificial Sequence: Synthetic oligonucleotide
  misc_feature 1..20: note = Target: SCN10A; (+) strand; PAM type: YTN; PAM sequence: TTC
  source 1..20: mol_type = other DNA
tattactttctgatttaatc

SEQ ID NO: 69946 - DNA, 20 bp, synthetic construct
  misc_feature 1..20: note = Description of Artificial Sequence: Synthetic oligonucleotide
  misc_feature 1..20: note = Target: SCN10A; (+) strand; PAM type: YTN; PAM sequence: CTA
  source 1..20: mol_type = other DNA
ttactttctgatttaatcta

SEQ ID NO: 69947 - DNA, 20 bp, synthetic construct
  misc_feature 1..20: note = Description of Artificial Sequence: Synthetic oligonucleotide
  misc_feature 1..20: note = Target: SCN10A; (+) strand; PAM type: YTN; PAM sequence: TTA
  source 1..20: mol_type = other DNA
ctttctgatttaatctaaga

SEQ ID NO: 69948 - DNA, 20 bp, synthetic construct
  misc_feature 1..20: note = Description of Artificial Sequence: Synthetic oligonucleotide
  misc_feature 1..20: note = Target: SCN10A; (+) strand; PAM type: YTN; PAM sequence: CTT
  source 1..20: mol_type = other DNA
tctgatttaatctaagacag

SEQ ID NO: 69949 - DNA, 20 bp, synthetic construct
  misc_feature 1..20: note = Description of Artificial Sequence: Synthetic oligonucleotide
  misc_feature 1..20: note = Target: SCN10A; (+) strand; PAM type: YTN; PAM sequence: TTT
  source 1..20: mol_type = other DNA
ctgatttaatctaagacagt

SEQ ID NO: 69950 - DNA, 20 bp, synthetic construct
  misc_feature 1..20: note = Description of Artificial Sequence: Synthetic oligonucleotide
  misc_feature 1..20: note = Target: SCN10A; (+) strand; PAM type: YTN; PAM sequence: TTC
  source 1..20: mol_type = other DNA
tgatttaatctaagacagtt

SEQ ID NO: 69951 - DNA, 20 bp, synthetic construct
  misc_feature 1..20: note = Description of Artificial Sequence: Synthetic oligonucleotide
  misc_feature 1..20: note = Target: SCN10A; (+) strand; PAM type: YTN; PAM sequence: CTG
  source 1..20: mol_type = other DNA
atttaatctaagacagttgt

SEQ ID NO: 69952 - DNA, 20 bp, synthetic construct
  misc_feature 1..20: note = Description of Artificial Sequence: Synthetic oligonucleotide
  misc_feature 1..20: note = Target: SCN10A; (+) strand; PAM type: YTN; PAM sequence: TTT
  source 1..20: mol_type = other DNA
aatctaagacagttgtatat

SEQ ID NO: 69953 - DNA, 20 bp, synthetic construct
  misc_feature 1..20: note = Description of Artificial Sequence: Synthetic oligonucleotide
  misc_feature 1..20: note = Target: SCN10A; (+) strand; PAM type: YTN; PAM sequence: TTA
  source 1..20: mol_type = other DNA
atctaagacagttgtatatt

SEQ ID NO: 69954 - DNA, 20 bp, synthetic construct
  misc_feature 1..20: note = Description of Artificial Sequence: Synthetic oligonucleotide
  misc_feature 1..20: note = Target: SCN10A; (+) strand; PAM type: YTN; PAM sequence: CTA
  source 1..20: mol_type = other DNA
agacagttgtatatttccag

SEQ ID NO: 69955 - DNA, 20 bp, synthetic construct
  misc_feature 1..20: note = Description of Artificial Sequence: Synthetic oligonucleotide
  misc_feature 1..20: note = Target: SCN10A; (+) strand; PAM type: YTN; PAM sequence: TTG
  source 1..20: mol_type = other DNA
tatatttccaggaatttatt

SEQ ID NO: 69956 - DNA, 20 bp, synthetic construct
  misc_feature 1..20: note = Description of Artificial Sequence: Synthetic oligonucleotide
  misc_feature 1..20: note = Target: SCN10A; (+) strand; PAM type: YTN; PAM sequence: TTT
  source 1..20: mol_type = other DNA
ccaggaatttattcatctcc

SEQ ID NO: 69957 - DNA, 20 bp, synthetic construct
  misc_feature 1..20: note = Description of Artificial Sequence: Synthetic oligonucleotide
  misc_feature 1..20: note = Target: SCN10A; (+) strand; PAM type: YTN; PAM sequence: TTC
  source 1..20: mol_type = other DNA
caggaatttattcatctcct

SEQ ID NO: 69958 - DNA, 20 bp, synthetic construct
  misc_feature 1..20: note = Description of Artificial Sequence: Synthetic oligonucleotide
  misc_feature 1..20: note = Target: SCN10A; (+) strand; PAM type: YTN; PAM sequence: TTT
  source 1..20: mol_type = other DNA
attcatctcctctaaatttt

SEQ ID NO: 69959 - DNA, 20 bp, synthetic construct
  misc_feature 1..20: note = Description of Artificial Sequence: Synthetic oligonucleotide
  misc_feature 1..20: note = Target: SCN10A; (+) strand; PAM type: YTN; PAM sequence: TTA
  source 1..20: mol_type = other DNA
ttcatctcctctaaattttc

SEQ ID NO: 69960 - DNA, 20 bp, synthetic construct
  misc_feature 1..20: note = Description of Artificial Sequence: Synthetic oligonucleotide
  misc_feature 1..20: note = Target: SCN10A; (+) strand; PAM type: YTN; PAM sequence: TTC
  source 1..20: mol_type = other DNA
atctcctctaaattttctag

SEQ ID NO: 69961 - DNA, 20 bp, synthetic construct
  misc_feature 1..20: note = Description of Artificial Sequence: Synthetic oligonucleotide
  misc_feature 1..20: note = Target: SCN10A; (+) strand; PAM type: YTN; PAM sequence: CTC
  source 1..20: mol_type = other DNA
ctctaaattttctagtttgt

SEQ ID NO: 69962 - DNA, 20 bp, synthetic construct
  misc_feature 1..20: note = Description of Artificial Sequence: Synthetic oligonucleotide
  misc_feature 1..20: note = Target: SCN10A; (+) strand; PAM type: YTN; PAM sequence: CTC
  source 1..20: mol_type = other DNA
taaattttctagtttgtgca

SEQ ID NO: 69963 - DNA, 20 bp, synthetic construct
  misc_feature 1..20: note = Description of Artificial Sequence: Synthetic oligonucleotide
  misc_feature 1..20: note = Target: SCN10A; (+) strand; PAM type: YTN; PAM sequence: CTA
  source 1..20: mol_type = other DNA
aattttctagtttgtgcaaa

SEQ ID NO: 69964 - DNA, 20 bp, synthetic construct
  misc_feature 1..20: note = Description of Artificial Sequence: Synthetic oligonucleotide
  misc_feature 1..20: note = Target: SCN10A; (+) strand; PAM type: YTN; PAM sequence: TTT
  source 1..20: mol_type = other DNA
tctagtttgtgcaaataaag

SEQ ID NO: 69965 - DNA, 20 bp, synthetic construct
  misc_feature 1..20: note = Description of Artificial Sequence: Synthetic oligonucleotide
  misc_feature 1..20: note = Target: SCN10A; (+) strand; PAM type: YTN; PAM sequence: TTT
  source 1..20: mol_type = other DNA
ctagtttgtgcaaataaagg

SEQ ID NO: 69966 - DNA, 20 bp, synthetic construct
  misc_feature 1..20: note = Description of Artificial Sequence: Synthetic oligonucleotide
  misc_feature 1..20: note = Target: SCN10A; (+) strand; PAM type: YTN; PAM sequence: TTC
  source 1..20: mol_type = other DNA
tagtttgtgcaaataaaggt

SEQ ID NO: 69967 - DNA, 20 bp, synthetic construct
  misc_feature 1..20: note = Description of Artificial Sequence: Synthetic oligonucleotide
  misc_feature 1..20: note = Target: SCN10A; (+) strand; PAM type: YTN; PAM sequence: CTA
  source 1..20: mol_type = other DNA
gtttgtgcaaataaaggtgt

SEQ ID NO: 69968 - DNA, 20 bp, synthetic construct
  misc_feature 1..20: note = Description of Artificial Sequence: Synthetic oligonucleotide
  misc_feature 1..20: note = Target: SCN10A; (+) strand; PAM type: YTN; PAM sequence: TTT
  source 1..20: mol_type = other DNA
gtgcaaataaaggtgttcat

SEQ ID NO: 69969 - DNA, 20 bp, synthetic construct
  misc_feature 1..20: note = Description of Artificial Sequence: Synthetic oligonucleotide
  misc_feature 1..20: note = Target: SCN10A; (+) strand; PAM type: YTN; PAM sequence: TTG
  source 1..20: mol_type = other DNA
tgcaaataaaggtgttcata

SEQ ID NO: 69970 - DNA, 20 bp, synthetic construct
  misc_feature 1..20: note = Description of Artificial Sequence: Synthetic oligonucleotide
  misc_feature 1..20: note = Target: SCN10A; (+) strand; PAM type: YTN; PAM sequence: TTC
  source 1..20: mol_type = other DNA
atagtagccttgaatgattt

SEQ ID NO: 69971 - DNA, 20 bp, synthetic construct
  misc_feature 1..20: note = Description of Artificial Sequence: Synthetic oligonucleotide
  misc_feature 1..20: note = Target: SCN10A; (+) strand; PAM type: YTN; PAM sequence: CTT
  source 1..20: mol_type = other DNA
gaatgattttttttttgtat

SEQ ID NO: 69972 - DNA, 20 bp, synthetic construct
  misc_feature 1..20: note = Description of Artificial Sequence: Synthetic oligonucleotide
  misc_feature 1..20: note = Target: SCN10A; (+) strand; PAM type: YTN; PAM sequence: TTG
  source 1..20: mol_type = other DNA
aatgattttttttttgtatt

SEQ ID NO: 69973 - DNA, 20 bp, synthetic construct
  misc_feature 1..20: note = Description of Artificial Sequence: Synthetic oligonucleotide
  misc_feature 1..20: note = Target: SCN10A; (+) strand; PAM type: YTN; PAM sequence: TTT
  source 1..20: mol_type = other DNA
tttttttgtatttctgtggt

SEQ ID NO: 69974 - DNA, 20 bp, synthetic construct
  misc_feature 1..20: note = Description of Artificial Sequence: Synthetic oligonucleotide
  misc_feature 1..20: note = Target: SCN10A; (+) strand; PAM type: YTN; PAM sequence: TTT
  source 1..20: mol_type = other DNA
ttttttgtatttctgtggta

SEQ ID NO: 69975 - DNA, 20 bp, synthetic construct
  misc_feature 1..20: note = Description of Artificial Sequence: Synthetic oligonucleotide
  misc_feature 1..20: note = Target: SCN10A; (+) strand; PAM type: YTN; PAM sequence: TTT
  source 1..20: mol_type = other DNA
tttttgtatttctgtggtat

SEQ ID NO: 69976 - DNA, 20 bp, synthetic construct
  misc_feature 1..20: note = Description of Artificial Sequence: Synthetic oligonucleotide
  misc_feature 1..20: note = Target: SCN10A; (+) strand; PAM type: YTN; PAM sequence: TTT
  source 1..20: mol_type = other DNA
ttttgtatttctgtggtatc

SEQ ID NO: 69977 - DNA, 20 bp, synthetic construct
  misc_feature 1..20: note = Description of Artificial Sequence: Synthetic oligonucleotide
  misc_feature 1..20: note = Target: SCN10A; (+) strand; PAM type: YTN; PAM sequence: TTT
  source 1..20: mol_type = other DNA
tttgtatttctgtggtatca

SEQ ID NO: 69978 - DNA, 20 bp, synthetic construct
  misc_feature 1..20: note = Description of Artificial Sequence: Synthetic oligonucleotide
  misc_feature 1..20: note = Target: SCN10A; (+) strand; PAM type: YTN; PAM sequence: TTT
  source 1..20: mol_type = other DNA
ttgtatttctgtggtatcag

SEQ ID NO: 69979 - DNA, 20 bp, synthetic construct
  misc_feature 1..20: note = Description of Artificial Sequence: Synthetic oligonucleotide
  misc_feature 1..20: note = Target: SCN10A; (+) strand; PAM type: YTN; PAM sequence: TTT
  source 1..20: mol_type = other DNA
tgtatttctgtggtatcagt

SEQ ID NO: 69980 - DNA, 20 bp, synthetic construct
  misc_feature 1..20: note = Description of Artificial Sequence: Synthetic oligonucleotide
  misc_feature 1..20: note = Target: SCN10A; (+) strand; PAM type: YTN; PAM sequence: TTT
  source 1..20: mol_type = other DNA
gtatttctgtggtatcagtt

SEQ ID NO: 69981 - DNA, 20 bp, synthetic construct
  misc_feature 1..20: note = Description of Artificial Sequence: Synthetic oligonucleotide
  misc_feature 1..20: note = Target: SCN10A; (+) strand; PAM type: YTN; PAM sequence: TTG
  source 1..20: mol_type = other DNA
tatttctgtggtatcagttg

SEQ ID NO: 69982 - DNA, 20 bp, synthetic construct
  misc_feature 1..20: note = Description of Artificial Sequence: Synthetic oligonucleotide
  misc_feature 1..20: note = Target: SCN10A; (+) strand; PAM type: YTN; PAM sequence: TTT
  source 1..20: mol_type = other DNA
ctgtggtatcagttgtaata

SEQ ID NO: 69983 - DNA, 20 bp, synthetic construct
  misc_feature 1..20: note = Description of Artificial Sequence: Synthetic oligonucleotide
  misc_feature 1..20: note = Target: SCN10A; (+) strand; PAM type: YTN; PAM sequence: TTC
  source 1..20: mol_type = other DNA
tgtggtatcagttgtaatat

SEQ ID NO: 69984 - DNA, 20 bp, synthetic construct
  misc_feature 1..20: note = Description of Artificial Sequence: Synthetic oligonucleotide
  misc_feature 1..20: note = Target: SCN10A; (+) strand; PAM type: YTN; PAM sequence: CTG
  source 1..20: mol_type = other DNA
tggtatcagttgtaatatct

SEQ ID NO: 69985 - DNA, 20 bp, synthetic construct
  misc_feature 1..20: note = Description of Artificial Sequence: Synthetic oligonucleotide
  misc_feature 1..20: note = Target: SCN10A; (+) strand; PAM type: YTN; PAM sequence: TTG
  source 1..20: mol_type = other DNA
taatatctcccattttattt

SEQ ID NO: 69986 - DNA, 20 bp, synthetic construct
  misc_feature 1..20: note = Description of Artificial Sequence: Synthetic oligonucleotide
  misc_feature 1..20: note = Target: SCN10A; (+) strand; PAM type: YTN; PAM sequence: CTC
  source 1..20: mol_type = other DNA
ccattttatttctaattgag

SEQ ID NO: 69987 - DNA, 20 bp, synthetic construct
  misc_feature 1..20: note = Description of Artificial Sequence: Synthetic oligonucleotide
  misc_feature 1..20: note = Target: SCN10A; (+) strand; PAM type: YTN; PAM sequence: TTT
  source 1..20: mol_type = other DNA
tatttctaattgagcttatt

SEQ ID NO: 69988 - DNA, 20 bp, synthetic construct
  misc_feature 1..20: note = Description of Artificial Sequence: Synthetic oligonucleotide
  misc_feature 1..20: note = Target: SCN10A; (+) strand; PAM type: YTN; PAM sequence: TTT
  source 1..20: mol_type = other DNA
atttctaattgagcttattt

SEQ ID NO: 69989 - DNA, 20 bp, synthetic construct
  misc_feature 1..20: note = Description of Artificial Sequence: Synthetic oligonucleotide
  misc_feature 1..20: note = Target: SCN10A; (+) strand; PAM type: YTN; PAM sequence: TTA
  source 1..20: mol_type = other DNA
tttctaattgagcttatttg

SEQ ID NO: 69990 - DNA, 20 bp, synthetic construct
  misc_feature 1..20: note = Description of Artificial Sequence: Synthetic oligonucleotide
  misc_feature 1..20: note = Target: SCN10A; (+) strand; PAM type: YTN; PAM sequence: TTT
  source 1..20: mol_type = other DNA
ctaattgagcttatttggat

SEQ ID NO: 69991 - DNA, 20 bp, synthetic construct
  misc_feature 1..20: note = Description of Artificial Sequence: Synthetic oligonucleotide
  misc_feature 1..20: note = Target: SCN10A; (+) strand; PAM type: YTN; PAM sequence: TTC
  source 1..20: mol_type = other DNA
taattgagcttatttggatc

SEQ ID NO: 69992 - DNA, 20 bp, synthetic construct
  misc_feature 1..20: note = Description of Artificial Sequence: Synthetic oligonucleotide
  misc_feature 1..20: note = Target: SCN10A; (+) strand; PAM type: YTN; PAM sequence: CTA
  source 1..20: mol_type = other DNA
attgagcttatttggatctt

SEQ ID NO: 69993 - DNA, 20 bp, synthetic construct
  misc_feature 1..20: note = Description of Artificial Sequence: Synthetic oligonucleotide
  misc_feature 1..20: note = Target: SCN10A; (+) strand; PAM type: YTN; PAM sequence: TTG
  source 1..20: mol_type = other DNA
agcttatttggatcttctct

SEQ ID NO: 69994 - DNA, 20 bp, synthetic construct
  misc_feature 1..20: note = Description of Artificial Sequence: Synthetic oligonucleotide
  misc_feature 1..20: note = Target: SCN10A; (+) strand; PAM type: YTN; PAM sequence: CTT
  source 1..20: mol_type = other DNA
atttggatcttctctcttct

SEQ ID NO: 69995 - DNA, 20 bp, synthetic construct
  misc_feature 1..20: note = Description of Artificial Sequence: Synthetic oligonucleotide
  misc_feature 1..20: note = Target: SCN10A; (+) strand; PAM type: YTN; PAM sequence: TTA
  source 1..20: mol_type = other DNA
tttggatcttctctcttctt

SEQ ID NO: 69996 - DNA, 20 bp, synthetic construct
  misc_feature 1..20: note = Description of Artificial Sequence: Synthetic oligonucleotide
  misc_feature 1..20: note = Target: SCN10A; (+) strand; PAM type: YTN; PAM sequence: TTT
  source 1..20: mol_type = other DNA
ggatcttctctcttcttttc

SEQ ID NO: 69997 - DNA, 20 bp, synthetic construct
  misc_feature 1..20: note = Description of Artificial Sequence: Synthetic oligonucleotide
  misc_feature 1..20: note = Target: SCN10A; (+) strand; PAM type: YTN; PAM sequence: TTG
  source 1..20: mol_type = other DNA
gatcttctctcttcttttct

SEQ ID NO: 69998 - DNA, 20 bp, synthetic construct
  misc_feature 1..20: note = Description of Artificial Sequence: Synthetic oligonucleotide
  misc_feature 1..20: note = Target: SCN10A; (+) strand; PAM type: YTN; PAM sequence: CTT
  source 1..20: mol_type = other DNA
ctctcttcttttcttggtta

SEQ ID NO: 69999 - DNA, 20 bp, synthetic construct
  misc_feature 1..20: note = Description of Artificial Sequence: Synthetic oligonucleotide
  misc_feature 1..20: note = Target: SCN10A; (+) strand; PAM type: YTN; PAM sequence: TTC
  source 1..20: mol_type = other DNA
tctcttcttttcttggttaa

SEQ ID NO: 70000 - DNA, 20 bp, synthetic construct
  misc_feature 1..20: note = Description of Artificial Sequence: Synthetic oligonucleotide
  misc_feature 1..20: note = Target: SCN10A; (+) strand; PAM type: YTN; PAM sequence: CTC
  source 1..20: mol_type = other DNA
tcttcttttcttggttaatc

SEQ ID NO: 70001 - DNA, 20 bp, synthetic construct
  misc_feature 1..20: note = Description of Artificial Sequence: Synthetic oligonucleotide
  misc_feature 1..20: note = Target: SCN10A; (+) strand; PAM type: YTN; PAM sequence: CTC
  source 1..20: mol_type = other DNA
ttcttttcttggttaatctt

SEQ ID NO: 70002 - DNA, 20 bp, synthetic construct
  misc_feature 1..20: note = Description of Artificial Sequence: Synthetic oligonucleotide
  misc_feature 1..20: note = Target: SCN10A; (+) strand; PAM type: YTN; PAM sequence: CTT
  source 1..20: mol_type = other DNA
cttttcttggttaatcttgc

SEQ ID NO: 70003 - DNA, 20 bp, synthetic construct
  misc_feature 1..20: note = Description of Artificial Sequence: Synthetic oligonucleotide
  misc_feature 1..20: note = Target: SCN10A; (+) strand; PAM type: YTN; PAM sequence: TTC
  source 1..20: mol_type = other DNA
ttttcttggttaatcttgcc

SEQ ID NO: 70004 - DNA, 20 bp, synthetic construct
  misc_feature 1..20: note = Description of Artificial Sequence: Synthetic oligonucleotide
  misc_feature 1..20: note = Target: SCN10A; (+) strand; PAM type: YTN; PAM sequence: CTT
  source 1..20: mol_type = other DNA
ttcttggttaatcttgccaa

SEQ ID NO: 70005 - DNA, 20 bp, synthetic construct
  misc_feature 1..20: note = Description of Artificial Sequence: Synthetic oligonucleotide
  misc_feature 1..20: note = Target: SCN10A; (+) strand; PAM type: YTN; PAM sequence: TTT
  source 1..20: mol_type = other DNA
tcttggttaatcttgccaat

SEQ ID NO: 70006 - DNA, 20 bp, synthetic construct
  misc_feature 1..20: note = Description of Artificial Sequence: Synthetic oligonucleotide
  misc_feature 1..20: note = Target: SCN10A; (+) strand; PAM type: YTN; PAM sequence: TTT
  source 1..20: mol_type = other DNA
cttggttaatcttgccaatg

SEQ ID NO: 70007 - DNA, 20 bp, synthetic construct
  misc_feature 1..20: note = Description of Artificial Sequence: Synthetic oligonucleotide
  misc_feature 1..20: note = Target: SCN10A; (+) strand; PAM type: YTN; PAM sequence: TTC
  source 1..20: mol_type = other DNA
ttggttaatcttgccaatgg

SEQ ID NO: 70008 - DNA, 20 bp, synthetic construct
  misc_feature 1..20: note = Description of Artificial Sequence: Synthetic oligonucleotide
  misc_feature 1..20: note = Target: SCN10A; (+) strand; PAM type: YTN; PAM sequence: CTT
  source 1..20: mol_type = other DNA
ggttaatcttgccaatggtc

SEQ ID NO: 70009 - DNA, 20 bp, synthetic construct
  misc_feature 1..20: note = Description of Artificial Sequence: Synthetic oligonucleotide
  misc_feature 1..20: note = Target: SCN10A; (+) strand; PAM type: YTN; PAM sequence: TTG
  source 1..20: mol_type = other DNA
gttaatcttgccaatggtca

SEQ ID NO: 70010 - DNA, 20 bp, synthetic construct
  misc_feature 1..20: note = Description of Artificial Sequence: Synthetic oligonucleotide
  misc_feature 1..20: note = Target: SCN10A; (+) strand; PAM type: YTN; PAM sequence: TTA
  source 1..20: mol_type = other DNA
atcttgccaatggtcaatca

SEQ ID NO: 70011 - DNA, 20 bp, synthetic construct
  misc_feature 1..20: note = Description of Artificial Sequence: Synthetic oligonucleotide
  misc_feature 1..20: note = Target: SCN10A; (+) strand; PAM type: YTN; PAM sequence: CTT
  source 1..20: mol_type = other DNA
gccaatggtcaatcaatttt

SEQ ID NO: 70012 - DNA, 20 bp, synthetic construct
  misc_feature 1..20: note = Description of Artificial Sequence: Synthetic oligonucleotide
  misc_feature 1..20: note = Target: SCN10A; (+) strand; PAM type: YTN; PAM sequence: TTG
  source 1..20: mol_type = other DNA
ccaatggtcaatcaattttc

SEQ ID NO: 70013 - DNA, 20 bp, synthetic construct
  misc_feature 1..20: note = Description of Artificial Sequence: Synthetic oligonucleotide
  misc_feature 1..20: note = Target: SCN10A; (+) strand; PAM type: YTN; PAM sequence: TTT
  source 1..20: mol_type = other DNA
tctatatctttttaaagaac

SEQ ID NO: 70014 - DNA, 20 bp, synthetic construct
  misc_feature 1..20: note = Description of Artificial Sequence: Synthetic oligonucleotide
  misc_feature 1..20: note = Target: SCN10A; (+) strand; PAM type: YTN; PAM sequence: TTT
  source 1..20: mol_type = other DNA
ctatatctttttaaagaacc

SEQ ID NO: 70015 - DNA, 20 bp, synthetic construct
  misc_feature 1..20: note = Description of Artificial Sequence: Synthetic oligonucleotide
  misc_feature 1..20: note = Target: SCN10A; (+) strand; PAM type: YTN; PAM sequence: TTC
  source 1..20: mol_type = other DNA
tatatctttttaaagaaccc

SEQ ID NO: 70016 - DNA, 20 bp, synthetic construct
  misc_feature 1..20: note = Description of Artificial Sequence: Synthetic oligonucleotide
  misc_feature 1..20: note = Target: SCN10A; (+) strand; PAM type: YTN; PAM sequence: CTA
  source 1..20: mol_type = other DNA
tatctttttaaagaacccgc

SEQ ID NO: 70017 - DNA, 20 bp, synthetic construct
  misc_feature 1..20: note = Description of Artificial Sequence: Synthetic oligonucleotide
  misc_feature 1..20: note = Target: SCN10A; (+) strand; PAM type: YTN; PAM sequence: CTT
  source 1..20: mol_type = other DNA
tttaaagaacccgctttttg

SEQ ID NO: 70018 - DNA, 20 bp, synthetic construct
  misc_feature 1..20: note = Description of Artificial Sequence: Synthetic oligonucleotide
  misc_feature 1..20: note = Target: SCN10A; (+) strand; PAM type: YTN; PAM sequence: TTT
  source 1..20: mol_type = other DNA
ttaaagaacccgctttttgt

SEQ ID NO: 70019 - DNA, 20 bp, synthetic construct
  misc_feature 1..20: note = Description of Artificial Sequence: Synthetic oligonucleotide
  misc_feature 1..20: note = Target: SCN10A; (+) strand; PAM type: YTN; PAM sequence: TTT
  source 1..20: mol_type = other DNA
taaagaacccgctttttgtt

SEQ ID NO: 70020 - DNA, 20 bp, synthetic construct
  misc_feature 1..20: note = Description of Artificial Sequence: Synthetic oligonucleotide
  misc_feature 1..20: note = Target: SCN10A; (+) strand; PAM type: YTN; PAM sequence: TTT
  source 1..20: mol_type = other DNA
aaagaacccgctttttgttt

SEQ ID NO: 70021 - DNA, 20 bp, synthetic construct
  misc_feature 1..20: note = Description of Artificial Sequence: Synthetic oligonucleotide
  misc_feature 1..20: note = Target: SCN10A; (+) strand; PAM type: YTN; PAM sequence: TTA
  source 1..20: mol_type = other DNA
aagaacccgctttttgtttc

SEQ ID NO: 70022 - DNA, 20 bp, synthetic construct
  misc_feature 1..20: note = Description of Artificial Sequence: Synthetic oligonucleotide
  misc_feature 1..20: note = Target: SCN10A; (+) strand; PAM type: YTN; PAM sequence: CTT
  source 1..20: mol_type = other DNA
tttgtttcacttatcttttg

SEQ ID NO: 70023 - DNA, 20 bp, synthetic construct
  misc_feature 1..20: note = Description of Artificial Sequence: Synthetic oligonucleotide
  misc_feature 1..20: note = Target: SCN10A; (+) strand; PAM type: YTN; PAM sequence: TTT
  source 1..20: mol_type = other DNA
ttgtttcacttatcttttgt

SEQ ID NO: 70024 - DNA, 20 bp, synthetic construct
  misc_feature 1..20: note = Description of Artificial Sequence: Synthetic oligonucleotide
  misc_feature 1..20: note = Target: SCN10A; (+) strand; PAM type: YTN; PAM sequence: TTT
  source 1..20: mol_type = other DNA
tgtttcacttatcttttgta

SEQ ID NO: 70025 - DNA, 20 bp, synthetic construct
  misc_feature 1..20: note = Description of Artificial Sequence: Synthetic oligonucleotide
  misc_feature 1..20: note = Target: SCN10A; (+) strand; PAM type: YTN; PAM sequence: TTT
  source 1..20: mol_type = other DNA
gtttcacttatcttttgtat

SEQ ID NO: 70026 - DNA, 20 bp, synthetic construct
  misc_feature 1..20: note = Description of Artificial Sequence: Synthetic oligonucleotide
  misc_feature 1..20: note = Target: SCN10A; (+) strand; PAM type: YTN; PAM sequence: TTG
  source 1..20: mol_type = other DNA
tttcacttatcttttgtatt

SEQ ID NO: 70027 - DNA, 20 bp, synthetic construct
  misc_feature 1..20: note = Description of Artificial Sequence: Synthetic oligonucleotide
  misc_feature 1..20: note = Target: SCN10A; (+) strand; PAM type: YTN; PAM sequence: TTT
  source 1..20: mol_type = other DNA
cacttatcttttgtattatt

SEQ ID NO: 70028 - DNA, 20 bp, synthetic construct
  misc_feature 1..20: note = Description of Artificial Sequence: Synthetic oligonucleotide
  misc_feature 1..20: note = Target: SCN10A; (+) strand; PAM type: YTN; PAM sequence: TTC
  source 1..20: mol_type = other DNA
acttatcttttgtattatta

SEQ ID NO: 70029 - DNA, 20 bp, synthetic construct
  misc_feature 1..20: note = Description of Artificial Sequence: Synthetic oligonucleotide
  misc_feature 1..20: note = Target: SCN10A; (+) strand; PAM type: YTN; PAM sequence: CTT
  source 1..20: mol_type = other DNA
atcttttgtattattattat

SEQ ID NO: 70030 - DNA, 20 bp, synthetic construct
  misc_feature 1..20: note = Description of Artificial Sequence: Synthetic oligonucleotide
  misc_feature 1..20: note = Target: SCN10A; (+) strand; PAM type: YTN; PAM sequence: TTA
  source 1..20: mol_type = other DNA
tcttttgtattattattatt

SEQ ID NO: 70031 - DNA, 20 bp, synthetic construct
  misc_feature 1..20: note = Description of Artificial Sequence: Synthetic oligonucleotide
  misc_feature 1..20: note = Target: SCN10A; (+) strand; PAM type: YTN; PAM sequence: CTT
  source 1..20: mol_type = other DNA
ttgtattattattattttta

SEQ ID NO: 70032 - DNA, 20 bp, synthetic construct
  misc_feature 1..20: note = Description of Artificial Sequence: Synthetic oligonucleotide
  misc_feature 1..20: note = Target: SCN10A; (+) strand; PAM type: YTN; PAM sequence: TTT
  source 1..20: mol_type = other DNA
tgtattattattatttttat

SEQ ID NO: 70033 - DNA, 20 bp, synthetic construct
  misc_feature 1..20: note = Description of Artificial Sequence: Synthetic oligonucleotide
  misc_feature 1..20: note = Target: SCN10A; (+) strand; PAM type: YTN; PAM sequence: TTT
  source 1..20: mol_type = other DNA
gtattattattatttttatt

SEQ ID NO: 70034 - DNA, 20 bp, synthetic construct
  misc_feature 1..20: note = Description of Artificial Sequence: Synthetic oligonucleotide
  misc_feature 1..20: note = Target: SCN10A; (+) strand; PAM type: YTN; PAM sequence: TTG
  source 1..20: mol_type = other DNA
tattattattatttttattt

SEQ ID NO: 70035 - DNA, 20 bp, synthetic construct
  misc_feature 1..20: note = Description of Artificial Sequence: Synthetic oligonucleotide
  misc_feature 1..20: note = Target: SCN10A; (+) strand; PAM type: YTN; PAM sequence: TTA
  source 1..20: mol_type = other DNA
ttattatttttatttgaatt

SEQ ID NO: 70036 - DNA, 20 bp, synthetic construct
  misc_feature 1..20: note = Description of Artificial Sequence: Synthetic oligonucleotide
  misc_feature 1..20: note = Target: SCN10A; (+) strand; PAM type: YTN; PAM sequence: TTA
  source 1..20: mol_type = other DNA
ttatttttatttgaatttca

SEQ ID NO: 70037 - DNA, 20 bp, synthetic construct
  misc_feature 1..20: note = Description of Artificial Sequence: Synthetic oligonucleotide
  misc_feature 1..20: note = Target: SCN10A; (+) strand; PAM type: YTN; PAM sequence: TTA
  source 1..20: mol_type = other DNA
tttttatttgaatttcattt

SEQ ID NO: 70038 - DNA, 20 bp, synthetic construct
  misc_feature 1..20: note = Description of Artificial Sequence: Synthetic oligonucleotide
  misc_feature 1..20: note = Target: SCN10A; (+) strand; PAM type: YTN; PAM sequence: TTT
  source 1..20: mol_type = other DNA
ttatttgaatttcatttagt

SEQ ID NO: 70039 - DNA, 20 bp, synthetic construct
  misc_feature 1..20: note = Description of Artificial Sequence: Synthetic oligonucleotide
  misc_feature 1..20: note = Target: SCN10A; (+) strand; PAM type: YTN; PAM sequence: TTT
  source 1..20: mol_type = other DNA
tatttgaatttcatttagta

SEQ ID NO: 70040 - DNA, 20 bp, synthetic construct
  misc_feature 1..20: note = Description of Artificial Sequence: Synthetic oligonucleotide
  misc_feature 1..20: note = Target: SCN10A; (+) strand; PAM type: YTN; PAM sequence: TTT
  source 1..20: mol_type = other DNA
atttgaatttcatttagtac

SEQ ID NO: 70041 - DNA, 20 bp, synthetic construct
  misc_feature 1..20: note = Description of Artificial Sequence: Synthetic oligonucleotide
  misc_feature 1..20: note = Target: SCN10A; (+) strand; PAM type: YTN; PAM sequence: TTA
  source 1..20: mol_type = other DNA
tttgaatttcatttagtact

SEQ ID NO: 70042 - DNA, 20 bp, synthetic construct
  misc_feature 1..20: note = Description of Artificial Sequence: Synthetic oligonucleotide
  misc_feature 1..20: note = Target: SCN10A; (+) strand; PAM type: YTN; PAM sequence: TTT
  source 1..20: mol_type = other DNA
gaatttcatttagtactgcc

SEQ ID NO: 70043 - DNA, 20 bp, synthetic construct
  misc_feature 1..20: note = Description of Artificial Sequence: Synthetic oligonucleotide
  misc_feature 1..20: note = Target: SCN10A; (+) strand; PAM type: YTN; PAM sequence: TTG
  source 1..20: mol_type = other DNA
aatttcatttagtactgccc

SEQ ID NO: 70044 - DNA, 20 bp, synthetic construct
  misc_feature 1..20: note = Description of Artificial Sequence: Synthetic oligonucleotide
  misc_feature 1..20: note = Target: SCN10A; (+) strand; PAM type: YTN; PAM sequence: TTT
  source 1..20: mol_type = other DNA
catttagtactgccctgatc

SEQ ID NO: 70045 - DNA, 20 bp, synthetic construct
  misc_feature 1..20: note = Description of Artificial Sequence: Synthetic oligonucleotide
  misc_feature 1..20: note = Target: SCN10A; (+) strand; PAM type: YTN; PAM sequence: TTC
  source 1..20: mol_type = other DNA
atttagtactgccctgatct

SEQ ID NO: 70046 - DNA, 20 bp, synthetic construct
  misc_feature 1..20: note = Description of Artificial Sequence: Synthetic oligonucleotide
  misc_feature 1..20: note = Target: SCN10A; (+) strand; PAM type: YTN; PAM sequence: TTT
  source 1..20: mol_type = other DNA
agtactgccctgatctttgt

SEQ ID NO: 70047 - DNA, 20 bp, synthetic construct
  misc_feature 1..20: note = Description of Artificial Sequence: Synthetic oligonucleotide
  misc_feature 1..20: note = Target: SCN10A; (+) strand; PAM type: YTN; PAM sequence: TTA
  source 1..20: mol_type = other DNA
gtactgccctgatctttgtt

SEQ ID NO: 70048 - DNA, 20 bp, synthetic construct
  misc_feature 1..20: note = Description of Artificial Sequence: Synthetic oligonucleotide
  misc_feature 1..20: note = Target: SCN10A; (+) strand; PAM type: YTN; PAM sequence: CTG
  source 1..20: mol_type = other DNA
ccctgatctttgttattcct

SEQ ID NO: 70049 - DNA, 20 bp, synthetic construct
  misc_feature 1..20: note = Description of Artificial Sequence: Synthetic oligonucleotide
  misc_feature 1..20: note = Target: SCN10A; (+) strand; PAM type: YTN; PAM sequence: CTG
  source 1..20: mol_type = other DNA
atctttgttattccttttct

SEQ ID NO: 70050 - DNA, 20 bp, synthetic construct
  misc_feature 1..20: note = Description of Artificial Sequence: Synthetic oligonucleotide
  misc_feature 1..20: note = Target: SCN10A; (+) strand; PAM type: YTN; PAM sequence: CTT
  source 1..20: mol_type = other DNA
tgttattccttttcttctgc

SEQ ID NO: 70051 - DNA, 20 bp, synthetic construct
  misc_feature 1..20: note = Description of Artificial Sequence: Synthetic oligonucleotide
  misc_feature 1..20: note = Target: SCN10A; (+) strand; PAM type: YTN; PAM sequence: TTT
  source 1..20: mol_type = other DNA
gttattccttttcttctgct

SEQ ID NO: 70052 - DNA, 20 bp, synthetic construct
  misc_feature 1..20: note = Description of Artificial Sequence: Synthetic oligonucleotide
  misc_feature 1..20: note = Target: SCN10A; (+) strand; PAM type: YTN; PAM sequence: TTG
  source 1..20: mol_type = other DNA
ttattccttttcttctgctt

SEQ ID NO: 70053 - DNA, 20 bp, synthetic construct
  misc_feature 1..20: note = Description of Artificial Sequence: Synthetic oligonucleotide
  misc_feature 1..20: note = Target: SCN10A; (+) strand; PAM type: YTN; PAM sequence: TTA
  source 1..20: mol_type = other DNA
ttccttttcttctgcttggt

SEQ ID NO: 70054 - DNA, 20 bp, synthetic construct
  misc_feature 1..20: note = Description of Artificial Sequence: Synthetic oligonucleotide
  misc_feature 1..20: note = Target: SCN10A; (+) strand; PAM type: YTN; PAM sequence: TTC
  source 1..20: mol_type = other DNA
cttttcttctgcttggtttg

SEQ ID NO: 70055 - DNA, 20 bp, synthetic construct
  misc_feature 1..20: note = Description of Artificial Sequence: Synthetic oligonucleotide
  misc_feature 1..20: note = Target: SCN10A; (+) strand; PAM type: YTN; PAM sequence: CTT
  source 1..20: mol_type = other DNA
ttcttctgcttggtttgggt

SEQ ID NO: 70056 - DNA, 20 bp, synthetic construct
  misc_feature 1..20: note = Description of Artificial Sequence: Synthetic oligonucleotide
  misc_feature 1..20: note = Target: SCN10A; (+) strand; PAM type: YTN; PAM sequence: TTT
  source 1..20: mol_type = other DNA
tcttctgcttggtttgggtc

SEQ ID NO: 70057 - DNA, 20 bp, synthetic construct
  misc_feature 1..20: note = Description of Artificial Sequence: Synthetic oligonucleotide
  misc_feature 1..20: note = Target: SCN10A; (+) strand; PAM type: YTN; PAM sequence: TTT
  source 1..20: mol_type = other DNA
cttctgcttggtttgggtct

SEQ ID NO: 70058 - DNA, 20 bp, synthetic construct
  misc_feature 1..20: note = Description of Artificial Sequence: Synthetic oligonucleotide
  misc_feature 1..20: note = Target: SCN10A; (+) strand; PAM type: YTN; PAM sequence: TTC
  source 1..20: mol_type = other DNA
ttctgcttggtttgggtctg

SEQ ID NO: 70059 - DNA, 20 bp, synthetic construct
  misc_feature 1..20: note = Description of Artificial Sequence: Synthetic oligonucleotide
  misc_feature 1..20: note = Target: SCN10A; (+) strand; PAM type: YTN; PAM sequence: CTT
  source 1..20: mol_type = other DNA
ctgcttggtttgggtctgtt

SEQ ID NO: 70060 - DNA, 20 bp, synthetic construct
  misc_feature 1..20: note = Description of Artificial Sequence: Synthetic oligonucleotide
  misc_feature 1..20: note = Target: SCN10A; (+) strand; PAM type: YTN; PAM sequence: TTC
  source 1..20: mol_type = other DNA
tgcttggtttgggtctgttt

SEQ ID NO: 70061 - DNA, 20 bp, synthetic construct
  misc_feature 1..20: note = Description of Artificial Sequence: Synthetic oligonucleotide
  misc_feature 1..20: note = Target: SCN10A; (+) strand; PAM type: YTN; PAM sequence: CTG
  source 1..20: mol_type = other DNA
cttggtttgggtctgttttg

SEQ ID NO: 70062 - DNA, 20 bp, synthetic construct
  misc_feature 1..20: note = Description of Artificial Sequence: Synthetic oligonucleotide
  misc_feature 1..20: note = Target: SCN10A; (+) strand; PAM type: YTN; PAM sequence: CTT
  source 1..20: mol_type = other DNA
ggtttgggtctgttttgttc

SEQ ID NO: 70063 - DNA, 20 bp, synthetic construct
  misc_feature 1..20: note = Description of Artificial Sequence: Synthetic oligonucleotide
  misc_feature 1..20: note = Target: SCN10A; (+) strand; PAM type: YTN; PAM sequence: TTG
  source 1..20: mol_type = other DNA
gtttgggtctgttttgttct

SEQ ID NO: 70064 - DNA, 20 bp, synthetic construct
  misc_feature 1..20: note = Description of Artificial Sequence: Synthetic oligonucleotide
  misc_feature 1..20: note = Target: SCN10A; (+) strand; PAM type: YTN; PAM sequence: TTT
  source 1..20: mol_type = other DNA
gggtctgttttgttcttgtt

SEQ ID NO: 70065 - DNA, 20 bp, synthetic construct
  misc_feature 1..20: note = Description of Artificial Sequence: Synthetic oligonucleotide
  misc_feature 1..20: note = Target: SCN10A; (+) strand; PAM type: YTN; PAM sequence: TTG
  source 1..20: mol_type = other DNA
ggtctgttttgttcttgttt

SEQ ID NO: 70066 - DNA, 20 bp, synthetic construct
  misc_feature 1..20: note = Description of Artificial Sequence: Synthetic oligonucleotide
  misc_feature 1..20: note = Target: SCN10A; (+) strand; PAM type: YTN; PAM sequence: CTG
  source 1..20: mol_type = other DNA
ttttgttcttgtttctctaa

SEQ ID NO: 70067 - DNA, 20 bp, synthetic construct
  misc_feature 1..20: note = Description of Artificial Sequence: Synthetic oligonucleotide
  misc_feature 1..20: note = Target: SCN10A; (+) strand; PAM type: YTN; PAM sequence: TTT
  source 1..20: mol_type = other DNA
tgttcttgtttctctaattc

SEQ ID NO: 70068 - DNA, 20 bp, synthetic construct
  misc_feature 1..20: note = Description of Artificial Sequence: Synthetic oligonucleotide
  misc_feature 1..20: note = Target: SCN10A; (+) strand; PAM type: YTN; PAM sequence: TTT
  source 1..20: mol_type = other DNA
gttcttgtttctctaattcc

SEQ ID NO: 70069 - DNA, 20 bp, synthetic construct
  misc_feature 1..20: note = Description of Artificial Sequence: Synthetic oligonucleotide
  misc_feature 1..20: note = Target: SCN10A; (+) strand; PAM type: YTN; PAM sequence: TTG
  source 1..20: mol_type = other DNA
ttcttgtttctctaattcct

SEQ ID NO: 70070 - DNA, 20 bp, synthetic construct
  misc_feature 1..20: note = Description of Artificial Sequence: Synthetic oligonucleotide
  misc_feature 1..20: note = Target: SCN10A; (+) strand; PAM type: YTN; PAM sequence: TTC
  source 1..20: mol_type = other DNA
ttgtttctctaattccttga

SEQ ID NO: 70071 - DNA, 20 bp, synthetic construct
  misc_feature 1..20: note = Description of Artificial Sequence: Synthetic oligonucleotide
  misc_feature 1..20: note = Target: SCN10A; (+) strand; PAM type: YTN; PAM sequence: CTT
  source 1..20: mol_type = other DNA
gtttctctaattccttgagg

SEQ ID NO: 70072 - DNA, 20 bp, synthetic construct
  misc_feature 1..20: note = Description of Artificial Sequence: Synthetic oligonucleotide
  misc_feature 1..20: note = Target: SCN10A; (+) strand; PAM type: YTN; PAM sequence: TTG
  source 1..20: mol_type = other DNA
tttctctaattccttgaggt

SEQ ID NO: 70073 - DNA, 20 bp, synthetic construct
  misc_feature 1..20: note = Description of Artificial Sequence: Synthetic oligonucleotide
  misc_feature 1..20: note = Target: SCN10A; (+) strand; PAM type: YTN; PAM sequence: TTT
  source 1..20: mol_type = other DNA
ctctaattccttgaggtgtg

SEQ ID NO: 70074 - DNA, 20 bp, synthetic construct
  misc_feature 1..20: note = Description of Artificial Sequence: Synthetic oligonucleotide
  misc_feature 1..20: note = Target: SCN10A; (+) strand; PAM type: YTN; PAM sequence: TTC
  source 1..20: mol_type = other DNA
tctaattccttgaggtgtga

SEQ ID NO: 70075 - DNA, 20 bp, synthetic construct
  misc_feature 1..20: note = Description of Artificial Sequence: Synthetic oligonucleotide
  misc_feature 1..20: note = Target: SCN10A; (+) strand; PAM type: YTN; PAM sequence: CTC
  source 1..20: mol_type = other DNA
taattccttgaggtgtgacc

SEQ ID NO: 70076 - DNA, 20 bp, synthetic construct
  misc_feature 1..20: note = Description of Artificial Sequence: Synthetic oligonucleotide
  misc_feature 1..20: note = Target: SCN10A; (+) strand; PAM type: YTN; PAM sequence: CTA
  source 1..20: mol_type = other DNA
attccttgaggtgtgacctt

SEQ ID NO: 70077 - DNA, 20 bp, synthetic construct
  misc_feature 1..20: note = Description of Artificial Sequence: Synthetic oligonucleotide
  misc_feature 1..20: note = Target: SCN10A; (+) strand; PAM type: YTN; PAM sequence: TTC
  source 1..20: mol_type = other DNA
cttgaggtgtgaccttagat

SEQ ID NO: 70078 - DNA, 20 bp, synthetic construct
  misc_feature 1..20: note = Description of Artificial Sequence: Synthetic oligonucleotide
  misc_feature 1..20: note = Target: SCN10A; (+) strand; PAM type: YTN; PAM sequence: CTT
  source 1..20: mol_type = other DNA
gaggtgtgaccttagattat

SEQ ID NO: 70079 - DNA, 20 bp, synthetic construct
  misc_feature 1..20: note = Description of Artificial Sequence: Synthetic oligonucleotide
  misc_feature 1..20: note = Target: SCN10A; (+) strand; PAM type: YTN; PAM sequence: TTG
  source 1..20: mol_type = other DNA
aggtgtgaccttagattatc

SEQ ID NO: 70080 - DNA, 20 bp, synthetic construct
  misc_feature 1..20: note = Description of Artificial Sequence: Synthetic oligonucleotide
  misc_feature 1..20: note = Target: SCN10A; (+) strand; PAM type: YTN; PAM sequence: CTT
  source 1..20: mol_type = other DNA
agattatctatttgtcctct

SEQ ID NO: 70081 - DNA, 20 bp, synthetic construct
  misc_feature 1..20: note = Description of Artificial Sequence: Synthetic oligonucleotide
  misc_feature 1..20: note = Target: SCN10A; (+) strand; PAM type: YTN; PAM sequence: TTA
  source 1..20: mol_type = other DNA
gattatctatttgtcctctt

SEQ ID NO: 70082 - DNA, 20 bp, synthetic construct
  misc_feature 1..20: note = Description of Artificial Sequence: Synthetic oligonucleotide
  misc_feature 1..20: note = Target: SCN10A; (+) strand; PAM type: YTN; PAM sequence: TTA
  source 1..20: mol_type = other DNA
tctatttgtcctctttcata

SEQ ID NO: 70083 - DNA, 20 bp, synthetic construct
  misc_feature 1..20: note = Description of Artificial Sequence: Synthetic oligonucleotide
  misc_feature 1..20: note = Target: SCN10A; (+) strand; PAM type: YTN; PAM sequence: CTA
  source 1..20: mol_type = other DNA
tttgtcctctttcatacttt

SEQ ID NO: 70084 - DNA, 20 bp, synthetic construct
  misc_feature 1..20: note = Description of Artificial Sequence: Synthetic oligonucleotide
  misc_feature 1..20: note = Target: SCN10A; (+) strand; PAM type: YTN; PAM sequence: TTT
  source 1..20: mol_type = other DNA
gtcctctttcatactttttg

SEQ ID NO: 70085 - DNA, 20 bp, synthetic construct
  misc_feature 1..20: note = Description of Artificial Sequence: Synthetic oligonucleotide
  misc_feature 1..20: note = Target: SCN10A; (+) strand; PAM type: YTN; PAM sequence: TTG
  source 1..20: mol_type = other DNA
tcctctttcatactttttga

SEQ ID NO: 70086 - DNA, 20 bp, synthetic construct
  misc_feature 1..20: note = Description of Artificial Sequence: Synthetic oligonucleotide
  misc_feature 1..20: note = Target: SCN10A; (+) strand; PAM type: YTN; PAM sequence: CTC
  source 1..20: mol_type = other DNA
tttcatactttttgatgtag

SEQ ID NO: 70087 - DNA, 20 bp, synthetic construct
  misc_feature 1..20: note = Description of Artificial Sequence: Synthetic oligonucleotide
  misc_feature 1..20: note = Target: SCN10A; (+) strand; PAM type: YTN; PAM sequence: CTT
  source 1..20: mol_type = other DNA
tcatactttttgatgtaggt

SEQ ID NO: 70088 - DNA, 20 bp, synthetic construct
  misc_feature 1..20: note = Description of Artificial Sequence: Synthetic oligonucleotide
  misc_feature 1..20: note = Target: SCN10A; (+) strand; PAM type: YTN; PAM sequence: TTT
  source 1..20: mol_type = other DNA
catactttttgatgtaggta

SEQ ID NO: 70089 - DNA, 20 bp, synthetic construct
  misc_feature 1..20: note = Description of Artificial Sequence: Synthetic oligonucleotide
  misc_feature 1..20: note = Target: SCN10A; (+) strand; PAM type: YTN; PAM sequence: TTC
  source 1..20: mol_type = other DNA
atactttttgatgtaggtat

SEQ ID NO: 70090 - DNA, 20 bp, synthetic construct
  misc_feature 1..20: note = Description of Artificial Sequence: Synthetic oligonucleotide
  misc_feature 1..20: note = Target: SCN10A; (+) strand; PAM type: YTN; PAM sequence: CTT
  source 1..20: mol_type = other DNA
tttgatgtaggtatttaatg

SEQ ID NO: 70091 - DNA, 20 bp, synthetic construct
  misc_feature 1..20: note = Description of Artificial Sequence: Synthetic oligonucleotide
  misc_feature 1..20: note = Target: SCN10A; (+) strand; PAM type: YTN; PAM sequence: TTT
  source 1..20: mol_type = other DNA
ttgatgtaggtatttaatgc

SEQ ID NO: 70092 - DNA, 20 bp, synthetic construct
  misc_feature 1..20: note = Description of Artificial Sequence: Synthetic oligonucleotide
  misc_feature 1..20: note = Target: SCN10A; (+) strand; PAM type: YTN; PAM sequence: TTT
  source 1..20: mol_type = other DNA
tgatgtaggtatttaatgct

SEQ ID NO: 70093 - DNA, 20 bp, synthetic construct
  misc_feature 1..20: note = Description of Artificial Sequence: Synthetic oligonucleotide
  misc_feature 1..20: note = Target: SCN10A; (+) strand; PAM type: YTN; PAM sequence: TTT
  source 1..20: mol_type = other DNA
gatgtaggtatttaatgcta

SEQ ID NO: 70094 - DNA, 20 bp, synthetic construct
  misc_feature 1..20: note = Description of Artificial Sequence: Synthetic oligonucleotide
  misc_feature 1..20: note = Target: SCN10A; (+) strand; PAM type: YTN; PAM sequence: TTG
  source 1..20: mol_type = other DNA
atgtaggtatttaatgctat

SEQ ID NO: 70095 - DNA, 20 bp, synthetic construct
  misc_feature 1..20: note = Description of Artificial Sequence: Synthetic oligonucleotide
  misc_feature 1..20: note = Target: SCN10A; (+) strand; PAM type: YTN; PAM sequence: TTT
  source 1..20: mol_type = other DNA
aatgctatgagctttcctct

SEQ ID NO: 70096 - DNA, 20 bp, synthetic construct
  misc_feature 1..20: note = Description of Artificial Sequence: Synthetic oligonucleotide
  misc_feature 1..20: note = Target: SCN10A; (+) strand; PAM type: YTN; PAM sequence: TTA
  source 1..20: mol_type = other DNA
atgctatgagctttcctctt

SEQ ID NO: 70097 - DNA, 20 bp, synthetic construct
  misc_feature 1..20: note = Description of Artificial Sequence: Synthetic oligonucleotide
  misc_feature 1..20: note = Target: SCN10A; (+) strand; PAM type: YTN; PAM sequence: CTA
  source 1..20: mol_type = other DNA
tgagctttcctcttagcact

SEQ ID NO: 70098 - DNA, 20 bp, synthetic construct
  misc_feature 1..20: note = Description of Artificial Sequence: Synthetic oligonucleotide
  misc_feature 1..20: note = Target: SCN10A; (+) strand; PAM type: YTN; PAM sequence: CTT
  source 1..20: mol_type = other DNA
tcctcttagcactgctttag

SEQ ID NO: 70099 - DNA, 20 bp, synthetic construct
  misc_feature 1..20: note = Description of Artificial Sequence: Synthetic oligonucleotide
  misc_feature 1..20: note = Target: SCN10A; (+) strand; PAM type: YTN; PAM sequence: TTT
  source 1..20: mol_type = other DNA
cctcttagcactgctttagc

SEQ ID NO: 70100 - DNA, 20 bp, synthetic construct
  misc_feature 1..20: note = Description of Artificial Sequence: Synthetic oligonucleotide
  misc_feature 1..20: note = Target: SCN10A; (+) strand; PAM type: YTN; PAM sequence: TTC
  source 1..20: mol_type = other DNA
ctcttagcactgctttagct

SEQ ID NO: 70101 - DNA, 20 bp, synthetic construct
  misc_feature 1..20: note = Description of Artificial Sequence: Synthetic oligonucleotide
  misc_feature 1..20: note = Target: SCN10A; (+) strand; PAM type: YTN; PAM sequence: CTC
  source 1..20: mol_type = other DNA
ttagcactgctttagctgta

SEQ ID NO: 70102 - DNA, 20 bp, synthetic construct
  misc_feature 1..20: note = Description of Artificial Sequence: Synthetic oligonucleotide
  misc_feature 1..20: note = Target: SCN10A; (+) strand; PAM type: YTN; PAM sequence: CTT
  source 1..20: mol_type = other DNA
agcactgctttagctgtatc

SEQ ID NO: 70103 - DNA, 20 bp, synthetic construct
  misc_feature 1..20: note = Description of Artificial Sequence: Synthetic oligonucleotide
  misc_feature 1..20: note = Target: SCN10A; (+) strand; PAM type: YTN; PAM sequence: TTA
  source 1..20: mol_type = other DNA
gcactgctttagctgtatcc

SEQ ID NO: 70104 - DNA, 20 bp, synthetic construct
  misc_feature 1..20: note = Description of Artificial Sequence: Synthetic oligonucleotide
  misc_feature 1..20: note = Target: SCN10A; (+) strand; PAM type: YTN; PAM sequence: CTG
  source 1..20: mol_type = other DNA
ctttagctgtatcccagagg

SEQ ID NO: 70105 - DNA, 20 bp, synthetic construct
  misc_feature 1..20: note = Description of Artificial Sequence: Synthetic oligonucleotide
  misc_feature 1..20: note = Target: SCN10A; (+) strand; PAM type: YTN; PAM sequence: CTT
  source 1..20: mol_type = other DNA
tagctgtatcccagaggttt

SEQ ID NO: 70106 - DNA, 20 bp, synthetic construct
  misc_feature 1..20: note = Description of Artificial Sequence: Synthetic oligonucleotide
  misc_feature 1..20: note = Target: SCN10A; (+) strand; PAM type: YTN; PAM sequence: TTT
  source 1..20: mol_type = other DNA
agctgtatcccagaggtttt

SEQ ID NO: 70107 - DNA, 20 bp, synthetic construct
  misc_feature 1..20: note = Description of Artificial Sequence: Synthetic oligonucleotide
  misc_feature 1..20: note = Target: SCN10A; (+) strand; PAM type: YTN; PAM sequence: TTA
  source 1..20: mol_type = other DNA
gctgtatcccagaggttttg

SEQ ID NO: 70108 - DNA, 20 bp, synthetic construct
  misc_feature 1..20: note = Description of Artificial Sequence: Synthetic oligonucleotide
  misc_feature 1..20: note = Target: SCN10A; (+) strand; PAM type: YTN; PAM sequence: CTG
  source 1..20: mol_type = other DNA
tatcccagaggttttgataa

SEQ ID NO: 70109 - DNA, 20 bp, synthetic construct
  misc_feature 1..20: note = Description of Artificial Sequence: Synthetic oligonucleotide
  misc_feature 1..20: note = Target: SCN10A; (+) strand; PAM type: YTN; PAM sequence: TTT
  source 1..20: mol_type = other DNA
tgataagttgtgtgactatt

SEQ ID NO: 70110 - DNA, 20 bp, synthetic construct
  misc_feature 1..20: note = Description of Artificial Sequence: Synthetic oligonucleotide
  misc_feature 1..20: note = Target: SCN10A; (+) strand; PAM type: YTN; PAM sequence: TTT
  source 1..20: mol_type = other DNA
gataagttgtgtgactatta

SEQ ID NO: 70111 - DNA, 20 bp, synthetic construct
  misc_feature 1..20: note = Description of Artificial Sequence: Synthetic oligonucleotide
  misc_feature 1..20: note = Target: SCN10A; (+) strand; PAM type: YTN; PAM sequence: TTG
  source 1..20: mol_type = other DNA
ataagttgtgtgactattat

SEQ ID NO: 70112 - DNA, 20 bp, synthetic construct
  misc_feature 1..20: note = Description of Artificial Sequence: Synthetic oligonucleotide
  misc_feature 1..20: note = Target: SCN10A; (+) strand; PAM type: YTN; PAM sequence: TTG
  source 1..20: mol_type = other DNA
tgtgactattatcattcagt

SEQ ID NO: 70113 - DNA, 20 bp, synthetic construct
  misc_feature 1..20: note = Description of Artificial Sequence: Synthetic oligonucleotide
  misc_feature 1..20: note = Target: SCN10A; (+) strand; PAM type: YTN; PAM sequence: CTA
  source 1..20: mol_type = other DNA
ttatcattcagttcaaaaaa

SEQ ID NO: 70114 - DNA, 20 bp, synthetic construct
  misc_feature 1..20: note = Description of Artificial Sequence: Synthetic oligonucleotide
  misc_feature 1..20: note = Target: SCN10A; (+) strand; PAM type: YTN; PAM sequence: TTA
  source 1..20: mol_type = other DNA
tcattcagttcaaaaaattt

SEQ ID NO: 70115 - DNA, 20 bp, synthetic construct
  misc_feature 1..20: note = Description of Artificial Sequence: Synthetic oligonucleotide
  misc_feature 1..20: note = Target: SCN10A; (+) strand; PAM type: YTN; PAM sequence: TTC
  source 1..20: mol_type = other DNA
agttcaaaaaatttttaaac

SEQ ID NO: 70116 - DNA, 20 bp, synthetic construct
  misc_feature 1..20: note = Description of Artificial Sequence: Synthetic oligonucleotide
  misc_feature 1..20: note = Target: SCN10A; (+) strand; PAM type: YTN; PAM sequence: TTC
  source 1..20: mol_type = other DNA
aaaaaatttttaaacttcca

SEQ ID NO: 70117 - DNA, 20 bp, synthetic construct
  misc_feature 1..20: note = Description of Artificial Sequence: Synthetic oligonucleotide
  misc_feature 1..20: note = Target: SCN10A; (+) strand; PAM type: YTN; PAM sequence: TTT
  source 1..20: mol_type = other DNA
ttaaacttccatcttgattt

SEQ ID NO: 70118 - DNA, 20 bp, synthetic construct
  misc_feature 1..20: note = Description of Artificial Sequence: Synthetic oligonucleotide
  misc_feature 1..20: note = Target: SCN10A; (+) strand; PAM type: YTN; PAM sequence: TTT
  source 1..20: mol_type = other DNA
taaacttccatcttgatttc

SEQ ID NO: 70119 - DNA, 20 bp, synthetic construct
  misc_feature 1..20: note = Description of Artificial Sequence: Synthetic oligonucleotide
  misc_feature 1..20: note = Target: SCN10A; (+) strand; PAM type: YTN; PAM sequence: TTT
  source 1..20: mol_type = other DNA
aaacttccatcttgatttca

SEQ ID NO: 70120 - DNA, 20 bp, synthetic construct
  misc_feature 1..20: note = Description of Artificial Sequence: Synthetic oligonucleotide
  misc_feature 1..20: note = Target: SCN10A; (+) strand; PAM type: YTN; PAM sequence: TTA
  source 1..20: mol_type = other DNA
aacttccatcttgatttcat

SEQ ID NO: 70121 - DNA, 20 bp, synthetic construct
  misc_feature 1..20: note = Description of Artificial Sequence: Synthetic oligonucleotide
  misc_feature 1..20: note = Target: SCN10A; (+) strand; PAM type: YTN; PAM sequence: CTT
  source 1..20: mol_type = other DNA
ccatcttgatttcattgttg

SEQ ID NO: 70122 - DNA, 20 bp, synthetic construct
  misc_feature 1..20: note = Description of Artificial Sequence: Synthetic oligonucleotide
  misc_feature 1..20: note = Target: SCN10A; (+) strand; PAM type: YTN; PAM sequence: TTC
  source 1..20: mol_type = other DNA
catcttgatttcattgttga

SEQ ID NO: 70123 - DNA, 20 bp, synthetic construct
  misc_feature 1..20: note = Description of Artificial Sequence: Synthetic oligonucleotide
  misc_feature 1..20: note = Target: SCN10A; (+) strand; PAM type: YTN; PAM sequence: CTT
  source 1..20: mol_type = other DNA
gatttcattgttgacccaaa

SEQ ID NO: 70124 - DNA, 20 bp, synthetic construct
  misc_feature 1..20: note = Description of Artificial Sequence: Synthetic oligonucleotide
  misc_feature 1..20: note = Target: SCN10A; (+) strand; PAM type: YTN; PAM sequence: TTG
  source 1..20: mol_type = other DNA
atttcattgttgacccaaag

SEQ ID NO: 70125 - DNA, 20 bp, synthetic construct
  misc_feature 1..20: note = Description of Artificial Sequence: Synthetic oligonucleotide
  misc_feature 1..20: note = Target: SCN10A; (+) strand; PAM type: YTN; PAM sequence: TTT
  source 1..20: mol_type = other DNA
cattgttgacccaaagatca

SEQ ID NO: 70126 - DNA, 20 bp, synthetic construct
  misc_feature 1..20: note = Description of Artificial Sequence: Synthetic oligonucleotide
  misc_feature 1..20: note = Target: SCN10A; (+) strand; PAM type: YTN; PAM sequence: TTC
  source 1..20: mol_type = other DNA
attgttgacccaaagatcat

SEQ ID NO: 70127 - DNA, 20 bp, synthetic construct
  misc_feature 1..20: note = Description of Artificial Sequence: Synthetic oligonucleotide
  misc_feature 1..20: note = Target: SCN10A; (+) strand; PAM type: YTN; PAM sequence: TTG
  source 1..20: mol_type = other DNA
ttgacccaaagatcattcaa

SEQ ID NO: 70128 - DNA, 20 bp, synthetic construct
  misc_feature 1..20: note = Description of Artificial Sequence: Synthetic oligonucleotide
  misc_feature 1..20: note = Target: SCN10A; (+) strand; PAM type: YTN; PAM sequence: TTG
  source 1..20: mol_type = other DNA
acccaaagatcattcaagag

SEQ ID NO: 70129 - DNA, 20 bp, synthetic construct
  misc_feature 1..20: note = Description of Artificial Sequence: Synthetic oligonucleotide
  misc_feature 1..20: note = Target: SCN10A; (+) strand; PAM type: YTN; PAM sequence: TTC
  source 1..20: mol_type = other DNA
aagagcagattgtttagttt

SEQ ID NO: 70130 - DNA, 20 bp, synthetic construct
  misc_feature 1..20: note = Description of Artificial Sequence: Synthetic oligonucleotide
  misc_feature 1..20: note = Target: SCN10A; (+) strand; PAM type: YTN; PAM sequence: TTG
  source 1..20: mol_type = other DNA
tttagttttcatgtatttgt

SEQ ID NO: 70131 - DNA, 20 bp, synthetic construct
  misc_feature 1..20: note = Description of Artificial Sequence: Synthetic oligonucleotide
  misc_feature 1..20: note = Target: SCN10A; (+) strand; PAM type: YTN; PAM sequence: TTT
  source 1..20: mol_type = other DNA
agttttcatgtatttgtata

SEQ ID NO: 70132 - DNA, 20 bp, synthetic construct
  misc_feature 1..20: note = Description of Artificial Sequence: Synthetic oligonucleotide
  misc_feature 1..20: note = Target: SCN10A; (+) strand; PAM type: YTN; PAM sequence: TTA
  source 1..20: mol_type = other DNA
gttttcatgtatttgtatag

SEQ ID NO: 70133 - DNA, 20 bp, synthetic construct
  misc_feature 1..20: note = Description of Artificial Sequence: Synthetic oligonucleotide
  misc_feature 1..20: note = Target: SCN10A; (+) strand; PAM type: YTN; PAM sequence: TTT
  source 1..20: mol_type = other DNA
tcatgtatttgtatagtttt

SEQ ID NO: 70134 - DNA, 20 bp, synthetic construct
  misc_feature 1..20: note = Description of Artificial Sequence: Synthetic oligonucleotide
  misc_feature 1..20: note = Target: SCN10A; (+) strand; PAM type: YTN; PAM sequence: TTT
  source 1..20: mol_type = other DNA
catgtatttgtatagttttg

SEQ ID NO: 70135 - DNA, 20 bp, synthetic construct
  misc_feature 1..20: note = Description of Artificial Sequence: Synthetic oligonucleotide
  misc_feature 1..20: note = Target: SCN10A; (+) strand; PAM type: YTN; PAM sequence: TTC
  source 1..20: mol_type = other DNA
atgtatttgtatagttttga

SEQ ID NO: 70136 - DNA, 20 bp, synthetic construct
  misc_feature 1..20: note = Description of Artificial Sequence: Synthetic oligonucleotide
  misc_feature 1..20: note = Target: SCN10A; (+) strand; PAM type: YTN; PAM sequence: TTT
  source 1..20: mol_type = other DNA
gtatagttttgagggtttct

SEQ ID NO: 70137 - DNA, 20 bp, synthetic construct
  misc_feature 1..20: note = Description of Artificial Sequence: Synthetic oligonucleotide
  misc_feature 1..20: note = Target: SCN10A; (+) strand; PAM type: YTN; PAM sequence: TTG
  source 1..20: mol_type = other DNA
tatagttttgagggtttctt

SEQ ID NO: 70138 - DNA, 20 bp, synthetic construct
  misc_feature 1..20: note = Description of Artificial Sequence: Synthetic oligonucleotide
  misc_feature 1..20: note = Target: SCN10A; (+) strand; PAM type: YTN; PAM sequence: TTT
  source 1..20: mol_type = other DNA
tgagggtttcttttggagtt

SEQ ID NO: 70139 - DNA, 20 bp, synthetic construct
  misc_feature 1..20: note = Description of Artificial Sequence: Synthetic oligonucleotide
  misc_feature 1..20: note = Target: SCN10A; (+) strand; PAM type: YTN; PAM sequence: TTT
  source 1..20: mol_type = other DNA
gagggtttcttttggagtta

SEQ ID NO: 70140 - DNA, 20 bp, synthetic construct
  misc_feature 1..20: note = Description of Artificial Sequence: Synthetic oligonucleotide
  misc_feature 1..20: note = Target: SCN10A; (+) strand; PAM type: YTN; PAM sequence: TTG
  source 1..20: mol_type = other DNA
agggtttcttttggagttaa

SEQ ID NO: 70141 - DNA, 20 bp, synthetic construct
  misc_feature 1..20: note = Description of Artificial Sequence: Synthetic oligonucleotide
  misc_feature 1..20: note = Target: SCN10A; (+) strand; PAM type: YTN; PAM sequence: TTT
  source 1..20: mol_type = other DNA
cttttggagttaactccgag

SEQ ID NO: 70142 - DNA, 20 bp, synthetic construct
  misc_feature 1..20: note = Description of Artificial Sequence: Synthetic oligonucleotide
  misc_feature 1..20: note = Target: SCN10A; (+) strand; PAM type: YTN; PAM sequence: TTC
  source 1..20: mol_type = other DNA
ttttggagttaactccgagg

SEQ ID NO: 70143 - DNA, 20 bp, synthetic construct
  misc_feature 1..20: note = Description of Artificial Sequence: Synthetic oligonucleotide
  misc_feature 1..20: note = Target: SCN10A; (+) strand; PAM type: YTN; PAM sequence: CTT
  source 1..20: mol_type = other DNA
ttggagttaactccgaggtt

SEQ ID NO: 70144 - DNA, 20 bp, synthetic construct
  misc_feature 1..20: note = Description of Artificial Sequence: Synthetic oligonucleotide
  misc_feature 1..20: note = Target: SCN10A; (+) strand; PAM type: YTN; PAM sequence: TTT
  source 1..20: mol_type = other DNA
tggagttaactccgaggttt

SEQ ID NO: 70145 - DNA, 20 bp, synthetic construct
  misc_feature 1..20: note = Description of Artificial Sequence: Synthetic oligonucleotide
  misc_feature 1..20: note = Target: SCN10A; (+) strand; PAM type: YTN; PAM sequence: TTT
  source 1..20: mol_type = other DNA
ggagttaactccgaggttta

SEQ ID NO: 70146 - DNA, 20 bp, synthetic construct
  misc_feature 1..20: note = Description of Artificial Sequence: Synthetic oligonucleotide
  misc_feature 1..20: note = Target: SCN10A; (+) strand; PAM type: YTN; PAM sequence: TTG
  source 1..20: mol_type = other DNA
gagttaactccgaggtttat

SEQ ID NO: 70147 - DNA, 20 bp, synthetic construct
  misc_feature 1..20: note = Description of Artificial Sequence: Synthetic oligonucleotide
  misc_feature 1..20: note = Target: SCN10A; (+) strand; PAM type: YTN; PAM sequence: TTA
  source 1..20: mol_type = other DNA
actccgaggtttattcgact

SEQ ID NO: 70148 - DNA, 20 bp, synthetic construct
  misc_feature 1..20: note = Description of Artificial Sequence: Synthetic oligonucleotide
  misc_feature 1..20: note = Target: SCN10A; (+) strand; PAM type: YTN; PAM sequence: CTC
  source 1..20: mol_type = other DNA
cgaggtttattcgactgtgc

SEQ ID NO: 70149 - DNA, 20 bp, synthetic construct
  misc_feature 1..20: note = Description of Artificial Sequence: Synthetic oligonucleotide
  misc_feature 1..20: note = Target: SCN10A; (+) strand; PAM type: YTN; PAM sequence: TTT
  source 1..20: mol_type = other DNA
attcgactgtgctctgagag

SEQ ID NO: 70150 - DNA, 20 bp, synthetic construct
  misc_feature 1..20: note = Description of Artificial Sequence: Synthetic oligonucleotide
  misc_feature 1..20: note = Target: SCN10A; (+) strand; PAM type: YTN; PAM sequence: TTA
  source 1..20: mol_type = other DNA
ttcgactgtgctctgagagg

SEQ ID NO: 70151 - DNA, 20 bp, synthetic construct
  misc_feature 1..20: note = Description of Artificial Sequence: Synthetic oligonucleotide
  misc_feature 1..20: note = Target: SCN10A; (+) strand; PAM type: YTN; PAM sequence: TTC
  source 1..20: mol_type = other DNA
gactgtgctctgagaggata

SEQ ID NO: 70152 - DNA, 20 bp, synthetic construct
  misc_feature 1..20: note = Description of Artificial Sequence: Synthetic oligonucleotide
  misc_feature 1..20: note = Target: SCN10A; (+) strand; PAM type: YTN; PAM sequence: CTG
  source 1..20: mol_type = other DNA
tgctctgagaggatacctga

SEQ ID NO: 70153 - DNA, 20 bp, synthetic construct
  misc_feature 1..20: note = Description of Artificial Sequence: Synthetic oligonucleotide
  misc_feature 1..20: note = Target: SCN10A; (+) strand; PAM type: YTN; PAM sequence: CTC
  source 1..20: mol_type = other DNA
tgagaggatacctgacataa

SEQ ID NO: 70154 - DNA, 20 bp, synthetic construct
  misc_feature 1..20: note = Description of Artificial Sequence: Synthetic oligonucleotide
  misc_feature 1..20: note = Target: SCN10A; (+) strand; PAM type: YTN; PAM sequence: CTG
  source 1..20: mol_type = other DNA
agaggatacctgacataatt

SEQ ID NO: 70155 - DNA, 20 bp, synthetic construct
  misc_feature 1..20: note = Description of Artificial Sequence: Synthetic oligonucleotide
  misc_feature 1..20: note = Target: SCN10A; (+) strand; PAM type: YTN; PAM sequence: CTG
  source 1..20: mol_type = other DNA
acataatttctattttctta

SEQ ID NO: 70156 - DNA, 20 bp, synthetic construct
  misc_feature 1..20: note = Description of Artificial Sequence: Synthetic oligonucleotide
  misc_feature 1..20: note = Target: SCN10A; (+) strand; PAM type: YTN; PAM sequence: TTT
  source 1..20: mol_type = other DNA
ctattttcttaaatttattg

SEQ ID NO: 70157 - DNA, 20 bp, synthetic construct
  misc_feature 1..20: note = Description of Artificial Sequence: Synthetic oligonucleotide
  misc_feature 1..20: note = Target: SCN10A; (+) strand; PAM type: YTN; PAM sequence: TTC
  source 1..20: mol_type = other DNA
tattttcttaaatttattga

SEQ ID NO: 70158 - DNA, 20 bp, synthetic construct
  misc_feature 1..20: note = Description of Artificial Sequence: Synthetic oligonucleotide
  misc_feature 1..20: note = Target: SCN10A; (+) strand; PAM type: YTN; PAM sequence: CTA
  source 1..20: mol_type = other DNA
ttttcttaaatttattgaga

SEQ ID NO: 70159 - DNA, 20 bp, synthetic construct
  misc_feature 1..20: note = Description of Artificial Sequence: Synthetic oligonucleotide
  misc_feature 1..20: note = Target: SCN10A; (+) strand; PAM type: YTN; PAM sequence: TTT
  source 1..20: mol_type = other DNA
tcttaaatttattgagattt

SEQ ID NO: 70160 - DNA, 20 bp, synthetic construct
  misc_feature 1..20: note = Description of Artificial Sequence: Synthetic oligonucleotide
  misc_feature 1..20: note = Target: SCN10A; (+) strand; PAM type: YTN; PAM sequence: TTT
  source 1..20: mol_type = other DNA
cttaaatttattgagatttg

SEQ ID NO: 70161 - DNA, 20 bp, synthetic construct
  misc_feature 1..20: note = Description of Artificial Sequence: Synthetic oligonucleotide
  misc_feature 1..20: note = Target: SCN10A; (+) strand; PAM type: YTN; PAM sequence: TTC
  source 1..20: mol_type = other DNA
ttaaatttattgagatttgt

SEQ ID NO: 70162 - DNA, 20 bp, synthetic construct
  misc_feature 1..20: note = Description of Artificial Sequence: Synthetic oligonucleotide
  misc_feature 1..20: note = Target: SCN10A; (+) strand; PAM type: YTN; PAM sequence: CTT
  source 1..20: mol_type = other DNA
aaatttattgagatttgtta

SEQ ID NO: 70163 - DNA, 20 bp, synthetic construct
  misc_feature 1..20: note = Description of Artificial Sequence: Synthetic oligonucleotide
  misc_feature 1..20: note = Target: SCN10A; (+) strand; PAM type: YTN; PAM sequence: TTA
  source 1..20: mol_type = other DNA
aatttattgagatttgttat

SEQ ID NO: 70164 - DNA, 20 bp, synthetic construct
  misc_feature 1..20: note = Description of Artificial Sequence: Synthetic oligonucleotide
  misc_feature 1..20: note = Target: SCN10A; (+) strand; PAM type: YTN; PAM sequence: TTT
  source 1..20: mol_type = other DNA
attgagatttgttatgttat

SEQ ID NO: 70165 - DNA, 20 bp, synthetic construct
  misc_feature 1..20: note = Description of Artificial Sequence: Synthetic oligonucleotide
  misc_feature 1..20: note = Target: SCN10A; (+) strand; PAM type: YTN; PAM sequence: TTA
  source 1..20: mol_type = other DNA
ttgagatttgttatgttatc

SEQ ID NO: 70166 - DNA, 20 bp, synthetic construct
  misc_feature 1..20: note = Description of Artificial Sequence: Synthetic oligonucleotide
  misc_feature 1..20: note = Target: SCN10A; (+) strand; PAM type: YTN; PAM sequence: TTG
  source 1..20: mol_type = other DNA
agatttgttatgttatctat

SEQ ID NO: 70167 - DNA, 20 bp, synthetic construct
  misc_feature 1..20: note = Description of Artificial Sequence: Synthetic oligonucleotide
  misc_feature 1..20: note = Target: SCN10A; (+) strand; PAM type: YTN; PAM sequence: TTT
  source 1..20: mol_type = other DNA
gttatgttatctatcacgtg

SEQ ID NO: 70168 - DNA, 20 bp, synthetic construct
  misc_feature 1..20: note = Description of Artificial Sequence: Synthetic oligonucleotide
  misc_feature 1..20: note = Target: SCN10A; (+) strand; PAM type: YTN; PAM sequence: TTG
  source 1..20: mol_type = other DNA
ttatgttatctatcacgtgg

SEQ ID NO: 70169 - DNA, 20 bp, synthetic construct
  misc_feature 1..20: note = Description of Artificial Sequence: Synthetic oligonucleotide
  misc_feature 1..20: note = Target: SCN10A; (+) strand; PAM type: YTN; PAM sequence: TTA
  source 1..20: mol_type = other DNA
tgttatctatcacgtggtct

SEQ ID NO: 70170 - DNA, 20 bp, synthetic construct
  misc_feature 1..20: note = Description of Artificial Sequence: Synthetic oligonucleotide
  misc_feature 1..20: note = Target: SCN10A; (+) strand; PAM type: YTN; PAM sequence: TTA
  source 1..20: mol_type = other DNA
tctatcacgtggtctatctt

SEQ ID NO: 70171 - DNA, 20 bp, synthetic construct
  misc_feature 1..20: note = Description of Artificial Sequence: Synthetic oligonucleotide
  misc_feature 1..20: note = Target: SCN10A; (+) strand; PAM type: YTN; PAM sequence: CTA
  source 1..20: mol_type = other DNA
tcacgtggtctatcttagag

SEQ ID NO: 70172 - DNA, 20 bp, synthetic construct
  misc_feature 1..20: note = Description of Artificial Sequence: Synthetic oligonucleotide
  misc_feature 1..20: note = Target: SCN10A; (+) strand; PAM type: YTN; PAM sequence: CTA
  source 1..20: mol_type = other DNA
tcttagagaatattccatgt

SEQ ID NO: 70173 - DNA, 20 bp, synthetic construct
  misc_feature 1..20: note = Description of Artificial Sequence: Synthetic oligonucleotide
  misc_feature 1..20: note = Target: SCN10A; (+) strand; PAM type: YTN; PAM sequence: CTT
  source 1..20: mol_type = other DNA
agagaatattccatgtgctg

SEQ ID NO: 70174 - DNA, 20 bp, synthetic construct
  misc_feature 1..20: note = Description of Artificial Sequence: Synthetic oligonucleotide
  misc_feature 1..20: note = Target: SCN10A; (+) strand; PAM type: YTN; PAM sequence: TTA
  source 1..20: mol_type = other DNA
gagaatattccatgtgctga

SEQ ID NO: 70175 - DNA, 20 bp, synthetic construct
  misc_feature 1..20: note = Description of Artificial Sequence: Synthetic oligonucleotide
  misc_feature 1..20: note = Target: SCN10A; (+) strand; PAM type: YTN; PAM sequence: TTC
  source 1..20: mol_type = other DNA
catgtgctgatgaaaagaat

SEQ ID NO: 70176 - DNA, 20 bp, synthetic construct
  misc_feature 1..20: note = Description of Artificial Sequence: Synthetic oligonucleotide
  misc_feature 1..20: note = Target: SCN10A; (+) strand; PAM type: YTN; PAM sequence: CTG
  source 1..20: mol_type = other DNA
atgaaaagaatgtatattct

SEQ ID NO: 70177 - DNA, 20 bp, synthetic construct
  misc_feature 1..20: note = Description of Artificial Sequence: Synthetic oligonucleotide
  misc_feature 1..20: note = Target: SCN10A; (+) strand; PAM type: YTN; PAM sequence: TTC
  source 1..20: mol_type = other DNA
tgcagttgtttggtagaatg

SEQ ID NO: 70178 - DNA, 20 bp, synthetic construct
  misc_feature 1..20: note = Description of Artificial Sequence: Synthetic oligonucleotide
  misc_feature 1..20: note = Target: SCN10A; (+) strand; PAM type: YTN; PAM sequence: CTG
  source 1..20: mol_type = other DNA
cagttgtttggtagaatgtt

SEQ ID NO: 70179 - DNA, 20 bp, synthetic construct
  misc_feature 1..20: note = Description of Artificial Sequence: Synthetic oligonucleotide
  misc_feature 1..20: note = Target: SCN10A; (+) strand; PAM type: YTN; PAM sequence: TTG
  source 1..20: mol_type = other DNA
tttggtagaatgttttttaa

SEQ ID NO: 70180 - DNA, 20 bp, synthetic construct
  misc_feature 1..20: note = Description of Artificial Sequence: Synthetic oligonucleotide
  misc_feature 1..20: note = Target: SCN10A; (+) strand; PAM type: YTN; PAM sequence: TTT
  source 1..20: mol_type = other DNA
ggtagaatgttttttaaata

SEQ ID NO: 70181 - DNA, 20 bp, synthetic construct
  misc_feature 1..20: note = Description of Artificial Sequence: Synthetic oligonucleotide
  misc_feature 1..20: note = Target: SCN10A; (+) strand; PAM type: YTN; PAM sequence: TTG
  source 1..20: mol_type = other DNA
gtagaatgttttttaaatat

SEQ ID NO: 70182 - DNA, 20 bp, synthetic construct
  misc_feature 1..20: note = Description of Artificial Sequence: Synthetic oligonucleotide
  misc_feature 1..20: note = Target: SCN10A; (+) strand; PAM type: YTN; PAM sequence: TTT
  source 1..20: mol_type = other DNA
tttaaatatctgttaagtcc

SEQ ID NO: 70183 - DNA, 20 bp, synthetic construct
  misc_feature 1..20: note = Description of Artificial Sequence: Synthetic oligonucleotide
  misc_feature 1..20: note = Target: SCN10A; (+) strand; PAM type: YTN; PAM sequence: TTT
  source 1..20: mol_type = other DNA
ttaaatatctgttaagtcca

SEQ ID NO: 70184 - DNA, 20 bp, synthetic construct
  misc_feature 1..20: note = Description of Artificial Sequence: Synthetic oligonucleotide
  misc_feature 1..20: note = Target: SCN10A; (+) strand; PAM type: YTN; PAM sequence: TTT
  source 1..20: mol_type = other DNA
taaatatctgttaagtccat

SEQ ID NO: 70185 - DNA, 20 bp, synthetic construct
  misc_feature 1..20: note = Description of Artificial Sequence: Synthetic oligonucleotide
  misc_feature 1..20: note = Target: SCN10A; (+) strand; PAM type: YTN; PAM sequence: TTT
  source 1..20: mol_type = other DNA
aaatatctgttaagtccatt

SEQ ID NO: 70186 - DNA, 20 bp, synthetic construct
  misc_feature 1..20: note = Description of Artificial Sequence: Synthetic oligonucleotide
  misc_feature 1..20: note = Target: SCN10A; (+) strand; PAM type: YTN; PAM sequence: TTA
  source 1..20: mol_type = other DNA
aatatctgttaagtccattt

SEQ ID NO: 70187 - DNA, 20 bp, synthetic construct
  misc_feature 1..20: note = Description of Artificial Sequence: Synthetic oligonucleotide
  misc_feature 1..20: note = Target: SCN10A; (+) strand; PAM type: YTN; PAM sequence: CTG
  source 1..20: mol_type = other DNA
ttaagtccatttgttctagg

SEQ ID NO: 70188 - DNA, 20 bp, synthetic construct
  misc_feature 1..20: note = Description of Artificial Sequence: Synthetic oligonucleotide
  misc_feature 1..20: note = Target: SCN10A; (+) strand; PAM type: YTN; PAM sequence: TTA
  source 1..20: mol_type = other DNA
agtccatttgttctaggtta

SEQ ID NO: 70189 - DNA, 20 bp, synthetic construct
  misc_feature 1..20: note = Description of Artificial Sequence: Synthetic oligonucleotide
  misc_feature 1..20: note = Target: SCN10A; (+) strand; PAM type: YTN; PAM sequence: TTT
  source 1..20: mol_type = other DNA
gttctaggttacagtttaag

SEQ ID NO: 70190 - DNA, 20 bp, synthetic construct
  misc_feature 1..20: note = Description of Artificial Sequence: Synthetic oligonucleotide
  misc_feature 1..20: note = Target: SCN10A; (+) strand; PAM type: YTN; PAM sequence: TTG
  source 1..20: mol_type = other DNA
ttctaggttacagtttaagt

SEQ ID NO: 70191 - DNA, 20 bp, synthetic construct
  misc_feature 1..20: note = Description of Artificial Sequence: Synthetic oligonucleotide
  misc_feature 1..20: note = Target: SCN10A; (+) strand; PAM type: YTN; PAM sequence: TTC
  source 1..20: mol_type = other DNA
taggttacagtttaagttca

SEQ ID NO: 70192 - DNA, 20 bp, synthetic construct
  misc_feature 1..20: note = Description of Artificial Sequence: Synthetic oligonucleotide
  misc_feature 1..20: note = Target: SCN10A; (+) strand; PAM type: YTN; PAM sequence: CTA
  source 1..20: mol_type = other DNA
ggttacagtttaagttcatt

SEQ ID NO: 70193 - DNA, 20 bp, synthetic construct
  misc_feature 1..20: note = Description of Artificial Sequence: Synthetic oligonucleotide
  misc_feature 1..20: note = Target: SCN10A; (+) strand; PAM type: YTN; PAM sequence: TTA
  source 1..20: mol_type = other DNA
cagtttaagttcattgtttc

SEQ ID NO: 70194 - DNA, 20 bp, synthetic construct
  misc_feature 1..20: note = Description of Artificial Sequence: Synthetic oligonucleotide
  misc_feature 1..20: note = Target: SCN10A; (+) strand; PAM type: YTN; PAM sequence: TTT
  source 1..20: mol_type = other DNA
aagttcattgtttctttgtt

SEQ ID NO: 70195 - DNA, 20 bp, synthetic construct
  misc_feature 1..20: note = Description of Artificial Sequence: Synthetic oligonucleotide
  misc_feature 1..20: note = Target: SCN10A; (+) strand; PAM type: YTN; PAM sequence: TTA
  source 1..20: mol_type = other DNA
agttcattgtttctttgttg

SEQ ID NO: 70196 - DNA, 20 bp, synthetic construct
  misc_feature 1..20: note = Description of Artificial Sequence: Synthetic oligonucleotide
  misc_feature 1..20: note = Target: SCN10A; (+) strand; PAM type: YTN; PAM sequence: TTC
  source 1..20: mol_type = other DNA
attgtttctttgttgacttt

SEQ ID NO: 70197 - DNA, 20 bp, synthetic construct
  misc_feature 1..20: note = Description of Artificial Sequence: Synthetic oligonucleotide
  misc_feature 1..20: note = Target: SCN10A; (+) strand; PAM type: YTN; PAM sequence: TTG
  source 1..20: mol_type = other DNA
tttctttgttgactttctgt

SEQ ID NO: 70198 - DNA, 20 bp, synthetic construct
  misc_feature 1..20: note = Description of Artificial Sequence: Synthetic oligonucleotide
  misc_feature 1..20: note = Target: SCN10A; (+) strand; PAM type: YTN; PAM sequence: TTT
  source 1..20: mol_type = other DNA
ctttgttgactttctgtctt

SEQ ID NO: 70199 - DNA, 20 bp, synthetic construct
  misc_feature 1..20: note = Description of Artificial Sequence: Synthetic oligonucleotide
  misc_feature 1..20: note = Target: SCN10A; (+) strand; PAM type: YTN; PAM sequence: TTC
  source 1..20: mol_type = other DNA
tttgttgactttctgtcttg

SEQ ID NO: 70200 - DNA, 20 bp, synthetic construct
  misc_feature 1..20: note = Description of Artificial Sequence: Synthetic oligonucleotide
  misc_feature 1..20: note = Target: SCN10A; (+) strand; PAM type: YTN; PAM sequence: CTT
  source 1..20: mol_type = other DNA
tgttgactttctgtcttgat

SEQ ID NO: 70201 - DNA, 20 bp, synthetic construct
  misc_feature 1..20: note = Description of Artificial Sequence: Synthetic oligonucleotide
  misc_feature 1..20: note = Target: SCN10A; (+) strand; PAM type: YTN; PAM sequence: TTT
  source 1..20: mol_type = other DNA
gttgactttctgtcttgatg

SEQ ID NO: 70202 - DNA, 20 bp, synthetic construct
  misc_feature 1..20: note = Description of Artificial Sequence: Synthetic oligonucleotide
  misc_feature 1..20: note = Target: SCN10A; (+) strand; PAM type: YTN; PAM sequence: TTG
  source 1..20: mol_type = other DNA
ttgactttctgtcttgatga

SEQ ID NO: 70203 - DNA, 20 bp, synthetic construct
  misc_feature 1..20: note = Description of Artificial Sequence: Synthetic oligonucleotide
  misc_feature 1..20: note = Target: SCN10A; (+) strand; PAM type: YTN; PAM sequence: TTG
  source 1..20: mol_type = other DNA
actttctgtcttgatgacct

SEQ ID NO: 70204 - DNA, 20 bp, synthetic construct
  misc_feature 1..20: note = Description of Artificial Sequence: Synthetic oligonucleotide
  misc_feature 1..20: note = Target: SCN10A; (+) strand; PAM type: YTN; PAM sequence: CTT
  source 1..20: mol_type = other DNA
tctgtcttgatgacctgtct

SEQ ID NO: 70205 - DNA, 20 bp, synthetic construct
  misc_feature 1..20: note = Description of Artificial Sequence: Synthetic oligonucleotide
  misc_feature 1..20: note = Target: SCN10A; (+) strand; PAM type: YTN; PAM sequence: TTT
  source 1..20: mol_type = other DNA
ctgtcttgatgacctgtcta

SEQ ID NO: 70206 - DNA, 20 bp, synthetic construct
  misc_feature 1..20: note = Description of Artificial Sequence: Synthetic oligonucleotide
  misc_feature 1..20: note = Target: SCN10A; (+) strand; PAM type: YTN; PAM sequence: TTC
  source 1..20: mol_type = other DNA
tgtcttgatgacctgtctag

SEQ ID NO: 70207 - DNA, 20 bp, synthetic construct
  misc_feature 1..20: note = Description of Artificial Sequence: Synthetic oligonucleotide
  misc_feature 1..20: note = Target: SCN10A; (+) strand; PAM type: YTN; PAM sequence: CTG
  source 1..20: mol_type = other DNA
tcttgatgacctgtctagtg

SEQ ID NO: 70208 - DNA, 20 bp, synthetic construct
  misc_feature 1..20: note = Description of Artificial Sequence: Synthetic oligonucleotide
  misc_feature 1..20: note = Target: SCN10A; (+) strand; PAM type: YTN; PAM sequence: CTT
  source 1..20: mol_type = other DNA
gatgacctgtctagtgctgt

SEQ ID NO: 70209 - DNA, 20 bp, synthetic construct
  misc_feature 1..20: note = Description of Artificial Sequence: Synthetic oligonucleotide
  misc_feature 1..20: note = Target: SCN10A; (+) strand; PAM type: YTN; PAM sequence: TTG
  source 1..20: mol_type = other DNA
atgacctgtctagtgctgtc

SEQ ID NO: 70210 - DNA, 20 bp, synthetic construct
  misc_feature 1..20: note = Description of Artificial Sequence: Synthetic oligonucleotide
  misc_feature 1..20: note = Target: SCN10A; (+) strand; PAM type: YTN; PAM sequence: CTG
  source 1..20: mol_type = other DNA
tctagtgctgtcagtggaat

SEQ ID NO: 70211 - DNA, 20 bp, synthetic construct
  misc_feature 1..20: note = Description of Artificial Sequence: Synthetic oligonucleotide
  misc_feature 1..20: note = Target: SCN10A; (+) strand; PAM type: YTN; PAM sequence: CTA
  source 1..20: mol_type = other DNA
gtgctgtcagtggaatattg

SEQ ID NO: 70212 - DNA, 20 bp, synthetic construct
  misc_feature 1..20: note = Description of Artificial Sequence: Synthetic oligonucleotide
  misc_feature 1..20: note = Target: SCN10A; (+) strand; PAM type: YTN; PAM sequence: CTG
  source 1..20: mol_type = other DNA
tcagtggaatattgatcccc

SEQ ID NO: 70213 - DNA, 20 bp, synthetic construct
  misc_feature 1..20: note = Description of Artificial Sequence: Synthetic oligonucleotide
  misc_feature 1..20: note = Target: SCN10A; (+) strand; PAM type: YTN; PAM sequence: TTG
  source 1..20: mol_type = other DNA
atcccccactattattatat

SEQ ID NO: 70214 - DNA, 20 bp, synthetic construct
  misc_feature 1..20: note = Description of Artificial Sequence: Synthetic oligonucleotide
  misc_feature 1..20: note = Target: SCN10A; (+) strand; PAM type: YTN; PAM sequence: CTA
  source 1..20: mol_type = other DNA
ttattatattgctgtctatt

SEQ ID NO: 70215 - DNA, 20 bp, synthetic construct
  misc_feature 1..20: note = Description of Artificial Sequence: Synthetic oligonucleotide
  misc_feature 1..20: note = Target: SCN10A; (+) strand; PAM type: YTN; PAM sequence: TTA
  source 1..20: mol_type = other DNA
ttatattgctgtctatttca

SEQ ID NO: 70216 - DNA, 20 bp, synthetic construct
  misc_feature 1..20: note = Description of Artificial Sequence: Synthetic oligonucleotide
  misc_feature 1..20: note = Target: SCN10A; (+) strand; PAM type: YTN; PAM sequence: TTA
  source 1..20: mol_type = other DNA
tattgctgtctatttcattt

SEQ ID NO: 70217 - DNA, 20 bp, synthetic construct
  misc_feature 1..20: note = Description of Artificial Sequence: Synthetic oligonucleotide
  misc_feature 1..20: note = Target: SCN10A; (+) strand; PAM type: YTN; PAM sequence: TTG
  source 1..20: mol_type = other DNA
ctgtctatttcatttcttag

SEQ ID NO: 70218 - DNA, 20 bp, synthetic construct
  misc_feature 1..20: note = Description of Artificial Sequence: Synthetic oligonucleotide
  misc_feature 1..20: note = Target: SCN10A; (+) strand; PAM type: YTN; PAM sequence: CTG
  source 1..20: mol_type = other DNA
tctatttcatttcttaggtc

SEQ ID NO: 70219 - DNA, 20 bp, synthetic construct
  misc_feature 1..20: note = Description of Artificial Sequence: Synthetic oligonucleotide
  misc_feature 1..20: note = Target: SCN10A; (+) strand; PAM type: YTN; PAM sequence: CTA
  source 1..20: mol_type = other DNA
tttcatttcttaggtctagt

SEQ ID NO: 70220 - DNA, 20 bp, synthetic construct
  misc_feature 1..20: note = Description of Artificial Sequence: Synthetic oligonucleotide
  misc_feature 1..20: note = Target: SCN10A; (+) strand; PAM type: YTN; PAM sequence: TTT
  source 1..20: mol_type = other DNA
catttcttaggtctagtagt

SEQ ID NO: 70221 - DNA, 20 bp, synthetic construct
  misc_feature 1..20: note = Description of Artificial Sequence: Synthetic oligonucleotide
  misc_feature 1..20: note = Target: SCN10A; (+) strand; PAM type: YTN; PAM sequence: TTC
  source 1..20: mol_type = other DNA
atttcttaggtctagtagta

SEQ ID NO: 70222 - DNA, 20 bp, synthetic construct
  misc_feature 1..20: note = Description of Artificial Sequence: Synthetic oligonucleotide
  misc_feature 1..20: note = Target: SCN10A; (+) strand; PAM type: YTN; PAM sequence: TTT
  source 1..20: mol_type = other DNA
cttaggtctagtagtaattg

SEQ ID NO: 70223 - DNA, 20 bp, synthetic construct
  misc_feature 1..20: note = Description of Artificial Sequence: Synthetic oligonucleotide
  misc_feature 1..20: note = Target: SCN10A; (+) strand; PAM type: YTN; PAM sequence: TTC
  source 1..20: mol_type = other DNA
ttaggtctagtagtaattgt

SEQ ID NO: 70224 - DNA, 20 bp, synthetic construct
  misc_feature 1..20: note = Description of Artificial Sequence: Synthetic oligonucleotide
  misc_feature 1..20: note = Target: SCN10A; (+) strand; PAM type: YTN; PAM sequence: CTT
  source 1..20: mol_type = other DNA
aggtctagtagtaattgttt

SEQ ID NO: 70225 - DNA, 20 bp, synthetic construct
  misc_feature 1..20: note = Description of Artificial Sequence: Synthetic oligonucleotide
  misc_feature 1..20: note = Target: SCN10A; (+) strand; PAM type: YTN; PAM sequence: TTA
  source 1..20: mol_type = other DNA
ggtctagtagtaattgtttt

SEQ ID NO: 70226 - DNA, 20 bp, synthetic construct
  misc_feature 1..20: note = Description of Artificial Sequence: Synthetic oligonucleotide
  misc_feature 1..20: note = Target: SCN10A; (+) strand; PAM type: YTN; PAM sequence: CTA
  source 1..20: mol_type = other DNA
gtagtaattgttttataaat

SEQ ID NO: 70227 - DNA, 20 bp, synthetic construct
  misc_feature 1..20: note = Description of Artificial Sequence: Synthetic oligonucleotide
  misc_feature 1..20: note = Target: SCN10A; (+) strand; PAM type: YTN; PAM sequence: TTG
  source 1..20: mol_type = other DNA
ttttataaatttgggagctc

SEQ ID NO: 70228 - DNA, 20 bp, synthetic construct
  misc_feature 1..20: note = Description of Artificial Sequence: Synthetic oligonucleotide
  misc_feature 1..20: note = Target: SCN10A; (+) strand; PAM type: YTN; PAM sequence: TTT
  source 1..20: mol_type = other DNA
tataaatttgggagctccag

SEQ ID NO: 70229 - DNA, 20 bp, synthetic construct
  misc_feature 1..20: note = Description of Artificial Sequence: Synthetic oligonucleotide
  misc_feature 1..20: note = Target: SCN10A; (+) strand; PAM type: YTN; PAM sequence: TTT
  source 1..20: mol_type = other DNA
ataaatttgggagctccagt

SEQ ID NO: 70230 - DNA, 20 bp, synthetic construct
  misc_feature 1..20: note = Description of Artificial Sequence: Synthetic oligonucleotide
  misc_feature 1..20: note = Target: SCN10A; (+) strand; PAM type: YTN; PAM sequence: TTA
  source 1..20: mol_type = other DNA
taaatttgggagctccagtg

SEQ ID NO: 70231 - DNA, 20 bp, synthetic construct
  misc_feature 1..20: note = Description of Artificial Sequence: Synthetic oligonucleotide
  misc_feature 1..20: note = Target: SCN10A; (+) strand; PAM type: YTN; PAM sequence: TTT
  source 1..20: mol_type = other DNA
gggagctccagtgttaggtg

SEQ ID NO: 70232 - DNA, 20 bp, synthetic construct
  misc_feature 1..20: note = Description of Artificial Sequence: Synthetic oligonucleotide
  misc_feature 1..20: note = Target: SCN10A; (+) strand; PAM type: YTN; PAM sequence: TTG
  source 1..20: mol_type = other DNA
ggagctccagtgttaggtgc

SEQ ID NO: 70233 - DNA, 20 bp, synthetic construct
  misc_feature 1..20: note = Description of Artificial Sequence: Synthetic oligonucleotide
  misc_feature 1..20: note = Target: SCN10A; (+) strand; PAM type: YTN; PAM sequence: CTC
  source 1..20: mol_type = other DNA
cagtgttaggtgcatatgta

SEQ ID NO: 70234 - DNA, 20 bp, synthetic construct
  misc_feature 1..20: note = Description of Artificial Sequence: Synthetic oligonucleotide
  misc_feature 1..20: note = Target: SCN10A; (+) strand; PAM type: YTN; PAM sequence: TTA
  source 1..20: mol_type = other DNA
ggtgcatatgtatttaggat

SEQ ID NO: 70235 - DNA, 20 bp, synthetic construct
  misc_feature 1..20: note = Description of Artificial Sequence: Synthetic oligonucleotide
  misc_feature 1..20: note = Target: SCN10A; (+) strand; PAM type: YTN; PAM sequence: TTT
  source 1..20: mol_type = other DNA
aggattatgatatttttcca

SEQ ID NO: 70236 - DNA, 20 bp, synthetic construct
  misc_feature 1..20: note = Description of Artificial Sequence: Synthetic oligonucleotide
  misc_feature 1..20: note = Target: SCN10A; (+) strand; PAM type: YTN; PAM sequence: TTA
  source 1..20: mol_type = other DNA
ggattatgatatttttccat

SEQ ID NO: 70237 - DNA, 20 bp, synthetic construct
  misc_feature 1..20: note = Description of Artificial Sequence: Synthetic oligonucleotide
  misc_feature 1..20: note = Target: SCN10A; (+) strand; PAM type: YTN; PAM sequence: TTA
  source 1..20: mol_type = other DNA
tgatatttttccattagacc

SEQ ID NO: 70238 - DNA, 20 bp, synthetic construct
  misc_feature 1..20: note = Description of Artificial Sequence: Synthetic oligonucleotide
  misc_feature 1..20: note = Target: SCN10A; (+) strand; PAM type: YTN; PAM sequence: TTT
  source 1..20: mol_type = other DNA
ttccattagaccaattattt

SEQ ID NO: 70239 - DNA, 20 bp, synthetic construct
  misc_feature 1..20: note = Description of Artificial Sequence: Synthetic oligonucleotide
  misc_feature 1..20: note = Target: SCN10A; (+) strand; PAM type: YTN; PAM sequence: TTT
  source 1..20: mol_type = other DNA
tccattagaccaattatttt

SEQ ID NO: 70240 - DNA, 20 bp, synthetic construct
  misc_feature 1..20: note = Description of Artificial Sequence: Synthetic oligonucleotide
  misc_feature 1..20: note = Target: SCN10A; (+) strand; PAM type: YTN; PAM sequence: TTT
  source 1..20: mol_type = other DNA
ccattagaccaattatttta

SEQ ID NO: 70241 - DNA, 20 bp, synthetic construct
  misc_feature 1..20: note = Description of Artificial Sequence: Synthetic oligonucleotide
  misc_feature 1..20: note = Target: SCN10A; (+) strand; PAM type: YTN; PAM sequence: TTC
  source 1..20: mol_type = other DNA
cattagaccaattattttat

SEQ ID NO: 70242 - DNA, 20 bp, synthetic construct
  misc_feature 1..20: note = Description of Artificial Sequence: Synthetic oligonucleotide
  misc_feature 1..20: note = Target: SCN10A; (+) strand; PAM type: YTN; PAM sequence: TTA
  source 1..20: mol_type = other DNA
gaccaattattttatcatta

SEQ ID NO: 70243 - DNA, 20 bp, synthetic construct
  misc_feature 1..20: note = Description of Artificial Sequence: Synthetic oligonucleotide
  misc_feature 1..20: note = Target: SCN10A; (+) strand; PAM type: YTN; PAM sequence: TTA
  source 1..20: mol_type = other DNA
ttttatcattatatatgtcc

SEQ ID NO: 70244 - DNA, 20 bp, synthetic construct
  misc_feature 1..20: note = Description of Artificial Sequence: Synthetic oligonucleotide
  misc_feature 1..20: note = Target: SCN10A; (+) strand; PAM type: YTN; PAM sequence: TTT
  source 1..20: mol_type = other DNA
tatcattatatatgtccctc

SEQ ID NO: 70245 - DNA, 20 bp, synthetic construct
  misc_feature 1..20: note = Description of Artificial Sequence: Synthetic oligonucleotide
  misc_feature 1..20: note = Target: SCN10A; (+) strand; PAM type: YTN; PAM sequence: TTT
  source 1..20: mol_type = other DNA
atcattatatatgtccctct

SEQ ID NO: 70246 - DNA, 20 bp, synthetic construct
  misc_feature 1..20: note = Description of Artificial Sequence: Synthetic oligonucleotide
  misc_feature 1..20: note = Target: SCN10A; (+) strand; PAM type: YTN; PAM sequence: TTA
  source 1..20: mol_type = other DNA
tcattatatatgtccctctt

SEQ ID NO: 70247 - DNA, 20 bp, synthetic construct
  misc_feature 1..20: note = Description of Artificial Sequence: Synthetic oligonucleotide
  misc_feature 1..20: note = Target: SCN10A; (+) strand; PAM type: YTN; PAM sequence: TTA
  source 1..20: mol_type = other DNA
tatatgtccctctttgtctt

SEQ ID NO: 70248 - DNA, 20 bp, synthetic construct
  misc_feature 1..20: note = Description of Artificial Sequence: Synthetic oligonucleotide
  misc_feature 1..20: note = Target: SCN10A; (+) strand; PAM type: YTN; PAM sequence: CTC
  source 1..20: mol_type = other DNA
tttgtctttttttaactgtt

SEQ ID NO: 70249 - DNA, 20 bp, synthetic construct
  misc_feature 1..20: note = Description of Artificial Sequence: Synthetic oligonucleotide
  misc_feature 1..20: note = Target: SCN10A; (+) strand; PAM type: YTN; PAM sequence: CTT
  source 1..20: mol_type = other DNA
tgtctttttttaactgttgt

SEQ ID NO: 70250 - DNA, 20 bp, synthetic construct
  misc_feature 1..20: note = Description of Artificial Sequence: Synthetic oligonucleotide
  misc_feature 1..20: note = Target: SCN10A; (+) strand; PAM type: YTN; PAM sequence: TTT
  source 1..20: mol_type = other DNA
gtctttttttaactgttgtt

SEQ ID NO: 70251 - DNA, 20 bp, synthetic construct
  misc_feature 1..20: note = Description of Artificial Sequence: Synthetic oligonucleotide
  misc_feature 1..20: note = Target: SCN10A; (+) strand; PAM type: YTN; PAM sequence: TTG
  source 1..20: mol_type = other DNA
tctttttttaactgttgttg

SEQ ID NO: 70252 - DNA, 20 bp, synthetic construct
  misc_feature 1..20: note = Description of Artificial Sequence: Synthetic oligonucleotide
  misc_feature 1..20: note = Target: SCN10A; (+) strand; PAM type: YTN; PAM sequence: CTT
  source 1..20: mol_type = other DNA
tttttaactgttgttgcttt

SEQ ID NO: 70253 - DNA, 20 bp, synthetic construct
  misc_feature 1..20: note = Description of Artificial Sequence: Synthetic oligonucleotide
  misc_feature 1..20: note = Target: SCN10A; (+) strand; PAM type: YTN; PAM sequence: TTT
  source 1..20: mol_type = other DNA
ttttaactgttgttgcttta

SEQ ID NO: 70254 - DNA, 20 bp, synthetic construct
  misc_feature 1..20: note = Description of Artificial Sequence: Synthetic oligonucleotide
  misc_feature 1..20: note = Target: SCN10A; (+) strand; PAM type: YTN; PAM sequence: TTT
  source 1..20: mol_type = other DNA
tttaactgttgttgctttaa

SEQ ID NO: 70255 - DNA, 20 bp, synthetic construct
  misc_feature 1..20: note = Description of Artificial Sequence: Synthetic oligonucleotide
  misc_feature 1..20: note = Target: SCN10A; (+) strand; PAM type: YTN; PAM sequence: TTT
  source 1..20: mol_type = other DNA
ttaactgttgttgctttaag

SEQ ID NO: 70256 - DNA, 20 bp, synthetic construct
  misc_feature 1..20: note = Description of Artificial Sequence: Synthetic oligonucleotide
  misc_feature 1..20: note = Target: SCN10A; (+) strand; PAM type: YTN; PAM sequence: TTT
  source 1..20: mol_type = other DNA
taactgttgttgctttaagg

SEQ ID NO: 70257 - DNA, 20 bp, synthetic construct
  misc_feature 1..20: note = Description of Artificial Sequence: Synthetic oligonucleotide
  misc_feature 1..20: note = Target: SCN10A; (+) strand; PAM type: YTN; PAM sequence: TTT
  source 1..20: mol_type = other DNA
aactgttgttgctttaaggt

SEQ ID NO: 70258 - DNA, 20 bp, synthetic construct
  misc_feature 1..20: note = Description of Artificial Sequence: Synthetic oligonucleotide
  misc_feature 1..20: note = Target: SCN10A; (+) strand; PAM type: YTN; PAM sequence: TTA
  source 1..20: mol_type = other DNA
actgttgttgctttaaggtc

SEQ ID NO: 70259 - DNA, 20 bp, synthetic construct
  misc_feature 1..20: note = Description of Artificial Sequence: Synthetic oligonucleotide
  misc_feature 1..20: note = Target: SCN10A; (+) strand; PAM type: YTN; PAM sequence: CTG
  source 1..20: mol_type = other DNA
ttgttgctttaaggtctgtt

SEQ ID NO: 70260 - DNA, 20 bp, synthetic construct
  misc_feature 1..20: note = Description of Artificial Sequence: Synthetic oligonucleotide
  misc_feature 1..20: note = Target: SCN10A; (+) strand; PAM type: YTN; PAM sequence: TTG
  source 1..20: mol_type = other DNA
ttgctttaaggtctgttttc

SEQ ID NO: 70261 - DNA, 20 bp, synthetic construct
  misc_feature 1..20: note = Description of Artificial Sequence: Synthetic oligonucleotide
  misc_feature 1..20: note = Target: SCN10A; (+) strand; PAM type: YTN; PAM sequence: TTG
  source 1..20: mol_type = other DNA
ctttaaggtctgttttctct

SEQ ID NO: 70262 - DNA, 20 bp, synthetic construct
  misc_feature 1..20: note = Description of Artificial Sequence: Synthetic oligonucleotide
  misc_feature 1..20: note = Target: SCN10A; (+) strand; PAM type: YTN; PAM sequence: CTT
  source 1..20: mol_type = other DNA
taaggtctgttttctctgat

SEQ ID NO: 70263 - DNA, 20 bp, synthetic construct
  misc_feature 1..20: note = Description of Artificial Sequence: Synthetic oligonucleotide
  misc_feature 1..20: note = Target: SCN10A; (+) strand; PAM type: YTN; PAM sequence: TTT
  source 1..20: mol_type = other DNA
aaggtctgttttctctgata

SEQ ID NO: 70264 - DNA, 20 bp, synthetic construct
  misc_feature 1..20: note = Description of Artificial Sequence: Synthetic oligonucleotide
  misc_feature 1..20: note = Target: SCN10A; (+) strand; PAM type: YTN; PAM sequence: TTA
  source 1..20: mol_type = other DNA
aggtctgttttctctgatat

SEQ ID NO: 70265 - DNA, 20 bp, synthetic construct
  misc_feature 1..20: note = Description of Artificial Sequence: Synthetic oligonucleotide
  misc_feature 1..20: note = Target: SCN10A; (+) strand; PAM type: YTN; PAM sequence: CTG
  source 1..20: mol_type = other DNA
ttttctctgatataagaata

SEQ ID NO: 70266 - DNA, 20 bp, synthetic construct
  misc_feature 1..20: note = Description of Artificial Sequence: Synthetic oligonucleotide
  misc_feature 1..20: note = Target: SCN10A; (+) strand; PAM type: YTN; PAM sequence: TTT
  source 1..20: mol_type = other DNA
tctctgatataagaatagct

SEQ ID NO: 70267 - DNA, 20 bp, synthetic construct
  misc_feature 1..20: note = Description of Artificial Sequence: Synthetic oligonucleotide
  misc_feature 1..20: note = Target: SCN10A; (+) strand; PAM type: YTN; PAM sequence: TTT
  source 1..20: mol_type = other DNA
ctctgatataagaatagcta

SEQ ID NO: 70268 - DNA, 20 bp, synthetic construct
  misc_feature 1..20: note = Description of Artificial Sequence: Synthetic oligonucleotide
  misc_feature 1..20: note = Target: SCN10A; (+) strand; PAM type: YTN; PAM sequence: TTC
  source 1..20: mol_type = other DNA
tctgatataagaatagctac

SEQ ID NO: 70269 - DNA, 20 bp, synthetic construct
  misc_feature 1..20: note = Description of Artificial Sequence: Synthetic oligonucleotide
  misc_feature 1..20: note = Target: SCN10A; (+) strand; PAM type: YTN; PAM sequence: CTC
  source 1..20: mol_type = other DNA
tgatataagaatagctactc

SEQ ID NO: 70270 - DNA, 20 bp, synthetic construct
  misc_feature 1..20: note = Description of Artificial Sequence: Synthetic oligonucleotide
  misc_feature 1..20: note = Target: SCN10A; (+) strand; PAM type: YTN; PAM sequence: CTG
  source 1..20: mol_type = other DNA
atataagaatagctactcct

SEQ ID NO: 70271 - DNA, 20 bp, synthetic construct
  misc_feature 1..20: note = Description of Artificial Sequence: Synthetic oligonucleotide
  misc_feature 1..20: note = Target: SCN10A; (+) strand; PAM type: YTN; PAM sequence: CTA
  source 1..20: mol_type = other DNA
ctcctgcttgcttttggttt

SEQ ID NO: 70272 - DNA, 20 bp, synthetic construct
  misc_feature 1..20: note = Description of Artificial Sequence: Synthetic oligonucleotide
  misc_feature 1..20: note = Target: SCN10A; (+) strand; PAM type: YTN; PAM sequence: CTC
  source 1..20: mol_type = other DNA
ctgcttgcttttggtttcca

SEQ ID NO: 70273 - DNA, 20 bp, synthetic construct
  misc_feature 1..20: note = Description of Artificial Sequence: Synthetic oligonucleotide
  misc_feature 1..20: note = Target: SCN10A; (+) strand; PAM type: YTN; PAM sequence: CTG
  source 1..20: mol_type = other DNA
cttgcttttggtttccattt

SEQ ID NO: 70274 - DNA, 20 bp, synthetic construct
  misc_feature 1..20: note = Description of Artificial Sequence: Synthetic oligonucleotide
  misc_feature 1..20: note = Target: SCN10A; (+) strand; PAM type: YTN; PAM sequence: CTT
  source 1..20: mol_type = other DNA
gcttttggtttccatttgca

SEQ ID NO: 70275 - DNA, 20 bp, synthetic construct
  misc_feature 1..20: note = Description of Artificial Sequence: Synthetic oligonucleotide
  misc_feature 1..20: note = Target: SCN10A; (+) strand; PAM type: YTN; PAM sequence: TTG
  source 1..20: mol_type = other DNA
cttttggtttccatttgcat

SEQ ID NO: 70276 - DNA, 20 bp, synthetic construct
  misc_feature 1..20: note = Description of Artificial Sequence: Synthetic oligonucleotide
  misc_feature 1..20: note = Target: SCN10A; (+) strand; PAM type: YTN; PAM sequence: CTT
  source 1..20: mol_type = other DNA
ttggtttccatttgcatgga

SEQ ID NO: 70277 - DNA, 20 bp, synthetic construct
  misc_feature 1..20: note = Description of Artificial Sequence: Synthetic oligonucleotide
  misc_feature 1..20: note = Target: SCN10A; (+) strand; PAM type: YTN; PAM sequence: TTT
  source 1..20: mol_type = other DNA
tggtttccatttgcatggaa

SEQ ID NO: 70278 - DNA, 20 bp, synthetic construct
  misc_feature 1..20: note = Description of Artificial Sequence: Synthetic oligonucleotide
  misc_feature 1..20: note = Target: SCN10A; (+) strand; PAM type: YTN; PAM sequence: TTT
  source 1..20: mol_type = other DNA
ggtttccatttgcatggaat

SEQ ID NO: 70279 - DNA, 20 bp, synthetic construct
  misc_feature 1..20: note = Description of Artificial Sequence: Synthetic oligonucleotide
  misc_feature 1..20: note = Target: SCN10A; (+) strand; PAM type: YTN; PAM sequence: TTG
  source 1..20: mol_type = other DNA
gtttccatttgcatggaata

SEQ ID NO: 70280 - DNA, 20 bp, synthetic construct
  misc_feature 1..20: note = Description of Artificial Sequence: Synthetic oligonucleotide
  misc_feature 1..20: note = Target: SCN10A; (+) strand; PAM type: YTN; PAM sequence: TTT
  source 1..20: mol_type = other DNA
ccatttgcatggaatatctt

SEQ ID NO: 70281 - DNA, 20 bp, synthetic construct
  misc_feature 1..20: note = Description of Artificial Sequence: Synthetic oligonucleotide
  misc_feature 1..20: note = Target: SCN10A; (+) strand; PAM type: YTN; PAM sequence: TTC
  source 1..20: mol_type = other DNA
catttgcatggaatatcttt

SEQ ID NO: 70282 - DNA, 20 bp, synthetic construct
  misc_feature 1..20: note = Description of Artificial Sequence: Synthetic oligonucleotide
  misc_feature 1..20: note = Target: SCN10A; (+) strand; PAM type: YTN; PAM sequence: TTT
  source 1..20: mol_type = other DNA
gcatggaatatcttttccca

SEQ ID NO: 70283 - DNA, 20 bp, synthetic construct
  misc_feature 1..20: note = Description of Artificial Sequence: Synthetic oligonucleotide
  misc_feature 1..20: note = Target: SCN10A; (+) strand; PAM type: YTN; PAM sequence: TTG
  source 1..20: mol_type = other DNA
catggaatatcttttcccat

SEQ ID NO: 70284 - DNA, 20 bp, synthetic construct
  misc_feature 1..20: note = Description of Artificial Sequence: Synthetic oligonucleotide
  misc_feature 1..20: note = Target: SCN10A; (+) strand; PAM type: YTN; PAM sequence: CTT
  source 1..20: mol_type = other DNA
ttcccatctctttaccttaa

SEQ ID NO: 70285 - DNA, 20 bp, synthetic construct
  misc_feature 1..20: note = Description of Artificial Sequence: Synthetic oligonucleotide
  misc_feature 1..20: note = Target: SCN10A; (+) strand; PAM type: YTN; PAM sequence: TTT
  source 1..20: mol_type = other DNA
tcccatctctttaccttaag

SEQ ID NO: 70286 - DNA, 20 bp, synthetic construct
  misc_feature 1..20: note = Description of Artificial Sequence: Synthetic oligonucleotide
  misc_feature 1..20: note = Target: SCN10A; (+) strand; PAM type: YTN; PAM sequence: TTT
  source 1..20: mol_type = other DNA
cccatctctttaccttaagt

SEQ ID NO: 70287 - DNA, 20 bp, synthetic construct
  misc_feature 1..20: note = Description of Artificial Sequence: Synthetic oligonucleotide
  misc_feature 1..20: note = Target: SCN10A; (+) strand; PAM type: YTN; PAM sequence: TTC
  source 1..20: mol_type = other DNA
ccatctctttaccttaagtt

SEQ ID NO: 70288 - DNA, 20 bp, synthetic construct
  misc_feature 1..20: note = Description of Artificial Sequence: Synthetic oligonucleotide
  misc_feature 1..20: note = Target: SCN10A; (+) strand; PAM type: YTN; PAM sequence: CTC
  source 1..20: mol_type = other DNA
tttaccttaagtttatgtgg

SEQ ID NO: 70289 - DNA, 20 bp, synthetic construct
  misc_feature 1..20: note = Description of Artificial Sequence: Synthetic oligonucleotide
  misc_feature 1..20: note = Target: SCN10A; (+) strand; PAM type: YTN; PAM sequence: CTT
  source 1..20: mol_type = other DNA
taccttaagtttatgtggct

SEQ ID NO: 70290 - DNA, 20 bp, synthetic construct
  misc_feature 1..20: note = Description of Artificial Sequence: Synthetic oligonucleotide
  misc_feature 1..20: note = Target: SCN10A; (+) strand; PAM type: YTN; PAM sequence: TTT
  source 1..20: mol_type = other DNA
accttaagtttatgtggctc

SEQ ID NO: 70291 - DNA, 20 bp, synthetic construct
  misc_feature 1..20: note = Description of Artificial Sequence: Synthetic oligonucleotide
  misc_feature 1..20: note = Target: SCN10A; (+) strand; PAM type: YTN; PAM sequence: TTA
  source 1..20: mol_type = other DNA
ccttaagtttatgtggctcc

SEQ ID NO: 70292 - DNA, 20 bp, synthetic construct
  misc_feature 1..20: note = Description of Artificial Sequence: Synthetic oligonucleotide
  misc_feature 1..20: note = Target: SCN10A; (+) strand; PAM type: YTN; PAM sequence: CTT
  source 1..20: mol_type = other DNA
aagtttatgtggctccttat

SEQ ID NO: 70293 - DNA, 20 bp, synthetic construct
  misc_feature 1..20: note = Description of Artificial Sequence: Synthetic oligonucleotide
  misc_feature 1..20: note = Target: SCN10A; (+) strand; PAM type: YTN; PAM sequence: TTA
  source 1..20: mol_type = other DNA
agtttatgtggctccttatg

SEQ ID NO: 70294 - DNA, 20 bp, synthetic construct
  misc_feature 1..20: note = Description of Artificial Sequence: Synthetic oligonucleotide
  misc_feature 1..20: note = Target: SCN10A; (+) strand; PAM type: YTN; PAM sequence: TTT
  source 1..20: mol_type = other DNA
atgtggctccttatgtgtta

SEQ ID NO: 70295 - DNA, 20 bp, synthetic construct
  misc_feature 1..20: note = Description of Artificial Sequence: Synthetic oligonucleotide
  misc_feature 1..20: note = Target: SCN10A; (+) strand; PAM type: YTN; PAM sequence: TTA
  source 1..20: mol_type = other DNA
tgtggctccttatgtgttag

SEQ ID NO: 70296 - DNA, 20 bp, synthetic construct
  misc_feature 1..20: note = Description of Artificial Sequence: Synthetic oligonucleotide
  misc_feature 1..20: note = Target: SCN10A; (+) strand; PAM type: YTN; PAM sequence: CTC
  source 1..20: mol_type = other DNA
cttatgtgttaggtgagtct

SEQ ID NO: 70297 - DNA, 20 bp, synthetic construct
  misc_feature 1..20: note = Description of Artificial Sequence: Synthetic oligonucleotide
  misc_feature 1..20: note = Target: SCN10A; (+) strand; PAM type: YTN; PAM sequence: CTT
  source 1..20: mol_type = other DNA
atgtgttaggtgagtctctt

SEQ ID NO: 70298 - DNA, 20 bp, synthetic construct
  misc_feature 1..20: note = Description of Artificial Sequence: Synthetic oligonucleotide
  misc_feature 1..20: note = Target: SCN10A; (+) strand; PAM type: YTN; PAM sequence: TTA
  source 1..20: mol_type = other DNA
tgtgttaggtgagtctcttg

SEQ ID NO: 70299 - DNA, 20 bp, synthetic construct
  misc_feature 1..20: note = Description of Artificial Sequence: Synthetic oligonucleotide
  misc_feature 1..20: note = Target: SCN10A; (+) strand; PAM type: YTN; PAM sequence: TTA
  source 1..20: mol_type = other DNA
ggtgagtctcttgaagacag

SEQ ID NO: 70300 - DNA, 20 bp, synthetic construct
  misc_feature 1..20: note = Description of Artificial Sequence: Synthetic oligonucleotide
  misc_feature 1..20: note = Target: SCN10A; (+) strand; PAM type: YTN; PAM sequence: CTC
  source 1..20: mol_type = other DNA
ttgaagacagtagatacttg

SEQ ID NO: 70301 - DNA, 20 bp, synthetic construct
  misc_feature 1..20: note = Description of Artificial Sequence: Synthetic oligonucleotide
  misc_feature 1..20: note = Target: SCN10A; (+) strand; PAM type: YTN; PAM sequence: CTT
  source 1..20: mol_type = other DNA
gaagacagtagatacttggt

SEQ ID NO: 70302 - DNA, 20 bp, synthetic construct
  misc_feature 1..20: note = Description of Artificial Sequence: Synthetic oligonucleotide
  misc_feature 1..20: note = Target: SCN10A; (+) strand; PAM type: YTN; PAM sequence: TTG
  source 1..20: mol_type = other DNA
aagacagtagatacttggtt

SEQ ID NO: 70303 - DNA, 20 bp, synthetic construct
  misc_feature 1..20: note = Description of Artificial Sequence: Synthetic oligonucleotide
  misc_feature 1..20: note = Target: SCN10A; (+) strand; PAM type: YTN; PAM sequence: CTT
  source 1..20: mol_type = other DNA
ggttggtggatttttttttt

SEQ ID NO: 70304 - DNA, 20 bp, synthetic construct
  misc_feature 1..20: note = Description of Artificial Sequence: Synthetic oligonucleotide
  misc_feature 1..20: note = Target: SCN10A; (+) strand; PAM type: YTN; PAM sequence: TTG
  source 1..20: mol_type = other DNA
gttggtggattttttttttc

SEQ ID NO: 70305 - DNA, 20 bp, synthetic construct
  misc_feature 1..20: note = Description of Artificial Sequence: Synthetic oligonucleotide
  misc_feature 1..20: note = Target: SCN10A; (+) strand; PAM type: YTN; PAM sequence: TTG
  source 1..20: mol_type = other DNA
gtggattttttttttccttt

SEQ ID NO: 70306 - DNA, 20 bp, synthetic construct
  misc_feature 1..20: note = Description of Artificial Sequence: Synthetic oligonucleotide
  misc_feature 1..20: note = Target: SCN10A; (+) strand; PAM type: YTN; PAM sequence: TTT
  source 1..20: mol_type = other DNA
tttttttcctttctgccctt

SEQ ID NO: 70307 - DNA, 20 bp, synthetic construct
  misc_feature 1..20: note = Description of Artificial Sequence: Synthetic oligonucleotide
  misc_feature 1..20: note = Target: SCN10A; (+) strand; PAM type: YTN; PAM sequence: TTT
  source 1..20: mol_type = other DNA
ttttttcctttctgcccttc

SEQ ID NO: 70308 - DNA, 20 bp, synthetic construct
  misc_feature 1..20: note = Description of Artificial Sequence: Synthetic oligonucleotide
  misc_feature 1..20: note = Target: SCN10A; (+) strand; PAM type: YTN; PAM sequence: TTT
  source 1..20: mol_type = other DNA
tttttcctttctgcccttct

SEQ ID NO: 70309 - DNA, 20 bp, synthetic construct
  misc_feature 1..20: note = Description of Artificial Sequence: Synthetic oligonucleotide
  misc_feature 1..20: note = Target: SCN10A; (+) strand; PAM type: YTN; PAM sequence: TTT
  source 1..20: mol_type = other DNA
ttttcctttctgcccttctg

SEQ ID NO: 70310 - DNA, 20 bp, synthetic construct
  misc_feature 1..20: note = Description of Artificial Sequence: Synthetic oligonucleotide
  misc_feature 1..20: note = Target: SCN10A; (+) strand; PAM type: YTN; PAM sequence: TTT
  source 1..20: mol_type = other DNA
tttcctttctgcccttctgt

SEQ ID NO: 70311 - DNA, 20 bp, synthetic construct
  misc_feature 1..20: note = Description of Artificial Sequence: Synthetic oligonucleotide
  misc_feature 1..20: note = Target: SCN10A; (+) strand; PAM type: YTN; PAM sequence: TTT
  source 1..20: mol_type = other DNA
ttcctttctgcccttctgta

SEQ ID NO: 70312 - DNA, 20 bp, synthetic construct
  misc_feature 1..20: note = Description of Artificial Sequence: Synthetic oligonucleotide
  misc_feature 1..20: note = Target: SCN10A; (+) strand; PAM type: YTN; PAM sequence: TTT
  source 1..20: mol_type = other DNA
tcctttctgcccttctgtat

SEQ ID NO: 70313 - DNA, 20 bp, synthetic construct
  misc_feature 1..20: note = Description of Artificial Sequence: Synthetic oligonucleotide
  misc_feature 1..20: note = Target: SCN10A; (+) strand; PAM type: YTN; PAM sequence: TTT
  source 1..20: mol_type = other DNA
cctttctgcccttctgtata

SEQ ID NO: 70314 - DNA, 20 bp, synthetic construct
  misc_feature 1..20: note = Description of Artificial Sequence: Synthetic oligonucleotide
  misc_feature 1..20: note = Target: SCN10A; (+) strand; PAM type: YTN; PAM sequence: TTC
  source 1..20: mol_type = other DNA
ctttctgcccttctgtatat

SEQ ID NO: 70315 - DNA, 20 bp, synthetic construct
  misc_feature 1..20: note = Description of Artificial Sequence: Synthetic oligonucleotide
  misc_feature 1..20: note = Target: SCN10A; (+) strand; PAM type: YTN; PAM sequence: CTT
  source 1..20: mol_type = other DNA
tctgcccttctgtatatttt

SEQ ID NO: 70316 - DNA, 20 bp, synthetic construct
  misc_feature 1..20: note = Description of Artificial Sequence: Synthetic oligonucleotide
  misc_feature 1..20: note = Target: SCN10A; (+) strand; PAM type: YTN; PAM sequence: TTT
  source 1..20: mol_type = other DNA
ctgcccttctgtatatttta

SEQ ID NO: 70317 - DNA, 20 bp, synthetic construct
  misc_feature 1..20: note = Description of Artificial Sequence: Synthetic oligonucleotide
  misc_feature 1..20: note = Target: SCN10A; (+) strand; PAM type: YTN; PAM sequence: TTC
  source 1..20: mol_type = other DNA
tgcccttctgtatattttaa

SEQ ID NO: 70318 - DNA, 20 bp, synthetic construct
  misc_feature 1..20: note = Description of Artificial Sequence: Synthetic oligonucleotide
  misc_feature 1..20: note = Target: SCN10A; (+) strand; PAM type: YTN; PAM sequence: CTG
  source 1..20: mol_type = other DNA
cccttctgtatattttaagt

SEQ ID NO: 70319 - DNA, 20 bp, synthetic construct
  misc_feature 1..20: note = Description of Artificial Sequence: Synthetic oligonucleotide
  misc_feature 1..20: note = Target: SCN10A; (+) strand; PAM type: YTN; PAM sequence: CTT
  source 1..20: mol_type = other DNA
ctgtatattttaagtggatc

SEQ ID NO: 70320 - DNA, 20 bp, synthetic construct
  misc_feature 1..20: note = Description of Artificial Sequence: Synthetic oligonucleotide
  misc_feature 1..20: note = Target: SCN10A; (+) strand; PAM type: YTN; PAM sequence: TTC
  source 1..20: mol_type = other DNA
tgtatattttaagtggatca

SEQ ID NO: 70321 - DNA, 20 bp, synthetic construct
  misc_feature 1..20: note = Description of Artificial Sequence: Synthetic oligonucleotide
  misc_feature 1..20: note = Target: SCN10A; (+) strand; PAM type: YTN; PAM sequence: CTG
  source 1..20: mol_type = other DNA
tatattttaagtggatcatt

SEQ ID NO: 70322 - DNA, 20 bp, synthetic construct
  misc_feature 1..20: note = Description of Artificial Sequence: Synthetic oligonucleotide
  misc_feature 1..20: note = Target: SCN10A; (+) strand; PAM type: YTN; PAM sequence: TTT
  source 1..20: mol_type = other DNA
taagtggatcatttagggca

SEQ ID NO: 70323 - DNA, 20 bp, synthetic construct
  misc_feature 1..20: note = Description of Artificial Sequence: Synthetic oligonucleotide
  misc_feature 1..20: note = Target: SCN10A; (+) strand; PAM type: YTN; PAM sequence: TTT
  source 1..20: mol_type = other DNA
aagtggatcatttagggcat

SEQ ID NO: 70324 - DNA, 20 bp, synthetic construct
  misc_feature 1..20: note = Description of Artificial Sequence: Synthetic oligonucleotide
  misc_feature 1..20: note = Target: SCN10A; (+) strand; PAM type: YTN; PAM sequence: TTA
  source 1..20: mol_type = other DNA
agtggatcatttagggcatt

SEQ ID NO: 70325 - DNA, 20 bp, synthetic construct
  misc_feature 1..20: note = Description of Artificial Sequence: Synthetic oligonucleotide
  misc_feature 1..20: note = Target: SCN10A; (+) strand; PAM type: YTN; PAM sequence: TTT
  source 1..20: mol_type = other DNA
agggcatttacactcaacat

SEQ ID NO: 70326 - DNA, 20 bp, synthetic construct
  misc_feature 1..20: note = Description of Artificial Sequence: Synthetic oligonucleotide
  misc_feature 1..20: note = Target: SCN10A; (+) strand; PAM type: YTN; PAM sequence: TTA
  source 1..20: mol_type = other DNA
gggcatttacactcaacatc

SEQ ID NO: 70327 - DNA, 20 bp, synthetic construct
  misc_feature 1..20: note = Description of Artificial Sequence: Synthetic oligonucleotide
  misc_feature 1..20: note = Target: SCN10A; (+) strand; PAM type: YTN; PAM sequence: TTT
  source 1..20: mol_type = other DNA
acactcaacatcagtattga

SEQ ID NO: 70328 - DNA, 20 bp, synthetic construct
  misc_feature 1..20: note = Description of Artificial Sequence: Synthetic oligonucleotide
  misc_feature 1..20: note = Target: SCN10A; (+) strand; PAM type: YTN; PAM sequence: TTA
  source 1..20: mol_type = other DNA
cactcaacatcagtattgag

SEQ ID NO: 70329 - DNA, 20 bp, synthetic construct
  misc_feature 1..20: note = Description of Artificial Sequence: Synthetic oligonucleotide
  misc_feature 1..20: note = Target: SCN10A; (+) strand; PAM type: YTN; PAM sequence: CTC
  source 1..20: mol_type = other DNA
aacatcagtattgagatgtg

SEQ ID NO: 70330 - DNA, 20 bp, synthetic construct
  misc_feature 1..20: note = Description of Artificial Sequence: Synthetic oligonucleotide
  misc_feature 1..20: note = Target: SCN10A; (+) strand; PAM type: YTN; PAM sequence: TTG
  source 1..20: mol_type = other DNA
agatgtgaggtactcttcta

SEQ ID NO: 70331 - DNA, 20 bp, synthetic construct
  misc_feature 1..20: note = Description of Artificial Sequence: Synthetic oligonucleotide
  misc_feature 1..20: note = Target: SCN10A; (+) strand; PAM type: YTN; PAM sequence: CTC
  source 1..20: mol_type = other DNA
ttctattcattatgctagtt

SEQ ID NO: 70332 - DNA, 20 bp, synthetic construct
  misc_feature 1..20: note = Description of Artificial Sequence: Synthetic oligonucleotide
  misc_feature 1..20: note = Target: SCN10A; (+) strand; PAM type: YTN; PAM sequence: CTT
  source 1..20: mol_type = other DNA
ctattcattatgctagttat

SEQ ID NO: 70333 - DNA, 20 bp, synthetic construct
  misc_feature 1..20: note = Description of Artificial Sequence: Synthetic oligonucleotide
  misc_feature 1..20: note = Target: SCN10A; (+) strand; PAM type: YTN; PAM sequence: TTC
  source 1..20: mol_type = other DNA
tattcattatgctagttatt

SEQ ID NO: 70334 - DNA, 20 bp, synthetic construct
  misc_feature 1..20: note = Description of Artificial Sequence: Synthetic oligonucleotide
  misc_feature 1..20: note = Target: SCN10A; (+) strand; PAM type: YTN; PAM sequence: CTA
  source 1..20: mol_type = other DNA
ttcattatgctagttattgc

SEQ ID NO: 70335 - DNA, 20 bp, synthetic construct
  misc_feature 1..20: note = Description of Artificial Sequence: Synthetic oligonucleotide
  misc_feature 1..20: note = Target: SCN10A; (+) strand; PAM type: YTN; PAM sequence: TTC
  source 1..20: mol_type = other DNA
attatgctagttattgcctt

SEQ ID NO: 70336 - DNA, 20 bp, synthetic construct
  misc_feature 1..20: note = Description of Artificial Sequence: Synthetic oligonucleotide
  misc_feature 1..20: note = Target: SCN10A; (+) strand; PAM type: YTN; PAM sequence: TTA
  source 1..20: mol_type = other DNA
tgctagttattgccttaatt

SEQ ID NO: 70337 - DNA, 20 bp, synthetic construct
  misc_feature 1..20: note = Description of Artificial Sequence: Synthetic oligonucleotide
  misc_feature 1..20: note = Target: SCN10A; (+) strand; PAM type: YTN; PAM sequence: CTA
  source 1..20: mol_type = other DNA
gttattgccttaattccttt

SEQ ID NO: 70338 - DNA, 20 bp, synthetic construct
  misc_feature 1..20: note = Description of Artificial Sequence: Synthetic oligonucleotide
  misc_feature 1..20: note = Target: SCN10A; (+) strand; PAM type: YTN; PAM sequence: TTA
  source 1..20: mol_type = other DNA
ttgccttaattccttttttt

SEQ ID NO: 70339 - DNA, 20 bp, synthetic construct
  misc_feature 1..20: note = Description of Artificial Sequence: Synthetic oligonucleotide
  misc_feature 1..20: note = Target: SCN10A; (+) strand; PAM type: YTN; PAM sequence: TTG
  source 1..20: mol_type = other DNA
ccttaattcctttttttatt

SEQ ID NO: 70340 - DNA, 20 bp, synthetic construct
  misc_feature 1..20: note = Description of Artificial Sequence: Synthetic oligonucleotide
  misc_feature 1..20: note = Target: SCN10A; (+) strand; PAM type: YTN; PAM sequence: CTT
  source 1..20: mol_type = other DNA
aattcctttttttattgtgt

SEQ ID NO: 70341 - DNA, 20 bp, synthetic construct
  misc_feature 1..20: note = Description of Artificial Sequence: Synthetic oligonucleotide
  misc_feature 1..20: note = Target: SCN10A; (+) strand; PAM type: YTN; PAM sequence: TTA
  source 1..20: mol_type = other DNA
attcctttttttattgtgtt

SEQ ID NO: 70342 - DNA, 20 bp, synthetic construct
  misc_feature 1..20: note = Description of Artificial Sequence: Synthetic oligonucleotide
  misc_feature 1..20: note = Target: SCN10A; (+) strand; PAM type: YTN; PAM sequence: TTC
  source 1..20: mol_type = other DNA
ctttttttattgtgttattg

SEQ ID NO: 70343 - DNA, 20 bp, synthetic construct
  misc_feature 1..20: note = Description of Artificial Sequence: Synthetic oligonucleotide
  misc_feature 1..20: note = Target: SCN10A; (+) strand; PAM type: YTN; PAM sequence: CTT
  source 1..20: mol_type = other DNA
tttttattgtgttattgttt

SEQ ID NO: 70344 - DNA, 20 bp, synthetic construct
  misc_feature 1..20: note = Description of Artificial Sequence: Synthetic oligonucleotide
  misc_feature 1..20: note = Target: SCN10A; (+) strand; PAM type: YTN; PAM sequence: TTT
  source 1..20: mol_type = other DNA
ttttattgtgttattgtttt

SEQ ID NO: 70345 - DNA, 20 bp, synthetic construct
  misc_feature 1..20: note = Description of Artificial Sequence: Synthetic oligonucleotide
  misc_feature 1..20: note = Target: SCN10A; (+) strand; PAM type: YTN; PAM sequence: TTT
  source 1..20: mol_type = other DNA
tttattgtgttattgtttta

SEQ ID NO: 70346 - DNA, 20 bp, synthetic construct
  misc_feature 1..20: note = Description of Artificial Sequence: Synthetic oligonucleotide
  misc_feature 1..20: note = Target: SCN10A; (+) strand; PAM type: YTN; PAM sequence: TTT
  source 1..20: mol_type = other DNA
ttattgtgttattgttttat

SEQ ID NO: 70347 - DNA, 20 bp, synthetic construct
  misc_feature 1..20: note = Description of Artificial Sequence: Synthetic oligonucleotide
  misc_feature 1..20: note = Target: SCN10A; (+) strand; PAM type: YTN; PAM sequence: TTT
  source 1..20: mol_type = other DNA
tattgtgttattgttttata

SEQ ID NO: 70348 - DNA, 20 bp, synthetic construct
  misc_feature 1..20: note = Description of Artificial Sequence: Synthetic oligonucleotide
  misc_feature 1..20: note = Target: SCN10A; (+) strand; PAM type: YTN; PAM sequence: TTT
  source 1..20: mol_type = other DNA
attgtgttattgttttatag

SEQ ID NO: 70349 - DNA, 20 bp, synthetic construct
  misc_feature 1..20: note = Description of Artificial Sequence: Synthetic oligonucleotide
  misc_feature 1..20: note = Target: SCN10A; (+) strand; PAM type: YTN; PAM sequence: TTA
  source 1..20: mol_type = other DNA
ttgtgttattgttttatagg

SEQ ID NO: 70350 - DNA, 20 bp, synthetic construct
  misc_feature 1..20: note = Description of Artificial Sequence: Synthetic oligonucleotide
  misc_feature 1..20: note = Target: SCN10A; (+) strand; PAM type: YTN; PAM sequence: TTG
  source 1..20: mol_type = other DNA
tgttattgttttataggtcc

SEQ ID NO: 70351 - DNA, 20 bp, synthetic construct
  misc_feature 1..20: note = Description of Artificial Sequence: Synthetic oligonucleotide
  misc_feature 1..20: note = Target: SCN10A; (+) strand; PAM type: YTN; PAM sequence: TTA
  source 1..20: mol_type = other DNA
ttgttttataggtcctttga

SEQ ID NO: 70352 - DNA, 20 bp, synthetic construct
  misc_feature 1..20: note = Description of Artificial Sequence: Synthetic oligonucleotide
  misc_feature 1..20: note = Target: SCN10A; (+) strand; PAM type: YTN; PAM sequence: TTG
  source 1..20: mol_type = other DNA
ttttataggtcctttgatat

SEQ ID NO: 70353 - DNA, 20 bp, synthetic construct
  misc_feature 1..20: note = Description of Artificial Sequence: Synthetic oligonucleotide
  misc_feature 1..20: note = Target: SCN10A; (+) strand; PAM type: YTN; PAM sequence: TTT
  source 1..20: mol_type = other DNA
tataggtcctttgatattta

SEQ ID NO: 70354 - DNA, 20 bp, synthetic construct
  misc_feature 1..20: note = Description of Artificial Sequence: Synthetic oligonucleotide
  misc_feature 1..20: note = Target: SCN10A; (+) strand; PAM type: YTN; PAM sequence: TTT
  source 1..20: mol_type = other DNA
ataggtcctttgatatttat

SEQ ID NO: 70355 - DNA, 20 bp, synthetic construct
  misc_feature 1..20: note = Description of Artificial Sequence: Synthetic oligonucleotide
  misc_feature 1..20: note = Target: SCN10A; (+) strand; PAM type: YTN; PAM sequence: TTA
  source 1..20: mol_type = other DNA
taggtcctttgatatttatg

SEQ ID NO: 70356 - DNA, 20 bp, synthetic construct
  misc_feature 1..20: note = Description of Artificial Sequence: Synthetic oligonucleotide
  misc_feature 1..20: note = Target: SCN10A; (+) strand; PAM type: YTN; PAM sequence: CTT
  source 1..20: mol_type = other DNA
tgatatttatgctttaagga

SEQ ID NO: 70357 - DNA, 20 bp, synthetic construct
  misc_feature 1..20: note = Description of Artificial Sequence: Synthetic oligonucleotide
  misc_feature 1..20: note = Target: SCN10A; (+) strand; PAM type: YTN; PAM sequence: TTT
  source 1..20: mol_type = other DNA
gatatttatgctttaaggag

SEQ ID NO: 70358 - DNA, 20 bp, synthetic construct
  misc_feature 1..20: note = Description of Artificial Sequence: Synthetic oligonucleotide
  misc_feature 1..20: note = Target: SCN10A; (+) strand; PAM type: YTN; PAM sequence: TTG
  source 1..20: mol_type = other DNA
atatttatgctttaaggagg

SEQ ID NO: 70359 - DNA, 20 bp, synthetic construct
  misc_feature 1..20: note = Description of Artificial Sequence: Synthetic oligonucleotide
  misc_feature 1..20: note = Target: SCN10A; (+) strand; PAM type: YTN; PAM sequence: TTT
  source 1..20: mol_type = other DNA
atgctttaaggaggttctat

SEQ ID NO: 70360 - DNA, 20 bp, synthetic construct
  misc_feature 1..20: note = Description of Artificial Sequence: Synthetic oligonucleotide
  misc_feature 1..20: note = Target: SCN10A; (+) strand; PAM type: YTN; PAM sequence: TTA
  source 1..20: mol_type = other DNA
tgctttaaggaggttctatt

SEQ ID NO: 70361 - DNA, 20 bp, synthetic construct
  misc_feature 1..20: note = Description of Artificial Sequence: Synthetic oligonucleotide
  misc_feature 1..20: note = Target: SCN10A; (+) strand; PAM type: YTN; PAM sequence: CTT
  source 1..20: mol_type = other DNA
taaggaggttctattttggt

SEQ ID NO: 70362 - DNA, 20 bp, synthetic construct
  misc_feature 1..20: note = Description of Artificial Sequence: Synthetic oligonucleotide
  misc_feature 1..20: note = Target: SCN10A; (+) strand; PAM type: YTN; PAM sequence: TTT
  source 1..20: mol_type = other DNA
aaggaggttctattttggtg

SEQ ID NO: 70363 - DNA, 20 bp, synthetic construct
  misc_feature 1..20: note = Description of Artificial Sequence: Synthetic oligonucleotide
  misc_feature 1..20: note = Target: SCN10A; (+) strand; PAM type: YTN; PAM sequence: TTA
  source 1..20: mol_type = other DNA
aggaggttctattttggtgt

SEQ ID NO: 70364 - DNA, 20 bp, synthetic construct
  misc_feature 1..20: note = Description of Artificial Sequence: Synthetic oligonucleotide
  misc_feature 1..20: note = Target: SCN10A; (+) strand; PAM type: YTN; PAM sequence: TTC
  source 1..20: mol_type = other DNA
tattttggtgtattttaagg

SEQ ID NO: 70365 - DNA, 20 bp, synthetic construct
  misc_feature 1..20: note = Description of Artificial Sequence: Synthetic oligonucleotide
  misc_feature 1..20: note = Target: SCN10A; (+) strand; PAM type: YTN; PAM sequence: CTA
  source 1..20: mol_type = other DNA
ttttggtgtattttaaggtt

SEQ ID NO: 70366 - DNA, 20 bp, synthetic construct
  misc_feature 1..20: note = Description of Artificial Sequence: Synthetic oligonucleotide
  misc_feature 1..20: note = Target: SCN10A; (+) strand; PAM type: YTN; PAM sequence: TTT
  source 1..20: mol_type = other DNA
tggtgtattttaaggtttta

SEQ ID NO: 70367 - DNA, 20 bp, synthetic construct
  misc_feature 1..20: note = Description of Artificial Sequence: Synthetic oligonucleotide
  misc_feature 1..20: note = Target: SCN10A; (+) strand; PAM type: YTN; PAM sequence: TTT
  source 1..20: mol_type = other DNA
ggtgtattttaaggttttat

SEQ ID NO: 70368 - DNA, 20 bp, synthetic construct
  misc_feature 1..20: note = Description of Artificial Sequence: Synthetic oligonucleotide
  misc_feature 1..20: note = Target: SCN10A; (+) strand; PAM type: YTN; PAM sequence: TTG
  source 1..20: mol_type = other DNA
gtgtattttaaggttttatt

SEQ ID NO: 70369 - DNA, 20 bp, synthetic construct
  misc_feature 1..20: note = Description of Artificial Sequence: Synthetic oligonucleotide
  misc_feature 1..20: note = Target: SCN10A; (+) strand; PAM type: YTN; PAM sequence: TTT
  source 1..20: mol_type = other DNA
taaggttttatttcaagatt

SEQ ID NO: 70370 - DNA, 20 bp, synthetic construct
  misc_feature 1..20: note = Description of Artificial Sequence: Synthetic oligonucleotide
  misc_feature 1..20: note = Target: SCN10A; (+) strand; PAM type: YTN; PAM sequence: TTT
  source 1..20: mol_type = other DNA
aaggttttatttcaagattt

SEQ ID NO: 70371 - DNA, 20 bp, synthetic construct
  misc_feature 1..20: note = Description of Artificial Sequence: Synthetic oligonucleotide
  misc_feature 1..20: note = Target: SCN10A; (+) strand; PAM type: YTN; PAM sequence: TTA
  source 1..20: mol_type = other DNA
aggttttatttcaagattta

SEQ ID NO: 70372 - DNA, 20 bp, synthetic construct
  misc_feature 1..20: note = Description of Artificial Sequence: Synthetic oligonucleotide
  misc_feature 1..20: note = Target: SCN10A; (+) strand; PAM type: YTN; PAM sequence: TTT
  source 1..20: mol_type = other DNA
tatttcaagatttagaattc

SEQ ID NO: 70373 - DNA, 20 bp, synthetic construct
  misc_feature 1..20: note = Description of Artificial Sequence: Synthetic oligonucleotide
  misc_feature 1..20: note = Target: SCN10A; (+) strand; PAM type: YTN; PAM sequence: TTT
  source 1..20: mol_type = other DNA
atttcaagatttagaattcc

SEQ ID NO: 70374 - DNA, 20 bp, synthetic construct
  misc_feature 1..20: note = Description of Artificial Sequence: Synthetic oligonucleotide
  misc_feature 1..20: note = Target: SCN10A; (+) strand; PAM type: YTN; PAM sequence: TTA
  source 1..20: mol_type = other DNA
tttcaagatttagaattcct

SEQ ID NO: 70375 - DNA, 20 bp, synthetic construct
  misc_feature 1..20: note = Description of Artificial Sequence: Synthetic oligonucleotide
  misc_feature 1..20: note = Target: SCN10A; (+) strand; PAM type: YTN; PAM sequence: TTT
  source 1..20: mol_type = other DNA
caagatttagaattcctttt

SEQ ID NO: 70376 - DNA, 20 bp, synthetic construct
  misc_feature 1..20: note = Description of Artificial Sequence: Synthetic oligonucleotide
  misc_feature 1..20: note = Target: SCN10A; (+) strand; PAM type: YTN; PAM sequence: TTC
  source 1..20: mol_type = other DNA
aagatttagaattcctttta

SEQ ID NO: 70377 - DNA, 20 bp, synthetic construct
  misc_feature 1..20: note = Description of Artificial Sequence: Synthetic oligonucleotide
  misc_feature 1..20: note = Target: SCN10A; (+) strand; PAM type: YTN; PAM sequence: TTT
  source 1..20: mol_type = other DNA
agaattccttttagcatttc

SEQ ID NO: 70378 - DNA, 20 bp, synthetic construct
  misc_feature 1..20: note = Description of Artificial Sequence: Synthetic oligonucleotide
  misc_feature 1..20: note = Target: SCN10A; (+) strand; PAM type: YTN; PAM sequence: TTA
  source 1..20: mol_type = other DNA
gaattccttttagcatttct

SEQ ID NO: 70379 - DNA, 20 bp, synthetic construct
  misc_feature 1..20: note = Description of Artificial Sequence: Synthetic oligonucleotide
  misc_feature 1..20: note = Target: SCN10A; (+) strand; PAM type: YTN; PAM sequence: TTC
  source 1..20: mol_type = other DNA
cttttagcatttcttgtagt

SEQ ID NO: 70380 - DNA, 20 bp, synthetic construct
  misc_feature 1..20: note = Description of Artificial Sequence: Synthetic oligonucleotide
  misc_feature 1..20: note = Target: SCN10A; (+) strand; PAM type: YTN; PAM sequence: CTT
  source 1..20: mol_type = other DNA
ttagcatttcttgtagtgct

SEQ ID NO: 70381 - DNA, 20 bp, synthetic construct
  misc_feature 1..20: note = Description of Artificial Sequence: Synthetic oligonucleotide
  misc_feature 1..20: note = Target: SCN10A; (+) strand; PAM type: YTN; PAM sequence: TTT
  source 1..20: mol_type = other DNA
tagcatttcttgtagtgctg

SEQ ID NO: 70382 - DNA, 20 bp, synthetic construct
  misc_feature 1..20: note = Description of Artificial Sequence: Synthetic oligonucleotide
  misc_feature 1..20: note = Target: SCN10A; (+) strand; PAM type: YTN; PAM sequence: TTT
  source 1..20: mol_type = other DNA
agcatttcttgtagtgctgg

SEQ ID NO: 70383 - DNA, 20 bp, synthetic construct
  misc_feature 1..20: note = Description of Artificial Sequence: Synthetic oligonucleotide
  misc_feature 1..20: note = Target: SCN10A; (+) strand; PAM type: YTN; PAM sequence: TTA
  source 1..20: mol_type = other DNA
gcatttcttgtagtgctggc

SEQ ID NO: 70384 - DNA, 20 bp, synthetic construct
  misc_feature 1..20: note = Description of Artificial Sequence: Synthetic oligonucleotide
  misc_feature 1..20: note = Target: SCN10A; (+) strand; PAM type: YTN; PAM sequence: TTT
  source 1..20: mol_type = other DNA
cttgtagtgctggcttggta

SEQ ID NO: 70385 - DNA, 20 bp, synthetic construct
  misc_feature 1..20: note = Description of Artificial Sequence: Synthetic oligonucleotide
  misc_feature 1..20: note = Target: SCN10A; (+) strand; PAM type: YTN; PAM sequence: TTC
  source 1..20: mol_type = other DNA
ttgtagtgctggcttggtag

SEQ ID NO: 70386 - DNA, 20 bp, synthetic construct
  misc_feature 1..20: note = Description of Artificial Sequence: Synthetic oligonucleotide
  misc_feature 1..20: note = Target: SCN10A; (+) strand; PAM type: YTN; PAM sequence: CTT
  source 1..20: mol_type = other DNA
gtagtgctggcttggtagtg

SEQ ID NO: 70387 - DNA, 20 bp, synthetic construct
  misc_feature 1..20: note = Description of Artificial Sequence: Synthetic oligonucleotide
  misc_feature 1..20: note = Target: SCN10A; (+) strand; PAM type: YTN; PAM sequence: TTG
  source 1..20: mol_type = other DNA
tagtgctggcttggtagtgg

SEQ ID NO: 70388 - DNA, 20 bp, synthetic construct
  misc_feature 1..20: note = Description of Artificial Sequence: Synthetic oligonucleotide
  misc_feature 1..20: note = Target: SCN10A; (+) strand; PAM type: YTN; PAM sequence: CTG
  source 1..20: mol_type = other DNA
gcttggtagtggaaaattct

SEQ ID NO: 70389 - DNA, 20 bp, synthetic construct
  misc_feature 1..20: note = Description of Artificial Sequence: Synthetic oligonucleotide
  misc_feature 1..20: note = Target: SCN10A; (+) strand; PAM type: YTN; PAM sequence: CTT
  source 1..20: mol_type = other DNA
ggtagtggaaaattctctca

SEQ ID NO: 70390 - DNA, 20 bp, synthetic construct
  misc_feature 1..20: note = Description of Artificial Sequence: Synthetic oligonucleotide
  misc_feature 1..20: note = Target: SCN10A; (+) strand; PAM type: YTN; PAM sequence: TTG
  source 1..20: mol_type = other DNA
gtagtggaaaattctctcac

SEQ ID NO: 70391 - DNA, 20 bp, synthetic construct
  misc_feature 1..20: note = Description of Artificial Sequence: Synthetic oligonucleotide
  misc_feature 1..20: note = Target: SCN10A; (+) strand; PAM type: YTN; PAM sequence: TTC
  source 1..20: mol_type = other DNA
tctcaccatttgtttgtctg

SEQ ID NO: 70392 - DNA, 20 bp, synthetic construct
  misc_feature 1..20: note = Description of Artificial Sequence: Synthetic oligonucleotide
  misc_feature 1..20: note = Target: SCN10A; (+) strand; PAM type: YTN; PAM sequence: CTC
  source 1..20: mol_type = other DNA
tcaccatttgtttgtctgaa

SEQ ID NO: 70393 - DNA, 20 bp, synthetic construct
  misc_feature 1..20: note = Description of Artificial Sequence: Synthetic oligonucleotide
  misc_feature 1..20: note = Target: SCN10A; (+) strand; PAM type: YTN; PAM sequence: CTC
  source 1..20: mol_type = other DNA
accatttgtttgtctgaaaa

SEQ ID NO: 70394 - DNA, 20 bp, synthetic construct
  misc_feature 1..20: note = Description of Artificial Sequence: Synthetic oligonucleotide
  misc_feature 1..20: note = Target: SCN10A; (+) strand; PAM type: YTN; PAM sequence: TTT
  source 1..20: mol_type = other DNA
gtttgtctgaaaaaaacttt

SEQ ID NO: 70395 - DNA, 20 bp, synthetic construct
  misc_feature 1..20: note = Description of Artificial Sequence: Synthetic oligonucleotide
  misc_feature 1..20: note = Target: SCN10A; (+) strand; PAM type: YTN; PAM sequence: TTG
  source 1..20: mol_type = other DNA
tttgtctgaaaaaaacttta

SEQ ID NO: 70396 - DNA, 20 bp, synthetic construct
  misc_feature 1..20: note = Description of Artificial Sequence: Synthetic oligonucleotide
  misc_feature 1..20: note = Target: SCN10A; (+) strand; PAM type: YTN; PAM sequence: TTT
  source 1..20: mol_type = other DNA
gtctgaaaaaaactttatct

SEQ ID NO: 70397 - DNA, 20 bp, synthetic construct
  misc_feature 1..20: note = Description of Artificial Sequence: Synthetic oligonucleotide
  misc_feature 1..20: note = Target: SCN10A; (+) strand; PAM type: YTN; PAM sequence: TTG
  source 1..20: mol_type = other DNA
tctgaaaaaaactttatctt

SEQ ID NO: 70398 - DNA, 20 bp, synthetic construct
  misc_feature 1..20: note = Description of Artificial Sequence: Synthetic oligonucleotide
  misc_feature 1..20: note = Target: SCN10A; (+) strand; PAM type: YTN; PAM sequence: CTG
  source 1..20: mol_type = other DNA
aaaaaaactttatcttgtct

SEQ ID NO: 70399 - DNA, 20 bp, synthetic construct
  misc_feature 1..20: note = Description of Artificial Sequence: Synthetic oligonucleotide
  misc_feature 1..20: note = Target: SCN10A; (+) strand; PAM type: YTN; PAM sequence: CTT
  source 1..20: mol_type = other DNA
tatcttgtcttcacttatga

SEQ ID NO: 70400 - DNA, 20 bp, synthetic construct
  misc_feature 1..20: note = Description of Artificial Sequence: Synthetic oligonucleotide
  misc_feature 1..20: note = Target: SCN10A; (+) strand; PAM type: YTN; PAM sequence: TTT
  source 1..20: mol_type = other DNA
atcttgtcttcacttatgaa

SEQ ID NO: 70401 - DNA, 20 bp, synthetic construct
  misc_feature 1..20: note = Description of Artificial Sequence: Synthetic oligonucleotide
  misc_feature 1..20: note = Target: SCN10A; (+) strand; PAM type: YTN; PAM sequence: TTA
  source 1..20: mol_type = other DNA
tcttgtcttcacttatgaag

SEQ ID NO: 70402 - DNA, 20 bp, synthetic construct
  misc_feature 1..20: note = Description of Artificial Sequence: Synthetic oligonucleotide
  misc_feature 1..20: note = Target: SCN10A; (+) strand; PAM type: YTN; PAM sequence: CTT
  source 1..20: mol_type = other DNA
gtcttcacttatgaagctta

SEQ ID NO: 70403 - DNA, 20 bp, synthetic construct
  misc_feature 1..20: note = Description of Artificial Sequence: Synthetic oligonucleotide
  misc_feature 1..20: note = Target: SCN10A; (+) strand; PAM type: YTN; PAM sequence: TTG
  source 1..20: mol_type = other DNA
tcttcacttatgaagcttag

SEQ ID NO: 70404 - DNA, 20 bp, synthetic construct
  misc_feature 1..20: note = Description of Artificial Sequence: Synthetic oligonucleotide
  misc_feature 1..20: note = Target: SCN10A; (+) strand; PAM type: YTN; PAM sequence: CTT
  source 1..20: mol_type = other DNA
cacttatgaagcttagtttc

SEQ ID NO: 70405 - DNA, 20 bp, synthetic construct
  misc_feature 1..20: note = Description of Artificial Sequence: Synthetic oligonucleotide
  misc_feature 1..20: note = Target: SCN10A; (+) strand; PAM type: YTN; PAM sequence: TTC
  source 1..20: mol_type = other DNA
acttatgaagcttagtttct

SEQ ID NO: 70406 - DNA, 20 bp, synthetic construct
  misc_feature 1..20: note = Description of Artificial Sequence: Synthetic oligonucleotide
  misc_feature 1..20: note = Target: SCN10A; (+) strand; PAM type: YTN; PAM sequence: CTT
  source 1..20: mol_type = other DNA
atgaagcttagtttctcttc

SEQ ID NO: 70407 - DNA, 20 bp, synthetic construct
  misc_feature 1..20: note = Description of Artificial Sequence: Synthetic oligonucleotide
  misc_feature 1..20: note = Target: SCN10A; (+) strand; PAM type: YTN; PAM sequence: TTA
  source 1..20: mol_type = other DNA
tgaagcttagtttctcttca

SEQ ID NO: 70408 - DNA, 20 bp, synthetic construct
  misc_feature 1..20: note = Description of Artificial Sequence: Synthetic oligonucleotide
  misc_feature 1..20: note = Target: SCN10A; (+) strand; PAM type: YTN; PAM sequence: CTT
  source 1..20: mol_type = other DNA
agtttctcttcatacaatat

SEQ ID NO: 70409 - DNA, 20 bp, synthetic construct
  misc_feature 1..20: note = Description of Artificial Sequence: Synthetic oligonucleotide
  misc_feature 1..20: note = Target: SCN10A; (+) strand; PAM type: YTN; PAM sequence: TTA
  source 1..20: mol_type = other DNA
gtttctcttcatacaatatt

SEQ ID NO: 70410 - DNA, 20 bp, synthetic construct
  misc_feature 1..20: note = Description of Artificial Sequence: Synthetic oligonucleotide
  misc_feature 1..20: note = Target: SCN10A; (+) strand; PAM type: YTN; PAM sequence: TTT
  source 1..20: mol_type = other DNA
ctcttcatacaatattcttg

SEQ ID NO: 70411 - DNA, 20 bp, synthetic construct
  misc_feature 1..20: note = Description of Artificial Sequence: Synthetic oligonucleotide
  misc_feature 1..20: note = Target: SCN10A; (+) strand; PAM type: YTN; PAM sequence: TTC
  source 1..20: mol_type = other DNA
tcttcatacaatattcttgg

SEQ ID NO: 70412 - DNA, 20 bp, synthetic construct
  misc_feature 1..20: note = Description of Artificial Sequence: Synthetic oligonucleotide
  misc_feature 1..20: note = Target: SCN10A; (+) strand; PAM type: YTN; PAM sequence: CTC
  source 1..20: mol_type = other DNA
ttcatacaatattcttggct

SEQ ID NO: 70413 - DNA, 20 bp, synthetic construct
  misc_feature 1..20: note = Description of Artificial Sequence: Synthetic oligonucleotide
  misc_feature 1..20: note = Target: SCN10A; (+) strand; PAM type: YTN; PAM sequence: CTT
  source 1..20: mol_type = other DNA
catacaatattcttggctgg

SEQ ID NO: 70414 - DNA, 20 bp, synthetic construct
  misc_feature 1..20: note = Description of Artificial Sequence: Synthetic oligonucleotide
  misc_feature 1..20: note = Target: SCN10A; (+) strand; PAM type: YTN; PAM sequence: TTC
  source 1..20: mol_type = other DNA
atacaatattcttggctggc

SEQ ID NO: 70415 - DNA, 20 bp, synthetic construct
  misc_feature 1..20: note = Description of Artificial Sequence: Synthetic oligonucleotide
  misc_feature 1..20: note = Target: SCN10A; (+) strand; PAM type: YTN; PAM sequence: TTC
  source 1..20: mol_type = other DNA
ttggctggcaattattttgt

SEQ ID NO: 70416 - DNA, 20 bp, synthetic construct
  misc_feature 1..20: note = Description of Artificial Sequence: Synthetic oligonucleotide
  misc_feature 1..20: note = Target: SCN10A; (+) strand; PAM type: YTN; PAM sequence: CTT
  source 1..20: mol_type = other DNA
ggctggcaattattttgttt

SEQ ID NO: 70417 - DNA, 20 bp, synthetic construct
  misc_feature 1..20: note = Description of Artificial Sequence: Synthetic oligonucleotide
  misc_feature 1..20: note = Target: SCN10A; (+) strand; PAM type: YTN; PAM sequence: TTG
  source 1..20: mol_type = other DNA
gctggcaattattttgtttc

SEQ ID NO: 70418 - DNA, 20 bp, synthetic construct
  misc_feature 1..20: note = Description of Artificial Sequence: Synthetic oligonucleotide
  misc_feature 1..20: note = Target: SCN10A; (+) strand; PAM type: YTN; PAM sequence: CTG
  source 1..20: mol_type = other DNA
gcaattattttgtttcagga

SEQ ID NO: 70419 - DNA, 20 bp, synthetic construct
  misc_feature 1..20: note = Description of Artificial Sequence: Synthetic oligonucleotide
  misc_feature 1..20: note = Target: SCN10A; (+) strand; PAM type: YTN; PAM sequence: TTA
  source 1..20: mol_type = other DNA
ttttgtttcaggaggctaaa

SEQ ID NO: 70420 - DNA, 20 bp, synthetic construct
  misc_feature 1..20: note = Description of Artificial Sequence: Synthetic oligonucleotide
  misc_feature 1..20: note = Target: SCN10A; (+) strand; PAM type: YTN; PAM sequence: TTT
  source 1..20: mol_type = other DNA
tgtttcaggaggctaaagat

SEQ ID NO: 70421 - DNA, 20 bp, synthetic construct
  misc_feature 1..20: note = Description of Artificial Sequence: Synthetic oligonucleotide
  misc_feature 1..20: note = Target: SCN10A; (+) strand; PAM type: YTN; PAM sequence: TTT
  source 1..20: mol_type = other DNA
gtttcaggaggctaaagatg

SEQ ID NO: 70422 - DNA, 20 bp, synthetic construct
  misc_feature 1..20: note = Description of Artificial Sequence: Synthetic oligonucleotide
  misc_feature 1..20: note = Target: SCN10A; (+) strand; PAM type: YTN; PAM sequence: TTG
  source 1..20: mol_type = other DNA
tttcaggaggctaaagatgg

SEQ ID NO: 70423 - DNA, 20 bp, synthetic construct
  misc_feature 1..20: note = Description of Artificial Sequence: Synthetic oligonucleotide
  misc_feature 1..20: note = Target: SCN10A; (+) strand; PAM type: YTN; PAM sequence: TTT
  source 1..20: mol_type = other DNA
caggaggctaaagatgggac

SEQ ID NO: 70424 - DNA, 20 bp, synthetic construct
  misc_feature 1..20: note = Description of Artificial Sequence: Synthetic oligonucleotide
  misc_feature 1..20: note = Target: SCN10A; (+) strand; PAM type: YTN; PAM sequence: TTC
  source 1..20: mol_type = other DNA
aggaggctaaagatgggacc

SEQ ID NO: 70425 - DNA, 20 bp, synthetic construct
  misc_feature 1..20: note = Description of Artificial Sequence: Synthetic oligonucleotide
  misc_feature 1..20: note = Target: SCN10A; (+) strand; PAM type: YTN; PAM sequence: CTA
  source 1..20: mol_type = other DNA
aagatgggaccctaatccct

SEQ ID NO: 70426 - DNA, 20 bp, synthetic construct
  misc_feature 1..20: note = Description of Artificial Sequence: Synthetic oligonucleotide
  misc_feature 1..20: note = Target: SCN10A; (+) strand; PAM type: YTN; PAM sequence: CTA
  source 1..20: mol_type = other DNA
atcccttctggcttgcaagg

SEQ ID NO: 70427 - DNA, 20 bp, synthetic construct
  misc_feature 1..20: note = Description of Artificial Sequence: Synthetic oligonucleotide
  misc_feature 1..20: note = Target: SCN10A; (+) strand; PAM type: YTN; PAM sequence: CTT
  source 1..20: mol_type = other DNA
ctggcttgcaaggtttcagt

SEQ ID NO: 70428 - DNA, 20 bp, synthetic construct
  misc_feature 1..20: note = Description of Artificial Sequence: Synthetic oligonucleotide
  misc_feature 1..20: note = Target: SCN10A; (+) strand; PAM type: YTN; PAM sequence: TTC
  source 1..20: mol_type = other DNA
tggcttgcaaggtttcagtt

SEQ ID NO: 70429 - DNA, 20 bp, synthetic construct
  misc_feature 1..20: note = Description of Artificial Sequence: Synthetic oligonucleotide
  misc_feature 1..20: note = Target: SCN10A; (+) strand; PAM type: YTN; PAM sequence: CTG
  source 1..20: mol_type = other DNA
gcttgcaaggtttcagttga

SEQ ID NO: 70430 - DNA, 20 bp, synthetic construct
  misc_feature 1..20: note = Description of Artificial Sequence: Synthetic oligonucleotide
  misc_feature 1..20: note = Target: SCN10A; (+) strand; PAM type: YTN; PAM sequence: CTT
  source 1..20: mol_type = other DNA
gcaaggtttcagttgagaaa

SEQ ID NO: 70431 - DNA, 20 bp, synthetic construct
  misc_feature 1..20: note = Description of Artificial Sequence: Synthetic oligonucleotide
  misc_feature 1..20: note = Target: SCN10A; (+) strand; PAM type: YTN; PAM sequence: TTG
  source 1..20: mol_type = other DNA
caaggtttcagttgagaaat

SEQ ID NO: 70432 - DNA, 20 bp, synthetic construct
  misc_feature 1..20: note = Description of Artificial Sequence: Synthetic oligonucleotide
  misc_feature 1..20: note = Target: SCN10A; (+) strand; PAM type: YTN; PAM sequence: TTT
  source 1..20: mol_type = other DNA
cagttgagaaatctgctgtt

SEQ ID NO: 70433 - DNA, 20 bp, synthetic construct
  misc_feature 1..20: note = Description of Artificial Sequence: Synthetic oligonucleotide
  misc_feature 1..20: note = Target: SCN10A; (+) strand; PAM type: YTN; PAM sequence: TTC
  source 1..20: mol_type = other DNA
agttgagaaatctgctgtta

SEQ ID NO: 70434 - DNA, 20 bp, synthetic construct
  misc_feature 1..20: note = Description of Artificial Sequence: Synthetic oligonucleotide
  misc_feature 1..20: note = Target: SCN10A; (+) strand; PAM type: YTN; PAM sequence: TTG
  source 1..20: mol_type = other DNA
agaaatctgctgttaatctt

SEQ ID NO: 70435 - DNA, 20 bp, synthetic construct
  misc_feature 1..20: note = Description of Artificial Sequence: Synthetic oligonucleotide
  misc_feature 1..20: note = Target: SCN10A; (+) strand; PAM type: YTN; PAM sequence: CTG
  source 1..20: mol_type = other DNA
ctgttaatcttatgtaaatc

SEQ ID NO: 70436 - DNA, 20 bp, synthetic construct
  misc_feature 1..20: note = Description of Artificial Sequence: Synthetic oligonucleotide
  misc_feature 1..20: note = Target: SCN10A; (+) strand; PAM type: YTN; PAM sequence: CTG
  source 1..20: mol_type = other DNA
ttaatcttatgtaaatcaga

SEQ ID NO: 70437 - DNA, 20 bp, synthetic construct
  misc_feature 1..20: note = Description of Artificial Sequence: Synthetic oligonucleotide
  misc_feature 1..20: note = Target: SCN10A; (+) strand; PAM type: YTN; PAM sequence: TTA
  source 1..20: mol_type = other DNA
atcttatgtaaatcagataa

SEQ ID NO: 70438 - DNA, 20 bp, synthetic construct
  misc_feature 1..20: note = Description of Artificial Sequence: Synthetic oligonucleotide
  misc_feature 1..20: note = Target: SCN10A; (+) strand; PAM type: YTN; PAM sequence: CTT
  source 1..20: mol_type = other DNA
atgtaaatcagataaccttt

SEQ ID NO: 70439 - DNA, 20 bp, synthetic construct
  misc_feature 1..20: note = Description of Artificial Sequence: Synthetic oligonucleotide
  misc_feature 1..20: note = Target: SCN10A; (+) strand; PAM type: YTN; PAM sequence: TTA
  source 1..20: mol_type = other DNA
tgtaaatcagataacctttc

SEQ ID NO: 70440 - DNA, 20 bp, synthetic construct
  misc_feature 1..20: note = Description of Artificial Sequence: Synthetic oligonucleotide
  misc_feature 1..20: note = Target: SCN10A; (+) strand; PAM type: YTN; PAM sequence: CTT
  source 1..20: mol_type = other DNA
tcctttataggttatctgag

SEQ ID NO: 70441 - DNA, 20 bp, synthetic construct
  misc_feature 1..20: note = Description of Artificial Sequence: Synthetic oligonucleotide
  misc_feature 1..20: note = Target: SCN10A; (+) strand; PAM type: YTN; PAM sequence: TTT
  source 1..20: mol_type = other DNA
cctttataggttatctgagg

SEQ ID NO: 70442 - DNA, 20 bp, synthetic construct
  misc_feature 1..20: note = Description of Artificial Sequence: Synthetic oligonucleotide
  misc_feature 1..20: note = Target: SCN10A; (+) strand; PAM type: YTN; PAM sequence: TTC
  source 1..20: mol_type = other DNA
ctttataggttatctgaggc

SEQ ID NO: 70443 - DNA, 20 bp, synthetic construct
  misc_feature 1..20: note = Description of Artificial Sequence: Synthetic oligonucleotide
  misc_feature 1..20: note = Target: SCN10A; (+) strand; PAM type: YTN; PAM sequence: CTT
  source 1..20: mol_type = other DNA
tataggttatctgaggcttt

SEQ ID NO: 70444 - DNA, 20 bp, synthetic construct
  misc_feature 1..20: note = Description of Artificial Sequence: Synthetic oligonucleotide
  misc_feature 1..20: note = Target: SCN10A; (+) strand; PAM type: YTN; PAM sequence: TTT
  source 1..20: mol_type = other DNA
ataggttatctgaggctttt

SEQ ID NO: 70445 - DNA, 20 bp, synthetic construct
  misc_feature 1..20: note = Description of Artificial Sequence: Synthetic oligonucleotide
  misc_feature 1..20: note = Target: SCN10A; (+) strand; PAM type: YTN; PAM sequence: TTA
  source 1..20: mol_type = other DNA
taggttatctgaggcttttg

SEQ ID NO: 70446 - DNA, 20 bp, synthetic construct
  misc_feature 1..20: note = Description of Artificial Sequence: Synthetic oligonucleotide
  misc_feature 1..20: note = Target: SCN10A; (+) strand; PAM type: YTN; PAM sequence: TTA
  source 1..20: mol_type = other DNA
tctgaggcttttgtctcaca

SEQ ID NO: 70447 - DNA, 20 bp, synthetic construct
  misc_feature 1..20: note = Description of Artificial Sequence: Synthetic oligonucleotide
  misc_feature 1..20: note = Target: SCN10A; (+) strand; PAM type: YTN; PAM sequence: CTG
  source 1..20: mol_type = other DNA
aggcttttgtctcacagctc

SEQ ID NO: 70448 - DNA, 20 bp, synthetic construct
  misc_feature 1..20: note = Description of Artificial Sequence: Synthetic oligonucleotide
  misc_feature 1..20: note = Target: SCN10A; (+) strand; PAM type: YTN; PAM sequence: CTT
  source 1..20: mol_type = other DNA
ttgtctcacagctcttaaga

SEQ ID NO: 70449 - DNA, 20 bp, synthetic construct
  misc_feature 1..20: note = Description of Artificial Sequence: Synthetic oligonucleotide
  misc_feature 1..20: note = Target: SCN10A; (+) strand; PAM type: YTN; PAM sequence: TTT
  source 1..20: mol_type = other DNA
tgtctcacagctcttaagat

SEQ ID NO: 70450 - DNA, 20 bp, synthetic construct
  misc_feature 1..20: note = Description of Artificial Sequence: Synthetic oligonucleotide
  misc_feature 1..20: note = Target: SCN10A; (+) strand; PAM type: YTN; PAM sequence: TTT
  source 1..20: mol_type = other DNA
gtctcacagctcttaagatt

SEQ ID NO: 70451 - DNA, 20 bp, synthetic construct
  misc_feature 1..20: note = Description of Artificial Sequence: Synthetic oligonucleotide
  misc_feature 1..20: note = Target: SCN10A; (+) strand; PAM type: YTN; PAM sequence: TTG
  source 1..20: mol_type = other DNA
tctcacagctcttaagattc

SEQ ID NO: 70452 - DNA, 20 bp, synthetic construct
  misc_feature 1..20: note = Description of Artificial Sequence: Synthetic oligonucleotide
  misc_feature 1..20: note = Target: SCN10A; (+) strand; PAM type: YTN; PAM sequence: CTC
  source 1..20: mol_type = other DNA
acagctcttaagattctttt
